United States Patent Application Publication US 2015/0240253 A1 - sequence listing, part 9

SEQ ID NO: 40459 - DNA, 382 bp, Zea Mays
gaggaaaatccagccaccgttctccaatcttctccgaagataagcgaccaattgagaaagatatcaaattcactgaagcttcttaattctatggcacctagtatagtaaaacagaaaacagatatagttcgtccacaatcctttgacttagttgaagcagaaccaaaaactcctgaggtcaacttaaaactttggcatgctcaagatgcacaagaatcacttaaggctcgtagcacagggattaaggtaactattttgaactcattacatacactttttattgtatcattagctttggtaataaattgtttactctttttctctacaaatgcagaaatctctagctaaggagtgtttgttgtttctaaacagcgctaataag

SEQ ID NO: 40460 - DNA, 569 bp, Zea Mays
cagttgcagcccagatgcggataatgcaacagatggctgatactatggcagatatgcacgggcagatacgataggagcgtcaggagatgcgccaagagagagaagagatgcgccaagagcgaagggtgcaacagcagcaagcaccactgccaccacctctaccaccacttccaccccggtacaagcaccgagaattcatgagccataagtcgcctaccttcgccagctctccagatcctctgcacgccgatgactggttgaagtcagtggagaagatgttgaatattgcacaatgttctgaccggaagaaggtttttatgctttgactggccctgctactgattggtgggattcctacactgctgcccacgatgctgctgatactatcacatgggcggaatttgctactcagttcagaaactatcatattactgttggactgatgaagatcaagaagaaggaatttctatcgctgaagcaggggagcatgtcagtcaacgagtaccacgacagattcattcagctctctagatatgcatcggatgaagtggctgaagatgagagaaagc

SEQ ID NO: 40461 - DNA, 765 bp, Zea Mays
aatacatggttatgacccgatttaccacttcggattgaccgtcgggctgtgggtggaatgttgagctcatgtttagtttgacaccagccaacttgaacaactcggtccagaaaaggctggtaaagattgtgtcgcggtcgctgacgattgagtagtggagcctatgtaagcagatgatgtcatcaaagaaggccttggccacggacgctgccgtgtaggggtgccgaatagcgatgaagtgtgcatacctcgagaatttgtccaccacagtaaggaccactgtcttgccaccagcacgtggaaatccttccacaaaatccatggaaatgtcgctccaaacctccaaaaggatggttaggggctgcgggagaccgctaggatgtagatgatccatcttgttcttttggcaagtggtacacccgcgcacataatcggcggacctactgcaatgcgcctgggttgtggaaggaggcgcgccagcgattgaccgtcttctggatgccgtcatggctgcagtcgtggacgtacgccagcaggtgtggccaaagggccaaagcatctggcacatagacgcgaccgccgaaggtgatgaggtcgtccaccttagtccagccttctggagcagagccatcggttatctgtcggtgtaaagtcgcagcctgcgggtcggtgaggcgctcggtgcgcaacacctcgaagagcttgaaggagggcgtggagatggtgtggagggagtagagatggcaatgggtaaatacccaccgg

SEQ ID NO: 40462 - DNA, 451 bp, Zea Mays
cagaggtagactgcgggttgttttgtataaactgtgggggttcttttgtaaaacggtttcagcgaaggggtacgggtgaatggtggccgtgggatcacaaatcaagggtgcggattagaagcccaggctccgaaccggtgtccaacgtcagtggtcggatcccgatctaacggtcttcccttaaagcaccgatgcgagagccccagccgatggatccaagatcaacgaatctggaccaatccatcgaagggggtatccttgatataatccaggccgtccgtcatcgatccgacagccacaaccacctttctaatctagaccgttaccccgcagatcaacagcaccagtacatctcctaccttacgcctgtagccgagctccccacggtggtgttgtagttcaccgacgcacagagatccagccacccggcgcgcccaacccataaccgaat

SEQ ID NO: 40463 - DNA, 577 bp, Zea Mays
gtgcgtggatcaattgggcgaaatcgaagctctgcgcgccggtaatcgctcgccagtgggagaactccgtcgtgtgccgccgctgctgcggaccggaagtttcgcgccaccaattcgggtatggtcccctcccacacgttcgcccccgtctctgctgtgatttgcaacaaaccttagacgatttagtgtgatgggtcaccgtaggttgctcaccggaatcctaatcctgctcgggtccgcccaattgcgcggtcggctcctacctgtgccccgcagctaaccatagtacctcggttgacttcaccatggtcccctccctctgtaggcctaagaccagcgtgtttggagcgtgattccacttagtgaccggattccggccatgccgccgccgtgaccggcgccgccgcgcttggcttggattgggggtagccacgtcgaccgtccgatctaccctatgcggtcaagattaatgcggtgacgtttcgaccagggtggagaacgctcaccgttcgattccctatcggacgctcaggattagatcacgtatatattaaatctcgggcgtagatctcggatt

SEQ ID NO: 40464 - DNA, 607 bp, Zea Mays
ggccatggccgaatccgatcgggcggtgcaggagaggtggaatcggatgttcgagtcgatggaagcactaacggaagaggtgaaggacatgaggaaggtatcagactgatgaattgtacctgaagctggaggagacgggtcgagagatggctcaattacggctggatcagatgggaagagagctggagaattcatcaggggaagtggagaatcgaggaaggaggaatcaccagcagaacatgggttttgagcgaggatttcagagaagagaccattccgagccgagggtggatcgacatcgagaggagaggccgatcgggcacgcgaacacgcaggtactgcctaagatgtctttccctagattttctggtgatgatcctgctgtttggatagataagtgcctggaatattttcacatgtatcaagttccatcgtctctgtgggtttcggctgcttctattcacatggaacagaatgcagcgagatggtggcaggtgcagaaattgaaacaaggagcgagggtgtggacggagtttgtgacagcagtagagggcaagtttggggcagatgcgtatgccaaggctctgagaaaattgagaaatctgaa

SEQ ID NO: 40465 - DNA, 545 bp, Zea Mays
ccaagatagagaatggtccaatgtatctcgggctgagcttcctagagacaccgaaccacacaactcctttagtaggtgataccctgagaaggacttggtcacccacagcaaattccagatcccgcctcctcacatcagcataactcttctgacggctctgagctgccaaaatattctgacgtatttcctgaacctttttagaggtctgctgaacccaatcaggaccaaccagagatctctctcccaaagtctcccagcacagaggggagatacaccgcctgccatacaaagcctcaaatggtgccatcttgatgctagcctggtagatgttgttataagcaaactctgccagtgcaagatgatcctcccagctacccttccatgacagaacacaagcacgcaacatgtcttccaagatttggattgttcgctctgactgaccatcagtttgagggtgaaaagcgacactaagcgaaagcttggtgcccaatgcactatgaagactctcccagaatttggatacaaatttggagtctcgatcagaa

SEQ ID NO: 40466 - DNA, 283 bp, Zea Mays
gatcgtcgtggcttcttatcccgcaattgccacgaatcactgcaccagtaacctctcctcctctccggccgccgcgcgtctccttcaaattcattggccaccgctcaggagacctataaattgagcacgcaatgagcttcgtagggtaattacccatccaaagcatcagcacttgcctccaattactcaccagagaccacgaattgctcatctcccccaaatcgggtttccgccaccgtgaaaaggtcctcgccgtggctagctcgattcaggtccaatcttg

SEQ ID NO: 40467 - DNA, 285 bp, Zea Mays
ccgtgctccggcgacccagtgctccatctcctgccctcgctcggtgagcagcccctttctccctctgtcttttctccctctctgttccattgagcagtgcacccctttttccacccttttgtgccaaattcaaattcttgtcaattctagtgaatccaagtggtgcaatgtgttcctatatgctccattgaatctcctgctggttctcagctccttagggagggtttcacagccttaaatagctgtttcaccgaaaccctaaatcctcgcacaccacatgctcgg

SEQ ID NO: 40468 - DNA, 580 bp, Zea Mays
gtcgactgggctggcttgatttgggcaacggtgaagagggaggtagtagctggcacgacacggcgatacgcaccgtacctcctccatctgatggtgcgccaaaggccggagcgtttcgttgagggtaatgggagcttggcgcttgagaaggggttgaaaggtcaggtattgcagcaatgccagttggaggacgaagaagaaacctctttggttttttggggcacccaaaactttggtgacttagaggaaatgccaatttttggcagccaaaacataagttttttccctcaaccgcaggaggtggggggcaattgcagttaccaaactatttcacgtttccaagccctcatgcaacggatccaaggttatgtgtctgacatggagagtaaatacctggataaggaaaagacttgcagggacactcaacatgaggtggagtgcattaagaatatggtgatggaaaaggatcaacaaattgaagctactgtcaatgctatacgacaggaacttttagaaaggagtgttgtaatgcgaacattggaagcagacaaggatcaattgagccgcagtgttcaacaat

SEQ ID NO: 40469 - DNA, 690 bp, Zea Mays
gacggattgggggcaaatcaatccagtggaggccggaattcgtcatcgcgattcgcgcccattgatccgtcgtgggaagtctagcgccaattcgacctccgcgttcggtgagctctcgattctttaccctcgccgtattcccttacctagctaatgtcgcgccatagttaattgtgggcgaattgggcacgaatttggcctttgtgcggggaatgtcgttcgggcgccgcccatatcgtggtcgggggtgttcggctgcgtggcggtcggcgaaatcattcccctgtgttctccttgagttccgtttatggcaagactagtttgatttgggtttggggccgcgaacctcgtcggccatatggcgcggccgtgggcattccctgccagagggtgctcggctcaccgggagagcgaaagaaaggagaaagcaccagagccgttgatctcaggatgaacggcccagggtcagataggatttggaccgtgggatggttgttgtgcggcttagatcaaacggtagtatacctccttcgtgcattagatcgtgaccatcgatttcgtgatcaacgatcctcggcgcgtaccggttcattaaagactagattcaatccaggccagtgaatcctgatcgtgcggcccacagtgcacgataccccttcggtcgtccaaatttacaaaataaaccccggg

SEQ ID NO: 40470 - DNA, 765 bp, Zea Mays
gaaaaagcttaagcgtgattaatcgtgcttaagcatttttgttaaaaagagaaaaaaatacatgatattgggccaccctgcagcaacccttaacccccacctcctctcttcatgagtctgcagcccactaggcccacctgccaggaggctcaacgcaaaacccctcttccgtgatgacctagtactctgctacctccttccacgccccgcgccgccgccctgtgctctccgcctccctctcccgaagcctatcctcctccgtgccggacgctctccggctccctctcccgaagcctctcctccctcgtgcgatcttcacctctaccgcgaagccgctccgcctctctctcactaatctactgcctgcaaccatcgtaggtccgtccgctctctctctctctcgtcgatccgtcgatttgcttcctgctggattgaccccggaggtgttcctcctcttcctctccctcctcttctcccttaaacatgccggatgggcacaattaagcagggccagtgcttaattgcccgcttagtaggtaagcgatgcgttgaccctctgctcagcgcttaaccgcgcctaatcgcacgcctaatcgcgctttcttgaaccttgtctactagtactagaaacataagttctctactaaaacatggatgtgactgcatataacacaatgtaaggaaccaaacacaactgtatcagtgcacaatgattacataaatcaatttacaatatctctgataacaacgaatgaataattaaac

SEQ ID NO: 40471 - DNA, 467 bp, Zea Mays
cgagagcggacctggatacggtggtccacggcgcgatgactcacggtggcgcggagaaccgaattggaggaagaaagaaattagggcgctacggtggctaatcggaggcgagggctggtgcactgggcgcgtaacatcctaatggagcaggctggggcatcaatttatagtgatcatcagcggtggcgtccaatttggggaagatgcgctggcgaccggaaagagggggaggtcaccggcgagcgctaacgtggctttcactgaggcactgtcacaggcgatggataggctacttataacaatctactgcaacgtggtaacatcgttgattgcgtggcgttcgggcggccaagcggcaaactccagtgaggatcattttagccggccgcagagcaagtgggtacggtggccagtacacgatctcatccacggtgaagatattttcaccctgagtcattatccgcgca

SEQ ID NO: 40472 - DNA, 334 bp, Zea Mays
acaaaatctgcaacttgtctgttcttgttgcgtcgagcattcagcggtagaagctagctaaagagagaggaacacagtcaatcaaccggctagtagtagtactcagcatgcatgcaaggctgtaataatgatagaatcacgtggccgggggattagttgcggccgcgggcagctttcaacaagctaggggccgggcgcgcgcgagattggggatatatgcatgatggccttatgattcgcgagcccccttcatcactgtttgcccatcttctctcactgtcctgtcttttgtctctcgcaactactgtaggaaggaatccatagctctcgttgt

SEQ ID NO: 40473 - DNA, 570 bp, Zea Mays
gcaagtttactactggcgaattagcaagttattatatagaaatttgtgttctcgacgctacaagttgggctatcaggagctctaaatcgcagttccgatggtacagtgtcccgagcagttcgccagctctgtccctcactgccgatgagccatgcgcggattcgtgctttcgccgccgtgattcgtgctcggatcggttggatagcgcttggggttgagtaaatatcatcgtcgtggatatactccgaccatcgtaccgagctagtcaccgatgcttcagatgtgtttgctggagacagccgcttcacggccttgtgctacgtgcctgggcacatttaccacatcgccgtgactcgcttaagccatccgatcatcgccggggagcccgccacagtattctccacgaatccactacgccagtgacctcccattcctccgaccgccgcgcgtctcaatccaaatacaccggccaccgctcttgcctgctataaattgagcccgtcgtgagctccgcagggtaatcacacatctaagccgccaagtcttgtcttcaattgtccactaacgccc

SEQ ID NO: 40474 - DNA, 306 bp, Zea Mays
gaggggttgctcctgttggcaacatcatcgatgttcttggcatccttaaccgtcatttgatggctaacaaatttgcaaagtacctcctcgggcaccatctttgtgtatctggggttctcaaggatcaaataaacaataataggatcttggtttaccaggcacttaagcatgttgtacatttcttgtagcccttctcccctgtttatggtgaaccttcgaagttctcctttgttgagctccatcttgatgattttggtcatcatgttgccctcgtgtgttgtctttaatgtgtcccatatgtccttg

SEQ ID NO: 40475 - DNA, 1048 bp, Zea Mays
accttttatgttgaggcaacataggcagaataagctatccgcaagcacaaattctttcctcaaaaattaattttgcactttctttcagtcgcataaaattgtattattaatttgcactttctttgactcacataaaaatgtatttctttctacagattggggatgctgcattatctatattacacagtatgacatctgcacggtccgatcttgatgatgcaggtgaaatagtaactccaactcctagggtgaaacgtatattgtcaagtccaagatgccttcctcatgtggcccaggttatctctagcttcaagtgtttgctatctttttccaccatataagtggatgttggagactgtataagtacaacataaaagtgacagtatcttagtctacaaccatcagattaatgtgtataagttaatacaatgcaatccttaaagctctgttgatgcaagtagcatttccttgaactgtcactaaattgtaactctgtccgcaatataatgcacagttgtcagttgtgttataagatataagctatttttcgtgccattaaaattcatgctttaatttgtgattcaattatcttattcaacttttcagatgtatgtttctctttcttttgaacaatttaattgaccaaatgctgacaaaaaacaaattgtattgtataggttatgcttactggggaaccaagcattgttgaagcagctgcctcattgcttatggctattgttacaagaaaccctaaagctatgattcgattatacattactggtgccttttactttgcattggcatatcctggttcaaatctcctatcaattgcacatttgttttcggccacacatactcatcaagcttttcatggtggtgaagaggcagcactatcttcatctttgcctttggcaaagcgtagtgtactgggtggactcctcccagaatctttgctgtatgtcttggagcgcagtggcccttctgcttttgccggtgcaatggtgtctgattctgacacaccagaaattatatggacccacaagatgcg

SEQ ID NO: 40476 - DNA, 355 bp, Zea Mays
atggtacttgttgatgttgctgctgttgctgttgttgttgaaattgctgttgcagctgctgttgcgcccttctctcctggcgtatctcctctcgctcctggcacaactcctgatgtatttcttctcgttcctagcgcatctcctagcattcttgctgcatctgagcactcatatctgccatagtgtccgctatctgttgcatcatcctcatctgagctgcaaccagtgggtcaactccgcctggtggaggattaggaggattcatctctgctggttgtgactggggttgtctaaatatcctcagagtgtgatgtctgggaggtaaatcaattccaccacccctcctggtattgac

SEQ ID NO: 40477 - DNA, 302 bp, Zea Mays
ggggtacgccgatttaactaggatgctactggttgttatatactgccttgaaacagaaggaacatgatggtggtaatcagtgttgttgcgagtgatgcctgctggtgattaggtcgtcgtctcatgtcgtcgttccagctttatccaagttgacgacaataatattttgattcctttctcagcatgtgtgaatcgatgtgtttttctaagctcaaggtcaggtattgttctacttcctcattcaacttccttcacacttgcgatacactttctttctattctacctaaccggagtcttcgtg

SEQ ID NO: 40478 - DNA, 398 bp, Zea Mays
gctttccccacgcacaaaactaattttggcgcgagtacatgtgcctctccccgcgcgcaaacagattctggcccaaccacttgattctggcccaaccagctccctgtcccacgcacaaggcaacagcacgttcctctcccacgcgcaaacccacgcacaaggcaacaacacgttcttctcccagcgggcgacgacgcggccctcaccacgcgacggcgaggacgacgtggtggcagccgtcgaatccacggagcaccttctctccggtaaggataaacaccttcttggcaaatcttctttaccccatccccgtcggcgcgggctcgcatgtgaaattgcagaggactacggcacggcatcccgcgcgcccggtcgaaacgatctcgtgcgcgtgcccc

SEQ ID NO: 40479 - DNA, 561 bp, Zea Mays
gctggcgcgctgatggccactggtttggaaccgcccatgggcgatgctggtcagctggtgggaggccctgagcgttgggtgtgacctgtcgagccggcgccgggggagagggttgggcggttacctaccgagctggcggcgggggttgaagctacgaggggtggggcgtgcgcgcgacggcgcgcccaggcgagagaggaagtggacctccgcgcgggggtggggctcctagaagcttcgcggcacgacgcgagaaggctgcgaggtcttgtgtggaaccgtagatgcgcgatcggacgactgaatgttttcgggccgacatggataggctgaaaggctgagttttggaccggctttaatataaaggaaataagacttaagaaataagtagatcataattctatcttttagcctattttttatctaattaaagtatgacttgttttcactaattttggcgaaagttgttgtacattttattttggccaacgcatattttattaaattagtttaacaaagcttgttattagaaactcgtatgcctcattttttatcattctg

SEQ ID NO: 40480 - DNA, 284 bp, Zea Mays
gtgatagtgatgcacgtcttgctcatggattttaatggtcataactagcaccattacatgttaatgttagtaacatgatagggcagctatttgctggagaaacatgacatgatagggcatatatttgctggagaaacattagtccattttaatttgttctattgttatgtggggcgcagtgtataagcgtcggccacagcagaaggagggttagtggatgagaaagaataggaaaggatagattaagttagttgagaaagtctagggatgaggattagccgcct

SEQ ID NO: 40481 - DNA, 462 bp, Zea Mays
acagggtgtgggcacatgacaatcagcgtatagcaaagttgtcagccaaagtcggccgcttttggtttgagctctccgaacgagactcgacaattgattgggccatcaactcacgctcgatcgcttggcatcgtgaagcaaacgctcgagcccgtgtggatgagctcagcacaacccttgataacctgcaagtatattgtaatactctacatgaggaagtacatgtactgtatggtcgactacacccggacgtgcccgctgactctgttggaataggagctggaccatcggggacagcaggtgaaagaccggatggggaagtggatctttttaagccccctccttctatgaacctggccgatgagcggtctcctacagcggacagcgaagcaacaaaagataatgaagactagactagtatagtttagaaactatacttatgtaaaatacataatgaagtca

SEQ ID NO: 40482 - DNA, 649 bp, Zea Mays
tacatattaggctcgtcccatatttgtcaaatacggaataaatacgggttcaatccggaaaaaaacgggatcccgcaaaaacggacggaataagctctctcccgtttccgtcccgtttccatatttttccgtaaatacggaaacggtcgggtcaaatgtagaaaacggtacgggtcgggacgggattttttccgtccgttttcaaccctagtgtcaatctacctgcatgcattcgccgatagaggacagtagctaatccagcaccggagatgaatctacctccgaatcctccgcctgctgggactaacgctgtggttgccgcttcaaatgcaactattgtaacagatgtccaacaccatggcagagatgcaagcttagcaccgccaaaaccaacagcatccaccaccaccagcactacatagggataagcatcgcgagttcacgagccataagccatccaccttctccagatccactccaggctgatgattggctggttagtggagaagatgctcaacattgcccaatgcattgatagagagaaggtcttatatgcatcgggtcgccttactggccctgctactgactggtgggattcttactgtgttgctcatgccgctgctgacaccatcacctaggtagagttctc

SEQ ID NO: 40483 - DNA, 479 bp, Zea Mays
caagcgtcagcgcgggaggaagacgtgaagcgaagacaggcgcgcgcgctgatggactcagacggagccaacgggtgacacggcccaacgtccggctcttgggccgtgagtgggtgaagtgagtaggccagacgtgtgatacggaggggagaggaatataggcggcgactgagaggaggagaggacagactggcattttggacttgacccggctgcgtccggcgaaccgacggtgtgccgtcgtgtaaccaccgtacctgctacctccataaactttgagagaggatctgagcgccgggagcggtgctcaactcattcccaccaccgtgctctaacaagcgcgctcatctccctcaagcttgtctgctccttctccctgccatggagctcctgaccgtgcagctcacccagtccccagcccgatcggagctcccttcaactcgagctcccaccttccatggtcgtctgccccagctcgg

SEQ ID NO: 40484 - DNA, 280 bp, Zea Mays
tgaagtttctgaataactttttggacgtagagaaaattatcatgaattgaacgtttttgaatgaacgcgttttgggtagtggagacaatctcattcattcttggtgcaagtctgtttgctaaaatcttggtcaatattttcatgaagctattgatgagactgatcggcctaaacatgtcaatcctgtcagcacctcccttttttgtaaaagcgcgatatttgcctcattaacgaggtttaggtttttgcatctatggtgatagaaatcatgaattgcact

SEQ ID NO: 40485 - DNA, 327 bp, Zea Mays
aataaaatagaatgaagataaaggaaacttggacacattagcatgattatttatctcttcatgggattgttttttcttgtgtggggctcaatcttcttagatcaactactggttgaagatagtttgagtgcgtatatgttagcaagatagaattatcaccgagttgccttttatagaacatctgataattatccgatcgatttgctgatctggttcgcaaagtgtaatcatgtggtatcgtttttttgctgagttagtacgcaaagtgttgtccatgctcagaaatcagaaggaacaaagtgttcatgctcagaaatcagaaggaac

SEQ ID NO: 40486 - DNA, 551 bp, Zea Mays
ccctagccgccagcctcacttctcactgcccgcgggccactgcggtcagcactttagcgtcactagcgtatgggcccggatattctgaagcgagccaaacatttctgcgcgtggggccaccctgtcatatccatccctcagctctcggcaatctcaaaactaaatcgcgtgattcctccgcggccaacctagaatcgtgcacgctaacttgtggtgccacctcgggtgagacctggtcgtcttccctgcacagcggtcgtcgaaacagccgaggcaaggggtgtggagaaatctccaccggcctggccgcatctcgggggaatcgttgggattcttggccataggagcataaatagcagcgctgcatccccgcctcgacctccaagccaaaacgcgggcctgacctagctgctccgccgccgccgcactctgctgtcgcgcactcaatgccacgctctgacccgctgctgcttgccgatcacgaacctgtgcatcgcagggactcggggcgaggatgctgggcacagagaagaatggcgggacctcacgcc

SEQ ID NO: 40487 - DNA, 471 bp, Zea Mays
ccttgcaaggtggggcaggtgtccaagtccctgcctagtagcctcacgaggcggagctgacgaccaggtccctgccgagcaaccttgccaaggggcgagcgaccagctttcgcgctagtctgactagcgtaagggacggccgacctggtgatgcgagcccccatcagcgagacaagatgggtcatcaccaaactatgctcgggcctaggatacagcgtcaaaaggtcatcgatggacgtcaaacgacacctcaccacatactatctcaggcaaacccccacaagcgagtggggccagtcaatcccagtcgaagtgatctcagcatcagagtatctacagtgaccggcatataggaaaagatgtaacggataccacatatcgatgtatgcctacacatgccagtagataactcagatccgtggggacgggtgaagctgcactatgcacggtcgcaccatgggcctaacctgc

SEQ ID NO: 40488 - DNA, 542 bp, Zea Mays
agataaactgcatgaggcccaccatcatttcactgaagctattggtagaaggggtgagagacagagggccgttcggtggggtaacctaggctatagtccatttgacttatcagatttggatttcttgttcaatgaggatgagattaaaaatgtggttatggggatgcactctgaaaaggcgccgggtccagatggttttatcgggatcttctataagagttgttttgagctgattaaagatgatctatcaagtgcaattcatgatttctatcaccatagatgcaaaaacctaaacctcgttaacgaggcaaatatcgcgcttttacaaaaaagggagggtgctgacaggattgacatgtttaggccgatcagtctcatcaatagcttcatgaaaatattgaccaagattttagcaaacagacttgcaccaagaatgaatgagattgtctccactgcccaaaatgcgttcattcagaaacgttcaattcatgataattttctctacgtccaaaaagttattcagaaacttcataggaacaatc

SEQ ID NO: 40489 - DNA, 312 bp, Zea Mays
atcgccttcgtctcaaattggcgaagcacgtagccggctcctttaaattgagcactaccctcgctctgcatctctgttacgcgctcataccaccctcagttagtctctctcgtgcaccgtagcccctagtcaccagatttcccccaaatcgggtcactcacgccgccgtgagacatcctgccatgatcaaccgttcctaggtctgttcatacctctctatgccttgttttagcattcttgaatgttaacgaagctcgtcgtctcaaccgattgaacactaccgcgacagggcatcgagaacatcacctcgcc

SEQ ID NO: 40490 - DNA, 282 bp, Zea Mays
ctccttcaaccagttcagaccactcctatgtctggccattgttctctctaatgatgccagccccaaagagtggtgttttagcttacgacgcaaccattcttcatgataggaaagatctcttgagtctctagcaacttccaggctatgcagaatctcattagacatcacaagctaccatttaacatgcccaacccttttgctactccaagattagaggtgtttagatagccgttttaacttatctgccatccgctgcaaaggacaaaccgcagcaattggttg

SEQ ID NO: 40491 - DNA, 423 bp, Zea Mays
tgctgctgctgctgatgttgatgggttttggttggattgttcagtgagtgatggggtctggcgagcaccgagcagtgtgcgcccggtcgcgcgctaccctcaaattcgtttaggagtttgcggtattggcctcggtgatgtgaggtgaacgtgtttttttgggaaatctccgtacctgacgcggaggcgttccaatgttttctagtgaactcgtgatattgaactgggtaatggcccgttaaattgctaccactgccagtaatgattaatgagggaggacacgggcgtacgccttttttttttaccccaactgggaatctgggatgagtgatgccgtatgaagatgagatgccatgcaagtagagagggtgctggatagcaacctgttaccattcatttgttgattggagagccttctcacgc

SEQ ID NO: 40492 - DNA, 335 bp, Zea Mays
ttctttgcagctagtctaacgctggatctcttagtgaaggtcgaagcgtgattatataaatcagcaggagattcaggggacccccattgttttgttaaaactgcctgtggtatcattaggaggtggatggattagaggttgttattttgacatagcaatagatgcaacgaactcttgtaactgtgcatcgaagcaaacaccctgcctatgtgcggttgactgaccgactgagaaatgatcagtgatgcgaactgtgtcagaagtaggaacttcctggctatgttgattacagtgttgatctgtaaataatcgcttgcatctaagttaagatcaac

SEQ ID NO: 40493 - DNA, 277 bp, Zea Mays
tcttctccatcgttcgtcttttggtttcccggcacgggtagccaccctcgtcgttgtgtcggtcatcagtgcggaagatggggggataatcaggcttcccacctttcttagtcgtcggtttctgtttctttctttcggctgctaggttttgcgcccaaccccagagtctagaactgtagtttacgggagacttagggccccctttatgtaaataatgatgtagccctagggagaccttggtctaatgtatagttttcatcccgacgtccttctttac

SEQ ID NO: 40494 - DNA, 401 bp, Zea Mays
gtaatttcggttcatatccatacaatgccttgaatggggagcattgcaaggatgagtgatacgaagagttgtaccacagctcggccagaggcagccatgccttccacttggctggagagttgtagatagtgcaacgcaaatacatctccagacattgattaacgcgttcggtttggccatccgtctgtgggtgatatgctgtactgactaacagctttgtgtccaacagtttgaacagccctttccaaaaggcactagtgaaaatccggtcacgatccgagacaatagaagcaggcacaccatggagtttaaccacatgagtgagcacggctgaagcaacttgattggcagtgaaagggtgacgtagaggaataaaatgggcgtacttagtgagacgatcc

SEQ ID NO: 40495 - DNA, 307 bp, Zea Mays
gcgagatgtgtgaatgatcggttagtgtttcacttgtttagtcgataaatgttgtcataaataattgtgctaaaattgggcatgaaaaggcagtggggacacgtatgtacgtgtgtgctgtggtgtattgtagtagtggtggcgtaagataattgattgaggtgtgcgggtatatgccgtaatgtggttatactcgcgacgaggaaagatgcatgtattgtgtaacacgatgcttaggccgctattatataaacgtgtgaaggatgctcgtgatgggtgtgtgattgaggagtgacgtagtggcaag

SEQ ID NO: 40496 - DNA, 327 bp, Zea Mays
gatcattgagcttttgttgtctcttgttttcttgtgacccgtgtccgccgaaaatgacgttgacttctctgtcgacgcgtgggaaggcttcacctccttcctcctcctgctgctagggttgtcgcggttctcttggtcctcctcgtggtgggggtggaggtagaggttggaagggtcggctgttccccacggagtgcttgaagtctctgcagttccgaagggtgtggcgcatgtccttgtggtatgtgcactgagcatcgaggatgtcgtccagcgtgcgttcgcctccgcgaggtcctcctcgggcgcgagaggcgggcggtccag

SEQ ID NO: 40497 - DNA, 356 bp, Zea Mays
aaacaagcaagggtaagataggtaagattccaacaaaatggttgaagtaactgaaattattaccgagggaagttataaagaaatgatgagatcatcaaaggatgtgcgaaaatagaacggacattcatggatcaccaagaaataaggctggtcaaaagcatgttaaccggaatgtcttaaacaagcattgagatataaaggtaagcatgtataaaaataatagtatgcaagattcaaatggtacgagcgtaccaagaccaagagaataaaaaaagccaacaggtgacggcttcacaacggaataggaaggggtctcaaaagacgggaaggtcatgaaaatataaactggaatgttt

SEQ ID NO: 40498 - DNA, 300 bp, Zea Mays
ggggtggtgcatcttggtcaagtcagcgggcaccgcaagtgtttggccctgaaagtgaaatgagcttaaccattttctaggtggcatcaaactcctgctgctgtgtagtacaaaggtggcaaggagggcactagaatcgaaggtagaggccttgtcaaccatggtgagctcctcaagtagaagctcattacgaatggtctaaaacagtgggaacgatgtggtgcacttgatgaaggtcttcatgtgctcgaaccacttattgagactatgaaagaggttgaggacaagcgtatgatcggg

SEQ ID NO: 40499 - DNA, 366 bp, Zea Mays
gtcgttataaatgatccactactagtagattacaagaaatcaaatctataaccgtctgaaacaggtaaggttaccacagggcactatagctgtatgtctggctagcatcatgactcattatttccctgctcttggatgttagtgattggtagccaaaacagtgctggcagattgttgacggatcacatgactctaaccattcagtagtaactgaaatcaatgccaagagaaatggagataggagtgcgacaaggccaccagccaccaccgcccttgtgatttgtgaacggatcggtttatcgaggagcccgattcattgcagtatcctgtcgagatgggaagggagcgaggggaaacaggaaggaa

SEQ ID NO: 40500 - DNA, 409 bp, Zea Mays
tgactagatacgatgttagattggagaccctaactagggtacaagtgatgtagatagaaatgtatatgggatgggcctaagtccatcacagttgagacacaaatgtctaagatttaccattgcaatataccccattttgttagttcacaattctcctttctgacgaatcaatgcatattcaagaagtaagtacttttcatatatgcatgcatttgggcgcagtaattggtagaagaataggaaatgcatttcaatgaaaaacaagagctaaatgaaggaacatagctggaaccacttttattactctagagcattcaactcattgtctataaatacaatttggcttgggtcatggagcatccggatcccaagtcaaggctcaaaaaatggcattgcattagacattgag

SEQ ID NO: 40501 - DNA, 331 bp, Zea Mays
cggcggcaccattgcatacgccgcagcagcggacatcgccggtgtgaagtgcccaggcgccacagtgcactaacctacggtacggatagcatatctcgaagctaacacgatggcggaacaggggacgagattcacaccaccggtgatggtgcagagggtcgacgacgaggtttagcaactccacgaggattcctagctctggcaagttctcgggactatgatcgcactacgaccgcacggatcagcgccaaacagacgccacacgcaccagacccgatctgagccatgggcgacgacacacccaaagactgacggtggcgcacaaactcac

SEQ ID NO: 40502 - DNA, 465 bp, Zea Mays
gtgtagtgaaattattagggataaccatcaccgtttgtttcctgtttttgtgttttgatggcaggcgacgaagaagaagcaaggatccccacagacttcgatgaatgtgttagccgccaagatcttgaggcaaacaacaagctcctgaaggagcaaatgcaggagacggtccacaagtcagtgcatgatgccttcattgacatgaaccttggcaagatttacgacaggctggatcgacgattgtcctagatcatcgacagacttgctgtgttggagacgcaacaacaagcaccgccaccaccacctcctcgtccacgtcttcccgatgatgccgtctttgatgaagaaggtaattatgatgaagcggccaccagagatttgcgcctacgtcgccgtcttcatcaaaacacagaaggtatgccacaccaacaccgccagtaaagtaataacaatcgtgctcttgat

SEQ ID NO: 40503 - DNA, 312 bp, Zea Mays
ccgacagtacgccatcatgtattgtctcaaagaaacccctgctgacataaggggccaataaaccctattcatagggacctcggtgtcagagtctctacaatgacttgcatactgtaaaggacactatggatacaccatacctagtgtattcctgcgcacgctggcaagtgatgcaggcccatgacgataagcgaagctgtgctatgtgctaccgtgccatgggactaacccgtgggacccaccgcacaccactacaaagatgtcagcggtggactcggtacagggacccatatgatgaatgagcgagaaaat

SEQ ID NO: 40504 - DNA, 426 bp, Zea Mays
aaagcctctgcacttcttgtcaattgctttgaacacccacttaggtaagtcaagagcagtcatatgataaatattaagggcggataggacagccttgaccgtgaccaatcgacaaacttattcatgagaactcccttccaatttgggagattatttgcaaccttgtcaaccagcttgtgaagttcagaccttgggagtttatgaacgctcaatggaaggcctaaataattacaaggaaaatccttgatgtcacactccagggtgttagtaatcagagatcgttcctccacgttgcactgaataggtgtggctgagcttttagctatatttgtgaccagacctgttgcctgaccaaaaaccttcagaagttccttaaccaataagggttcactctcaataggtcgtagaaataaaaccacgtcatcc

SEQ ID NO: 40505 - DNA, 536 bp, Zea Mays
gagggagaggggaggttgacctgaccggaatggggctggccgcggtgagctgttccttgcggtggcggaaacttgatttggggagagtttgaaatttcagagctcgggtgaacgattacgggtgggagtgggtgctaaggcttcacgatgacatagcgcagctacccgggggctcaatttatagaaggagcgagcggtggccgggaattttacgaaggacgcgcggcggtcggaggtagaagaaggtactggcgcacgtgaatccgtggcatctaccgtggcagttactccgacgagccacgaagaggcacaagggttcacggcgatgcagtggaggggctgagccacgcggcgcaaggccgggaggcggctgtcgccggcgagcatatccaaaaccgtcgtggtgagtgcagtacggcggccggaattgtttactgcccggagttatccacgacgacgatattttcgtgaccccgcagcgctatccactccatccgagcaccaatcgtggcgacgacggcacgaatcacggcggc

SEQ ID NO: 40506 - DNA, 320 bp, Zea Mays
ggcaatgatccggctcgggtgggcagcgcgagctacaacccagcccccgagggtgctgccgatggtgatccggctccgatgggcaatgcaggtcgcgacccagcctccgagggtgtccgagcgggctccccttctcatacctccatggatgtccacgacgggtcttctcctccacatcttgattgcatggcggcagcatgtgcttcaaatcaggaaatcgccttagagaccggcacacatgacgctagagttttgattcctactggtgacactgagttgatccccaatgatgctcttcagattgcttcagttgatattcc

SEQ ID NO: 40507 - DNA, 413 bp, Zea Mays
tgagatatgtctgaagcatccgcaacctcagtggcaatcaagccagcaacaacagataaacaatcagcaacaatcctctcagagcacattcctcccaccaactccaagaggggtaagtggaggttgaggcttcgggggcacgttcaatgcaccctaaagatattttgtctgttttgtggtgagaataaaggacacacaacaaggactttccaccacactatccgcaagcaaaaagagattgcttcagtgaccgctcaatcatctcagccaaaaggagatgtttagtacatcttcatattgttcaccttatattccataatacgtcaaacctcaaccctaggatcctaggctgcattagccttcggtttcaaatgcttcgagcaaccatgtgatgagcgcatgttcaccctctg

SEQ ID NO: 40508 - DNA, 521 bp, Zea Mays
gttgtgttcgctgttgttccctcctcccgtggagctaggatcgatgagttcagggaacgatttcgctagatgctggactccgtccatgcgcgccgccgtggctcagcggtgggaaggggatggatcttcggacccttggatcttgaccaacggtcacgattaggcagtaggcgtacctcttcacgtgatcgatccggaccattgatccagtggagaacggctgagaatagatgctttcggtgatttgatccgagccgttgagcggatcgaatggtccatattagattgtgtcccgttagatactgaccgtagatctgggatcctgtggtcgcgagcgcgcaccggttcattatatgggccgatctaatctaggccgttcgtgcccgatcggacgactgaaaccaactcataccctttcgccctggtaatctttcctaggagccctcctagaattttaaaactaacccgcagtccatctgtatacaaagatcattaccataaggtccttattttctccaaac

SEQ ID NO: 40509 - DNA, 382 bp, Zea Mays
gtgttctccacgaggcttctcagggtagcatggtgcccataggtcccgctgtggatgtctttcaggagccacctgtcttgttcgatcggggtgcacaaacgctttattccgatactcccctttttgtagaggtcttccccaatcatgacgaaggacttggcccgtcgatgaagcctctacacctctgttttgtcttggagaagcagtccattggttaagaagttgcaatacgacgctctttggtcgtctaccgggttggttgggaggtccgttcattccaaggcagcggtcagatccagggtcggtgggcctgtgtctgagtgaagcttgcctcttggctaggccccgtcgtatcgaatagttgtcctaaaaaggctagtca

SEQ ID NO: 40510 - DNA, 325 bp, Zea Mays
gggaattctctccccccacggtcagggagacagccagatgttcgcactccgagctggaccgaatcccccacggaccaggaggtggctaaggcaggggctctgcttgctgaggttgggctactgaaagagaggggtttggctacagaggctgtggttgccgacttcattttcaagaacattcagccactgaaagacagagcataccccgcatatctgtatcgaggcctggctgattcaacccgggtaaccaacagaagaattcctgttgtggacttggtgggtcggctcgagatgatactcagaggcaaggtgtcgaacatcggcg

SEQ ID NO: 40511 - DNA, 294 bp, Zea Mays
gcggcggcgcccgttcgccgttggtatgggggatgatctgcgtgggccgtagatccatcagagtgcggctgcgatttaatccgatgcgtaccgattcggacaaagggagtggatctgggaggttttagggcatttagaatcagggtcgtagatctcagatcggatgatggctgttacgtaacggttcatcgcactggcgatttaatcttggccgtggaattgtaatctgacgatcgtagatgcttcataccccttcagcacatacagtttacataagagaccctctgtttctaa

SEQ ID NO: 40512 - DNA, 318 bp, Zea Mays
ctaaagtctatggagaagatgttgaatgttgcacagtgctccgactgggagaaggttctctatgcttctggtcgacttactggtcctgctgctgattgatgggatttttacactgctacccacgatgctgctgatactatcacttgggcagagttcgctacacagttcaagaactgatgaagataaagaagaaagagtttctgtggctgaagcagggaagcatgtcagtcagcaagtaccacgacagattcattcagctctcaagatatgcaccagatgaagtggctgaagatgagagaaagcaggaacacttcatag

SEQ ID NO: 40513 - DNA, 687 bp, Zea Mays
gttgttgcgaagcggtggtccaaatcagagttggcatagctacttgaaatgcccccatgacaggggtggttcatcatgcatgagctagttgtaccaagtctatgcggcgccgagcatgtgatatgaagccaaccagactttctcctcttccaacgtgtgttgtccctcgaagaattgttcacatcgagtcaaccagtgcattggatcttcctttccatcaaaggttgcaaactccaagcggtggaagcgaggaacagcagtagatggtggtggagagaaagcactgggtatggtgtgcggtagtgaggaaaaggatggggtgggtgaagtggtgtgtgggaatggtggtaatgatggaatagaagatggtgaatgtggtaacgacagcaagtgcggtggaagtgaggtggtggtgtgtgatggtgccgatatggtggtgcgtggtggtgggaggtggccatcgaccgctgtcatagctggtggcagtccgccatatccaggcatgccataggggtagtctggtggcggtgccatggccgatgttcctagggtggattccactgtgtcaatgcgggagtacatggaggccatctgcgtggcgaagagccccagttggcactggacttcggcaagggcggtggtgattgctgccaactccgacggctgggctgaagctgcagtttcggc

SEQ ID NO: 40514 - DNA, 385 bp, Zea Mays
ctcacaactactcgtctttgggcgacctctatgccttaccagccgatcaattggcataaattaggaaaagactccaaaaccagcacgccgcacttacttccgcaatcgttcaggacgactgttgaattctaacaatagaaacaaaatgttataattttcagcaccaaggacacattctagtaccctatccaccgagtatccgagcacactgatcacgtacacacataattcacgaatgcattcagaatcttctaaacacgtcgctacaacaaaatatctctatttggcaatatcttctgcaggggcgatcgaggaagaagggtgactcgaggcatcaggcgtagcctggacgtcagcaacaatgtcatcaggaacaactacaccg

SEQ ID NO: 40515 - DNA, 878 bp, Zea Mays
attttgtcaaacaggccgtgcacacgaggtatgctacgcccgtgcgctgctttagagatgcttttggtagtgtggagagtccactgttgaggaagaggagagctgccgttgcatgtggacctcctgtagctgctgcctgaggtgcctgtgctgcatgacatcttaggccgcacagagcatctcacggcctcgtgtagaagaccaatgcaatggtggtggggcgatgagggccgtgatgctgcccttaatgatgcggcaggggagagccactgtgctgccactcttcctgaggtccacacaccttccgtgagcctgttcaaccgctctggatcaccacaactcctgatcaacacgtgacttgccaagggtggctatgacttgtgactttgtgagatctgctgcttggtgtcctttgcactgactccacactgtcggcattctatgccgcaccctacatgtagctgcactgcggggaagtaggtggactaacaaggggcgcgggcaggggcgtgagaactgagaagcagggtaggaatgtgcggcttatgaaggtttgcggcggttcggatcagccacgtagcgggtagtagatctgaaatgacttgcattggacaaatcggatcgcatgattgcacaatccaacagttaaggggtaacaggtttcgtggccctaccgtgttgtagagattaaataaagataggatgaatggacttccttccaacctaactgcttctgtgctcacagattttagctttaatcgattttgccatgtatttagaccattatgtgaacttgaaacgtatgtgtaccaaggatagaatgaccatggcactaaaaaaaattgtaatggtatgtaacttatcgaggtggaatctac

SEQ ID NO: 40516 - DNA, 315 bp, Zea Mays
ttactaggtgaacacggtggatccttagattaggttcaaaatttaacttagaaagaattagagagctctagtgttctttcttcttaagggggtgaaattggggtcttcatggtgtctttttgcaatgttccctccctgcatttgttaggttacaaggctactaaaacttgtttaagaactaagatcatgctttggcaatttggttaacttatccactaatccctggcttggaagtctagtgctcttaggtgccctttttagggtttaatcttcttggctccaaatgaccattgttccacttgtgtggttgaaacc

SEQ ID NO: 40517 - DNA, 400 bp, Zea Mays
tcacccatctaatcttggcctgccacctttccaaaggggtatttcccactgtaactgaagcccaagtagtctttaccatatctaagaaaccatcacgaagtaaccatcctaattcaaatttgaaaggatgtggaagtgcacattcattagattctccagtgttcaacaacaaaggcgtatgatcgaaaatatccctgttcagagctactactgtagataaaggatatttattgtcccattcagtagctaccgggatacgatccaacttttcatatgtcagataaggtaacctgttagcccacgtgaactgccttccagacatctcaatctctttcaggtttaaactatcaattaccgcattaaacataaaaggccgtctactttgaaaattgtctttatt

SEQ ID NO: 40518 - DNA, 443 bp, Zea Mays
tgccattccaagtgagaacattagaactggtgctttgctatcatacctgttctcttgactcagccaccttttagactcaccttcactgttttcttcatatgaatactcttcactggagtcatgatatggactccctgggtcatctaggttcggaacttcatctaccaattctgcagggttaatgtgtccaatccctccactttgtagtcctagcttcttagccctgatattcctcttcacctcattggcatattttctgaaatcaattgcttcatcatcttcccctgaactgtcatcttcaatgggttggaagtagtctttatctaatgattcagtttcagtgtcttcctctttatcttctactggaaattcagcaaacctattatcttcaatttgcttgctgctgccaccatcttcatcttctacaatttgcttacccctgc

SEQ ID NO: 40519 - DNA, 316 bp, Zea Mays
agataaccgaacttgccgagtcattatgcgcacctgcatgactgtctaaggtccttaagaaaaggacatctgtaggtgggcctaataccatgggaggttccatgacagcgagttggtttcgataaaacgcagggttccttttacaagatgtgcaagccgaaggggtatcaggagaatctgaccgtccgatctcggccaatcggcccagattagaatcatgtgatccaacactctgctacccgccctggccacccgatccggtttcaacgggtgaggaacggccacgccccaacttaatcaaaagcactcatcaccg

SEQ ID NO: 40520 - DNA, 501 bp, Zea Mays
gttcatcgaagctctagaatggtggtgtggaaagtggtgaggagtcaagataattctgttggctaggagcttggagtgtggtgaggagggggtgaagagtggctggttttataggggtgcaccattgattggaggggagaagacactgtgtgtgcagcgcggctggtcgtcgttagaatgttggcagacccgctcggggttaatgaatgcatggagtctccaccataggatgacgcgtgcaggggcaacattcggatctcgtaggggcgagatcagcgaaagggaaattgtcgttgaaaggaggatgcgagcgaaaggtcgaggttgacatctgagtcccgcgtgtcagagggagagagggagcacatgcagggttttggctgaacagccagtcccacatgatagcatgagcgagcatgggtgcgagggagtggtgtcgacagatcggcaccactcgttagcgcgagcaggcacgggtgcaagttggggcagaagtcgttt

SEQ ID NO: 40521 - DNA, 305 bp, Zea Mays
ggaaagaggaaaacaaaatctgcacattgtaaattgaagaccagggtggtacagaatgcataatctattgtccgaagagaatgcggcgaggttttctacttttgcttttccttggcagacatcagacagatcacacatgcctgcatttcagtccccagaatcgtagaccagagaagaaccatctttgtaggttttatttagcccagaaactcatcaccgtccagctaaaaaaccaaggcaaactcagttgaagaattggtattctgctccaaaaaaggaaagttgtgtttaatttgctgctcagc

SEQ ID NO: 40522 - DNA, 306 bp, Zea Mays
ttccttctgttattgaggtgctagattatgtggaaaaagatggtccaaatgataagaaaaggagacaagcccgcgagctcatagattatcttcagaattttgattttgtgtttcatctgcaattgatgttgataatattgggaaatgcaaatgctctatcactttgtttacaaaggaaagaccaagatatattggcagccatgttagaggtggagtcaacgaagcaaaaaattcagaagcttagagatgatggatgggattctttattgcaaaaaatatattccttttgtgaagaacacaatatcc

SEQ ID NO: 40523 - DNA, 405 bp, Zea Mays
gtctgatgtagcctttctctaacaactcatcgatctgcttcttgagttccaccatttctggtccggacactcgatatgctcttttggaaataggggtggtgcctggtataagctctatggcaaattcaaccttcctttcaggtggcatacctggtaactcctcgagaaacacctctgagaattataatactacatggatagcctctgatggtttaatcttctcaatatgggtggtgacttggtgacagcttccttcccttggtctagacaagaccaactccactaacacttcttctcctgacaaggacactaacttcactgttctcttgtcacagctaagactgacttgatacttggttagccagttcatccctaggatgacatctatagttgcatcctggttac

SEQ ID NO: 40524 - DNA, 427 bp, Zea Mays
gttggtgccgccttgtggatccggagattgacaacgttacccgttgatctctgggccagggtgtgtcaccaggttgtgccgtcgtgattggtggcctcgtcaggggcgagcgaaggatgaggccgacacaatttctcaccgaacttggcgagccacactccgccgtggccaagaacgattgtgctgtgattctcggtatggacctcgttaatacagttgcaacaatattcccttcatatagtgttgttccaagcgaagttcaagagtgggagattaggaattgcgagcgccgatgatggcgctaccgtgcggtgctttaacgctgtcggtcgggatggcagaggtagcagacaagtttcccgccatcgatcatgatatttgcggcccagattagataaggggtaatgtttcgtccgaaaacctcgta

SEQ ID NO: 40525 - DNA, 445 bp, Zea Mays
cttgcctgggtggtcaaagttgagccactgatctgcccgagtgaaggtgatcgggtgctcagaccatcggtacggggcgggaggaccggtagccgccaccagtatctgacgatcgttgagcttttgctgtctcttgctttcctgtgacctgtgtccaccgaagatgacgttgacttctctgtcaacgcgcgggaaggctccacctcctctctcctcctgttgctggggttatcgcggttctcctggtcctcctcgtggcgggggaggaggtagaggttggaagggtcggccgttccccacggagtgcttgatgtctctacagttctggagggtgtggcgcatgtccttgtggtacgggcattgggcgtcgaggatgtcgtccagcgtgcgttcgcctctgcgaggtcctcctcgggcgtgagaggcgggcggtccggcggcgtgg

SEQ ID NO: 40526 - DNA, 438 bp, Zea Mays
gtattattcttgtattctaatggttagtatgggccgtgttggccatttcatcttgtaataggccgtatgggccgtttgttgaatacagtaggctctagtgtagagtataaaaggatgtaactctgacagaagagggcaacgaagaacagaaatacttacacccaaattcttctgctctgaatattcttcttcctcgtctccttcttctctggaagtttccgacgacgatctccacgatcgctggttatgacaccatggccccacccatgatctctcccatgaaaccgctcgtccgtttgagccgatcacgacgcgacgcgctcagcaagacaacaacttcctgcctcgttgtccgtttctaagtttctagcgcctgctctctcgtccctcaacaccacgacgcatttgcacatcgctgcacagcaaccgtgccacaaa

SEQ ID NO: 40527 - DNA, 318 bp, Zea Mays
cctgcgcggcaatatgtggtgagaattcgcccacctagctcgccttcatcctctccgcgtatagctgtttgagtaacatagtttagagcactctgggggccgcgcagggcttatgtcagccatggcgccgccgtggggaggccatcaccgccgtggccggacctctgcgcgtctccaactcgggtatgaacctgcctcgcggactcacctaaacttccgcttcatgtaacactgctgggagctaggaatggcgcgcgggtcgcggaatcggatgtctccggtgatggcgtcgccgtactccggcgaacgcgccgttgc

SEQ ID NO: 40528 - DNA, 291 bp, Zea Mays
gcacagcaaggcatcgagcttgggcaagcaacgcagctagagaccaggcagataaggactccaccgcagatactttgaacctcccagggcactctctaaccaaaccaaccaagcaatgtcggcataatcgtggggctgagatctttccttttctccatatcatgaatcagcttcggccaccagaacctgcactcaaacttttgcctctttctactaccgacgccgagcacacaggaaacaagcaagtaagcagaagcctgcccaaactgagacaaattcagttaactgaca

SEQ ID NO: 40529 - DNA, 289 bp, Zea Mays
aggcggaattcctcatcggagggcgccaccaccatgaagtccgcaccataccgtgcctggagcccatcgccgtgtaattccatgtaagtcgccatccactgtgtttgtgttggtctccattgtcttcggcgtgcccacaaattaagctcgggtaaccggtgttggagggtgggatagccggtaatggcgtcagcgtcctgggtggggcggcgccgggttgggtcatcggggtaagcaagagagggagagatgtagggggtgaaatcgtgatccttggagagaaaacgaa

SEQ ID NO: 40530 - DNA, 364 bp, Zea Mays
caggaggataatgccggcaattggactaagactcggttggatgaagaatgtgaggtggatggagcgtacaactttgttggaaacatggttaagccccagttggttgaggaatatgaggagacaggtaatgacaaggatggattaaatgatgacggtgaacatgatcttggtgagtgggggatgactcagttggttgaagaccctgatgaaggcataagtgacgatgagttgagtggtggcactgttgtcctaattgacaatgagatcttgacagaagatgagaggggtgcaaagtcaggaatggataaaagagatacgaagttgggattggaagaaagtatcgaggggttaaatggttggatta

SEQ ID NO: 40531 - DNA, 418 bp, Zea Mays
gagaaacaataaacagcaaaaggaaactgcagacccactaaccaaagtttgaggcctttagatcatctatttgcctctgaagcagtagaggattccattgcatcaaatacgaaacttgatcggggacaggggcgccacaagatttcaactaggccgaaacagagttgaggacattctgcaagcccaaaagttagcaagagaacccgtttgtcaacataaataacacaagtcaaagatcagctcacctggaggttagaaagaaataagggaagtcacagagctggaggcatcgacgcactgtctgatgatagagtgtcgacagggacaatgttgagagcatcattcggggagacctcagctccaacaacaggtagtggattcccagcatccgtatcactggcctctaaggtgaccggac

SEQ ID NO: 40532 - DNA, 609 bp, Zea Mays
cggatgattgattactacatgcaaagataggatagacgatgttccgccacctcggcgcggcaggggaaccggggaagcagatgttgacgaagaatttttgtaatttttctatgccatccccctcctcccctattgtgtgttcttcgcaaggttcaaggaagcgctaagcgctgagcgcgcgctagggtggtgaaaaagcttaagcgcgattaattgtgcttaagcgtttttgttaaaaagagaaaaaagacctgatattgggccaccctgcagcagcccttaaccccctcctcctctcttcatgagtctgcagcccactaagcccacctgccaggaggctcaactcaaaaaccctctcccgtgactgctgcctccttccacgccccgcgctgccgcctgtgctctctggctccctctcccgaagcctctcctcccccgtgtcatacgctctccagctccctctcccgaagcctctcctccctcgcgcaatcttcacctctctaccgcgaagtcgctccacctctctctcaccaatctgctgcctgcagccatcgccgctctgttcgctctctctctacctctctcttgaagtctctcctcttctctctc

SEQ ID NO: 40533 - DNA, 364 bp, Zea Mays
cggtaatctagagggaaacccaacaacataagccagcattcccgattaaagaaaagggctctatgattccaagcatcgttatgccgctgagcagtgaaggaagcatcgaggtattgttgtggaccgagcaggacaagattgtctctttcaagcacgctgctaaacttaaccagaacttgacccaggtgcgaccgctggatatcgcgcaccccaagccgtctgtgctccacaagatattctctaaccacatccctcaccgccgggaaagtaatctcatggtcaggtaaaggttgaatgctgataatagcccagtcctcatgcaatggcgggaggcgcctagtaactgacctggccataatttccc

SEQ ID NO: 40534 - DNA, 450 bp, Zea Mays
ctctactacttcgcctcgccgtgatgcgattgatgagctggggcgagcactggggttatatagtgtggggcacgtgggcaggcagagtccacacggtggaggactttatccccggaatcaggtgacaacaacccacccgaatccaaggggaagactccgagtcggcatcttcgtagtttctgttggcgctccttgattctcttggggaggttgacgacgcccgacaggtgggtccctcggctagagagagcggtagcggcacgcgatgcgtaccggctgacaggccccccccggtcggtacggcaggctactcggttgggccgagtggtggagggaagtcgtgggctaaaagcaaggttaaggcccatttcggttaactcttccttctttctttttctttgttttgtttccaatttcaaatattcaagctagattcatatccctattttg

SEQ ID NO: 40535 - DNA, 419 bp, Zea Mays
cacagcagccgatcttaagtatcatatacaaaacaaacaccgtcaaaccattcctactatattctttaaacctgcgtaaaagtcctcgacgccgtagggccctcagcgccgccttccttgagcgaggattgctcttccgctcctgtctccaccgcagcgtcctttcgggccaccgatctctcaaggccagcaaggtcctccacctcttcatccctcatcacctgcgaagacagcacaacaatgttttagacaacaagcgcacacacacaccaccatcgacaaagacaaacatacatgtgccggtgctcggtcgaccctctctcgaacaacgtcgcggccgtgaggacgccacatcctatcgtaaagcgccctggcagagcactttagcacgtcgtcttcgatctagaatacaccagcat

SEQ ID NO: 40536 - DNA, 345 bp, Zea Mays
aaagtgagtggttctatatcaaggccgatgagaagaagagggagaagttgaagacgctagtgatgagcccgctgagtttaagcttcgggctgactaggcccctgtgccgcatgtcgtcggggtcaccattccaacaagctgtatcagaattcagggtggtggccgaacagattagcaatagagatttggtgcaggagtaccttgccaatagggtatctccaacattgagtggttggagtatgccaaagctgaaaggaacgaagaagaaggatgaacttgtccgattgccctatcgtttcaaatttgagaaataattcaaagggccatgccaagagtggttagaaa

SEQ ID NO: 40537 - DNA, 351 bp, Zea Mays
gagcaattggcattacttcccctatggtgtcatgtttcccaatgggtgtcagtgatctgctccctttcttggaaacctacgtggctattgaagtcctcgtgactgttcggcgtacaggtgagaggcgaagggttgcctcttgccctctttaaatagactgcctacctgtgaccggttccttcactcgctcttgctatccttttgcgttcttcttcatcttccactcaccagaaacacaatggctgccaataaaggcagcaagggcaagcacggccaaggggagggaaagcgaaagcgccctccgactcctccgtcggaggacttcggtgactcggagttcttggatgagca

SEQ ID NO: 40538 - DNA, 467 bp, Zea Mays
gcattcttggggccattcactgaattggagtaagtaggcacagatgccttcaagtgggggcaattattcttgtagtgactggggtctccgtagtgccaacaggcattagctggaggttggttgcttgcaactgagggggtttgaaaggagctttgaccttgttgactgaaacatgatggagtgggtccagctggcttgttgaagcttggtcccttgggtggaaacccaaaggatcgaattctctggtgcctgtcctgctgctgagctcggaggacctggaactttctcttgaggtgacccttttcttcttcccttgccctttccacttgtatggccttgtttcagaggtgcgagaagctgaggaaatcttggctagcaaggatagtcttgagttctggtcttagccctttcaagaaacgggccatcttcttggcttctgtgctgacatcgtcaggtgcataacgagc

SEQ ID NO: 40539 - DNA, 288 bp, Zea Mays
ctcaaaacggctgcaccgcgtggtcaaccaaagccatcgacaggagtggtgcttggtgccgctgccatcattcatgacctgcacaatcgatcgggcgttaggaattgtgcatgcggtgatcactgggtggccatcgtagagttctctgtctcggcgagtgattactgcgggtcgctggtgctcgctgcgatcaccggattctagccgagctggtggtctagggtagccactgggaaacgatcagtggagcttgcgcctcgccgtggacccacactacatcgccagcca

SEQ ID NO: 40540 - DNA, 366 bp, Zea Mays
aaaaaagttcctaagcaaggaggcaccgtccgggaagggcactgagccccataggagcgaaaaacaagaaagaaagggccctattttccccgacaagactgaatgtttcatgatctttgaagggtctgactaccatgcgtcgaaaaggcactagaagctcgaacggcgtgaggtattctaggtacgataggcggtcccaactctcttgaatggttcgaccacgccatcaccttcgatcgctccgaccaccctgagcacgttccgtggcccgggcggtacccgcttatcataaatcccattgttggattagtatgactatcaaaaactaatggacggaggaagcagactcaatatcctttactctgc

SEQ ID NO: 40541 - DNA, 1530 bp, Zea Mays
gtggatcaaggtgatcggtgagtactagcatatgtgcttcacacggcacggctcagacaagcttggctgctacctttttgagttttggtgctttttggggccatatatacaaaattctagcatattattaccagtgttttcttagacggaaaacggtagacggacggtgaggagctgtctaaggtttagacgtgtttagacgtgtttagacggaattaaacggcctaaacggtatgttactgtagcatagtttcagcaggataaaaaagattttttcctaaccttttttgaagcaaacatgaagcttttgttgtccttgtcccaatttgagatatgtacctgaaaaagaagcgagatttgttagtatgtgcccatgtgatatgtataagggcccataggacataacttacattttatgacattccaatcatttggattgacaatagttccatactcccaccctatgtcatcgctattccgcttaagtggttgcttgtccactgctggttgagctgatggattggaagccgccgatgacatcctacatgttgcaatgcacaatcaatcatttgcatgaagtacactgtctgaccctactagccatgttgtacactatctgaccctactagcattaagcctaagccatgaactaacatttaacgacaagaaatagagagccatgaagattgaagcatgaactactatgcataatcaggagcaaacagcaaactataaaatagaggaagcaagaggcatccatacctggcaacaaacaaaggatggggagtccctgcttcagcttcctgctagcgcgccccctctatccctgggcgtgcgtgcctctcttccactgcagaaccactgctgagatgagaggagattgagaggagaggagaaggaggagccctgggcgagcagaggagaggagggaggagccctacctgggcggctgggtgagcagaggagaggatggaggaggcagcgccggcggctgggcgcgcagaggagaggaagcagcgccggcggctgggcgcgcagaggagaggaagcagcgccggcggctgggcgcgcagaggagaggaagtccctggcggccgtgcgtcgtgcagatggataagggtgcagaggcaaaaaaaaaaaaaaaacacgagggaactctagctttggcgcgaaaaaggcccgccagaggcctggtttcagtttccccgcgtaaaataacaccatactctaaacgggccttaaaacggcctgaacgccgtccaaaaccgtctacaagccgtcccgttcagcccgttcaggccgtttagacgccgagttgaccgtttagacggttgacccgtttaggaaaccgcccaggccctaaactggacggtggggtgccgttcaccgtttagaccggtctaaacggccgtttaataccgtttaggataacactgattattacatgcctggaagtggggtctttgtttcaggtggctggagcagccacccctctgccctacacctaggaccagccctgggtctgagtgg

SEQ ID NO: 40542 - DNA, 272 bp, Zea Mays
gcgagatacgaaacaccgacagttggcgtgccaggtatgggccttgtgtgttacgcgttgagatcatccaagctctggatggcaagccgtgatgacaaccgacctcccggattggtgatccattttggaagtcttgacttccccttcaacgatgaaggagaagtggtcagggccccgaaagcacaaccccctcgcccgaggagtctaggcatctctgtgggggtcggtagaggctcccgtgtcgaatgcacccccggagcgtccatctgctt

SEQ ID NO: 40543 - DNA, 370 bp, Zea Mays
ctgctacctcttataattcgtatgtgctaaaaaggtcttatacatgtggttttgtaatgtttttggcgactcatgatgcatgtatcagatacttagtggcagactgaaactgagggattcataattttcatggaggatgtagaggtttttaaagtgattcataatacctatcaaattgaagcttcataaacggggggattcattctaaagaaccaattggatcagatacttggtgatagactgaaactgggggattcatggtaagcgtggggatgtgggggaacatgatgcacgaagaaagtcaccaacactgagactgaacaatacatgtcgaggaggatcaaggtaggaggggagaggagcagagcgt

SEQ ID NO: 40544 - DNA, 475 bp, Zea Mays
gcgtcttcttcaaccttgcctcctgcacgtgaacagcagggaggaaaaaatggagctgctgctgtgtggggaaggagagggacgagcagaggggttgcttgcaggggaatggaggctagccgacgaccctaggcgtagccatggagctgtgctcggccatgggaagggagatggcagggggcgccatggccagccggcgctgtggccaagcacggaggctccatgagcacctagcagaggtccggccatggatggatgatggagctcgggaggtgggcgtggaggtgagggagaaggctgctgctgcattttggaacagagaggaggagaagtggcgtgtgggggaagggaaggagaggggtgggctgccatttattgagctggagctctggacatgtcaggtggcagtgagcagtggcaggtggaaaaatgtggacattgggcggccatttttggcattttctgcttgttttcg

SEQ ID NO: 40545 - DNA, 340 bp, Zea Mays
cttcttgcggccttcctgctgctctaagtagacagtcttccccttgacctgcctaaaggggcgaggagggtcctcgtcatctcctccccctggcaccgacacattcttcgtgcgcgacatcctgacctgaagactgcatatgagagagagaaactaagcaaaagacgataacagtcggtcggatatcaaaagaatggatgtctacctggaaatctcacacgagaggagaaaatctaggcaggacacgggacgactcacgagcaggcgaggtcactgaaatgacagaagaggtgagcacgtattagtcacatagtcataagtatatgaaatgtgaatgaat

SEQ ID NO: 40546 - DNA, 292 bp, Zea Mays
acagaaggggcgcgtcaggcatcctcatgaagtgcgttctcccgtccactggaaaacaacttctggaggaggtccatgcagggcaatgtgggatacatgcagcatccagaacactagtcggaaaggttttcaggtcaggattctattggccgatggcgaagaatgatgcagccgagctagttcagaggtgtgaagcttgccaatacttgtcaaagcaacaacacatgccagcacaacaactacagaccataccagtaacttggcctttcgcatgatggggactggatatgat

SEQ ID NO: 40547 - DNA, 420 bp, Zea Mays
gggtacggccacgacgacggtggcggccgggaagcgttggactccgtcttcgccgacattgttggtgcggaggctgccattgtgcgcccgcaggtcccacctccgcacacaacgcaatctcgtttttttttctggttacagtactgtgtaaccgagctcctctcctctttgatgaatcaatcaactaattgctccactgctgccagttcttctcaggtacccacgccattgcctgtgcgttgtttgcgcttctgaggcctgggcatgaggtggggacaggatgaactgaatgaacaatccttggcagtgacatttgagagttgagactgattaatgttggattcctgcagctcctggcagtcgctgggcccccgtacgacaccttggaggaggtgattgggatcagggggtcggccaatg

SEQ ID NO: 40548 - DNA, 668 bp, Zea Mays
tgaaagtgctgactaggttcagtgttatgggtgtgtctgtgcatctgtgaggaacttgagcatgaaagacacgtaggggatgtccatgtactgctggcaccctgggaatacatttgcactgaatttgtgcaagtccagggacacctgccccactttagctgccataaaagacatggttcagtgaacttctttccctgagttccttgcagcgtgtggtccctatgccttcaggttcgtgtagcttctcctttccccagccatcattgtgctctatccagagctgcacgcgccaaactcctatgagttgtgaccacgcctaccaatttgtcacctcgccgtggccaggctaactcaggcaagtattggtctttgttgtgcttgttccatgtcccccttagatcagtgaagctcaccgagctgttatccctaacgatactgtcatgttttggccggaacaagagcgcaccgccgcagactgacaccgtgaacagctccgccgtcgcccgaccgacttgcttcgtcctcggccggttttccgcgagcataggaatctaggtatgtcactgatgctacccgtggtgtttggttaaactttactatagaggtggctcaagtacgtggtcgccgtacttagctcgctgtcatggccgtcggcggcataggtccag

SEQ ID NO: 40549 - DNA, 764 bp, Zea Mays
gcacgagataccgcccgggatacctctaatcccacgtctggagcgttagagcaaacattcatcatatcatcaacagtcggttccaacaacatatcttcaggaatgacatcctcaagggcctgatcaaaatctgttatggataaatcttgaaggctaacaagagcagataaagctggataaggaatatcactatcccccctactacctctgtaacgccggttattcttgcgaattagtggaacttcttcttcctcttcttcgtcctcatcaaaaatgcagacaaaagatggtgcaggatcacacccactggggtcagcttcaacaggatcacacccattgggctcaacttcaacaaggttacacccattggggtcaacttcagcaggatcacacccattgggttcagctggtgcacagatacactcattagggtcagttggtgcacggtcacacccattggggtcaacttcagcaggtacaccactagtggggtcaacttcagtaaagacctctattgggacttcttcgcaaacatgagcagaaggtccaacatcctggtccaagcacgacagtcgccgaagccgtctctttttcttcttgtcctcagcaggcacagctgggcggctgacttggcgaagacgctttgggcgagtacccttaggcttccgggtgtccactgttttgacagtctctagtataaccgcaacaaccattgtttcagcaggagccgagtcagatgattctccagccaacatatcaagtac

SEQ ID NO: 40550 - DNA, 1695 bp, Zea Mays
tgacaacagcgggcgaggcgatgacgcttctcatgacggggatgcggagcctcgcgtcggggtcgccattggcactgatctggttaacggggatcatccggcagctaaaggtgaggatcatattaagagaagagtgctgtgaatttgaatgatgacttggtctcatgtaatgcagaggtagtggaaggtgctggtgacgaggacacaggggacggagggaacagtggcctggcatcgactgctgatgtgtttgctgaggagatggcaccctttgaagatgactacgatgatgagatgttggaggagcagcttgttggagatgtgattcgtgcttacagtaatggcagaaacttcgattcagatggagtggattgggaggcagaggatgagatggagttcaatgacgatgctgacaatagtgattttatggatgatgctgacgatagtgattttatggatgatgcttatgaaggtggcaattccaaaccaattcaaaatcatgctaagttggaaatacaagactgggtgaaccagaaagttgttttgagtggagggaggtgtgaggcgaggggcgagggggatctggaggaagaattggatgtgggaaaggaagcagatgaggaggacgtggaaccaaagagtgaagcggctccaggttctgataaaagggtcttgcagttagaaatcctaggttccgatgaggaaatcaaggtgcttgaaaatatgagtagtgccccatccaggaaggcgtcagttcaatcgaagttaccaactattccatcttgtgttgcatggagaacccgatcatcatggggggtaaatcaagatagactatcgtacgatacatattttgaggaattatctgatgagccaaaagaggatgatgatgatacagaggtggaacttgatgaagttgaggatgacaacaatgacgatgacagtagtgatgcttatgataaagatgacgaagagaaggaggaagaggaagaagaggctgaaagaagaaaacttaataacaggatttgcacatccgatgaagacatgatcaatattactgttcctacatcaagatatgatatgtttaagaaaaaaaattcctcaagatatgatattgagtgggtggaggatgaagatgcaagtgttgatatgttacagccagtttcctttaagaaagatagcagctggaagcctgtggctgttggcaacgacacatttactgagcaacaaaagcgatcacgatttacttgggagcttgagaggaggaaaaagcttaagcttgagatgaagacaaatcctttgcatgagcgggatttggactcagatccgaactcatcaggttctgaccagatcagaaagtatggtttcaaaagtgatgggagtcataaagttgataggaaaaagaagcatacatcgcccaaatcgggcaagaaacccagcagcgcaatcatactaaagcggcagtctcttttgaagcttttggtagataaaatgagtggtgataaaagtttagcatcttttccatttgatcagaatcctcagcttcagtttattttcaaagaaatgcatccattggtattttcatttggagatgaagatctagtagcagctgacaggccagagcaagatgttggattggatatgttatgggctgactttgactttgctttagagtctgagaatatcggtacttattat

SEQ ID NO: 40551 - DNA, 280 bp, Zea Mays
cataggttaaggttgtaaggcaattttttccaccatacagttgctaaaaagttggaaaataaagaattcaaaacaatagatcaccttttaaacctcaaatgacgtttctgtgatatttagggcattgtattcacacgagagggtattagagtacaactagcagatgaaggcgttattgggctagttaatgaccttttgtgataccaggtttcctataatccctttattcaaggcatatctagatggtgtttatgtccactcaagttcaacatcgcacatc

SEQ ID NO: 40552 - DNA, 498 bp, Zea Mays
caccagcgcaaagtcgagtctcagaggaaacctaaagaccctccgcagtccagccgtacgtggacgaggccttcgcaggcagactccagtcaggacggccgaagtcagcagcaggtacacaacatcgccaaccaacaccccgctggtgaggccccccgccgccaggagtatccccccagggccacggaaacggaactcgtggtcggggctggggacgtgcgcagcagccacacatattttactgcttgttccacggcgaagactgcgcgcaccctacaagagactgcccagagacgaaggccaccagagacaggatggcacgagcgcaaccagccgacaaccctagagttgtcgcgcacacatatcaacaaccccctcagccatacaaccacggcccccgctccacatccacctcaccacgcataccaacaccaacaggaggtacaaaatcgtacctcccccactcccacctccacacccgcaacagcaaaacatcca

SEQ ID NO: 40553 - DNA, 521 bp, Zea Mays
gtgcggtccacttgccaccgcaacgaggaaacggagagctgggaaaggggagcattacgcagcggagaggtgatcagctggatgccatggcgatcgtgctcctctcccgcctcgtcgtgctcctccagttggtggacggacgacgccatgattgggttgggacttgggagttatgactgggacttggccggctgacagtggcaatagcagctgcaggtgttgccgtgctgggctcctttcagctgactcgtctgctctggcatttattacactacagatcgtgctcgatgggccccctctccccactggccactactacaatagctatcatataccaaaggccactagtttctccctacctcaccaataaaacttgaaccccaaaaaaaaaccaagcactccttgtgatacgagaaagaacgacgtccacatacatggaatgaaaggctacagagcgctgagtttatcgatggcaatagcaagtgtctcttttgcttctgaggacatgcataatttttttt

SEQ ID NO: 40554 - DNA, 357 bp, Zea Mays
tatgcggacaacaggcggagagaactcagatttgaggaaggagacttcgtctacctcaaggtctccccgatgcgtggtgtcagaaggttccaagtaaaaggaaagctagcaccgcgattcgtcggtccctatcccatcattggcagagtgggacccgcaacataccgtcttgaactaccagaatccatgtctgacatccacaatgtgtttcacgtatcccagctccgtaaatgcctgcaagcaccagaaagtcacatcgaagaaaaggcagtgcagattcagaaagatcttcagtaccgtgagaagccagtaaagatccttgattcagcagtccggaagacccgcacctcagaagtg

SEQ ID NO: 40555 - DNA, 374 bp, Zea Mays
cggaccatcgggaatagctaatgaaggacctgatggggagctggacccttttaggccccctccttccatgaaccttgctgaggaatggtcccctgcagcaagaaatggagcaacaaaggatgaagaagactagaatagtatagtctaagtgttatacttatgtaaaataagtagtaaagtcaagttgtacatgggagtctgtataattattatgttttggcaatgtaatatgatggtgtatgttgtcatgttatattttttcaaatatttatttgcctcagatgccatcacagactcgcgcacatgatggtgcggggacatcctgcggtggggaggatactcctaacccgccaccagtaccaccaacattggct

SEQ ID NO: 40556 - DNA, 354 bp, Zea Mays
cgcgaggaggaaacagaggagatggagcgggaggtgagcctgaggctgaggctgctgtggattggggtagaacctgggggatcaggaccagacgagctagggtttagtaggtacgacctggggatccgctgatggtgagcacgtactccatggacgggcgagctctagggttcatggaagcccatggagaggaagggatcacgacgagagatggagtgagccacggtggagaatggaagccggcgagaagggaagggatgccgcctcagagcttgcccacgcggaggcgagccgtgcctgctgagatctgcaaaggccccgtcgtcgtcacgtctacctccgggcaccttgcgc

SEQ ID NO: 40557 - DNA, 327 bp, Zea Mays
cgcgggtaaaaagaagagcgagggcgagggcgacattgacgatgaccaagaccgagaggttggaaaaccgtatctcatcgcgggtaaaaagaagagcgagggcgagggcgacattgacgatgaccaagaccgagaggttggaaaaccgtaactaccagtatgtgcttttgggggaaaaagaactctgccattcgtagatccgacacaggcggacttcatcgcgtcgtgattaagaagaagagcgagggagacagcgatattgaagccagacattgaagccggccaagatcaacaggatagaaaaccccagctaacagtatgcgttgt

SEQ ID NO: 40558 - DNA, 295 bp, Zea Mays
gttggtgagaaatatgcatatggatgggggtgggagccctaaattttgtttctagatgcaggactggttttgactatactggattggctgtatatttggcacgaaacagattggtagactcactggaccgcaggaagaacaagaggaataattcactgttatcgtggataaactaaatttgtattcaacgaaagcaagtgttcatattccagttgattgcatagttgctgtggtctagatacgctacatgtcacacatcgatcttgttgaaagtgtgattgcaaattgttaggtg

SEQ ID NO: 40559 - DNA, 396 bp, Zea Mays
tgttgactttgttttcaagaatatccagcctttgaaggatagagtctaccctgcttacctgtacactagtgttaatgacccctctcgaattaccaacaagtgaatatatgaggacgtgctgagttgggttgactcaatgctgagggcaaagcttcgaatgctggtgctcccccttcgtattctgcctggaatcttcccctgtggtaagcgctgttgcatatgagttcctatatttgtcatgtgtagtgtccttaatgtgttgttttgtcgccgcagaggtctttttcagagttcatatctaacccgcctgtccaagacgacagtccagggcatagagcacgaccttcttcaaaagatattgaagccctcattgctatgtaccgaggtctccctgaa

SEQ ID NO: 40560 - DNA, 531 bp, Zea Mays
gaggctagaatgcggcggaggagttacaaagttagggttcatgcaccaagaaaccattgacaaagatataagtgagcgcattaagtcgggcgcaacgggacaggctggtagctaggaccagttttcggcataacagagcagaatgtgtcgggcagtgtttctggtcgggtacacttgagcgttttcaaaagctaaagtcgtcgatcgagttcactggaatgaattcatcaagcaaagacatgaactatacaagaacacataggcaacgagcagatttcattcaactggtagaagaacattacaaaaggaaataaggaccgactcattatgagccgaccttgatatccttgttctgctactactactacaactactactacatatacaactatactacactactaattatgtcggtggcatcttgccaccagcgttgtcgctgtcgccactgccctcgtcgttgccctcttcgccatcgtcaccatcgccatcgccgtcgtcgtcgccctcaccatcatcatcaccctcgcc

SEQ ID NO: 40561 - DNA, 391 bp, Zea Mays
gtcatcaaagaagacgaggacaaatttgcggatgaaagggcgaagaacagaatttatcaatgactgaaaagtggacagtgcattggtgagtccaaactacattaccaagaattcataatgtccgtggtgtgtccaaaacacagttttttcgatgtcatttggatgcatgcgcacctgatgataaccactccgtaggtcgagctttgtgaagaattttgcctcgcgaagttaatgcagcaactcatcaactactgggatgggaattttatccttcactatcttcatgttaagttcacgataaccaatacaaaatctccaagtgccatctgcctttttgactagcaatacatatgatgagaaggctgatttgcattccctgataatgtcttgc

SEQ ID NO: 40562 - DNA, 446 bp, Zea Mays
gtttggtgacatatttaaagttgtatgactcaccaaatcattccgaaaagtggcgacatttgatgtagccaccttctttcctttcttcatacttttgaggaggtcagcatttatggtgccttcatctatcaatttctgtatgatgtttttcaccacaaagcaatctttaagggtatgacccaagatacgatgatagtggcaaaaattcggttccttgaacttagaggcctcttctggccttttgggcttagggagttctatgaggccaaactctcttaagcctatgaaaagatcatctacttcttccacagggaaggaatatgtttgattttgtcgctcactcaaagttggccttctaggagctgatgcatcacctctgtgttgatttctttcaatggcgcccccagtttgcaattttcgagggactactgtagcctccatggcct

SEQ ID NO: 40563 - DNA, 658 bp, Zea Mays
ggaggatggggaggagtaggcatgggcgggcgccatggaggcgtggagatgagcgcctcaatgtcaaaggcaacacggatgtgaggcagtcgggggacgagctgtagtagcgcgagccagaggtgatggtggcatcggcgtcggcggagtggacggcgtcgaggaagggccgcagcacgaaggcggggatcacgacggctagcgaagaggagggggagaaggcgaggcggcggagtgcgtggagggaccgagggaggtggatgagagcggacttcaaccagatcgatgcacaaaaaacgaatgaaaagttcgggtccggacatgcctacacgtcacagagcgttgcagtacccttgaaacgcgaggagaccttcaaaggggttgaggttttaaggaaaaatataataaccattgcataaactcaaataaaatttagtttctactaaataacactactgcggaatgtgcattcaataccggttgggaactgtctacaacattggatttccacccgccactctgtgtccgagactaaagcccacaactttagtacacagactaaagcccacaactttagtgtcagttgcaaagaacgatactaaagctagtaatttagaatcagtttcttgtcagatcctgtactaaaggtaccatcttt

SEQ ID NO: 40564 - DNA, 342 bp, Zea Mays
gggcagatgcagcatgattcctgggtattcccaggaatacccaacttattctgcaaaatactatgtaaacatagttttatgtttttttatcgaaatgattttttagttcttgagcagcccattaaactctagctacttcttttttctagtactgcactttgcattagcatgttcaccgtcttcttgcttatgaggtagcccatatcaataaccttgtcacaatatgatatatggctttatgtgtgtttggaagctatcatccacttacccagccaatgtactggctagccaagcattggtgaaggatttggttggctaagtgtagctgtgtgccagtgtttt

SEQ ID NO: 40565 - DNA, 502 bp, Zea Mays
aaaagatcttgcatagggatgaattcggagcactgttacgcccagtcaccgtacccacttgcgttgtgatgtggccggacggtcctcgccgtggagatcgccgttcaccgtgattgtgccatgccgtaatcaattcaccacgtcgtcgcaaactgcaaggactcagccgtgacctttgtagacagttagccagtgagtgcctcgttagcgacctccggtgactattcccacttctcactgtgcgtgcttccccatccaaattcaacctcctcgtggtcgtattctataaattgatgccctagtctgctccgctagcttgttgtgaagccagagcaccagccctcgcctccgatcgtccaccgtagcgccctaattttgtttccccccaaatccactctccgcgccaccgtgagtcacctcgtcgtggtcagccatctacaggtccgctctcgccctcctggtttgtgtttcagcactctagcatgcttgtgatactcgtcga

SEQ ID NO: 40566 - DNA, 501 bp, Zea Mays
aacatccagccaaaaagccaacactatcatttgtacgtccaaattatcgaccaacactctataggaattcgtgacgaccgtctggtgtagtggagctttggaatggatggggtaggtaaggtagcaagcttgcaggttcgataaaagaggatgatagccttcagacaaaaacgtatggctgccctgatcgcctaactgcgccctgaccgtgtctctgatgcatgtcgtgaccatgccctgaccgcgtctctgcttggccgccctgaccgcctccacaagcggggataggagaggggaaggaagagagtgcagggccttaccgtgagaaggcggcagagagagtcttcgtcgactttgcgctccgccaccacatagttactccacgtcgcctcctccgtcgttagggctgcgccacatctcgctcttgcgtcgtcgccatgatccgatctggaggatagttgatcggggttcgaaccgggccgtcaaggatgggaaaactcc

SEQ ID NO: 40567 - DNA, 830 bp, Zea Mays
ggactaaaacggatgaagatatattgacaaaagcacagcgcttggcagcaaaacgtaatctggaaaccagtgagttatccttcattccttttgatccgaaattcattgcttcaaattgtgaaaagattgggattactcttggtagtactgaaaataaggtgctacagtccgtagtttctattaaaaatattgagattgataggctcacggtagccgcaaaatctacattaccctttagtgtgaataattttcacgatgaggaggaggtcgtgttagatgatgaattatctcatattactgatagatgggacgatgattctgagttgtgtggcttagatcgatgttgtgagcttactgtggcgccgcgtagaaagaaggcgaataggtctattttaaaggggaaggttaatcgcccttccaaaaagccagttacaccctccaaaattagtttgaaatgaagggaattttttggaattgtagaggactaggggatttggccaaacataattacctatcccaacttgctagagaacatagcctcgactttattgctctcatggaaacgggtcgtagatctttctcggaatccactttgagacatttctgtggtggtgttgattttctttggcacctaatgccacctagagggaggttaggagggatgatgttaggcgtgaatccgggtgtctatgacattggagctatagacgagggagatttttattgtaagttccgacttcgaaataaagaagatggcttcatttgggccctttttgctgtttatgggccagctcaagatgacttaaagagcgatttcttagctgaatttg

SEQ ID NO: 40568 - DNA, 531 bp, Zea Mays
gaagatcgggcacccccgttcctatcaagtggtatcaaagcactcaggtattaccgtcaggcttaccctagtttagtttaggtttttcatcctataactccagataattgccatacaaaaaaatattccgctgtcctgtaaccctgtttagccttgcaattttgtttcagattgctttgttgaatttgtgttcgtgtcgagtcttgttgctggtttaggtcgtgtcgtaatcgtagttcaaccgctccatcgctgttatttgtttccgctgctatcccatccaccttacccagattacaagtcgagacaccacattactcgatttgccctcgctagccgccttgtgtgaattctcgccacgctagccctagattaggttgcaagccgtattgcattgcagcccctccttgtttcatcatctagcgcttacctattgcttataccagggaggtttgtgcccctgtgctctatagccgccgctacggttcctaccaatttgtgccctagaaaaccataacttgaggtaccttc

SEQ ID NO: 40569 - DNA, 1032 bp, Zea Mays
ctgggatccgctttccccgccacactgcgcagctgcacggcgtgcctgattattcggcagaccatgcgacatgcacggcatgcaacggcgtggcgagaatagcgcttgacgcggtcacagcgcagctgggtgcattcgccagccacctgtaattctacgcgtacggatactaaacgtgctcaagtacaacttgtctaatgcatctatatgctggatacaggattgacatgattacataatgctgttatgcaacattctcccctctaatcttgtcaatcttcagtcttccactctgatgattccgagttgccttctcagttcaatgaaccgaattctcccaagaggcttagtcagcatatctgctaactgatcttcagagctgacatgttcaattttcagtaccccattgcttacacactcacgaatgtaatgataccgagtgtcaatgtgcttgcttctctcgtggtacacaggattcttgcttaattcttgagcagaccggttatcaattagcagcctgaaactcttctgttcagtacccagcaggtcccctagcagtctgttcagccaaacaccctggcaagcagctgttgcagcagctatgtattcagattcacaagaggagagagatactactctttgcttctgagagctccaggtcacaatgttctttcccagaaagaaagcaaccccactagtgcttttcctcttttcaagatcacctgcatgatcgctatctgagaaaccaatcaggtctgcaattgctccttgtacatacttgcagccgaactgtttagtgcctgcaacatatctgatgatccttttaatggcagcccagtgttcagtgtttggcatttccataaatctactaaccatcccaactgagtaagcaagatcaggtctggtattaaccagatatcttaagctaccgactacacttctatatctggtagcatcaagtatgagttcaggttttccaggtgttagctttgtctgttgatccattggagtatcgactggattacatccttt

SEQ ID NO: 40570 - DNA, 901 bp, Zea Mays
gccaggagcagtgtctgcatgcatgtttttgcttgttatacgttctttctaccctttgcatatggttgttcaattcatctttcttttctgatcatacagccctgagtcggggtattatctcaagaacagcgtcttgtgacctcgatctcacaaagaatataggaagtcctccatataaactacatttgtggaaacaaaaaattgaaaatcatgtgtaatttagactcttacaggcgaaatatgtaaatgctaattaactaacatattctgtcgtttagcaaggaagatgcattgagatgaatagccaagttcgttaattgtccaagcataagttgcactccattgccattttttgtagaacacatgttggcgcataccataccttggttaatcacgctgtcactgtgatatgttagacctactatagccaatgaccattatctcaaataatgatgtgatgactgaatgatcaggctaattattgcataatgcgtatactagttccgtattgatttttctgcggttattatcctccttcatattcctagagagaaagggctgaattttggcgctcatataaagaacataaccacatctctgttatattactctttgtacgtacatgcaagatatgttacacatacaaaaaagatgaggtggatatcatgtatctgtatagcttgaaatgctgaggtatattgatatttattgcttttgacagtttcattgacatctccatcgctatggaaatcatttcatgcactacatttctgaagaaacttattagctaggtctaatggattaacaatgcgcatacagaagggctaaagattttaagtatatcatcacagtacttgtgtttattttgtattacactttatggtcttttttttgcgtattg

SEQ ID NO: 40571 - DNA, 379 bp, Zea Mays
gagatgcatggcaaactggtggggttatttcttgcccagctagaaaactagcgaagggcgcgctgtctggaacctctgtacgaacatcgtcacctccagccttagagagctctagcaagaggtcctcaggaataacctcctccaacgcgtggtcaatggcgtacattgtcatccctggagggtaaccagccccaagatagcttgatctaggacattgttgttggccatgctgagatgattcctattaaccaaggagggcacatcctcttcatcctcctcctcctcctccgaaacatacctactaactctagcgccaccgcaactctcaacgtcatcttcaagatcgacattcgccgcgtcatcaccaaggtctggagca

SEQ ID NO: 40572 - DNA, 748 bp, Zea Mays
aaaagataacactcagattgttaggctgtaacacacgccatgatgtacaatacaacctaccctcaaatggtgagattgctgccattattgttggcgactacacgatcggggaatacacatatgatgttcttgtgcatgatagagagtgcggcctcaaacgtgtttcatgcttgcatccagcatacatgcctttgcaatacccattgttgtttccttacggtgaaacatggcttccatcttggtattaggtactttggtgatgacgatgttggttcatcaaaacgaaaatacgtcacgatgcttgagtttgtaaggagacacatgcactacagattggacgagccaaacccatatacgtgttacggtagattaagtgatcaaatagatgtcgatgtgtattcaactatcgagggaaacatgctacagttcatagcaagccaccaaagcgatctacggtcagaaacagttcagggcatagctgacgccattgataagggcttcgttagtgctgattcgattggcggtagggtagttgtacctgccagcttcactggtggtagaaggtaccatgtcatgaattaccaggacgcgatggctatatgtagggtatacggaccacctgatctttttgtgacttttacttgtaataccaagtggagggaaatagcagatgccttacgctttgaacctggccaacaaccatgcgaccgttctgacttggtggtgcgtgtgttccatatgaaagtaa

SEQ ID NO: 40573 - DNA, 472 bp, Zea Mays
gagagagatcggctcctctaggttgtcgtgtgggtcctccgggttgtcgtgtgggtcctccgtattatcatgtgggtcctctgtagagtcgtgcgtagccgtactcctggtatggcatatcttctcgctcatttgtcatatggacccctgtagttagtccatcgctaacaccttcatagtagcgtgcggtgggtcccgcgggtcagtcccatggtgtggtcgtgcgtggaatggctctgtctatcatcacaggcctatgtcacccaccggcgtgcgtaggcatacaccccggtatggtgtatctattgcattttgtcgggcatgcgggtcactgtagagactccggcgttgaggcccctaccaccggggctgactagccccatatgtcagtgagggcttgcttgatagggacttttcgacactgtacccgaggtttggatatggtttggtggtgacacatcttgtcatgctt

SEQ ID NO: 40574 - DNA, 332 bp, Zea Mays
ccacgcatccttcttcctcctcccatatcagacgccactgcttgtaccaccatgatgtcgatcctcatacaccaagccgtcacaattcgactgactaaatccaatttccttctatggcatgctcaacaacttccgtaaacggagatcaaagattctgggatatcttgatggatccaatgtcgtccctatgaagaagatcgccacatcaacgattgtgtgtaccgctgaagtccccaatatgacgtatgctagttggtatcgccaagatcctcaacaactattaagtggccctttctcatcaatgatcgaggaagtcactccatgcaccctct

SEQ ID NO: 40575 - DNA, 271 bp, Zea Mays
cagaagtcgcctaagggtgcagccggactaagcacaacaagtgcgcaaaaatcagaagtctatcgcgaagactatccgcgcagaagtcgcctaagggcgcagccggactagcacaagcgcgaaaaaacccgaagtctatcgcaaagactccgcgcaggagccgcctaagggcgcagccgacctagtacaacgaaagcagaaacgacagcaagaccaactataatcacaccggcacagcataaccaaccataccagacaaagtacacagcgc

SEQ ID NO: 40576 - DNA, 274 bp, Zea Mays
cattaaaacgtgacaaccagaggcggcgccgcctgctcacacggcggggaacccgccggcaaccgcaccatggccccccaggtgataatttcttcccccagaaacgcgctacataatgtggaggtcggggcgaacttgagaatggtggatttaccgtcggaggtgttgggatttggggtgcccacggtgtgacgcggcttcgcggcggtgccctgacttaggagagaaattcatcgcggtccgaggcttctctatgatccgtgtttgtcgtgtg

SEQ ID NO: 40577 - DNA, 448 bp, Zea Mays
ttagtgccagattgtttgtgatttgaatgccgttgaagtgtcttgatttcgtgggagaacagtaactttcatcgccattcatggcggctgtggaaacgatgactgagtgggcacgataacgcggcggaggctgggcgtgggcaggtgcagtaatggagggaggatgatgatcggacacgacagctacagatgctccacgcatgggctgaagcgggaggcgagaggactgttagacaaggggccagatggatggctccaggcggcggcgcaggagaaatggctcccaggctgcctcgcattagcgtgaaagaagaaaggtggagtatagagagtactagtgggacccacatgtcatgctaatgagtggaggttcactagcaaggcatgataaaatccaacgcagggtgaggaggttcgatcgtccatttttttataatttcgaaattca

SEQ ID NO: 40578 - DNA, 596 bp, Zea Mays
gtcgctgcaaaacgtttatctgtttggtgcggtcgtcgctgctgggtggtgccgtgtgttggacgtttacaatttagccggaaagagaggagaacgagccgagcgcgagcgcgtgacggcgtgagtgtgaactcagacagagagagagagagagagggagagattaaagcactgcaagtattaatatagcgcggggtggtgacattgatatgctaatgaggagcagttaggtttaattaatcactcctaacacgcagctacaggcctagaactagaagcaaggtttgcgacaggtgaccgtacgtgtgacggcttggtaatggcgggcgttttgctgcgttggcgccttggtggcgtcattttctatcgcctcccgcccttaattggccactgctcatcgcggcggtgcgcccaccattgctttgttcgcttctcatcctatcttttttctttcctcctctggttcctctcatctctcgtcttttttttacgttccgggtcctcctgcgatggtcatcgtcaagatttttccccgggtatcgttgcttaccaagtcatagctagtatcgctttctcgcgccgtatctagttttaac

SEQ ID NO: 40579 - DNA, 286 bp, Zea Mays
gtttgttaggctacaactttgatgtagagcattgatctagtcaccatacaaaatctggaggaaatttgccccaaacatgatctgtcagaccgactgaaggagttcatgatggtacagtaaccagaaagatctgttggttcagtgaaccggccgccggtgaccccgcgcgtggattcacgccggtgaggtgattcgtgcgcacttaggcccggataacgcctcggggtagaaagatcttcaccgctattgagccatgggcactgttccgtccggccgccgtgtccgc

SEQ ID NO: 40580 - DNA, 444 bp, Zea Mays
atgtcgagtgcatcaacagcgacactatggctcatcaaagctcttgatgatgtgagcctctacaagaagccttgacacttctaaggaaggtacactcgtgatgtttctcaaggcaccaacccctcctcccgtgacaccatcactagcatcgatccctcctgccatgactagtatcaatgttgacttctcttgtgtctttattactagtatcaattcactgccctagctaggttttgtctcaccacatctaaacatagaggaatactaggatgctgacaacagtgttgtgctgaggtactgcaccatgaacaacatcctcgaagaggcatcatagccttgcttagcttcacgataactagctattgagcttcatctacaaattaaggagtcagccacctttgccaagaccaagaagcactagttgtggaaaagcgtataattgag

SEQ ID NO: 40581 - DNA, 585 bp, Zea Mays
aaactattaatacatggtctcttctgcaaaataggcacgacaaaggggtacggtgcattatgagcgcccagattagatcattcatcttaaatgctcccacactctctaccggccattggatcataaatcgatggcaccgattaggtcttcttctaagtgaaccggtacgaaaccaggtccaaccgatccccatcccacgtctcacattagactaagtgaagaggtatgctttagcttgatctccaccgtctggtgatagatcaacgggcgaggaccctcatcaccacaaaccagtcagacgcggcggcgccgccgagcgcccacggtggatgcacactggcgttaggtgatccggcagcccgaccttcccacgcggatacagacgagggctaaacgaagcggggagaccaacgatgctagtgaggtagcccttaccggacatggtggtggtagtggccctgcccacgagctcttgcggacaaatggtgaatccttgttccggtgagcaattactaggcggtccgaagcataatccgcccaggtgacaccatggttgtgacctccaaggtttggtgaagcacccag

SEQ ID NO: 40582 - DNA, 289 bp, Zea Mays
ggaacacaacgtgtgcacatggcacacaatgtagtgttcgatgaaggacgaggatgggcatgggacaaggcggtggacgacgacacgactccaacgtacgacgactttgcgggagctgagggagtaggcaactcttcttcaccgtgaaggtctaccctagtccccaagtctccaccgactctagtgccacactccccagccatgacttcagctacaatgagctcttcgccaccatgctctccatccacaactccggctacaacgagctcttttccaccatgcactccag

SEQ ID NO: 40583 - DNA, 281 bp, Zea Mays
ttgtggagcgggataggggtattggctgggctataaattcatgatctatagcctaggattgtgaggcggctgcccgagcccgggtggaagagctaagcgtagccctggaaaatctacaagggtataataatgctctgcacgaggaagtgcatgtgctgtatgaccagctacatccgaacgtttcaccggaagttgcgacgatgggagctggtgcatcaggagcagcttgcggaggaccttatggggagttggatctctttggagcccctccttccatgaac

SEQ ID NO: 40584 - DNA, 323 bp, Zea Mays
aacatgatgtcaagcgctgaaaagcaatattcagttccacttcctccgcagcagttttatgtgcctaggacttctcatttcgtgccgatgcagggttttcctcagtatctggctgcgcatactcctgcaccgactactcctatgccatctcagtttggagctccgcgtctggctcacctgacggctcagtggggttcttctgttaatttcactccgggagcttcctcttctgcgggtattttcggagcttatgtgctacccgctgcggatggcagagagcaaggagacatggtgacaggtacgatttcagttgattcgtttgt

SEQ ID NO: 40585 - DNA, 383 bp, Zea Mays
cttctccacggggatgtaaatgggcaaaattaatcccccggcgggtaaacggagtcgtggacagtgaagcattcctcatcctgttccccgtggggacccgttaaactttcatgtatgtagtaattataatttaagaagagataaagatccttgtcagggattttatcccagcgggaacgggaaaaaaggtcccccataaacatttgtgggaatcctcatgggagaatttttttgtcgcggggacagagatggggagctattcccaatgcggaattcccgttgccatccctagggacgacatgtttaaggtcaactcctagtgcaacaaccagtggaagtgaagcattacactgtaattaggttccttaaaatttcagttgttt

SEQ ID NO: 40586 - DNA, 513 bp, Zea Mays
aacgattgacaccaaccaaggcccctactacggcgtcacccaggagccacccgcaccgtacttccgtccgaggagagcaaagggcaccaagacacgaaggctcctgaggtggtggtgaaggctatgcaataatcatcacgtcgttggtccactgggaggtgcttcaggaggccccacttgtcagtgtaacacacgactgtattatttggtgtgtaccactcgcagggaacatggtgttataattaccccgttatgcggatattcttcgaatatagtaggtggacgggggtaggaccgtactttggaccacctacccccggaagaccctataaacacccatgtcctgtagttggatgggacacgtgtaacgagccgctagagttcccacctaacatcttaccacgcttcaatgttccttatttttttctgtgagtgttcgggcccacctgaccacgtgtcgcccatgatttggcgtccatcgtttgtgcgacgaagactacgatgcctcccaag

SEQ ID NO: 40587 - DNA, 379 bp, Zea Mays
aggggggaattttgggtcgggatcctcggtattcccagctccggccaagctccgccgcggctctggttaacgccgctggcaatggctggagggggaagtgggcgcttagcccttggatgggaatggtgcggttaggattagatcgggggggccggacaactcctggccgtccaatctagacgtgcgggtaggattagatcctgataccgattcagccgaagcaaacagtgaccgttgatgcagtatccggtggtggagatccgatcttgaactcattaaacgcggaccgtcggatcgggatccaaggaccctgattgcataccgattcgcgcagtttggagtttaatcctggcgctcggtttctaatcgtgcggccaga

SEQ ID NO: 40588 - DNA, 386 bp, Zea Mays
caaccatgagatcaggattgatgagcttttagagacatcagagaaccaaagacaatagcaacatccattgaactaaatggatacactgtttaaagataaaattgataaacaatgtcatgatcctcggagaagggggtatgagaatgaccagaattgagagatttaggcagatcaacatccaatacttgagaacgggttataacagataaccagataatagggcagaatcattaaaggatatagagatttggatgataaggccacaacatgattcacaaggaaaagattaccagatccaggtgaaaagagaggtagtcgcatgagatcgcttaggatgagcatcagaaaggttatgaagattcgggacaggatctattgaaagaaac

SEQ ID NO: 40589 - DNA, 272 bp, Zea Mays
cttgaattggacagggacttaccagagagggttggtcacggacgaactgttcttggcggcgcggcagactgaattggggagaaacggcgtcgcggtgtactcgggtgaaattgagggcggggattgaggctatacgacgacaagagactctagttttaccgtgctcaaccaatttggaaagagggggcagagatagtgcgaatttaggcatcaatcaactcacggtgtgtgcgaagttcataccccgccgtggaccaccgtgctatttatag

SEQ ID NO: 40590 - DNA, 290 bp, Zea Mays
agcgcgcgggactctattggctgggtcgaatcacgtccgcagatcagccacagaacggcccagatctcatccacatgaaccggtatgcgttgttctaatccaaccgtccatacttaatctaacggacccgagttcttcgtctacttccggttggttcaaggtggcgccgccccacggtgtggtgctcggcgaggttgcccggccacagcgatgccccgcttctactacggacacgcactactcgatgcgaacaacaagatgaacgaggtgaggggatattcacctcggat

SEQ ID NO: 40591 - DNA, 523 bp, Zea Mays
atttgagggggggtttccctttattttccttaaaaatgaacaaaacatgtggccagccaactgggacactacaaggcccggagaccgagcggcctagtcggcttagggctttgcctgggcacttcaatgcctcagcgagagactgcagggagggagcggggagatggccgagcgaacggctgggcagcggtggtaaccgctgctccattctctccgggttcctcgtacagagaccacagctcactcctctcttctcggtaacagtctcttgcccaactccttaagtggatccccttcccctgtactctctctctgcaggaaacgcagagacagagacctctacagttccatccaatccactgttccggcgagaaatccatcgatctgctcgattccaggtgtcctggtctcgtccgtatcgtcggttgtgtgttgttctcgatggtggtggtgtggcgctgttgatgtcgtgccttggtgctactcattgatcctctggtctttgtccaccgtggcctagtgc

SEQ ID NO: 40592 - DNA, 1115 bp, Zea Mays
cactcgaatcgacggtcacggtcttcgttggggagatcgaaggtagctggttcttcggctagggagaagaagacgggctcagctcgggttgtggtgcacgacagcgagttgaggaggtgccaggcatcacggtgcggcgtcgggctcgctttatagacggggaaaggcggttcgcctgagaaaaatctcagcagacgactgtgcgcgacgacccgacacagtgtggcggtgtcttcccgaggctggtcggcaacttgcacggagctgggcacgacttcggtggtgattgaggtgagtggctggtcttcgattcggctgagcgcgcaggggcttgccgggctactgctttcactgcttgttgcgtcgtttcaggtcttctcagctcgacaacatggtctcaactcccagaccagcatcatggcgtgtgcgtgtattggttctggtcgggggaggtagaagacaacttgttttacttgagcaaggaagcatgtgggctagccggactgcacgaagaatcatctcaagattagcagtgaggctgcttgcctcggcaactgacttctagaacaaggtcgagttatggcgatggaggttggtgcagcctactggttcacatgaacgtcgagtgggccggagacaaccttacagttcccacacggaagcttcttgccatggatgtgtgtccttatcgtcggggtgtcagtaatggtgagtaggtgctactaccagttgactgtgagttattgaggtacggcttgctcgagaggcttccgaggcaaggaacagatagctagcttatcttctggaatcactgtgtcaaggcgtgtgttgctcctgggaagaggagatagtttgctagcaagtgcaatgttacgaaggtgggatccttgtgcaaaagttgcattggagtagagtgttgacgttagtacttgagatggattaatttatagctagcgagaaaggaggtgaaatacttgtaaatagtttgcctagtcacttgtttactaacatcatgcgtgtaaaagttaatatatcaggatgattgcgaaataaaacaagattttacttagcggcgaaaatcagggtgttacaaacctaccccacttaggtcaaat

SEQ ID NO: 40593 - DNA, 430 bp, Zea Mays
aagacaggggccactgcacaagaatctctaagacacagagcactatacactggactgtgggtttaattctaaaaacccgaggggctcattagaaaaatagacaccgcgaaggggtatcctcggatcctagccgtctgatgtaatgtgagcgacccagattaaatcccaagtcaatcgaacgaaatgcagtgcggactttcggattaagatctaacggtgtagatgtttatgtatcccgatctaatcgccaccactggatagcctacggtcgagatcagattgccgaagcggtatggccagactcaatcgcacccgtccgtcgtctatcccatggttctcaacccctctcagcactatccgctcctggccattcattctaagatccacgacagcaatattttcttcctccctgaggttacgccatggtcat

SEQ ID NO: 40594 - DNA, 477 bp, Zea Mays
caccaagaggaatacagaggaagaagaagaacacaggatagaagagttatgcggcggcttaatccttcctgaggtctgtcctttttaccatccagtttttatatgttgcttacgaagccaattacaaggcccacggccctttactgtacccattcggcacctgatacgcgcgagctcggccttctcttccgtcggcccattatctgaacgtgttccagctctgttctggcgtcttccatctgttgtggctgttccagcctcctgacattatcctccccttgaaatgccgcttgaccccaagcggccgcagttggaaattgagcgtgcaaggcttcttcattctcccaggtggccaacgcatcatctccatgagaccacttgattagtaccggctgaacctgcttgtttccccgcacaactaccctcctgtcaagggcctgcaatggtacctgaagatgactcaaactgtcaggtaga

SEQ ID NO: 40595 - DNA, 420 bp, Zea Mays
caacgatccaatcggagacttggaagccaaagtggaacaacatcagatggagctatgtcaccaaaatagggtgtgagcacaggacagtcagcgcatagctgaattgtcaactaacgtcaggcgcttgcaagacgagctttctgaacgggatttggcggttgattgggccgtcaactcacgttcggttgcttgggaccgcaaagcaaaagctcgagctcgtgtgactgagcttagtgtggccctcgacagcctgcaagtatactgcaatactttacatgaggaagtacatgtactatatgctcgactgcacccggacgtacctttcgacgctgctacaatgggagtcggactgtcgggaacagcaaacaaaggactagatgaggagttggacctttttaagccccctccttccatgaactt

SEQ ID NO: 40596 - DNA, 348 bp, Zea Mays
ctcgtgccaatgaagacgcacacagtactaaaggccttttggcacgcttcaacatcactatcaatattcaccttcggccttcggaggtcgaagcgagaccagatgggacgctggataatttccttgatgtcctcccttttctttaaatcattttaacgtaaaaccactcctccatccaggccctgggccatcttttttggaatgttggcactgggtggcttgcattggggcgagcaataaatccataacaaccgaagttgttgtggtactgttctttgccagtagccttcgtctcatataaaagctcgtgcatactgcagaagcacttcgcgtttggctctagcccct

SEQ ID NO: 40597 - DNA, 900 bp, Zea Mays
tgctatagatctaattggttatggctattctgataagcctaacccacgtgagatcgaagagaacttttatacttttgagacatggggagaacagctgaattcattttgtgctgaagttgtccagagtgaagttttcttcatatgcaattcaattggaggtatgccagatgcacacatgatttgacaactattgccaatgctacacagttatgctgttactcagaatagtgttcgactatttatttattattacaagggacctatatggctagttaaatatacaccctctttatattttcgatttcaaaaggttataaacaacatcaagtgattatattagaatcatatttaggacccaccagtcactatggtgaggtccagatctttttttgtttgtcagaacttctggcatgattctctttttattgcacctttactgtcattatctttagtcatatattacattattcatttgataatacatttgaggtactgatgtggcagacttagcatagcaacgctggttacttggtacaatctgttgaaagacacatttccaatattgaaatgctggatgccccagcttggtttttttattttatttgttactgaaatgagtaaaatcatgaatctgattaataaggctgatgtcgttattatttgatatgatttgagtatcttaaacctttgtgttgttcttactatgctgtaggagttgttggtctgcaggcagctgttatggaacctaaaacatgtaagggaattgttttattggatatttcactaaggatgcttcatatcaaaaagcagccatggtttggaaagcctttcatcaaatcttttcaaagtctcctaaggtaacttgtattttgtactcccatcacaattttttggtgctag

SEQ ID NO: 40598 - DNA, 391 bp, Zea Mays
ttgggattgagatcacggttatccggctaggatatttcacagtgacttgctcaccgtggcacacaagggggaactggtctgtgaacgatgacctgtggcttgccacgacccttaccacgtggaggagtggttattatgtgtcacgaccggaaaaacaacgagctccgatgatgccagcacgactgaccgcggcgggacacgacggccggtccggccagcgactggattcacccctcaatggatattttcatcccgccctgatgttatctactattcccacggcacaaatctcccaggcaggcgcgaattgtggtggcagatcaccggcgtcgaactcacggcactggagatcttttctggtcactgtaccatggtaatcctcatcagaagt

SEQ ID NO: 40599 - DNA, 283 bp, Zea Mays
ttgtgtggccgtgtgtggtgtgctgctaccttgctgttcacctgacgtgccaccttgttgggttgcctcactggctggcgcctgtggagttgtggactgtggaggacaggattacaggacgcgtgtgactttgtgtggattgtggacgcgtgcttgctgcttggctagttgtcgattctggtttgtgcctttgtgctttacggtaaactgataatgagtatgattgtaatttgtacgactgtatgagagtctgagactgtgatgtttggtctttctcggaaat

SEQ ID NO: 40600 - DNA, 608 bp, Zea Mays
ccaaaattcgtgccaccgccgtccgggttcgtgcgcggtagggaacggataacgccggagttagataacgcgtacgtggcaccataccccgagcccagccggagttgttcaccggcgaccaccgtgactcagtgagctctcgccgcgctgtcacgcatgccgtgatttctctcactgtgcctcctaccgacgtggtcggcatgcgctcgcgatggtgtccatgaccatgtgatgatcgtcggtccgtcgtggctataaatagccatgtggtccacgacgaaggtgcgaccatcacacacagagcgttgaatcggagccccaaattcacgctgtctctgacccctcctctcaaattgagtctgcacggtgaagctatagcttcttacggtcgagtagcctcaatccccaaccccaatttcaaccagagccgccgcaacaccaattctccccttctctgtttccggcgagcacaagaatccgcgctccgtggccagaccactctggtaaggctctgcctctctcgagtgttgttctagcagcgctgtatgcacatgaagctcaccgtagtagccgtttaaccaattaggccgtaaatgattgggaacacg

SEQ ID NO: 40601 - DNA, 347 bp, Zea Mays
cgcgcatccccagctccaaatctgttggctcctcctcccacagcgtggggagcttcggttccaccagcccctcacgaagagtcccaaaggagaaggtattgttgcattccaaccagagtaagagagtaagaggtaacttgatatcgctgatccactgaccattaataagggattgggccaccattctagaggaggtcaacttcttgtccacctttgagaatactattggaactaaatccttgatggaattcccgctcaaccacctatctatccaaaagagagtatcattaccgtttcccacatgggcgattactgaaatggcaaccaacgccttgacttgtggctgc

SEQ ID NO: 40602 - DNA, 306 bp, Zea Mays
acgtgaaggtaaaagtgcagcaaaatctaatgatacacctaggatgaggaatagatcatcggggcgtacacaatgcaaagctggaataaaattaaaaaaatatatgatgaaaacaaaatggttgtagctacaaaaattgaactggtaaacttggagcataaccatgagttcataactgacgaagcagagaaacaacatttacgttgcaacaaaattagggatgctgagttcataaattttgtggatgcaatgcatgatagtcgagtgccgcaacattgcatagttgatttcatatcagaaatgcat

SEQ ID NO: 40603 - DNA, 376 bp, Zea Mays
caccttgctctggccgccaacttgcctttcccaaattcggagccaccgcttgcagacgctataaattgagtgtgcggcctgcttcattagcctgttacaaagccaggacaccaactctcgcccccgattagccaccgtagaccgcaaatttcgttttcccccccaaatcggccaaaatcgccgccgtgaggcatctcgccgtggccagccgatttcaggtccgttcatccccttccgtgccatgttttagcatccttgatagttaacgttgctcatcggcccaaccgattgagcgctaccacgttctggtatgaggaacatcatctcttcgccgcggaacacccccgagagcacgctcacgtcgactcactcttcc

SEQ ID NO: 40604 - DNA, 434 bp, Zea Mays
cagccaagatttcctcagcttctcgcacctctccaacaaagccatacaagtggaaagggcaaaagaagaagaaaaaggtcacctcaagaggaaattccaagttctccgagctcagcagcaagactgacaccagagagctcgatccttcgggcttccacctaagggaccaagcttcaatagaccagctagacccactccgtcatgtttcagccaacagagtcagagctcctttcaggcccctcggtcgcaagcaaccaaccgccagcaaatgcctgttggcactgcggagaccccagtcacttcaagaataactgccccaagttgaaggcacccggacctacctactccaactcggtgaatggccccaagaatacctcggcacctgcctccaaggcactcccctccaacagtcagcagagcaggacccagtatta

SEQ ID NO: 40605 - DNA, 427 bp, Zea Mays
atctatagttatctagttagcagagtattagcatcccgaacaatagcgtaacaacctgctacaattccgtctaacaccccccctcaatcacacccgatcaaggttgagattgtttctaaatttagagagtcattgctgagagatcagtttggtgaagccattctccacctgatcatttgtagagataaaacgtatatctagcaattgacgtataacttcatcacgaacaaagtgataatccacctcaatatgtttcatgcggccatggaaaaccgggttggaagcaaggtactttgcacccatgttatcacaccgccatagacgtgcagtttttggacttaagatgtgtaattccttgattaaattacgtagtcatattaattcaacagtagcatttgccattgctttgtattctgcttcagtgttg

SEQ ID NO: 40606 - DNA, 596 bp, Zea Mays
ccaagatcaaccaataaccatcgtagccatataatctcgacagtagtggtagcaagagctcgaagttctgcttctgcactagatcttgatacaacaacttgcttctttgatttccatgcaataggagaggaactaaggaaaatacaataacctgtaatagagcagcgatcagtgcgatcacttgcccaagtggcatcagagtaggcatgaagccgaagaggaatattacaatcaagcctcgagatgtggttccccgtaagtatcttaatacacgaagcaagtgaccataatggtctgaagtaggcgcagaaacaagctgactcaatatatgaacatcatgtgcaatatccggtcgagtgatagtgagatagactagactgccgactatataccgatatctggatgggtcttgtagtggtgaaccatcatccggacaaagttgtaagtgaatatccatgggtgttgcagctgtacaatcatcagtcagaccagagcgagcaataagttcttgtatgtatttagactgtgatagataaccctttgtagattgtagtacctcaatacccatgaaatgtccaagagggcctacattagac

SEQ ID NO: 40607 - DNA, 473 bp, Zea Mays
acgtcgacgccagtaagtcacgatgggcccccatatccagccttggtccgatccaaagacacgacctctccatgcccattcgacgatgccttctaacaccctgcgaagactctccgacattttgtttcgatacccccatctttttcgccccacgggtcacttgggaatgcaccgatcgaagtcaccgacgcttcacagggggcgacctcaacggagactccactacagctaaatccaatgctgcaaaataatctaaatcatcctccgaggattcgtcatctatccaagaaaaagtgctccccaactttccaccctccaaagaccacgacccaacatcatattccctagacgcattactactaagaaacaccgcatttccatgcatcaaaatatcatcatttgtgtcatcatcagggtttgcttgcgcaggcccagacgccggaacctgcgcatcaatcgatcttcagtatcac

SEQ ID NO: 40608 - DNA, 880 bp, Zea Mays
cggccggtgggccctcgcgttcagatccgtccccaacccagcttcgcaacaacctccgctgcgtacgctgtttcggtacgggagtccaccagatcaacgcgtcgcgcggctccacgcggatcgatggctcggccagggatgtagcgattcgcccgcctgcccttgcggaatccgcgacaccatgaatcctgagcaccgtgagccgcaacaaaatgaccgcaacaatcgtgagcttcgaaacaaactccgaaccccactccgtgatcccctctggccggattccgccgcgacactagaaatcacgaggattatgactccccaaccagccgaagccgtgtatagcttggtgccgtaggcgcatggatgggggtgcggggagatgtgattgccgctgccgccattgatctgcccatatgtgatcctccagcctcgacaggtggtactggggcagcgagggatcccaccacacatatatgtggcctcgttgtgctcgattgagggttggagcgcttctaatttctcgccggaattggtgcttcaccctggaaccgcatacagccgtgggccggactttctgcgccgccatcatcggtgagaacctctcctccgatctcgcccttatctctgctccctgttgcatccttcgattgggatttgtcacatcgagtcgctgcgccgctccctacgacgagggcgcgaccgcgtgtgccctgcgccgtcgcgcgtctccagcagaggaggaagacgagtagagatgagctgagagccgtgagcgaccctatccgtgggatgcacgatcgacgcgggtgatgaaggcggtctcaggcctttggatcagtaacggatggtcccgattagaagaagataacggtttggttag

SEQ ID NO: 40609 - DNA, 857 bp, Zea Mays
gttcattctacgcaatcataacgtggtcaatacgcataggagtagcgtagcaaattatggagatactcccagcttcagtcaaaccttcggtgatgcagtaagaccttcacggtagcatataacgcaaccgtgttggaaacttgtactagtgcttttgtaatgctgcttttgaaccaagctcgtgcaacgatagatagccagacaaatggaatccagaatcacgtggtcaaacggtaccaaatcccaactggtatagggtccccaggtcagccttagtcagcattacatcgttcacggttctgtgtcaaagcagagcggttgtaagcgtagcgtgacacgccgctgagggaaaacacgaaaaaggccatatacaataggaaactgcaagatacgtgtgccgtgcttgtgtcgtgcacttttgctgcaaatgtaaaggttagaaggtacatgaagccattccattgatcaggttagcggtcgtaagagaacaaagaattaccccaccattgctccagcagaaaatataaaaacagaagtccaaataaaataccaatgtaatatcgtaatttcattccgagacatgccaaccaccaaagctcatatagaaacaaaggaagcgaacaactgcattccaaacctgaagtcgttttagattttctagattcataagtgtgtgtgtctatcaatctatctatctatctacacacgcatacatctgcatgcttgcgcatctgtgcgtgtagacgtggtgtacatatctaaatacatagctttgctatgcacttaaaaaaaggtcaaaacaacttacaattcaggatggaggaaatattttttgaaagcagcacatcatctttttt

SEQ ID NO: 40610 - DNA, 361 bp, Zea Mays
tttggaatttgaattaaggtatgaaatgatgaggaattgaaccgatacttcacgaataggtttatatgggtaaatatgagtgaagtgtttgcttggtatgaatttaggcaaagaaaatgaaatttagggactcggctcggaattgatcgcttgaaacagggaattgagtgaaattgaagcctggtatatcggattggcgtgaaattgcgcgaatatgttactgaaggtgttgtgaaggtgcttgcaaagtttgggtttaatcggagcaattttgagtggtttgggcatttcaccgagcatgtggcgtgcgatgttctagggttttggagaaatgcctatttgagaaagtgaagccctccca

SEQ ID NO: 40611 - DNA, 409 bp, Zea Mays
gaatcccacctgaggctccaagagatggtaaatgaaccgtctgagctgctaacttgcatcccaatgtttcctttagtaaattattattccaactcattatctttgtctcttgaagacatacaatagttgccccagaagagagaatcgtatgtttcacacttgcccttttagctgggtcatttagccccctcacattccatgacagaatacaacagttggcattcattaatcaaaagaagttcctctactaatccagaaagtgccacacatgaggaacacagctgaagaaacaggactcgaccagccaaccagcgtcaacagcatgcttccagtcggggacatcatgcgactcacaaccagaattatgacagaccgaaccacagacagagcaagccacaagaaaaaacac

SEQ ID NO: 40612 - DNA, 320 bp, Zea Mays
gttaaatcagctatgaagacacaaaagcaagtcatggaggtagtggtacgccgtttgttagttgcctctcgccctggagatgaaaactatgatcgtggtgccgaggtcgtgccaactgtgcatgatgctcaatctgcccccaatatgatcccattaagtgatcctataaatgattgtggcactcatgacctctacctagattctactgagggtatccctttggcaggcaccccctgcagtaagtctctttgcagctggtaatcattttcaagagttcctactttgttcttttcattgcctccactttattctttcctcgg

SEQ ID NO: 40613 - DNA, 273 bp, Zea Mays
ctaccttcatgaagcttctgtaaacaacagcttcattttgctcgggtgtaggggcagcactgtctcccccaactctcacaatagacatgccacgaaagtatcttcccttcatggcatcaatctgactctgtttgatggatgattttccaaagatggtatggcttggccgccagggccgatctttggcatcttcattcctgctttccacatcgaagtcatcgctatcaccagaatcctcagacagctcatctaatatttcattcgtaatctttt

SEQ ID NO: 40614 - DNA, 312 bp, Zea Mays
tgttaggtaagcagaggaagaattccacctacgagacatggtggaacaccagagaatcctcaggcagattgaagctctggacaaagaaatcatagctgcggtgaccctcagattctctgatctgcgtgacgatgagcacccgccgcatctcgttctccacattttctagctcagctgagcgaggaaggacacatcagcacctctggagccttgtatgagtatctaggatgctagggggctgtcaactccagattcttcaccgctcgggcatgaaggggacgagttggctgcaacagggatggaagcacagca

SEQ ID NO: 40615 - DNA, 423 bp, Zea Mays
gttgagtttgatgaaacaaatgggtctcaagatgaaaacgataatcttgatgatgttggtggagctcaattgagaaatgctatgaaaacaatggctattggtgaaataaagccaaaagaagatgatgatgatagtagtgtggttgtcattccatcctcttcaaccctaaatgaagaaaatcaccaaagccaacaaaatgacgaaaatgtggatgctcatgatcaagatacttcaagtcattcggtccctcctcatgcttcaactagtaattctaaaatggtatcaagaatccatcattctattgtgaaagatcaccaagtttatcaaattgtgggcgacattagtaagggtgttcaaactcgctctcgtatagcttcattttgtgaacatttctcttttgtatcttgtatggaacctaaccgt

SEQ ID NO: 40616 - DNA, 365 bp, Zea Mays
tcagggaggcattccttttgagtgcctttgtggcaagatgtctgattactccagccttcatcttttttagtatgtgtgttatgtgcttcttgcggatcgtgagcattctaagttgtctgtacagtccattgagtgtgtcttccttaggtacaatgctgagtataagtggtatcgctgatgagatccaattgctcgttagatgcagatttctcaagatgttgtctttattgagactcatcctttctatcctcacccctcttaagatatttcctctgcatccttcattgaccttgtctttcccatctatccctgactctgtgtgtctcctgctatgcaccgtctatgtcttattcatagacttttgt

SEQ ID NO: 40617 - DNA, 438 bp, Zea Mays
catcaaactggctcctgtatttgaatgtgtacttcaggtagaccaaaccaccttggctagacccagcagcagtttccttcgacatctcccacccacttgtgagtagccacactctataagcgatatgcttttgcactaagtcccttgtgcctatgtaagtacatattgtattgatggccatttgtcatgcttgtatgtcattcccaagggcagtggatggcctcctaatgctgaagcgagaccatataggacgttgaataatccccttaatatcttccctttcagccaggtcgttcttcacgtagaaccactcctacatccacgccccaggccatctcttccgaaacgtcagaactaggtagctcacctcggagcgaggcacgaagctgtaacaaccgaagttgttgtcatattgctcctttccggtagccttcatct

SEQ ID NO: 40618 - DNA, 391 bp, Zea Mays
cggctgaagtacacattcagatatggggataaattcgatgaaccaaacgatgactggctaaaatgcatcgaagttacaagtgatgaactgcttggatcatattccaaggcggaagacaatgcattatccacagccttcggaggccggggaaaaaagagattgaacagagtttttgatgccattggttttgtttaccctgactaccgctatccactgcgaggtcagggaaagaagaggaaaactgctacttcggccactccagacgagcctgtgccgaaaggcaaaaagttaaaggttcttacccaccggccgcgctatattgaaccggccgtggtgcctgagtttggcggggaggcttcttccgctgctgaattaagagaacctgctcctc

SEQ ID NO: 40619 - DNA, 738 bp, Zea Mays
gccagctttgagaagagtaaagtgtcccttggctttgaggctctggcacgcgctcaatatcttttgaggagaaaaccatctttggagaagatgcccattcttgaacaggtgtgatgttattacttctacatgaacaagttcttctgaatagtaaatacaaaatcatgccataacttattcattggtggtccagattgaagaatcacttgaagagcttgcgcctgcttgcacattggagcttctaagcttgcctcagacacttgaaaattctgaacgcaggcgaggtgctattgcagctctctgtgaactgcttagacagggccttgatgttgaatcatcttgtagagtccatgactggccttgtttcttgggtcaagcaatggacaaactattagccaatgaaattgtggatcttcttacttgggatactttggctacaactcgtaaaaataaaagatcgttggagtcccagagccagcgggttgtagttgacttcaattgcttttacatggcgatgcttgctcaccttgcatttggatttacaacccgccagactgagttggtaccctctttttctcactcgcttggcaacctgtagaagttgctatctctttgcattatttttaatttgttttacatctgtgcagatcaagaaagctaaaaccatctgtgaatgtttagttgcatctgagagcacagacctaaaatttgaggaatctttctgctcatatcttcttg

SEQ ID NO: 40620 - DNA, 638 bp, Zea Mays
gagaaactggcaaacctaggccacagatcaagaaaggaacaaaaactactgactcgtgggtatcctccatggggacggtgatccctttcaagactcactaggagcacaactcctttaacgacaaaactccaatttcaaccaggtgaagcaagtcggattcagaaacaatagaggcatacttacagtagaagggaagctggttgttggggtcaattaggggaatgaagggtattgtattcccccgcttcttcttcctgggcgccatgggacctcgctgatgaaaggaatcaaacgcaaacttgagggcaagcaggaatttcaggaaagtgtttacgacagagaaaagcagagttagggtttgttcgctaggaaactacaagcaaggatgtatatgcatgcaataagtagggtgcatcacgacagacgaagtaactcgaaccaaacctcaattgagtggagtaagttggatggatttgttagtcagatctatcaaatgaattcatcaaacagagttatgagccggatctaccagtaaggcttgtcagtcggaattgtcagttgggttaattctattggatttatcaggcgaaacataagtcgaacagaatgaggaattcaatatcaagcacaacaaccac

SEQ ID NO: 40621 - DNA, 282 bp, Zea Mays
gccatccttcttctccacaaatagcactggggctgcccaagatgaggtacttggtctgatgtaacctttctctaacaactcatcaatttgcttcttgagttccaccaactctggtccggacactcgataggctctcttggaactaggggcggtgtcttggataagctctatggcaaattcaactttcctttcaggtggcatgcctggtaactctttagggaatacaccggggaattctgacacaattctaattgccttaattggattggactttttgtcatc

SEQ ID NO: 40622 - DNA, 349 bp, Zea Mays
tgctaactaaagctccacaaactctgtgttaataaggtcccaagtcgacgaacagagtactaaaactgggtttcagttggctactccaaattcagcacacatttgtctgacagagagtttagaggtgttttactctcacttttatgtagaaccaagtccacccctctttataaaacatattctctgtattatgggctccaacttttctatatatttcttagtcgaacaccccatgatttagtcacaaaaggacatcaaactgggcaccaaacactaattttcagtttttagtgaattgagaaaaattcagtttcagtcacaaggcagtccaactttgagcaagttttac

SEQ ID NO: 40623 - DNA, 502 bp, Zea Mays
cttgcttcaatgacagaaactccttcttgatctttatcaatccagctggaatatggtagttcctgaactgtgtactgaactctgcccaagtaatagtatcagcagcatcgtgggcagcagtataagaatcccaccagtcagcagcaggacctgtcagacgacctgaggcataaagaactttctcccggtctgagcattgggcaatgttgagcatcttctcaattgacttcaaccaatcatctgcatcaagtggatctggcgaactagcgaaggtcggtggcttatgactcataaactcccagtgcttatcacgaggtggaactggtggcggtggtggaggcaatggtacttgctcctgttgctgttgttgttgaaattgctgatgcagctactgttgctgttgttgttgaaattgctgctgcagctgctgttgcgcccttctctcctgacgtatctcttctctctcctggcgcaattcctagcgtatctcttctctttcctg

SEQ ID NO: 40624 - DNA, 291 bp, Zea Mays
tcacaaacttattagtagtcacgatcttttcacttgctcggtaatatccgcgttgatccgtgcacgaatcttcactacgatctcgaatcgtggcgcctgatcaccagcggcgaggtacactgcaccggaatcttcttcagtgtactgtaccatggcaatgttcattcagcgtgcctgacagagccatttgagagtcatttctcttcgactttcgttcaacaacctaccaagccaaccatagaaaatttgttgtccatcatgtcagctttaactttgttatatggttcttgt

SEQ ID NO: 40625 - DNA, 301 bp, Zea Mays
cattcctcggatcagctgcaaagttgggatcaaacgtgtcgagagccttccatgcatccccatctgaagggagcacgattaggtcatcgttatcacggacaccttctttgtgccatcgcatgtgcatagcggttttttagatagaaacatctgtttcactcgaggagttagtggcaagtagcggagctgcttatgtgcaacatctgtcaccaccttctcactctcatcattaacaacttacatctgtcaccaccttctcaccctcatcattaacaactttcacatatctaaattgtccaca

SEQ ID NO: 40626 - DNA, 405 bp, Zea Mays
ttaggaagtgcaacccctggaataagatcgatttgatgctcaatccctcgaattggaggtagtccagccggtgtttcttgtggaaacacgtcttcaaagtcctgcaaaagatcagccacaacactaggaagagatgttatgtcattagcagaaatcaaaacatctttgttcacaagtacaaagagtatttgatatgggttgttcctcacttctcttagctcagattttgtggctagcataactagatgttctccctcttccttccttttatctcttgaatttggcttgtagcactcgctcaccgaattgtggatggcactcaatttcttttgctcttctcctcctctacttgctgtactaatttcagttttcttttgtaagtgttcagccatgatttgttgaggg

SEQ ID NO: 40627 - DNA, 341 bp, Zea Mays
aatcatacttgactcccttcttcaacagttcagtcattggcttggcaattctggagaaatccggaatgaatcgtcgataataccctgccaatcccagaaaactccgaatctgtctcactgtggtaggaggtttccaatccattacttcttgtaccttcttaggatcaactgatatcccatcctgagaaattgtgtgacccaagaatttaatttcccttagccagaattcacacttagacaacttagcataaagacgatgatcgcccagtcgctgaagcacgatgtgtagatgctcagtatgctcgtcttcatttttggaatagactagaatatcgtcaatg

SEQ ID NO: 40628 - DNA, 374 bp, Zea Mays
ggaccctatactggtcggagccacatacacagtgtgaggtgcacaagctatgcggaccgtatggtagctacaaccctgacgcaaatgctacgagcgcaaatgctgggagccctgaggattgtcaggtgacttgcttcaacagttgcagctacagtgcttacacatataacggcactagttgttttgtttggcatggagacctacctggtcaacctccaagaacagcacactggtgatggaggaggaaccctcttactcactcaggcttgctgcatccaaggtgccagctgctgcagtgcacaaggctacactcattggtatagttgctagtggagttgttgcagtttttctaatccttcccatgctaactcgaa

SEQ ID NO: 40629 - DNA, 271 bp, Zea Mays
caaaaatacactgacattaaaaatttactacaatactacatagctcctctgtagcagatcaacgattaacaagttaaccaagctaataccacttatttcagtagtcatgctagcaccaaagcccacgataatgttcagccgcgagcttgtcttttttattcactaggttgtgttgtcaactaatttgcttactgtggagtaacggatattgtttggtgttgaacaacattcttattgagtgacttgttcttttcatctatttggttgttgt

SEQ ID NO: 40630 - DNA, 499 bp, Zea Mays
aggctcctccctaagcagcggagaaggtgcccttgactctccctcagtttaatttggccctgcgcggcgcaaatcgctcgccggagtgggcagaactctgcggcgccgcacctcgtcgtggaccggcgactgcgcaactcaaaattccggtacgaagccgcctcgatttccgcccacttctcattgacgtgtagtacctaacgtgtggggtagacgatcggtctaatcgtgtgaattgctcgacggaattgggcatcgtcgttgtgccgcagattgcatgggtagggcaatggggcattcctgcttcaggtgggactataacgtgtggactcagttgtgtctcgatggcataaaaaaacattagtatgacttgggttagggcgcgagcaccccaagttcctttctccgtcggagttcgccgccgcggaggcaagtccgccgccgcccgatgccggggcgtgtggaagacgagcatcaaccgtagcgtcgatgatggacg

SEQ ID NO: 40631 - DNA, 315 bp, Zea Mays
ctagcgcagacttattgtcgatgtagaggagtggcgcgacgacctttgtgttcagcaagtctgcaagcaggcgtgacaactatactccttgacacgccgcggtggcgctggtgatgtattccgcctcacacgacgatatcgcgaccacgcgctgcttctgggaccgccagctgactaggctctagccaaggaagaagattgcaccagaggagctcttcctgtcatcaccgtctccggcgtgatcggcatcactgtacccgatcaactccaatgttcctttcccgtggcgataaacacacccttgggtcatcgttc

SEQ ID NO: 40632 - DNA, 336 bp, Zea Mays
aaatgaaccgagtatctttgaaatctatctttattgatgacatatttccactttacagagtacatgtcgccccggctgttttgaaatacagctaggggtaaaactttctgaggtgctctatgttccaggagttcccaacttctgtgccatccatctgggtgaggcgatacgatccgggccgagtgacctctgctaccatgaagggtccttcccataagggtgatagcttgtgccgtccctcccccgttagaattcggcggaggacgaggtctcctactgaaaagaaccgttgccgcacagccttatcgtgatagcgccttagagtctgctggtacc

SEQ ID NO: 40633 - DNA, 466 bp, Zea Mays
gtttaccctagattttggaaaagttttcatgagaatacggatgcgaagttgaattttagtttggcctacctcagactgatggactgaccgaaaggactaaccaagtattgaaagatatgttgagagcttgtgcccttcagcatggtagtagttgggacaagggtctaccttgtgctgagttcacatataataatagttgctaggccagtctgaaaatgttaccgttcgagactctatatagcaggaaatgcaggactcctctatattggatcagactaggggaagacagttctttggacctgaacttattcaagaggtagaagaacaaatccgtataattcgggagaatttgagggtagctcagatcaggcaaaagagctacgctgataatagaagaagaccactggaatttgaggaaggagattatgtgtacctcaaggtgtcaccacttcgtggaatgaagaga

SEQ ID NO: 40634 - DNA, 576 bp, Zea Mays
aattgctgatgctactgctgaattgatttggttgcaagtactgctaagagagcttcgaatttcttagcctcgagctgcacaactgtggtgtgataacattggtgcaacatatctatgtgccaatcctatttttcatcgccgatctaaacacattgaggtggattatcattttgttcgggagcgtgtggctactagacagttggatgttcgtattgtttcaacgaaagatcaagttgctgatgtgatgacaaaagccttgctagcttcatcgttttcattgtttaggaccaatctgaacgtcacttccctgcgtccagattgagggggtattggaagatattagatattgtgcttatcagataagctaggattgttatcctcttcgagctgcatctccatctctatctcttcccctgattttctccaaccgtgtaacagccatgcatggctcatctatataaagaatacatcggcaccatcttcaggtgtcgagtcttgagccatacctaccccacgccatggcaacaggagcacggtggataacaagacaacagacatatctagacgcaacaacat

SEQ ID NO: 40635 - DNA, 311 bp, Zea Mays
aagatctcaactttctcacacccgcaaactaaagaacaatacatgtctccacctaccccctaatgaaccgactgtcatggcctcgatgcttaagtacatcatcctcaccagcaataaggggtactcgaaacatcttgtcgctaaccctcacactcaaatttctgacactagcaaactaaagaacaatacatctctccacctaccaccctaatgagctgaccgccatgccccccaacgcataaggaagcatcctcactagtaacaaggggtactagcaacatcttgctgctaaccctcacactaactttggc

SEQ ID NO: 40636 - DNA, 320 bp, Zea Mays
caagcttgttgcttggtttaatgatagacacgcccatgcagtgggactgcagagtgatggagagagatgggctccaaaaccaaaggctttttttgagaaggcaaaggaaagggccgcaacacatacggttgatcattctgacttccaatcagggactcatgaggtgtacttccaagccggtacaacgtcagacggtgaatcacaagaatcgaagaaacatgtggtcgtccttaatgaattgtcatgcacttgtggggcacctaggcagtaccactttccatgttctcatgtcattgcagcagcccgtgctcgcaactttg

SEQ ID NO: 40637 - DNA, 690 bp, Zea Mays
gggaagatgaaaatgtacggcaatactctgcaaatgcctcagatttaagtttttttcacagcggaatcgctacaaagtatatttaacaccatcatcggcaatttgctcgagataatacaccagcctaaacttgtgttaaacagcctaatggtacacttgacaacgatgataaaatgacagaaaaacgaattaatcacattggaaaaagaacagattcaagaccacagtctgcctcagtggtagtgacaatttgtggatcgtcatggaacaattccgataatacgtgcattttttatgcatcatcggcagccaacgaacatgacaagaagcaagaccccgaaagaaagatacacagagaaaggagatttagttttggaaaagctaaagcattagagggacggccattgaaggcgagttttggatttggaaaagctaaagcatcagagagattcccattatagacttggtctatcatgcccggaaaagggttctgatgtccctgtcttgttctcatcacctgcttgcatccaatctcaatccaaatcgacaagaagaaaaacgataaactcaagcaaccaaagatctcagagcataaaagaaagaagagcaaagaccagcccgcagcacgaatagaaggatgcaaacaacatagtggagagtatcgcatggaaggcgcggctgccgtcggcg

SEQ ID NO: 40638 - DNA, 336 bp, Zea Mays
cgcgtccaccaagccgtcgggctgcgcacaaatagcgggaccgttgcaaccaccgtggcttccctgggatatttacgcagtgcgcccaacgattcttcccctctcctttatgtcgtgatctcaaagcaaattgcggggtccctagctgccgccgtgtgcatctgcgtcgtgaggagagagagggtaagggatagaaaatctatgtcaccgttgtggttctgctcgttcgccgtcgccataacagtaactcccggccgctagtggtccctggatcctccgcgagctgcctctgccacacgtcaactacgataatgcggtcgccatggcgcgcccgcg

SEQ ID NO: 40639 - DNA, 363 bp, Zea Mays
tgatggaggggtcgggcaacatttcatggccgttgctattgctccgttgcggatccatgggttgtcgtggccgggaaatcgtgtcgcttaatcgctggtaaggctactttcgttgtgttctcttttaacccttctgcgagtagcgctagggaatcggagcctgggctcttgagcgcgggggtgataaactccggcgatggtgccgccactgggcctgttcgccgccgtgtccggctgcctgagtggaggagatgggtagtaaccactgatccgtaaaccaacggtcccgattagacagtaggtgtaccgcttcgagctagagatctggaccatcaggtcatgtttgggcgaataggatctgag

SEQ ID NO: 40640 - DNA, 714 bp, Zea Mays
attatgcttcgcatataatgtgtgattgtgctcacggattcgagtagacacttcaagcaagtcaagtaggtttgtgtatgagttgtgtaatggagttaattgttttaggataattattgaaatgctctgttcgtatgataaacatgtatgtgttcatgattggggagtaaatgcatggtgattgtgagttggagactagtagtttacgattcgtatgatttggtcggtgtgcgaatatacttgtgaatctgtgggtttataaaaatgttgtagtatatgttgtgtctcggattgcggcaataaaaggcaagttgacgtgtacgttatttagcggcgatgtcgttgctctagttaaccgaatggttagataacttggttaagctcgtaatcacagcgaatggcttgttgtggtctaaatgtgtatggttatgggtacgggtaaaaagtagtagtgctcatgtggggtctaattgaaaccgcaaatggttgggtgattatcggggagaatgcgtcgttgattggttgtagtagttttagtgcactaaatgacttgaataaaatttgtaagtctacttgttagtcctcatttgattaatttagctctaacaaagggtaaagtgttagaataattcaagtctctagaacgcgacaattcttgagttgtataggagctgaaatttattaatcgctgttttggactgcacgcgctgtttt

SEQ ID NO: 40641 - DNA, 346 bp, Zea Mays
ttttgacctacatcgtatccccacctaacatcaaacaagattttgacctacatcgtatagtctatttcctccatatctatcttaaccatacttcctcaaccctgatgatatatactaacctcaaattaatgagaccaagaccagggaagaaaagatcgacatcgacaaggaaggatataacagtcaaagcgaatctcgagatgaatcaggacttaaacattttggataaagtcttttccttgccataatatttcttacctcaacctgttcggtttatatcccacataaatagtagctggatacctatgctctcccaatcttccactacctccaccaccaccaccag

SEQ ID NO: 40642 - DNA, 359 bp, Zea Mays
cggaggtcgtcgagtgtcttcctcatcacctccaccgcctgggggcccgaggccgtctgcgtcgcctgagcagcttgcgctgcctggaactggcggacctgctactccagtgcccgcactttcccctccaaacgcttccttttctcctctgcctcgagctcaagctcatccagcagcttgttccgccttgcccacatctcctccatgaaggcgaggtcctcctcctgccaggtgagatcagttgcccgtttcgccagggaagcttccctcgccttgaggctttcctcggcgcgagcaatgtcgctggccttatcggcgagttcctgctgcagcttcgcctcagtcgcatcctgcttgtt

SEQ ID NO: 40643 - DNA, 504 bp, Zea Mays
atcagacgaaggccaaggcagatggtcttcataagaacttcggctgctacaactttgcatatagaaaagatacaaaggctccagtgattgtctatcgcaccaaatggccaactgggtggacaaatgaatggttttatgtgaaagctgatgagaagagaacggagaagctgatgactatggtcatgaagcctatgagactaagcttcgggatgaccaggcccttgtgccatatgcaacttggctctccatgccaggtagctgaagttgagtttagggtggtagctgccgaaattagtactagagacctagtacaagaatatttggcaaacaagacatttccaacttacagcggttggggaatgccgaagaagaaagaaggggggaagaaacatgagcttgtacgactcccctatcgttttaagtttgaaaaacaattcaagaaaccttgcaacgaatggctggagatgattgagaccatgtgcaatgaaatacttggtaattata

SEQ ID NO: 40644 - DNA, 334 bp, Zea Mays
aagcaaaagagttgaggattgccttgaggaagaaaagttgcttagggcaggcctccaaaatcaaaagagtgtcatctgcatactgaacaatcgggaaatcctggtcaccaatatccggtaaagggagcttaagaagattccatagcctagctttattaatgatgctctgaaggagatcagctgccaagacaaacaacagaggcgaaagagggtcaccctgtctaacacctctcttgcaatgaaagggcttaccaggaacaccattgagtaacaccgaagacgtgccagaaagaaggatgctccgaatccagttgatccatctaggaccgaaacc

SEQ ID NO: 40645 - DNA, 395 bp, Zea Mays
ttggactataaactatgtggcaaagttggattccatagtacagagaataagttttatcaagagggttggacttggttctacaaataaatgggagtaaaacacctctaaacttcctctgtcagaatctgtgtagtgctgtttcagatttctgaaactgaatgtttagtgacattggctgtactttggggtaccataacttttgttctacatgttttctgatatgggttgctatacaaaataggtagagctacaagtagagaataattttggttaagggagagtggtctgttgctgcaaagagttgggacatcagagggcctgaactgggaggaatggaatggagcagcaggactgataagttggattcagagtctgttcaagtgattgaagaagat

SEQ ID NO: 40646 - DNA, 608 bp, Zea Mays
ttcatgaccatgtattgtgcaaaccaaggataatactgttcttgtatgacctcattaaattcctttgccttagcttccatatttgagatggatatattgttgatcataaaaaggattgaaaatattatagacagtgtttatattacatgaaataaaatttgaagacaaactacaaataaaatgggtacaccgatagtatttgctaaaatggaaggccaaaattctgatgaggctgaagcttaccgatatccagtagtgtagtcctaagcattcaaaatgcagaattattatgattggttagctgtatgaaaaggttactataatgtgggatttctagacagagcaagatcatcaaaacaaatttattaagcttaacaatacaacaatcatcacaagtgtggaatcattattcgctaacgtatcattcaaaagcaataacatgcactatgcaaacaacattgccatgacatataaattaatatagtctaatggtcatacaagaattctcatattgcaacgatcacctcagttaagatctccaaaattcataccaaaatggctagtaaactgcgcaagaatgggtgtaaatgacagagagtttacaaaac

SEQ ID NO: 40647 - DNA, 547 bp, Zea Mays
ttaattgcacgggtggtgacctactccgccctgcccacgggaacagcggaggctaagaacttttgctcgtgttcccggcaatgggtggcgatctaattcaattggacgagttggcgagcatcaccatcattcagagacataagaacaatgcgtgaattgtacggtgccttaccagaacgggctggccatggtgagctcggttcttgcggtgttttgggtggatttggggaaatcccaaattgaagatctcgggtagataattcagggcacggattgatgcaggagtttcttgactacatggcggagctacgggcgaggtcaatttatagagccctcaagcggtggccgcgaatttaagcgatgacgcgcggcggccggaggaggggaagagtactggcgcaacggcttggtgtctaatgccgtggcagttactccggcgagccacggggagtcgcaaaggttcacggtgacacggttgaaacagttaaatacgtggcacaaggccggaagacagcggttcaccggcgagcttatctgctcaagccgc

SEQ ID NO: 40648 - DNA, 337 bp, Zea Mays
ccgaagacgcgtcaacaacgaagacactgactgatgggactgagtaactcggacttggattgagtaacttggacttggtcgagggattccgaatcggacaccaggagactcaaccgacatatcagaataggatcaacacgtatgaacatataaggaaagaagatgattcatgataggggtaatatttttgttgtaactacatgtcgagagtaagtaatatgggcataacatggaccaggaatagtagcaagtggcggagtggtgggatgaaaaatcacgtctggaccaagcgaaaacaacacgttttgtttgaccctcacaagtaggacccactttg

SEQ ID NO: 40649 - DNA, 602 bp, Zea Mays
ttagtaattccaatagaaaagatgctatatcaagtaagttgaatagatcaatttaggtataggaattaaatcaccactccactataaatataaacctctagcatggttattgacgaaatctcaaacttgcttcttatttagcaaaagaaaataaaaaattatagggaatgtagttgaatgcactgtggctggttgtgttgcaggaatatttttcaatgtcaaggcactactcatatcatatgtacgagattttaattgtgattttgtgtactcacatgcaaagtggatgttagttgataggtttatgcactagattgttaccttattatgtaagatttcttaatgttgttcgtaattaatgctattcgttggtaggttgaagtcttgtgctcgcatgggcttcttcgtgatccatatctacattttcaggtgttgcatattggtgacacagatcaaaagctgcagagatgatacgtctgaaattgatgtcaaacctgatggttccaggagagttaaggacagagctgaactaaagaaccttacacagtggcatctaccagatggtactctctcagtgtccagtagtgttcaccatttcgctc

SEQ ID NO: 40650 - DNA, 313 bp, Zea Mays
tagcaaagccgatctggcagaagctgcaccgtttcacgcccgacaagagaagctatacgggccgagttagctcgcctagtatcagtaggttttattagagaagtgctgcaccccgagtggcttgcaaatcctgttcttgtactaaaaaagaataaagttgattgttgcatgtgcgactataccgacctcaataaacattgcccgaaggaccccttcgggctccctagaataaatcagttagccgactccactgcttgatgctctatggtctcctttctggaatgttactcatgatatcactagatcagtcttg

SEQ ID NO: 40651 - DNA, 620 bp, Zea Mays
agggagagtagcactagcacgcattgaaggaggggctcagtgctctctgctctcatcatagctacccaatggcgcccccctgccctgccctatcgaacgatatcgcatttactttgcacgcaggcatgcagctcgctagctgcgtgtctttgcagctgcagcacagcgcgcgcggcagcatggtagtgcttgttgcatgcgtaaacttttgcaaaccctagctatagctatgctgccatccagaaaggtgcaagtcaaaccgcaggcgatccaccacgctcacacttcgtgtatctgcccccctgtccctgtccccaaacttggggcctctcttcaatacgagttgcatgtccgtgcatgcgttcgatcctcatctctcgctcggtctctcccatccatctacatacactgcagtcactggcatgcatgcatgcacgagacgacgatcacagagtagcggcccgctcctcctgcctgcctgcctgctgctgctctggttgctgtagttgcgtgagtttgtagcaaatagatgtgatgtgatgcaccagctagcatgtactgctactgcctagccagtgtagctacatgagaggggctgacgagaggccggcaggccgcag

SEQ ID NO: 40652 - DNA, 557 bp, Zea Mays
tgaggggggccatggcagtagcaacagatcgcctgcgaccgcgccttgctgcatcgaggggaggggatggggaacctagtgttgcacgcaggggaagcacacgacatgggaaggcagtggggatttcgggcgtccattctcacatgtggacgaccaacagcgcaacggacacgtagaggcctacgctaggaggaggtcacgcctggagaggggtgttcacgcctgggcaactcgacagtaggaagaaaggccgaagggagagaactcacatgtgtgtgaggatcggcggcggttctttgggcacgatggctagatcgacatgcactccggcgcataggttgtgcgtagcggtgggggtggggctatgcaggtgtatgggaggtgatgttgtgtgagggagcagggcatttaagcgagtggtttgaaagagaactggaaagcggttgtcgagctccttacgatgtggctgatccaagctggaccagaggttacagggaggaagatggtgggtgggcttcgttgggcagtcctaagcgtgggacaagaagcttgggagg

SEQ ID NO: 40653 - DNA, 961 bp, Zea Mays
gtagctcgacgaaggaagatcaactggaacaatctgaagagcatcgtcgggggttgattcagctccactagcagatatcagaattctggcatccggctcgccgacctctaaggcgactccctcgctcgaagttaaagaagtatgcatcactatcactccatcaaatcgtggtggagacgacccgacgtggacgtccatggaggtatgggaaggagagctcgctcgaacaccctcgggggctgggtggcagctcgcactacccatcggagtcggatcactaccggcaacaccttcgagggctaggttgcagctttcgctacccaccagagccggatcattaccgacgacaccctcgggggctaggtaaccgctagcatcacccttgggggctgggttttctgcaacggccacctctgaggctgaaggatcctcagtcacctccatgggagtcgggcaatcctgaccaacctcttgacaccgaagactgccttccaaagtcgacgatgcacgagataccgcccgggatacctctaatcccacgtctggagcgtcagagcaaacattcatcatatcatcaatagtcggttccaacagcatatcttcaggaatgacattctcaagggcctgatcaaaatctgttatggataaatcttgaaggctaacaagagcagacagagctggagaaggaatatcactatccccctactacctctgtaacgccggctattcttgcgaattagcggaacttcttcttcctcttcttcgtcctcatcaaaaatgcggacaaaagatggtgctggatcacacccattggggtcagcttcaacaggatcacacccattggggtcagctggtgcacggatacactcgttggggtcagttggtgcacggtcacacccattggggtcaacttcagcaggtacaccaccagtggggtcaacttcagtaaagacctctgttg

SEQ ID NO: 40654 - DNA, 544 bp, Zea Mays
ttgtgccagtgcctttgtccactcactcaccacaaactctcttatgctaagctcttgctcgcatgccaccatatatgcagggtatgggtatctctctcttctctacgcacatatgaatgagcactcagtttcatcgtcgtcgtccttcgtctctccatagaaaacacaccagctgcttctcgttcttccgcgtcgtacgtaccagtaccaccctcctggattaccacctccatagctttgatatctctcatccatcgattccctcctagaatccaatccgatgcggcggccaccacccccgccccaagtggcgtcctcgtgagaggttggcagcgagctacatcagcgagaagcctagggcgcgcagtatatctcggaatgtgctggctcccaacagccgcgaagcgattctcccctcaccctcgaccacgagccgcctatataaccatctccatggctccccctcccaacccccaccagagctagcggcatcactgtcatcgagctcgaccgacgaccgtcgatcggtacccgtcgtcgtcgc

SEQ ID NO: 40655 - DNA, 453 bp, Zea Mays
gccatcgataagagggagggcgatcggtggctgtgatcggagggctaccagcgaaggaaagtgcgacgacatggtaggaggcttcgtagtggagacgacgctagataaagcaagcggggagaggtggctaccgctagggagctcttgcacatgggggagggagccattgccagggaggccgcttaccggtcagggggcatcggtagggatggggacacagcaggcagcacactgctgtaatgggaaggaggtaggcgcagtcgtggccatgccagggaggggggtgaaggttggccgagtgggtgcgccattgcatgagatggaggagtccacatgtcaaatagggccaatgatgtcgggcaatgattgaggccatgcagtcatgctagggattgccgcaccagcagtgacttcaggccaggaggtgtcgaccatgggagggtaggggaggag

SEQ ID NO: 40656 - DNA, 304 bp, Zea Mays
tgctgaagttgtggtcgctgacttcgtcttcaagaatattcagcctttgaaagacagggcatacccggcttatttgtacagtggtatcaatgactctacccgggtcaccaataagagaattcctactgaggatctggtgagccaattggacatgattctgaggggcagagtgtcaaatgttggtgctcctgttgcctattctgcttggaatctgccacctcataggtcattttctgaatttgtgtccaaccctcctactagtgatggtggtctgggtcttagagtgcgaccctctcccgaggac

SEQ ID NO: 40657 - DNA, 582 bp, Zea Mays
ccgcactagcacaagcttcctccttcccacatgggcaccgtctcctccttccccaattgcaagctccattcgcgctcctcgtcctccgctgcctccagcctagtcccatctctgctcgattggagaggtttgggccatgcttcctcctcgcgcgccacgttctcgacggaatttctcgtctacacaggagccaaggaacgctagaattagacgcttcccggggtcccttttagttcccctctaacgaatcataggtttgcagtttggtgtggacgtatcctgtgatttgtggatggttttggtgtagagtttagagagatcaagaacttccaacttggggtttcctgtagccttttttagctgttctggggcttttatgggagtgcccgtcgcgcagaagtccgattcttgggtgactgtgcttgcgatgacggacagcggcggcctcggcgttcggcctattaacggaggccgagggagtgccgtggagcagcgtgggctcggactcggagacaacgggcctccagtgtccccaccagagcgtgtttctacgccgcctgcgccgagactagctgcttggtg

SEQ ID NO: 40658 - DNA, 315 bp, Zea Mays
gacaaattcagcaggtacaccaccagtgtgatcaactccagtaaagacctctgctggtacttcttcacaagtaggagcagaaggtccagcatcctggtccaaacatgacaaccgccggagccgtctctttttcttcttcttcccttcagaaggtgcagttgggcgactgacctggcgaagacgctttgggcgagtaccctcaagctttcgggtgtccactattctgtcaagctctggtataactgcaatagccattgattcagcaggggccgaatcagaagattctccagccaacatatcgagcacaacattcat

SEQ ID NO: 40659 - DNA, 312 bp, Zea Mays
ccgagtcatgctgagccacgttggcattttagaaataacggtcgagtggtgcttggcgacgtcagcgttttagaggtaacagacgagtcatatcgagccacgtcggcgttttagaaataacagccgagtggtgactaagtacttttttgaaacggtgtctaacccagaaaaaccccatttatatcacgtcggtgcatgcctctatgttctgagccctagcctcacttttttgcctccgaacatcctctgtttccctttgattttgcttccgcttagtccaccgacgagattgcgatggtgcccaagcggaag

SEQ ID NO: 40660 - DNA, 779 bp, Zea Mays
gaaagatctgaagcccctggtcgccgttttgcggatcctggcttcggttttctgaagagatgcgatatcatacctctggacctctggacatgcgggttcgttctatacatcctcgcattttctcgaaggtccaacaatctgcttcaaatacaccagtgaatcataagaattgttcttggcagtttgcattttttttgttttttctattttttgctatgtgaatctatttgaatgaatcatatgcatcttgaatccgtgacgacgaatcgatggctcgatgatgattattcttgctttaaccacaccgaactaaaggctattggaagggtgctttcttccttcctccatttgcgccaggctcctctttcttggtgtttcctcatgaaaccttgctttcttgttgaagaatgcagttcctgttttcttccgcgagagtgcgaggtagaaggattcggtaagatttggtagcgtagcaaggggggaaagctggaggcctcgtccgctggttcttggcttgtagaaaaacctggcctttctctgagagcctttgccctgtatttgcaattgatacccctctttgaataagtatttcccccttttcaagccaatatgttccgctgatcaattatttatatgggtgttggacgataatctggaataaaatttgtcgctaacaaaacatattatgaaagtgattcggattattaaaatgattcttaatctgagatatatataaccatctagttacaaaacagttaactattcgcggacaggccggt

SEQ ID NO: 40661 - DNA, 492 bp, Zea Mays
aatcgtgatttactttttggtggcatatatcgaaagagagtaaaaagaggatcaaccttccgcgctaatttaggaaactcaaatcttcttcataattagagagaattagggggagaaatgaactaattcctctctcaatcctttccaattgcaaagcagcgttgagttttcaaactagccctcaaagtaaaaagatacgacatccgagacaaattatcggtctatacaaggatggcatcacacaatgaccctatttggttaggcttataagccgcttatagatgggaaaacgccaaaatctagtccaaacaccgcacttcttgcccgccacacgcgactcccatgaacgggattacatagacgactcacattctcgtatcacgacttcaacctcgcggtttctaaaacgcggtctcacccacgcccccacggtccaccctcaacaccacgtccttgaccatatctaccccgtcgctaggcgctcgactccat

SEQ ID NO: 40662 - DNA, 281 bp, Zea Mays
atggtggtaggactacgtactgcatctgtatgttgcaatgtcactttcggcgaggatctggactcatcttggattggactggtaatccctcaggatcagatcagaagcctctgctcaaaccgagctagctattcgttgccgtgctgcagtggatgttcatccgtattctcatctcatggttgttgtaacagctggagctggacctggaggtgaatgcgttgttgcctagcgtgcgcatcgtcagtacagtgctagtttaatcggggaggactttggcgtct

SEQ ID NO: 40663 - DNA, 340 bp, Zea Mays
ccagggccctgttttatattctaactatctcctcatcgtgctcttattcggtgggggcgatatttgagttttggcggcaagcctctcgtggtgctggggtgacctcgccaagcagcctgtctatgtgccttgaaaggaatgataacattgaattgggaagaagcggggaatgaccatagtgctataagggcatctttctgctctgagttcgccgtgttgttgtttgcgtggggacgtattcctgggttgtttggtccccccattccttccatatgtgaagcaatcccctgatctccctatttgtcacagcggatctgtctgggggcgccccatctttttt

SEQ ID NO: 40664 - DNA, 360 bp, Zea Mays
gccatcatggggcgaggatccatcaataaacttgaagcagctatacatggattatacctgtgcatgaagatcacaggcccccagggtgtaatcaccatatatgcagaccaacatgttgccagaaacatagaaagagacttcgttcccggccagcgcaatgtgcattgcctcacatctgaccacgaagaccctgatagcattcacccaatcaaagaaaaaaggatcaacgcctagctatagagcaacaaataggtcaaaaagtccccctagacacaaccaccccaatcaaactttataacacccttcgacacatactattttgtgtgaatgcccgaaggcttaaaaatgtcggctccactt

SEQ ID NO: 40665 - DNA, 306 bp, Zea Mays
cagcgaagggcggtggcgaagcagagagtgagtgaattgtcgcgaagtggtaggcgtcatcgtattgggatggagcgtggccgtcttcgcgtggaccagactggtaggcgagaactgttgtcctcgccgattggggcgagcataggtgagggggagctgcgaaatctttttgagggtgaggaattgaggataatgctgttcaattacagggagataggtatcatcccgaaggttgagccaatgtaatatctgatgccctcgctgtgtatgtaacagtgatttgtattatgaggctgcgcgccttcg

SEQ ID NO: 40666 - DNA, 543 bp, Zea Mays
gcaaatcctcgaggaccttgttgaccctttctgtctaaccatctgactgggggtgataggcggtgctgaagtctagcttggtgcccatagcttgctgaaggctcatccagaattttgaggtgaactgtgttcccctgtctgacactatcttccgtggaataccatgaagtctgactatttccttaagatatatccgggcaagggtggctcctccaaaggtagtttttacggggatgaaatgtgctaccttggtgagacagtcaattatgacccagatagaatcgttccctttttgggtccgaggtagtctggttacaaaatccatgcctatttcttcccacttccatttgggtactggaaggggttgcagtagacctgcaggcttctgatgctctaccttagttcgctggcaagtgtcgcaccgggccacatactgtgctatctcctgcttcattcctctccaccaatatctggtcttgaggtctaggtacatcttggtggtccctaggttgatagagtaggctgagttgtgagcttcgtcaa

SEQ ID NO: 40667 - DNA, 354 bp, Zea Mays
cccgagggtgttgccggtagtgatccggctccgatgggcagtgcgggctgcaacccagcccccgagggtgtccaagcgggctccccttctcatacctccatggatgtccacgttgggtcttctcctccacgttctgatggcatggtaacagcgcatgcttcaaatgaggaagtcgccttagaggtcgttcaccggatgctagagttctgatgcctgctggtggtgctgagttgatccctggtgatgttcttcaaattgcccggttgatattccttcatcgagccaccacctagcttctcgtgacttgggatttctgtcattcttctctaatcttcaggtaattcggcttttctg

SEQ ID NO: 40668 - DNA, 329 bp, Zea Mays
tattcttgggaagcactccaaagtacacactttccttgtcccaattacttccggatcgtcggacaaggaagtcaggaaatcttttttctatgatggtggagagtgaggctgccttgcgagtgcaggacatccgtgtggtgtgtgattatgtcgacgtgttcccaacggagctaccaggcattccaccagagcgtgatgcgtcttttgaaatcaagttgatttcgggtacgcaacctatttataatgccccgtatcggatggctccaaaggagcaggttgaattgaagcggcaattggacgatctgcttgctaagggtttcattaggcct

SEQ ID NO: 40669 - DNA, 311 bp, Zea Mays
attcgcaaagcaacaaccgcgaaggggtatcagcaggccagagccgtccgattaaaaggtgacgacgcggattagatcatggctttaaacgaaccggtatgcgactacaaccgcacgatcgcgatctaacgtacaggattcattggaccgaaacgttatcccctggtttaatccggcccgttcatcagtcaatcaatggcccacagtaattccttccccagatctaatccccctcatccattcacgatcgaacgacagggagcctttcttcctcccagagaccgaacaacgcggcgcgaagtgcccagcgg

SEQ ID NO: 40670 - DNA, 361 bp, Zea Mays
ccattttacgtgcaaaaactcaagcagctttggcagagggaatctcatggggtatgacagatgatgcaatagaagagtctgcagaggttagttgtttatttaccacagctggttgtagttgtttatttaccacaactggttgtgtttttagttttagatcagagcttttgatggagctatactcaagtttaatctgcgcaccactttcctaattcagcttcatatattgctttgtatttttactgatcatgttcttggatcttaggatgatgcagatgaaattacttggcaaacctacaaaggtcagcttactgatagacaagagaaaactcgtagcaagatagtaaaacgaatggagaag

SEQ ID NO: 40671 - DNA, 344 bp, Zea Mays
agaaaatcgaggccatcatgagaatggaagcgccgcgatcacagaaaaaggtacataggcttactggatgcatggcagccctgagtagattcatatcaaggctaggtgataaaggcatgccattctacaaattgctcaaaaaggtggacaaattttagtggaccacagaggcacaggaagctctagaggcactgaaaaagttcctaactacaccaccagtactcaagccaccacgccgagccacgccaaattagccggtagaagatctgttgttatacatctcctgcactactcacgtggtaagcaccgcgttagtagtcgagcgggtggaagaaggacataca

SEQ ID NO: 40672 - DNA, 396 bp, Zea Mays
tcacccagatctcccgcaatgcgagtagtctgggtggaatccgcagtaagccggatggctttaacagtgacgccgtctgccccagaagattgtacctttggcaccatggggagtgccttggtgccgggggttgaggggttcccccctccgtcgtccgggcgagcagtctctgccgccacggtgtgcagcttctctacagccacaagcacggcggcgtggtcgcccggcatggtgaggaccccggttggagacgacatcttgaggaccaaatacccataatgggcaatggccatgaaccggtatagggtcggcctgccgatgatggcgttgaaggggaggttaacctccgcgacgtcgaacacgacgttctccgtgcggaagttctcctcggtcccg

SEQ ID NO: 40673 - DNA, 631 bp, Zea Mays
agctggtctactgaagcttggtcccttgggtggaaatccaaaggatcgagttttctggtgccggtcttgctgctgagcccggaggacttgaaattttctcttgagatggcctttttcttcctcctttgccctttcaacttgcatggccttattagagaggtgagagaaaccgaggaagtcttggctagctagaattgtcttgagttctggcctgagtcccttcaggaagcgggccatcttcttgacttcggtactgacgtcatctggcgcgtagcgggctaactccgtgaacttgtgcacatattcactgacagatcttccgtcttgagtcagttcccggaattcgtcttccttgagctgaacgagcccttggggcacatggtgctcccggaaagccgtttcaaattccgcctaggtagcatctctgatggtgacgttgaaggtatcccaccaggctaaggccatcccggaaagttgatgagcggccagttgaacacgctgattttctgggcatccgatggcttccagcttccttttaatcgtgcgcatccaatcgtcagcatcgaggggattgctagatccggcaaacgtgggaggcttgagcctcaggaaatcccccattctgtcttgc

SEQ ID NO: 40674 - DNA, 318 bp, Zea Mays
atggagcattcgtcacgacgtgcagactgacactggctcaacgactcccacaatagaaagtcaaaagtgcacaatggccaacctgttgtgggatgtgacgaaacgtaatggccggctctaggatgattcacgcattgctacagtaccctgccagaagagatgaacgtcatccacggcatcgttgactagaaacccaatggacaattaatagatcacacaacatcgttcgacattcatccgcttcacccgtcctcgaactcttgtaacaaggtccgcacccaccttggactataaaaagatgggagaggctcacattca

SEQ ID NO: 40675 - DNA, 479 bp, Zea Mays
agaagagtaactgattttgagatgagtcgtttatgacttcacatgcatacaaaaaggtgttcacaaggtatgcggaggaggatccatattacacaattgaattgattagtgataacggtctaggtgttctcgatgagcatgattgggacaatgcaaagaaaaaggctagattcttaggtcattttgctgatataactaaacaggtttctgcatcactaagtgtcattgctcacacaatgtttcatgagattggagagatcattgttttggtgaatgattggctgaacaacaatgatgtggttcaagtagcaatggggaaagaatgaaagagaagtttgacaagtattgggggcagttgcatgacattgttgagaatgaaaatgagaatgataaggggaaggaaaaagggaaggaaaaggagaacatgaacttactgatttttgtggttgttgttcttgatcctaggtacaagcttttag

SEQ ID NO: 40676 - DNA, 332 bp, Zea Mays
ttgatgttgtccttgagggggatatcaaggtactctactttcctccactggtgaagctccaaactggcaccaccaacaagctgatgttgtcctccagccataccgggccgacactggtaaagatacctccagagcccaaagtggggaaggattccaagaaaggcctcgcacaggtgtacgaaaatggcaacttggagaatggagttgggatttaagtgtgtaagatttaagtcatagaaatcaaggagaccgcggaaaatggagaaacaggaagggcaagccctcgcatgaggaatggcagaaaaagatggcctcgtgggtgtcctctatcg

SEQ ID NO: 40677 - DNA, 360 bp, Zea Mays
ctcaattttgtgcttgctgcagttctgatttgatttagttctctctctcttctcctcccctcttcttcggtttttggaagaaccatcgagtgcttgtgttttgggtgttgttgggaattgccttgggtgaaggtcacttcttagacaactgcgaacatctggttcaagcaatttttgatcatgatctcagttcatcccattttgagttcttttgagaaaccccaaccaaagcaggaattctaatctgcgcatggagttttgttttgctctggtttaaacttcaggaatcatcgtctttccttcagcgcaagttttcctgcgtgacattatcgctccctagcactatcagcctactgtgcg

SEQ ID NO: 40678 - DNA, 359 bp, Zea Mays
gttggatctgaagtcaacatcccgttggcttgactttaatctgtactggcttctactgttcctacagtgtttttgtctccatgaattgcagctgcaggagtccaaactgtcggttttaatccgaagcgaacaacccaacagtaatttcccattcccaattcccctttgcacatatctgcatatttcacatttcgttgtttgaaaggaaagcgatatgctactgatgtgtcctttcctattgcagcatatgtcataatctgcatacctatctaatatggactttatattttcttgttaaccctgtatccatgtcatgattaaatcggaatttagtgtgacatacaattcctgtctctgtt

SEQ ID NO: 40679 - DNA, 430 bp, Zea Mays
tttcttgagtttgttttttagctagttctcagcaggactaagaggtctgtgatcctgggctatttcaaatatgtgaagcggctcctttgccaaggaaagctgagggactatatgccccacctgttttcactccatattcgcaatcttctggttgtctccttaagtttcttatccagatttaggaagggacagctggtaaggcactatagagttccaagcatccaacaccacctcctgaaaaccttccattcttgtctagaatgattcaaaatggaactttttcttgccaatgggcatactactaacctctatggatcaaagtgataaaggtatgtttcaagtacttagtcaattgatttaagtgctaatcaggtttgtctaagtgctagggggcatatgaagtcgagccaaaatgagcaaaagaaaattg

SEQ ID NO: 40680 - DNA, 452 bp, Zea Mays
caaagaactgcgatggcaacactcactattacattggatcctccttcaggataagaccaacctctcggaaattaaacaacatcaacctcaactcttcttcaaaaaggtcccgcaggtatcctttcctgatgcacgacccagacgtcgccgccagcaacttgcgacgggtaccctggtccagtcgcggtccgcttcgaagacgggacctcttcatgcccattcggcaatgtcttcttacacatcgcaaagactcactgacgctctgtttcgacacacccatctttttcctcctttgcgattctcccgggcttgcaccgatcgaagccaccagcgcctcgcgaggggtggaccacaatagagactctgctgcagctagatccaacgccgcaaaatagtctaattcatcctcagaggattcatccacccacgagaaaggcctccctaattctcca

SEQ ID NO: 40681 - DNA, 429 bp, Zea Mays
catgaacggacctgagatcggctggccacaatgaggtgtctcacggcggcgcgactaaccgaattggggaaaataggaattcaggggcggtggtggctaattggcggtgaggagcggtgcactggcttcataacaagatagcggagtaggccgaacactcaatttatagagaccactcgagggtttcgagaatttgggatggatgagcttgcggccggagcgaaggtgagtcaccggagttcgctcaacgtggcactcactagggtagagtcctggggtggtaactaaccatttcacacgacacattgcgacgtggtaacatggtcagtagcgtggcgtatctagggtaacggtgacggccgcgcggccacgccgcggggcaagtgggtacggcaaagctgactctatccactctccttcagatctttt

SEQ ID NO: 40682 - DNA, 380 bp, Zea Mays
acgacaacgacatttgatcaacttccttgccaacagtccagcggggacctacttcataggttctatcgatgcatcaagtgagatagcaaatgccaatatgttggcagatctattggagaagcaaataatgaaggtggggaaagaacatgtggtccaggtgatcactgacaatggagccaatttcaaagcagcgacaaggatccttatggacataattccccacctgttttggactccttgtgctacgcattgcttgaatttgttgttggaggatattggcaagatcaaggagttcaacacttgcatcaacatggccaagaaggtttcgaggttcttgtacaagcatgggtgacttcatagcctaatgagagaaaagctag

SEQ ID NO: 40683 - DNA, 295 bp, Zea Mays
aagggcacctcaaagtggacctgccgttcactatcaggaacttccctgagcgaggcaaccaagacgctaacttcttcagcagagggtcgcactctaaggcccaaactgccgtcagtgacaggtggattcgacacaaaaagagtgaaggccttgggaggaggcaagttccaggctgagtatgccactggggcaccaacatttgataccttgcctataagaatcatctcaagctggttcaccaggtctacagagggaattcttctattggtaacccgagtcgagtcagctaggcctc

SEQ ID NO: 40684 - DNA, 317 bp, Zea Mays
ggcaccccacatatcagtcctcaaggcatcgcttgccctcgaccatctagggacctcgggcatcagtccccaggacacctcttgctgcaaccctcagggcaccttgggcattagctcccgagggaacctcttgccttgatcctagaggcaccgacacatcggctcctagggcaccctgctcatcggccacagaggcacctcttgccttggtccttaggcaccttgcgcgctggctcctagagacacgaggtgccttgcatggacaccccgcacatcgccccaagaggcacctcttgcctcggccctctaggcacctc

SEQ ID NO: 40685 - DNA, 506 bp, Zea Mays
ttccttagaccattagtccgaggtagaagttcttgtgttgattaataccaataatggacccatgttttgaatggtggtgctatttggggtatcttggatgttttgctgggagtggtcgaattcgaggacgaattctttttaagaggggtagagtgtaatatcccaaaaaaatgttgaccaaaagttgatcttcggtgcgtggatgtgggaaaatggttgtgggccgttagaagttcggagtccgcagatgtgaagatctcatttaaacgatatcatttgagtattcatttgtctgaatcggggcatggatgggagatttggttgtgagccgtcggtttcacatcaagggcatcgggggcatcgctccctcctcttctcaaaaaccctagccgcccctccccttccctcatagcagcagccgtcccccatcctttcctcatatttgcagcagccgccccacttcttccccattgcagccgctcctctcctccccaaggtgctgcacc

SEQ ID NO: 40686 - DNA, 290 bp, Zea Mays
cggcgatggtcacaggcgtcatctttatggctacgtcaatcactagcctctatagctcgggctcggcgcaacccatcgtgtagtgccctatgggaggtctgcgtactcgggactagtccaataggccataagtgtgctacagtccgaggggctcgtaggttatgagtgggaagcggacttgtgccgcgctttggctcggtgctaggcatagttaaatatggtcgactatttatggcgagtcagtttggcgctaggagcgagatccacttgagtggtttccttccgatacg

SEQ ID NO: 40687 - DNA, 1150 bp, Zea Mays
ggctccttatggtgtccgtctccgtgctagttggtaatattctaaaaacttactgccagcatcatgtcttacttactgttgggacataatgatatatgtgatgaatataaaacacctagctattttaggatataatgttagaattaactatataatgatagaattagatcatatccatcaaaacctatacttctgtatacttcaatgaacttaaaatgcaatattttctgagccgtatttctgattttgcttgagaatatattggatatgttgaggaacactagtggaaagcccaatagggctctaaattgagataatacaaacaattgtgttctctaagttgtctaaacatatctctacaaatcatgtttatctatgtgttttaattgtgtaaatgttcatgatgcaatctttctgtataaaaagtaattccaactttctgctgatgtttttttggttttacttcgggttatcagttttttggtacaaattgatttacttgtttcttgtttcgtgcatgctaaatttacaaatatttaatatcattttctaggatgtcataggatttgtttttcaaatgtagcaatgttatgtcattttgtaggatagcttagaacttattttgaagttttcctgtccaacccaccccagtataccttttatgttattatgtatttcatgaatgatttttcttagattttggcaactgagattactacattcttctaaagaagtattttgttgatgtggtattgatagttttagttggatatcacgaaaaacatttgcatatcctttgacatgccagtttttgttctttaatcagctattttcaagaggtcaactgttcccacttttaaatcttatggaatcgtgcaagcacgcatatcagactgtgcatcagagacattttcagctattcgtactgtgagtgccatagttttttcctgaaacatgcacatttaatcattaattcaatttcaagcttcattcttttgtattactgatgaaatggtccatctactctcatcttatactcttgttaagtattaactgttgtggtttatgttatccttgattcaaaaaatcatttgcaggttcgatcatttggtggtgaaaaacgacaaatttctttgtttgacaatttggt

SEQ ID NO: 40688 - DNA, 370 bp, Zea Mays
ggcctgagccaaggttttaacatgctcacaacctgacttctccaaaatagctgcaattcccctcgcactagagaaggcacagacatccccacggtcactcaaaatttcctcaaaagcttcggcttcactgctgatccactcaattgggccctcaggatcgcctcttatgaagttgtcttcactcgagtacgcgcccacgttggcgaagctagtttttatctttttgacgcattctacagatttttcaaaacatcttccttttgatgagcgaagctctgtaactatttcaaaataatttttccagtaatcactggcatctcggtcagcttcggcaatagcgcatttcaatttggcttcggccagttgtttt

SEQ ID NO: 40689 - DNA, 322 bp, Zea Mays
cggggaaccacgaggcgtcgggggtagcccgccttgactatcgattggaggtgagctacttaccatagggttcgcctagttctcctcttcacgtaggggcgtctggtgtgcggtttcggggctcgattggtcgtatggctcatcgccggccatgggcaccgccgggggaaaactatgtgccgccgactttggaccatgggaggaggacggctcctggccgtctgatccctatcgggtggttgcgattggcgatgaagtgagaagaatcggaaccgtccacttgggcctgggtggctcagattaaaccctgctgtaccggttc

SEQ ID NO: 40690 - DNA, 299 bp, Zea Mays
ccgagacctcacgcagtcacggctcgcccgagacctttcacagtcacgactcgcctgagaccaacctcggacgggagatgcagttctgactcacccgatgcttcggaaggtgaccaaccctgccaaccaactccactgaccaactccacgaggcagaccggttggccaactctccgatgaccacgactcgcctgaggccaaccctatacgggagacgcagtcatggctcgcccgaggccaaccttggacgagcatcgcatttttgactcgcttgagggcgtcttggtcgatgctccttt

SEQ ID NO: 40691 - DNA, 573 bp, Zea Mays
cgctttactatttgttcgagttaagacaatcaatttagaaccaacaattcgacttgcaaattttattcaagtcattagtgcactaaaattactacaaccaattaacaacgcattctccacgataatcacccaacaatttgccttttaaattagacatcacatgagcactactactttttcatccgcgaccataaccatgcgcaatttggttacaacatcccaaacgggtgcaagaacactagtttctagttttaaccccatgattgttccattaatcattttaactgcttaatcggcatcgaccgacttaaccttcatctcgacggtccgagcaccacaattcacgaacgtctacctagacatctagaattacatagagagcctactacttcacattgcaattcatacagaaccacaaggttacaataataacacacatgtaatcgacccttctctacgaccttcagttaggtcaccaacagacgacatgatgactacgaaggcatgtcaccatttcatcacactcattcctcgcctatatgcgcactaattcgtttcttgcgaccatgcact

SEQ ID NO: 40692 - DNA, 393 bp, Zea Mays
cggcgggagcatggcctcgcctgtggatgccccctgccccttaataggtagtagagaaattacagttttctttaccagttcaattcctgtgctaaggtactggtggaagaatggtcgtagacatggtctaaatattatttaacatgctcaacatgttctctgtgtttgctcgcctgccagctacttattctaatgcctgcctccttccttggcatgtgactattggaggattctacaagaggacactcatcccttgctcctttcgacaattttgttagttgacatgcttgcacgcttgtacctcgtgaatttttagtttgtgtgattggttcagttctacgctatgcccataatctgattatggcctatgtacatccatgaggtgctgttatt

SEQ ID NO: 40693 - DNA, 285 bp, Zea Mays
aatatctctttttcgtatctatgatcctaacatcctctttacagaggacgaaaacaaaacagagatatataaaaagcttcattaaaacaatgctaggctacatttaacctaacttaggcgaaatgcctgccaacccagaagcctcaacaagagatatatatttagtattgctgctaaccaaggctgcatatgaaggattgttcattgggtctgtccacttcagttactatgaaagagtttggaaaacttggcccccctccaaatgccgcttcttcctttggctca

SEQ ID NO: 40694 - DNA, 320 bp, Zea Mays
ctattatggatagaaaccaggatagttatggtaggagagatcctgattggtgtaggggatcaatctggatcagcccacactaggaaggcctgatactgattgatagaggagatcaatctggcactatttctataagccactcatgatctcctctccctataaatactgtaaccggctggctcttcattcatcaatacacaatagcctacaccacatatctctctcacatggtatcacgagttcgggacactcccgttcctcccaccttccgctgaaatctgcagcctgctgcacctgcgcgctgcacgtctgcagctgct

SEQ ID NO: 40695 - DNA, 632 bp, Zea Mays
gctgggcaaggtactaacataatgtttgtaatagtatatatataggatatataggatttgaaagtttctaaagttattcgtcttacccgttgttccttgaaaacaaatttagatggtgaatctattgaggatatcgagattgatgaaactcaagatgcatttactgttaccccagacgtacctgacccgtatgataaggtgtatagtaacatacctgaagaaacacattcattggacattgttgctgactgcgtttactgcacagcaaagaagtttcagtatgaaccacctggattctgttgtcgtaatggacagattgatctagccccgatcgagacaccacctcaacttaggaggctgtgggagtgctcagatgctgatgcgagacacttccgtgataacattcgattttttaatggccatttctctttcacttctctgtactgttgccttgacagtatgactacaaacatgaattgtggtatttacacgtttcgtgcacatggcatgatgtaccacaatgtaaggtcgttcggtagggaagctggggcagaacataaacaccttgaactttacttctacgatgatgatcctagcctcgagcatagatatcgtaaatgtcgtcaagatca

SEQ ID NO: 40696 - DNA, 364 bp, Zea Mays
gaagttaaaaactcgcaggtgacaaagaagaggatacacccaagggaaaagtaggtaaagtacaatgctcagattgagatggaaaagaagatattttaaaggctggtataagataaacatcaaggtaagatataggggtgataaggataaaggtgataatgatgaaaagcataatccatggacagagttaaggtaagactggcaaagtgacgaagtggtgaaaacaatcaagggcaagataagtaaggttccatcaggatgatcgaagtaaagaagttcattaccgagggatgttataaggaacaacgagattagcaggaatgtgtgaaataaaatgaccgctcacggttcattaagaaacaag

SEQ ID NO: 40697 - DNA, 773 bp, Zea Mays
ttcctgcgaacttttcattcttgtcgaagactttctttctgagtgcttccagtatcattctgttggctctttctacctgcccgctggctcttgggtgtgccactgatgcatatttgatctagatgcatttttgttcacagaaatcaaagaactccgagctagtaaaattggaccccaggtcggttatgatgctgttcggtatcccgaacctgaatattatgtcttgtatgaattctactgccttaactgaagtcagagaagcaatgggcttgaactctatccacttagtgaatttgtcgatagcgaccagtacatgagtgcatcctccttgagccttcttgaagggtccaatcatatccagtccccagcacgcgaacgaccaagttacaggtatggtttgcagttgctgtgctggtaaatgctgctgttttgataagtattgacaagcttcgcacctctggactaactcggctgcatcactctttgccgttggccagtagaaaccagacctgaagaccctcccaactagagtcctggatgctacgtgtatcccatattgcccagcatggacctcatctagcagttgcttcccagtagctgaaagaatgcatttcatgaggactcctgtcgtgccccttctgtatagtgtttccccaatgagggtgtagtgagttgactgtcttgcgatgcgctctgctgcatttttgtcatctggctcctcctcattctttatgtatctgatgattggctccctccagtcatcagaatctgac

SEQ ID NO: 40698 - DNA, 372 bp, Zea Mays
ctcttactttcttgcgacccatgtccaccgaagatgacttgacttctccgtcgacgtgcgggaacgctccacctcctccccctcctgctgttgaggttgtcgaggttctccgggtccttctcgtggtgggggaggtggcagaggttggaagggtcggccgttcccaacggagtgcttgaagtctctacagttcaggagggtgtggcgcatgtccttgtggtacgggcactaggcgtcgaggatgtcgtccaatgtacgttcgcctccgtgaggtgctcctcgggcgcgagaggcgggtggtccggcggcatggacttcttcgcgaggcctcttctcccaacgcttgtcgggttgttggttcgtgtcgcgtcg

SEQ ID NO: 40699 - DNA, 404 bp, Zea Mays
aggaaatcagttccagcgtcagaacaaccaggcagcttgtctccctgccctagcaaccaaccagaatggtcaagcagccccagctcaagtaggaggtcgtgcatgcttctactgtggagagcagaaccattgggtgaagaattgtccaaagaaagcagctcagcagccgccagcagtcaatgccccagcaagacaaggagcaccacagcaagcaccaggagtccgtggtcaggcctacaaccatggaaaggtgaaccacctggaggccgaagtgatccaggatgctcaggacgtggcagtaggtatgtttccagtcgaatcttacccagcaaaagtactatttgatactggtgccacgcattcttttgtttctacatcttgggtagaatcacataacatcccca

SEQ ID NO: 40700 - DNA, 291 bp, Zea Mays
tggtcagatgtaacctttctctaacagctcatctatttgcttcttgatttcaaccaactcaagtccagataccctgtaggctcttttataaatgggggcagttcctggaagaagctctatggcaaactcaactttccgctcaggtggcatacctggtaaatcttttgggaacacatccagaaactctgacacaaccttgatagtctcgagtaaatctgcctccttgctatcaatagccatctgatgacaacctcctttccttggatcgggtgagactaactcagccaccac

SEQ ID NO: 40701 - DNA, 330 bp, Zea Mays
aaagcattcatcttctccgcttcgctgccagttgcagtttgcgcgtgaggctaagcagccatatcagcagcttctgtgtgagttccccgttgtctcgcttctccgtaggccaccgctcgcccgctccaccctctgcaggaccgccactcacgtttgcgcccgctgcttgactctacgttgcgtgcctatgcctccgggactgcagggggaggagaaagatgtcgttggcagctaaaaagtatagggcacgacaacacagttatctactagcttatctttcccttccccggtttggtagtttctctgacccctcatctactactgcgtgag

SEQ ID NO: 40702 - DNA, 522 bp, Zea Mays
caaattccctggcttcttccacgacgagcacctcccccacggcgtcctcctccttccccatggccgcccctcacctcctctagcatggcgctcgcccagccctcccccatctcctcaccaactgcttctccttgcctctccctgccatggacccaaagctcgcatgctccttggcacatctctctccctgcattggctagcaccaagctcctcccatggccatcccatgtcatggcgctcggctttcccccctcagccatggatgccgcccctccctggcaccctcacttccagccgagctcgcccttgctccttccccatggcaccaaagtctctagctgagtcttcagccctaaacgcacgccccctggtgcagcaacccctgttgctcttccatgtcactctagccttggagcttccctaacagttcgccctcatgctgcctatgaagccgcaactgcttgatcccattttcgtgtcgtcctctcggcgtcctcggcagcatggtcctacagatccttg

SEQ ID NO: 40703 - DNA, 408 bp, Zea Mays
caccatgcctcagagctgggcgggtggctacctcagttttccacggccactgaagcatcagttgtgcagggtgcatgcatatgtgtgtgggtggtgttacctctcctagtgcagaactcccctaggcataccccttcttcagagtgcttctaattattagaaacaacactcctcgctgtagtagcacaatcagttgtgtggttaagtcaaagatgaccgaggtctgtgctatgctgttcactggtgcattagcctgatctcattttgtgcagctcaagtatggtatggtggtttttgctcttgattctggattttgcttttgggtgagaggatagatattattcaagaactcatccaataaaaccgaactacatttgcaaatcattccagctagttttgttcctgggc

SEQ ID NO: 40704 - DNA, 289 bp, Zea Mays
gcaacacaagtgtgctgctgccggtgccgggtgctggacgccgaccacaagagggtggcacgtctctttccatccgcgacaaggcgtagcaagctgcaagcccagcagcaaccatctgtcagtttaattcaccgatccatatcgtatcatcagatcccaaccgacgtgccaccaacccacgttcggatcatcaagccatccctcatccatccaggtgtaccatcggatggaccacgaacacactcctccatatgctcattcagctcaacaacaacaggtgctgattgat

SEQ ID NO: 40705 - DNA, 376 bp, Zea Mays
ccatttaggttcaaattttccttttattcgatgagtaatattcatggggcggataactgctagcaccaggtccccctgtttaaacgatcttctttttaatcgcttatcaaaagctcgagacatcctaacttggtatgcctccaagttttgcaatgcatgaagccgcttttcctccaagttgtctaattcttttaagcgcaattttgtcgcttcgtcttctgtgagtttttcttgaatggcaactcgtaaagaggcgatttgtacttctaatggcaagactgcttctcccccatatacaagggagtaaggggtcatccctgttgctgttcgcgtcgtaactctatacgcccacaaggactctagtagcttttcatgc

SEQ ID NO: 40706 - DNA, 346 bp, Zea Mays
aaagctttggacttgcgtgaccgtggtagggactggctagttatgtattgcctccaccttagcctgatcaacttcaattccatgtggtgtcacaacatagccaagaaaagagacacggtctgtgcaaaatgtgcacttgtcaaggttaccaaataagtgtgcttcacgtaaagcattaaaaacaacacgtagatgattaagatgatctactagacatttgctatagatcaagatgtcatcaaagtagacgaccacaaatcttccaatgaaagcacgtaaaacctcattcattaatctcatgaaagtactaggtgcattagtaagaccaaaaggcatgactaaccac

SEQ ID NO: 40707 - DNA, 449 bp, Zea Mays
caagatccggcggtatagcaaaaaggcccgtccacctgacccgtgctctagacgacgcccagcccatttcagcccatcagtccatatccatatagctgcaagcctgcaacagtcaatggattatatgtacgtggagaaagtgcaggatgtacttgcaaaagaagaagaaggctcgtgtacgccggtgcatagatccagtcacagtcaggtagatggccaacccaggttctctcagcaagtccatgtccatgcctgtcaatggatatgggcatatggccgccattttccttcccccgcgagagtgtgcatgcgcgcctgtgcattgctcttgctcatgctcatgacctctgccgccacaggctggcagtggcaggcaggcagttcccacgcgagtctgccgtcatccccgctggtcttccgacaggtgaacggctgcggacacagacagg

SEQ ID NO: 40708 - DNA, 468 bp, Zea Mays
cgagagcctcgaccggatcggctgacttccagcgcgacggcgtccggccggccgccggttactgatcatcaactacgtaggtgcaatccaacgcataaaagagactcgcagtcctgttcatgtagattagcgcagttaagcattgtggatttcagagacggtaaacgcaggtaaaaacaatcatcatccgctccatctgtgaatgacgaaggtgaatcactcgacgtagcaggctataggctagcagccgtgctaatattttgtggcaccccttgatccattccaaagcgaactctgttgggagttttctatcgttttgccactgcctacaactgtgcggcgctttgcccaaaagcttgcgatgcgttccttggggacctgggactctgggaggcagagagagcagacaggcttttggccctaggctgtgcggttcacctttggcttggtcgaattgactctgaaaag

SEQ ID NO: 40709 - DNA, 274 bp, Zea Mays
cggattagcagaagacgtagagcgattgctgcgtcgatggtagtacctcgcagacctgcaaagagagagaagaggtgaggaactaaaggcagagaggatccatgcggctagcggagggacaactctagtttccatgttgacggcgatggtggccatctccatccctagcacccactctgctactcccggtgatctggttcaccgttgtgcacctcgccgtattccccctgtgcttccagggatcgtccaggtgtgcgttgacatccacgggtcc

SEQ ID NO: 40710 - DNA, 288 bp, Zea Mays
ccataatggattgcacaagctcttagcatatcttcaaggatctggtttaccctttctgtttgaccatcggtttgaggatggtatgccgaacttcttatcagcttggttcccaaggactcttataacttttcccaaaatttggccacgaattgggctccttgatcggaaatgatggtcttgggtatttcgtgtagtcgtaccacttgatcgatgtagatttcagcatacttttctgcccgtagggtggggtgtactagtataaagttggctgtcttggttagcctgtcc

SEQ ID NO: 40711 - DNA, 622 bp, Zea Mays
caaacgcgtgttgtgctgaccagcgctgcgtacgttcacttgaaacaagcagagatttccaagtacaccaggaatcttgctcccgccagtcgtgcaatcctgctgtcaggtcccgcaggtacattgtcatcttccgcttgtattggcactcctctcagccaatttgtttctgcttcactgaactaagactcaatgtcctgtcttgaagagctctaccaacagatgctagccagagctcttgcccactattttcaagcaaagttgctcttgctagatcctactgatttccttataaaggtcagtttggctgaaacagtctcccttcattcacaaatcatgtcgtttgtaaccaaatagtgtccttccttacagatccataacaaatatggcacaggtggcggcacagagaaggtaagaaggcctttgaacattccagctttctgaggtagtgaggttaccttttcttgtgacatgcccatagcgccattcaggtgtagtcattattaatagaaattactggtgcgttcagtttgcttttcattgatatgatgatgtaatacatctgcatattgttgccgaacttgatctttttgctcattcacagattctcatgcctcgatta

SEQ ID NO: 40712 - DNA, 414 bp, Zea Mays
gttgtatcccgctcgttcctcgtcgttccaggtcggtaaccacgccctgcccttctggggtggaaaatatcccagcctgaaaaccacaccggaagggcacgcgacggcggtggcacggatacgaaattcttcaatccggcgtcgatctgctccggcgaccgccttctcactggtatgcttcttcctccctgcttctggtgcccggcggagacattccgtccgcgcgtcgagttgtggagtctaatttcaggctcagccacatgaccacatgtgttttcccccgcgacaagaacgtcgcggaagtcgacgcggtcttcttgatgtcccgtgcctccgcctctcgtccctgcttctggtgccgaagcactctccgctacgtggccggctggctgatctgctcccggttcagtttcg

SEQ ID NO: 40713 - DNA, 345 bp, Zea Mays
ctgctggagcggctctggccattcggtccttggttgctttagtcttcgggcaatatctagttgggtgctctaagtctttgccattaaagacatagcaaaatcttcttggctactgagggcctcggcctctggtctcgtttccgttgcggccttgttgcggagggtagttttgacatcgggggtggacctctcctggttactgctggtttgcaatgtttgggacttgtagttgaccacgctcttgatgggttgggtcttgctgtggaggcctggtccatgtcatgctggtctctagagtttcttttggcttccgctgtgactcgacttttctatggtggagttctc

SEQ ID NO: 40714 - DNA, 520 bp, Zea Mays
ggcgggttgattggccagaaacagaggggctcctttgcaatttttatcagccgaagcggtatcgccatttctggccatccgatcagaatcagacgcgccagatcataacgcgaaccggtacgagcccgcgagcgtaggatcccgatccaacggtctacaacatggtttcttttcgcccgcacatccgatgatcaccggccgagatcgacacggccgaatcggtacgctggctcacatcgtggacgttgataatgaatctaacggttgcacatcaatccggctgagcggctacggtcatccgatccccaccgtaccgcacgggatcaacggtcgtcggccttcttctacgttctaccacaccggttctctctctcttctttttttttctttctccagctaatccgccgcggccgagcgccatggacgcgacaacgaactattccgagctcgccattcgagccctatctaccgccaggacgcctctgctcctaccttacacggccacgcattcatcttcttc

SEQ ID NO: 40715 - DNA, 302 bp, Zea Mays
gatctgcagctgtacaacactactctgcatgaggaagttcatatgtcgcacaaccatttacacctgtatgagctgcccgaggaagccgagatggaagcaggtgtagttgaagctgatggcggggaacttgatgggggcttgacaaatttggaatcccgcctcttggtcctatggaagaccaccctctagaaggtagtgacgcatctagagcagtgacaagctccgatgactagggaatgtaggagtgtgttgtcgttttctttcctagacttagtaggggtaggaaattaggcagggtctag

SEQ ID NO: 40716 - DNA, 387 bp, Zea Mays
tttggattgagcactagaacaggccagttgttagtagcataaagttagttatttgtttggttctctctgaactagcaattagctgtcagtttgcaaactttcgtggtggatatgcagagggacttttgactttgtttatttaagacataaagtaacatatgttgtagcttttaacttatttctacccccctgtactaacctagcaaaaaaggatatatttttccaatgctaccacattctgtctatgaactatttgataaatgcacacaatctgctaaaagaaaccgaatgtcacggctgctttgcttatatatgcctatgtaaagcaattaagttgtataattctactgaggctagtttcacgaatgcagcagtatgttactaaat

SEQ ID NO: 40717 - DNA, 353 bp, Zea Mays
gccttccccccggaaacccttctggactccccacgggtccaaccttttgatgggtttgtgtaggggccactacaacgcgagcacatggactcaagcggcaaactcagctgtcaagttgcaacccgaaatgcacatcgtaaccaggcaccaaagtactatggccgacggttcgtgcatagtagggaacctagggtcgggacctagtcctacggcaaagtactgaaccaagaggggatccgtaacctctcccccagcagggaggaacccctcaaggcgatggaaatatgccaacccgagggatgtcaactttgctatagccgaagaagtaccccttcctatctctataagttcag

SEQ ID NO: 40718 - DNA, 325 bp, Zea Mays
tcgagacacaataatcaggaaacaataaggttggatgctgcccaactcatcgaaaaagagccaccaaggagaaacacgctcagggatcaggtcctcggacctctaggggccacgagttagagggagtggaaagagccccgtccacgtaaatccacccctagatgaccccgtgctccgagctggggggtgggctaggcagagctaggctagggagctagatggaccgctaagggattgctcgagtggatcccgtgcgaccatcaaaatactatcgccatcaatgctacgcataccacatcaactgtgcatgactccaagtcaaaat

SEQ ID NO: 40719 - DNA, 568 bp, Zea Mays
gtttcatcgagaagaatgcaggaagcagcagcttgtttgagcagggagaggaatacttccatgagctcataaatagaagcatgatcgaggcgatggagttcgacgaagggtttggcatcataattggttgtcgcgttcatgacatggtgcttgatctcatccgtgacatatcaaacaaagaaaattttgtcactgtctcatatgatgatggtagaagaggcacaacgtcgtcatcgtcacgaaacgtggtgcgtcggctagctcaccaaaatagaagaatgacagaggacaatcctgtggagggcagcatgacacatctaaggtcactggttgcttgtgggtgtgatatggatggttgggtcatgcactcgagctctacgctgctattgcgtgtgctagctttagagcaatgctgcacaccaccatctatggacattggtcatcttggaaaactgcttcatctcagataccttgggctacgtggtactctcgtagacaagctcccagacgaaataggatccctcaagcttctgcaagcactggatttactaggcaccggaatatcacg

SEQ ID NO: 40720 - DNA, 361 bp, Zea Mays
gcccgaatgacatgaaggccatcgaggaccatcatggaggtctcgagattgctgggcagaaggggttgggttttcgaggccctcaccatctccccttcaccattgaggacgaagtcgagatctccgaaatggatggttgttttggaggcctagatggcatcatgactgaccatcgagagcatggggaagaaggcgtcaagaacgtgcaagtcccctacctggtgcgccaactgccgatgtttctaatcaactccaacaagtaaattagtttttgcatgtttcgtggtccggatggtgtgctcagtgggcgcaagatttatactagtccggacagaacgttcctacatccagtctacagtgg

SEQ ID NO: 40721 - DNA, 331 bp, Zea Mays
aaattatacaagagacagaggaacaagtccatcagataagagagaatttgagaactgtatagtcaaggcagaaaagctatgctgatactcggagaagactgctagagtttaaggagggtgatcatgtctatttgaaggtgtcaccactccggggtatgcgcggatttaaagtcaaaggaaagttgtcccctcgcttcattggacccttcttaatcctaaagcgagtggaggaggttgcatatcaattggagctacctgatcatcttccggatgtacatgatgtcttccatgtatcacagttgaagaagtgtcttagggtacctgaagagca

SEQ ID NO: 40722 - DNA, 522 bp, Zea Mays
ttgaacgcctgttccacaaaactcctgattattcgctcctaaaaatttttggttgtgcatgttggcctcatctccgaccatataacaaacacaaattatctttccggtcaaaagagtgtgtttttcttgggtatagtgcatctcataagggctacaaatgtctagatgttgattccggtcgagtttatgtttctcgtgatgtcatctttgatgaaaatgtttttccctttgctaggacatcactcgagccttacccagatatacccaacccacctacagccgtgcgcaattttcatttggctgatcatagtgttaattttggttttgatcatatggccacaccggtgctccctaaccctttgcatgcagcgatttcaccagaaattaattcagctgctgcgcccgctgtgccaggagattcgacggggctcgccaccactgcagtgcccgcggtgccagtggcgcccgcgtcctcggtttctgccgtggaaacagaagagcaaactgcaacgggtacttctt

SEQ ID NO: 40723 - DNA, 444 bp, Zea Mays
cattttgcgtgttctcatttgcactctccttgaaggtgaataattgctgaatttagcgttaaatctagacctccggacctccctagatagtacacaagcggcgagaatgtgactgatggtctcctctgcctggtcacagaagggacatgcagattgatggggcaaacctcgtttggccaggcagtcaaatgtccaacacttattattaatgaccaaccaaatgaagaacatgtagttcataggcacccaactcttccagattcgattctagggagagaaactgatggtccctagaaacataaaattatacgctgacttgcaactataggtaccagagattgagagcttccagcggtgctggttcgaggtatcaggctgcagctctagcccatccaccaaatcctagactagcaagtattttgtaaggacatgtactgatagtgc

SEQ ID NO: 40724 - DNA, 350 bp, Zea Mays
ggtcgttgatgaggtcgtcgaactttttggttttcacaacgatgtcatcaacatagacttccacgttgtgcccgacctggttggtgaaggattggagcgtacgtcattgatacgtggcccaacgttcttcaggctgaacaacatggagacttagcagaatgtccaaaagggggtgatgaatgtcgtagagtgatggtcggcctccttcatagcgatctgatggtagcctgagtatgcatctaggaaagagaggagttcacacccagcggtggaatctactactcgaccgatacgtgggagaggaaaaggatcctttgggcatgccttgttcagccccgtgtaatcaacgc

SEQ ID NO: 40725 - DNA, 637 bp, Zea Mays
tgaagatgatgaagaagatgatgaaatccctgtaattcggaagaacagccgacgttacatagctagtggggaaagtagcggtgttccttctcctgctttgtctgccctcattggtctgcaagaattgtctctggcgaactttgatcaaactcttgaagacatggttccagaagatctgttgtcagagccggcagatggtggcgcgatggttgtttgtgctgatgtgcccgatgccgggttggggtcatctcgagcagcgtcccgcgcctcatcgaccttagagcgcggtcttgagggtcaagaggctggtctggattgcattgcccccatggaagtgactgagggtccttcagccttagaggtggctgttgcagagaactcggcccccatggatggcgctaacgcttacccagcccccgagggtgttgccggagatgatccggctcggatgggtagcacgagctgtgacccagcccccaagggtgttgccggagatgatccggctcgaatgggtagcgcgagctgtgacccagcccccgagggtgtccgagtgggttctccctcccacacttccatggatgttcacgtagggtcttctcctccacactctggttgcatggcggtagcccaagccttc

SEQ ID NO: 40726 - DNA, 288 bp, Zea Mays
aaaccacgtccgggccttggatacggtgacaaaaggtccttgtcgaatgctaacagtacaccatcacgcactgtctcaataagcccccgctgacatgtggggctagtcaaccccgattttaggggactcaacatcggactctctacaatgacccgcatactcggaaggatgcgatgggtacaccataccgggtatatgcctacgcacaccggcgggtgatgtaggcccgtgacgacaggcagagccgcgccacgcacgaccacaccgtgggactgacccacgggaccc

SEQ ID NO: 40727 - DNA, 327 bp, Zea Mays
atttcggcaactatttttgtgtagtattaatctaggtggctgaagtggctgcatggctgtgtgtaatacaacaaataccagtagagtagtgtcatgtatgcatttgtggatgtattatgcattttttgtagaaaaactatacttttaatcgagcgagaacatagtaccatgcttttattgttctcctgctcttacctgacattgtgttacacagtgatacaaataactttcttttggggcagtgtagccacaaatgcctttatccccttccattctgatttttttgttgaattcaggttcctgatgatgttctaatctatagatgtg

SEQ ID NO: 40728 - DNA, 425 bp, Zea Mays
gttatagactccttctatggtcagcagtaccaaaggcgcagaaaaggaaaagagcagcagcagcaaaaggaatcaggagaggagatatgatttaggcacagaaaaggaaagaaggagccgcagaaacaaaaggaatcaggagatatgatttagttgttcctatactagcagattgcttaagaataaatgaggagagtgtttccctcaattaagagatatgatctagtttatttccctattagtattatttccttaagtaaggtttccttaagagaaagaggtgctagctatataaagcaccatagtttgtaataggggacatcgaagaagaatagatctcccagagagggcgaactccttcggtcacctcgactggagatcgacctcctctggttccaccttccccatagtccattgagtccatt

SEQ ID NO: 40729 - DNA, 350 bp, Zea Mays
cttcgtagtcttgcgataagcaaagttgtagcagccaaaattttcgtgcagaccatctcctctggctttagtctggtagtgtaattcatgaactcggcagaaaccctcaccgaacggttccaccccctggctacgaagagcccaaatgtaaacacttaatctaacaatagcattgggggtcagctaatgaaggtaaatcccaaacttcttcagtacaatagcaatcatcttattcagggggaaccttagaccagctttaagaaaacttttgaagactactacctcgtcttttcctggctttgggatagtttcctctccaccaaaacgaattaattccttcttggcctcac

SEQ ID NO: 40730 - DNA, 450 bp, Zea Mays
tttttgttgcagttccgcaatctggagttttaattctgctaactctgtgggggccatgcggtatggtctttttgcgatgggcgcagtgccaggaatgaggtctatgtagaactccactcctctttcgggtggcattccaggcaactcttccggaaatacatcctcaaactcttcgattacggacatgttttctgctaccaggttaaacatcattggatcgttggcgggcggctgggcttgacaggaaactgcttttccttggtgatcggtgagaaggacggtcttacttgcgcagctgatgatacccttgtgcttagttagccaatccattcctaggatcacatcaatccctttggatggcaagacggttaagtccgccaggaacactaccccacttaagagaattctgacttgggagcacctgagttggcataggaggtctgatcccgg

SEQ ID NO: 40731 - DNA, 414 bp, Zea Mays
cgaagttatagtttttaaatgattcttccgagcaggactttggttccctctgtacgagatgatcggtgaagttttgaaaagatttgaaattaccttcatcaactcactccaaatgccatagttagactcagtgtatatatttcagatttgcggagttagggaatgagtgctaatgccgaagggttctgcagagtgcatgaacttcactatcagaccaagtccagagcagacagcctccacaagaacttcggatgttataactttgcctatcgaaaggacctgaaggctccagtgattggatatcgcattaagtgggctactggctggaccaacgaatggttctatgtgaaggctgatgagaagaagagggaaaactcatgagtatggcgatgagtctgttaaagctgagcttcg

SEQ ID NO: 40732 - DNA, 529 bp, Zea Mays
gtcgtgcaagcggctgcagcaggaggcaaagccactgatgggagagagaggcacacaacacatgtagtactagaggtgtggtgtatcgattggcccgtcaggagttatccccagtcgaccatggccatggacaggcggcatcatcagtgtagtagtactgcatgcatgcctttcactcctttcaggcatgccctttcacccttttaggcatgcaggcgagaggctgcaaggttcatatgtatccggaccatgtatgagcatcgtgtcatatcctatgcaaaacaatagaaaatgcatgctagccccgttcttgttttatgtgcgtgcgtgcgtgttggcgtggagtggagctagctgctagctgatgcagacaaatccagtgcaggctgacgatgcacgtcatgtgtcgtttcttccaaaaagcatgaatgcgtcggagggagctgtaaataaatttactcattccagttgtccagaccgtattcggtcaagaaaatccaattttgtgtcgggactcgggaggtgtata

SEQ ID NO: 40733 - DNA, 309 bp, Zea Mays
ccaggtaacaattttaggtgctgctccattggtgtatccacaggattacaaccctgcataccacaattctccagtatcttttcagcatatgcactctgacagatagtgatctcccctggtttctgctttacttgtaagcctaggtagtaactcaataggcctagatcacacatattgaaccttttcatcatctgttgcttgaagacagctatctcattgctgtttggcccacaaatgatgagatcatcaacatatacaccaactagaagtaaggttacacctgttcctcgtttgtaaacagcatgttcc

SEQ ID NO: 40734 - DNA, 410 bp, Zea Mays
gcaggagtaggcgcgacctgatactgacggaaaccctgcatcggcacgaactgagaagtcccaggcacataaagctgttgtggaggaagaggaactgaaaactgctgctcagcacttgacatcatgttgatagtgccctgagaagaggaggaagtcaccggctcccatctgagcttcccattgggattcctcctacacaccacatccttgtggtcctgactgcagatagaacacctgccactccactggcactctgcacggcgatgcgcatctccacagcggaaacacaccagccccagcccgggcttaggaatggcccgaaacctctgagtacttcctcctgaagtacccgcatcagaagatttgccacggtaaggatggtggcgctgatgctgagacttgcccttctt

SEQ ID NO: 40735 - DNA, 497 bp, Zea Mays
ctcaaactgcctgatgaaaatatcctaggacaggactcctagtgaagaggagtgagctgcctgcacgcctctccaccaaatttgagcctcaaccttcagcagctatgtgccaaagcgaagacgatcaccatacacaatctcaaagacattcatcttatcctccacataagtcagccaatctgctgcctcgaccggagtaccactgccatcaaaagtgtccaacttcatgcccatccactgcatcagagaaagaccactgacgggaaggggcacctcagccctgccacctggagcagcacccatagggacagcgcccccgggcactcctccacctccagcaccctgagcagcacccgcaggggcaacaggaatagcttgcctcagaatggccaactcctgctgcatgggcctacatcgcgactaacattgccgccggactcatagaatccccactaggaacttgcgggctgccacgagccctacgaggcggcataact

SEQ ID NO: 40736 - DNA, 438 bp, Zea Mays
ggagcacaagcagagatgctgggcatgtggctgctccatggcagcagtttccatggctagtgctactgtgcaggggaaagaggggcaagagagaggtttcatgagttgcacgaaactacataggacgcgacccttcttttatggatgcgagaggttgtgggtgaggtggataggcgcggaggcgaggtagttgtggtggcatctgagtcagacacgcacgcgcgaaacgagtgacggtttgagaagatgaagcggacgcatgggtccatgatgacaatgagatgaacgggtgtggggataggcagttgtgcggcggattgcacgagaccgtgtaagacagagacggagctagacgagtggtagacagggttacataaaattagacaaagatagtcggagctggcccacgggcccaggatgataaggtagacgtcggag

SEQ ID NO: 40737 - DNA, 493 bp, Zea Mays
ctcaatttggtctgcttcactgctatccacagccatctgataacaacttcctttcttcagctcaggcgggactaactcggtcaccacttcctctcctaatggggacactaacttgattgtcctcttatcacaactgataactgcctgatatttatctagccaattcatcccttggatgacatctattccctgagtacccattactatgaggttagcgggaaacactatccccctgatttccacacttacattcaaacaagcgctatcggctcgaattctaccaccggctgagtcaatttgaatgggggttgacatggcagttattggaagattatgtgcttctacccatgatgcagtaatgaatgaatgcgttgctccagtatcaaataacacttctgcaatatgggagtcgattggaaacatacctactatcatgtcgggggtctcctgagctgcttcagcctccaagtggttcagtctcccatggttgtag

SEQ ID NO: 40738 - DNA, 527 bp, Zea Mays
cagatctaatcctagccgctattcacggatccatcggttctaaacacccttcccccatcaacgcaccagggccgtccattaagagatctacggtcctggcacgtcatcaaccttgagctcccttgctacggcagtgcgcccagccatccgcgccaatctagcttcgcccgccattaccggccaccacaaattttacgtgacagcggaaccaatacctaatcgagagatgctacacgtagctagggatctagtgagttcggccaggacttcttaccccggatcgcgcggcgcagaggtccaatgccgacgtcttgcggcacagcggtgatttctccggcccggcgagcaatcccgcaggcgcagacctcacgtagccaccaggtctctcccccgcgatgtccgccgtgtcaactcggtcgcccagggcacttcgcacgaacagataagggaaggggacaatgttctactggcgggtggactcccagatcgcctcgcggccaaggggtctgacaaccgagggagcgaga

SEQ ID NO: 40739 - DNA, 420 bp, Zea Mays
acgaggtggaatgcaagggtcgaaagtcgatgcagtcaagccacatgaaacgagacgtggaggagaagataagctaacatacccccataccctcccccccacacacacagacacacaatatcacagcaggagcggtgagactggagaagaagctgacagctaacatctctctacaactataagagtcgatgtgtcgtgtatgttgtggctgaagaagtcgatgggtcctcatgcaaagtggtagcccattgtgtcgatgtcaaggtaaccaagagtgagggtggaggagtcatggttgcgaatgtcatgttgttgatagccatggtcaacatagcacccgaggaagtcgatgtcaaggcagccgcacatgaagccacgagagcaaagaggcaccatggtgatgacggagacacatcgagc

SEQ ID NO: 40740 - DNA, 305 bp, Zea Mays
aagccttgctcaaataagctaccggatgaccagcttgcataagtacagccccaacacccactgcgctagcatccgtttccaaacaaaaaggcaatgaaaaattaggcagtgccaacactggggctgtaatgagagcttccttcaaggcttgaaatgtcgcttcatgctcagaagtccacacaaatagggcccctttcttgagcagagcttgcaagggtcgagcaataagtccaaagtgtttcacaaaacgcctgtaatagcctgccagccccaaaaaactgcgcaattccttcactgtacccgga

SEQ ID NO: 40741 - DNA, 367 bp, Zea Mays
gtacgatctaatttatgagtctttatcttctatgaaagggcaagttatagctgattttataactgatcatagggttgatgtagagcaggaaatctcatgtcctaatacttgcccttggcaattattttttgatggttctgtgtgcaagaatggcagggaatcggctatgttttggtgtcaccaaatggtctagtacatgaaacatcaattaggattgaatactgctgcactaacaatcagattgagtatgaggctttgctgtttgggttaatgcatttagatggtatgggaataaaagatgtagacatgttcagggattcattgcttgtggtacagcaggtgagaggggaatttcagtgtttagatg

SEQ ID NO: 40742 - DNA, 312 bp, Zea Mays
gcattatcaacgtgtgcgaagggtaaggaagttagttgaaccaactaggattagtttatgtagttggaatgtagggtctcttgcaggtaagttaagctagttagttgatacaacgactagaagtgtaaatattacatatgtctaagagactaaatggaagggttagaaggcggagcaggtggacaataccgacttcaacctttggtacacaggggcaattgcaactagaaatggaggagttttgattaataagagcctaaagagcgatgtagtggatgtgagaaggtgaggatatatgattatcttattcaa

SEQ ID NO: 40743 - DNA, 520 bp, Zea Mays
tagcaacttaacaggactcaagaacgacgtctaggaaggcgagtggagggacagagaggtgggtcgtcggagggggtgttcgcggtggcgcagagaactgatttgggggaaatccaaattcgggcgctacggtggaagattggaggcgagaagcggtgtgctgggcgcgtaacaagtaggtggaacaggggtggaggtccaatttatagactccggctgagcttatcacgaattttggaatgggatcgagttcaccgtggccaggatatttttacggtggccagctcaccgtggcgcgttagagggaaatggttccgggatgataaccggttgcttgccacgatctttatgacgcggaggatagatcgctgcgtgtcacaatcggggaaacggtgagctccgatgatgcaacacgactaaccgcggcgggtaaggggaagacacgatggccgtactgaccagtgattgggttcacccctccccggatctttcaccccttcccggtgttatctatttctca

SEQ ID NO: 40744 - DNA, 336 bp, Zea Mays
ggctctttagcaatttgcacacgcgaaggggtatcttctattgtgggccggacgatccagattctgcgacctggattgaatctagtcttaatgaaacggtacgcaccgaggatcgtcgatcacgaaatcgacggtcacgatctaatgcgcgaaggaggtatactaccgtttgatctgaaccgcacaacatccatcccacggtccaaaccccatctgaccctggaccgttcatcccgagaacaacgacactggtgcattctcccttcttccgcaccacggcgaaaaatggcgaacagggccgcggcgccagactacactccggcgagaacaactccg

SEQ ID NO: 40745 - DNA, 342 bp, Zea Mays
gtctccgtcgatgaggtccttcgaagtgggctcgtccacatcggggacggctgacgggagtgtccgtggtgacccatgttttatttcttgcggggtcatggcctccgatccatatagaaggcggaaaggggtgaacccagttgccctgcactcagtcgtgttcagtgcccagaccgcttcaggtaacaggtcggcccacttgccctttttgtcgtcgaggagcatcttcttcacggctgtgaaaattttgccatttgcgcgttccactactccgttggattgcgggtggtacactgaggcgaaggcaagcttggtgccaatggagaagcagaaatctttgaa

SEQ ID NO: 40746 - DNA, 416 bp, Zea Mays
atcaaagccacgacatccgcatacatatacccaagagaggacactagtatgggctcttgggacaacggttgagagaaatccccaggcggagagtggcaactatggctgatttttgttgatgcgagaggataacggagatcccgaccggcggggcccagtgtctgaccaagaacaggtcttggtgttttgatgatgttcattcggcgtcggaggttgaggatgcggatgagtcggtcttgtagtagaccaccttcttcaacttctttttctccttgtcacccttcttgggcaacatgatggagccgacagattcttccttgtcctcctagtgcttgtcgccggatatcttgacctcctttgatgaagtcttctcttcttgcttctttcccgaagactcaaatatttcccgatggcca

SEQ ID NO: 40747 - DNA, 537 bp, Zea Mays
gccaagtcatattctatgagtgcataagcccatttaccaattctaccactcataattgggttatgcaacatgtatttgatcacatcggtttgaccagaaacagtgcaacgattagacagtaaataacatctacacttggtgcatgcataaaacaagcataatcataacttctcaatgaaagtgtacctcgtttcagcatccaccaaccttcgacttagatacgtcaccacatgctcctttcctccggtttcttgtgtcagaacaaccctaataaccttgtcttcagatgcaatgtataatctgaatggtactcctacttgcggtgcttttaatacgggggccgaagacaaatatttttaatgagatcaaatgcttcctgctgctctgccccaagcgaattcggcatcattcttaagacgaaggatatgggtgaaggcattaatcttcccggctaggttagaaataaaccttcgtaaataattcaccttgccaagaaacttctgcacttcgaccttacaggtcggaggtcccacattc

SEQ ID NO: 40748 - DNA, 357 bp, Zea Mays
agatgatggagcaccgtccgatcgtacacgagtggctaagattagttggaggataccgcttcgcccgatcgcgatctggggcgttgatcttgcatcgggcggtcagcgggcatcgcacgactcattaaatgtgggccgtcagatctagatccgagggtccgcgctacattccgtttggtggggctcgggatttaatctggatcgtccaccttacatcgtacggtcccaggcgttccataccccttcggccgaagccttttgcataagaaaccccgaccaatacagaaatcaacctgcagtcctgcgtgggttgagtctgagtcacaggcatttttgtagattaaacccttctgttat

SEQ ID NO: 40749 - DNA, 1054 bp, Zea Mays
tgaaaatgtgaactataatttgtacaaaattgtaacatgtaggtagtggaaagagttatctggcaaaggcattgcgcgatcttgaagttgataatggtgcaaatgcgcctaggatacactccatggatgattatttcatgattgaagttgagaaggtcagcaggaattggaaaactactgttcttagtaatgatattgatttagtttgtgtaataattgtcttaatctgggtaatctggccaatattctcttagaaagtggaagacactgaaggccctaaatcttctagtgcatcaaaagggaggaggcagttgactaagaaagtaattgagtattgttatgagccagaaatggaggaggtgatattactttcaacaacgctgtaattctttttctcttgtcatatgcacctgcaaacttgagctcgctatattagcaaagctatacactcatgctatcatttgtaaaaatatgcaaagctaattgtcctatcatttaatttcctagtaattcaacttttcatggtgaagcttctttatcgatacggtatctttgtatataggatgcccaatggcaacatcttaaaaatgaatcatatgctgctcctccagaacatcaacatatagaattaggcccatttttaggccttctcttggcaggctttgaataaaaagttataaattaatttttgttttgtttcagctcagtccttgctccttaatttttgtttctgttactttggcttgtttatcagctattatatagaccagtattatcgttgctgattttttgtgtattttatagacttacaggtcaagcatgttgaaggcattttcaaagacccttgatgaaggaaattttacatttgtgattggtatggagttatttagagcagcttatatcaatcattactgtccaattcccatatgtaatattttcttctcatggttgtttcttcaatattgtggaggtgccttcaaaatttatgggttaacgaaacactttaccatgctttattttttctttctttcacatcatcagtgctacatatgag

SEQ ID NO: 40750 - DNA, 553 bp, Zea Mays
ttcataacacatggttgatgttactagattcaacatggaaaagtactttggtaatatttatccttttctatttaaagcagtatacttttacaacaaaaaatgcaagtcaaaatgtcatatcggagacagtatcacaaccctaaacaatctaagtttggggtcagagggagtgtatggccttcatgttatcctctacctccattaaaccaatggtgttgcaacatatattaagaaacataaggaacacatcaatctgtcctgaccagttgcttgtgtgcgtcctgcttgtataggtattggcaattaatatcacacctttctttcaccttggccctccagtcttcatgtggtatttctgagtagtgcaagagtacatatattttagcaaaaacatcaattaagtgttgcaactccttgccttcaagatgtgaattgttagattattacatgtgcccattagaccatggaactgttgtgagacaacctatatgaatttatgtttcctgaaataaacggaagagctacctgccccatgttcgttaggtgaacacat

SEQ ID NO: 40751 - DNA, 641 bp, Zea Mays
ggagtaacaagatgtatcatgatctcagatccttatattggtggaccagaatgaagagataaattgctaagtatgtatctaagtgcgacacttgccaaaggattaaagcaagccatttgaaagtagcaggtaccttacagccactccctataccatcttggaaatgggaggacctcagcatggacttcattgtgggattgcccaacacctcctggcaccacgattctatatgggtcattgtggataggctaaccaagacaactcatttcttgccagtgcataccacccacaagacagaaaagtacgcggagatctgtattgaccaaatagtgcatttgcatggaattccgaggactatcatgtctgatagaggagcactgtttgtagcacatttctaggagcaactacaaaagttacttggcacaactgtgattagaagctcagcgtatcatccccaaacgtttggtcagacagaaagagtaaatcagattctcgaggacatgttgcgagcgtgtgtgttacactatggcaagaattgggataagtgtctttctctggcagagttctcttacaataacagtcaccaatccagcctaaagatggcacctttcgaggccttgtatgggagaaggtgtagaaca

SEQ ID NO: 40752 - DNA, 680 bp, Zea Mays
aggatgtgtagtcgggaaagaaggtctgcatcatgtcttcctcgagtgaggagtccctaggaggctcatcacccgcagaaaaaccagatgcagaagacgtacgatgaggaggaggaggtggaggaggagggtggtgatggtaaccagagccagaaggccacgggtcaccaggaatgggtccctgacccgggtagggaggaggagaatagtgaccagtgccggatggcctggggtcaccgggagttggtccctgacccgaatagggaggaggaggatgaggaggatctgaggtgtagtaggggtcatcaaactcctcggcctcatcctccggggtaatgaatggcacaccaaactcctgttggtgcccctcattaaggtccatgggggaagataggggttggatgtggaggggacccgggagggagaggataacctgtctccgctgcataacaaagaaaatcctcattcagccggtcagtcctgcgacgacatacagactcctcgaccgcccgagtgcggcacatggcgaagacgccaagaaggcccttggccagacgaatgaaaagtccccgacctcgaccccgtccctggtccggaccacttcctctcccgctgtggtccatcagacgtgaggcagcggcgacgcgagaggaggatgggtgatgtggaggctgaggagg

SEQ ID NO: 40753 - DNA, 363 bp, Zea Mays
gttggggagatcccggtctcgtgataccatgaaagagtagtatggctgggaatagttgattgataaattggaggagcccaaggctcatacatataggcaaggatatccctaataaaggaaagatctaatctatcaataggaaaggtctaatctaggggatccttgccaaacacagccaactaaccaaatacagagggggggaggcagccgccgcaccctgttagggcaggtgagccgcctgggccctatttccctatacatcacgctaacaaaccggataaacaaagagagacaatgacgagccgatcacacagcaaaccatggaggatgagggactgcagcagaattgaaagaagaaacggg

SEQ ID NO: 40754 - DNA, 293 bp, Zea Mays
caggtgcttgctcgcgcagctgctgctgtctgtgtcgcctcgagcgctcaggtagccaggcagcaactcctccgtggcgtttcttcttctccctccctgcccagcagtcgtttcttgctcgacttcttcaatgtcattattggcgaacgtccgtttctctatgccatcagacgacgcttcaattggtaattcaatccgtggttaattcgtctctaatcctcctcttgttctctcctatattagtgtcagcagctcctccacctaaccgaatgtagcggtagccaccatttccc

SEQ ID NO: 40755 - DNA, 509 bp, Zea Mays
tcgtaatcctcggtacttcatcggtagccttggtcgggttgggtgagttcctgtagcgccgttgggagctcgccggtgatttttgccgcggctggtaatgtgccaccgtcggctggcccgggggggggggggggggggaagaaggcccctgcgccgtccgtccaaggatgggtggacacgattagatctagaacccattcagccgcgaccgttggatcttggatttatggctccgatcggatctggcgatggttgatcggtggtcgttgatttgcagatgaacgcgcgggattagatcgcatcttcataaaaccctagccgtaggatcttaatctgatgccccacgctgcgtaccagttcgggattaaaccgatctaatctacactgtccgcttacaatccaacggccgtaaaaaccccgtaccccttcgtgggtacattttactaaagagccctcggagtcttggttatttaacccgccgtccaccctagggctaggatgagtctgtg

SEQ ID NO: 40756 - DNA, 353 bp, Zea Mays
gccgcgacatgtggaacgtggcgcggttagagtaagaagcgggaggaggtggaggaggccggatgcggacagttctgccaaagtggccttaggcgagtcgtgactgcgcctgctacccgggcttggcctcggatgagtcgtgactgcgtctgctgcccgggcttggccttggatgagttgtgactgcctgtcccgcttgggcttggccttagacgagtcgttattatgtctcacgctcgagggtgtcctcgggcgagtcgtgactgtgtctcccgtcgggcttggccttgggtgattcttgacagcctctctcgcccgagagtggtctcgagcgagtcatgactgtgtatccc

SEQ ID NO: 40757 - DNA, 661 bp, Zea Mays
ataacaactcggctaccttttagccttatctaatgctttggctctacagccttatcccttctactatagactttccctgtcataacatctcttccccccccccctcctcctcccacccctgtcgaggaacagctcgtcctcgagctgaaacagcgggtaagaggccttgaactgctgcaacgattcccaggtcgcggcttctggtggtgaatcagtccagtgtaccaagacatgccaaactccacgctgaagctgtgcctttagtatcttgtgtggtgaaggaaggagccagccattctccattgcaggaagctctgggggtgtggttggaggaggcccgcgaagtggtttgaggagccccacatggaagacatcatggatccgtacactggctggtagctgcagccgatatgccaccgtaccaatgccttcgagcacttggaaaggtcctgcataacgaggccctaatttccctttgggcctgtcgacgagtgtcaaagcttggcgattcagaagacggagccagacccggtccccaacagcaaactccaggtccctgtggtgagcatcatagtattgtcgggcataagcttgggcttgcaagagtctgtcccgaacttcctgaaggaagtgatcccgctccttcaaaaggtcttcacgc

SEQ ID NO: 40758 - DNA, 292 bp, Zea Mays
aggattgacacttagctaccatgtgccttaattccttgcacttataacataaagggtcatcagaacatttagattgatggtgtctagattatattcatcgaaagcatttggttcctttgacttgatccccgtgcgctctaaaatccctatcctgatgacattctcctctgttgtctgaagtcctcccacccctaggagatgagaaggacccaagatcattattcttcttctcagtaggtctacccacatagctgccaacgtcccactgggctgaatcacgatgaccaccata

SEQ ID NO: 40759 - DNA, 333 bp, Zea Mays
ggaggggagtcggtgatgtgttgtctcgaccgtccccggatcgggccactagttgaggctactgccgattcaactagggtggcatgacttcgagccaggacgccatggtctcgatcgtaacctcccggtgccttatctcgttctcttgtcgtcaatcgtgcgaagcgttgatagagcttcacgcgtctcgacaactgttgatggcgtgtcacaggtcacttggggatgagtgaggggtagaagatgattagttgcctgagtaagcagccgctgatagccttcaacatccagagtccgcgggaggccatcagctatctgagccaacactcctcc

SEQ ID NO: 40760 - DNA, 447 bp, Zea Mays
gcgggaccacctgtgggctgtggctttgcttacagattctgcgagaacaaaacaaataatagccagaggagaggagaggaccctaagcaatccggtattgtgttgtattgtattgacggtaaacttacccctcgtgcaacaactgctagcctggttttgtttaattagtccaagggcgcgttggctgcgaggatctcgagacgtactactacctctgcctctgcctctgcctctgccgaccgatccacaacgccacatgctgctggaatgaatgattagccccgggagctggagctgcgtgctctttggtggtggggtgggttttttttttaagcgatggtacagtacatgtgaggataacgggattgggacaagacaggcggagagggggtgttatctggcggagaggaggaatgtgatcctgatccggatggatctgagcgccgg

SEQ ID NO: 40761 - DNA, 407 bp, Zea Mays
atcgacagcacggatcttaaaactcgaaccggtatctattttctgatccgagacgttggtttgagatcggacggtgcccgatcgatgaccgccctaactctttctcgtatccctctcatggccaacgccggtggcgaagcaagtttccccatggcagcgccattgccgcccgccctcgaaactaccctccaacgcgtcaaacctcaatctgagcctagctgtgtgtgaagcagatcataacggacatgggagagggtcacataccaacacggcggccgcacaactcccagtccacgcgcaagagtggctcctccacgagattatggctccagcgagcaattctcctccagccgacccacgaagatgcttgggaaggccgtgcgtagacatccgcgaacgcgacaaag

SEQ ID NO: 40762 - DNA, 435 bp, Zea Mays
ctggttcatgtatgctttgtttgtttagatcagtatgtacaactatctttagtctccacttttgaaaattttatgtatctgtatctattgtcagcttactggaacaatgagaagcaagaaacccaaatgtgtgattcaattgatatatttattgttgttgctacatagaaggtatgattctagagcccacactccacaaaagtaattattaatgtaccttcagtgcctgatggtggtcttctgttattctagggtttaatgacccctaaaataagaaatgttgatcaaaagactatatgtgcaataccctcataggtgcgataatgttgtcaaagttcagagcagatgcttgtgtgcttggatgctcaggcttttttattgtttttgagtgtgtaattcttgactcgttgccatcaacaaccatcgtgtttgctg

SEQ ID NO: 40763 - DNA, 307 bp, Zea Mays
ttttcagctaagttgaacttaacttcaaccagggtccagtcaggttcaaccggaacccagacaggttcaactgggctcaagggcaagttcaaccggggtctaggcagtttcaatcgaggtctagggcaagttcaaccagtatccaggcaagttcaaccgatgtctagggcaagttcaaccggtgttgaggcaagttaaaccagggtccaggtaggttcaaacgatgtccaggcacgttcaagtggggtccaggcaggttcaacagaggtctagggcaagttcaactaggttttttcactggacctct

SEQ ID NO: 40764 - DNA, 539 bp, Zea Mays
caattatccagtctttcaaaaggtactttatgaagagcactgttcatctatttataaaggatcgtacagccttgtataaaattacaaatatatccctaagaccagtacatatgatttacaaatgatgcgagggcaaagttgacttctgcctatttcatcttggatacggaatcgtgggcaccttctcccggctctgtccaccttcgtttccatatgttgttgtgacgaagctaacatctttatccttatcttgttctgaaggtactcaatgtcgaagctcctgcaatacttaaaaacatgctagtaaccaatagttatgtgtttttgaggaccttcgaaagatgaaggccccaacagaaggccataggtccctagtcttggtgtaggacagcacctaatccaaagcccgacgcgtcgcagtccaccacaaaggaacactcaaaatctagaagctacaatacgggcgctgatgagagggcctgattgagtgtttgaaatgctaagtctgcgtctagggaccacttgaggccttctttctt

SEQ ID NO: 40765 - DNA, 406 bp, Zea Mays
aacagacttgcatctggagcaacgagtctttgcaggggcatggcaagttgcacactcatggtattcctgtcttaacgaaggcgcaggtttgaaatagggcatagttctcaaggaagggcctggcggaataatgtctgggcacgccatcgtttcctctctataggcttcttctgcagctcgctgtgcaagcacacttgcccttgccttcttacttgcagagtcatgccatctcccaagaagaaaataagctaccacgggaagtacaatgaagacaagaaagagtgcaggcacatcagcttcccttggttggagcatatccctaacagaatactgatatccagctccagaagttctctatttgagctcggaaaaacattccagaatacttattgacctacaggaaaga

SEQ ID NO: 40766 - DNA, 627 bp, Zea Mays
atggcaatggcgccgccgccttgtgcctacgccgagggacccggtaccagggaagaagaaacactcttgaccgttggatcatgatctggcgcgcagacttagatgatgggcatctggctgtccgttttgcgatgatcggccaggattagaaaacacttaccctttcgcggggattgacccgtggccgtaggattagttgtcagtggccgagatttgatcgcaaccatattaaatctggtgcgttgatcggatcagatggccctggttgcatggcaattcttttaatactggaatctaatctggaccaattaaaccagatcgtgcggctgatgattgcctataccctatcggccatgccactttacacttaagcccctacacttttgttaaaccaacccgccatcctcccaagtcaaaacaaattacaaccgagccctagatctttataagctagcccctgcgctctgtagaatttgtaccagcagtccttagcccttgttttcagcaaatagaattttagaaagtgatttataatataggataatcttagaaatttcgtaactttctcatttaaagtccaaattgacccattccagtttctataattttgtaatataattgtttatc

SEQ ID NO: 40767 - DNA, 288 bp, Zea Mays
ctgttcttactccgccgcggggaactctaccgtgatcagcacccctcgggttagtaattcccccaattgctccctgttctagcgcatttatagtctcttatggctctcagaaccgaccaattgaagttcggccaaagtctttcaccggaacaggcacttgctctgtagaacaccgtcgtgacaccctctccgtagcccagcgtttctattcgtgcccagtccaaactttagtatgtgcgtcacctctggtaggcctgtgaagctttcccaagcttcaatttggtcgtt

SEQ ID NO: 40768 - DNA, 424 bp, Zea Mays
gaagcagaggcagaaaaagagccttcggcacccggtgggggaaacgcgcagaagaagcgcggtatgatgaatgtgatgagggctattcttgataccccgccaccggtaattcaaaagaggatgacccctctgttgctgatgaagcgcctcaacgggccgaaagtagtggcggtcccctcggaacaactttatcagagattgatagacttattgctgacgtagtgcctaagaagaatatcgagggacgattgctcctgagacttcaagtcaaaggggaaaagaactaaagaagcctctttgaaagataaaagcttcgacttacggcacctgggaggccaacaactttccgaagaggatatatctgaattaaaagaatttgatgtgtctagcggctaccagcctggatttgttcgcttcggcggcg

SEQ ID NO: 40769 - DNA, 536 bp, Zea Mays
cttgatttgctctgtcagagcttctgatgaagaaggccatggtacactagccagaacccgaacgccaggttcagtgtatcgtcgtcggtgagctcgcgccaagatccaagtttgccggggagattcgtggttgccgcgcagtggataacggtgggggagtaaaagatctctcggggggtggatttagtcgcggggtgaaacttatcgactacgcctgtagccgtgcgacgtggctgggctgccggtgtcgtcgtggtacaccagcgacctcaattacgccatgccgtagccctttaccatgtagtagtaaccgtggcacgcccggacttgccatttcggagctgttgcatcggctggctccacgacggagccgccagtacaatgtcttgtcgcagccgtgctccgctctcttcccaaatttggaatagccatggtcgaactctataaattgagcacctcccttgcttcgtctcctcatcatgagcccagtgcaactctaacctcggccagtcatccagcatagcccaattaatttc

SEQ ID NO: 40770 - DNA, 340 bp, Zea Mays
aacatctcacccagagcgaagttgacgatggtggtgaaggtgacagccatggagctatccatagtcgatgttgcaccccctacctggtgcgccagctgatagtgtctagcactgacaacacactatggggtataccgtagagtacttttggtggtcggcgatgttgattgtagctcgatggttcatgcaaagcacgacatgacacaaagatgtatacaggttcaggccgctaaggagcataataccatacgtcttgtgtgttgctggagtttgaggttacagaggagatgagttcagtgttctagatgtgtctaatagaagatccaatcgccttttaggg

SEQ ID NO: 40771 - DNA, 467 bp, Zea Mays
tcgaagctgaggtcatcgcgaatatacaggaggggttcttaccgacagggacgatagatacggggcttcccacgacgttgggcggatccgcggttgtgcccgaccaccagcgagaaattccggccacccagaccaacggtgagctaagcgagagtaccgtgagtactggtgcgatccaacgaagcatcagggctaagattctagggagcgctagtaatgtggagagaccctaaggtgcgatggctctcgttcccctccttatcttctctgcttgccgccatggctcatgtcgcaggttttcctctcgtgatgaaccgtggtggagttggccaagggtggtcttggatttatagcgcgacggtagagtccgaggtggggagaacggccagcggtggaagcggagaagaaatcgcggtttgttggaggtaggagaacgagctgtccgagcgggcccacctgacagagtc

SEQ ID NO: 40772 - DNA, 333 bp, Zea Mays
gttgggagctcgaaccgtgcaattgatcaaggggacacgtttgttagatgttgaattaggtatcagccaagttagagcaccggccattgcgtgtcctggctcgtacagcttcgtcggagctcggtctaccgccgtgctgtgtcatggacctgacgttgtgaaggaatggaaatctagggggttttgtaagctgtcagtgaaatgcaggaatagtgtcgcgaccccttttcaagttattcaaatcgccaaggtcctctgcgcaaaattaaccatgtgggcgcgcgcatgcgggcgcgttctgcctatgctgggctggctcgggctagattcagc

SEQ ID NO: 40773 - DNA, 307 bp, Zea Mays
attttgaggttggctgagagggcactacccttcttcaagctcctgcggaaatcaggcccatttacctggaccgaagaggcggaacaagccttccaagaattgaagcagcacctatcttccctgccgatcctggttgctccagagccaggggaaccgatgtacttatacattgcggcggctgcataagcgataagcatggtgctagtcgccgaaagggcaacacaagaagggcagaaacctggaaacttaggactagccacagagacccggactgtccagaagccggtctactacgttagcgaggtac

SEQ ID NO: 40774 - DNA, 398 bp, Zea Mays
gtattttacctatttacccttggtcgtattctcttccttgtctcttgcgagtttttaactccaccctttgttgtttgttattacctttaccttcatcgtctctccatcttaccttgatgactatcttatgtctgttatttaaaattccctctcccatctcaattcgagggaagtgttttacttatactgcccttggtcggaacctcgtctttgctaggtgtgagtcttatcttaactccattctttgttgtactcataccactggctcttctatgccttcatattttctcttataaccttgtccgttatcgcctttgacccttgagacatttatgtcttcaacctaaatgcttacctcgagcttatcctttaaaagcctcctctttccttcaacctag

SEQ ID NO: 40775 - DNA, 341 bp, Zea Mays
cgagatcttggcgttgcaatttgttctatcaggcgtctgaaaggagtctgatggtacagtaatctgaacctgatctctggttcagccccctcgccgccggcggcctttgcgtccgaattcgcgccggtcgtcgcgattcgtgcctcaggcgagtagattttgctcacccgtgaaaagatctcgtcgcgaatgggttcgagttactgtggcctcgctgttcctcgaccacttgcaccggcgacgtggctttacgaccatcaccggagttggcgtctttcaccgtgattgtgccatgccctaggcgtttaaccacgtcgctactagccgcaccagctcgccga

SEQ ID NO: 40776 - DNA, 353 bp, Zea Mays
gtagttctctattttgtaaaccaagtctgtttgtgtttcagagaggtgtggtgttcagatttgagcgctcagagaggtgtccatcttatactcgagcatcgcaagatctgggcggggctggcgcgtagaatgggaagtacttgagcatcgcaagatccgggcagggctggcgcgtagaatgagaagaatgagatggcggggtggtcctgcacttacgatgggatgcaggccgatggtggtcctgtgcgctggatggtgacgaggggattggattgtgattcgttccatgacggcgagacgtggattgcgtttggggcgtggaggatataaaaggggcatgtgtggtgcatggg

SEQ ID NO: 40777 - DNA, 283 bp, Zea Mays
tgaatttttacttcaactcttctatcgggacctcacttatcttatccttgattgttttctccaccttgccattttgctagtcttcccttgactctatccatggattatgcttttcattattaccacctttatccttatcacctatacatcttaccttgaggtttatcttataccagcctttaaaatatcctattttccatctcaatctgagcattgtactgtacctacttttcccttggtcatatcctcttatttgtcacctgcgagttttaactctatcctt

SEQ ID NO: 40778 - DNA, 329 bp, Zea Mays
cactgctgcttccgcgatctcggggatacgatttctcatggtctggaatcttttgaggtacgaccggagagtttcatccccccggagtttgatggatttgaggtcccatggttgcgccagtttgtcggagagagattggaagttggcggtgaagcgccgactgaagtcgctccagtcgttgatgtagtgtcggggtatgtgtcgcagccattgcagcgcgtcttgcccgaggacaataggcaagtacgcggtcatcacatcctctgttgcccctgcggctcgggcagcagtggtgtagatggccagccagcctcccggatcctgcttgg

SEQ ID NO: 40779 - DNA, 414 bp, Zea Mays
tacgaatccaacattattctaggacgaagtgctctagataataaaaagaaaacaagcacactgacactgaaaaattccattcttggactgcaaataaattaccaaacagtcatcttagtgtttcatccggtaaagtggccaccgttgtactaccatcagcacatatgttaaataagtagggaatccaaatgttttgtaaataaaaatgtaaaaaatagatgcttagtgtttctgttactaaattagcacgacgtatcctggaacgtgctgcattccaagtggaatgctcagctgcagcccatgccccgcataagtaccaatcaatcagcaacactaatcaatgtatctgaatgccaggcatggagtagcttgtgaaacgctcgagccaccggacgccaccgtggagtggagccg

SEQ ID NO: 40780 - DNA, 284 bp, Zea Mays
ttttgattgaaaggtcggatcaccaacctttgtcgcttttcaggcccctggttgggcctgtcacctccaaagccctttgacttcccttggcctccatacttggtttcaactgctagcgcggtgctgacagccctgctgtaggagaggtcgaggcaggtggccatcttccattgtagccgatcattaaggcccctcataaaacagttcctcttttttaggtcagtgttgacctggtcaattgcatactgggacaaatgattgaacttgttgagatactatgtaac

SEQ ID NO: 40781 - DNA, 288 bp, Zea Mays
ctctgatactctgggtccagataaaacagtgtaccaactagatctgttgattttcgaattgtatgtgttgacgaagtgtcccttaatggaagaaatgttgcaaggcctgcatcaccgattttgctagtgaaatttctgtcaaggagtatatttgcaggcttgaggtcacggtggataattggctttggttttgaactgtgtaggaagataagtgccaatgttatttcccatgcaatacggaaacggtggtaccatgggagtggggcagtgtctcctttgcactgcagc

SEQ ID NO: 40782 - DNA, 280 bp, Zea Mays
cgatgaagctaacaactcagcctactctatccacccaaggaccaccaagatgtacctagacctcaaaactatatactggtggagagggatgaaaaaggagatagcttagtatgtggcccggtgtgacacttgccagtgaactaaggaagagcatcagaagtcgtctactgcaacccctcctagtgcctaaatggaagtgggaagaaataggcatggatttcgtaatcggactgcctcggacccaaaaagggaatgattctatctgggttataatcgaccg

SEQ ID NO: 40783 - DNA, 297 bp, Zea Mays
ggtagatgaaaatattttttctatacagacttggtcaaacttaggacagaattatttttcataatttacctttttggtgtggtagatgacaatactttttctatacagacttggtcaaacttaggacagacaattctggcatcctgccctttggagaggctgtcccaaaagcttaaaaggctcgctaaacatttgcagtcgtgagggcataaggaggtgggtaatgtgagaaaccagttgggccttgctcggtaggtgatgcataggctggaaacagcgcaggacaacagagttttg

SEQ ID NO: 40784 - DNA, 325 bp, Zea Mays
caacttttggaaaggttgctgcttcggctgctccaagcgagcctgcgccgaagaggaaaaagttgaaggtccttacccaccgaccgcgctacattgaaccggccatagtgcctgaatttggcggggaaacttcttcagttactgaagcgaaagaacctgctcctctcatacagaagattgaagagccggccaacatgccgaaggcgccctcaacggagctagttgaatcgcaggctaataaaggtaaaactgaagagccaaaagttgaagaaacaaaaaagctagaaattttaagcccttcggcggaagtaacagtgccgaaggc

SEQ ID NO: 40785 - DNA, 407 bp, Zea Mays
ggtataacctaccctatcgcattcaccattctctggggatcgtgtagatgcacaccatttagctattggagccctggtgccgcaaacctgatgttcgccggtgggtgcgccaccgccgagctcgccgttgtggctcggctccatccaggggaggaaggacgggtctcggccgttggatagccagggagtggccgtgatctgtgctgtgaataacccttcgaccgagggaaccctagccatagatctctgatcggtcggatgcgatcgaatcctggcacattaaaatatgggccgtagatctttcatccgatggcgcgcattgcgtaccgcttcgttttaacctagatctaatctggcgcgtccctcgctgatcggacggccagattctcgtgataccgcttcggccg

SEQ ID NO: 40786 - DNA, 422 bp, Zea Mays
gaaaaactaaacttatttctcgcttgccactacatcactcctcaatcacacgaccatcatgagcatccttcacacgattatataatagcgacctaagtgtcgtgttacacaatgcatacatctttcctcgttgcgagtataaccatattacggcatatacccgcacacctcaatcaaatatcttacgccaccaccactataatacaccacagcacaaacgcacctacgtgtccccatgttacgcacaaggcatcaacaacatagtgactctaacaggattaatcatactcctcattcgcctcgactatcccaatcatcgatcacatgcataaaacaatacacttttcacgtagacacctatcgatgcattccccaacacataatccgcattttaaaaatttgtcctcacagcaaaccacaca

SEQ ID NO: 40787 - DNA, 379 bp, Zea Mays
cctggccatccgcgcttgatcagacgaccgatgtcgcgtgcagtgtcatgtgagtcgtaggtctaatcggatccgctggtttctaatccgacggtgaggaaacatcagtaccccttcggccgcgacagttttgcacataagaccctctgttttaggaaaactaacccgccgtcccatgcgctgttccctgagccttaggaattttaccccgaggcccctgcctttctcagatttagtgcgcccaggccagagttcataataaatggataaataaaatctgaaaatgatttttatgagaaaaagaattgctagaacttataaaattgatagaaaattcatctctggtccaaattgagccattccactttctaaaattttg

SEQ ID NO: 40788 - DNA, 324 bp, Zea Mays
caatgtcgaaaaagaccgcatcgacggtcttcggcattcgaccacaccaaagtcaccgcgaggggcagcgctaactaccctcgcgtgcggcactccacgcaaaagtcgcctacgggtgcagccggaatagcacaataagtgcgcaaaatcgaagtcttcttcaaaaagactctccgtgcaaaagtcgcctaagggtgcagccggattagcacaacaagtgcgcaacatcgaagtcttcctcaaaagactatccgtgcaaaagtcgcctaagggtgcagccggactagcacaacaagtgcgcaacatcgaagtcttcctcaaaag

SEQ ID NO: 40789 - DNA, 710 bp, Zea Mays
gctgttattataggacaactctgccaaaaaaagacacttgtcccaatttttaccatagtgtaacacacaggctcgcaacatgtcttcgaggatttgatttactctctctgtttggccatctgtctgcggatgatatgcggagctccttattgcatgggtcccaagtgattcttgcagctgctcccaaaagcgtgccacaaacagtgctcctctgtcagatacaatggtctttggaataccatgcaaacgcactatttgatcaacatagatttctgcatatttctctgtcttgtgggtggtgtgtaccggcaagaaatgagctgtcttggtcaacctatccacaataacccaaatagaatcatggtgccgggaggtatggggcaatcccacgatgaaatccatgcaaatgaactcccatttccatgatggtatgggaaggggttgtgtaacgcccgaatttcgagttgaattttttctttctctatcgctcgctaaattcgggcgatgcctctctttcctatttattttcgctaaaaccctacctatttccaaaactccaagtcgtataataataaaccctaggagtattttatttggattgttacaccatgctggtccctgcatatcttttgtttgtggattgaatttgtgagcttttagaaaaatgattaaaatgggaaaaatcctttcttttttcccttcctcttctc

SEQ ID NO: 40790 - DNA, 351 bp, Zea Mays
gccggctggtcctgatcccggtcccgggtcgtatttgggcgccgccgcacgcagcaggaggaagacatcagcgcggggcgaagcgtcgagcccatctccgccgcgggaaccactggtgagcgatttgttcttggtggttttgccgattttcttcttcttctgctggcctagattcgattcctgcttacccggccgccgctggtaatttttttgaggcatctggtgggttggagtgcgcggatttccctcacccgcgtgaacactggattgatggattttggagtagtcaactagcaattctgacacagtatttcgacatccatgtgtgtggacttcgttataacttttttc

SEQ ID NO: 40791 - DNA, 305 bp, Zea Mays
gctgggtaggattcgactagaaacatacctactgccacgtcctgagcatcctagattgcctcggcctccaggtggttcacctttccatgtttgtaggcctgaccacggactcctggtgcttgctgtggtgctccttgtcttgctggggcattgactgctggcggctcctgagctgctttctttggatagttcttcgcctagtggttttgttctccacagtagaagcatgcatgacctcctacttgcgctggggctacttggccattctggttgggtgttggggtaggaaggcgagctgcctggtt

SEQ ID NO: 40792 - DNA, 273 bp, Zea Mays
atgtgacaatgcagctgctggagttggagcctgaaaatgcttcgcattatgtgacacttgcaaacttgtatgctgagacagggaggtggctggaggctcacgaggtcttgaagtggatgaaggaaaaaggattggcaaaggatgcaggctggagccttaggatgttagaggacaggtcaagcaaatgtataagtgatggaaatttcatggaatgtgcactttgagaaacatcagatgatcaattaacctttacagtatcaggtagttaagcat

SEQ ID NO: 40793 - DNA, 477 bp, Zea Mays
gaagaactgagcatgcaacaaatatcaagcatgtgtaggatgaactctctcctcaaagtctcgtaaagtgttagaagcatgctcatttgatctggtgttttcacaaacacagctgctgccttgatctgttcagtccgggtaaatccaagcttgcgtagctctgctactgccttatcccttaattttttcttgaagttcagcctcgcgctccataaccgctgtcatttttccaacattcatagccacaccctttagatcaccttggacttcatttaacatgtccaaaagagggtcacttgatccactcttctccttcccagatgtcctcctcctcttcacacttgatgatgctgaatcagtagaccacctaggggttctatagatctcatgccctcctcttcttcatgatcattaccatacccagtagcaagctcttgttctaagttcccaacggcttcatcaatcccttccgcacct

SEQ ID NO: 40794 - DNA, 395 bp, Zea Mays
ccccaaagagctcttcaaccttagacattcatcactaagggtgacaatagagaggtcctttggtgctttgaagaatagattcaaaatattatacaacaaacctttccatccatacaagacacaagtaaagctagtcctagcctattgtatcctccacaactggattcttcgtcatgggaatgatgaacatattccactggaagaaacatgggctgcaaatcaagttcatgaggaagctccccatgaccttgtcatggacaatgttgcctgatctgctaccagggacaattgggctaaacaaaatgtggtagaatagggcctcacataggggatagtggtcattatgtattgtgctaagttggctgagaacattgtctattagcaatgatgaacta

SEQ ID NO: 40795 - DNA, 283 bp, Zea Mays
ccggtgttaggactcgcgctcggggtgggtggataaggacgtgcggtgaaagattcttgccggcggtgagctggaggtcattccggtgactcaccgtggctttcttatccactgtgcagctgggcagataacttcgccggtgcaccgccaccttccggccttgtgccacgtgtcctaaccgcgccacagcatcgccatgacatcctttagcctctccgttgatcgtcggaatgactgccacggtaaaagccacgttgtgtggccaccagtgactcgcccttcg

SEQ ID NO: 40796 - DNA, 708 bp, Zea Mays
gactccaaggtagtcaccggccaagtcgagagagactacacagcgaaggaccccgctcttatgcagtacctcgcagctatccgcagtctcgaaagacaattcaaaggttttaccttatagcatgtggaccgagccaagaatgaggaggccgacgcattggccaaggcagccgccagaggcgaggccctgccttccgatgtattctaccatgtcatcggcacgccaaccgtccgcagcctagaggggctccaaataaccaatgacagcgagggccaccgcatagtcaacctcatcatgaccgaagactggcgggcaccaataaccctgttcctgcaggggtactatcatccaactgatatcaatgaggccaagcgccacaaacatcgaagtcgggactttgcactaatcgaaggccagctttacaagaagggggtcagtcaacccatgcttaaatgtgtcaccgagaccgaaggcgtccaaattctgcgtgaagtccacagcgggacgtgcggctctcacgcagggcccagggccctagccagaaaggtgatccgtcaaggtttctagtggcccaccatgatctgcgctgcaaatcgggtcacaaggtcctgtgaagcctgccagaaattttccccacgctcgggaagcccttcgcaattcacaaagctaatcgcccacacatggcctcttcagcgctggggcctggac

SEQ ID NO: 40797 - DNA, 279 bp, Zea Mays
ggacccaaatagagaaaaccctaaagattaagtgaaataatcataaaatgttatcaaagatggacctacattgcatttacacccctgagataccaaaaaaccctaattggaaccctggaaaaccctaaacctaaaccctagggggttaagtgcaaaattagtccacttttggactaaagtgtaaaggctatgatgttaagacatacaaagtcatatggttcacatttatgaacatttgcaagctaaaccctgaattttggacctaattgcaaaaaggac

SEQ ID NO: 40798 - DNA, 592 bp, Zea Mays
ttagttgtttgtgtgaattactctatctagtgtactagtagtgtttgatgggatgtggttggatggtccaactgttcataccactgccaaaaaaaggagagggggagggtgagctatcggtgaccagtgcccgcccaatcgatggccttcttggaataaaaaaactcggtttatctgtctgtggtatcaggtttgacttcatactgccctgccccaaaggatcaagatcgcatcaccagtggaagcctcgggggctgctaagtaacgttatctgactggctgactgcgccattgataaccttgggttacaactgcacaggaggctgcgacccacaggccatccggggctcattgcagctgacgaagcccctgcagactactccccgacaatatggcgacagcgacaatggcaaccgccgcgggggccgcggcactgctttactacacactgaaccgccgcctgcagacagagaggctgaataaggaaggggagtgcagcgatagcagggatgtgacacccagggccgcacagggttctcccagcaggagccgtgtatcgcggagggacgtccgcgcccctgccacctggctt

SEQ ID NO: 40799 - DNA, 310 bp, Zea Mays
gtccaattctaccagactaccttgtaccttctcttctatgacctcttcaccagaagttctctgaaaccacgatgaaagagatgccccttcgttcatttacttcaccaacataggtgcatctcatttggtgttaattctcgcattatctttcgtcccgttgaccagctttgcacttggcactatcctaatctcattccataaaatgtgtactcgggctggtatgtgatatgaatatgatccctttggaccaataatttcgattcctcctcacctaacaaagagcagacacgacagcttcgcgacaaattta

SEQ ID NO: 40800 - DNA, 492 bp, Zea Mays
tcgccagtggggaaagtagtggagttccttctcctgctttgtctgccctcattggtctacaagaattgtccctggcaaactttgatcagactcttgaagatatggttccagaagacctgttatcagagccagcggatgatggtgtgatggaggtttgtgctgatgtgctcgacgctgggttgggatcgtcccgggcagcatcccgcgcctcatcgaccttagagcgtggtcttgagggtcaggaaactgacttggatcgtcttgctcccatggaagtaattgagggaccctcagccttagaggcggctactgcagagaacttggtcctcaaggatggtgctgacacttgcccagcccccgaggatgttgccggggatgactcggctcgggtgggagacgcaagccactgcccagcccccgagggtactgccggagatgatacggctcaagtgggtagcgcaaactatagcccagcccccgagggtatccgag

SEQ ID NO: 40801 - DNA, 450 bp, Zea Mays
ccggggagacgaccagtttggtcaacaggtcctgtgcctgtggatcgtcgctgtagctggcgacaatttcttgaatccacattggagtaccttgagaaatatgcatggcttgcccttctgccggcatccgagaaagagcgtcagcagccatattgtcacaaccctttttataaataatgcggtactgcaaaccagccaacttgatatataatttttgttgccagactgtatggagccgctgttcattgagttgcaccaagctttgatgatcggtgtaaatatgaaattcagccaattgtaagtaggaacgccactgtgttattgcgatcagaattgccaagtattccttctcatacgtagacagtccctgattcttgggtcccagtgatttgcttagaaaggccaggggatgtccacgctgcatgagaacggcgcccacgccagtgttgc

SEQ ID NO: 40802 - DNA, 437 bp, Zea Mays
gtggcgtctgaggttcaaatagggcttagggcatgtacaaccctgagacgatggttctgtctaagtaaaagagacacttaagagactctgtgatacaaccttgagcacctagaccataaatgcagtcgtcttttgtattttttcatcaaaccccttaagagactccatattaaatggggttgtacatacccttagggtctgcagatatgtgccgatggactgtgcaaaatactgttttgcactgttgaaaatgtcaatgaatctaggcgcgtggtggcaactccagcttgtataagtccaagatttcctctccctcctgaattctgatcctactaccatacccaaaagcttcataaaccgcctcaaaacctgcacttagactatctccagcagacttcctatctcaaacttcactctgtaaacagtgcaatctattg

SEQ ID NO: 40803 - DNA, 390 bp, Zea Mays
agggcggtggcgaagcgtagagtgagtgaggtggagggtggtcgtcttcgtgtggacagggctggcaagcgggaattgttgtcatcgccagttggtgcgagtgtaggtgagggggagttgcgaagtctttttgagggtgaggagctgaggataatgttgtttaactatagggagatgggtatcatcccgaaggttgaaccaatgtgaggtgtgatgccctcactgtacgtatgtaactataatttgtatgatgaggctgtgtgccttcgctgatccggtcgtgcccgtaggggacttgtgcactaggtcaagcacgttttttatgtccgtccggctgcacctgtagtcggtctttgcacggatagtcttttgagagagacttcgattttg

SEQ ID NO: 40804 - DNA, 1333 bp, Zea Mays
cagaaacctgagctgaagctccctcccaccaaaccataaaatgggtatcaccttgctgaggggctagactgtgcaggccaaactttcttaagatgttgtaccagaagactctagagaaaacacaggacaccagcaggtgattgattgtttcagattcttggtcacagagagggcatctggctgggtgattcatgcctcttttagcaagtcggtctgcagtccagcatttgttctgagctactagccacaggaagaaccgacacttagaaggagcccaagatctccatatctgtttatggtgaacaaaggcacatgaaccatagaagagaccattgtatgcagttcttgctgagtaaagaccatcacgagcaatataaaaaatgtgtctatcctcagtatcaggttgcagcaccaaatcagatagagcatcccagagatgcagctaatcaatcagggctcccacagtcagagctcccttaatatcaccaatccaccttctatttaacagagcttcttgcacagttcttctgttggttattctttttggtactatactaaacaacctaggtgcaaaatctgaaacccttcttccattgatccatttatcaacccagaataagatattagctccatttccaatcacagtggtcagaacagttgaaaagaaggatctggctttacttgggacctgaattgggaggtcagcccatggccggatagagttagttttcttcaaccatagccatctcattcaaagagcccagcaaagctctgggaaactagagattcccaagactcccagttgcttaggcctgcatacttttctctatgcaaccaaacagtatcctcgttttgcttcctttcttcctctccataataagtcttttctaattttgtcaattgcatctgtggcccatttggggaaatcaattgccattgctgtatatactgacataccagtgagaacatgctgaactaaaactcttctgccttgcctgctcatcagatcagcctttcagtttgggagtttatcagcaatcctttccactatgggcaagaactgttgcttgcttaacttatgcaaggggagagggaggcccaaatatttgcaaggaaaggaagcaatttcacaaggcaaactgttttggacctctaggatggtctgctgagagcatctgatagggtaaatattggacttctgtgcgttgttgtgaaggccagagacatccccaaagagcttaaggatgtcaagagtagtggaaatgtcttcctaagtagggtgcagaaataagggcacatcatcagcgtaaattgaaatcctgtgaatcttctt

SEQ ID NO: 40805 - DNA, 542 bp, Zea Mays
ccaccgtccccgctgggctccggcgacctcgcccgagctcttcccctcggtgagcacctactctcctcctccctctctcactgctctcggttttgaaaggcagtgtggcactcttttcccccccattgaccatctctcaatttcctatgaatcttgcaaatcaaattggtgaaatgagttcaagtatctctattgtgtatccctgcttgcttttagctccttcgggagggcatttccacctcaaatggccattttcctaaaaccctaactccccgcacaccatgtgctcggtgaaatgcccaaaccagccaaaaatgctccaattgaacccaaatttttcaggcaccttcacaacacttccagtaacccacttgccaaatttcacgccaatccgagatcccaggcttaaatttcaccaaaattcccgttttgagcgatcgtttccgagccgagtgcccaaatccctatttcttcgcctaaattcaaaccaatcacacacttcactcatattcacctatataaacctattcgtgaagtctcgg

SEQ ID NO: 40806 - DNA, 292 bp, Zea Mays
tgacccaaggatgaattattgtgagacactaatcccatgttcatctcaagtaaaaagtggaataggtccttaatcattattggtgaatcaagcaaaggacctcgattgtgcatctgtctcttcaaaggacggtacctgtgtttcttaagtacattatcaatatcgctcttaaagctaaatgtcgtgctatctgtccttggagtagttatgctttgaagattgcttgtgttggattcttgttaataattgattaataatttccaagatcgtaatcatgcttgcttaatcatga

SEQ ID NO: 40807 - DNA, 472 bp, Zea Mays
ggctacttgcttggtgcgccgtctgaacgatgatctccggggtgcagaggccttctcagagcactattctattactgagagggatactgtcaaggcaaccatgcaagatgcagcacgacgggcactttctcagtattgcttgttgttcagcggggtagctgatggccttgacctaaagtactaccctcgctgtttgaccggtagtcctggaggtgtgattgcctcgctagtgggtgagggcaatcctaggctgaacaacatggtcaacttggctaccgtgctcaacacagagttgtaccactccctcgacgagttgggcaaggttcaggcggaggttgcggaattgcgtgctgagtgcgcagcacgccactatctagatggtggttcccccgcccctgtcgggattcagcacccttaccgttcgccgccccgtggtcgcttcgactatggtaccccagactgcaggacccag

SEQ ID NO: 40808 - DNA, 567 bp, Zea Mays
gccggtgagggagacatggttgacactctggtaatgatccctcttctgccactttgtctcaaagttgacgctggaccctccggtgatcatgtggatgactccgcgatacgacagatcggtgaagtcttccatcttcggcgcttgggggtgattttggtggtgtgggttcgggtgatgcggatgcagaggcaggggtggaacaacttgtacttcctgatggtgcggatatgcgtggttgggtgggtgctagacatggccgttgttgtatggttgtgggtggtggttgtgatatgtgtgcgcgacaactctctggttgtcggctggttgtgctcgagacatcctgtccctggtggcctttgtttccggacaatcccttgttgggtgtgcgcaatcctcgccgtgaaacagacagtaaaatctacgcggttgttgtgcccgtcctcggccccggcctcgtgtgccattgttgtagccctggggggggatattcctgatggcgagcagcctcaccggccaggtgctggttggctatattgtgcacctgctgctagctgcggctgtcccgtg

SEQ ID NO: 40809 - DNA, 366 bp, Zea Mays
gtaggccctattggcccatcttagatttcaaggattccctaaaatgcacccttctaattcggtgaggagacgctcttttcagcatgcatgcattttaaaacatgaaaggattagaaattaaagaagaaaaaatttgatctaacccacttccttttgacaacccgagctcgcatatttttctttcttctaccataacctttacgtctgatcctcttccacagatgacttcacccacccccaccaatggaggagacactcatttcagttccgatttcctttctcacgagggttttccttccatcttgtgggaggtgctcaactccgccggttaccctacgccccctttgtacacggtgcagctgtacg

SEQ ID NO: 40810 - DNA, 311 bp, Zea Mays
gaagtttttcctggtccgagtgccgggcgcaggcggtgaagggcggtggcgaagcgtagagtgagtgaggtggagggtgggcgtctcatgtggatagggctggcaagcgagaattgttgtcttcgccagttggggcgagtgtaggtgagggggaattgcgaagtctctttgagggtgaggagctgaggataatgttgtttaactacagggagatgggtatcatccctaaggttgaaccaatgtgaggtgtgatgccctcgctgtatgtgtgtaactttaattggtatgatgatttgtatgatgaggctgtg

SEQ ID NO: 40811 - DNA, 434 bp, Zea Mays
tgaagtataccttcagattcagggagaagtttgatgagccaaacgacgactagctgaagtgcatcaaagccaccagtgatgagctatttggagcatactccaatgccgaagataatgctttgtccgcagcctttggaagtccgggcatgaaaagattaaactgggtatttgatgctattggcttcgtataccctgattaccattatctgataaaagggcaagagaaaaagaggaagactgccgcttcgaccattgcagctgagccgaagggcaaaaagatgaaggttctgacccaccggccgtgttacattgaatcggccgtggtgcctaaatttggtgcggggacctctttagctaccgaggccaaggaagctgctctaattgtgcagagcactaaagagctgattgtagtgccgaagctgcctacagtcgag

SEQ ID NO: 40812 - DNA, 345 bp, Zea Mays
ggggggtctccctcgccaacgtgttagacagactaggggttgaagaagagtgcgaaccgttggatccacacggacggttcagattaaaacacagatatcttttcgcttcagtaaaccatgaccgtagatcagtggatgtgcgggtagggtttggcgatgagattttaaaatcacaaccattgatcctcgatctggcggtcaccgctcctcaccagttcgatgtagtttcgatttaatctagaccgtgcgtagttgatcgggtggccgggatttaaccatacccccttcgtcgtgcatatctttcaaaagagaccctgtgtttggtttaatcaacccgacgtcctt

SEQ ID NO: 40813 - DNA, 910 bp, Zea Mays
ctccattttagggactctactccacatgagtagagtttctcactttaattttgtactcctgtagaattgccacaacaaatacaccaataaaatgttattaaaacatgatccttttcctatcacgtgcaaactcctacttgaaaaaacaacattattagttaaaataggaacacttcatctcttgtccaggttggtatataaaaaaggcaccaaactatatgaagatccctgcggcaaggtatatgaaaaacatggttgtatttagcagagtactactgaatattcagcagaaggaactttaaaaaatattcaaaataaactcagaataaaggggatgtgaatttccatacgcatgcaactgcaacacattcagcttctgaacatgccaattgccatgcgggtcacgggcaggggacgctgctacaatgctactccactccacttgctcctagtgcttgtgttattgttggtcaatgcaacattaccaatggtccccctcggcgatgccgtagaggcaggacaggaacgggtggtcaacaacctcgagggtacgctccgtacgcgtgcgaccctccttattggcggcaacgacagcaggtggtcggacctcggccagctacacgatactgatattgctcacaccgagctgtctcaggaagtatatgttggagagattgacgacgtcgaggcacgagatctacatggacacggcgatggcggtggcatggtgttgttgtcagggcgcgacgagagggagggaccgagagtgagaggtggtggtggtggagcgggtccaacaatgtgctcggagatgagaagcaaggctgctgttgctgtaggtcacgcaggtttcctcgttcgagctaatcttgatcttgggagagggagatgtctagatctagtcgtctgt

SEQ ID NO: 40814 - DNA, 529 bp, Zea Mays
aagaagaggaggaaatccccttaattcggaagaatagtcggcgttacatagtcagtggggagagtagtgatattccttctccagctttgtctgctctcgttggtctgcaagaattatccctagcaaattttgatcaggctctcaaggatgttgttcctgaagatttgctgtccgagcccacggacggtggtatgagggacatttgctctcacgttccagatgtgggattagagttatcccgagcagcgtctcgtgcctcgtcgaccttggagtgcagtcttcggggccaagaggctggtcaaggttgttcaattcccatggaggtgaccgagagtccttcagccctagaggtggctgttgtggagaacccggtcctcaagaatggtgcaagcggttacccagcccccgagggtgttgccggtggtgatccggctcgggtgcgtagcgcaagctgcacctagcccccgagggtgttgccggtggtgatccggctctgatgggcagtgcgggctgcgacccagcccccgag

SEQ ID NO: 40815 - DNA, 432 bp, Zea Mays
ttcgggggtgagttgatgaagatgtatctcgaatcttttaagtattttgaccagcattttatgcaaaggaaaccgaaggccagcctttgtaaacaaccacttcattagcttcaggaagaggaacaatattctctccttcggccctcactatagttgtatcacggaaatatttacccttcattgcttcaatctgtcctctcttaacagtggattttccaaacacaacatgacttggcctccacggccgatctttggcgtcattgttgtcactctccacatcaaaatcctcactatcactagaatccccagatagtccagctaaaatttcatcagtaatcttttcaacattggttcttcccatggcttcataaaaaccagctagtgcggggtccacgcttttcttcccttcggccatctcagcgttgattaaaa

SEQ ID NO: 40816 - DNA, 531 bp, Zea Mays
caaaaatcgcccaacctctccatggcatccgtagaccctaatggttctatgccactggccaccgacgctcctcccaacggacaagaggggaaacaaatccagagggagggactcaactcctatagtcgtctatgaccccacctactactgcggcgagtctccacctagccccgaagatatggtttccctatctatcttctcccttcgctctcactagcgctcaagttgtttacctcttactctatatgcaagaaccgataagggctctagagggatcggctagcccctagatgaaaagaggccgacatattcaacaatggtatcggaaccagaatgacaattcccctaacactagtctacaagaccgttagcacagaagaaccagaagaggtcgaggtggtcggggaaggctaaccctaactgacaaaatataccaagaacacagagtgaattcgggataggagattacaacagaagaacctataagaggtcaaggtggtcaaggaaccctaacccagaagaccccacccg

SEQ ID NO: 40817 - DNA, 297 bp, Zea Mays
agttcggcatttgaatgctactgttatctcctatttttttagaattcagtagtacgtaaatttgcaggagtaaaatgttgtgtgatgattttgaaacttatttacaggatatagatgtcacccctatatgagtaatcgtaagcatgcgaaatcgccttaagtcgttgctgacttaaatcaattgcttttgttaatagggcatagtggtcatcccaagttaagcatgttgcaccgtcttaagtcgttgccgacttaagccgattgcttcgttagcagggcatagtggtcaccccgagt

SEQ ID NO: 40818 - DNA, 713 bp, Zea Mays
tgaactcctatgtgtcatatccaaatctactttctgcataacagtagttatttatagcagacttgttcatgggaaaatactcagtggaaagtggaaactgatattttgggtgttggcttctctgatgtggtcttatctgtgtgatctggatggttcggacttcacttgaagagaagtgactgcatacagttcctcaatcagtgagcaagtgatctaaaatatatccacccatagacccgagaatccctcttaaaatgctagataattcaaaacctgatcagaaggcctgtgctgaagtcatgtgttggtttgattaagcagccccctttgttaattcttgtacatttaacactgtgtttctgttatgaagttgtattccctgaaatgtgtgtgtgttttaatctttgggcatgaaccgtgaagggtctagttttgagtcaattcatgcagtactgcattgaattctgttgggttaataacaaacttctgtgaccctaataattattggcttgttaggttgtagttcctattgatcattggttcatgggtgtgatatttgttgctcaccttctaaaatgattgtgttgattgatattgacctgctgattacggcgagtggagatctgcacctggttctaaaagaatgtatctttctttttgctttatttttgaccttccatgatttttgtggatcatgacatttttgtgtagac

SEQ ID NO: 40819 - DNA, 275 bp, Zea Mays
cccttcacctagatttgggtaataagtctgttagccacacttcgagccttgcttggaatattctcaaggtcagctggggcgatagtcaaggtgggcttgttaacatctctcaaatgtttacacccagcttttgaaaatatagtagttgttccttgggcggccactagggtgcaaaaatttccatgcccctccatcacttcatcaaattcattgttttctttctcgacaaactcaagtgccttcggaatatcattggcagaataattcgcttctcc

SEQ ID NO: 40820 - DNA, 512 bp, Zea Mays
cgcgggaacctcagcgccgaagtctacaatgacttgtacaccggaaaggccaggataacaccccataccgggtgtatgcctacacgtgctggaaggtaacacaaggggtatgacgcaagatgaagttgtagtgaacacgaccctggacctcaccataagtccactttgcggaacccgccaggtaccgcaacgttgacatcgagcaagctacatgatccgtatggagagcagaaaggatagaacacagtatcgtgagtgcgtcagcgcacgcccccacatacaacaccaggagggctagagcaacctaggggcaacaagccaaggaccccgagtaaaatacaagtcccgactgtaaaggcagccctcgagcgataaaagggctagacaacctcctttctcaacacaagcacactagttgtaacacgctccaagtaatattacgatcagcactacactggattagggctcccgcctgaacaagtctaacccctgtgtcacagctcctagctcag

SEQ ID NO: 40821 - DNA, 273 bp, Zea Mays
aagcctactctaattcatccatgtatgatcccgtcaggttctttccatcgtgcaggttcaataaaaccaataaattctggggttcaactgaacccccaatccgagtataacggccactctgtgctgcaaggtttgtctaagattttcgtgcaataacggccatgtggaggctcaagcagttcatccccaaggagcagcccagccccagcggcctcgagggtcggacggtcgatgttggcaatgtcaaggtgcacgtccgagaggccattgctg

SEQ ID NO: 40822 - DNA, 366 bp, Zea Mays
catgattgtaatgatgatataggtcgaagcgtatgaaacagaagaaatggctatagacaacttacgcaaattagatgatgggaacgaggtatggaacaaatctttataatgtattacatatactgctctataagatttgtgtcttcactagactttgttttatttcacaggaaattttaatgggctctaatacaaatgaatgcaatactaaggatgatcaatgtaatatgcagatattaacattggaacataacactgacattcggctggttgagagtagttccatggatgtggaagctagaaaggtgaaaacattgctacaatatatgatgacatacgtgaatataaaatctgacttgatatctt

SEQ ID NO: 40823 - DNA, 278 bp, Zea Mays
cacaaatattgtatgaatatagtaaaaaggtaaaatgaagcttcgccccaacaaatattgtatgaatacattaagtattatatgatacaccaagtatagactaaatatagaactctaagtattacattatcacatatatgaatacaccaagtatagaactctaagtatatatgaatacaccaagtatagaataagtatagctctcattattacattatcacattatcacatatatgaatacactaagtatagaactctctgcctctccctctctctag

SEQ ID NO: 40824 - DNA, 696 bp, Zea Mays
ggtaaggagttgcgacatattctatttcctaacacccgcccgcagtcgaagcgggaggctcccggacgcaaaggctggatcgaaattctcgaaagagtgctgtcggaagccctttagtcatgatgtcggcgaactggtgagaggagggcacatggagaacccgaatctcaccaagggccaccttttcacggacgaagtgaatgtcgatctcgatgtgcttcattcgcttgcgatggacggggttggccgtcatgtagactgcactgacgttgtcgcagaagacaatagtggcggagggtagctggatgtggagctcctggagtaactgtcgaagccagcagcagtcggccacaacatgagccatggcccgatattctgcctcggcgctggagcaggacaccgtggtctagtgcttggaggaccaggaaaccagattgtcgccgagatagatgtagaagccggaggtggatcgtcgagagtctggacagcctgcccagtcaacgtcagagtaggcagtcagcgtatcaacagatccggtgccaatgtgaagacctgaggagagtcccctggacgaagcgtaggatgcgcttgataagcgcacgatgaggctcgcacggggcgtgcatgaagaggcacacctgctgaacagcataggccggatcaggacgagtcagcgtcaggtactgaagagccccc

SEQ ID NO: 40825 - DNA, 382 bp, Zea Mays
ttctctatcttatcctcactctgcaagaagttttgttatggatcccctggatctattatttgacttcttggttaggttgataggattgttctttagtattaagattttcgactagatcggtatgggcgatattatatcatggtggttttctaatccctaatattgctatataacccttgacttcttatacttttgttttcctgccattgtattgccatccttgcgcaatatctaccttgatatactgaattctttgtctccctactcctacttgataatgcctctctattttgtctccttgataatgctttctccctaactcacttcatatccttggttgtatcatttatcctcactttaatagttcatggttagcttattt

SEQ ID NO: 40826 - DNA, 553 bp, Zea Mays
tgagcatgtcgcaccgacttaaggcgtttccgacttaagccgattgctccgttggtaggacatagtgatcaccctaagtcaagtaagcgtgagcatgtcgcaccgacttaaggcgttttcgacttaagccgattgctttgttggtagggcatagtgatcgccctaagtcaagtaagcgtgagcatgtcgcatcgacttaaggcatttctgacttaagccgattgctcctttagtagggcataatgatccccctaagtgaagtcatgccgatttcgagtcaagcccaatcgaagccagttgtcaatcaagagtttgaatgcctttggaaaatgaaagctttattgatgatgaaatcttctggttacagagtataacttttcttcgagggtttttgaggaatctctaagggtagaactttctgaggtgttctatgttccacgagttcaccacttctgtgccgtccatctgagtaagtcgatatgatcccggccgtgtgacctccgctacgatgaacagtccttcccatggcggtgatagcttgtgtcgtccctcc

SEQ ID NO: 40827 - DNA, 292 bp, Zea Mays
atagggtccatggactgcgagttagttttcgtaaaacagagggttttatttgcaagatcgaccggccaaaagggtgtcctgggtcctcggccgcacgatcgcaagggaacggtgcagattagatccggattcaacccgaaccggtacgcaaagctagccttacgatctgcgatcaacggattgcgttctacataacagagatcgacgcgcacccctcggatcttggatctacggccgctgcgcgctcggccgaagcggtacaccggacttaatcttagccgtgcatctaact

SEQ ID NO: 40828 - DNA, 335 bp, Zea Mays
ctttttcttctcgaacggggacactaattttggtatagaaactttagatttctttgatggtcgtggatcccttgatggctgtggagaaggtggatccctgaaggcgatgtatgtggcggagacggtggccaccaagaggatgaggagaaggagggtcagaaagaggatgaggagcagcatgtgaagtttgaggagttgatgatggatgtacaataggaacaccaatttgagaaggcggagacggttggacctgcgacgacgactgtcgtggtggatcaaccaattcgacatcccttcgaggccaaaggataaaattcttgatagtttgtccaagt

SEQ ID NO: 40829 - DNA, 613 bp, Zea Mays
tttcgcgaatgtggaatgagataggaaaccttgtttgttaggcttaataattttgattacaatcatgtgaaagttttactgaaaattgaattgttctttgataaacctcagggctgcatgattgtcaggaattcctcgtcctccagaacttgtattcgtcagtggacaactgaacgggtcagtcggtctttgtaaatttagttgggcattagttgaagtccgtgtacagtatttatcttggccaagttgatgtagtttagttgaagtcagtgtacagtatttatcttggccaagttgatgtagttgtggtgctaattatattcagttttgatgtaccagtgccttctgtgcatcaaatggcatttttgtacattttagatttctggtccactcctggcaaataaggctaaccctttctttcaatgggattggagtggtaagagagcttatcgattgtacggcgagttttgtgtgttctttcatgagaaattattatgtaggcgccaaaatcttaccattattaaaaaaaagcaaaagttgcgagagcataggaacaatcaatcatcacaactagctttagaatgctattatgtatccaattatagttacagca

SEQ ID NO: 40830 - DNA, 604 bp, Zea Mays
gtacagccagatcaggaaaaaccaaattacctggaggttggagaagaacgaaggaactcccaagtcgtgggaaatcagttgatggctcgatgaaggatcaacacccggagcaacccacaatgcatcagtggggaccaagtcagtatcaacagcagaaatcaaaactctgtcatcaggaacgctggcctctaaggtgacttcatgacctgaagcttgagctgctgccatgcaaccagaatgcggaggagaagaccctacgtgaacatccatggaagtgtgagagggagaaccaactcggacaccctcgggggctgcgtcatagctcgcgctacccatccgagccggattatccccggcgacaccctcgggggctgggtaagcgctagcgccatccttgagggccgagctctctgtaacagccacctctaaggctgaaggaccttcacccacttccatgggagcagaacaatccagaccagcctcctgacccttaagaccgtgctccaaggtcgatgaggcacgagatgccgctcgggataactccagcccggcatcgggcacatcagcacaaatatccatcatcccaccatctgtcagctccgac

SEQ ID NO: 40831 - DNA, 701 bp, Zea Mays
cgccgccgccgagtagctgctcttcgtttctttccagttccagctgaaagccttctcgccgtacccagttctgttcttgtatctgttgtttctggtctctgtttcgatgccagttttggttcggttctaggctgctagctgttgattctgctttctgtttcgcttctgtttacgacacctgaaccagtttttggtaccggtgggggagcactgtcccaatggctggccgccgttcgccgtcggcggatcccggtctcggtcactgcgaagctcccgaaatgagatccggtggcgctttagagccctcgtccgttccaatacgcagtcggatgctgggttacgctcgcctctaaatctaagcttattatttatgcctttgcttcgtattcgtcagatctgatttcgtatttctgtctcgaccgaaattttgcgcggtgcagtgattataaaaacattcctcgtactgatgggtcatcctcgtgaacgactcctatacacccatagaatctgagcacccaaaacacatctccaaattttttttactttcgtgctctattttgtttgtttgttatactatttaggttttttaaaagaaacttgacttccgcgctgttttgcaaatctgtatttttcttatttgctttataatttgtattggatggttttgaattacttggatttatcatgacaatacattgttg

SEQ ID NO: 40832 - DNA, 408 bp, Zea Mays
gttcgccctacctttggcttagtgtggcttggttggattggaaactcaggcgggtttgtggccgatttgatggttctccggcgagcgggtcaccgtgggagcgggcgccgtcgcgctcggcaaccagaggagaagaaggtttacgcgccgttgatctcccagggaacggctgcgattagaagtagcgtaccccttcgccactttggtcgggtaccgttgatctcgaatctaacggtagtggttagatctggtttcataaactcagggtgcgttgatttgggatccaacggctgcagtcgcgtaccggttcgggaaaggctagatctaatctcgcgcgtccacacctaatcgaacggttcagattagatgataccccttcggcttgcacatttcgctaaagagaccccg

SEQ ID NO: 40833 - DNA, 419 bp, Zea Mays
tgaagttaggcggccattgaatcacttggagtcgggggaaaggaccgagacttcgcacgtcctctggccgcccgacattcttctcgagcgcggtcgcggtggcagtccctgtgaggcgattaatgtggtgcgtcgtgtagcctctgccgagtcgatcgacctagtgttgggctattcgtagaggctgttgccgactatgtcctggtagcatgactgtgtgctggtgcgccgtggtttcgatcgtactcttcctaccgcctcacctcactcttgtgccagtgatcacacgaagcattgatgttgctccgctcgtctcgccgactagtgatgacgtatcgcatgtctggtgtcagatgggcgtgggaagaagatggttcgccacctgggtgaggatctgtcggtagctttctgcatctggg

SEQ ID NO: 40834 - DNA, 357 bp, Zea Mays
actgaagggaattcgcatggtacattaacctgacgaagatcgccaggttcagtgcaccgccgttggtgatctccgcgctgcgatcctcgccgacatcgcgatttgtgcaccttggcttccggataacggtcgacggtgaaaagatcgtgtgcatgcatcatcttggggcactgtttggccttgtcgccgtacccacttgcaccggcgatgtggccgcgcgaccgtctctgcagtgccaccgtttctcacagttacgccacgctttcggtcgtttcaccatgttgtcgcaagccgtgaaggttagccagtgacagtcgtaagtccttgtcctataaatgccacgatagcgttcgccgg

SEQ ID NO: 40835 - DNA, 390 bp, Zea Mays
agcggaggaggtggagcagactgaaccggaggtgctgagataccagaatgctgaagcatgagagccatgaatgccctattctctgcccgatcctgaagtagctgctgctgaagtggcatcctgcctgtcctgcatgctctgaaacatcgagagcatcgtctcggataaccgggcctgctcggctgccaggttggccagaattgccgcaagagcagggtccatagccggaggaggagcaggggcagcacgagaactcccagcctcatgatcatgtgagcgtggaggcataggaggcggaggcggaggaggaagcccaaaatcatcatcatcatcatcatcatcagccgctgtaccctgagtgtcaaactgtcgaagagctgcatcctcagc

SEQ ID NO: 40836 - DNA, 285 bp, Zea Mays
caagaacaggatttgctaaccactcaggatgcagtacttctctaatgaaaccagctgcgactaatcgagctagctcagcacaaataacttctctcttgttggcgtgaaacgacacaacttttgtcggatcggactcgcttggggatagactttcagtttgtgctcggtcagttttctcgagactcccagcatatccgcagactgccatgcgaatacgtctcgattatcttacagaaattggacgagcgcgccttcctatttgtcatccaggctggagctgatgat

SEQ ID NO: 40837 - DNA, 470 bp, Zea Mays
aggcgtataggcggagccgtttagattccctccgccttagtaacgcatgagtaatcagcgggagtcatgatgactacagcccatgcagcattgataggcagtgacccttttcttggaaacgcacgagtaatggtgagtcattgtccttgctatggtaacgtgtgagtaacagcacgacccacacagcgtggactgggcacaccgcctgtcactggaatggacacgcgcacgtcttatccgtaatgaatgcaacgacgcacgtagcccagaggcttcatgctaggttccgcccgttggcttacgccgcacgcagtaggccacgtggcagcatcgggtctccgcctgggcggggagcaggagtgtatgtgataaggtccggatcctaccagatcaggtctggacacgtgtcggcaccggacccccgcctgggtcctgattaaggcccgggtatgttctgtcctggaaccctg

SEQ ID NO: 40838 - DNA, 558 bp, Zea Mays
ggaccgtggtcttgtcactcatgttcgcatgcgacgtcacgtggggtagttatgcgcattgaatgttcttgtctccacggatcccatgacctttgattgaggccaggctcggggttgtcctcctgtttcaaggcgggctcgagcgaggtggaaaccgttgttccgtgaagagggtacctcgggcgagacgaggattttcccgagcgctcaggctcgagcgaggcggagttttggatgactatcgagcgggggctcgtgcgattcgtggctcatacttaaccaacctcgaggaacgtgtctcacgacggcttagggtttaagcgtgtttaggggcgtaattcaggtacccctaattatgataccaggcagtagccccgagcctctaaggaagtgtttgacacttgattgggggctcttctatctttgtgcgggtatatttttactctaagaggcgatagacttgtttctgaggggtgcacgtgagcgcacccgtcgagtgtagtcactgaggcctcaaaagagtggtatactcctctgaggtcttaatattccccttcg

SEQ ID NO: 40839 - DNA, 435 bp, Zea Mays
gaggaatatcaagctagagaacgttaggaagaagatgctggcagaagtcgacacgaagttcttggccgatttcaaggtcgtccgacaccagaatctcgtccggcaaaatctttgacccactgcactcgaacccactataagtaaattcgacgacgttcatgctcttaagatttacgtagatgaacaacgggagcaatttcaataaatagttgggggtatacaaaatgactttgaaagaatggcacgcgtatttaagaaatctgttgctcctagtttcccatctcacgacatcgacgccacacaagaatcatcgaccgcaaatgggcactcacagtcccaaccaatttatggaatatcgatgacttcccatactagagaaacacatgcgccaacacagcctccaccaccgatgtgggaaaacaccacgaccctgcg

SEQ ID NO: 40840 - DNA, 785 bp, Zea Mays
gaggcaatttgggtttcgtttcgggagaaagggtgggggtcgggcggctggcctggggcaggttagtagtatgggtggtggccgattgcgttggccgttggggactagttttctcgtaggtgggctttgctgcttcgaccggatccgtcattggagtcttctgcactccgaattccccaaatcaggattagctgatgcttgcatatttgttctgttcaatttgctgcgcgtcccgtgtggtgccagtattttgcattcctttgtgttgcggaaagctttctttcccatctgtaagttcatcgtggagtcgtgcttgctggtttcggcttgcaaggatgatggagaataatacttcctgtatttagatatctctctctcttagcatgtgttctgatagaacagatcaattgcatgctggacattatgtttgaaatatgctgtatggcatattggctacctaacgatcacaaaggaaccttgaattttatcgtctatgtggaagagcatatgcacatggtaacatggccatggatacaaatcattcacatgacatcgatgaaaactacaaaattacataatcagcgtacactttttttgttgcagtatgctgtaatctgttgtgctaactcagtctttgttatactcatttagcgtatgagataattgttccaaatcaggaatcggtattttgtcaccattggatgtgctaagaatatcttaccatatgatgccctgaggaaccatggctttggacaactgcgctagtatcctctatgttgtttttt

SEQ ID NO: 40841 - DNA, 748 bp, Zea Mays
cacatatctacagaaaacacaatttagttcatcaaacatacagcacaccgaaaacagtacgtgcagcccaaaacagcaatcaataaatttcagctcatatataattcaagaatcgccgcgttctagagacttgaattattctaacactttaccatttgttagagttaacataaccaagggagaactaacaagtagacttactattttttatacaagtcaattcacgcgcgagaactacatacacatttaattaacgcattcaccacatgaacacagtttcacgccgcacactagtttctaacatgcttttcacataactcgtaattcaactactcactaacaataaatcacgcacgacaactaccacatcaaccgatttatttatttggaacaccgcctgcctagcgtaccactagttcccacattttgattcaagctcaacaatacatccttcattcgattatacaacagcgacctaagcgtcgcgttacccaaggcatacatccttcctcatcgcgagtataaccatatcactacatatacccgcacatctcaatcaaatatcttacgccaccaccactataatacaccatggcacacacgcacatacgtgccccaggttacgcacaaggcatcaacagcatagtgactctaaccggattaatcatactcctcattcgcctcgactatcccaatcatcgatcacatgcataaaacaagtacacttatctcttatttttgcgcaggc

SEQ ID NO: 40842 - DNA, 441 bp, Zea Mays
ggcggctctaggcgaaattgggggtggagattggggctacacggccgttaggaactgtagtttcaccgtgtatactcaatttgagaggagggggcggaggctgtgcgaatttgggcttggatcatcacactgggtggaggtgtgcataccctaccgtggatcatggtgctatttatagccacggcggcccggccagctatctacggccatggataacttcattagtgcatgcataccacgtagggaagaggcacagtgagggagatcgaggcatgggtgacaccgcggcaaaagttactgagtcacggtggccgccggtgactaactccggccacgctcgactgggttcacgggattgcgccacgttcgaagttatccatccccggattgattcactggatcgcgcgagcccatccgattcaatagtggccctgatcttat

SEQ ID NO: 40843 - DNA, 520 bp, Zea Mays
ggcgttttagaagtaacagccgagtgataacgggccacgtcggtcgctttggaaatagtggccgagtgaagtctggtaacgtcagcgtttttagaaataacagctgagttaatttgggttgcgtcggccgttttggaaataacggccgagtgatgacatggcatgccagcgttttagaaataacagtcaggtgatgacatggcacgccgacgttttataaataacatccgggtgatgacaaggcacgccagcgttttagaagtaaatgtcaggtgatgactgggcacttttagaaatggcgtctggcctgggaaaaccccatatgtactacactgtcgcatgcctctgcgttctgtgccctagttttgcttttctgcatccatgcctcctccgctatcttgcaatactgccttcgctctgttcgccaacacgattgagatggcgcccaagcggaaatcccagagttcgtctgccgcagtcattccccccatcgatcccaacagtcagttgcctttcgcag

SEQ ID NO: 40844 - DNA, 467 bp, Zea Mays
gaacaaagataccagattcagtgaacttcgccgccggtgatctccgtgccgcgattcacaccggccactgtgattcgtgctcagctcgggaaggttatcaccgcgaacgtgaaaagatcagaggggaagtggatcgagccggccttaccgtacccactagcaccggcaacgtggtcgtgtgaccatcgccgtggttaccaccattcacttcggtcgcaccacgccataggccattttaccacgtcgtcgtgagtcatggagagtaaccagtgatggccgtaaacctttgcccagtgaatgccacgataagcgaactccgatggctcacctttgctccggccaccagcttatcttccccaaattcggagccaccgcttctggtcattataaattgatgcccccgcctgttccgctagcttgttacgaagccagagcaccgctcctcgctcccgattagccacaacggc

SEQ ID NO: 40845 - DNA, 293 bp, Zea Mays
aagaattggaatcgtccacttgggcttggatggctcagattaaaccctagcgtaccggttcggggtcacattgggaccattggatctgaatccgtaggctaggaacggtccggacttcataaaatctagagcgttggtcgctgatccaacgagtacgattgcgtactggttcgataaagtgaagatctaatttgtgccatcgatttcggacccaacgactgatcttcgcagataccccttcggctatgtggatttgcataagagcccctggatttctaaataatcaacctgcc

SEQ ID NO: 40846 - DNA, 487 bp, Zea Mays
gccgatcccaccttggcctaaaaaaggaggaggtcgaccacggatgcaggaggagacgcaagaaggacacacacacacatagagagacaaaagacaaacacaaatggatgaccacaccagaagacccaaaggaccacggaggccgaagccaaagagtgggccaccatgatgcccaaggcttcgtagagagcaccatattcgtagtcctaagctctaaccacacataagatacttgggaggtcctccctctcttgcctgcttgtaacccctactgcgagcattgagcaacaaaggtgcaggtagcgcgagccacgtgaatactggatgtagggacgttctacccgaactagtataaatctcgcgcccactggtcacaccatccggaccacggaatgcgcatagacaaattacttgttggagctaaaaaataaggaaatgttgtagatgccataacagatagatctatagctgttgtgagaccacgagc

SEQ ID NO: 40847 - DNA, 366 bp, Zea Mays
gaggtaaaggtgcataaaaaaccaggaatctaggtacaatcaagaatagaaataagataagtcttgcaagaggtaaagtataggatataaccactggtgagataagtaagagaccacgcttgaactaaggtgggagattggaggttttagataacgaacatagtgtaatcaccaaggtaagattgagagatgagaagggtaaaggcaataagaagcaaaagcacaacaaaggatgaggctacaaactcgcaagccaaagaataggatacgaccaagagaaagaaggtatgagacggaagaggggcgattttaaagggcagttatgagacaaacttcaatgtaggatatagaggtgtcaagggtgca

SEQ ID NO: 40848 - DNA, 374 bp, Zea Mays
gcatgctgcataggagtatttcatatcacggggtgtgcgagatctaaagcctgcacgcatcagccatcagctcgatcccttctctctctgtctgtcgtctctacagctctgtcacacacatgaggaagccagggagctagagctaacacagtgagaaaggaaagggcataaatacagcaagaaaagagagcaggaccaccaccatggccaaagaagctcagctctcccctctcccttgcgctcgatctcacgagtcacgacgactcacaagattgaaaggccggctgagcacatactaccacagtacacatacagcaagctctgtgctagatctacgcaaacatctagctcacctcacagggagagcacacaat

SEQ ID NO: 40849 - DNA, 350 bp, Zea Mays
cccgctgtggagtcgattcccgcgtgctgcttctactacccctggtatgctacgatgttgtcgccctctggctgatgtagcgtgaacaaggtgacggtgattgttgttttgatgcctgtaacaagctaattctgattttggctctatcattgtactgaccgctcacctgataaactgagagttatgagtatggtttcaggtcaggttatgtacctatgttccactctttcatcagatcatattttctttagatagaaaggtttacgtgcaatggaatccatatttccatattgcaaagtacttagtttattttgggtgctattggtagtttttatttgtttttctttttc

SEQ ID NO: 40850 - DNA, 458 bp, Zea Mays
cagcggacaccacgggtaaccgaacacgttcccggcgatcctagggactctagctcaattggatgggtcagagagtatcaggagcatccaaggatactgaaacgaggactcagagggcatgaacggacctgagatgcgctggccacggcgaggtcaaaccgctcggtgttcttgagtgatctgggggaaatcccaaattggggagttctaggggatgattcgaggcacaagttgcttcactggttgcacaactacctagcggagcaggcggggtcggcaatttatagcaggcttgagtggtggcgtccaatttcacgatgatgcgctagcggccggagaggaagaaggtcactggcgctcggggttagtggctttcaccgtggcagctctcaggagatcaccgggcatgcacgacgtgtttcactatgacgtggtctagcgctttagcacgtggcgca

SEQ ID NO: 40851 - DNA, 714 bp, Zea Mays
tcgactaatcgtccggtcgtccgattagtcgtcaactaaacgtgataagtcgtccaatttgggtggggacgattagttggcctggactcctggttttggcctgttttggatgtgggctggacggctggtagtaaggcccattactgtaacgccttaggccgcgttcgtttgttccaactcgaagacaggtatattttttcaatctgagccggatagagtggatccgggtggttcactaaaacctataaaggcttggtttggtttgattccgggtgattataggtgtggctctaatccaagtcgttgagtgggtaaaaaggcctggtttcattctggaatggtctggttttattacagaatagatctaaccgaacaactattttagattggttctgatttaaatccagatcaaataattccgggtggaacaggccatgttccatgtcgttcctgtgaagccgaacgaggccttagggttttatctaaatggggctgctccagtctccctgttacggtggctgctcttctctccctgttccggaggctgtgcagcggctctccctgttccggcagctgctcacctctctccctgttcaacaccggtggctgccctctccttgttcctcaacggttgctcagtgctcaccggctcaccctattccttgacgacggcagccctgcacggttgcaccatcctcggcggcggtggcccag

SEQ ID NO: 40852 - DNA, 334 bp, Zea Mays
gggtgatccatctatcgttgatcccaatgggtgtgatccatctgccgctgatcccaatgggggtgttgtctgtgtcgctgatgaagacgacggggaggaagaagatgaggtccctctgactcggaagaacagtcggtaatatgtcgctagtgggaaagtagtgggttccttctcctgctctgtctgccctcattggtctacaagaattgtccctggcgaactttgatcagactcttgaagatatggttccagaggatctattatcagagtcggcgaatggtggtgcgacggatgtttgtgctgatgtgctcgacgccgggttggggtcatcccg

SEQ ID NO: 40853 - DNA, 418 bp, Zea Mays
ccagattcaattccaaaggttagagttcggacagggtgtaaatggaccgaatccatggcatcgggattttagatcatatttaatacagtctaatttttacgattttcaccagctatcgatcatctgatttgacgccaaggatcacatgccgagaagaagaacaatttaattaatgagttgtcgcattattcttttcggacagcgtggggctccaaattttcataaaatcagaagttttctgattttcatattcacttgcgcgcgtaatccgaacatatccaaattcgccagcaaacaaagattccaaaagattctcgaacccctttttaattgcttagattatggaaataaatactacaccaaactcgaacctttgcgagatgattaaaatttagtgtccactttatttactgatatc

SEQ ID NO: 40854 - DNA, 460 bp, Zea Mays
cacttgtgcctctccagccccatgcctatcttctgttaagaaggatgcagtcctgtcatcatttccccttctcatcccacaacttttttaaattttcaataccaccacttctcacatgattctatctcctagcaaaacagcacacttccacacgctcaaaaccgcaggtgccatctaaatattatttttctcatcttgtaatctactgtcctaacaattattgtggtgtagcaacatcaggatactgtagctacccaaatgtattgatgagtgaaggacagagcgagggacacaggctagaggcacgctgatcctggatactgtcaagttactatcatacgagagatttataatgcttgcaggtatattgccatagtgttgagatcgtcttgtacatgtactcatgctgtaggggttgatacgtactttcatagtggcaggacctatgacctaagatcac

SEQ ID NO: 40855 - DNA, 327 bp, Zea Mays
ggaaggcccagtgtaactgtgtgagtgtagattccaagatttccaccctgtgtgacgagttgtgcaagctgaacatagaagttgtttcctcaggtgccttgagttatatttcagtggagcccactttacatgagcaaatagtcatggcacagatcggtgacaagggtgttcaagtcattaaggaaatgatcaaacagaaggtggacaaatacaaatgcttccatcaggatagcaagggagttttatggtttggagaccgattggttgttcctaaaaatcccgaactcagaaagaagatattggatgaagctcacctttcaaaatttt

SEQ ID NO: 40856 - DNA, 293 bp, Zea Mays
ccgagctgagccttagacgtcgcggttgtatgctccttggcttcggccccttttataggctaaggtggtggtcggttaccggctccttcacaggggaaggagctactgtgtgtggtaaaataggtcgttctacctaggtaactcgtgcttgtcggcatgtgtctcgatcgtctaagcttctctggtcgtgctctttattatcggctgcgcatgggcggcgaggagctccaacatcatcattactgtctttcactgcgcccacccatggccttcgtagcctaggtctcggcacg

SEQ ID NO: 40857 - DNA, 301 bp, Zea Mays
cccagggaggtgcggtcatgtcattagcggccttcgtcgtgcctgcggcctaccgttcgaatgactggtcatggctcgagatgtcatgtcttgcctttgtaggcgtggactttgcgattatttggggttgggtttccatcttactcccttccttggtagggacctggttggccggtccgcctcgcgattttccttggcggggacatgattggtcgctctatttcgcgggcttgctcggtagggacctggtcgctcgctctacctcgcgaacttgctcggtagggacatggccgatcgctcc

SEQ ID NO: 40858 - DNA, 407 bp, Zea Mays
attttgatgatattcttatctatagtaagtctcatgatgatcatattgaacatttacgtgctgtttttgatgttttgcgtgatgcacgtttatttggtaaccttgagaagtgcaccttcagcaccgatcgtgtgtcttttcttggatatgttgtgacatcgcggggcattgagatggacgaggcaaaaattgttgccatcacgagctggccacttccaaccatggtcacgcaggttcaaagttttcttggtcttgcaggattctacagacgatttgtgcgggatttcagcaccattgcaacacctctccatgagttgacaaagaatggagtgccgtttcgttgggtaccatcacaacaacaagcttttgatgccctcaagtcgaagctcacacaagcaccactgctg

SEQ ID NO: 40859 - DNA, 352 bp, Zea Mays
tttgcatgtggcaaagatgaggttatgaccaagcacgggataagtaaaacaccactctcgaattgagaggggagaagggaggttttaagtggcaggcatacgacaagcagcaagttagggtcacaagggtaaaggcgatatcaaacaaaacacattaaacaatagagttgaaagttcaagcggcaaagaataggatacatcccagggaaaatgggtaaaatacaactctcaatttgaggtggaaaagggaaaattttatagggcgggtacacaataagcaacaaggtgatatgtagatatgacaaaagtaaagataatatcaataaaaagcatgacaaaggatagaattaag

SEQ ID NO: 40860 - DNA, 319 bp, Zea Mays
tcttgttcatattacacactagtccagacgctgaaccaaagcagtccaatattaccttaacacaattcagatcttccactataggtttaacaaacagaaccacatcgtcagcataaatagaaattctgtttcagacattcccttccagaaggttatggagcagccccctatcttcagctagcagaaacatactactaaggacgtccattatcagcacaaatagcattggggaaaggggatcaccttggcgaagccctctccgatgcctaataggaataccaggagacccattcagcagcacctgagtggaagatgaagc

SEQ ID NO: 40861 - DNA, 316 bp, Zea Mays
tgatttctgaatttattctaattgagcgttatgcaatcgcaaggcatgtgacatattccaccaaccgcgcataccttagtggcgtcctccaccgctgatatttctatataacaaagccggtccaaaacggcgctccctagcctatccacgtcatcgtctaaaattgcagccgttggatcgcgcatcgacgtatggcgaagcatcctacccttctccattctacgacgcccgcaaagcttccagactagagaaggcccccctagagctccattagctcccaccacggaccacggtgtcagcacctccaccgtctccc

SEQ ID NO: 40862 - DNA, 698 bp, Zea Mays
cttgccgctgtttgttcaatccaaatgccatcaggatatgattacatactgtgccgcgcacctttcaagacgatgataggtaaaatgaaaattacgattagtattgcgattgctcgccagatactaattttattgatggtttggattaggagctcaataatatctattttagatggctgtttggtattcgatacgtctctactgagtctactctctacttggccgttcataatgagttactgtttttttgagcacggagccatgattgcattctagaatgatgatattgtatttgatacatgctggaaagaatatgggataagatgttttggtgagacaccacagcaagcattcctgcttgtccgaatcattgtgttagactttcgtgatagaatgcatggtttccgaatcattaggatggagtttgtaacatgatggacagtcaggctttatgcctgtgcgtgagctgcattttgagccgtgcacgttataagtaatgctggagtgaccaatttagtggatgtaaaggccggtgccgcagtctttgttagatagtagtactcatgacttcgaagcatcctaaggcgtcttgttcttttgtttggtaacggacccaatgtctctgatgggtatggtagcacaatcatccacagctcgaaagtgagggttacttgcaaccaaattaatagagtaccaac

SEQ ID NO: 40863 - DNA, 564 bp, Zea Mays
cttataagaatgttgtggttcatcttgaaaatcaaccaactacaaacaccaacttctaatacctacccatcattcgtccatggtgcccctcagcacgcatgcatgtagaaaggttctaggggaacaccacatactgttagttttaggtaacttatatatatagtccaagggtatgcgttatagatatatacaaaactaggatatgtgcatacacaatttgttataatgcataagcatgctaaaacaattcatgcaccacatcagtcatcaaatcatgtccaactaaggtactacatcttgcttggcacaatgcacacatctgagtagtatgcacaccacaacactattttaacaacaccaactaagacaaatttcatgctaaaatccgcatatcacacatgtacatatcatgaagtgaccaccttcattcagtctcatctagtttcagtccatcatcgaccacattcttcctcaagcaacatctgcacatgaatcaacatgcaagtgagtactagaacaagttggatgagtaaccctaagctctacccaaagtagagaaaaatg

SEQ ID NO: 40864 - DNA, 316 bp, Zea Mays
gtggccaggaattttagcggtgacgcgcggcggtcggaagagtaaaagttcactggcgcgcgtgaattagtgtcccatgtcgtggcagtcactccggcgatcaacggggagctagagtgagtcacagtgatgtggtagacaggtagagacacgcggcggacggcggtgagggcttaacagcggtgagaaccttattcgagggatagtgcgcaagggagaggcacggcggctagccggagtggcgtccagttcaccggcggtgaagattttcctaccccgcgacgttatctatccactccgggcacgaatcgggacg

SEQ ID NO: 40865 - DNA, 601 bp, Zea Mays
cccgtcggccttttcccaggctgacgggaattagtctagccgacgggaatcctttggattcctgttgtgacaacaaaaggatattttcagaaaatatgacacatatgaatatgataagaagcaattgtgggggatagatgtccctcgggtcaccacggcccaactatgtcctagtagccatccaaaaaaccctaatgggctgcctaaaaggcaccagtgggccttaatcgggtagaaaatgcggacgcccagggaagacgcgggcgtgagcgcgaaggaactcggttgtgtcccaagcatgcgacatacgaaaaagtgggcaggcgagtcgttgaccgtggttagacacaacatggcacgggtgagttgggacgtggagatcgtgcacccgaacagttctctatagctcctattcagtcggtgataaggctggatagtagacccctacgaaaaaacgatagacagactagacagaaccatcttcaacctcaagacaccgttatgtaactaagagacatcgaaaacgatcataaccagaaaccacaggacgtagggtattacactcacgagcgaccagatctcaaatggccatggccccagc

SEQ ID NO: 40866 - DNA, 272 bp, Zea Mays
ccaccctctattttctcttggatcaacttgtcgtccctcatcctcacgcctccctccttatctcaatcgctcgcaaaacctagcctcagcggcggagccaaggccggctagcctgggcacgtgcccgggctccgccgttggccatagtaaacgcagagcaatgaggtcttatagtgatgaaaacgggatgagtacccgatacgggtatgaaaacgggacgatttttcgaatatggatacgtatatttttattgtcaggatggatacgggaac

SEQ ID NO: 40867 - DNA, 271 bp, Zea Mays
ctctcgagccactggcttgtccttctgcgcccgactcagtgtgccaacctgtacttttgtcgatgtcctcttggcccctgaaccctagttcctgatttttcctccaccgctttctagctttctaagttcccacatcttttcgcgttttgttcctgaactgtgctatttgaaaaaatcatgatggcgcccaggaagagaaaacagagtgctgctacgatggtcatcccttcgatcgatcctgatagccaactctcttttgctggtaaccacg

SEQ ID NO: 40868 - DNA, 513 bp, Zea Mays
aaaactgatcgagggggcgaacgaccattgctccaacactagtccctcgaggggccagtttaacttggtgagctggtcctaaagtctttttctgggagatgatcgaaacactgccctcgtcagcttgaagtggtcccgagggggggagtgaaatgtgatcgttgaaaggtgacattttactgtggaattgttggtttaccaaggcgccttttcgtgtctataaaaactgttcatggctgcaacggaaagacttttacacgctggcttacagaaatgttggcttctccgcctaagaaactgatgcacgctttctgtttttcttgccgccggtgagctggcccgtgtgaagtagaccgcctgcctccgcatacggtacgttatgttgtcttcttctttgccaccgtctgtcgcgactgcgttgtcgaatacaccgtcgtcggagaagacagttagtgatccagcgacgacagtggagttgttaccagggcacactgttgagtttggaatatcaag

SEQ ID NO: 40869 - DNA, 641 bp, Zea Mays
gcaagatataaagaaacaaaatgacatgactagccaatcatacattttgtgcaccagcttgttcagaagaagctccattggagggcacagatcctttcagtgtaacctcatcatcctcagatacagcctttgtatgatcttttgcattactctttgctttacgcttcagcatatttaactccctggcacttaatcgtctagagcgaaaattagaatgcttgggatacctggggaccatggtagaaaccaactgctgaatattatgacctgaattaaatgaatggaatccattattctgtacatgtgaaccccaataatttttttgggcaagaagatcctcgtctttgataacgtcattaacatccataaactgctcacataaatccagtcctgcactagaacaaaaaaaaagtgtaaacattccagaacactaataatgtatatgtgcaaagatgtcagtccttgtattcacatcatcaagacgagatggaaacatcacatcaacaatccaatgagggtggagccatgggggtacttcattcgactatagtattgctactacaagatttaaagggaaactaggaaagtaggcatctactaccacttcttaaacagtatttcaatctttttaaaccccaggc

SEQ ID NO: 40870 - DNA, 1299 bp, Zea Mays
gaagttgccattttctataaagccttggactggatctgaggataacattggaaagcttttgatggtaatgttgtattcatcttatattctttactctattatttggacaaaagatgttgagatcctaaacatatcttggttatcagcgaagattttaaggttgccttgagtcattaatggccacattatatttattgggacatcagttcccaagaaacattaactgtgatgacagtcgccagtcgtctcccttgctcaaaggcttagggtgtgtattgggtttttgtaggggagacctcttgacgcctcccctgttttctgtacattttgtatggtccctttctcatctatactactctattaagaacataatgtggacacctggtgctaccacggcttcaccctccccacgctcagcgcgtgcaaaaaatagtgcaaagtgagcactcgaacccacaacccatgctctagaaaattgaggctaactattagaccacacgtaacttagtgtttagaaataaacaataattatatttgtagtctaggcgccgctcccctgcttcgtggcaacgcacggacacatacctagttattaatgaaatgacacaattctcctgcattgtttgagggtaaaaatagttcttaagaaacattaaattacatctgaattctgaagtgttttgtttcttttatttattaagatgctttgctcttttttagaaaatggaaaaaattctggcctttgccaccacacagccaggtcttagaatgttgtcagcttatttgctgacagaaataaggaaaaaatgcatccaaatcaaagaaaatcatatgtgaagtttattattactttgccatccattcttggcaaacacatctaaaagatgctatgctcttctttgtttgtcactttatcttcccttatgcttctctctagtatgtgtaaacgttttcaatttttaatacattgacatcaattctatgtttgtctatatactatagtatctatggtatttgtataacgccactttgctaactggactgcaggtgtggaaattcttaattactttcactgatgttctgggtctttgtccagttacacttgatgagtttgttcagtctcttcatgattatgtaagtttctttttcctcgggacttcagtatgtttttttttcctttttttgctggtaaagtgatgtataagggtggaaaattgaataaatagatttgtatggttatgttcttcaaactttctgacagtggtaactggtaagatcatacacaatgaaagacacaca

SEQ ID NO: 40871 - DNA, 577 bp, Zea Mays
gcagctgctcttcctcacatgacggggcgggaggcgcctgctccgcgtccgccctgcgagtgctcctcctctttgaaggtaaatcaagcctcggcctttggtaaagcgacgctactctcctcatcccaccacccaccatctttattcaattatctgcaattaagaacactaaactaataagcacatataaagaaggcgtaattatctaccgtaaatccattcaaccaaagatgttcccccatgaccttctttgtttgtcttttcctgtttgcacatttactgcagggacaacaaattctactcgctcctttagcagcctcactaaatgctcgttccaagaaagcatcagtcttgttgatccattcattggtgacctgaccctgacctgagcggcccatgtacatccactcaaggtcctccatcgcctaacatatatagtagagagtaacataaacaacaattgcatctacacaacgttcctactctctaaatgcttgtaagagaatatgtagggaccaactagtaaaaacaatataaaacaatactagtaatatactctagctccactccagtaaaa

SEQ ID NO: 40872 - DNA, 899 bp, Zea Mays
tgaactgtgtgtggacataagcgcaaaaattaatgatgtgagtggctacctcggacttgcagactagagggaaagtccagcaaaagtgagtgaagtcatcgaggatgactaggtagtactgcgcaccagagacactggcaacgggagaggtccaaacatcacagtgaataagctcaaatggtagagatgaaactgaactggaatttccgaagggcagccgcacgtgcttgccaagttgacatgaatgacatagagtatgagcggacttattacatgagatggaattattttgtctaagcaaatttagggcagcagctcctggatgaccaagacgatggtgctagaggttggtggaggtggcgaggttggcttggggcgtggcagggacggtgtagaggccgtcggagctattagagcggagaatcacgcgtctggtctgcagatccttgacagaaaaaccaaacgcgtcaaattcgatagtgcaattgttgccacgagtaaattggcgaaatgaaagtaagttgcgcactagagatgggacaactagaacattgcaaagcgaaaaggatgaagtgctaccaggcaatgtggaggtgccggagcaagacacaggaaggtgatgaccgttgccaacagtgatggatgggacagaggagggttgatgggagagaagtataccatccgtgttgtgcatgtgggaggtggcaccagagtccatgacccagccggagttctggagcgccatctggttcagggcggcgatgaggctggcctgatcccacaccgggtaaggaggtggcggtgcggcgaagtgggcctgtgggttggcacccatgaggccctggttgcgcccaccttggccgccctgctgccagctgccggacttggagccttgctgc

SEQ ID NO: 40873 - DNA, 325 bp, Zea Mays
gcaacatgggggaggggaagagggataacctgtgctcacggcggattcctggcgacggtggagattggcacggggagactcgacgtgctacggcagtgttccgggccagatggatagtcaccaggcgatgcagcgctcgatgtctcgtcgacgccagtgaacttggtgagcggctgaggagaaactgcgagagcgcaagagcaggaaaaggataatcgctggacggggaaggaagagctttaaactgcgacgtggacggttaccgagttcaccggcgcggactcatccgagtgcgcaggagaagtggttacgacgaagaggcaaa

SEQ ID NO: 40874 - DNA, 359 bp, Zea Mays
atttgatgagggtgtttttcctttctcaaaaacattgacccaacaatcacagccaaatctatcctctccatcgcatgatttacgtatgttgcatttgggcaatggtggtaattttattggaaatgatcatgtgttatctgtacctgctaaccctccagtaacagaacgtccggtaatatttccttctgcacaggaaccatacccaaggctatcgcaattggttacaggctctcctgaacattctggcgattcttctactgatatggctgacacgtctctaaaaaccatgtcgggacccggtgttcaaacagaatccgtctccggaaccgcagaacccgctgggtcggtggccttggagt

SEQ ID NO: 40875 - DNA, 312 bp, Zea Mays
gcacccctttggcaagaaacattaggaaatcacagtaaaataatcaataagtattagtggctaaaatttggtacagagtcatgttattacacctaaatgtcagaaaaaataagccttagggaataatccactgtaaaaggagagttgtagttcaaaacacccctctgccctaagatttgataattttgtacagagagaacccttaactttttaagccccaatttttgagacagagagttatacaccagtgagaagctactgtaatgtttacagaatttttggaaatttataaaactagattgtagtttaaac

SEQ ID NO: 40876 - DNA, 357 bp, Zea Mays
accgcatagtcaacctcatcatgaccgaagactggcgggcaccaataaccctgttcctgcagggatactaccagccaagcgatatcaacgaggccaagcgcctcaaacaccgaagctaggactttgcactcattgagggacaactttacaagaagggggtcagtcaacccatgcttaaatgcgtcaccgagaccgaaggcgtcaatatcctacgagatgtccacagcggcacttgcggttctcacgtagggcccagggccctagccgccaaggtgatccgtcaaggcttctactggcctgctatgatttgcgccgcgaatcgggtgacgaggtcctgcgaagcctgccagaaattct

SEQ ID NO: 40877 - DNA, 460 bp, Zea Mays
cagatacagcaggaagtggtggagatgaacaaggccaaattttagaggaattatttagggagcaaagtgatggttaacacagcgaaaggagatcctagagcagtaactggccctgttgatttggctaaggagaggcagctgagagattttcggaggctaaatggtttatgttttggttgtggagagaagtacgagccaggacatcaagataaatgccaaaaagaggtggagctcaattacataatctgactatagaggatatggggtttgtattgtcagatgaggtgttgcagcagctagatcaggaagataaggaagtggaggaagcatataagttgtctataaatgctatcagtggaactgaccgtgaggattgtatgagggttcgggctctggtccaaaatcgagtactggtgatgttggtagactctggcagctcctcaagttttgtcagtcagag

SEQ ID NO: 40878 - DNA, 696 bp, Zea Mays
tagggtggatggtgccatgggtgtgctagacatgttggagaaaggaaaaaaagattcgtcaaaaatgacatgtctagaaataataatgcggttcgactgaagctcgaggcatcgatagcctttgtgttccgaggaatagccaagaaaaacacatagggaggagcgaggggcaagtttgtgaggtgttgtggaggacatgttaggataacaagcacacccaaaaactttgaggtgatcataggagggctcggtggaaaatagggcgctatatggcgtggaggatgcaagggttttggtggggaggcgattcacaagatatgtcgcagtatgaagaccctcaacccaataggccggagggagacttgcctgaaataaaaaggagcgcaggatattgttcagggtgggaagagagcgttctgctttcccattttgttgagatgtatatggacatgacatgcggagggtaacaccatgggagagaaagaacgtgcgggcctgagaattatcgaattcgcggccgttgtcgcactggaagctcttgatggtggtcccaaactgcgtgcgaacaaacgcaaaaaagttagaaagagcgaaaaatgtctcggatttgaggcagagcggaaaagtccaaatgtagtgggagcaatcataaagaataacgagataatatttgtatcctgacacactaacaatggg

SEQ ID NO: 40879 - DNA, 377 bp, Zea Mays
ggctatcctctacttaatgaacaacattggtatgtagctgaaaaggttttagagttccttgagctgttttatgaatcaactgttgtcttgtctggtgtttattaccccaccagtcttttggtaatccatcacatacttgaatttgctagccacctgcatgaacatgaacatgatactaatctaagtgatgttgttgttccaatgaaagctaagttcatgaagtaccggaagtctattccaatgttatattcatttgcatttgttctagaccctagagctaaaatgaggggtttgtataatgttcttgaactgctttctcaatctaacaattataattacagtacttattttgctgatgttaagactgagttgtataa

SEQ ID NO: 40880 - DNA, 363 bp, Zea Mays
gtattttcttgtgggcatgtgggggtccacagtcatttaggcagataaggaataagtttggtcactctttggaaactattagtcgcaagtatagtgaagtccttaatgcactatataagatgtcttctgacgtaatcaagcccaaagacccaaatttcatagagattcaccctcgattgcgagagagtagattttggccccacttcaaggattgcataggagcaattgatggtagtcactttcccgcgtctgtcccggccacggagcaagccaaatatattggtcggcacggttacgcatcccagaatgtaatggtcatttgtgacttcgatatgaggttcacatttgttgtcacaggttggt

SEQ ID NO: 40881 - DNA, 475 bp, Zea Mays
ccgctattgagcttaaggcactgttccgccaaccgccgtgtccgcttggctcacggccaaattcagataagttcactggagttagccgcctgccgctcggatgacacgtgcctagacgcaatacttcgtcgtagtgactcgctctagcacatccggtcatcgccggtgagcccgccacggtaaatgccaccaatcgcttgcgccaatgctcttccctctctccagccgtcgcgcgtctcctacaaattcactggccaccgctcaggagacctataaattgagcacaccatgggctccgtagggtaattacccatccaaagcaccagcacttgcctccaattgttcaccagagaccacaaattgctcatctcccccaaatcaggtttccgacaccgtgaaaaggtcctcgccgtggctagctcgatttaggtccaatcttgtcctctgctctcttgtttcagcactcttacatgcc

SEQ ID NO: 40882 - DNA, 615 bp, Zea Mays
aagaaagaaaacaaatctgtgttgggcccaatccctgtgcctcggcccacctcaccaattccccttgcgtggcccaagtccacgcgcagtatatacatggctcctggtgctgccagtggggcccgcataccagccatacatctccttctcgcctcgttgtgtcgctgacaatgtggggcccagtcgtcaggttcatctttcacccagtaaacagactccgccgaacggcacgcgtggaatccggacaagattgcccaccgccccagctccagcctccctcccttcctgttccgcgcaatcacctgggtgtgtcatccgctgcctctggtgcgtgggccccgcgccatagaatcgtctcctaccccagaaacagaacacgcatagctccgtatgtgccgccgcgcgaattccgcgctcagctgtaaccaccacggatcctcttctcccgtcgcgtccccaaccaacctccgctataaagcccagccctgcggtgtccccatcccctcgaccatctggatgcgccagcagggaggtgttggggaggtgagtgaagtgcgccgccgtggttgattcaagcatgggtggtcgtcgggtccctgatggatggccgaggat

SEQ ID NO: 40883 - DNA, 395 bp, Zea Mays
acaaggatactgaaacgaaagaacatggggcatgagcggacctggagcacgctgaccacggcgaggtcacaaggcgtggtgtttcggaccgaattgggggaaatccgaaattggggctcgttggtgagcaattcgaggcacggcttggtggattgggtgcttgactaccttacggacccgaaggcacactcaatttataggctccgggggcggtggcctgtgaatttggagttggcgcggtggcggccggagagaagagttgcactggcgcaagcgattagtggctttcaccgtggcgggttcaccgacgatcactgaacatgcataacgcgagcgactgcgatgtggtaaatgccgaggcatgtggcgcaaggccgcgaggtggctaactccag

SEQ ID NO: 40884 - DNA, 376 bp, Zea Mays
ccgcactccgcaccgatgctgtgggtgtagtaggtcgtgggctactggctcagagggtggctgccgggtcaacacaagccacatgttcgatgatttacctggccgacgaccgcaacttggctgacatctctgttggcgcgctctgggaggagacaatggaacaagcagcaactactctacagcctagtggtcctgagaagaaatcggtgctcctctcctcatccactgatggtaaactcggtagtctgaaggcctatcatctcgctcgaggcctgtgtgaccgatgtgacgagaaatggcatcgaggtcacaagtgcaatgatattgtgcagttacacgtgctgcaagaggtatgggacttaatggctgaacctgc

SEQ ID NO: 40885 - DNA, 308 bp, Zea Mays
tctgatattaccaagacgactttctctacctgatatgggctatatgggttcacggtcattgtcgtttggcttgactaatgcaccagcctacttcatgaatctgatgaataaagtgtttatggagtatcttgataagtccatcgtgctattcatcgatgacattctgatttattccaaaaatgatggagagcatgatgaacatttgtgattggtattacagaagttgagggacaaccaactctatgccaagtttagtaagtgtgagttttggcttgatgaagtatcattccttgggcacatcatctcta

SEQ ID NO: 40886 - DNA, 310 bp, Zea Mays
aaccagacctagtgccgcaccatttggatacaccatatcctacgctgaagccctcgtcggcaacatggatggtggaggactgcggagtggggaggacgaaactgggcgtggttcggctgcgggcaatcgtggtggccgcaccaacgggcaaggcagtttgatgaaccacaatggctttagaagaccgaactttgaggctcgtcgcgggggttacaaccgtttcgggagaggtcaccgcaataagcacagagaaggcatggggaggtatgatcgccctagttcttcatatgggtttcaaggtggcacaggc

SEQ ID NO: 40887 - DNA, 1156 bp, Zea Mays
gtgccatgtcagtttgttttctttttatgtcctgataataagcctcgaaggcatgctgtatttcttcactggtttctactttctagcttcaaaatgacagtttcgcccagtacaactgtttgttagaccttttacatatcttatgattctttgcagttgcaggaagcaggtgaagtgaacctcatgtccagttcttgctcctctttaactagtaactagatcatttgtagtgatggaagctgtaaagaagctccatgctcatctcgttgtttctggcctgcacaactgtcaatatgcaatgtccaaggttatcagattgtatgctcttcatcaatcagatttggtttctgctcataaagtatttaagcagattgagtcaccaacaacttttctttggaatactcttctaaggggtcttgctcagagtgatgcaccaaaagatgcaattgttttttacaagaaagctcaggaaaagggtatgaagccagacaacctgacatttccttttgtgttgaaggcttgtgcaaaaacttgtgctccaaaggaaggtgaacagatgcacaaccatgttataaaacttggatttcttctggacatctttgtttccaattctctgatttatctatatgctgcttgtggtgctctggcctgtgcaagatccgtctttaatgagatgctagttaaggatgttgtgtcctggaattccttgattggtggatacagccagcacaatagacttaaagaggtattgacattattcaagctaatgcaggctgaagaagtgcaagctgataaggttacaatggtcaaggtgatttcagcttgcactcatctaggagactggagcatggcagattgtatggttaggtacatcgagcataatcatattgaagtggatgtgtacttggggaatactttgattgactattactgtagaattgggcagctgcaatcagctgaaaaggtgttttctcagatgaaggataagaacactgtgacactgaatgcaatgatcactgcatatgcaaagggtgggaatttggtctcagcgaagaaaatattcgatcaaattcctaacaaagatttgatttcctggagttctatgatatgtgcatactcgcaagctagtcacttctctgattctctggagctcttc

SEQ ID NO: 40888 - DNA, 464 bp, Zea Mays
gtccgatctagatctaagctctacagtttaaaacagacaagcggctcgacttgactaatgtagatctgtcgatcctgatccaactgaccaaatcacgcggcttggcatgagcgtgtggctccgtgcccaacaagctggggtgaaggggcgtgataaggggaacacacggcgtgcggcagtgcacgacagacaagctcaccaaagttggccataacggggatccaggggcctatcatgctgggagaatagctcaggagggagcgggggtgaaggcgaacatgattagggcctcaccaagggggtcgaggtagcagagagggtcggcgacgagcgatggcggggagcgtggagagaggtagcgaggcttgaggatggggagccagtgcttggaatcaaaggtggggcttcaggtgatacttataggagcgagaccgaggcatgacaggcaccaaatcgatggaaat

SEQ ID NO: 40889 - DNA, 679 bp, Zea Mays
gctagaatccaaacttccatcctaggtctgaagattgagcctttctcttaggattcttagccatatctgccatttccgtcggcagtgtagctatggtcttctctgctatggaagactcatctgcaagattagatgaagtcatggcattagctatgccaccactacaaggctcaagaatcaatacttgtaccacatcatgctgttgtcgttgatccacatcatgcaacatcatgagggccaattggccaagcactaatagtaataaatgctagactgctagacaattagaggctagagcagcaggctagaaacactgctgcaggtcaacattcaagtgaatcaacacaacgttgcttatcccaaagagagaacagagcagattagcagaggcgtaccatctgacgaggaactcatctctagggctctaggcgtcgtcggttgcgggctggggcccggcggcagtccctggcgacgacattctaggcgatagtccctgacggcgatgatctgaagacggtggtccaggcggtgcgacggtttggcagctggcggtgcggagacaagatgaaagaggaaagaggcactcatgtatcgatgagaatgagagaagagagataagagaagagtattctgaaccctagtgggccaaaaattctcaagagacggcctcaaagcccat

SEQ ID NO: 40890 - DNA, 317 bp, Zea Mays
taaccagcattttgttggtggtgctggtcacagcatccagtgattacaaacagtcacggaagttcatggagctggactgcgagaaaaagaagattcacgcacaggagagcaccaaagtccgcaaaaaaacacagatgcccagcttcaaatcagacaagggaaacatagctgcaacgtggaaagctttttgttcccaaaaactgaacccagttttcagtcacctagaactgaattcagcactaatcaagtgaacccctacctttaacccctccagttcatccccatttttctcacaattcaaaacaaggacaggccga

SEQ ID NO: 40891 - DNA, 806 bp, Zea Mays
cttaggaactcggttctgtagttttccggagttccaaaggtgacaggcatgtagatgtgtccaagcgggtattctccttcggtcgacacaatgccaaagaaaggagtgtctgactcgtggagctctttgagtgcaactcccaagcctaagagtgtctggggggaaggtgacgttgatgctgcttcccacgtccaccaataccttctttaccctactctctcagatcaccggatcaatgaggagcgggtacttgcccggatgatcgaagttgagccattgatccacccgagtaaaggtgatcgggtgttctgaccaccgatagggggtgggagcactggtggtcgccaccaatatctgtcgatcgttgagcttctgttgccttttgttctcttgcgacccgtgtcctccgaagatgacgtgacctctctgtcgacgcgagggaatgctccacctcctcccccttcctgctgctatggttgtcgaggttctccgggtcctcctcgcggtgggggaggtggtagaggttggaagggtcagccattcccgacggaatgcttgaagtctctgcagttctgcaaggtgtggcgcatatccctgtggtacgagcactaggcgtcgaggatgtcgtccaatgttcgttcaactccgcggggtgcccctcgggcgcaagagacgggtggtccagcggcgtggacctcttcatgaggcctcttctcccagtgcttgtctgtctgctggtttgcgtcacgtcgtggtgctgatggagcaggcttcgttcccccgatgaggtcttgagttcgttgatc

SEQ ID NO: 40892 - DNA, 642 bp, Zea Mays
gaagtgactggggtctccgcagtgccaacaggcatttgctggcggttggttgcttgcaacagagggggcctgaagggagctctaactctgctgactgtagcgggacgaagtgggtccagatggtttattgaagcttggtcccctgggtggaagcccaaagggtcgagctctctggtgacgttcttgctgcgagctcggagaacttggaatttcctcttgaggtgccctttttcttcctcttttgccctttccacttggatggctttgttggagaggtgagaaaagttgaggaagtcttggctggcaaggatggtcttaagctcgggtcttagtcctttcagaaaatgggccatcttcctggactcggtgctgacatcgtcaggcgcgtaacgggccaactctgtgaacttgtgcacatactcactgactgttctcccaccttgagttagctcccggaactcatcctccttgagttgaactatcccctggggtacatggtgctcacggaaggctgtttcgaattctgccctggtagcatctctgacggcctcgctgaaggtgtcccaccatgctaaggccattcccgaaagctgatgagcagccagttggacacgctgatttttggggcatccgatggcttcc

SEQ ID NO: 40893 - DNA, 329 bp, Zea Mays
aaaggcactggaagggcctgcctttgttaaagaggctgaggagaaagttgccctgatccacagaagattacttgaagctcagagttggcagaagagttatgcggacaacaggcggagagaactcagatttgagaaaggagacttcgtctacctcaaggtctctccgatgcgtggtgtcagaaggttgcaagtgaaaggaaagctagcaccgagattcgtcggcccctaccccatcattcgcagagtgggacccgcagcgtaccatcttgaattaccagaatccatgtctaatgtccacaatgtgtttcacgtgtcctagctccgcaaat

SEQ ID NO: 40894 - DNA, 302 bp, Zea Mays
agcatggctgctctaagtcctatagcgcatgctgcacaccatggctggtaacactccctgcaccttgaaggcctgcttgactccaagcaggagcaaatgtacagccttgatggagggtacttcatgatcttcccaagtcatgagctctgaaagaaggcccgaccacttgatgagaacttgttgcaccaggcggttccgttttgtcgaacaatgagtctgaagcacacgtcgtggcacactaaagttgggtaaagaagtcagaaggataggttaaaccacacctttgaaacctacagtgtcac

SEQ ID NO: 40895 - DNA, 711 bp, Zea Mays
gggcatggtggacttcctacatgacctcagcgagcctattttggattgtaccccatccttaatctcctttgcggcctcaatgagctacaatcacctatagacttggatcacacgatccatgtcgttttttcattccacactgtttgcaactatctcatccttgaggagctcaccaaggggggccatgtccccctccgacaccgccatggccttcgacaactccacctctagtaagcaaccatagtgctccactcctactattagtggtctgtccttgtgcttgcatgcaccatcaacgtcaacaaccccttgtccccctaacaactctggtggtggtagcctcggtagcagagggatggccacggtggtggtagtaggaagggtgacgcaccctagctatcactctataacccatggaccgacacatttctttatggctcgacccaacgatggttggttcgtcgccatgcccatcgcaattgcagtcaatcctcctcattatgcccacctttggtagcctcgagtgcctcctagatctcccctcgcaaggatacccacttcagggccaagctgtttgtcgggtaactccgtagatacccttgatactttcccatgtgcaagtggatctttagaatagcctctcctagaccgctcctcgacgtcttcactattgagtttttttttccaaaatatcatgggcctcgttatctc

SEQ ID NO: 40896 - DNA, 311 bp, Zea Mays
tttcaccagtggcacaagttcacatcaagaagacacgaggacaatctgttgtggggaaaagacatggggacaagcagctgagaggaagaaggcatgtggacaagatgttgaggcacaaggcatggacacaagctgatgtgacgaagaagcatcgagaggacaaaaacgcagaggcgacagtgcaggaacgaagagagctacgacgaagaggagtactcggcggagactaccgacgagcgaccacagagtatagcgagggaggaagcgacaaatggagtactgcaatccgttttgagtaacgactagtgagc

SEQ ID NO: 40897 - DNA, 428 bp, Zea Mays
tatggtgctgcattgtatttgaatccgggaaaattctttgccattaaaaacaaaggagatgatatgtatgttgcagagctaagtagctactttaatgatgtgcttgaaagaatggaaccggatgatgctattcggtctaagattgatgaatttgcaatgcattctgaggaacaatgtagccctatcttctcaagcaaattggcacttgcaaacattgaaacaaaaagccctcgtaagtctatgtgcttttgttaatttcagcatgctacatgtttcaatgtccctaatatgtatgtgtcatgtgacatgttattatcgttgattggtggcgttcgtatggtggtcgtgccttcgaattgcaaaggtttgcaaagcgtgtggctagtctatgtgcttcatcacccagttgtgagaggagttggagtacc

SEQ ID NO: 40898 - DNA, 325 bp, Zea Mays
gggtaaggaccttcaattttttcctcttcggcgcaggttcgcttggagaagctgaagcagcaacctttccaaaaagtgcaccctttcttttctgccctcgtggcgggtagcgatagtcaggatacacaaatccaatagcatcaaaaactctatttaatcttttcttttttcggctcccgaaggccgcagatagtgcattatcttcaaacttggaatatgctccaagtaactcatcgctagtaatttcaacacacttcagccagtcatcatctggctcgacaaactggtctccaaacctgaaggtatatttcaatcgaatcagacc

SEQ ID NO: 40899 - DNA, 364 bp, Zea Mays
gacaccagaaccatagccaataaaagtgcattttgagctctaggcactaactttccattgttcacatgagcataagcaggacaaccaaaaattctaagattagaataatcaactggtttaactgtccatacctcttctagaattttaaaatcaataactgaattgggagagagattaatcaaatagcaggcggcattagcagcttccgcccacaaaccatgcttatcacataaaccagcattagaaagcatgcaacgaacacgttccagaatagtacgattcattctttcagcaacaccattctgcttgggcgtacctggaacagtcttgtgtctagcaataccatgatcagcacaaagagaat

SEQ ID NO: 40900 - DNA, 373 bp, Zea Mays
catcgatctgtcccctcacctctgtgggatcgtagcgttagcatgacctttatgctagtttttcttaagttttgatgaagcattcttgcctcaacatacctcatcaatcgccttcccatgcgtgtaatagacaataagtgcacattagaacgactctttaatattcctaactacttcttgttaaaagtttttagatgtgcatgttggcctcaccttcatatttacataaacaagacttttatttcatttaaaagagtgcatatttttaggctacaactcactctataaagggtacaagtgttttgacgctgattctgatcgcatctatatttatcatgatgtcatatttaatgaaaatgtcttcccatcacca

SEQ ID NO: 40901 - DNA, 327 bp, Zea Mays
tcggccaccaaagcggtctcgcttacccacccaggagcgacagtaggttaggccgattggaccacctcaccaatcggaaaggacgagaggtcataatgtccaactaagacctaacgtacatgcatggacaccgccactcccatacacacctatgtcatatcattatacatacataccaccaccaccatatatcccgaatcagatgtggggtatgccaccatatcctttcaggacaccacaatactccgcttggggggcaccccagtcatctgtctttgccaggttgacgcctccagtacaagaccgattgagagcccctcaatctgg

SEQ ID NO: 40902 - DNA, 1118 bp, Zea Mays
atgcgatctgttgtgtcttgcttgtcctactgctcctacatcacctgtgattttagagaaggctactagcgcagactatgatgatccgatgtcctcttatgtctatcagtttagtgtttacaagacttagttgaatggggatgctcgtgttcgtgctattcttgtctctagaatggatgatcgtcttgctgttgatatcgttaattttgagtttgcacatcagatctaggcttttatgtgtgatcgttatgagcctactagccagtctacatatcttgctgctattcgtcatgagcaactcttacgacaaggagattgtatagttgatgtcttgatgagttctttgcacagatgtcctctatttggcgtcaccgtgatactcttggtccctagctatcactagatacttgtaagtcttgccaggttcagaatgttgcacttgagcttcgacatatctacttcttgatcgggcttcgtgacgagtctaagccccttcatgctcagctgctcgcttgtcatccctgcgtctctctgatggatattcttgctggtgtccgtaaccccgtaatgagactcatgcgtgatactggcctgttgtagtcttcgttggtcttggctatgtgcatgggggcatggtggtcttcattatgcttacgtgacgggcatgtggaagcctactattttaggaaggagaaggcttaggcttgccattcttcatagggtattagtagtgctggtactggaggatctcagggaagtttggctacgactacggaggcccaaatactcatgttgctacgttgccttaagatctctacacctataggagttgttggttttgtgactcagtcctctgcacctatcagttcaccatcttccactgagggaccgtctcccccttccacttcaagtacctgttcatggattctatactctagtgcttcctttcatatgactcctcattgcacatgcctttcgtctatgagtcttatctcattctctcactgtccatacaactgatggatctctcctttctgttgttagttagggtactcttctgtcttgttttatgttcctgatgactgatgtttcttttgttcttgatctgaccatgcagc

SEQ ID NO: 40903 - DNA, 635 bp, Zea Mays
gaggggaagtaagccacggccgccaccctggattcacgggatacgaactgtgtggcctcgatttggggccggggcactacgcagtgtcgcggggtcgtccagattcctcgccgcccctcctcatcgccgtgaagccgccgcagtcacttcgtccgctcgtcgccgtggggagcttcactaccgccactatatctagtatggattgcgctcccaggttcaccaattcatccgcttcgagtaggatctatcaaagccgagaatcacgcatcggggtataggcggaggtgatcaccgccgtgctatgccgtggggcagaacggcgccgtgtccggtcgtcgtgggggaagaaagaagtctggccgtaggatcctagatgtgcggccgagattagattagctgaccgattcaactggacaatctgagtgcttgattttatatcccacggtcaatagcgttcaccgtttcatatggagcccgatctgatctgggctgtccgatcatgatcggatggctcactgcgtctgataccccttcagtataaaggttttgtaaacgagcccctggaaaatcggttaataaacccgcattccatggcctgggttctctatgtcttggcacactttgcgctagggccc

SEQ ID NO: 40904 - DNA, 500 bp, Zea Mays
gaaatagagagctatggtggctaatcggaggcaggagcgggtgctctggcttcgtgattacctagcggagctcgcgacatgctcaatttatagggcccaagggcggtggctcttgaatttggaatggcgtgctggcggccggagaggaagaaggtcactggtggctcaatcgtggcgttcactggtgccgcggttcagagattgtattcctaggcatgccacggttactaccgcacagtaaagagccacgacatggcataactaaggtcaccggagtttccacgatgacaccggcgatccggccacgtcgcatggctataggcgcggttgataagcttcaccccgcgtccaaatccgctccccttctgatcttttcaccctcccggcactatcctgcccgagtccagcatgaatcaccgcgatcggcgcgaatccttgcgcaaaggtcaccggcggcgaggaggactgatcctgaagatcttttgcgcactgtaccatca

SEQ ID NO: 40905 - DNA, 340 bp, Zea Mays
atcgactctggtgcctcctaccacaccactcccactacaggcacgctctcccgctcccatccccctcattcctatcatccttcatcgatagtcgttgggaacggttccactctgcccgtcacctctgtaggtgcctcggttctccctgaaccgttctacctcaacgacgttctcatagccccccacatcactcataatctcctttctgttcgtcgtttcaccactgacaactcttgttccatcgagtttgacccctctggtttctctgtgagtgtgaaggatctggccaccaggactcccctcgcccgctgtgacagctcggggcccctctacacgctcc

SEQ ID NO: 40906 - DNA, 359 bp, Zea Mays
aaagacttcaggccctgtcaggaagagatcctactgaggatgaccccaccatcgtctacatggccggatatctccacactcttgataaccactatgatgacctttcctcccactgcacccacctaaactcccgggtggaaagcttagagcaacaggtcaaggaacttaaaaaggagaaggcgtccctccaagagagtctcgaaatagcagaaggtgaagaggccaacactcgtgaagcctaccgaaccctgaagatggattacgataagaagctaaagaagctcgcccccacgaagaaaatccgaaagaagaccaagagccaaggatgccagactaagcggaagaaggaagcccctcca

SEQ ID NO: 40907 - DNA, 754 bp, Zea Mays
tggggtatgggcatctgctttctactgtagctgcatatggtagtcgtgtgctttatactcgtcagtcgttgttgggcacccatacgcgctgaaacggtgtaagcggatcctgacacaaacgatgggagagagctcacgtgcactacaagataaatgataggaaaatgtagcttcccgttacgtgtcttaccccgctacagggtggagatatttataggctttgcccggagataggtggtccaaagttcgatcctaccccggtcaccaactatatccggggaatattccgtgtatcagggtaacaacggtaacaacagcagtgcacgcgcagcgaccaatgcacaccgaataacacacccgctaactaagctgacaggtggagcccctagaggtgcctcatggtgggctaatgacgtaacggtgtgacatgtagcttccgccggccttagagccttcgtgctatggtacacttcgctgcgcttggacggaaggcggtcgccaccgttggagccttcgcgctatggtacccttcgctgcacttggacagatgagtggcgatggagactctagggcgacatagcggcgagggcctcgattgctggcgatcgctcggagaccctcgccattgttctcttgccactggtcgattggtggatcgaaggtcccttcggctatggacctgcgtagttaatgtgaaacaaaaggagaggtcttcgttgtatgattgaggtcttgttcgtcctccgcccaacag

SEQ ID NO: 40908 - DNA, 380 bp, Zea Mays
ctgccctctcccacgcctcgaccaacgtcgaccgccctacgtccgacaacgtctccccgcccatcacccaccgctgtggacttgcgcccgaattacgtcgccccgtgctcgtcgttgcttccccatccaatgcccgacgcggtggcctccaccgcacccgcaccttggccaggctattagtcatcagtttttataatttgtcataatcatgaattatttacacattatttatatgtacgtgcatgagtgttcgtgcaaatggctacacagggacactagacatgcggtgcacctacacccgacccaaagtccgagtttctatttcgacccacgagtgtcccacacccgacacgaaatttgattcattccttattttgcgc

SEQ ID NO: 40909 - DNA, 325 bp, Zea Mays
cgactgcaagggtgactcgtgaaggagaagagaccgaggtcaccgagacagcaccaatttccgaagtcatgaaacaatcaggtctagttgtgatagagggaactactgatgaaggtacccctgttaccaaagctgaatagaccattgctgaagaagaagatattgaagaggatgaagaagattatagtattttgatcccaacaaaacccagccatctagattttgagaaatctattgtgtttgaagctgacatgcccatgatgatgaagctgggctactttggggaagctaaaaggaaacttgtccgatttgccggagaagagac

SEQ ID NO: 40910 - DNA, 288 bp, Zea Mays
cagattcctcacaaaccaatggccataattacattgccttgagtgttgattattatgcggttacttctaagtccaaggctcattcttttgagacaaaggggcaacaaattgatcagcaacaaaaggaagctcgaaaaactcaagctgacatattggagggagtgctaagactagctgaaaagaactgtgcaggtagtgttgaggaactcataggagaggaagttgacgcagatgggcatgcaagtgtcggaggaacaaccgatgcttctaggaagcaagaagccaaac

SEQ ID NO: 40911 - DNA, 422 bp, Zea Mays
actggctgcgcacgatcaagaggaaactggaagccatcggatgccccgaaaatcagcgtgttcaactggctgctcatcaactttctgggatggccctagcatggtgggataccttcagcgaggccctcagagatgctacctgggcagaattcgaaacagccttccgtgagcaccatgtaccccaggggatagttcaactcaaggaagatgagttccaggagctaactcaaggtgggagatctgtcagtgagtatgtgcacaagttcacagagctggcccgttacgcgcctgacgatgtcagcaccgagtccaggaagatggcccgttttctgaaagggctaagacccgagcttaagaccatcctcgctagctaagacttcctcaacttctctcacctctccaacaaagccatccaagtggaa

SEQ ID NO: 40912 - DNA, 373 bp, Zea Mays
tgagcttcatctagtatctgctttctgagctcagggtccttgggaacaaccaatcgatctccaaaccatagaattcccttgctgtcctgtcggaagcactggtatttttctgccttttgcttaatcatatctttgataatctgaacacccttatcctcaacctgtgccctgactatctgctcttgcaaagtgggctccaccgagatatagcttaggtcacccgaagaaacaacttccaggttcagcttgcacaactcatcgcacagggtggtgactcttgcatccatgctcatacaattgcactgggcctttctgctcaaagcatctgccacaacattggccttaccagggtggtaatgcacttccaaatcat

SEQ ID NO: 40913 - DNA, 408 bp, Zea Mays
catgaaatgtggacgtacgagcgtttcatgtcaatactaaatggctatgtatcaacccgtgctcgtcccgaggcatccatgatagaggggtgttgtaccgaagaggccattgagtccggaggtccattctgcaatagtatcctaaaagaccaggttgcaataggtttgcctccgtcatgacacgagggtagattgtatggaagcgggaggatgggacggaaatctttcatcccactagattacaatacagtacttgaggcacatcacagcatcctacatcagctagcgataatagagccatttatccaacaacacatcaatgagcttcacgagcaaaatcctgggcatacggctgattgggtaatgaagcaacataagtagtggttcaacacatggctaatggtgaag

SEQ ID NO: 40914 - DNA, 311 bp, Zea Mays
gttgctctcgaagtttggggaactatggcgcagggccaccgtcggtggcaatggctccaccgtaggggcaaagcgctgccacagcatctcggcttgtgttggaggaaaccacacagaccgtccgatctagcgtaagcggtctagattaggagcgcgggcaacgtcttggccgtggggaaagatgaatgctgtgagccattgaatggttgatctgcggctccaattaagtgctggatgctccctccacgtaattaaatcgggatcgttggtctccgaatggactgatccagagcgatctcgggtatttaaaa

SEQ ID NO: 40915 - DNA, 569 bp, Zea Mays
gcaagatcgagaaaagccagattacctgaagattggagaagaatgaaggaaaccccaaatcataagaagccaggtgatggctcgacgagggaacatcaactagggcaatctgaagagcatcattagggatcaactcaacatcaccagtagacattagaactctagcatcaggtgcgccggtctctaaggtgacttccttgtttaaagcatgtaccgttgccgtgccatcagaatgaggaggagaagacccaacgtggacatccatggaggtatgagaaggggagcctgcccggacaccctcgggcgctaggtcgtagctcgcgctacccatccgagccggatcattaccggcaacaccctcgggggctgggtaaccgcttgcaccatcctcagggaccgggttccctgcagcagccacctctaaggctgaaggattctcagtcacctccatgggaattgaacaaccttgaccagcctcttggccccgaagactacactccaaggtcgacgaggcacgagacgccgctcgggataactctaatcccacatctggaatgtcagagcaaacg

SEQ ID NO: 40916 - DNA, 433 bp, Zea Mays
cagatttgtattcacttggtcaatgacatactgggagagatggttgaatttattgagatactgcattatagtatctcccccttgctttaactggataaactcttcttatttcatatggagcactccctctagaacataatgctcccagaatgctagcttgaattcctcccaggtaatctgatgcccagcaggttggattgctgcaaaatttgcccactaagtgctggcagaccctcttaattgttgtgcggcaaacagtggcttttgcgtctccatgcatcgaattaacccaaacttctgttccataactctcacccattcatcagcttctaaaggttcttctgctttgatgaagagcgggggtcgaatctcagagaattccaaatatgttgtttcaggcggtccttgaggaggagctcttccttcgtgttgt

SEQ ID NO: 40917 - DNA, 271 bp, Zea Mays
aagtcctcttgtttgggtgctgctggtggtggtggaggaagggcttggatctcttggtgttgctggtacatatggttttgctggtggggtggaatggttcattgtggaattatcgctggtggtattgttgggggtggtaggtgtgtgcgacaactcattggttgtcggctggttgatttctggccatcctatctttggtagccttggttttagggcagtctctagtggggtacaaggagtcttcaccgtgaaaaaggcagtagaaccttca

SEQ ID NO: 40918 - DNA, 627 bp, Zea Mays
cttaatgtagtccccgccggcgccatcgtagctggacttcacttggggcatcggggttccagtaactctaaaagcctccggacagccaaaccgcgcccggcacctcggctaaactgatcttgagcgctgaagacgaaggcgaagcgaatcgaacccaagcaggattgtttggattgccgggcggcgcaccaaagtaagcaaatccgcaaccaactctgaatggtgagagaagaagatttagattaggttgcgagaaagccagtccctagtgcaatccgtccaagcaacctcgaggggcggttaccgacacgagaaggaagagatcgtggcaagtgcgggtggatggatctccactccacgccagtccaggcgcagcagagggcagcgacgaagtagaggacggggatgcctccccacaagagaaggctgtagctcaaagccccggttagctgtataataaccgcgtggtccgcgccgcaggcggcaaggtcgccgacgacgccgcacgactgattatagcggcgtagaatagaatcgcggggaggggcaagagagagaagacggagaggaaaaccctcgtgtcgagtcgagtcgagtccccctcggactcgcagaattccggttttg

SEQ ID NO: 40919 - DNA, 456 bp, Zea Mays
caggtccccgacggcgaacggcggtgagcgcgccctccggcaaacctgtactggctgggatgcgcagagactgacgcccaaacacggccgacacctatttctatccttggtgactctaatccgaccctcgattgcacaaatccagcccagagtccttctgcccacgacgacggcaaaacccgaggggaaatcgatgtgttcttggtgatttagggcggtctagttcaatcaaataggtctacgagtagcaggatgcttaatgaaggctagaacatcaagcaaggatgcttgaactaacctgcagagagctggccacggcgaggtttttacggtggcacggaaatccaatttaggggaaacctgaattaaggcgctatggtggacaatcaggcgcgagagtgggtgctctgtgtttgtgatgagaaggagaagcaagggaggtgctcaatttataga

SEQ ID NO: 40920 - DNA, 555 bp, Zea Mays
accagagcttgcttgagagtctggaaagaaacctcatgatcttgagtccaaatgaaaagtgcccctttcttgagtaaggatgtaagtggtttcgctataataccaaaatgtcgaacaaacgcctgtagtacccagccaaccccaaaaaactacacaactccttcacattgctaggtgtggaccactcgaccactgcttgaattttgccagggtccgtcgccacacccgcagccgagatgacatgacccaaatatgccagttgaggtttagcgaacgtgcacttggaccacttgatgcaccactgatccttgagtaataattgcaacaccgcatacaaatgttgaacatggtcttcaagagttgcactgtacacaagaatatcatcaaagaacaccaaggcgcaacgacgcaacaaaggggccaaagttgcattcatcgcgcgctgaaatgttactggtgccccggtcaacccaaaagccatcacacggaattcataatgaccagaatgcgtttggaaggcggttttgtgagtatcatcagacttcaacaaaattt

SEQ ID NO: 40921 - DNA, 311 bp, Zea Mays
atgtccttaaatgtgtgctgtcagagtgtcagtttgtgctgtgctgtaaaaacctgatttagtgttaacagcccaatttcagagccctgctatgctaaatccatggagttatgaaccctgatctctatagtaaagttgtagatcatagattaatgtatgacttttgttaagaagcattggtctgttgccatatgaaatgacgaaataaagggggcatgaacaggatgggttcaggtgggcagtagggcatagaatcagggaagttcagtgttaatctgcaattttgaacaagataatttggtactgttgtt

SEQ ID NO: 40922 - DNA, 277 bp, Zea Mays
gggactcacaacaatctccaattttttgagattgagggcaagactgtcggagcatccaccgaatatcatcccgagcgcgaagaaaagttggatgctttgctctatatgtatgaaaatatggatgagatgactccgtatttcaagtaagatgaaatttgtcatttctgtatctatgtagtaatcgtgacttaatacgctattgtttatttgttgtaacagagaattccaatcgcgacttaatgagaaattgtcctcgaggcagtatgaaaatgcactt

SEQ ID NO: 40923 - DNA, 406 bp, Zea Mays
gtcttcgccgcgtgtggaggttggcgaggctgctgatcttcctagtgcgagtactgagtataggtggcgaagggtggtgtcgaaacacagtgtgggtgagttttcgcgaagtggtaggcgccgtcgtatggggatggagcgtggccgtcttcgagtagaccggattggtaaacgagaattgttgtcctcgccgtttggggcgagcataggtgagggggatctgcgaaatctttttgagggtgaggaattgaggataatgctgttcaattatagggagatgggtatcatcccgaaggttgagccgatgtagtatatggtgccctcgccgtgtgtatgtaactgtaacttgtattgcaatgtggcctgttggccgttttcgcacgcctgtgctgatccggctgcaccc

SEQ ID NO: 40924 - DNA, 477 bp, Zea Mays
ctttcattaaagcggtacaacaatctagggcagcatgccctactttgctacgtacttgccagatcttgtcagtgcgtcgggcttgagggcgtccattagatgaggagaaagacacaccttgatgaccacatccactaggaggacctccacaccctctgccttggccatggctacgactgcggttgttgcttctgtgccctcgaccagcagtatttgcggaagcttgatgacctccatgaagtagatccatcctcacgctgaagctaagaagctaggatgtggcttcagacatgatgatctgttcaacacgaccacaaacgcagagaccactggtctgttctcttcatcaagtcccgctaggatgtacgagatgagttcttcgtctattctttgcagatgccatctcgtctgcaagaaactttatcttggtgacatatcctagcacgtagcacagtcatgttaccttttctagttgtt

SEQ ID NO: 40925 - DNA, 519 bp, Zea Mays
aaatatatgatgccacacaacacaatcaaataaaatatataatcaaacaaaattatttacggaggttgcgcgtaatgtgacttcaggggcttgaacaatccaccataatccacacgaatacaagctcaagtgtatccggcgttaatgcgtgtgcagccatcagggctaggacaacacaacaagccttcataacaaacgcaacagacgcagttgtgactcgatagtcggggtacaagacaagtccacgcaacgtgcgcaataggcgcaattgtggctcgcggcagacagataatgcctacagggcatgcgaaaaatacgcgactcagcgatggcggtctgactcaacgggagcgatccaattaatggagagcgcgacatagcaatcacatgacgcagccaagttcgaacggcacaaatactgcgtcgtgttgccagggcgcagtcaatattcagctaatgccataactcagccgattaccaacgcagcctgatcggcgtgtctgagtacgcattatacaa

SEQ ID NO: 40926 - DNA, 284 bp, Zea Mays
aaggcaataagatggtattcaaaaagaaagaaagcctacattcatgatttttccatatggcattgctcaagaagtatggagaggctcctaaggtaatcagtcctttacacgagatattacatgggtgtgtcatccctgccactgaaaaagtgattaaagctcaactggatcatggagtatcggatgttttggtgcattgggtaggtaggtcagctatagattcctcatgtgaacaattggaagaatttaagtgaagatttccaaatgtacagctcacgaacaaa

SEQ ID NO: 40927 - DNA, 333 bp, Zea Mays
gggatggccatgaacttggccagtcccgacctcccgatgatggtgttgtacccgcgttcgaaccgagctatctcgaagcgtaggaacttagttcagtagttgtttagagcgccgaaggtgaccggcatgaagaggtgccctagcgagtactctcctttaggcagtacggtgtcaaagaatggggtatccgactcaatgaggtcggtagtcgtgatcccaaaggcctggagtgttctggggaaggtgacgttgatgctgctgctaccatccactagaaccttcttgacctagttttcttggatcacagggtcgacaagcagagggtacttaata

SEQ ID NO: 40928 - DNA, 452 bp, Zea Mays
ataagagcgatggaattgaagcgtacgtactcgaattcttataataaagagcagggagcaagctgaatccaggtgcagccacgtcgcctgtttaatattaggcacatgatcattgtcggacgaccaaaaatacgtattctcacgcgtctcctctaagtaatgggatagttccagaaaactttcgtgtcatctttgcagctccaccccttactccgccgctactcccactccccattggcgtcatcccttctccacaccgcctccatgtggacagtctgatcgaacgaaccaacgccatcctcctcgccgtgtccttctcacccatcttctctatcgtttgcctagtctccggcgcacgcatatcagctgttgtggagcttttcgccccctccgctgacgaatctttcggttcgccgatccgcccctcactccgccgccgctcccactcccac

SEQ ID NO: 40929 - DNA, 382 bp, Zea Mays
cacgagttgacactagcaagaacacatgaacacgattgcttcctccaaagtaggaaggcttataagctggtaccgcaatgtttggctggccggtatggtacaatatttgcgcagcggtgacaacgacggtagtccgcgtgggctgtgttatttggtgcggcccactagcatgcctagcacgccgcacttatctggcactggcccagcttaccgtttcagtcccccgccaacgctctcactgctctgtggcccccctctagctctccctcgcattgtctctcgagaggctgagacgcggcgtcgccttcgtcctcgcaaccgctgcgacgtcttcggtccatgcccgcatcccccatcttcacgacctccacttcgtcagctc

SEQ ID NO: 40930 - DNA, 359 bp, Zea Mays
atcatgcgggccgtcggatttaaatggagggttgagattagatctagaagcgttggctgtcggccgttgatgcgtgaatgaacggtccagatcgggactcgcataccacttcgcgtcgttaaatctaagccgtggatctctgatcccccggtccgaattagatcagggattcattaaaccatgaccgttgatctagcggtgggtggtcacgattagactacacatactgtttcaaaacgactgatccaagttgttgatcggtgcgtgaacgggtaggatcgtgcccttgcgtttatgtttgcagatcaactgtgggccgtgggatctggatccaaggctccacgttgcataccagttcg

SEQ ID NO: 40931 - DNA, 288 bp, Zea Mays
gatatttttaatgaattgcagtaccctgtcttagaaggggttgcaatagacccaactcattggctttcaagaacagagagtgcaacacatccatgactatgtatgaacagcattggtgaaagagcatccccctgtctcaaaccacgctggtgggaaataagctctccgggcattccattcatcaacaccctagtagatgaagaacacaagagctttgagatgatgttacaccagatagggccaaaacctaggtgcccgagaacttcaagtagaaaaggccacgaaaca

SEQ ID NO: 40932 - DNA, 332 bp, Zea Mays
aagtggcatcagaatacgcatgtagctgaagtgggctatcagaagcatagagtaaacatctggatcttgtcccgcgtaaatatcgaagcacacgaagcaaatgaccataatgaactgaggttggtgtggatacaaattggctcaacatatgaacatcatgagcaatattaggtctggtcgaagttttaaatgaatatccattggtgttgcaactgtgcgtgtatcagtaattccagagcgatcaagaagatcttgtatatacttggaccgagacaaataaaagccttttggagtttgatgaacttcaatgcctaagaaataactaagtggac

SEQ ID NO: 40933 - DNA, 607 bp, Zea Mays
ccagtcgagcctacaaggatgccaaaagagcctgctgctgtgtaagagcctgaaggatcgcagccagagcagggtcaaccgtaggaggggcagcaggaacagcactggaactcccagtctcatgatcatgtgagcgtggaggcacaggaggcggaggcggaatcccaaaatcatcatcatcgtcgtcgtcgtcgtcaggaactgatgcgccctaagtctcaaactgatggaaagttgtatcctctgcctgaatgtctatcactggatcaggtgctggcactggatcctcaggggctggacggtaggagccaaagtggaggcgtgaggcctcaagggtaccctggaattgcggtggccggatcagctgtgcgaagatgtggcagagatagtgagcatatggcagctgtcgccgggcacgaagtccatccaataccatgtcctctatctcacatataagaaagtcaacagcatcaaactctgagtgagagatcagggcaccaagaagccagagctggatatgagtggtagcctccctataacccatccgcggcagtagcgtccgtctcatgagatgatataagtacttggacactgtagtgaaatctgc

SEQ ID NO: 40934 - DNA, 369 bp, Zea Mays
ggaatttcttgtcgccgcggaactccgcccaaatctgtgctccgtcgtggaccgcggtccctatgtagcgatcgacggtaagacaagtcctatcgatttcgccttgctgtcctgtgcgtataacaccggtttttcacggggatttttgcgctagtgtgggtgatgaccatcctccggcggggcaccaccgctggtcgtgttcgcgtcgccgctctggaagtcgtggggtagaagaaggcgtctccactgtggatctcgaagctaagggccgagattaactcacgtagaaacgaactccggccttcggatcggtgatgaatggctcagattagaaatagaatgtccctttgtcgattgcatctgagtcgt

SEQ ID NO: 40935 - DNA, 542 bp, Zea Mays
gtattttattaattatttgtttttctcttaaatgaggtgttcacatgggatggtgaataaagagggcacatatataaaggaaataatttctaatttagtattctcttacaaattgggtattacacttccctaacaaatggcgagattggttggcttctttgatggctacatccacttctcaagtgctactaaatggaatccatggtcaatcaatcactcattgtaggggcctaaggcaaggagacacccactctactcttgttcattctcgccattgatcacctgcatcgcctcctctacttggccaccgaggcaagcattctgtctagagttgttaaggctacaacatgtctccggacctctatgtatgtgaatgatgccatcatctttgtcaagcttgaaaatagagagtttgatttctttgcagccctgctcaatcttttggggtgaagcgactggtttgcgtaccaatattcagaaatcctcactcgtgcatatcaactatgctagcctcaacctcgatgaaattatttttggcttcc

SEQ ID NO: 40936 - DNA, 299 bp, Zea Mays
aagcacttgcactaatcaccgagtacttcaccaataactttggtggctaaagctactagagatgaggtttaacaccatacaattcttccttgagctctacacaccctctcttggtcgattggggcaatatttataggccccattgtgagacatgcccataggaacttcagcaatcagctacatgcaatgtgaggacatctgactcatgcatgctcgttggaccactatgctagggttcaatgtctcacaatagctaccatgtcaaaactagccactattgatcgttgggcacattttct

SEQ ID NO: 40937 - DNA, 291 bp, Zea Mays
gctgaattgtaatttcatatgtataaaggtgtgccggtctggccctaaaaataaatgaaaaatactactgctacgggtgtcggttattttgtaaccttgtgcctgtagcaccttagtcccgggaaagagttttcgaaggtaattcattatcgaagctcatatgcttggtccttcgcctgtgtgtattgtgatataatacctgaagtgattcattcatgtttcatgatgttaacacccttctctcctttggctccttcggagagaagggataagcaaaattgcttaatttca

SEQ ID NO: 40938 - DNA, 553 bp, Zea Mays
caaggctcgctaggtacttcgaagcttcacctagcgtctcagggttgactatgacgagactttcagccccatggtgaagcttgccaccgtccggatcgttctgactctagctctctcaccggcttggccgatacatcaggtcgacgtcaaaaatgtcttcctccatgggactctggcggagacgatgtattgcactcagccggttggttttgtgtacttcgctcaccccaacatggtctgcaagctcaaccaatccctctacggcctcaagtaggcgcctcgagctttgtacagtcattccttgctcgcacaaggtttagtcgaggtcaaggcggacacctccctgttcatctttcgttgtggcctgaacacggtgcacctcctttacgtcaacgatatcgttctcacggctttctccctgagctcttgcgacacatcatctcctctctccagcaggagttcacgatgaaggaggagctgcggttgggagagaagctgctccgctgctaggagagagggatcagtagtagggagagagggaggcggctaggag

SEQ ID NO: 40939 - DNA, 306 bp, Zea Mays
cttctttgagccttgactcctctatctcatcctttgaaacttcctcatttttgtgatcctgggtcgatgttgtaactcttgtagaacccatctttatttcttcgggggtgacaacttcgtccacaaagagaagcatgaacggtgtaaagccagtggatcttgatactgatgtgttatgattccacacaacttttatgagctcttctgtccatttgcccttcgatagtccaactagaatttcgtaactcccagtaagattatgtcatttgctctttcaaccaatccattagactctggatgtctgac

SEQ ID NO: 40940 - DNA, 308 bp, Zea Mays
tcggtgagcaggcgaggaggagaagacggagaagcagacaaggaaatgcaaccaaatacgaggcgaggtggaggatgctcagtacatggacatccatcctgattactaaacttcgctagagccatctaggttgttagaaaaggtcgcaggataaaaatcagagttcgattaaccggtccaaaaaagtgtttttaaatcggtccaacaaatgttctttaggtggggagttggtttgatctttgaccgggtgccatacagaacgaaggttcggtggcgcctgtttcaaagcccactaattttcagcccac

SEQ ID NO: 40941 - DNA, 536 bp, Zea Mays
tgctgcgccctgcccgctctccatcgtgcccttcaccggcaacgggcactcaccagattagcctgccccttgccccccccccccccccccccccttccttccatggaaaaccgatctcacagtccctagcttaggcttcccatttgtattcggatctgatctagttacaggtgtagcatacttgcaattggagctgatctagttactagtgtagtatatttgtatatggatctggcataaaagatcttaccggactcttttacacatttggtccgagctaacttgatgcttcagcctgactgcctgactgacacttccatcagttgtaatttcaaccattccaagaatgaagtgccagtgcatatatatttgcttttggacagctgtaccacatgatctttattattccacaattccactgtgcaattcgtcattgacataggatctagcataggtacaaggtacttaagtagcatttgcatttgatagttcatttcttttagttgagcagtaacttattgcctaacagataactc

SEQ ID NO: 40942 - DNA, 392 bp, Zea Mays
atcagtgaagatggctggaattgatcaaagattatgaccttgagatccactaccaccccgggaaggccaacgtggtagcagacgcccttagctgaaaacctttcgggaagaaaggatctaacttcttagaagattggaagaaagaaacagctcagctgaatgcatgtctaggagacaatggcagcctagaagtcaagccaatgctagaagacctcatacgcaaggctcaacgcttggacactgagacagcaggtcttatggaaagagctctcaaagaacaacttctggacttcaggacagatgaagaaggagtcctttggttcaaaaaccgtctgtgtgtaccaaaaggagaggcacgagaagttctgcttgacgaagctcacaactcagcc

SEQ ID NO: 40943 - DNA, 363 bp, Zea Mays
aaaatgaagggtgcaagtgctctaagccaaaagaaatggttgtctataatagcctacccatatatttaaagagggttatttatatttcgtaaactacctctagatacatagagcctatccacttagtcaggggtgaaatggaccaactcctaggattttcatcttatggccacacactccacgtgaagttgctttgcctcgatgcaccctttgtgatgactccacgtgcctcctccgatcctcaccggaaccgcaccaccgagttttgaggcccaaactcagcaaaaccagtagctgggtgtttttgaggctcaaccataaaaccaccgtgagtagcgcactacatgtgcatccccaacgtcc

SEQ ID NO: 40944 - DNA, 558 bp, Zea Mays
gcccggtgcaagttatcctagactcagtgcatagtaaaaatggacggcgggttgattcacagatatttcaggggttcttatgcaaaacagatggccgaaggggtatggttgtatcttggccgctggattaaaagttgatggctcagattttataaaccaaaggggtataatgcttctaatctggaccctcaatccagagatcgacggcaccaagcatcctattctctcttctattcgtggcctttaatcacaagatcaacggtccaggggtcttcttcctcccacgacaccttctctcctccatcgaactctcatgccgcctagcccagcaccggcgcgacgacacgctcaacccaaacccctgatctctccccacgtaacccgtcagtcgagtggcccaaacggtagcctaccagacacgaattgctccacccctaccacaatgtgcccaacaccagaagcatctacaagcagtgaagaaggtacacagaggagcgatggctcaccaacgatgatagctagtcgaggcgctgcgcgatctgaagccgtatcacccgc

SEQ ID NO: 40945 - DNA, 428 bp, Zea Mays
cggctctggtagacaattggaggcaagtgctggtgtgttggatgcgtaattacctagcggagttctctgaggcttcaatttatagaactcaacgttggtggcactcaatttggaggagaagcgctggcgaccggggagaggggaggttaatggcgcaaggaattcgtggctttcaccgtggcaagttctcgggtgatggacaggcttgctacaccggttcatggcaacgtgctaagcttccaagacgcgtggcgcatgatcgttaagcggctaacgccggtgaggatcatcccggccagccacagtccaagtgggtacggcggccacaacggtgagcgagcccgaaccaatccgagcactaagatctttccttctctccgttatccacttgcgatgggcacgaatcacaacggccggcgcgaatccag

SEQ ID NO: 40946 - DNA, 433 bp, Zea Mays
caactgtgtaagattgccaattcaaggtggaattttccctatgaagttgtttgattgtagtgttaaaacttgtagatttgtcatctttctgacccattccttaatggtacctatgaggttgttgttttctagtgataatttagttaagccactaagttttccaatagttgggggaactattcctgaaaggttattccaacccatgaatagttgttgaagactagtggacagattagcaatcgaatttggtataggtccgtgtagatgattatgagacactgaaagtataacgagatatctacattttgctagggcatcaaagaattgccagccctcactatgtcttgcttcaagcatgtttacctcaaggtttagaatctgcaactttgaaaggtttccaaaagaacttgggattgtgccactgaaaaggttg

SEQ ID NO: 40947 - DNA, 273 bp, Zea Mays
tttgtgaatagatcagtaagattatcacaagactttgtttgcaagatgttaatatttcttgtttcctgtttccatctgaacaacacaagctcaattatccttatagataattgtcggtgattcaatcgaatcatggtacgttgttctccaatggacctctagcccaaagaacaataatatgtctatagccatcatctcaaaaaccccagtggggaaaataaatgatgagacatataactcaggctaatatttctccaagataatcgtgtcaga

SEQ ID NO: 40948 - DNA, 373 bp, Zea Mays
cgcttgaaggcagatgtaatacttttgctttttgtaaggtacttttgagcactatttatcaagcagtgttagcacttatctgtgtaccgcttgttcctgctgtgtgtgatgttatgttgttgactcctccctggtacttggccccccacctgggatgtaggcttgatgtgtcgaggttggatactagcatatctgaaagggttgtcaacaactctcgggaggcagcctcgccgggatctggatctgtacacagcttcacctagggagctttagtagtatacccatagggtctcctgtctgatattagccatcctttgatacatgctcgggactcgcagggtttagtccgggtggccaagttgtgtgtccggac

SEQ ID NO: 40949 - DNA, 311 bp, Zea Mays
gcgaagcctcgacactggacggagtcatggcgcagagattcggcgtcggcatacgacagtcacgcacaaacaggcaagcagcgcatcaactgcggatgggcggtgctcaaggcgagtggcgagctgcgagtcacaagcgtttcgcacgacaagaagcgaggcgactgatagagtagcgtagactgctttagcgagggaagcacgggaggccagagcaacgacaacgagtggcatggcaggacgcggggctccgagcgatttcagcacgacaggagtactctggcgggcgacgacgtcgtgaacagagaagc

SEQ ID NO: 40950 - DNA, 362 bp, Zea Mays
agttgatcacatgtttgattccattaaccaaactactaatggtgagcatgcagcatatgatcacagggggagctccttgcctcccagcacgagaactgaagaagatctggtgtccactcctgttgacactgcaggagaagatatcacctctgctgtcgttgcggcacctcaggtggatgccatgcacactccgttgactgttgctggcatgggggaacagattctgtcgcagcagaatccgacagctctcctgcaccagaagatggatcctctgcggctgcaccagcgactgcatcagagactcctacaccacctggaccacgaactcgacttcgtgatggcattcgcaagcctaaaatcta

SEQ ID NO: 40951 - DNA, 593 bp, Zea Mays
caaggatggacgacagagggatcatcttcccctaccttcaccccaaacgcgacggcggactggactcacggctgcgcttcgccgtcgagcgcggtcactgcaatacagtgccccaagacctaatccgatgggcaccctacgtagaggagagttgggcaaagggcagggaggtggtcttacctcagatttgcaacgatagcagctccgcccacgttgtagcgcggtcggcggaaatctcccagcgacggcgaggaattcccacgtgacgcaggcacatgaattcaatcctcggccccgcacggccttactgatgatagcggcaccccctcggtcaagaaccgaggacggaaacccagcactggcggagatcaccgacggcggactcaatctctccctcggctaacactaccctctccgcaatgacgcttctggctgggcgtggttgattatctgacggcgaacgcgagatggcagctggtcacctaagtaggacgaaggagggggaggttgaggcgacccgagcgcccacgccgccggtcgtttcgctcggtttgttacggatgctcgcggatgacaggtggggtcagcgcgac

SEQ ID NO: 40952 - DNA, 281 bp, Zea Mays
tagttgatagcacctatcggcttcgtcatgatttttgttgtatggcggatcgaagccttgtcgtcgtagtctcggggaatttttggaagtgtgctggtgctttactgatggggttgtatatacttgtgatgtattacaatagttgtgtgtcgtgcaagtatccacaaatggtgaaagatggtgtatgttggtaattagaaaatggtcacttcgttagccaatagccaagcttatgccgagatttaaaatatgggcaagttaaattgaaatcatgcttatct

SEQ ID NO: 40953 - DNA, 352 bp, Zea Mays
caaagaaagttcggacctcggactttctatctaaacactaggacctttggacctttcagatcctccgctacactgcactactccctttttatagctcaagggaggaaagagctacatctctgcgtctgcgtgaatggtgggccctgtcaggggcggagctagaattatgacataaggggtccgaccaattcatcaacactatatggtgaaaaaataccgtatgatgttatcaagctttttcgtagatttgaccacatcaagcactcgacatggaataagaactctagttctttacaaattgtcctagtctatgagttcattttctagctaattgatttgttgaactaaaatt

SEQ ID NO: 40954 - DNA, 306 bp, Zea Mays
cccgggaggtcatacaagatgtcgtggagacagcggtcgcgcgcttccagcatgaccctactgatgttgagtagctcatacctgtagaaatgaggctagggccctgcttgaaggcggatgtaaaacttttgtttttgtaagatacttttgggaactatcaattaaatagctcttatttgtacagtatttgttcttgcttgtgtgtggctttaccaactcttctcctggtgcttggcccccctgggatgtaggctcgacgtgtcgaggctggataccagcatacctaagaaagagttggtgtcccgc

SEQ ID NO: 40955 - DNA, 586 bp, Zea Mays
gttccacccgatcgtatccaacggtctggatttaaccccgcccaaacgatctgcgtgcctcaatcatagccgtcggtccccagatccacgaacggggtgtcgtattcttcctcccgacagagtgcagccccgacgaacgccgcccaagcatccacgacggagcacggacaaaagttgcctaacgcggagataacgacgatctactgggttgggaacgtaccagcgccaaagcgggagcaaggttgtccctggtaagtgcgacggtgctcatgctggtcgatggcgatgcgccgacccaccgctctggtgatgccccggatgaatcccctctgcgcggcacggaaagccgccgagcctgccccgtttggctctgcccgcgtgtacacctgctctgatgtctgtgctggaccactgcgttccccaattttcttctgtctctcctacaccatcgagcgccaatggcgactagggtgtttccttctggatgtcgaaggacgaacagggggagggcggcgacaaggcgatatttaaatcactgggcgaggtgccaggccgcacgtggcgctcgggttgttgcaacgagctc

SEQ ID NO: 40956 - DNA, 349 bp, Zea Mays
ttgtgagtcccggtcctctacccacctccggtggtaacccaggtcgagcacctggccatggcacaagcgttcgccacaggtgacctactgtattggaaataaacattcccgcaccaactttggccttagttgactaatcccctcaaccggattgatctgtgctgaccctgaaccccatctacatccgacgacaggaggagcgcaaccttggttaagctacgcccaaggtcatttggcagtagcgtttaatccgatgccgcagctagcatcaacaatacatctaacatgtgattcttacactgattgacttggggaacactggcctcgctggtcgacgcggacatgctag

SEQ ID NO: 40957 - DNA, 1046 bp, Zea Mays
tgctcgaggaagcgcctgaatcgaggaaccctcatcgttctttcgaatgtcgtgttgatttggtcatggtaagtggagttgttattcatataactggattgatggatgggttggctagatatgtgaatcgcgatgtggggtgaaatataggtttgaggtttaaatgacgtgaagaatatgttggtaggctcatatacgcagcgtgattggtttaataatgcgaaggatatgggtaggcatgtatgtgatgtgtggtagggttagtaatacgaagggtaggtctaatgtttctaacgtctagcaagtagatgtttttggaatgttttgagtggtatgtcgtgctctgattgtgttcatgatttcaaatagacgcttcgtatggtcaagttcataaagcaagttatgtggagtgtggtaaattagtgaaacagagcttagatttagcattttaaatgtctaatcaataatgctattagtgttacttgtgacgaatgatgtttgtttgataaagtcgatgctttgctctagtaataataatgccagctatccatgcacggttattcagagcttgggccaccgtcctcctcttgataagcccctttgggacagccttaactaaattaggagccaattctgagattttcttcccctgtacccatctatgattccataattttatattctctccattaccctctaaggagtctacagcaatatgaaagagggataatgcctttagggggacttggagcggtagtccagcccatggtctagcatgatcagttttctctgcccacagccaaagaatgcacagagcacaacacatagtctccaaattatgaatttccacccctccatatcgcaatgggcgttggacatggactcgctcccaagaaatcagacagctccctccattggcactctcttgagtcttgacctttccaaaggaaacccctgccgtttatcaatggctttgactactcatttaggaagctcgatgacaatagcattagcatgatagatggtactatggtagaagcagttag

SEQ ID NO: 40958 - DNA, 364 bp, Zea Mays
cgagaactaactcaagatgggagatctatcagtgagtacgtgcacaaattcacagagttggcccgctacgtgccagatgacatcagcaccgaagtcaagaagatggcccgctttttgaaggggctcagaccagaactcaagaccatcctagccagccaggatttccttagcttctcacacctctccaacaaagccatgcaagtggaaagagcaagggaagaagaaaaaggccacctcaagaggaaattccaagtcctccgagctcaacagcaagactggcaccagagaactcgatcctttgggattccacccaagggaccaagcttcattagaccagctggacccaccccgtcacggtttagtc

SEQ ID NO: 40959 - DNA, 574 bp, Zea Mays
ccggaacagcgcaagggccactctccaggacactgtctaagcaattggtatgtgggcactcaatcggatgggcagctgtggcagagttcggtaaagtggtactcatattgatcatgccaacgccgggggagcaaacaggcacactgtctaagcttttgtggattgtagtgaaaacattagcaagatcaaccgtattgtttaccttgtgagtggaggcagtagagccgtgcagcgcaacctgaacgtcagtggccatcgaagccggactgtctccaacatcttcagatggcccatggcactcctcctgcggccaaacagcggtaacaacggggtctgcaaaagagacagagctgaccttcctcttgggcacccagcacgctgccggcatcgaaccaagaccacggcggcaaaagggtgttgagtgcctgttcctgtcgttggagctgtagcagtcatccattcctcccctgcatcgcgacgaacgcgcccaaccagagaggctacgatggcgacggttgccgccgcgtctgtcacggtggaaatccccattatcatcatcatgaccccaatcacg

SEQ ID NO: 40960 - DNA, 443 bp, Zea Mays
gcaggccctttgcaaccccttcccataccatcttggaaatgggaggacatttgcatggacttcatcgtaggactgcccaatacctctaggcaccatgattcaatttgggttattgtggacagattgaccaagaccgctcatttcttgccagtacacaccacccacaggaccgagaagtatgcagagatctacattgaccagatagttcgtctgcatgggataccaaggactatagtctcagaccgaggagcaccttttgtggcacgattttgggagcaattgcaggaatcacttgggacccaggtcatacgaagctcagcataccatccccaaaccgatggccagacagaaagggtgaatcagattttggaagacatgttgcgggcatgtgcactacactacggaaaggattgggacaagtgtctttccttggcagagttttc

SEQ ID NO: 40961 - DNA, 321 bp, Zea Mays
ggatgacaagaaaagaagaatcaagaaggtcatatactacgagaccgacacatcaccgtcgacctcggcattaacgagtctacctccaaaaagcatcatgaacacaaaccaattaaaacaaatacctttactcatactcattttgattactctcgcattcctagaaataccacaacttctttactttcggtccttcttggaaaaccaccatatttctatggtgaagattactcttggcagagtcacaaaatgaaaggacatttatactcactccacccaagcatttgggatgttgttgaattagggatgcagataccagag

SEQ ID NO: 40962 - DNA, 300 bp, Zea Mays
gcggcgcaaatcatggcgggccagtagaaaccttgacgaatcacctttgccgctagggccctaggccctgcgtgggagccgcaagtcccactgtggacttcgcgcagaatttggacgccttcggtcttggtgacgcacttaagcatcggctgactgacccccttcttgtaaagttggccttcgatcagtgcgaagtcccggcttcgatgtttgaggcgcttggcctcattgttgtcggttggatgatagtacccctgcaggtacagggttattggtgcccgccagtcttcggtcatgatg

SEQ ID NO: 40963 - DNA, 416 bp, Zea Mays
ctgagaacttagacatatcaattgcccaagctggttttacatactccactgtgcttgccgagcttgcattcgcaaataagaaatttaggagaatatcctcacaattaaagaaactatcaacaatctgcctgccaatctcagcctctttgctccagtacctcttaaaggctagttcatgatccataaatgctgctcctgttagtatgatgttataacctccttgttgccgagcatacctctcattgcggtattccagaggccagccctcagcaaggcgtggatagtatccgacaattctatcagggtgctccctccataccttgaacccacgctctaagtcatcacatgccatcatgatatcatcatcaagctccataacagctcctgttttaatttctttgtcaattttgaatctg

SEQ ID NO: 40964 - DNA, 519 bp, Zea Mays
tggatgctatagcttcgcataccgaaaggatactaaagctcctgtgattggttatcgcactaaatggccgactggctggaccaatgaatgtttttacgtgaaagctgacaagaagaaaaggaagaagcttatgagtatggtgatgagtcccttaaaactaagcttcgacatgacacgacccttgtgtaacatgtagctcgggtccccctgccagctggccgtggtggaattcagagttgtgacagagcatattcgcactagggacttagtgcaagaatacttggcaaacaaaacatttccaacttctggtggatgggggatgccgaagaaaaaggaagaaggaggaaaatatgaacttgtgcggctcccctaccgcttcaagttttggcaagccgtgcaccgagtggttggaattgatagagaagatgtgcaatgaaatcattggaaattgtacaaagaaggaagatcaactaatgacataccttcgacacatgggagaaccagagactaaatcgagtg

SEQ ID NO: 40965 - DNA, 435 bp, Zea Mays
gactgctcaatctgtagagtgtgtattccttggatacagtcctgaacacaaaggatatcgttgttatgatccatctactcgtcgtattcgaatttctagagatgtgagcttcaatgaaaatcgacccttctttcacaaccagtctactcactcctcaaattatcccacagaatctacttctttcatatgtcttccttccattcctgctgctgaaccatcaccttctacatccacatctgatgttctcattcccataacaccaccttccacctccacgtcatcctctacttactcttccaaaccacctatcatccaaacctacattcgtcgttcccggtctattcctgcggctggtcctgatactgatcatgtacctgattcttgtactaacaattatgagtctaacgatgtttttaattagggatatcgtcttcg

SEQ ID NO: 40966 - DNA, 468 bp, Zea Mays
agcagagttcttgagtgatttgggggaagtaagaaattggagctctctggtgaacgattggatgcaagacttggtggcttggtgcgtgattaccctatgaagcttgcagtgcgttcaatttataatgggcaagagcggtggccggtgaattagacaacgacgcgcggcgactggagaagacaggtgttactggcgcgagactcagtggcatctaccgtggcgacctcaccagcgacgagccagtgctaccgagcggtttctagtgactcaccgcgacggagtaaagcatcgaggcacgtagcccggctggataacggcgaacgccattgatgccagcgcgactaactacgacgagacacgatggcggtgagaacagtggttggagtttatccccagcgtgatactttacaccgaggagtgtttatctgagtttggtcgggcgtgaatcgcgtcgccggtgcgaatccg

SEQ ID NO: 40967 - DNA, 711 bp, Zea Mays
cgttttacattactatgaagagtaatgatacagactcaatattacacagcaggatacattacccattttacaaaagttgaacctattatacaacagtacaccctacaatacactactctacttttattacactactagtcctgcttcccattgcttttggcggcttcattgtcaggtgtgggagtccagacgtccaccaacctcaaagaaggagggggctcaaaaagatctaactccccacccaacgcgcgtcccgcagcgtgagagggtccggcttccgcctcagcagagtgtgcaggctcactagggtgtagttgcgagtagagcacatggacttcctcgtgcaatgtattgcagtagacctgcaggttgtcgacagctgagcttagctctctaattcgggcctgagcccttgcttctttagcacatgccaacatatgggactgtactgcccagtccagtgctaagtcccggtcagccagctgatcctgcaagtgacggatatctcttctcagttcatttatcctatctccgtctgcaatccatgcattggtcctgtgtcgcaacgttgcttgaagtcgactcacttcggcttccaagtctcctatgggatcgttactcccactgctactgctttcgtgtcgaggggccagttggtgccggggtactccaatcggtcccgttgatttgcgtgccgttagcctcgtgcgt

SEQ ID NO: 40968 - DNA, 371 bp, Zea Mays
ttctgtttctactgatttgcgcttgctttggtttgtggccgtggtaaatgtgtacgcgttaggctgccgccgcccccccgaaattgctgcgcttagttcttgcgtcggtggcgccgcctgtagatgagctgtgcttgcaggctgcagtggctttgactctcgatgcacgctcgtgtctggtagtgccgactgttagctggagtgtttttccctgcttctttggaagttactaaaggagagggggcattgaattgctgcgagctggaactaagtggccgtggatttaaggggcgtagtgacaagcgcattagctctctacgtgtttctgtttgagttcgaactagaggcatgttgtatctccgaatcaatta

SEQ ID NO: 40969 - DNA, 355 bp, Zea Mays
cgggaggaaaagagtgcgggccggaataaaactatttggggaattacaagggcgagttggccctgaggagtcaaacaaaaaatttgcgaagattgtctatgttccaggaatgttccaggtcttcgccagattgtgttgttaatctgtaagcgctgggagatgacttcgtcttgacgataaatggtccttcccacttcggttccagcttaccccgtgactctgtccgggttgtgtggacaagtacgaggtccccttcgttgaattctcttgggacaactgtgtggtcgcgccaggccttcgtttgggcttgatatttgtcgagggcctgcagggcgaagacacggtctccgtcaat

SEQ ID NO: 40970 - DNA, 317 bp, Zea Mays
cgacaattgatccacaagggacgaaaaatgttcaatgtactctaacacgctagccaattgtctaatgcaaaacagctgacacaacaagagatgatattgatctttaccaaaacgctcgtgcacaagcttacaaaataggggctaggacagacttgagttgtggaacacaacaaactaaaaccaacatgacaccataggtgacagatgcatggaataattcttcaccaacgactctggatccacctgatacatatcaaaataagtctcaaaacgtgaaatccacaaccgagggtggtggccatcaaatagtggaaatg

SEQ ID NO: 40971 - DNA, 294 bp, Zea Mays
ccataagtctattggggattgaatttattttgttttggatagggacagtccttgatgaagtgtccagacttcccacaattgaagcagtagctagatgaactgggtaaggcggggaaacgagtaccaggggcactcggctgattgttttgagcgggggcaagagttagacagataaaaactagttgcttgaagggataggtgggtggacgaggaaaagagcgatttgggttaaaaggacgaatcaccatcctcgaccgcttctcggacccttgagatgatccttcacccccttca

SEQ ID NO: 40972 - DNA, 308 bp, Zea Mays
ctcagctgtcaagtggatttcacatgcctgcttgttggtcattctttgacccttcactttcttgaagtacacggtaacagctttgacccatgcatctgacattgaaccatttataacttttctagcagcattgtggaatacacgttttgcatgttcttcgttcgctgtttcgtccaatctaaattgttcctgcaaaatgaagaagcaattaaattcatttatagacgcccacggtaagtaaatttaaaagacataataaactcacccaaaacaatgaccacactacatcttggtgagtacggtcgggt

SEQ ID NO: 40973 - DNA, 1582 bp, Zea Mays
gcaattactttggaagatgcgagatgatacagtatgttacatattgcaattcatttctgaagttacagtgatgcttgtcgatcataattcttttccttgataacctaatgtgtactcatctcagtctatcttcgtttcagctccatgagcattttatgcttggagatcgatgtgctgagtacgaaatggacattcaaacaatcttgacaggtattttaccttttcacaactaatcaagatgaaatgtacaataacagtgtgaaatcaaatgatcttgtggcaaacaaactgtctttccattccacaacgtaactaaacatagcacgaaggccttgtaatcttaggctgcgatttgtatatgtgaaccttagccccaactcccaaatgatggagttgggcgtcaccaccccatccaaacaaggctgcagaatacaagtgcatgaacattatttatcctcccaaggacaactagcaagataacttaaattcccgtagaataactgtagacctatatatatcatcatatcttttcaactgtgtgattgttgctaatcaacctcaatattttaccttcaagttatatcaaaccagtgtgtaccgttttcaaatcatttgcagaaacagagatgacacctaaagtaatgtcaatcctaaagaaatatgagaatagttggaaggcgatgaaagttgccaatccaattagctctggagaaggatgccaaaccatgaacataaagaggaagaaactgaaagaagccatacttctacgcaacagatgccaggcaagaagcatcatatggtgtaaattattatcatggctgcctctacaatcctctgtctgacagtagtcattgcaggaactggatgatatatgccgtgagagcaactggattcttccaagatacagagtacttccttcagttaccggtggtatgtggatgataatcaccgatttttcaagttcctgcatgtcgcagcatggagtccttggaccatacatagcaggcgacagttatcatatggtgttcgatcttttacagtttgtactcctatattggcagatatgtaccaggccagtgtccaccttatgggcccagacttcaacttgagtgtagatggtgatgtgagggttacccctcacgaggcacgagactcagcagcgtccaacatgctgtctcagcttcagcagaaggcaagggaaggctaggagagcggcatgtctccacagaacccttaatgctgcatccttgtgggtatcgacttgcatgcgacaggaaagaacagccatcacagctcagaaatgaacatgctggttgtcaaaacaaaattctatctatctatttgaacttaagaattctgcaggtgtggttctgcgttttcttgttgggcaatctggattttcacttgctatcttgacttgaccatgttctttttgtttggctacattctttttcgttcgcgcatggtagcctgctgtgctaagaaccgcggcccggagaggttcattggtctttaagctgttggctgcaggctatatacttgtcacccacccaccctgccgttgctgggagtccaaactcat

SEQ ID NO: 40974 - DNA, 561 bp, Zea Mays
gtcggatcctgagctggtggtaacctgacctcagatctatctttgagaacacgctggctcctctcagctggtcgaacagatcttctattcttggcaagcggtacttgttcttgatcgcgacctcattcagagctcgataatcgatgcacatcctcctggtgccatccttcttctccacgaacaggacaggggtagcccaaggtgaggtgcttggtctaatgtaacatttctctgacagcttatctatttgtttcttgagctcaaccaactctcgtccagataccatgtaggctcttttaaaagatgggggcaattctaggaagaagctctatggcaaactcgactttccgctcaggtggcatacctggtaaatcttttgggaacacgtccggaaattctaacacgaccttgatagtctcgagtggatctacctccttgctatcaatagtcatctggtgacaacctcctttccttagctcgggcgagactaacttagtcaccacttcctctcccagtgggggtcaccaacttaattgtcctcttatcacagctgataactgc

SEQ ID NO: 40975 - DNA, 385 bp, Zea Mays
cgacaattatattactgagagggatactgccgaggcagccatgcaagatgcagcacgacgggcactttcttagtattgctcattgttcagcggggtagctgatggccttgacctgaagtactaccctcgtcgttcgacaggcagtgctagtggtgtgattgtctcgctagttggtgagggcaatcccaggctgagcagcatggtcaacttggtcgccgtgctcaacacagagttggaccacgcccttgacgagttgggcaaggatcgggcggaggttgcggaattgcgtgctgaatgcgcggcacgccactatcttgatggtggttctccagcccctgttgggattcagcacccttaccgttcaccgccccgtggtcgcttcgac

SEQ ID NO: 40976 - DNA, 540 bp, Zea Mays
acatcgtcgttgcttcttagccaagcagctctcagacttggttgacatggttgatcggcggcagtctatgcacctgaccacccttcaacagttcactcaccccatggaacctgagctatctgaagttggccattgctagtccaccgccgagctccaggcagagaggcacacgagctacgcgacgttgatatcgactacataggaactcgttgaatgtcgcaccttgactagcaactgtcgacgctattcctagatcgtgagaacattgttctcagtcaggaccttgtggccatcttcattaagctgaccaagctgacgatgtttgttgttagctggtagatgaagtaagcgatagaaaccaactggtgcttaccgctcttgcacctgaagaggaccgtgcaacgaccctcgatggcgaccatggagccatcgtcgaattgaacagtctcttggacgccagtgtcaagctcggaaagaccatgtgctcccctgtcatgtggttcgtcgtgccaatgccgaagatccagcgctttatctcgc

SEQ ID NO: 40977 - DNA, 375 bp, Zea Mays
aaaaggtctaaagaagaccagaaacaaaacagcttctttacggaggccagtagcaagcatacagaaaagaatccatcaaatataaacaaaggaacaccttagaaatcagttaatggggcagcgagagagcaaaggccttttgcctcagttgtttccccaacgacttctcatcagcagatgccaagattgacgatagacatggagtccttccattgaagacacatttatttcgatgattccatattgtccaagcgcctaggatgataagggaatcaagaccttctttagtaaggccagaaatcacatctgaaacctcttcccaccaactccagaaggaggtgacagccgactgaggggcaagggagtgcaacccaa

SEQ ID NO: 40978 - DNA, 622 bp, Zea Mays
gaggacttggattattttgcggcattggatgtggctgcggcagaggcttcttcgcgtgtgatggatgctgaagttcttcctggtccgagtgctgggcataggcggcgaagggcgatggcaaagcgtagagtgagtgaggtggagggtggtcgtcttcgtgtggacagggctggcaagcgggaattgttgtccttgccggttggggcgagtgtgggtgagggggagttgcgaagtctttgagggtgaggagctgaggataatgctatttaactacagggagatgggtatcatcccgaaggttgaaccaatgtaaggtgtgatgccctcgttgtatgtgtgtaactataatttgtatgatgatttgtatgatgaggctgtgtgcctttgctgatccggtcgtgcccgtgggggacttgtgcgcttgatctagtgggcttattatgtcggtccggctgcacctgtagtcggtttttgcacggatagtcttttgagggagacttcgattttgcgcacttgttgtgctagtccggctgcacccttaggcgacttttgcccggatagtcttgtggggaagacttcggtttagcgcacttgttgtgctagtccggctgcacccttaggc

SEQ ID NO: 40979 - DNA, 322 bp, Zea Mays
ctccgggccacctcttctgaaatgttggaactgggtagcttgcattgggacgagcaataaatccataacaaccgaagttgttgtgatactgttcttttccagtagccttcgtctcgtacaaaagtttgtacatattgcagaaacactttgcgctcggttccagcccttggcttcttacagcccaaacaaacatccccatcctaattatagcttcgggagtaatctgatgaagaaagatctagaatatcttcaacacttcaaccacaaatttgttcaacgggaaccgaaggcctgccttcaaaaagcttcggtaaacaacaac

SEQ ID NO: 40980 - DNA, 421 bp, Zea Mays
atcacattcatttcacttcttaatgagcaaaatctagtttcatccaatggctttgtaaaaatatcggccaaatggtcatccgtgccaattgaatatatagagatgtctccctttccaacatgatccctcaagaagtgatgtcgtatatcaatatgcttagttcttgagtgttggaccggatttgtagccaattttaccacactctcattatcatacatgagaggcacattcttaaaaatgatcccataatccaactgtgtttgtttcatccataataattgagcacaacaattaccggccgatatatattccgcctcggcggtagagagagcaacgaaattttgctttttagaagaccatgaaacaagagatcttccaagaaattgtcaacaaccggaggtgatctttctatcaaccttgc

SEQ ID NO: 40981 - DNA, 361 bp, Zea Mays
tgaaatttgaagcggtaagggagtcgaacaagttcatactttttcccttcttccttcttctttggcattccccatccgctagaggttgggaaacttttgtttgccaagtattcctacactaaatccctagtgccaatatgcccagccaccaccctgaattctacttcggccagttggcatggggagccgagttgcatgttgcatagtggtctcgtcatgccgaagcttaatttcaagggactcatcaccatactcataagcttctcttttctcttctcgtcagctttcacataaaaccactcatttgtccagccagtaggccatttggtgcggtatccaatcacaggggccttcgtatctt

SEQ ID NO: 40982 - DNA, 304 bp, Zea Mays
tcataatccatgtgttgttggctctagaatgttatagcaaagtgaaagaccaatacttggtgaacaagtttggtgtaatgggcaaggtctgtccttatgtggaattagaagggaagaagagaggaagttaacactgcagtagactgatcggattctaggtattgcaaaatatctgaagaatattctgacccactacttttctagcagattctgggtagctcgtagataaaactaacttgggattagaaaggagaatatttggagtacatttttactgccctgagaagagaaaggagacaagttt

SEQ ID NO: 40983 - DNA, 501 bp, Zea Mays
atttacttctcatctacgcaagcccactccctccccttttcttttctttcgcgctagctgataggtgggacccccagcttagtctcttcaacgcgacgcggactcatctctggtcgcctgaaccgtggggtcagctggtcagggtgttcttcctcctctgtgacgaattccgccccgctccaccattcccatcgccgtgtggacccatgccgcatgcacctctgctcaatccaacgcgccctcaccaaccattgttgggtgggaccagagcgtcagctctttcccctccgctgaaaccaaacaaagccgaagcagccaccaaaacggaatccgcggaatcaccggtaaatcgagcaggatccggaaatgacttgggggaaattggccgggcggatttctcgtgcaaatccaaacaacttgcgcttggattctctctgtcgcggtctataattgcgagccctcgcgacctcctccctcctcgaaccgagacaccaaaactcc

SEQ ID NO: 40984 - DNA, 569 bp, Zea Mays
gatactgtcagagggactgtgagatttgaagatggctccactgtcaaaatctgtgggttaggttctatggttgttcagggaaggcaggaccaacacacgatactgacaaatgtctattacatcctaaagctaaaaagcaacattatcagtcttggtcagctagaggaggtgggctgtgacattagactgttcaatggtcgtctgaaggtgtttgaccctgaatacaatctactagtatatgctcccagggctggcaatagattgtacacagtcaagttgggcataactgatcctgtttgccttctgacaaaaatggatgatttggcctggaagtggcatgcaagatttgggcatttaaatttcagagcacgtcgagatctagggaagaaaaagatggttgaaggtttgcctactgtagatcgtgtggaacaagtatgtgatggatgtaccctgggaaagcagcacaggtcaccattcccaaaggtctcatcttatagagccaaaaagggtttggaactgtttcatgctgatctgtgtggacaagtgagaccacaaacagtgggtggaaa

SEQ ID NO: 40985 - DNA, 302 bp, Zea Mays
tggggacacatagttaagatggcttgtaggtaaggacagatggttagtgggtaggtcgcatagaatgagtgttggcatggcataatctagcttcctttggggtctagcttgattcctattcctattttatgatattaatctcttctttctcgagctttggtgtcttcatccgggttagggacaagttgtttaagatagatttgtaggtaacacccactaggttagattatattagattaggtaggatctagattggattgggtataactagattagactagtttaagttaagtacatctacc

SEQ ID NO: 40986 - DNA, 422 bp, Zea Mays
aaacgaatcaactgaaatcgtacctgtcaccatgtctccttactctctgccatccgcagcgggtagcacataagccccggaaatacccacagaagaggaagctcccagagtgaaattaacagaagaaccccactgagccgccgggtgagttagacgcggagctccaaactgagacggcataggagtagtcggtgcaggagtaggcgcagccagatactgaggaaaaccctgcatcgacacgaactgagaagtcccaggcacataaaactattgcggaggaagtggaactgaaaactgatgctcagcacttgacatcatgttgatagtgccctgagaagaggaggaagtcaccgactcccatctgagcttcccattaggattcctcctacacaccacatccttgtggtcctaactgcagatag

SEQ ID NO: 40987 - DNA, 410 bp, Zea Mays
gtgcctcatagcgacgtaaatgaccacgatgggggaaaactagaatttgtgatctctggtgggtaattagaagtgaggaagggtgcgctaggcgcgtaactagaaggcagatcagggagagcctttaatttatagtagctacgtgagtgcttcgcgaatttgggacaagaagatctcatggccggaagggaggtgagtcactagagggcaactgtcgtggcgctcggtgaggtaaagcccctcgcggtaaatgggttgtccacaatgacctattctgacgtggtatccttgcggcgagcggcggacgccgatgaggacattctggtcggtcgcgaagcaagtggttatggtggccagctcacaaacttatccatagtcacgatcttttcacttgcccggtaatatccgcg

SEQ ID NO: 40988 - DNA, 599 bp, Zea Mays
gaggttttagcccgttccggtttgttgatacgtgtgtactcgatgtggggtcgcagcttggaatgcgatgggttgggtggcctggcctcggtgattgtggtttgggtggctcattagtgtttagcgttgttgatcactgggggttagggtttaaagcccaaggttttgcggccttgcgggtgccgattgcggggattgctagttcgttgcgttgtctacctgttaatcgcagtaaatcgccctggttttggtgggtttttggttggttgtttgagcgcattttttattaaaagataagagaaatccatgcagttttggtgggcaactgtgcctgcatgtgatttatttgttttatttatttctctttctgtttcttcgtttcacgactggttttgtgtgttgtgaacttgtggtggatacacgtagaatttatgtatttttcctgcagactgtacgagatttttattggtacaagagctgaccaaaaattgcctacacgtgagatgtgtccctttggatgtggttaaaattgttctgtgggcatggtaacatgacagattgcttctgtgtgatcgtccttgttgaagtggtgatgtggc

SEQ ID NO: 40989 - DNA, 306 bp, Zea Mays
aatttgaaagaagctcaagctcgtcagaagagttacgcagacaaacgccggatacccttgtactttctagttggagattatgtctacctgaaagtttcaccaatgaagggtgtatcgtgtttcggggtaaaagggaagcttgcaccctggtatattggtccttttcctatccttgaaagatatggaccagtggcatactgacttcagttatccgaaaccttgtctgcagtacataatgtgttccacgtgtctcaattgaagaagtgtcttcgggttcccgatcgaaccattgaagtaacggatgtt

SEQ ID NO: 40990 - DNA, 739 bp, Zea Mays
ccacacgccacctaacagacgacagtgtaaacattatgacaaaggatcctgtcggctatcgaaggggatgttctctccccctcggtccagtggtgtcctatacctcattcccgcaaccatattgaaggtttctgtgcgtgcccatccacccctttgccggttcgagtagacatcgtacgcgaagacaagccgacccgcctggaccttggcgacaccgttgctccgactctgttagcaactcagtggaaggagctgctgatgtcgtggacacgggagaagaaagcgcacgtgtggtttgaatcctcgtccaaacaagcgcgttcgtgggccggagtgggccgaatgaactcaagatataagagagtgggttgaatgagcgcgggctgcgccctggcggaagtataagtatgtggagtctgtaataattcagcaacaagaatttggaaagtaataaatctattgtcgtcttcctggcgccgcttcctccagttcgttcttcttcttacccctcttccacgcctctatcccctaccttaacatctagtatccggagagtcgatcctggatctcccagctcaaatcccgtgccgtccccgctcctctgccatggggaactccggtctcgccttcgcgaagatgcttgatgaactccagaatatggagacacgtctgacgggcgcgattgagggacgctgccatagcatcgagcgcatcgtcgacgatcgttgcaccaccatcg

SEQ ID NO: 40991 - DNA, 656 bp, Zea Mays
agttaatacttgggtcactgtgacaaggttggagacgatatattggagtacaactttgtcaaaggaaggtaggtgtgttactgcctagatcagggagtaaatgtggctcaaacatgcgttgtcaggcgacttcaaagggaaatttagaatgaacagtggtctgaagaagatcgtaggtgcagtgcaccaatcgccggtgagctcacgctgggatccgagttccgcctgggagattcgtgctcgatgaggagtgaataacactagggcggggtgaaaagatcagtggtgggatgaatttcggtcgctagctggcccagccgtcatgctcacttgccgcgcggtcggtcgagattatcatcaccggagttggatgcccgtcgaccgaacgccacgtgcctcagcaattaccacgtcgcaatcaccagtattatgcatgtctgatgatcgccggggaggccgccacggtgaaggccacgaatcaccatgccggtgactcatcttgtttcttaccgatagccatccgccgctcaaattcgtcgtgctcacggtcgatctctataaattgatgcctctgtgagctccgttaggttatccccaagccatagcacccactctcatctccaatcatccgccatagcgcttcaattcgggttttc

SEQ ID NO: 40992 - DNA, 922 bp, Zea Mays
ctccatttctgttaacttgaagttcatgttgtcccttttatgtctggctaaccgcgactccattgtctcaatgaactcagcaagcaattgaaaaagaaacagcttggtagggcctttatttatcatgtaatgatctagaaacaatggcctagaattatgaatgtgtgcagtattagccttactggtcatcagcctacgaacatccgcatttgagaccaccacatgcctttcttcatattcttggtccgacccctcatcaaatattttatcaaaaaatacatggtctgcagcaaccatatggatctcatgccagatgagagctgaatacgatgtttccctagatactttgagaccaccacaaacagacagcactaatgcattgttatccacctgcttgcattgcatctagtcatccatctcttcaactagctgctcccgtaagccatgtgaattattgaagccatcacactcacagaaaactggcacatcatgcacatggatgagatttagaacatggacagcgatttgatttgtatctagaatcaactcattgctatctaagtactcttcacccccggtgagtggccgagattgcatgcatttgctcaaagtagccacttcctcatcccagctcaccacatcacatagctcagcattcatgtctgtctcgccaaccatacactctccttgagctactagtttcaataaacagttatgtaactgaagaccttgcggtaactcatcatcccatagaacatggctagaaattgcatcaaacactccatgggcatcactcatggatgtcatgggtaccttgaacaatgcctggtcatgctgctgcaatagcacatgtggatcagaaccatgctgcaattccatagcaagctctagaaacaatggtgcattactggaaggaataagc

SEQ ID NO: 40993 - DNA, 352 bp, Zea Mays
gtccaagctctctgcagtaaccacctctaaggttgacgggcccttagttacttccataagaccaggacgatccaagtcagtctcccgaccctcgagatcacgctctaaggtcgacgaggcacgggatgacctcaacccagcatcaggcacgtcagcgcaagcctccattgtaccatcatccactggctccgataacaagtcctctgggatcatatcctcaagagtctgatcaaagttggccagtgacagttcttgcagaccaatgagggcagacaaagcaggagagggaactccactactttcatcgctagcaatgaactgccgactgttttttcgagtcagaggaatctca

SEQ ID NO: 40994 - DNA, 336 bp, Zea Mays
acagcggctacctctggtgaggtcatgttaatgaaggcgtagcctttgttggtctccttcctgaaatccatcgacgggcggaggaaacagttggatagtttcctcacctgctgggccaggtgtcaaagacaccatgatcttcagggcaaggagtgttagaaacgcctggatcctcaagataaggactgattcaccagatgttggagtggaaactccggccaagtggtgaatcatcgtccatacctgacgcgccaaaatgtcggagagaaaaatctttggtcgggtggagtattgcacctgccctaatcctaagatgaggagggggttgcaaggttt

SEQ ID NO: 40995 - DNA, 315 bp, Zea Mays
tcttggtgtactcgctcgtcaggagtttctcctacttctgaggcttcgtcccgggatacgggctgcctcagatcccattccctagcttcgtgatgtcgctgcatgttccggcgtctgttcctccgtcgtcgtgcttcacgctggggaggttcttccccttgcatggtaggctcatcgtcagagatgggtgatgactccaatcccccccgatgaagaggacgtcggggtagaaaggagccggcgtgatagcgcttttctttctgtcctcctttgagggcgaaggcgtcggaaagatggcttgacgtgttctcgtcc

SEQ ID NO: 40996 - DNA, 455 bp, Zea Mays
ggacggtaggacccaaagaggaggcgagaggcctcaagagtaccctggaactgtgggggccgaatcagctgagcaaagatgtgacacagatagtgagcataaggcagctgccgacgagcacggagaccatccaatatggtgtcctcaatctcacaaattagaaaatccacgacatcaaactctgagtgagaaactagggcaccaaggagccaaagctaaatatgagtggcagcctccttgtaacccatccgtggcagaagcgtccgtctcatgagctgatagagaaacctggccgctgtggtgaagtctgccggagaacaccgcgacccatctgagaagggcggtcggaacaaagccacgatgtgagctgtaccaggagcaactctgccgtgagggcgacgaggagggtcagaggtgccatagcacatgctgtgaagacgagtcgatgactcgtt

SEQ ID NO: 40997 - DNA, 349 bp, Zea Mays
gcatgtgtggtcccgaccgcccatctaagattgacgacagccaggccctcctccacgtattccccatcataccccaggtaggtgcggcgccgccgtcagctctcatggcggagccatggtcagcgatggccaccccgcgcctccgtgctccaaccttctctcataatggtgataaacttactctagaggatggcgaacatcattgataaccccttaccagcgattgatgacgtgaattctcctagccacagtggcgtgtggttcccggggtccggtgagaaattgccatggattcacgccctccttcatcggactggtgatcatagcagcttcaacacatcctatcaac

SEQ ID NO: 40998 - DNA, 937 bp, Zea Mays
gttttgccggaggtgctaacctcagccatcattgcttgattatatagaaagatgagatgagtcacattgattacataacagctcattagagcttagctaatcagataggagccttggcagccgcacacacctgttgagctgctcaaggtctttaatgactataattaactagcacaagtaactaggagagtgcttaggaaacaggacttaataacaacatgcgacactttcgatgtgggtttcggtgccgttctccaccagggggccggttctctgaccttctttagttggcgcttcgccacctgtcatcacaagctagcgtcatacgagcatgaagtcataggcttggttcaggctaagcggcattgacaaccctacctctagggtcgtcgcttcctcgttcgcaccagccactacaacctcaagtttctcttggaccagcaactatcgactgttccctagtactagtggatcatcaagctattcagcttcggtttttgtggtcaagtatcgtctcggtcgcctcaacttggtggcagatgccctctcatgccgcgacaccggcactagggactttgcaagctgcacccctctctgggccctcgctccacctactcaacgagactgtgccacaatcactaatgatgaagaggctggtcgcctccacaagtagctctaggatgcaactcttggtgtgccatagcggaccatcgatgacttctttctccatggtaagcacgttttcatgctgatacaacttgacttattgtagcaggtgcttgcgctggccctaccactgaccttgaggggatacagaaggccttctagcgattgcttatggaattctacatcgccgacgactgggtggtcggccaggactacgtccgcacgtgtgtcacgtgccaacgcaacaagacgttgaccttgcagttgatcg

SEQ ID NO: 40999 - DNA, 541 bp, Zea Mays
gacagacacatcatcgtggcctcgtacatcggcgtggtcacccgtagctgcttcacgaaacctggtagggatcttctcaattgattcgtctccctcggtagaccgtgtaggaccaatcggattggggggggcatggctctggggtggtggcttggccgacaccggcaggttctccaccgcgaggatagaagcgccgccgcctgctaaccatcgtgagaagaagacaggggggagatcgtcgatctcggtttgaacggctgagatctgatctcagccctggcagctcgatcatgggaatcctcaccgtagatccttaatcctacggctcaggtacctgcgggagcttcggcctaatctcgaccgtagaatcctaatcgcgcggagctcgttggccgataccccttcggcctgtgtattttgcagataagcccctcgccttattagaattgaacccgccgtccactcacgtgggaatttaattaaatctaggtcctgagtttcatagtttagaccctgacctttcgcagaatagtgtccccag

SEQ ID NO: 41000 - DNA, 649 bp, Zea Mays
ggggagttcactggtgcagtgaattcgtgtcctacgccgtgacagtcactccggcgatcaacggggagccgagcaggtcatggcgatgcggtggaagtgcctggacacacgacgcaaggccggaaggcggcggtcaacggcatacttatcggattccaccgcggtgaacctggtatgacagtcggagttgtttactggccggggcttatccgcggcgatgatatttgtgtgaccctgagcgctatccaaacattccaagcacgaatcacaacgacagaagcgtgaatccgtgcacggcggtcgtcgacggcgagggtctgaagcttatcctcccgggcactgtaccatggcgatgatcttcagttgcatgaaccgaccatcttcttccttcttgatctccgaattcttgttaggaacagagcaatctcccttaataaaatttgttcaccatgtatcagtctacaaactaactataggattcttgggctaaaaccgagtggattcaaagatatggcgcatcaaactcggcctcatcacactgggaccatttctgacctagggttcagtttcagttttctaacccagttctgacaaagtaactttgagttgttttttctccaaattttgcataacaactaagggagatgtc

SEQ ID NO: 41001 - DNA, 857 bp, Zea Mays
ccggggtggtcgaagttgagccattgatccgctgggctgaaggttattgcatgctccgaccaccaataaggtactggggcatttgtggttgccgccaggacctatcggtcgttgagcttctgctgccttctgttttcctgcgacccgtgccctccaaagatgacgttgacctccctgtcaacgtgcgggaatgctccacccctcccccttctggttgctgaggctggctgggctcgccgggccctcatcgtggtgggggaggtggtaaaggaaggaacggtcggccgtgtccgatggagtgcttgaagtccctacagttctgtagggtgtggcgcatgtccttgtggtatgaacactgggcgtcgaggatgtcatctagtgtccgttcgcctctacgaggcgcacctcgggctcaagcgatggggggggggggtccggcggcatgtacgtcctcacgaggcctcttctcccagcgcttgtcatgttgctggttcgtgtcgcgacgtggtgccggtggtgcaggttttgtacctccgatgaggtcctaggcccgctcgtcagtggtgatttagaggtctgcctctcgaaacagttgttcggaggtggtcgacgctttctatagtatggctcggacgaaagccgagtcattagatccctggtagaaatcttcaatcactgctgcctcggtgacttcggggatgcgatttctcatggtctgaaacctcttgaggtatgaccgaagtgtttcatcgccctggcgtctgatggatttgaggtcccatggctgcgccggcttgtcagagagggattggaagttggcaatgaaccgccaactgaagtcactccagtcgttgatg

SEQ ID NO: 41002 - DNA, 321 bp, Zea Mays
ttcgcatagagcagactaccggcgatatgttgtcgctggtacctgcagaggtctgcttctatcttcggcaggccaacgcttttggagagggttctaacaattttggcctcggtgcgattccgaaggcatcttagcttcccttcgttgaccccaccaaatagcatagcccctgatttatatccgcaagatatggcatattttttcaactcttctttttcggcgtctgttaactcttgtccaagcaaatcttgaaagttaaaatctccttcctccgaaatttcatcaatctgctctttccccttttcagttatcgtgttcacc

SEQ ID NO: 41003 - DNA, 466 bp, Zea Mays
taggatctgtgcaagacttcgtatcgggcaccaagtaccctgtagacgatattgttgaggacaagccttgctttcttcatattccaatcaatcgatctgggacaaaaacaaaacaagctgctactggtttggtaaaaccaggacttattaactaccaggataatcctgtcccgccacactatgttgtggtccaagttttagagatcacagacagtggttgtgaagattgggagatagactttctagttgaggggatcataactttgcaggaggcaatgaacgagttggtcctttggcatcgacgcgacatcaagtttggtgatgagccgatcttaagccgtctatcgcgtcataagtcacaaacgccgaattcaacaccaatgcaacagaaagatagttcgatcattccataccccatggtgcaggaaaatatagcaccgacctccacaaaaaccgttgaaacaat

SEQ ID NO: 41004 - DNA, 466 bp, Zea Mays
aacgctgatattgacaagtaagttctgcagagaaccacaggtttctggtaagttgagcccggaatacactacagtttgtgtaaccaacaagaaattttctgaaggtcaagtttttttaagatatacacctgtgtctacttgcaggccagcgtgggcatggacgatcttaaggcatcctaatcatctatctaacacttatgactttacttttgccaggcttacacagaaacaaccatcgatctgtcgataatttgtttgtatcgttggttatatgactgtcaagtgtaacaccgtcttcagcagctctcctatcacatcccctatctgatacctctatttcaaacttcactctataaccagtatcaaatagtatcatctacattaccataccgtatccctattttacacgatccaccgaacacaaccttataccctcttatatccataaaagtttgttcaacctctg

SEQ ID NO: 41005 - DNA, 347 bp, Zea Mays
ccagcgaggtcttattgcgcactatattaaaaaggtttgggaattactctctaagaggagaattattaagccatttatcttcccagaatcttgttgcttgtccgtttcccaccttaaaatatccccacttgaggaatttgtccttgatgttcattagactagcccagaaatgataatcacctggttttctgacagcttgtgttagggattcgtctcccaagtatttgtttcttaataaacgttgccacacaccatcttcattgagtaatttaaaaagctatgtgctgagtaaacaaatgttctttatgtcaagattagcgactcccagcccacctagctctttaggt

SEQ ID NO: 41006 - DNA, 280 bp, Zea Mays
ggacaggttacatctaggaaggatcaataccagtactggtgtacaagagatgaaccatatcggtacatttcagtaaatgacttcgtagattccttcaaagcattccatgttggccatgcattgcagtcggagctcgagctgcccttcgatcgaaccaagaaccaccctgctgccctcacaacatcaaagtttggtatcagcaagatggagcttctcaaggcatgcttttgtagggagtggctgatgatgaagaggaactcatttgtttacatcatcaaaa

SEQ ID NO: 41007 - DNA, 318 bp, Zea Mays
caactctgcgaggcggaacgaacgaccagctctctgtcgagcaaccctaggaggcggagcgggcgaccaactctctaccgagcaaccccgcgaggaggagcgcacaactaactcactgtcgagcaacctgagatggagcgggcgaccaaccctccgacgagtaagcgtgcaagaggtgagggcctgagccactaagccacatcgcaacaagacgcatcaacatcaaaccatgtcttggacgtgggtacatagccgaaaggactccgtgatacatgacgacacgcccccgcgcatatccttaagtatgccctcgctgac

SEQ ID NO: 41008 - DNA, 528 bp, Zea Mays
gctaggtgagcgacaacgccatccttgagggctgagttctctacggcagccacctctaaggctgaaggtccctcagttacttccatgggagcaggacgatccaagtcagtttcctgaccctcaagaccgcgctccaaggtcgatgaggcgcgggacgctgcccgggatgaccccaacccggcgtcgaacacatcagcacaaacatccatcgcatcaccatccgccggctctgataacagatcctctggaaccatatcttcaagagtctgatcaaagttcgccagagacaattcttgtagaccaatgagggcagacagagcaggagaaggaactccactactttccccactggctacgtatcgccgaccgttcttccgagtcaaagggatctcatcttcttactcctcctcgttttcatcagcaacacagacagcacacccattgggatcagcgacagatggatcacacccattggggtcagcgtcggtaaattcaggcataggcactttctcaacagcaggaaccgaa

SEQ ID NO: 41009 - DNA, 468 bp, Zea Mays
gtgttctcgacgtgtttcccttccaggggtgaacttcatcgtatgatcgaatggggaacagttcatacaaaatttggtgcacagatgcttgtcaaggaagaggggctaggagaggaaataaaatatgagatgcctaaggcttgggtgcagttactggtttacctaaggaacttagagagtactcagtaatctgggtggttggttctatgctaggcatctcaaaagaggtggatatgttgtttactcgaaagtttgacagggcaaggttgaaggtggccgtgcttgacccgaatttgattccgcaagtagttgatgtggtaattggagactacttatatgaactgaaattcagggtggagtcagaagctgaaggtgaccagcctttgccgatggatatggatcattttgggggaaatgatgatgatgaatttcaggatcaaaacaaggatcacaaattgggtgaaagag

SEQ ID NO: 41010 - DNA, 359 bp, Zea Mays
cgggggctacacccgacgagtgtgctcatgcgcacccatcgaataacgagcacgtcctatctctcaaaaagcagcatgctcgcgggcaagtaggagagcctccaaataagtaccaaaagtacttccttggaaggctcaggggctactgttgggtgcgataattaggaacacccaaattaccccctaacaaacgcactcagagagataaggactaaaccccaaggggcgacatccgggccacctataaaagccgagacaccccccgagcatctcccacctcaagcggagctccacctcacccgaagacgacatcactcacttcgtctcgcccgaggtcgcctcagcctagtccgtctcgc

SEQ ID NO: 41011 - DNA, 501 bp, Zea Mays
gagacattgtatagaaggggcgcgtcaggcgttctcatgaggtgcatcctcccgtccactggaaagcaacttctggaggaggtccatgctgggcaatgtggaatacatgcagcatccagaacactagtcgggaaggtcttcaggttaggattctattggccaacagcaaagaacgatgcagccgagttagttcagaggtgcgaagcttgccaatacttgtcaaagcaacaacacctgccagcacagcaactgcagaccataccagtaacttggcccttcgcgtgctggggactggatatgattggacctttcaagaaagctcaaggaggatacactcatgtactggtagcaatcgacaaattcactaaatggatagagttcaaacccattgcttctttaacctctgctaaggccgtggaattcatacaagacataatattcagattcgggataccaaacaacatcataactgacttaggatccaacttcacaagttcagag

SEQ ID NO: 41012 - DNA, 421 bp, Zea Mays
gattacgaggctgaaactgtgtgcaagtaatagtccatccatcaatgtaacactcatgtgtttcttcttgcggctgggcatccttgtgatgtttcctttttggaatacttcgcaattcaaaaactgacagtgcattaggtatgagagaatctgctattagttgttcttggggagacatctgtctttttatgccagaaaataaaatctggttcttctgttttgcagtttcactttcatttgcattgatttggcaacaaggaattccatagtactcacaacaacaacatgttccaaggtcacttgtctgttggtttagttgtgcatccttttgtgtcttgaatgtctgttcatcagctgttttatttatagtgttgttttgacttgccaacacaccgcattctttgcacttagtgacatcatt

SEQ ID NO: 41013 - DNA, 509 bp, Zea Mays
agcccgacagttattttctgcttcgggaccatctcatgtgtagcggatgtagaaggaactttgcactacatatctactccacccaagaagaaatcctcctcgggaattccataggaagctggagtgaaaccgcgaaccgtgcccccgctcacagcacgacagggcatggtcttgcgcaagtattggctctgaagtccccagagggtagaaggccagtcaaccatggcctccccaacccggcgaactctgttgtcgacctcgcctactaaggagtggacacggatcacccggcgaagggaagtagatattcgacaccaaggaaggaaagcacaacgatcaatcattctgacacctccgccatcaaaggaggatgagaagaagcacaccgctgcaccagctcctttcttccctggcatcctcttcattcaggggagactggagtcatcacccatctctgatgatgaacccaccgtgctaggggaggaacctccccagcatgatgctcggcg

SEQ ID NO: 41014 - DNA, 300 bp, Zea Mays
cggctatattgataacctccagtgcttccttcgcttctggatcggccaggagatcgagtggtactgacgatggagataattcagccggagaaagaaaaagttaatcagtccgaagctataaaaacaaatgccgaagttaaaaatcatgacataatacctatacgttttacatgctctgcggcttcttcagcttgtcttgctttggcttgggtctcatggatgtccttttcactctttttcataatttcatgagccatttctcgtccaccatttgcccagatctcgttataaaatttcccg

SEQ ID NO: 41015 - DNA, 604 bp, Zea Mays
gtgcttaaccaaacaaaatcattcgctgttaagttttacttgttcatttgggctcctgtttttccttaagtacttggaatacttatatgtcttttgtttctgcagcctgagccagagttccgcccacccatgtcagaggttgtccagcaacttgtgcgcttgatgcagagggctagcatcgtgaggcggcaatcaggagaagagctagggttttcatacagagtcccagaacgagaaggagacctgagagacatttccttctgagcaagtgcgtccacgatagaagcgcaaaacagtttggaggcttaatgtgcaaagaaaatatctagagcactcgtatagtcatatcgattggagaactcgagctgaccgcaacaattcaggatcggatgagttttgagaagataatttcgttgcctattgttcaactttgttcattcttctacattcgtctcattttcagtcagtatacttgttgcagctgtatttaaaacgagactcaaattgatggtggtgtatagctgattattggtagagaagaaggaaaagaaatgtaaaattgatgctccgttatgttttaatgatagaaacctcaagactctac

SEQ ID NO: 41016 - DNA, 362 bp, Zea Mays
gcgtacagtagtaaatgagacaggtggaatttcgtgggactttcaaatgaaacactttgtaaaagttgggtggatgcagtcaaaaccagtgtttaaaatagcgggctaacccatttatccccggccttcttcagtggctacaaaaggatatatcgggatatatctgcagctaaatgttttagcggttttcactagacagtacacagtagacacttagacagatcctcccatgatcccaattcccagacctcacactagccactgattgcaacaagcaaagcagcccaaaatacatttatctcacaactagccgctgattccacaaacatccaagtcattgatctcacaactcacattctcac

SEQ ID NO: 41017 - DNA, 484 bp, Zea Mays
tactattgcactacatctcaaattcttctcctgtttctgaaccccaaatacacttatttaaatcctcccaaaaatgacatgccaacagtaggcttcaatccctcattgcaatcaggtacaaatgatgtaatctacaaaatcaatcgttaatatatcaatacagatatctagttcatcttgaacaacaacttaaaacaatgtaaaattctcaccggtgatgctgttcttatacttttttgggtgttctaaatcgatcagcactgtaatgaggatcagagttgtttagaaccatggtgttgttgcctgcgatatctgtggctacatcatccatgtttggttgcaacatttgcatgtcggtgtctatgctccccgcaacgcctgttggatgtgtatctaatgcggtcagtagagccatgaagctgccgtcgtacccaactggcgaggtcgcatccatggtcgtgcagaacctacatcacaatcaatc

SEQ ID NO: 41018 - DNA, 309 bp, Zea Mays
gagggtgaggaatctgctatggctagatttttgggcaggttaaataagagaaatttaggacatccttgcttataaagattatgctaacgtaacccgattgtttcatcttgcttgcaaagctgaaagggaagtgcacggacgacgtgctagtgcaaggtctaatgcttctgcaggaaaatctacaccatggcagcagcgcaccactacgtccatgactggccgtacaccagcaccaactccctcgtttagtcgaccagcaacaccgccttcctccagcgacaaaccatgtgcatctttcacaaattcagc

SEQ ID NO: 41019 - DNA, 307 bp, Zea Mays
tgcagtcccgctcgagatgcagttttcgctttcccagaagcgaactgccaaggaagcctgggacgccatcgctgcgacccgcatcggcagcgaccgtgcccgcaagaccacactgcaggcacttcgcaaggagtgggagaacctgaccttgaagccaggtgaggatgtggatgactttgctctttgcctcaacactctgttgcagaagctggtgcagtttgtcgacgacacctacgatgaggagagagccgtcgagaagctcttccgttgcatcctcgagaagtacaagcagatcgctcgctcaatc

SEQ ID NO: 41020 - DNA, 370 bp, Zea Mays
ctggccacgggtgagcggttctcggtggcgcggcaatcggatttgggggaaaatggcgtcgcggcgtgctcgggtggaattgaggatggagcttggggctacacggccgcaagaggttctagttttactgtgcacaatcaatttgagaggagggggcaagacaacgcgaatttggcttcgattcaacccacggtgtgtgtgatggtcgtgcctcgccgggaatcacagggctatttatagccgcggcggtccggcgatcacctcacggccacggatagcatcacgagcgcatgccgaccacgtcggtaggagacacagtgagggagatcacgacatgagtgccaccgcggcaaaatttactagtcacgat

SEQ ID NO: 41021 - DNA, 324 bp, Zea Mays
gtcagatccagcatggagcacccatgtcatcatcgctcgttcgcccaactccatctgctccttcagcacgcggatctgtcggcctcctgctgcttcatccggccggcctcctgctactcaggaaacgctagctgctcccctccttcctctgcgtcatccaaggaccgccagtcgtcgttccctctttggcgatactcattccccactcccccggcaccaccacgtatggcctatcccatccgtccttgcccctattcctctgactgcagtagtcgtgccttccactgctcctatgccccttggccccgcattcgcattggctgc

SEQ ID NO: 41022 - DNA, 355 bp, Zea Mays
tttttaatcagcaaaaactctatcccacgttagttttcgaaatagctgtaatttgtccaagcaacgaattatccgcaatcgccaattacaatgttagcacaaaaagctattctagattattttccttggtcgaacttgaattagaaactagctgaaaagctattctatattatttatcgaacttgaaatagaaatttgacactgcgaaacacagctgttgcgtcctcgtacaaaatccttcatcttggacgaatccaatccaaagagcatttgacagggatctctagcggataatcatcatgtctctccaaatgataacaagacgctcccccgctttcctttgaatactgaagat

SEQ ID NO: 41023 - DNA, 275 bp, Zea Mays
ccaggtataccaaaatgtcacccaaagaaattcttggtaagtttgtgagtgagcgcatgatggtaaaggaagcaagatacgtcgataacatcgccaacagacctcatcctcactacgagccgcaacccgttgcacttaaagcaacgaccaataaggaagcacttcccgacaatgtggcactagttgaggcgactggccttaacgaggatgagatgtcgctcctgattaaaagtttcaataccaccttgaagggacacaaggactaccccagcaag

SEQ ID NO: 41024 - DNA, 355 bp, Zea Mays
ggggatttgtgggacctgtttgagggggaagagttgaggatgatgttgttcaatactcgggatgtaggtcttataccgaaggaggagcctatgtgacattgttgtcgccctcgctgctttgttgtgatattgagtgaaaacactgccctccccctcttcacaaaggagttgtgagggtaaaagccgtgttttgtattatttcgcgatggtgccgttgagcccttcgtttgttgtttatttgtgattgtgcgttgtatgttgtgcctaatgcgagttggcttcgatttgtaatcatgttcttgccgtaggggactcctctttcgacaggtgacaatgcaacatttcacttatccgg

SEQ ID NO: 41025 - DNA, 355 bp, Zea Mays
gctcgacaacattgtgatcttaagtgtcctgcaacctaagtcgtggcaataatacttgtcaggcctgtaatatcgtccatcacatacttaatgtgttgtacctgaaatttatccattaagctttcactatggacttatcctcaagtccttagatgtggggtccagtccctcaggccatactatccatggcgggcctcgtcatatactcatatccttctgtcttgtgacatgtttacacttgggcacgacagatcccttgtcctcttggtgcacagggccccgataagctaaagtcctgatcgcttttatgaggcgacaccagtgagcttcaaggaccttgggtctagcagagagt

SEQ ID NO: 41026 - DNA, 390 bp, Zea Mays
tgttataaaaaaattaaagctggtttatagaagaacaactttgctacagacagattagtgggttgtcacacgaaaattagataatgaggccctgcaatttgctctgtcagaacgactaaattggatcgcgatggtacagtagactgaacaagatcatgggttcagtaaatctatcgttgtcagagatctccgcaccgtgattcacgctggccaccgcgattcatgcctgtgtgaagtggacaaccatggcgggtgaaaagatctagggtgaggagaaagtgggtctgagatggatcatcgtcttgcccacttgccacgcggtcagtgaaatatcaccacctatgttcgttgtgatcgcagtgagagacacgtagtcgcctgtatcaccgt

SEQ ID NO: 41027 - DNA, 715 bp, Zea Mays
gatctccctgcctgagaccacgacgatgaataatgatgtccccaggctctccattgactaaaatctgagtggatgaagtagacagtaataaacaaaggagatcccgccaacgctgaccaaatcccattttacttaaaacctccaaaaggaacgaccaagaaacaaagtcaaaagacttggagatgtccaacttaagaaggatatgtgtttctttcttcctgtgcagcgacttcacaatttgttggacaagcataaagttatcatgaatcctcctccccctcacaaaggcactctggttcacagaaaccagtgagggaagcaaaggggccagccgagtagccatgagcttagctaccaatttggcaaaactatgaatcaaacttataggccggaaatccttaacctcaacaacatccatcttcttagacagtaaggagatataagtcgtgttaagcaggcgaaatttgaaaacatggccacgctggatgacatccaaagccatcaacacatcacctttaataaaattccaacaggatttataaaattgacctgtgaaatgatccggccccggggccttatgcggaggcaaatcttttacaacagcccacacctcctcctcaataaacggagcatctaatgcagataaatcatgattgtggatggccaactcatccaagtcaagagtgtagctcctctcctcagccttacccaaaat

SEQ ID NO: 41028 - DNA, 474 bp, Zea Mays
ggcgaaggggtatgaagcgatacagaccgcccgatccaaccacaacggcccagattagattatcataatatccgaatcggtatcccccgctggcgatcggatcccgatccaacggtcttggtttacttcacctaaattgttataccctggataatctgcgccctccatcggccgatcgacgaccctgattcggtaggatgaaaggggaagcccaacctgatctcagccgtgcgcgaggaaatcaataacgcacgcgatgtcatcttcccagatctaatcttattcgttccctccccatccaacggctaccagcccatcctctatctcccaacatcagccgaaccccgacagcagagcaggagcgtcacagcggtgccatcgacgagcaacccagccaggagaatcctcccgcccagacccaaattgaaaggtgccacacgcagcaaagattatggtgaaacgagggagctagtt

SEQ ID NO: 41029 - DNA, 277 bp, Zea Mays
agagttggttgagctcaagaagcaaatagatgagctatcagagaaaggttacatcagaccaagtacctcaccttgggctgcccctgtcctattcgtggagaagaaggatggcactaggaggatatgcattgattatcgagctctgaatgaagtcacaatcaagaacaagtaccccttgcctagaatagaagatctgttagatcagctgagaggagccagcgtgttttcaaagatagaactgaggtcaggttatcaccagcttagaatccgatcttcg

SEQ ID NO: 41030 - DNA, 434 bp, Zea Mays
gtggagcgcagaccgttcggactctagagttgaccgtccgccactagtggtgttcaacactaccaacatggtgcttatgtgaaaccatacgcgtctattttgcgtttgctttgcttttgcttcaacgcaatgcccccagtcatgcgctgcatcagccttgtgtcagtgaagcttagctgacacgaagcatgcggtcctcttccgacgccaacgggatcgaccactggcatttggcagccagttagttttgaggaaccagaggcacaggcactttgtgcttttcccgcgctaaacctcatcaagatccgcccggaagcgaagcctttctgtctgtatatacgcgtgctcgctctgtttggcaagcggcggctcgactcggctcggctgcaccagcaatctgcgtgggttttcatgttgccgtacgttaacttgtt

SEQ ID NO: 41031 - DNA, 297 bp, Zea Mays
gggtgtgaaggtatccagccatgtagacgatggtggggtcatcctcaatagggtctcctcctgacagggcctgaagtcttttcctccaggtaggtgtatttttgttgctgggtgggaagtagcgaaggggggtttcaaagatcaccttgttgtagctctggcatagttgtcggaaggctttccgggcaacatcttggcaggtatctgggaagcggtatccggtaaaagtgacttggaaagaaggatggtttggatagtttcggctttctcccaggtagactgccatagagcattttt

SEQ ID NO: 41032 - DNA, 424 bp, Zea Mays
tgccatccaagttcgcctctagggaagaacaatggatatgatagtgcatcgtagcatccatggtatgagcggatgcagtggtttgaactgtccttcccatggagcataacactcttgctgaactggcctcgcccttcgctcccttcgatccagacagcggccacctcggaagtgagaggtgtgttatatgtcttctggttcaacgtctggtctaggttcaatgcgatacgatagtcatcaaggttatcaacgtggcccatggtcctaaggtgctccgagtacgggtttccacgtagtatgtcgactatctgtcgaataacctctttgtctttctgttgatgctcttcgcgacacttacggtaccgatgctcgagagtgggatcatcatcataaaagtaaagctcaaggtgtttatgctctgccc

SEQ ID NO: 41033 - DNA, 517 bp, Zea Mays
catgcacataataaaggcattcactcacctccaagtccaaacatacctgaaaagtacattctggagcgatatacacgtaatgcaagatctgtggttctgtgggaccgacacgatgtgagtgttggtggtcagaatgagacagagcagtcgaggttgtcgaaactgctgccaaagttaatgcacctgggaagagcgggaagcaaatctgatagaccatacactgaaactatcaggcacatcgacatgataactcctgggattgagcttctacgaacagcggagattggtccggatgaagcaacaaatactgagttgcagcaagatgcagatggacggcagaatattggtcccattgcaccaacacaacaaagttctgaaaacaatatggaacctgttgtgatgtccactggtcctacaccaccaccagaatcgggcctcaatccaggttctgcaaacttcctcgctgatctaacattgactaaaacgccagtgtcgcgcacgaagggtaggaagtctg

SEQ ID NO: 41034 - DNA, 440 bp, Zea Mays
gcaaggatgttgctggaagtgttgtggaggtgcctgaaaaatttgggttcaattggagtaagtttggctggtttgggcatttcatcgaacacatggtgtgcggggagttagggttttagggaaatggccatttgaggtatgaaaaccctcccgaaggagctaggatcctgcagggatacataatggggacaaagggacacattccaccaactggattcattggatttcacagaaattggatttttgcacaagggggtggtgacttggatgccacagagcctttcaaaccgagagcaaggagatagagggaaggagaggggggatgactgctcaccggagaggaaagggtcacggagagcaccaggtcgccggagagacgccggtgggggaagatcgccggcgctggggaagaatcgccagagacagagaggaaggaggcg

SEQ ID NO: 41035 - DNA, 286 bp, Zea Mays
tacctgcggggatcgtcggcacgttgaggattgggtgtactggagatggtagcacacgtcgggaacaccacacggcggccgtcagtaacagtacagttgctaatggggaatgcggcgcgatctgttgctggaagaatcgtatgacgcaatgaacagcgtaaacacgtggagaaggatggattgtgaggtacgcaccagaaacaggatcgtagttgccggcgatggagcggacactcgcggggaaggaggagcagcggcgttagagatggcaatgggtacccgaaac

SEQ ID NO: 41036 - DNA, 415 bp, Zea Mays
cgcgctggagctgtgggtggcggtggttgggcgccgtggggaaggatgacgcgactgccatggatcctctgatcgacggctagaaactgatacgcacttaccccttcgttggttgaataggtgtcgttggatggaaagagaacgctcaggattacatcaagtatttagtaactctcgagcgtcgatccctgttccaacggtggtgtttacgtatcgtttcggctgagatctgatctaatccatacgctcggctgttgatccaacggctgtgaatggccgataccccttcgacccgtcacttttgctaaagagaccctatccttttctcgaatgaacccgccgtcccccgcgggatacttctgagtctaaggaatttttatgaaatagcccctgtgtttctctgttatttgcgccc

SEQ ID NO: 41037 - DNA, 322 bp, Zea Mays
gacgccttcggcgagtatccagtttggatcgggatgtcggtacctcggttcctactgttgaagaaatgcctgtgactgaatttgctgatgctgatcccaatgggtgtacccaacccgctgctgatcccaatgtgggtgctccatctgttgctgatcccaatgggggtgttgcttctgttgctgatcccaatgggggtgctgtttgtgttgccaatgtggattatgaggaggaggaaaatgaagttcctttgactcggaaaaacagtcggcagttcatcgctagtggtgaaagtagtggagttccctctcctgctttgtctgc

SEQ ID NO: 41038 - DNA, 343 bp, Zea Mays
ggactctagtgaaaaatgattccagacacaggactcccacaaggcggactgcgggttaattcatcgaaatccgagggactcatttgaatatttgcacaaccgaaggggtatgcgccaatcttgaccgttggatcacagttgggtgcttgagattaaattaagtcccccccgaaccggtacgagatcccggccacaggatcctaatcttacggtcatgattttatgagatgagatccaacaggatctgtctgttaacagatcagtggcccagatcgttcacgcgaaagggtatgccaagctctaatccctaccatccatcgggaatcgacggtcacaaggttct

SEQ ID NO: 41039 - DNA, 498 bp, Zea Mays
tgcctccgtaatccaccatcaccgtgaggcagagaaccgatgggagggggagtgagaatgccgccaggggcgattcgagcatgcgacgccggcaggacatcactatgaggcttgggaagtttgccgagccctcaggaatgtgttcgtgaaattctcgaaggaggaacgccaccaggctcaccgaaatttctcactgtgtctgctacgtcgttgtggatccgccctacgccgaggacgagacataagcaccactgaattcacgatagggatcttctcaactgtttcgtcttggtccatacgtcgtgtagcgtgtgtcggatgggagtttgctctcttgggttgagtgttacctgcttcagccatggcaccgccgcaggatttgtgcgttaccgcctctgcaatggttgggccgccgtgggggagtcgaggtgatgctggccattgatacaaagtctagcgacagagattacatcacagtgtatccgttcgcggtgtcaa

SEQ ID NO: 41040 - DNA, 296 bp, Zea Mays
tatccgcgtagaagtcgtctaagggtgcagccggactaagcacaacaagtgcgaaaaaatccgatgtctatcgcgaagactatccgcgcagaagtcgcctaagggtgcagccggaccagcacaacaagtgcgaaaaaaacacggagtctatcgcaaagactccgcgcagaagccgcctaagggcacagccgaactagtacaacaaaagcagaaacgacagcatcaaaccatccgcactaagaccgactataatcacaccagcacagcataaccaaccataccagaaaaaagtacac

SEQ ID NO: 41041 - DNA, 406 bp, Zea Mays
ggcgagcagtctctgccgccagggcgtgtagcttctctatggctgcaagtgcggcggcacggtcaccttgcacggtgaggaccccagctggggatggcatcttgaggcccaaatacccgtaatgggcaatggccatgaaccggtacagggtcggcctgccaatgatggcgttgaaggggaggttgacttctgcaacgtcaaagacgacgttctccatgcggaagttttcctcagttccaaatgtaactgggagtgtgatactcccaaggggatacaccggctgtgggcccactctggagaatgggcgcgagggtcccagacgggactctgggatttgcagctgcttgaacacaacatggctgatgacgttgaggcctgccccgctgtcaatcagcacatggtgcag

SEQ ID NO: 41042 - DNA, 357 bp, Zea Mays
ccggaatcgctaggaagggttcgctggcaagctctgtcgccggggagttgtgtggcgccgccgcgtccacgctcgggacggggacgatttcgctcggccgttggatggctagcggacgacggtgatcgtaacgtaggatacccccttgcttgattaaaccatggctgtcgatatccgatctggtggtcgcgtggcatgttgcgcgggttcattaaaccgagacccttggatttggatccgatggcatagatcggataccggttcgatgtaatatagagctaatcttcgcccttcaaatctaatcggacggccgcgatcggcccatacctctttggcctatcaatttagcaattaagc

SEQ ID NO: 41043 - DNA, 310 bp, Zea Mays
ctactggtttgcctccttccagagattatgatcatcatatttctttggtaccaggacatgtacctgtgaactcaaggccctataggtactcacctttgcacaaaacagagataaagaagcaggtctcagaactattaacgtctggtctaattgtgcctagcatgagtccctttgtatcctagtcttgttggttcaaaaaaagatggaagttggaattttgtgtggactgcagaaaactcaatgacatgaccatcaagaacagatttcctatgcccctagtagatgaaatactggatgagttagcagggac

SEQ ID NO: 41044 - DNA, 593 bp, Zea Mays
caaaccctacctaaaggcgacgatgatagaggcaggggtgatgcataggatgatgttgtgaacctagctggctgatgtgctggatgaagtcacacaacatctccctaggctactactgaacaacattgttgttaccctctgtgccacgttgatggtaggaatcgtagaagtttgctatgaattgccaatagaattcttcccacaaactaatatagttgatggtaaggctcatgagccatgaccaggtagacccagccaataccagatggaagtagttgaccattaccacctcactacctcctataccgaggatggtagtgttatagatcaagagaaattcggtgggttgatggacccatcatacttctcggggatgtgtgggcaaaagttgtgggggccatgaagcttgacatagctctaataaaataaagagttgctttctctaaactccaatctaggtggtgcccccagctaaagggggtagtacctaggagacgagggtgctccatacctgtcctctttgtgtaagtcatggtttcaagttatggcgacatccatgtcctaggatgcacacaacttgtcgtgcacacgac

SEQ ID NO: 41045 - DNA, 353 bp, Zea Mays
ggaaagatggaaatgcattggaattggtcgactcatcaatttctgtgagttattcacttcaggaacttgtacggtgtgttcagttagggcttttgtgcgtccaagaccctccaaatgcaaggccactcatgtcatccatcgtgttcatgctagagaatgagacagctccacttcctacaccagaagaacctctatattttacagttaggaattacggaactgatcgatcaaatgaatacatgcagaggtctctgaataacatgagtatcacaactctagaggcgcgttagacatttcgcttcatcgttccttaaatttgtagacatttttaatctgtgttattgtacatttac

SEQ ID NO: 41046 - DNA, 519 bp, Zea Mays
aaatcatcatcatcatcatcgtcagggacagttgtgccctgggtctcgaactggtggaatgccgcatcctcatcctatgtgcctagcactggatccgatactggcactgggtcctcaggggctagacgataggattcaaacaggaggcgtgaggcctcgagggtgccttggaactaaggcgaccggatcagctacacgaagatgtgacataggtaatgtgcatacggcagctgtcggcgagcacgaagaccatccaacacggtgtcctcaatctcacagataagaaaatcaactacgtcaaactctgagtgagagattaaggcaccaaggagctagagatgaatgtgaatggtggcctctctataacccatccggggcagtagtgtccgtctcatgatctgatagagatactttgctgctggagtgaaatctgttagagagggtcgcgacccatctgtgaagggcggtctgaacagggctgcgacatgagcagtggctggaacgactccgctgtgaggg

SEQ ID NO: 41047 - DNA, 652 bp, Zea Mays
cgcgcgcgaggctgctgcaggtgtatgggccatacgggcgcgcgaggctgctgttggtatatgggcaatacgcgggacaggcgcggcatgcttaaccgtagctactagctagggccctatttacttaagattaacgctagctgtttagactgatgcagaatgattacccctcgggccatcaccgccccacgccatccgccacaatagatacgggacagctagacagcctcgggtcctactagtatgcgtgcctcgcgggataaaacactgattttacccctaccttatggttccttcccagggaagccaccactggtcgacctctgtcccggtctataaaacgaagagaccgacctccaggcattggggcgaaggagagagctcttggacacaatcgaacaccttcaggcaaagacgaacccacaaggacgaacaggaggaggagcgccgacgaggatcaggaggctagagccccgccaagccaagacttacctacgactccactttacagcttctaagctccacttccaccccaataagagacatgggagcctctcctccctctctcgactgcctgtaacccctattacccgtttgcagctcaccgagcaccattgctagaccatcgagtaaagtgtggttcgcctcacct

SEQ ID NO: 41048 - DNA, 505 bp, Zea Mays
gtttcagggcattccttgcatccatacaattgggaacagtagcatcaggttcatggcattattgagagcggatggggaaattgaggaataaatcagcgagagacaacatagttgggtgctaacctagctgttgtaggtcgtacaagcgcctgggttggtggcgggtcgccagaaggaaaacttgtgggcagtcgtcccatggccgccgccttagtcgtcaacgaaggagcaggcatcatcgacgaagaagcagcctgcttcaagccatggggaacaccatggggcatcgtgcatggacaagggggcgacaggttctaggcagcgctatgtttcagggcgggggcactgagatctgctggttggtggtgctaggatggaaggcggaggggctgcgacgtgattgagatcgaaacattcaggtagttgaatacgagatagggcagcccatttgggtgcaatatatttgtggcacactaggaggtgccctttattttttttaacaaaa

SEQ ID NO: 41049 - DNA, 281 bp, Zea Mays
aatgctctcctcgcgttggagatgtaaggtatcagtcgttttctcctgctctacttgcttcgaaggacgctcatgcctaccaccagggagaggctaggtccctgcttccgcgttcctagggtattggtgctatcctctacaggtggcggtgcctaggtttccaattttagctggctccgctactgataaccatgacaagtcatgaaatagatatttattgccatatgaattctctaaatttagatatttgttcagatctttctaaaatatgtactagtggc

SEQ ID NO: 41050 - DNA, 568 bp, Zea Mays
aaaggaccaatatcccatgtaccagtgcattttagagcagccaattcctcaagcatagcaagttgccactcagagatactagaagcctcttgataagaagatggttcaacaatgactgtagtagcacgtggaaaaccataacgatctggaggttcaatattgcctcgaccatgaagacaatgtccctgattagaaacaataggatactcatgattgttagaataagtatctgcaataggttttgcatcaagactagccgcggggatagagttggaacgacaaatatatgttttggtggcaggtggcttagaggagtaagatgaagatgttgtggaagtatgtggtgtagtaggaataagaatattaggtgtggttataggagaacattgttgaacattcgatgtggttataggataagattgtggcacagaggaaggatcaggaatgtgaggaagacataggaaggaggtggactcggtgggaaagtatgagtgggtagacgaattgtagaagggacgattttcattaaaactcacatcacgtgaaatacgaatgcgacgagaagatg

SEQ ID NO: 41051 - DNA, 934 bp, Zea Mays
tggcagggtcacacccattgggttcagcatcagcagggccacacccattgggatcagcatcagcagggccacacccaatgagttcagcatcagcagggcacacccattgggatcagctccagtaaagagttccactggtacttcttcagcagcaggaacagaagggccgacatcacaatccaagcacgacactcgtcgaagccatctcttttttttcttcccctcggcaggagcagctggatgactgacttggcgaagacgtttcgagcgagtaccctcaggccttcgagtatccacggttctctcaggctctgggatagttgcaacagccattgtttcagcagggaccgagtcagaagaatccctagccaacatgtccagcatagcgcttatctctgcatcacccggactcataggcatctcaaagtgaacttgcctctcatcattgggaagatctccaagtgaagcaaccagaacctcaacttcttcaagagagggtcgcactctaagatccaaaccactgtcactagcaggaggatttgacaaataatcgaaaaaggacttggaaggcggcagattccaagcagaatatgcaacaggagcaccaatattcgataccttgcctctaaggatcatttccagtcgactcaccaaatccacagcaggaatcctcttgttggtaacccgggttgaatcggtgacaccactatacaaataagctgggtatgccctatcctttagtggctgaatatccttaaaaacaaagtctgcaaccacagcttcagcggtcagacctctctccttcaacaagcaaatttcagcaagtataactttggcttctgctatctccaagtctgtgggagactcaatccaacttggagcgcgaacatccggctgtctccctgactgagggggagagacttgccatggtttt

SEQ ID NO: 41052 - DNA, 396 bp, Zea Mays
agcaactacagaccatacccgtaacatggccatttgcatgctggggactggacatgattggacagttcaagaaagctcagggaggctacactcacatgttggtcgccattgacaaattcactaaatggatagaatacaaacccattacttctctaacttcagccaaggcagtggaattcatacaagatataatattcaggtttgggataccgaatagcatcataaccgacctggggttcaatttcactagctctgaattctttgttttctgcgaacaacggaacatccagatcaaatatgcgtcagtagcacattcaagagccaacagtcaggtggaaagggccaacagaatgatactggaagcactcaggaagaaagtcttcgacaagaatgaaa

SEQ ID NO: 41053 - DNA, 527 bp, Zea Mays
cttttatagtaagcatcttctacttcatctgcagcctaggagaatagctagtcctcgacctccgcttcatcacacttctgcttgtaataagcgacctatgcttcatcggcgatctgagacataaacttgtcctcctcctcttgcgtaggtaatcctgcctcagcgagtgcgatgagctcactcaaccttgatacgtcctcctcctcttccccatgtaatcctgcctcagcgagcgtgatgagctcactcaaccttgatgagtcctcctcctcctccatcagctccacccctccattttttgctgaacttatcttgcacgagcctcgtctgcgatatagttcccggcgcatccaatctctgcaaatatattgatataaataagttagcaaagacaagataaatacaatgtacgagcaaaacaacacatctttttctcactcacttgcactcagatgactatcaagattccccaacatctgtttctcggctctagccgcctccatttcccttgcctcctgtgctctcat

SEQ ID NO: 41054 - DNA, 280 bp, Zea Mays
atgaggcggcaagaagaatatgatcgagatcatggtgcaccggttcgtagtcgtacaatcagaaccaattcagcaacagcttacactagcagcctggccctgggatgatcgaggcgacatggcgctcgtttgcctccctgggaccgtcgacacgatcaccgatgggaggatgggggaagtgtggagtctttgcccttactccccgactccgagcaatccaatggcctctgaacttttaagtctccaacgttgacaactacgaacccaagcagcacccggg

SEQ ID NO: 41055 - DNA, 476 bp, Zea Mays
ccaaggtcgatgaggcgcgggacgctgcccgggatgaccccaacccggcgtcgagcacatcagcacaaacatccgtcgcaccaccatccgccggctctgataacagatcctctggaaccatatcttcaagagtcttatcaaagttcgccagggacaattcttgtagaccaatgagggcagacagagcaggagaaggaactccactactttccccactggcgacatattgccggctgttcttccgagtcagagggacctcatcttcttcctccccgtcgtcttcatcagcgacacagacaacacccccattgggatcagcggcagatggagcacacccattgggatcagcggcagatggagcacacccattgggatcagcgatagatggatcacccccattggggtcagcgtcagtaaattcaggcacaagtacttcctcagcagcaggaaccgaaggaccaacgtcccgatccaaa

SEQ ID NO: 41056 - DNA, 474 bp, Zea Mays
cacctttttccaccatacagtttctaaaaagttggaatataaagaattcaaaacaataaatcaccttttaaaccacaaatggtgtttctttgatgttgagggcattctattcgcacgagattgtattggagcacaactaatggatggaaactttattggcctagctaatgaccttttgtgataccaagtttcccataatcccctctattcaagccatacgttgacattttttatgtccactcaagtaaaacaccacacatcattatgcttcatcatttctcaaaataaaataaagacgatggaatatttagccaaatttcatgatagagctgtccaaacatagatgacggttgaaaggcaccttttcccaccatacagatgctaaaaagttggaatataaagaattcaaaataatagatcaccttttagatcagaaattttgtttctatgatattgagggcattctattcgcac

SEQ ID NO: 41057 - DNA, 379 bp, Zea Mays
gaagaaaataaccgaggagaagaagttgaatgaagagaagaaagttgcggatcctttcatcgctgggttttatgagtccatggcaaaaacgaatacatagaaaattactaaggagatcatggagggtttgtctgaagattctgatgacagtgatagttatgacgtgaaaagtggggatgaagattctgaggatcggccctggcggccaagtcatactatcttcagaaagtcgactatcaaacagagtcatattgacaccatgagggggagatattttcgcgacatgtctattgtcagagttggaggagacagcattgcccctgctcctgaggaaaacaaagttgttatttattgaagcttcctgaaagcaggtctccgg

SEQ ID NO: 41058 - DNA, 302 bp, Zea Mays
gcgccttagataaagacgcttaggactcaggactggataagttagaatgagatcaacacaacaacctcctccgtacacttacacccctttgtttctcttttaactcttccaatttctcagggtgtattggtatcgttacgcaacaaacaacaatgtcgataatatgccgtctatgtttgacatccttgatgtcggttctctgcgagtagggattctcagggacttgcacgttcgctcgcagcgtttggaggaccttgaggttttgcttgccgcgcgcccccactccatgcatggccgacaaa

SEQ ID NO: 41059 - DNA, 333 bp, Zea Mays
gctatcggtaaccgacccacaccttgtactttaaaaggggaacgatcggcctagcacgggtggcctccaatccctctgcccacaaccgggagacctttcttttgagaattggtggagaaggtgtaactaggctatcactactctagtaagaaaaggattgaactcaaccatcatcttgggaacctagtgtttgtggagacatcacaatagatttgtttttgatgggacctctcctaatgctagtcttttaactatggcagaggatgatttgaagctctggagtttagtaggcgcaaagggtctttccctcttgcgtggtctgttagggggaaa

SEQ ID NO: 41060 - DNA, 490 bp, Zea Mays
gacgagaagtgcttgttctagcaaacaaagaaaccagaccgggaatgggccgaaagcgtgacatggggtccagaacatatttgccgcacagtcaggccccgggcgcccgtcacgcagcatgctttgctgccgtgattcacgttccattaactcggcacagtttgaattcgaatcctgcagccaacttgcgcaaacgtcatgattctcatgcatgaacacagcccctgactccgacgagctgcccggtgaggtggtaaacatttcagctacaccatctggccgggacggcaccgacgaagtgtgcttcaggggcatgaaccttgccttttctaaggcatctcccagtgttatctttggcgaaacccgaggattaggcaggaccccagcccacggcttcaagccactggcctttggggttttcctactgtgcccgacaactagatcaataatttttcccatcttacaccgcacatcttcatctgcctcccgc

SEQ ID NO: 41061 - DNA, 326 bp, Zea Mays
aacagcagtagctactacgctttactcgagcaaaatacgaaatctgagataaagagttaaagagagtggagatgtagcgaacagttgtcagtcttataagcatgcttcctgttaagattgggaatgtatcctgtgcacaaacccatcttcgtgcacatatgcacaaaaacaatctagaccctacgtccaacatccttccgctgagcgagttgtcagtcttataagcatgcttcctgttaagattgagaatgtatcctgtgcacaaacccatcttcgtgcacatatgcacaaaaacaatctagaccctacgtccaacatccttccgc

SEQ ID NO: 41062 - DNA, 406 bp, Zea Mays
ccggggttcagttgtgcgccgccgtgattgtgctagagatgggtgatgacctctgagtcgtgggatcatgatctagcgtgtgggaatgcttaccgtgtgggatgcgattcggaccctcgatttcggatctagcggcttgaatggcgttgtggcaaaatagaatccggggcgtagatcttggatctgacggccaagggagagtgcaggagagtagctcgctccgatctaatctgctgcgtcgatgtctaatcgggcggctcatagtgaacgataccctttcgctgatacaatttgctaaagagtccctagaatactactgaataaactcgccgtcccttgcgacaggataatgagtcttagggattcttgctctgtagcccctgacttttccagaatttgacgccca

SEQ ID NO: 41063 - DNA, 341 bp, Zea Mays
tcctccctccgttgtgtgcatggctcctgctgcatgcaagggcaaaagcgcggcaggggtacgtggcgggtccgggtggggcgaatgaaaagcgggaattcaccttttttgcaggggtacgtgttgggaggtgagaggcgtagtttcattacgccaataattggagcccccgcgcgtccgtacaggactcaccagcacgcagcggctttcccgcacgccaatggccaccggacatgcatggccgtagatatgagcctgcagctcggcgtttcatcatcggttcctcttcttcttcttcttttcctatttccctagttgccgtctcttcttagcaagagcgc

SEQ ID NO: 41064 - DNA, 445 bp, Zea Mays
ctgggctatctggtgattcaagcgacagcgagagcttcgatgttgagagtgagaacgaagatgccgaagatcggccatggaggccaagccacattgttttttggaagtcaactattagacaacggcaaattgaagcgatgaaaggaaaatattttcatgatgtgtccatagtgagggctgggggagaaaacatagttccccttcctgaaggtgatgaagtggtggtcttcagaagcttcatgaaagctaggcttcgctttccgctccacaaaatgctggtcgaagttttgaagagattcaagatataccttcatcagcttaccctcgaagctcttatcagagtgggggtttttatatgagccatgaggagtcagggactggagccagatgccagatgcttcttcaacattcatgagctatcttaccagacgaaggctaccagaaa

SEQ ID NO: 41065 - DNA, 310 bp, Zea Mays
ggagaatgaaaaaggcagaacatggaatgacagaacatgcagggaggaaatggtggcagaacacgaaattacagactctcttacaaccttaataagtagtaaagattatagcaccagaaataggatatgatgacctgccattaccgctgatcccattcttgtttcttcaataagaaccaacgatcagatcaaatagcatcgcgagcggtttacatcgaaaaccatccacgtgtacttgaacatctaataatacaaattaatgtgtttggtttgatattaaagtaggatgagacggggtgacactgttcac

SEQ ID NO: 41066 - DNA, 442 bp, Zea Mays
ttcggtcagagctacgtcacaggaatagggcacgggagcaggacaaccatcatatagctgaattgtcagctgaagtcagccgcttgcactatgatattttagaacgggatttggccattgattgggtcgtcaactcgcgttaaatctcttggggccgcgaagcaaaagctctagctcgtgtggtagagcttagtgcatccctcgaaagccctcaagtgtactataatactttacatgaagaagtacatatactatatgctcgactgcacccggacatgccttctaacgttactgcaatgggactaggaccctcgggtacagcaaatgaaggatctgatggagagctagacctttttaggccccctccttccatgaaccttgctgacgaacggtctcctgccgcaggaaatggagcaacaaaggatgaagacgactagaatag

SEQ ID NO: 41067 - DNA, 466 bp, Zea Mays
ttggatggaagaatggttttatgtgaaaaacgatttgacagtgagggaggacatcgaggaggttatcatgcgccccatatggtcccgcttcggtctccgaaagccgaaggttgaaattgatgaagccgccgaagcgtgtcagaaggcgtttggtattgtctgtttcttcattggtataagagatttaattcaagagcatatagcattcagagtatggccgcttgcagagagctgggaaatgccgaaggataaaaatcaccaagtctagcgaaggtgaactggtctgactgaaatacacattcaggtatggggataagttcgatgagccaaacgatgactggctgaaatgcatcgaagttacaagtgatgaactgcttggatcatattccaaggcagaagataatgcattatccacagccttcagaagtcggggaaagaagagattgaatagagtttttgatgctat

SEQ ID NO: 41068 - DNA, 294 bp, Zea Mays
tcttcactaaaagcccttctggttaaataagcacttagctcattgaatgtgtgggttgttcaacattggtttcttgtgctgtctaggtgtactttcattttattatcataccaagtcatagcaaataaatgatgattccttcgtcaggttgatcggaaagttggaaaaaaccatctatttaaaaggagcatcatattgatcaaggcatggtgctattatgaaagccgcctactaggagctcatcatggacttatatcaacctatgcactggaagtacttatcctttatgtattc

SEQ ID NO: 41069 - DNA, 640 bp, Zea Mays
cttgcgactagattgttagttaccctggtaggctggtacttgatgttgttaatttttatgttaaacttttgatatgatgcaattctattatttagtatctccttcgggtatgggtttataagtttatggcaaatgcagcatttggatttacggtcaaacttgtgcaatcagagcactgtttgcttttggcatggacatgtgcagcatgtgcatttttctatgtgcattcagctactatagtgatctaactagttttggcatgaatttgtttatctctttaactccagggctccaagcaatattggaagttgattaactcaacatataatggtgcaggtacttgttccacccagtacaaaggcacttaagtggtgctctcagtttagaggatcatcattgtttccccagttttatttatcaagggaactgaggtctgctccatcatgtcaacttgaaatctgtggcattggttccacaatctgctttcatggttcctacctaataaataatgaatttgatttggtatcaaggtgaggtttcaccccctccttcctaccattttctcctccctctataacaaaattaacaaaatcaaatttcttttccttgcagatatatttcttctgattcacacttgata

SEQ ID NO: 41070 - DNA, 387 bp, Zea Mays
cacggaggcagtgcaaacaacggatgagcacgggtgttcccggtgatctagggcagtctagcttaattgaatgggtcgaggagcattagtggcatgcaagagtgccgaaacaagagagcagaggacaagattggacctaaatcgagctagccacggcgaggcccttttcacggtggcggaaaccggatttgggggagatgagcaattcgtggtctctggtgaacaattggaggcaagtgctagtgctttggatgggtaattaccctacagagctcatggcatgctcaatttataggtcccttgagcggtggccagtgaattggaaggagacgcgtagtggccggagagaaggaggggcacgggggcagtgattcgtggcaattgtgg

SEQ ID NO: 41071 - DNA, 407 bp, Zea Mays
gttcggttgcgtggcagtcagcaaaatcattcccctatgttctccttgagttccgtttagggctagactagtttgatttggtcgggcctcgtcggccatatggcacggccgtgggcattccctgccagagggtgctcggctcaccgggagagcggaagaaaggagaaagcactagatccgttgatctcaggatgaacgacccagggtcagatagggtttggaccgtgggatggttgttgtgcggctcagatcaaacagtagtatacctccttcgcgcattaggtcgtgaccgtcgatttcgtgatcaacgatcctcggcgcgtaacggttcattaaagactagattcaatccaggccagtgaatcctgatcgtccgccccacagtgcacgataccccttcggccgtc

SEQ ID NO: 41072 - DNA, 404 bp, Zea Mays
gcgccggttcaccgagctcgcacgaagaccggttgatttagcctcgtgccatgcccctgtgttggtcagtagagttccccttaccatgctaaagccagtccaggccttagcgcgcccgaaaccccatccctgcggccgggattcctcaccggagttacctgacccacctggagcaccttcctccaccgttctccgatcttcggtcccaatctcgcggctggagtcccaccaatgagtttgccggaccttcctagcccatttcagccctcattggtgaccccagatcccccggcgaccacgtgtgccttgtctccagcgactttgccgccgaggagagagtaacgccggtcatcgagctgcaaaaccccatgcacccatcatagtcatcgagctctacccctagg

SEQ ID NO: 41073 - DNA, 557 bp, Zea Mays
cacggtaggcaatggaaagatggctgaattctggaagtctagttggattcaaggccaggcccctaagaacattgcgccatcattgttcaagaagacaaaaaggaagaacatcacagtggccaaagcgctcaataacaacaactggattcgtctttgctcaccgtatacgggggagggagagtttggagagttgatctctctttggcgggccataggtaatatgcacgagcttaacgggctagaagacaacatctcttggagatggacggcagatgggcagtacagtgcttgtagtgcttataaaatccagttcgcatccaatttcagtagtatgaatctaggccccatttggaaggctaaagtggaaccgaagtgcagattttttgcttggactcttctccataagagaattctgacggccgacaaccttcacaaaagaggctggccatgtaatccagtttgctgtctctgcaactcagccccagaaacaatcctccacttgtgcaaggattgcccctttagtagagaggtgtggaacaaagtttggattggggcca

SEQ ID NO: 41074 - DNA, 394 bp, Zea Mays
ttcggttagcgttttatacagccactgcataagggatccacaaactaacctgcaagagttgtaccaactcttcaaaaagtatgcccgatcagaagagctccacaagagaaaagtcgagtctcaacgagaacctaaggagaccccgcaatccagcagaacatggatagggccttcacagcaggactcagcccggcaagactgtgcccagctccaggtacacaatattgcaaaccagcagcaactaggagagaacccccctcgatgtcaagattaccctccataactaggccgcggtggcaacacgaccagaggcagaggcaggggtcggagacctcaacaacagagaagattctattgcctgttccacgacgaagactcgacacatccatccaga

SEQ ID NO: 41075 - DNA, 401 bp, Zea Mays
tacgagaccccccgcacactaccatgaggatgtcagcagaagaccagctaaacggacccgtaggtcgagcggatgggacagtacgccgtgatgggagtacgattatgaatgaccctatggcagcataagaggaaccacactacccgagggccatcggtcgagctccctccagcagaatacaagtcaccattgtaaagtccagcccttgaactataaaagggaaggaccccctcttttctgaacacacgagcgcactagttgtaacacgctctcagcaatactacgatcaacactacattggactagggcacaagcctaaaccagtataaacccaccgtctcaaatccatcaccttggtcccgacgactcaccattcagagtgagtccgtgctagcatctcc

SEQ ID NO: 41076 - DNA, 458 bp, Zea Mays
cagtattcagcacatactttccaaaaatcttaatggcctctgactccacctcccgcacgaaggtggccgcatcccgcccacgcaagtcaacaatgaaggctaggctctgcaccattttatcccctagcattggcatcccgcgaggtctaatttcgcccaacacccacccgtgcgctaacgaccacactccataggcgatgaactcttccaccaaataacggtcgctgctcaatcggaccgtgtagtgaaggacctgctcgtcccgatcccccttcttcaccttaaagtgtggaaaggccacatagcaaggagaacacaaaatgaccgggggcaaggtaggcaacccttcgacattcccgggcgccacataaaaccaaaaatcccaccagttaccccatttattcttggcacaagtaacaatctcaaccactttagccgaagtctttccggtcctcggc

SEQ ID NO: 41077 - DNA, 279 bp, Zea Mays
atagatgagcagcaaggtactccctatattttccgcggggacgcacaagcttctgctgggactcctgaaataaaagaaccacgtgatgaaccatctgaagatagtgaccaggaggagcttgacaggttcatctcagagatagaaactgcagcagagaagcaatgggaggaagaagaggctgcagagaaagaagaatcttcaagaatgcgatattgggagagggaagatgtaggtgaccggagggatttcaatagaagttatgagaactcagattatgag

SEQ ID NO: 41078 - DNA, 423 bp, Zea Mays
atgggcgaacaagcagatggtgttaggagaagctcgaggctggaagcttatgatgacatcaaggtgtcggatatggcaatttccagggccgaagcaaaagatgcattcatccacaaaggtgcctcagctaatccgttctctgttttaaataccgacgaatctactttatgtgatatcgctgcgtctttaaatgtttcatctggaagttgagaaatctaagagccttagtttgattagatctatcgaagaagctaggtctagcctgttgcttcaatcggtaactaggagcaatggccatgaggatgaccatcctcacagtcaggacaaaggtaatgagtttatagataacgggttaagagaaataatgtacaacatgtctgaaaatgataacctgggtatgggggatctaaacactggaaaaac

SEQ ID NO: 41079 - DNA, 286 bp, Zea Mays
ggagacatactccgcaatagagaagcagtgggaaggacgacaagtggccatgtgaacttggagctcacgacatagaattctgaccccgcaccgcaattaagagcctggctctagtggatttcatatcagaatagaccgaacaaaagatcccctaaaaccccaagtcagtggaggtatggaagatgtactttgatgggtcgttgaagttacaaagagcaggggctggtatccttttcatcgcccctggaggagattagctcaaatatgcactccaactattatttcc

SEQ ID NO: 41080 - DNA, 460 bp, Zea Mays
cccaaattggggttctttggtgaacgatttgggacacgagtgggtgcgctgagtgcttgaataccttgcgaagctgagggtacgctcaatttataggattcatgagcagtggtccgtgaatttgagatgtcacggtggcggtcggagagaagggggggcactggcgcaagcaattggtggctttcaccgtggcgagctcaccggcgatcaccgaatatgtgtaacccgagctattgcgacgtggtaagacaccaaggcacgtggcacacgatcattgagtggctaacgccggcgaggatgatcccgaccagctgttgttcaatggggtacagcgggtgcaaaggtgagcgagtccaagctaatccgagcaccaagatttttacccttcaccgttatccatctgcgctgggcacgaatcaccgtggagggcacgaatccgggtgcacagtcgcctgcgatg

SEQ ID NO: 41081 - DNA, 562 bp, Zea Mays
ggtggtggtgggagaatgatggtagtggtaatggggaatgaggaaggggtagacgatggatttgaaggggggctgtggaggtaggatgtgtcgtgactagcaaaggatcggtgttcacctgtaccttggggatgccgccgtagcccggtaggccataggaaatgtcttgcgggaaggccggtgtggatgaagatggacatgcctcgatggccgcaacacgagaggagatggaggacatctgctgggcaaaatcgcagagctgacgttggacttcacctagtgtcgcggcgatggatgccagggatggctggagggcagtggctgtcgtgctatcttcatcatcgtgacctgacatatctgataccatattgtaatggtcccgacttctgagtttgtatgagtgggtagtaaggcgaggccttgaggatcgagggcgagagggagccgtgcgcggttgagacacaatggggcaaggagcaatactcttcttagattgatctttgctaatcctcctaggtacaaactaaggactttatatagtccagtacaggcgcacataaac

SEQ ID NO: 41082 - DNA, 612 bp, Zea Mays
ccgggtttagcttggttctagcgcttgcggacatggaggcagtcaaggtagagggtaccttaatggagttctaggcgcaacggatgccgcccacacgccatgcggatccacgacggcaattcggacatcggcgatgaattaccacgaccctggttgaccgccttgcccgaggagtcgttcaacacctacagcaagagacggcgatcacccagctcggtttggcgctccaattcctgacgatggcagagaatcgcgtgcagtccgccagttgccgccgcaagaattccatcccccctcacgcaatttcgtggtgtatgggcgagatggatgagagtccaagggagagcagagcagggcaagggcgtgaggtgacggtacttatacccgaggagctcgaggggaaacaggcgggcagtcccgggtccatgggccgttgcgcggcggtcggagtttgttagccgagcgtgggatgcggagaggagatagctttatccggtgggaaagcttccgcgcgagactggacgccagcatgcggaaggaggtctcgtcgatgatatcccccacgaacgccccgaagaagaggagggcgccacacccgcgagatccgcatgg

SEQ ID NO: 41083 - DNA, 558 bp, Zea Mays
cttcttcactgcatcctcgaggactctctctgaggcattacatatcttgttggcaagattaagaacactaaaatcatctgacacagttacccactttagtagatggaaatgctccttgacctcagggtccttgtagatgagctgagcgagggtggtcttgcctagtcctggcattccaacaatgggaacgaccatgagatcacgactgttaacatggccattgaccaatatgttaacaattttcttcctctcatcgtctctagacctggcaacaatattttcaggatcaacgataatggaatccatctcacgcaactccttccgtgccgttgttgcctcgggctcaagcttgttgaatctaaaggtgtccatttcttttataaggtccttgaaggtgtcaacaactctgcgaagcctatagcccatcctgatatggaaggcaacacgattgtgggtagggaagagttttacactggtcataacgccaagctcggcgatgtgcccattcttcttggctcgacggcggagcgcctcgtactcgaagtcgtcgaagacctc

SEQ ID NO: 41084 - DNA, 621 bp, Zea Mays
ataccggaatggtccaaccatggagcacgaagaactagcggttgccggtgactgagaaaggggaaaacgtcgcggtgacgaactcgagtgaaattgggagatgaggttaggtctatatggtcgcaaagtgctacgattcaccgtgcacactcaatttggagagaggtggagaaggcagtgcgaattttggtttttcccaagcttgtaggtgaggctgtgagtgcctcgccgtggtccatgctgctattcaaagccacgacggtccggctaatgatcagcggccacggatagcattgttagcgcatgtttaccacgtagaggagaggtacagtgagggaagagcaaggtatggatgacaccgcggcggaagtgaccgagccacggtgaccgccggtgagataactccggccacatatggctgggttcgcggaattgtgccacgtccaaagttatccttctccccgattgattcccccgctgattcatcgaacccatctgattcaatagtgcctagatttttgtttcagatatttcagtgtattggatcttcagtgtttatttgaaccggctctcttcaacccacttattctcttgattcttgctaagaacagggcaaacttc

SEQ ID NO: 41085 - DNA, 594 bp, Zea Mays
ccgacgggcagcatcgctgaccgaggcagcgtaggtggacagtggtgtcagggactcgtgagcagacagagtcctgaatcccctgtcacctgcatccatcaccctgacatggatgcgagtgatgtaatagcaagcccagagaggctcgctcactcgccttgtttcgtacagggggcggacgtaggtgcctagcgcatgcagcacttcttacagcaggttggggaagtgccccgtctcgaacattgacgtgtaatgttcgacaacaggatcgaaccccatgaagttgttctgctgggcgtagtcagcttcctcgtggacgtgttcgtctccaccttcttcgtcgtcgtcatcctcgtcatcgtcgtctccagagtcatcggggtcgtcgcctccgggtgcaggtgcttggaaggctggtgcagacggtgctgacgtcgatgacccagctgcgaaggccagggactctaccaacagagtgggcgtcgacagctgttccttcgagctgtcctccaggttgactacattctccactcggatgggagggagatccgccggaacttcctcgactaccactgggtagaccgggatctgccg

SEQ ID NO: 41086 - DNA, 542 bp, Zea Mays
gggaaatggagtcagcgcagactgtccgcagtgagcggcatcgcggcgggcctccaacatctctgcctcttgctcctccaggtccacagcgcaggtatgcgagggtgcctttgggtcgtccgagagagactggagggcagtgggttgaggattttgaaggagggcatcttccaataccacgtatgccatttcctaaatttgaaggggcggaacctcgtatctggattgatcggtgtgtggattacttcactttgtatcgagtgcctgagtcagtttgggtgatgtcagcatcgttgaacatggaggggaatgctaagaggtggtttcagatttttaaaattcagtatggtccatgttcatgggaggaattttgtgaagctgtgatgctgaagtttgggtcggaggagtattcacaagctatgcagtccttactggagattaggcagattggatctgtggaggagtacaaaaaggtgtttgatgaggcgcgatatgcaacttctgtccataatcatgatttagatgagactttgtatgtggcc

SEQ ID NO: 41087 - DNA, 530 bp, Zea Mays
gggggaggtacctgcacgattcggtggtggccaggcccaggctttcccgaaatgatggcgtcgatgttgctacccacagtacaagcagcgtttgcggagtagacgaactccggcgagatcctccatggcacaggttcgatctccagagccggcgcccgggaccctggtgacggtgtgtccgattcctttggtggctgcttttagttctctctcggcaagggtacgagcggtagatggtgatggctgtatgcctcaagtatttatgcaccagagggggagatcggctggtggtacctggctagcatcttgtgcggcatgcagcgatttggtcgcaaggttgttacgaggatagagatgctacagcagagccccacatgtccacgagccggtgcccgcgagcgtccttccgcccgacatgcatggccctgtacgtgccgatagcaaacggatgcatgcaagagaattcaacgaccaatttgctagcgaactagagatccaacgagatgacctcatacctgatgtcatgctaa

SEQ ID NO: 41088 - DNA, 318 bp, Zea Mays
caggacggtaggatccaaaaacaaggcgtgaggcctcaagtgtgccctgaaactgtggaggtcgaatcagctgcgcaaagatgtggcacaagtagtgagcatatggcaactgtcgacgagcacgaatgccatccaaaacggtgtcctcgatctcacaaataaggaaatccacgacgtcaaactcagagtgagagaccagggcaccaaggagctagagctggatatgtgtggtagcctcccggtatcccatcctcggcagaagagtccgtctgataagctcaaataagtacttggctgctgtagtaaaatctgccggtg

SEQ ID NO: 41089 - DNA, 396 bp, Zea Mays
ttgagaggtcggactcggcggcgaccggccggacgactctgtacagggcggcgccattgcagactgcgccgctccctaagctcagagatagcgtgaaggggctcatgttctactgctgatcttatgatgatttttagtggtggttatgaaggggccggcgttctctttgcccatatatcgcgtgcgttctatattctggtgttgtattatttgggaatcatgtatagtgtctgtggagcggcatgtgcaagactgcgagtctgcgatgctcatgatactttgctagtggcatgcaaaaaattccgatccctaactgttaggtgtactagagtattggtagggacccgtgtgcatgtaggatggggcctcgcattttgcaccgtgtgggtaggcacg

SEQ ID NO: 41090 - DNA, 482 bp, Zea Mays
agagagaggagggcgtgaatagacatgtagagagctgggcacgacgagctcacacacggcggggttcttgactaatttggggaaaatcccaaattgggagatgtgggggacgattggaagtgagggctggttcactgggtgcacaattacttagccgagcaggctggggtaccaatttataatgtccaagggcggtggctcctaattttggcatggcgtgctggcggccagagagaaagacggtcactggtggctcaatcgtggcgttcaccggtgcagcggttctgagatggtaagcctaggcgtgccacggttactactgcacagtaaagagccacgacgtggcataattgaggtcgccgaagttccacgacgacaccgatggtccggccacgttgcacgactataggcgcggttgataagcttcaccctgcgaccaaatccgctccccctcaatcttttcaccccccggtactatcctg

SEQ ID NO: 41091 - DNA, 659 bp, Zea Mays
atgaatcgtgtttgaaatttaaaatatgaattgaaagtttgaaaaagaaatcataaaaagaaaaacagaaaagagcaaaccttaccctgggccgaaatttcccttggcccatttctgtcttccttccctggccggcctagttattttatcgccaggcgcgcttctgcgaccactgaatggtgggacccgcaggtcgggcgcttggtgtgtgcgcatgggacaatgacatatggggcccacttgtctggtgcttcccccagcttcggtctgttgcaaacaaccccgacatgttcgtccccaaatcgcgggaatccctccccggtcgggcttggcggtagtatataaatcctgaacccgtgccagactcgcctcatccgcgctgcctagaaccggccaccgtagcttccgccaccgggaacctgccatatgattctcgggggcaagtagaagaagtcacggcttagacgccgccatgaccgtgcacgggagagagcgggagagagggattgctcgcagtttaggagactgccgttggagatcttcggtcgtggcgaaaccatctgcgtggggcgaggggtcctcggcgacgatccttcgtgaagcagcacctgcgcccagcctctacctcgtctcggcggggtgagttcttttcccgctat

SEQ ID NO: 41092 - DNA, 388 bp, Zea Mays
ggagtgtggaggcatgtcgtaaagtgccaaatcatgtgaaggacctaatgtctcaaaaagtaacggatgggagaattaggagggcacgtggtaagaagcttcgtttgtttgttgaaaaggaggttagtgcaataagacatggttatcaaagtgcaagaattccttttgatgaagaagcacagattgatatggcaatgagaaattcattgagggattctttttccacattggaacatgatagttgttcaccttttgataagtcaactggtagtgcaagtggagctgcaagttgttctacagggaagcaaagtaggctgtcaaggtactacaagaatacacaagatacctctagaggtccttttgacattgacttggcacgcagtaggac

SEQ ID NO: 41093 - DNA, 367 bp, Zea Mays
cgacccctcgggatagtgggggtggacccggggtcgtacttgaggaggtgcagtcatgttgataacaacccctcggcgcgccctcagtctgtcatttgtatgtctggccgtgacctaggggactcgtcttgtctcagttagcgtggacttgtagcactagacttgggtctccgtctcgcggacttgctcggtggggaccttggtcggtcgctccgcctcgtagacttgctcggcggggactttggtcgaccgctctgcctcgtagacttgctcggcagggacttggtcgttcgctacgcctggcggacttgctcgaaagggaccttggtcggtcctccgtctcatggacttgctcgatggggacttg

SEQ ID NO: 41094 - DNA, 486 bp, Zea Mays
tccttcgtctcatccggatttgtacggtacggtgcgcggttcggaagctgtgcgccggggatgaggtcgatctggtgctcaatgccacgaagcggtgggagacccggtggtaagtctttgggaaagacatcagcgtactcctgcaaaaggttagcaaccatagggggaatagccaaagatggtgcatcatcaagtgaaatgaggacactagagcatacaagtgcatagcatggcaaatgagcaccgtgtagatcatcaaaatcagcatgtgtagcaagtaaaacaggagccttcaacttgatttcagaagtaacagagggcgatggatcaagttgtttagcagttatagcagctcgggcaagatcatctttaacaatttgttcaggtgtcattggatgtataattattttctgacccttaaaatgaaagaataatgattcgaacgaccatgatgcaagctatcagtatcatattgccaaggtcgac

SEQ ID NO: 41095 - DNA, 436 bp, Zea Mays
gggagggtgcgggaaacccgatggtggggactaaactgaggtgggggcactggacggtagaggtccacagtgaggcggctcagtggtggcactaggaactccgatgagcaattacacgtggcagagagcgagggatagaaccggtgggaaggggaggttccttacctcagggcaaacctcaggacccctcggcgatggcaacggcacagcggtggtctggaatgatggtagtggctccggcctacacaggggagagggtgagcgagggcacgatgaagagagagggaagaggggaagacaaggcgggtttgttggattatggggaggctacgtgtagcaccccggtttttggctccagatgttagaaaccctaactccttaacccccttaagccctagcctcataagcatttctactactcatatgcataaaccag

SEQ ID NO: 41096 - DNA, 272 bp, Zea Mays
aatttgtaaaaagcataactcctaaacgatcagacttatgcctgtcaaatttttgtacaagcaagataataatgttatctacaactcttctatattacttttctacagaaaacatgatttggttcatcaaacaaacagcacaactaaaaatagtgcgtgcagtccaaaacaacaatcaataaatttcagctcatatacaattcaagaatcgccgcgttcgagatacttgaattactctaatgctttactatttgttcgagttaagacaatca

SEQ ID NO: 41097 - DNA, 443 bp, Zea Mays
aggatgcatctcttcgacagtttgacactcagggtacagcagctgatgatgatgatgatgattttggggttcctcctccgccttcgcctcctatgcctccacgctcacatgatcatgaggctgggagttctagtgctgcccctgctcctcctcaggctatggaccctgctcttgtttcgattctggctcacctggcagccgagcaggcccggttatccgagaggatgctctcgatgtttcagaacatgcaggacagacaggatgcacttcagcagcagctacttcaggatcgggctgagaatagggcattcatggctcttatgcttcagcattctggtatctcagtacctccggttcagtctgctccacctcctccgcttcacgctccagtggtgccatcgattttgtctggaccccctgttggtacctctccgctccggccg

SEQ ID NO: 41098 - DNA, 679 bp, Zea Mays
caccggcagattttactacagcagccaagtacttatttgagcttatcagacggactcttctgccgaggatgggatacagggaggctaccacacatattcagctctggctccttggtgccctggtctctcactctgagtttgacgtcgtggatttcctcatttgtgagatcgaggacactgtattggatggtctgcatgctcgacgccagctaccgtatgctcactacttgtgccacatttttgcgcagctgattcagcctcctcagtttcagggcacacttgaggcctcacgccttgtctttggatcctaccgtcctacgcctgaggctcctgtgccagcttctgctcctgtttttgactctcagaccgaggatgccgctcttcgtcagttcgacactcaggatacagcagttgatgatgatgatgatgattttggggttcctcctccgcctccgcctcctatgcctccacgatcccatgatcatgaggctgggagttatagtgctgcccctgctgcccctccggctattgaccccgctcttgcttcgattctccagtctctcactcagcagcaagctcacctggcagccgagcagacccggttatccgagaggatgctctcgatgtttcagaccatacaggacaggcaggattcgcttcagcagcagctactccagga

SEQ ID NO: 41099 - DNA, 449 bp, Zea Mays
cgaccacttaagtttggcggcttgggtattcacaacttggaaatccttggttgggctcttaatgtgagatggctctggctcagaaaaacacaggtagagagaccatggactgagttcgacataaaagttcatcccaatgctgaagttctcttccaggcctcggttcactcttctgtgggggatggtgccacaaccctcttttggatggatagatggattcaaggacagtctattgcagttcttgccccttacctgttcagccgtattccaaggagggtcaggacaggccgtacggtgcaggaggctcttgctgataatagttggattcaggatatctctgggggtctgactgctgttgtcatctgggagttccttctagtttgggatctgattcaagatgttcatttacagacaggagttcctgatgtccacatttgggtgccttgcgc

SEQ ID NO: 41100 - DNA, 386 bp, Zea Mays
ctcgctatgcacctaacgatgtcagcacagaagccaagaagatggcccgtttcttgaaagggctaaaaccaaaactcaagactatcctcgccagctaagatttcctcagcttctcgcacctctcaaacaaggccatacaagtggaaagggctagagaagaagaaaagggtcacctcaagaggaagtttcaagtcctctgagctcagtagtaggacaggcaccagagagttcgatcttttgggtttcctcccaaaggaccaagtttcaacaaaccagcagggtctgctccatcacatttcagtcagcagggtcaaagttccctccaggcccactcagttgcaagcaaccaacctccagccaatgcctgttggcactgcggagacccc

SEQ ID NO: 41101 - DNA, 573 bp, Zea Mays
ccttgggtgggtataggacttatacgtttcctatatatgcaggtcatgatatgtagaaatgtgaaattctcatgcacagttcttactcgtgcatatctgcaataatggatgatagtcgtgattggatgtgtcgtagtttcagaaaccgagggacaatagaatttgtgtttgagcacggactcactctaaatggtgaattgatgatacttaagcaggggtttgagacagagagttatactagtttagtcttgcgccctagtccagtgtagtattaatcgtagtattgcttgagaactatgttacaactggtgtgtgtgtgtgtgaagatggacgggatcccacccttttatagctcaagggtaggaacttatagtggggacttgtattctactaagtggaatgttgcccttgggtggcgtagtccttctaacgtcattcgtagagtcgtgcgcagatgtactctcggtatggtgctccgcttcatccgcctagtatacgagttcatgtagcaagtctaatgctgtcatagtggctcttggcgagtcccacaggtagaattatggtgtgcttcga

SEQ ID NO: 41102 - DNA, 415 bp, Zea Mays
ggaagaacttactcgtaccagtttagtggtgtctgtgccctcctggacttcaacaaacaacattctagcaatgatggcgacacccgacagcctgtgacatgagggagagaacctaagtagtgaatatggaggagatgtgctcgagcgatggtggagaaggaagttgggccacaaagcttacctatacgaaaaaagtgagtgatggcaatgcattctggccacaactcgatctagggatgaatgtggccatcgacagatgggatctcgaggcaatggaggcaccacggtagccaccgagtgtggcagcgacacgggaggggaacgaaaggcgctgaaaccctagcagtgcaaagaaaatgaagatgtcgaaggggcccaggagtgaagtgcctgacaagctgccccacttcccaag

SEQ ID NO: 41103 - DNA, 586 bp, Zea Mays
caataattcatgaaattccctatatgccatcgtctgtgttggcctgtagggatttcagtgattttgctgtggtacagggataattgcatcgaatttgtgtgtaatccctctgctcaaatttattgacgcggttctttttctatgtaaaacggaggaataaaactcttcatggtcttgatggagcaactttgacaactatgtcttgccttgatgtattcgtagtggctacaagtgctgacaatttttgcaagggccaatgggtggtatccagttactgacgacagggcttgtttagttgattccttgtgagttatccacaggtttgatgcagaaatctgatgtggcccctctgcttagatgtcacgatgtgatccctttgctttagatgtcatggaaaagttgaacctcaagtcacgaggtagaacaacaggacttgatgtgtcattattgggttcctaacaagctgactgtttagtgaggcgcacctcctgtcaggtgggtttccgtacatttctttctgttgggctgtccattgaaagattcctccccatgaaaacgtactgtgtgtggcccgattcgtccagcc

SEQ ID NO: 41104 - DNA, 531 bp, Zea Mays
ctgtgggggccatgcggtatggtctctttgcgatgggcgcagtgccaggaatgagatctatatagaactccactcctctttctggtggcattccaggcaactcttccggaaatacatccacgaactcctctattacagacatgttttctgctgccaaattaaacatcattggatcgttggcgggcggttgggcctggcaggaaactgcttttccttggtggtcggtgagaaggacggtcttacttgcgcagcttatgatacccttgtgcttagttagccaatacattcctaggatcacatcaatcccttgggatggcaagacggtcaagtctgccaggaacactaccccacttaagagaattctgacttgggagcacctgagttggcataggaggtctgaccccagggttcgggtgaccaaagggatagctaggggtgtagaggggatgccatgcttttccacaaacttagtggctataaatgaatgggatgctcctgaatcaaaaagcacagtagcgggagtaaattcaa

SEQ ID NO: 41105 - DNA, 326 bp, Zea Mays
tgttgacccacggaatgtcagctctattatagaatttgtgaaggcatttcacaagaagggctttgttttgtaaatcaagatttatggcacctagcccccctgagcttttggtttgcagactgttttccaagcaacttgaggtggttttttgcatttatatctgatcctctccaaagacagtgccatatgaatttatcaatctgcttaatcaccgtttttgggagcttgagggtgcacatgtaataagttgggagagaggaaaatgccgcattaaccatttgcagtatgccagcctaagataaaaagacagaagttgacgcaagtct

SEQ ID NO: 41106 - DNA, 558 bp, Zea Mays
cctcagagggcttgaacggacctgagatgcactggccacggcgagggctataccatggcggcagagagcaggtttgggggaaatgagaaattagtgagctctagtggatgattcaaggcacggtttgcttcactggttgcacaattacatagcggagcaggtggggttggtaatttatagcaggcttgagcggtgaccggtgaatttggattgagacacagcggtcgaagatgacaaaggttactggcgctcgggatcggtggcatttaccgtggcaagctccccggcgatcaccggataggcttaacatgatcgactgcgacgtggtaagatgcccgggcacgtggcgcaaggccgcgaggtggctatctctggcgaacccattcgaagcaaacgtgactagctcgggtacggtggttggagtaaattagtggtcggagcatatccatgacgtgatatttacttaccccaagtgctatccaactaatccgagcatgaatcgccaacggcgagcacgaatctgagcgcacagctcgtcggcagtgatgggatctgaac

SEQ ID NO: 41107 - DNA, 396 bp, Zea Mays
ttggggcactgttttgccctgtcgccgtacccacttgcaccgacgacgtggctgcgcgaccgtcgttgtcgtgccactgtcatctcaccactcatcgcaagccgtgaagactcggcagtgaccgccgtagaccgtaaaccagtgagcgccacattagcaactatggtgactcttccccctttctcaccatgagcgcttccccatccaaattcaccctcctcgtggtcgtcctctataaattgatgcctcggcctgttccgcctactcgttacgaacccagtgaaccactcctcactctcgatcgtccaccgtagcgccttaatttgggttttcccccaaatcggttctctgcactgccgcgagcaccccctccatcgacccaccatcctgtccctc

SEQ ID NO: 41108 - DNA, 542 bp, Zea Mays
tataattggctgaaccatgctttagctaaagtctatttaacaaagggagcatacataatacaaaccaccaatttcctgcaaccatatccagaaaaaaacactttaaagttcaaggttaactgtcttaagcaaggatttcatctgatacatgtgttgcattattcacccttttagtgctctttaacatgtgtgcacatgacttaggagttttagctaatttatgttcagctgcatttattgtcacacattttttgtggaaaacttgaacctagacaaaatctgcatcgctgcttaattagttgatttattccctcaggtttctgttcatttcctctgaaatatgttttgggatggacctcggccagaagtgctagcaacaaaagagacaaacaagcaacccttttttgactttggaatttcatgaattaggttcatgaatgaacacgccatgaaatgcatattttccattatccacactgtcatgttcattcgcttgtttagatagaaaggtctacatgttcattcaactggtaatcaacagt

SEQ ID NO: 41109 - DNA, 656 bp, Zea Mays
cggcagggtgaacggtgtaaggcgttttatgagcttctctcaagatatccatcttcacctctgatttctgaggcacacaaagacggcccctgaaacgaaccaaatcattctcatcaatggtgaactcccggggtttaccatcgccaaccctctttcgagcttcctgcaataaacgatcctgctgctgagccgcacacactctctccatgagggaggattgaataagcatccgagtctcttcgctagtggtgccgacatagcacaaagcgatccctaaacggtcaagatctgcgatcaaaggcaaggccacctttggaaccctggacctgctaagggcatcagccaccacatttgccttccccgggtgataatgaatagacaaatcataatctttaatcaatttgagccaccgacgctgcctcaaattcagctccttctgagtgaaaatatacttgagacttttatgatcggtgtaaatgtcacaagactcgccataaagataatgcctccacaactttagagcaaagaccaccgcggccaattcaagatcatgagttggataattctcctcatgtttcctcaactgccttgagccataagcaatcactctgccttcctgcatcaacacacagccaagaccaattcaagaagcatcc

SEQ ID NO: 41110 - DNA, 378 bp, Zea Mays
ctggaggtgacccggaaggagaagaggctggccaagaaggaggtgcacttggaccagagggaggaggtcatctcagagctctaggcgaagcagaatgcctacagcaagatgatggaggagcggcgggaccagcaggccacagctatggagaacttgcggagggtgcagcaggggcttgatgacagggccagcagccttgccttggccgaagagaacctcaaggagaaggatacctccctggataagcgagcggcggatctcgcctggcgggagaaggacctcgccttcagggaggaaatgtttgagaggcggaataagatgttggccaatcatgagctcaaggcggaggagaaggagcggacgctagaggagaaggag

SEQ ID NO: 41111 - DNA, 464 bp, Zea Mays
cttgggacatgccttattgaggttggtgtagtcgatgcacatccgaagcttcctattagccttggtaacgatgactggattggccagccatactgggtgatggacctcttcgatgaagccagcacgtagtagcttccggacctcctcacggatgaaatcctgccgctcaatggactgtctccgaggcttctaactcaccggtttggcatcagggtggatcttcagatggtgcttgatcacctccctggggatcctaggcatctgcgacggttcccatgtgaatacgtcgacatttgcctggaggaaggcgacgagcgcgatttcctatttctcctctagattgcccgtgatacgagtggtctgggaggaatcccgctgagccagatggtcttgatggggacgcactctgctccagatggttgcaccttaggcaccttagcaggcgtcttggtacaggaagtcga

SEQ ID NO: 41112 - DNA, 442 bp, Zea Mays
cgtttgccacctgcaatgctggtaagaacgttgtaagagcggggttagacgcttcataatttgtattccaccacctccaccaccaccctgagagatagttgtagggttcacattgtttgttgcctttttgtctctgttttgtgctaacaatgacaggaccaaagaatcaaatggacaaggacaaggggcctaagcttaacgacgatgagtgtgtctctcagatggaattgaaggagatgatgcgcgcgatgactgaaacttttaaaaaataccaggactctgcggcgacatcctatgagcatcttgatcgacaagttgatgaacttgttacacgcatggacgtactggaggctcgtcccccaccaccaactccagccccagctcactctcctatggacgacgacgacgatgacgacgatgtgtatgcaccgctgcgacaacg

SEQ ID NO: 41113 - DNA, 432 bp, Zea Mays
ccggctccagcacgaaaaaaaggggcgcgacacaacagcggtggtcacggccggggtaccgctccctggccatccctctagaattcatggacaggtagcatcccgatgtggcccggtccgtcctccggcagagagcagcctcgacagcaactccagcaccatcgtcagccgtcccacgctatggttgcagcctcacctggcatgttcagtccaccagacatcctcggttctgctcctacgccgccccaggcacctgccttcagcgtggtgcctaccaccagctggtcgcccctggtccggcagttgggaatagcaatctcttgctaattcctttagcacgatgaccctacaacccctggcttcggtcaccgactggggtgcatactccggcacttccatccacactacgccatacgccgatagcatctcccg

SEQ ID NO: 41114 - DNA, 459 bp, Zea Mays
gttgggaggaggctgatgaggagcaaagaggtggtgcgccaggtgagaggaaaagtgttcttccccagactgatccgggggaggagcactgccagaaggatcctggggcggagggtgagaggacgattggcccggatccccgtgatacggaggcgggacaaactgctcacgttcatcaaaataagcttcttcttcttcgtcgtcgtctgctgtcataaaaggcaccccgtatgcctgctggtgccactcgttgaactccgggggaggaggatggagaggcacgtcaggtgagcggggggcgaagggagtacccagagaggaagcttgacgacgaaggttgtcatcagtctcccgctgacgtcttgccacctcatggacatccgcagcaatgttccggcacatggagaaaaatgccgcaaacccatgggccaagcgggcacccatccctcggccacgacc

SEQ ID NO: 41115 - DNA, 339 bp, Zea Mays
cttggtcttaccctgtgctgcaccccggaccaccacatcctcctgttcactattcttccctgtcagcacagtttcctccctcgtatcccccaccaacttatcccctgagtcgaaaacctgctgcacaactgcagggagaacacacctgaaacagaaggtgtctgcttcgaaaacgcctggttaatcaaggccacggcctgagccagagcctcagccgacggcggcactgctgcagaagaagaggccgcctccgcccttgaaaaattcacctgagaacctgcacgctgcccacaccttggttcctgacctccaaatcgattgaacacaccagcccctctc

SEQ ID NO: 41116 - DNA, 299 bp, Zea Mays
caaaaataaggactcccgtgtcaagtgcaggtgggggcccagggtcgggacctagccctacggcatgtaccaaaccaagaagggctccgtaactctcccccagctgggaaggacccttcaaggtaacgggaatacactgacccaggggcagccatctagctatgaccggaagagtaccttaccccgatgccgaaacatctctgtaagttctatccataaagcaagtctgaggggtcgaatctgtcttttgtaactaggtaacgcatacgtgtacgacaaaccggtggggtctgtccccg

SEQ ID NO: 41117 - DNA, 362 bp, Zea Mays
ggctacattgcaattgcaaactcacccctgccccaccccattgttgccttgcggaggaaagataccgagaaagaaagatacagttagggattggagagagatttgtgtcgtctctctcgcttgcacagaagccaagcccacaaggaagccaaagtgtgggggtctctctcgcttgcacagtttcttcaacatttatgggcagaaagaacacgagcctgttctctagggaaaagattaagtgaactggcacataatgtattgatattggagagaaattgaaatgtgcgaaaataatgtcaagctgaaccatattgtaacaatttgtaggccagcaacaatgtttggaattatatgagtcagat

SEQ ID NO: 41118 - DNA, 311 bp, Zea Mays
tacaaattggagaaatgccctttgacaacatatagggtcatatgagtgtcccctttgtttcaaaaattcaaagtacaccatgttttttcaagtacacatgatgctgtacctcatatgatgctttagttatgagcgtccccgtatgatgctttaaattccttagaaaaaaagtttcatctacgattctatgtatgatatcttccttggccatttctgcatatgtacagaacatagatacattttattatgtttcagcctctttttatgctttggaacttgtctataaggaacgaacatgcaatgtgactcgc

SEQ ID NO: 41119 - DNA, 957 bp, Zea Mays
ctcctgaccctcaagaccgcgctctaaggtcgatgaggcgcgggacgctgcccgggatgaccccaacccgacatcgggcacatcagcacaaacatccatcgcgccaccatctgccggttctgacaacagatcttctgaaaccatgtcttcaagagtttgatcaaagttcgccagagataattcttgcagaccaatgagggcagacaaagcaggagaaggaacaccactactttccccactagctatgtaacgccggttgttcttccgaatcagagggatttcatcctcttcttcatcatcttcatcaacaacacggacagtacacccaatggggtcaacttcaacaggatcacacccattgggatcagcagcggtcagatcacgaccatttgtttcagtttcagtaaaggcaggcactggcattcctcagcagcaggaacagaaggaccgacatcctgatccaagctagacactcgacgaagacgtctcatcttctttttctgcccctcagtaggagaagtgggctgattggctcggcgagggcgtttcgagtgaatactgtcagacctctgattatccaaagcgtcgctagcttctgggagaggcgctaccaccggtgtttcagcaggggccgcatcagaggaatcttcagctaacatatccagcatggcacttatctctgcatcactgggattcaaaggcacctcaaaatgaacctgcctctcgtcgtcaggaatttcttccagtgaggcaaccaaagcattaacttcttcgggagagggtcgcactctaaggcccaaaccgctatcaccggcaggaggattcgacacaaaactggtaaaggccttggaaggaggcagattccaggccgagtacgcaacaggaacaccgatgttcgacaccttgtctctgagtatcatttcgagccggctcaccaagtccacagcaggaattctt

SEQ ID NO: 41120 - DNA, 351 bp, Zea Mays
gcaaagttggagctggtatattaggctacaactttgctacagaacaatggtcttgttgccatgtaaaatcaggaggaaatttgccccaaacttgggctgtcaggctgactgaagaacaatcccatggtacagtaacagataggatcaggttctgattccctcgctgccgacgagccacgcgcggattcgtgctatcgccgtggtgattcacgctcggatcagttggataacaccggggatccgtaaatatcacgctgtggatacgctccggccactattttactccggccaccgtacccgagtagaccacggttgtgttggatgggttcgccggagctagccactgcgcgg

SEQ ID NO: 41121 - DNA, 284 bp, Zea Mays
caaggttggttcaatggagatgtaagacaaggtaccagaaggaatcacttcgttcctcatcttactcaactcatcacacagggcattgatgcgagaatccatcaccatacaattgcattgtgactttctacttaaggcatctgcaaccacattggcattccccgggtggtagtgtacttccaaatcgtagtccttgatcagttctagccatcttctctgcctcatgttgagatcagcctgagtaaagatttacttgaggctcttgtgatatgtatagatgttgc

SEQ ID NO: 41122 - DNA, 347 bp, Zea Mays
tcccaatacagtcacttcttagctttggcacatcccttcacagctgttaaggtggccagattattcttagaccaaggctacagattacatggtatgccattcaccatagtatctgatagggacaggatcttcaccagtcagttttggcagcaactgttttctctcactggcaccaaactcagtatgagttctgcgtatcacccacaaaccgatgggcagacagagagggttaatccgtgcattgagacatatttgcgttgtttcgttcacacatgcccgggcaaatggtttcagtggctcccagttgctgaattttggtataacaccaacattcactcttccttggg

SEQ ID NO: 41123 - DNA, 362 bp, Zea Mays
gtcgccacccccgtgggttttcatgctgttattgccggtgctggggttcgtggctgggccattgatgcttggtggcgccaggtgttcagatgcttcaaggggggtggtgtgctaggttagtgaagcgagttcgctttgatttgtgtggactggatggaatggtcaggttgccatttgtattgattttgggggcgatatgactgattggattcattttagtcagttttacttcccatttttgttgttgatgctggtatagatccctcttattatgtctaatatcaatgttttgtgtagatttgttgttgtgggtgtatggtttactacatgcagattggtgtggcaatgttgatgcacctgta

SEQ ID NO: 41124 - DNA, 302 bp, Zea Mays
gccgtgaattgctcgccgacgtctggctcacattggggtcgcatcgcgccgtggttggtggtctctgcgccctcaatcgtggtaagaactcttcgccccagttcgtttttgtctccgcatggaatagagcatacccgatgagagcttcgagcgcggggagatgggattcgggtgcgtggcaatggcgccgccgtcgtccacaaggaggcgagggggtgactgacgtccgttcatcgggccgtggacgatcaggattagaactagaataacattttggtcaaaaacgaatccgtgccgtagat

SEQ ID NO: 41125 - DNA, 533 bp, Zea Mays
cggcctaccgatggacgacgcgggcgacgtaggaacaggagaccggacatgacgcgaaacccgccgtgtatgcgtgcgtgcgtagccatgccttcatcactcatcagtgagtgctgcgtgtgggagtggaagatacggatacgatcactgttcatctcgtcgtcagagtccctgctgcacacactggtgcacgtgcacccctagcttgttgttgccaaactggattagctctcctgtgacggcaaggaatttccttgccggcataataagctccaagacacggcataatggaacggaacccgttgcaaccgtgtcgtgtcgactagggagtagagagggagtaatgtacctgctgaacggaacccattgcgtccggtcgcttgctgatgtcattcctcttccggctgaaaatccggacctcccaccgtttggcactgttcgtggaaggcatgggcagctacgcgattgtagggaagaaaggtatctgtccaacttgacatctaacctaatcggctaatcaacacctcccccta

SEQ ID NO: 41126 - DNA, 484 bp, Zea Mays
caacattcttgcgcttggaggaccaggaaacaagattgtcacaaataaagattgcataactggaagtggatcgtcgcgtgttaggacaaccagcccaatcaacatcagtgtagatggtgaggtgaccacagagcgccgaagaagcaagccgtcctcagaagtgccacaaaggtatcggagaatacgtttgagagctgtgaagtggggctctcgcgggtcatgcatgtggagacatatctgttgaactgcataagcaatgttaagacgagtgaaggtgagatattgaagagctccagctaaaccgcaaaaatgagttgcgttctgaacaggaggtctgacatcagctgaaaattttgcctgaagatcaaccggagtggaaactgatttgcaattttgtagactagcccgctcaatgatgtcaacaaggtaatgccgttgatgcaagaattggccactatctctgcgttccattgtaatacccaga

SEQ ID NO: 41127 - DNA, 503 bp, Zea Mays
cctaagcccttcctgaccaccatgttcttcgattccctgaccactaggcaaacatccttgaattgaagaacctttgaaacaaacagagaaggttcagtatagtaatgtcttttaaaataatgccttttgttagtttgctatagtataatgataggatttgaacctatatgttgcataactcttttgcgatagatagaaacatatatatagctaaactgtagttgcgcatctagatagattagaggctttagcacatacgctagaatgaaatgcttcttacctacgacgccacctgcatctgtgtgcattatacgaagctatatattcttgttgtgccttcatgtccatactagtaccctatggatagcaatgaagacaaaatccctgtggtagagtgcctagaaccaaagttatgtggagcaatgaagtgcattgttggcacacatgaattccctgtgcttcccaaccctatgttataagacttgttcttatctcccttcttt

SEQ ID NO: 41128 - DNA, 471 bp, Zea Mays
tacatacacgctatagctgatggcatgcttgtcggtttcgattttagaattgctggttgacacgcgcctggctctgctggaatacgctttcaacctgaattagcctcggggcctgtttgatcggttgttcctcggctctcttcttcttcttcttctttttcctccggttatgtgatcggctggagtagtttttcgccgtagccgctgcaagtgggtggctgtacgtgggcaccagttattgccgtaatgtcttgcaagacgaccacagcagcagacgtgcaccagacaccagtgcgccttttattttaccatcgttgcatggactacgcgacagaaatgcgcagagcagagagctcggatggaagcagatgctcgatttactacaacgcagcgacgaagcaggaaggcctctctcgcccacgccgcctcatgagagatcgtctagagaacaacatggacgcgacgcaggcc

SEQ ID NO: 41129 - DNA, 809 bp, Zea Mays
gccgggatggaatcaatggtggctctggtggattggttatagacgcgatgaaatcatgcagctgagtattgtcggtcgagcggttatctgtggtcctcagtgcgggtgatactcttaaggcttcgtggccatcgttatcgactgggttccctctgcgagtcatggataaataaggcatcccttaggccggcctgttcagcaccagacaaatttgactctacaacttgattaccatttaataactcagggcccaacaggttagttggatggatagctaggacattggctggtttagaagcattcaggttcacactaggagggcaagccgacacactgtccaaacttctgtgaattatggcgaaaacattagcgagatcaacagtattgattaccttgcaatgggtggcagtaagaccgtgcgtggctttctggttgtcaatgatgttggctccagacttgaagacatcgccttcaggcatcccctgaatgtcctccggaggccaaacaccagagacaatgggatctgcaaaagaaacagttctgacctttgcctttagcacccatccagttgacggtgccatccccaggccatgacgacggaatggtgttgattgcctgtgcctgtcgttgaagttatagcaatcatctagaccccccccccccgacatcgcgatgaacgcgcccaaccagaaaggctgcggtgtctacggctgccgtggcgcctgtcacactgaaaatccccatcatcatcatggcccccgtcacggcgcaaagtctctctgcctctgagaacttctaggcgctctctt

SEQ ID NO: 41130 - DNA, 317 bp, Zea Mays
atagttgaacataacagagattggggaactcaactgggcgaagatgcaagaggatgtggtggggaggtgtccgcgctttggatttatttatagcagtgcatgtggctcgacaacgatgtggtgtgggcaccgaggatgtaggtcgttgttgatggaaggttgcggcgacgatggaatgagattcagccgtttgctttgatggagtgagtgctctgatggtaggtcacgatggcacgggcgcagaggatggaaggggattgcgagatccagtagcaagatagggggagaatacctgtttggcagaggcatgaatggcg

SEQ ID NO: 41131 - DNA, 660 bp, Zea Mays
ccgccttcaaatcggagtttgggcatagcaatcgaagtttgggtggccgtggccatggcctccgccgtgggtctcgggcggcggcaccgggctcacggtcgttgggggatgcttagcgcacgaccgtgggatcctcgatggagggtcttgattagatcggtgtatgggttagatgtgggggttggtgtgtcatcgtggcccttggattccgtgatggacaattgcgatttgatcacatcgtaccaattcgattgtgtgatcgggaccatcgatctatgtgtgcacgatgaagattagatcgtgccgtgggaaatgatggaccatcggatctggatcaaatgggtccggtgggatcatggggatttcagatctggggcgctgatctcagaatcaagggtcgtgggcgcgtatcggtacattacatgacttgatctaatgttggccatcagatcttaatcctacgacggtcagtgtgtaccggtttggactatataacaagctaattgcggtcgttaacaatagatccatcggctgatctcatcttgtatcccttcggtcgatcccgttttgcagtttagccctcgaggtttcttgaaaccaacccgccatcccagcctgtataaagatcagtgccactaagtcctaaaatttgtagtttag

SEQ ID NO: 41132 - DNA, 405 bp, Zea Mays
caatcgtaaatgaactgagtatctttgaaacctcttttttattgatgatatatttccactttacagagtacatcgtcgtcccagcagttttgaattacagctagggataaaactttctgaggtgttctatgtttcaggagttcccaacttctgtgccatccatctgagtgagacgatacgatccgggctgagtgacttctgctaccatgaagggtccttcccataagggtgataacttgtgtcgaccctcccccgttagaattcggcgaaggacgagatctcctactgagaagaatcgttgtcacacagccttgtcgtgatagcgccttagagtctgctggtaccgtgctgattggattactgcgttaagtcgttcttcttcgagtacatcaatgtcctccagcc

SEQ ID NO: 41133 - DNA, 668 bp, Zea Mays
gaggcttctccgcgtgtgatggatgctgaagtttttcctggtccgagtgctgggcgcaggcggcgaagggcggtggcgaagcgtagagtgagtgaggtggagggtgggtgtcttcgtgtggatagggctggcaagcgggaattgttgtccttgccagttggggcgagtgtaggtgagggggagttgcgaagtctctttgagggtgaggagctgaggataatgatgtttaactatagggagatgggtatcatcctgaaggttgaaccaatgtaaggtgtgatgccctcgctgtatgtgtgtaactttaattggtatgatgatttgtatgatgaggctgtgtgcgtttgctgatctggcggtgcccgtgggggacttgtgcacttgatctagcgtgtttattatgtcggtccggctgcacctgcttttgagggggacttcgattttgagcacccttgttgtgctaatccttgttgcgcactttttgtgctaatccggctgcacccttaggcgacttttgcacggatagtcttttggggtagacttcgattttgcgcacttgtgctaatctggctacacccttaggcgacttttgcacggatagtcttttggggtagacttcgattttgcgcacttgtgctaatccggctgcacccttaggcgacttttgc

SEQ ID NO: 41134 - DNA, 352 bp, Zea Mays
catcaactcctgatttcgaatcgatatgcgttgcaaagtccgagtacgaggagatgggatcagtggtgtccaccgcaccccttggcgaaatcatctgtaatcgggatttgtccggacgcatcgcgaaatggtctctcaagctcaacgggcttgacatcagctacatccctagaactgcgatcaagtccgaggctattgccgactttgtcgcggaatggacagaggcccaggagccacctccgatcgaggacccagagtactggaccgtgtactggagctagaggaagtggaggacaagcaaaaactcaccagatcactcaaccttgcatggttgaaaggcatgagtccactc

SEQ ID NO: 41135 - DNA, 900 bp, Zea Mays
atttaaaccgactcgataccacccagtccacatacccagtccacatggattaaaggtgaaacgaacaagccacaaacggaatggtggacatatattgtacatacataaagaaaaaaacaaatcaagcatcgcttgattccaaagcccgcacactgcaacaccctccttggtgccaaaaatagaagtataggactacagtagtagaatcagcttaaactgtccatttgtgtgccatgtggtcggacatgcctctcaaaacatacaggagttgaaatccgcaaaaccacaaagccacggcaaccatccccaaacaattcttcacaattccacaaaacccaatgcgacatccgtcaaacctcagctcgacttcagcgcgccatgtagcagctacaacagaatgggcaagcacagcaccaaggccaaaacagcaaggggaaaaggcacgagcgtgcaagtcaaagaactagactaacaagtaagggtcctcgctcccagaatgaatcttctgttcaccgaagtatgccactgtcgactgatcccctcagctccagaaaacagggaatgagaagcataatagtcccggcttgacctctatacacccgaattagtggttggacgccaaacaagtcaacaaccttcctacctcccggaatttcagcagaggaaggggaacagcgacctgtaatgtccagtctgagcttcaatgtagcacgtaagaagaaaaccatcgaaccacagcatcaaggaccatgaattccgccggaatcaggcaccatttcacgtccgcacacaaagagcacgagctggcccaaaattccgcgctacgcgtgggcagagagcacgtaggcgctgcccatccacatctcagttgcacccacggtagaaccatggaccggggag

SEQ ID NO: 41136 - DNA, 577 bp, Zea Mays
taaaatgatatattgccatagaccataaatctctaacctgtcggggggggcactactttcctccgctttgtgactagcttcttcaaaactttcctaggattgtcgtccaagttacgcttcttggataatggcataaagtcatcatcctcatcagcagcctgccttgtttcgggtctaacagtctccgccggaacacggggtatgtcaacgctgaagcactcctgagtagactggattataatccgtttgattagaaggaggtcggtctacgttcttcatgtctgatgttcctgccaaatgaaacaacacatatacataaaatacgtaaaggatcaaaaaaagttaagcgcaagtcaattcagttcagttcatgaccatgcattccattagatcccaacatatcatgcagcatcactactaaattgtaaattgcataattctatcaacaaagcagcataacacaatattgtaaattgcataaacgtgtgagactaaatggatcaaaaaaatctgctcatatgcgacatccaattaatgtataacctggttatttcgtgtgagctgacccaaattgaac

SEQ ID NO: 41137 - DNA, 1581 bp, Zea Mays
cagttcttatatatgctgttccaaacaggccgttagtttgttcgtttgttggtattttttgctaccttgttctcttttgcgaactgtgtacctgacatcttttccccatccgttggttgcatagaaatggaggaggatcactcggtgatactaatatctgaaggtgctattaaaagcatcaaacttagcctctctaccggagaagagatagtgagttctacaaacctggtgtttttaccagtaattccagcataccgagatgccttttctccaatgatgacttaaatgtttttttatttctgaagtgcacatactccataaacgagtgcccagtgacccatcctagccagcttggaaatccgttccttgggttgccacttgaagctgggaagtgtgaatcctgtggtgcctctgaaaatgacaaatgcgaaggtacacaatgtttttttgttcataacactttcatacagtgtgctctagagatcagcttagcgaggacaccttttcctttcgttaacaattaagtttctctgcttatgtaggccattttgggtacattgaactacctgtacccatataccatccatgtcatgtcactgaactgaggcaactattgagcttgatatgtctgaagtgccttcgaatcaagaaagggaaggtacttgtaaaccggaactgcataaccttacttcgttgtttttctatacttaatttcctgatttgtttgaaccttatgtgtttttacactgatgcttaaccttgggttgctatttatgaaatctttttcacctttgcaggtgaaacaaagtaatggaaaaggaaacgcggcaccaactttgtgctcttattgcagggtacacaccagcattcttcttttttgttctggcttgaagtaagagtaaatagataccttggactagttactggtatatgtagggatatggaagtaaatgcccacgctaaaataaagtatatcagtgtttcaaattgaaccactttcctctgtggtctgaatgattgacgagttgttatttaagaggctgaagacataacaggatatactgattcagtgccttagggaggtactatttcacactgaaatttattcaaatgcagctaatctggttatatatccttcataagtaacttcagtatagttgacaaatatagcatacacattgaagtcagtcatatgtccttgttgattagtggatggctttcatacagtaatcttgcttgctgctggtctggtgccagtgcttacactaaacctgtgttggctggatgagtgtccactaatgtttcctgaccatcccagaacttgttgtttataggatattccagccctgtctttgaaggaaatcaagacaacagatggtgcaattcgtttagagttgagagcacctcataataaacacatgacagaacgttcatggaactttcttgataaatatggatttcatcatggtggatgttctcaccataggacactgcttccagaagaggtgatattcttatgagtcatgagttatgctttcacgagatttattttggtagcttttatgaattccaggttgtttg

SEQ ID NO: 41138 - DNA, 516 bp, Zea Mays
gtccctttgctgctcacactcgccactgcctccctttgctgccactgtccctgctctcatccttctccccttccctgctgatctgctcacaatctcctctaattttggttatgatgatgaagcaacaaacaatagtgctggctatggtgatgagcaagacaaatacaagaatgatggtggtatagatgatttggatgatggttattgagatatgatagagggagattgagtaacgctcgtgtgcttgcagttgtggacattgcattccactttagttgcttttgtgctatgtttgtgcctttgtgtttgtggacgttgcattccactttagttgcttttgtgctatgtttgtgattgtggactattgcacatttcattccacttttttgtggttgtcacttgctagttgctattagttgaacacttgaacttgtgttattgtggatttgtggtagtgtggttatggacatgttacattattatgtgaaattttgttatattcatattttgtccatg

SEQ ID NO: 41139 - DNA, 662 bp, Zea Mays
atagccggaggggcgcaggggtagcactagaactcccagcctcatgatcatgtgagcgtggaggcataggaggcggaggcggaggtggaatcccaaaatcatcatcatcaactgctgcatcctgagcttcgaactgatgaagagcagcatcctcggcctgagtgtcaaaaactggagcagaagctggcacaggatcctcaagcactggacggtaggacccaaagacgaggcgtgaggcctcaagtgtgccctggaactgtggaggccgaatcagctgcgcaaaaatgtgacacaggtagtgagcatatggcaactgtcgacgagcacgcatgccatccaaaacggtgtcctcgatctcacaaataaggaaattcacaacgtcaaactcagagtgagagaccagggcaccaaggagccagagctgcacatgtgtggtagcctctctgtatcccatccgcgatagaagtgtccgtctcataagctgaaataggaactttgctgctgtagtgaaatctgccggtgagcgtcgcgacccatctgagaagggcggtcggaacagagccgcgacgtgagctgtacccggagccacaccgccgtgagggcgacgaggagggtcagaggtgccgtagcataagctatgaagtcgagtcgatgactcgtga

SEQ ID NO: 41140 - DNA, 348 bp, Zea Mays
cccaagaacatgtttccactatctgaagcagaacactttgttgccaaatgcccatataaaaatcagtcaacaccattcgttttctagaattctaagaatgaaccaaagcaaccaacttaagttaatcgtattgcaccaactaagagtaagcggtcatctggaagagtcaagataaaccatgtctatgcagaagaagttgaatcaccaggagtgatactcagtgagttcatgttccactcagttttagcttcattgacttctagttttggagcattatattcctttatatcgtcacaacatcacatttgcactaacatatcaccccatacccttgccccttgctagaag

SEQ ID NO: 41141 - DNA, 661 bp, Zea Mays
gttgaagtttatttgcgcgaggaaagaaataatgtgtttaatacttagaactcttagtcgatagtagattgttttggcttatatagagaggtggtgacatgccaaagtagtcattgcttcctctatatcttgagtcgggtcaatacgcgttatgtgttcatgatttgggaagtaagcgcatgatggtttcgagttagagattagtggtttacgattcgtatgctttggtcggtgtgagaaaatacttgtgaatatatatgtttataaaaacgatgtagtatatgttgtgtctcggattgtgataacaatggactagccgacgtgtatgttatttagcgggctatgtcgttactctagttagccgaattgttggacggctttagttaagcatgtaatcgcgataaattgcttgttgtagtctaaatgtgcatggttacagtcgcgggtaaaaattagtagtgttcatgtgatgcccaagttaaactacaaattactatgtgaagagcgcatcgataaacacatatatgccgggtaagattattgtggtagatgcgttgctaattgtgtatggcaattctagtgcacaaaatgaattgtataaaattagtaagtctacttgttggttctaatttgattgtttcaactttaacaaatggtaagg

SEQ ID NO: 41142 - DNA, 323 bp, Zea Mays
gtagattgtagagtgggctggagttattggacatgatgatcacatttggggtagtgaggtcctttatagaaacacataaggggtcaaactccatcgaacacaaattgccagtagtgaagcggtggacaaaaagggttctgaatgatatcaggggtgagaaggatgttgttgatgtagactggcctgggaagaactgagccaccagctgaggtgcggggaaggaggggtagagttggatgatggcctcgatgtgctcaaacttcttgtttaggcctcagagaatgttgaagatgagtatctggtagttgatggaggcgttcaag

SEQ ID NO: 41143 - DNA, 464 bp, Zea Mays
gcgttgctcaacccggaggtcgtcgagtgtcttctgcatcacctccactgcctgggggcccgaggccatctgtgtcgcctgagcaacttgcgttgcctgaaactggcggacctgctcctccagagcccgcactttctcctccaaaggcttcctcctctcctctgcctcgagctcaagctcatccagtagtttgttccgccttgcccacatctcctccctaaaggcgaggtcctcctcttgccgggtgagatcagttgcccgtttcgcaagggaagcttccctcgccttgaggcttccctcggcgcgagcaatgccactggccctgtcggcgagctcctgttgtagcttcacctcagccgcaacctgtttgtcccgctgcttctccaacaccgtattataagctttcagcttatcatggagcgctgtgacggcctcctccctttggtctaagcgtacctccttct

SEQ ID NO: 41144 - DNA, 278 bp, Zea Mays
taacgggacaatcgactcaagtcagcgatggcttaagtcagcatgatacgatcacatctacttatcttagggcgaccactatgccttgccagccaggcgatcggcttaagttagcaaaaatatcaaaaccaacacgccacatttactttcacaattgttcagggtgactgttataccctaacagcaaaacaattagtactccaggaaaaaagaacgttgtacttgtcggcaccaaggacacgttttggtgccctgtccacaaaatatttgaacacaac

SEQ ID NO: 41145 - DNA, 616 bp, Zea Mays
cgaagcgtagagtgagtgaagtggatggtggtcagcttcgcgtgggcagggctggtaggcgggaattgttgtcctcgccggttggggcgagtgtaggtgagggggagttgcgaagtccttttgagggtgaggagctgaggataatgctatttaactatagggagatgagaatcattccaaaggttgaaccaatgtaaggtgtgatcccctcgctgtacatgtgtaactatagtttgtatgatgaggctgtgcgccttcgcgcatccggctatgtccataggggcgttgtacacttggtctagcacgtttattatgtcggtccggctgcgcctgtagtcggtctttgtgcggatagtttctcgatgtagacttttgcacggatgtaatgtgccttcgattttgcgcactcgttgtgctagtccggctgcacccttaggcgacttttgcacggatagtcttttgaagaagacttcgattttgcgcacttgttgtgatagtccggctgcacccttaggcgacttttgcatggatagtcttttgaagaagacttcgattttgcgcacttgttgtgctagtccggctgcacccttaggcgacttttgcacggatagtcttt

SEQ ID NO: 41146 - DNA, 328 bp, Zea Mays
cagaatccattcattatgatcatagtaggattatggctacactgattctttcttcctcggtggagtacaattggtggccttatatacatgatgtgggcgtcatttttctgattgcctctgaatgcctatatccattttctaggtgaacatggtattttttatttagccaattgaatcatctcctgtcctttcaacaatttgtatttgtaatcatgtgcatatatttatcctcaatttgaaatcgaactctgaaaatcaaattgtccttcctatttgatggtacagggtcatgccttcggataatgaaggagaagatttaggaacacaa

SEQ ID NO: 41147 - DNA, 496 bp, Zea Mays
catgaaacaagcaagtgatgaatagactctccttcctggtcacataaggggcaagaaataggatggggaagacccctcttagcgagtcggtcagccgtccaacatttattatgtaggaccaaccagaggaaaaactaacacttaggcggtgcccaggtgctccacactctttcaaagcccgccatggaggtataaccacagaacattatctcataagcagatttggccgaatagataccattggaagagaacctccaataatgtttatctggaactcccggttgaagatcaacgtcagccacaacatctgccagcaaaatgaggttagcaatgacctcccaagataccactccccttaaatccccaatccatgatgaactacacagagcatcaaccactgtccttcacttcaccagccttttaggaaccaaactaaaacatgaggggccaagtctgcaatcctctgacccaggatccatctgtcatgccaaaaaag

SEQ ID NO: 41148 - DNA, 371 bp, Zea Mays
gccaattccaaatcatgggtggggtaattctgttcgtgcggcttgagtaggcgtgatgcataagcaatgactctctcattttgcattagcacacaccctaagtcttgcctcgaggcatcatagaagacgacaaaatcttgatgaatatctggtagtgataaaatgggtgttgttgtgagtttctcctttatgatctagaaacttccttcacattttggggtccacacaaatttatggtctttcttgagaagttctgtcattggtcttgctatgctggagaatcctttgatgaagcggcggtaatatcctgccattcccagaaagctcccaacttcagtgacgttggtcggctgcctccattttgatactgc

SEQ ID NO: 41149 - DNA, 491 bp, Zea Mays
gagggtggaggtcgacgcagtcatggagaagtgggttcatgacctaattaaaggccatgaaagtaccctgaagaagctggacattgtgaaggtagatgcgcacgtggtagggaggcacaagaactacggtggaggtaggcatctccaaaagtgagagaaggggcagagccaaacaagccgcatcgaggtagatggtgtagacaggggatgcgaccgtgctaggttaggggaggacatcgacagacacactacgtggcatcatcatgggcatgttgtgctgggaagagagttagtggcggcacgaactgatacatacatggataggagggcgtcggggtcggtccggtggctgtgggaggtgctgggagcatagggatgcgtgtgggggctagggtagagtgttggtatgttggcagtgatgggaagccagagccacaagtgtgctaggccaggcaaggctcacgggtgagctgccgccaaggtggcgtcgg

SEQ ID NO: 41150 - DNA, 467 bp, Zea Mays
ctaaaattctatgctaaaattagaagaacaactaattcgttaaaggatccgtaccaatgttgaatctttttttagtgtgctgaatgcatgttcagcctcaagttgctgcactgacaatgtagcctgtatgttgggagacatcagtgtggggtgtgtgttctagtgtcgcacgagcaagtgattgtcgaggcgcggaataatactcctggcatcaaggcatcgtggtcgaggcgtcgggacgcagacctgtagtcgaggtgtcaggacgtggagctgtgccgaggtgtcagagtgcggagctagagtcttggcgttgggccacggcgacgccgacaactggccatcgagctgcatcgcaggagcatccaccattaggagaatacaaacaactcgtggcctggaagcttatgagacaaggaagtttacgtgagaagcttgttctttattgaaagacaaggtaaagaaac

SEQ ID NO: 41151 - DNA, 645 bp, Zea Mays
tcgcaattcctcccaagactcagtctaacccttaagtggacggcggcttattttgaggaaaactgaggggttcgtttagaaaatatccgggcgaaagggtatctagggtttctgaccgttggatcatcaatctgcgcccccgattagatcggcgcggccgtgaaacggtacgcgacgagaaccgttggatgcaaatacgacggggaggattttattattctggatttgattctatccgtccgatctagatcaacggatcaggccgaatgctacggaagggtatgcaatcatctaatctcagcccttgaattctagatctctagcccacggttcttcttctctccgccaaatccacacgacggctgagcactgctcacccacggtggagcatcgccggcgaacgcgcaatccgacgcccggacgcccctaacctaaaattggccggtgctaaacctagacggggtgatggcgagcacggaagggagattcttacccgcgattgaaggagtagcgagctcgtccacggttcggggcgggtctgcgacatgaacagagcgttgttgagggattcccgacgctctggtgacccacatcgttcaggaggacaacgcataggttcccggtgcccagaccatcatcccccac

SEQ ID NO: 41152 - DNA, 913 bp, Zea Mays
gcgcggactcccctagctataaattcgtaccgagctcgcttccctcccttcatctccccactgccagccaccatcgccgagaacgcagagagagaacgtgtgatgccgccgccgtggacccgcaccttcaccgacgctctggtgttcgcaaggggccggatctactcgttggggttcgtgggtcgcgtatgaggaaggaattgggcaaacgtacccaggggctctagtgaattcctcgccgtcgaagcacttccgccgtgcgccgtgggcagggcggaaccctgttcaatctccggtaataaaccccccccccatgcttcgcccttgttcatacatcgtgtagctcagtttaattggagattggagctcgggttggccgaattcgaaaatccggcgatggctccgccgtgctcgtgggtggtgccgccgctcggttgacctgggagaggtgaatttgggggaaacgacgtggggcgttcatccggagatctacggctgagatcaattggcgcatagcgttttgtcgtgttgaactagggccgtccgatcgggatcggatgatggtcataacacaggggttcataaaatccagggcgttgattgacaatccaacggttcctgggcgcgtaccggttcgaccgagttctggtctaatctgcgccgtgcgaagacaatccgacggcccacattaaatcgtgccctttcggcttgcatgttttgcgtataaacccctcgggttctgttaaatcaacccgccgtccgttatgcactgtgcgctgtgtctcgggtaatttgcccagagccccctgcgttttccattaaatgtggccgagtccagagagttagaaaatcataaaaaaatgatttagaaaatgatttttagtgttaaaataaatccagaaacttaattaat

SEQ ID NO: 41153 - DNA, 321 bp, Zea Mays
actccttcaactatggcacatgtcatcgaatctcaagacgggttcagtcgcaacctcaggcgtacctccgccttgcctgtgcccagttctgccctcgatatctatgatggaggacgcccccaacatcatcaaatacagtggagctgtcacatcccttaagaagctttttcccacgctaagcactgtgtcaaccactacagtatgggaaaaccctctccagggggctcgggtatgtgaccgagccctcggccttggcctcggctctaagcatgaaacaagcaggtacaagtcaacaacaaagtacaaggtcataccatctac

SEQ ID NO: 41154 - DNA, 465 bp, Zea Mays
gttaaagactctgtagtgctgtaggccagattgtgctggactctagttctgatatgattctgtagcattttattttattagccttgaacgcggtagtcgatacagtataggcctgtttcaaaggttcatcggaaacagttctgttcctgccaaaattggggaatttccagcaaaaacattagatatccatcctgtgagcagcccatccccgtcatgatgtctctgtctgctctcctgtcatctcatctagttatttttggtgcttcagtttattggttttttgcatcctgaagtgatgtgtttctatgttatgttcgtagttttaggttgtgttgctggtgtgcagtgtggatttgagttatacttgttgggtggttagagtaattattttcgtcttacaccataactttggattgtgattggaacatagctttgaactgtggatccttgcaccatatattaggc

SEQ ID NO: 41155 - DNA, 359 bp, Zea Mays
gtggtaagagcaaacggccaccaacacggtactcaacagcaggtggatccaatagggtcacgccaatggcaaccaacagggctcgtcgaagaccatgtcatactgttggaggctgtccagcagcggatgctggtggtcgccaacgatgcaacaaagcgatgatggtgtgtcgtcatgatgggatcccacgccgttctagaggatgtggcagtcacccctccagaatgccatgcagatgacctcaaagtcgcacaagaagggcgcaaggttcgaaggtaattaatgcctaggacgaggtcgtaggccatttgcaggtcctaggttctcggagctcgacatcaacccaaatatgatccgga

SEQ ID NO: 41156 - DNA, 717 bp, Zea Mays
tcaccacaggtatagcacaaaccattttgcttccgatactctttcaccaatcgctctttagacaactcgggcaacgaaaccgagcttctactgtcagctttgggcacagtactaccaaatcgaccttgactgctagtcgagaagggtttatggcgctgtttatccaagattccctgctgaatactggctaataatgccgctcgttcaacagaagcaggcatatgagatttaaccggtccttgtaattcttgcttgagtcccttaataaaatgagccacatatagagtctcatccaaatcatgattgtggacagaagtggcatatcttgcttcatcaaacagctttttgtactcctccacagaccctgactgtctaatgtccagcaaagactgcatagcctgagaatactcctcggatccaaacttcaacagcaccgcgtcacaaaactcctcccacgaacatggaccatattgaatcttaaaaatctgaaaccacctcttagcattcccctccatgttcaacgatgctgacatcacccaaactgactcagggacccgatacaaagtgaaataatccacacattgatcaatccagatacgaggttcctcccctgcgaatttgggaaatggcatccgtggtattgggagatgcccaccttcaaaatcctcaaccctccgccctccattctctctcggacgacccaatggtacacctgca

SEQ ID NO: 41157 - DNA, 569 bp, Zea Mays
tgtgatttggcgacatattttgccagattatagtctttattgatagctatattagtatacttaatggattttgtcatttctcagtggtgcctttaactgcaattttggttgtttgtttcatttccatcacattttagtaataatctaaaacagtgtgcatcttagtaataatctaaactgatgtgcagggcctatcttagagtcgcggtaggagccttccaaaagcaaattctccatcaccaatagcatcatagaggtaccacacgcagggagatatagcaagggaatgaacatgcaaattcttaagcatgccctctaggcacccagacaaaccgtagatgaaggtgatgattgctcgctcgctcgcttttattttttggttcttctctctgccatcgaatgtcatgatagatttattgattaattaatgtttctcaatcttcaaggaggttcaatgcaaaattagatactctttgttttcactcaccttggaattatttgcactgttcgagtatgagttacaatattgtgctttcgattttggctgcaaacaaggtgtcttcagtctg

SEQ ID NO: 41158 - DNA, 723 bp, Zea Mays
ccgccgtgattcgtgcgacagccggtccacattgttctcggggtaagtgggtaacaccggtgtacgccgccgtgggtaagctccaaccgttaaagaactccggccaccgtacggtgtcaccacggtagaagtcgataagaacgccggtgatcgccgcctcccggccatgcgtcgcatggctctcgctttccatcgcaccgccgcgacttactctcgctctctgtggctcaccggagtaactgccacggcagtaaacaccaagccgctgcgccagtgttcttctttccttccggccgccgcgcgtcttgctcgaaattcgcgaccaccgcccgctggcactataaattgacattgcccgtagctgcgccatgtcgtcgtgaagctgtagcacctgctcccaccctcgatcacccgccagcacgcgcgaatttccaatttccccaaaatctctttccgccaccgtgaaacaagcttcgccgtcgccagccctttttccggtcagtccgaccctccctctgcttcgtttaagtctcttcacatgtctatgatgcttactgacccgtccaattgggctaggagttccctgaccgtcgggaacgcgtgaatctttggttcatccgcgcactctccgtggccagaccaaattagttcgccaattgtgcaattaacttagggaaattgatggttgggcgtgaattcggtttcgaccaaagtagggcatca

SEQ ID NO: 41159 - DNA, 281 bp, Zea Mays
cagatggggtagagctccggctcgagcttggcgaggctctacgaacctttggggaagctggagtgggctgggcacggtggctggctcttggggggcgacgatggcgcgtgtagagctcacgagagttaacaatgtctctagcgaagctaggcactagattaagggagcaacagagggagcaaccgatgggttgggcagcctttgcaggcgcaagcatggcacgggcatggaagtgtctaaccggtcgtgcgggggcgcgcgcgggcaaagcccattcgtct

SEQ ID NO: 41160 - DNA, 347 bp, Zea Mays
gtttctcgtttaatgattggttgaacctgcagtaatgataatataactaatacagttgggcctaattatataagtaacaagtatacgtctcgctaagttagtgaaccaaattagtgagagtctaataagtgtttgcctagtgaataattttaaagcccaattaattgactgatttcttttcaactaagtttgtctatatataagtcgtagcgaacttaggtacttaactaatttaatgttaagtaactaatggatgattagagtgagcatggtgaatgcgcgtacttgtgataccgtatttgtgttgcgtaaataaataaaatgttgtcttcttttaagggtgttaa

SEQ ID NO: 41161 - DNA, 651 bp, Zea Mays
gactcatatcctaatcaaatctgaaattcatcgtagtgaaataagcaaaactatttaaatggaggtagtgatccacgccatccggtttgaaataagtactcttcggattctgtagaaatcttgcagcttcgaaactgaaaagaaaataatagaagttagtgatcaacaacattaatgtttcatgatgttctatattgtacctgtgcataaatttaaatggaggtagccaattctacacaagaatcaagttaacaacaatatcattgttgttggacatccctgcgagatcaattgcccctgacgaaacaacctaagaactggatgcgctactgaatgtgtatagactagaataatactgtactcaactccaaaccactccctctccccaaaaccgatctgcactgaattgcatgtgttggtgcatccagacaaccaaccaaattacaacactgatcggcactgatctgcactgaattacactgatgttgaagtaccattacacattggacaagcttatttaacatgttgcgccgagccaaaccagaaatgtgcctcttctctaaccatcctcacccaaactacatcaacctagaaacaaaaaccgatccacgccatccggtttgacccaaaccaattccagcttcaactcta

SEQ ID NO: 41162 - DNA, 314 bp, Zea Mays
gaagggtaaaatttgaatatcttgcatcttggaggcctccatatgccatcaaaacaccgaaataactgaaatgaaatcatttagtacatcaagataatagtatagtaaataaacatagtggtatgtctaatcgtctttaagcctttcttacttttgcactgctactgatgatgcatcctcaccatgagaaggtataggaaactttgacaggaatgggatgaccaataactccccaattgagctcatttcagatttccctttatttttatcacctttcttacgctttgatgctgcagatgcaactggtggacctt

SEQ ID NO: 41163 - DNA, 601 bp, Zea Mays
caaccatccgaggggtgcaagagtgtcaaacaggagttgtgatgcatatgactatctctaaatacacatcatttttacttcatagcaaagcaatcattacaaactgacgggacaaaagatgatggccagaagaccatcatatcactttgaataataacccaacagttttatttcatacaatgataagaggatacaagacacaacagtggccaaaacaaaaataaaccaaaagaaatacataaccgaaaaaaccacaaacagaatgactagaaattttggattttctcccctttttggcaacaagtaccaaaaacgaagagagagacatggatacatgaatcaatatcctccaggaggaggataggacgaaggatatgatggagggtatgatgtgtagtcagggaagagggtcctcatcacgtcttcctcgaatgaggagtccctaggtagctcatcagccgcagaaaaaacagatgccgaagatgtacgatgatgaggaggtggagggtggtgatggtaaccagagccggatggcctagggtcaccgggagtgggtccctgacccgagtagggaggcggagggtgagaggatgattgaccc

SEQ ID NO: 41164 - DNA, 357 bp, Zea Mays
aagccctgcaaaatgctctgtcaggtgtctgaatgaagaactgatggtacagtaacctgaacatgatcccaggttcagcccccctcgtcgccgatgaatccacgccgtgatcgtcgccgccgttacgattcatgctcaccaatgaccggataacgattcggggcaaaagatcttcgcctggggataactccgatagccgactgccgtaccccattgccttgcggccagcgcagatcagttcaccggcgttggttgtccgtcgatcggctaccacgtgctaaagcgttagaccacgtcgctgtgaatcgcgcctcgcatgcacggtgatcgccggtgtactaccatggtgaaagccac

SEQ ID NO: 41165 - DNA, 304 bp, Zea Mays
ctggtactgagtcctgctctactgactgttggaaggaggtgccttggaggtaggtgccgagggaatcttggggccattcaccgagttggagtaggtaggtccgggtgccttcagctgggggcagttattcttgaagtgactggggtctccgcagtgccaacaggcatttgctggcggttggttgcttgcaacagagggggcctgaagggagctttgactctgctgactgtagcgggacggagtgggtccagatggtttattgaagcttggtcccctgggtggaagcccaaagggtcgagctctc

SEQ ID NO: 41166 - DNA, 367 bp, Zea Mays
gtaggaatatggtaattcctgaattgagtggagaattctgcccaggtgatggtgttggtagcagcgtgagcaacacaatatgcatcccaccaatccgcagcttggctggtgaggcgacccgatgcatatagcaccttctctccgtcagtacattgtgctatgttgagcatcttgtccatggactttagcaagtcatcagcttgtagtggatccgtggagttagagaatgtaggtggcttatgactcataaactcccggtgcttatccctgggtgaaactggtggtggtggaggtggtagttattcttgttcctgccgtacttggcgcatatcttggcattcttgcctcatttcctgtcgtatttccg

SEQ ID NO: 41167 - DNA, 441 bp, Zea Mays
gtggtttgttctaggggggtccgtgctttaactcttgcggtgtcattgcctcggatccgtacatcaggcagaagggtgtgaacccggttgctcggcattctgtcgtgttcagcgcccatatgacttcgggtaattggtctgcccatttgcatttttgtcgtcgaggagccttttcttgatggcgctgaagatcttgccgttggtgcgttcgacgacaccgttgaattgtggttggtagatggaggcgaacactgccttggtgccgatggaactgcaggattcccgaaaatccaggttgtcgaactatctggcgttgtcaactgttagctcggatgggactccaaacctggagacgatgttttgctagaagaatttttgcgtgatctttgctgttatcgtggagactgctctgccttcgatccatttggtaaaatattcgac

SEQ ID NO: 41168 - DNA, 305 bp, Zea Mays
gcactacgaggtcttcgaccaatcagacgagaactttgaacgcgagatcttcaaggccgacgaccctgtggtgaagcagtcagcgggggcacttttcgataggatgtggggttcgcatggtcgggaggcggtcagggagcgatccgaccgggcgagagagcaggtgaaggtcattttttgtgtggttgtgtgtgtgggtatgcgtggtttttgctgagtgactgtgatgttgctgcagatggagcgtgctgaggacgtcgaggactttggagctctggccggcgcgccgcccgaggctgcggagg

SEQ ID NO: 41169 - DNA, 690 bp, Zea Mays
ctgaagtacagaggaggagccgtcgtcgtcgatacctgcatatccggaccacatagagcaagcatggggccgaggtgatttactgtgccctcggaattgcactcgtatgcttctcggatggggagctgggcggcgttccgtgcgtggtgggtggtcaacagaccggttgccggactggcgccgctgggggatggccctgtgccgctgtgccggtcgcctggggagggagatgatacgtaagccatggagtggtaaacggacggctgggattcggtcgggggtgtagttcggtgggatccgatatccaccgttggatcggtaatggatgggcaaggggtcgcggaccggtgatccatccgtgaacggtcgagattaaaacgtcgacaccgttttgggtagatcgcttccacaccgttgatcatcacgtctaggggcgagtcaaaacagtaccaccggtcttcacaaggaagaagatgcactgggatcgtagatgtgtggatggatggcccagattgaagcaacatgtacccttttgagttatttaatcacagccgtcgatctctggttgtgtggctcaggttatgtactcgagtccgatctaatctaggccaccgaatcgtgatcgtgcggatgtcgtttggccgtaccccttcgacctctgcatttttgcagaagagccccttctctttc

SEQ ID NO: 41170 - DNA, 414 bp, Zea Mays
ggaaacgacaccgtgcttctctttcttgttgattgatggtgattggggaacaggcggaatgtacatgcatggatcgagatgatgacgatccagccgcgctactgtttatgaacgcaaaaacgaaatcaaacggtacgggacgggatgaaatctctccctacttccccgacacacactagcttattgcaagcaggaagaacgacagcagtgagaggtcacggatgggatcggaacaacagggatcagcgaggagatgcatgctgaaaaggaattaatgagagccttccctattagcagcacccgattaatcatcccggtcgggcggtcgatcggttcaccttcaccacctcctctgcaggaagaacaattcgcgatcccgccgctcggccgccgccgcggcggcgtccgacgcgc

SEQ ID NO: 41171 - DNA, 311 bp, Zea Mays
aagggcgaggttgtggaaaaaggagtttcttgcgattaggcagagggggttttatcaggtgtgtgctttgagtgggatgggaactgagggagctggtgggggttttatagaagagaggtggtctttgggtgcggagttgtggtgatggagcatgtgccacgtggtagcaggcatgataagggaagggggttggtgttggtggtggtgggtgcgctgcaaaggggtcttgggtagtggtagtgcgcatggaggcgaggcacgcatgcgaggggcacatgtgagtggtggggtggaagaccctgatgtttgtg

SEQ ID NO: 41172 - DNA, 459 bp, Zea Mays
gtttgtgcgtctcaaggtacctggtcttcgcctcgtggaggacctcgctgacgtagtagaccgacctctggatggtccagaccccggcagccggtcctaagtcctcaggttcctggccttcttgtgccgtccttccgacgaccagcaccatgcttaccgcttccgcagccgccgtgatgtataaatacaacggctccccaggctctggggctaccagtattggtagggacactaggtgctgcttcaactcttggagggcttgctctacctcttcggtccaagagaatgggttggacttccgcaatagcttgaagaagggtagcgccctcttcgccaaccttgaaatgaagcggctaagggcggctaatgaccccgtaagcttctggacgtccttgatacgggccggaggcctcattgcctcaatcgccttgatattctccgggattgcttcaatgcacc

SEQ ID NO: 41173 - DNA, 387 bp, Zea Mays
ggagctttcgttttacaaccgctaggtaaagttttcttctttctaccaatatgaaaatgcagagatcacaatcacaagatgctgtatggtctagcgctcaatctgcagggataaaacactagaacttatgggttggatgcatccagcccacactgcaaaataaagtagactgtagcttaaaatcatatgttatagatatcaatcagccagatcctgagatccatgaagcttaactcacattatattggtctagatacgctctccctacccccatccagcattttaggattgtggaccaatgaatagtatcccttgagctgctgttgttggatttgtatgtctaagttcctatggctccaatcgggaaatatcgccctcctatttcag

SEQ ID NO: 41174 - DNA, 650 bp, Zea Mays
gatcgcgatcaggcggatgccatgcgatccgcgctatttaaaactgtggtcgttggatctagatatgagggcctacgtacagtacctattcagatgaggacagatctaatctgtgtcgttcgcttctgttcagatgctgaaagatctgaaatgtacattgaaagatagttgagtaccatcaatggggctggaaaaagctcgggttcgacaagccacctcgagctcgttgtggctccgctcaagacagctcgtgaactcctggagagccgagccaagccggttttctgagctcggtaaaggggcgggtcaagccaatccaactcgtatgagctcgcaagctggctcacaagctagcccttgcacaacgctacaggctacaacccacaacgtcccataatcccaaggcctaatcttgcaatagaccaacatgttacatgtacataggttacaaaggttacaagtaaggaacacaacataaccaccccacccctaatcctatatgttgcgtctgtgtggtggctggttactcgagagacgaccgagagctcgagactagaacactggacgacgtcgcgtcgatgccgcctccgccctctaggccctccaccatctagtcgaagtcgagtagttgaccactgccagtccatcac

SEQ ID NO: 41175 - DNA, 451 bp, Zea Mays
tacgctataaatgttgcatatatactatataccgtttggcataaaacattgagtcattgtgcgtaagtagtgtgttagggatatttttattacatgtacattgctataatatcggcacggtttcaaaaattatggaaatactctggaaacgtggatgcggttacttgtttagtatagcatccgtgatttcctttcattcgaaaaaaataccccctagactgcagaactagttggcggtggagatagctggctctggacaatcgccgacgatggtaggagatggcgttcgtcttgatccagacacagagggagtagttgatggtaacttactggttacaccacctcctgctctactggggcctgtaatcgacgagataagcataggggaggaaggagaacaacggattcgacctccgatgtccaatattagctccagggagatggatacgcc

SEQ ID NO: 41176 - DNA, 336 bp, Zea Mays
taccactcaatcaagtcccccagtgaatcatcacatattggcacgcaacagccgaggggttcaccatccgatgactcggctgccaacaactttacgcgcttccttccagtgacagcgtaagagcagccaaagcctgacaccattggttcagcatccaggccctgatcacaagaataacggcacatatgtatcaatcgaatcacttagcttaagttggaaaaatagttgatgcctggtctgctgttatgtgcattagcgtgccttgatgtattaaacatgcgacgggttttgcattatttttgacactgcatatacttagtggcgttgccagtgaac

SEQ ID NO: 41177 - DNA, 329 bp, Zea Mays
aaaataggagatgtccacaagtcacagtgaataagatcgaaattgttaaccgcacgagaagtagacgtacggaacggaaggcgaacatgacgactcaactgacaagcatggcacaaaggagagctagcatctttatgacacatgggaacgattgatgcgagcttggagagggactcgtggccagggtgaccgagacggcgatgccaaagtgacggagtggagctagcgatgaagctgtgtgcagcagggaggcacagggggtatagtggcccaaagctattgcacctgacgatcacgtttcgagatagtagatccttcacagagcaacc

SEQ ID NO: 41178 - DNA, 391 bp, Zea Mays
ctggatctgcgcgtgtcctgcgagagcgaagcgagagtgttctggtttgtcgtttgatcatgcttattatgcgtgccgtgtgcgcaatgagatgcgcacccgtggtgttggtgacaggggattgttggggaggggccctggctggttagagattttgctttcgttcaatcacaagctttgcttgcttcaagtaatgcgtggattggtggaagacattgcctccaaaactgaactacaaatcaagagctttcccctctatgcttacgatgttactctcttaccactttattaacttcgaaaatcgacgactaaattggaccttgaaggctagcgttgtacttgactttccgaggtaatgtatgtgaggatgaatcaaaagaatacaatcaaa

SEQ ID NO: 41179 - DNA, 527 bp, Zea Mays
gcgagcttccccgtggctggacacaacacttctctactactattaagaacatacagcgtgattggttgagtggctcccgtgagccggtctcccacgcgcctggctggccagcgaaggccgtttactccatctccgtgcgtgcagatggatggtagaatattggtctagcctgcacctgcacatgcaggtcggtatcgttacatacaagcaaccaatcacaatcttgtatccggtcaaagcgtgtggagagcctagttgtttctatacaatcaaccaatcacatagatagtgtagacgtccacactgatatggtgcacggttctgcctcccactcgcacccgcaccgccatccgcgtcgcgatctcctaccaacaatggccgccatcaacggaatctatactaccaacaacggcgccatgcacggttctgccgagaatcatttagcttcctgatttgtttcctgaaacacggctgttgtccgtgctgccgcagatttgtgccgaggatcgccccaccatcaatcacgg

SEQ ID NO: 41180 - DNA, 496 bp, Zea Mays
ggcttcacatttttgctgtccccttcacttccaatatccatgagatttatcgttatgtttattatcttttttaagccagaccagtggaagtaatatgcgcttctcgttctacccatttgcaaccttttgtgcagattcaaaaggaaagcccaccgaggctattcgagggggaaggtatcgatttgagtttttggccccttaattatgatgatcatatgcttagcaccttcacctgactccctatgggcctactgttcttccccaagtgtaaagcaggtttccttttatgatgatgatgttcgcttttggcaacattggcgtaattgctctgctgctgctgaggccccaactgcagtcagtcagcagtcttccacgttcattgcacctgcaccttcgacacgaggaaggcactttgttgtcatttgttgtgagaacaaagtcatatttttggacttggtgactatgcggggccgtgatgttcctaaacaggagcttg

SEQ ID NO: 41181 - DNA, 426 bp, Zea Mays
tggcccacgaggcaagcgtcgcggtggtccaataggcatcgaaggcgtcccaccgacctagcgcggacgcagagtagggagccaaggcggttgcaatctgaccaacagatgcattaggggtggcgagtccagggcactaggtgttgcacgtgtctgtagcgccaaaagctgcacatggcgtgcagtaaggaatgcccctacaagcaacaaacatggtgatggtgcaaagggaactgacacaagattagtgaaatccttccggaaatcaaaagtcgctcgaatgagagaactcatcgaagaccacatggcgagagatgataagacgatttgtgtgacaataaaggcaattcaaaggtaggtgggagtgctaagtgttgcagccaaaacgtaggaggaacactggtctggaaaaggagggagtgaatg

SEQ ID NO: 41182 - DNA, 371 bp, Zea Mays
ggttgattcgctaaaagctgaggggcgcttatgtaaaacgagccagcgaaggggtatcgctcgcccaggaccgtccgatcaggactcgacgacccagattagacccacattacattgaactggtatgcgatctgggcagttggatccgtgatccacgatccacattcaccgagttcgcgatctaatcgccaccctttgatctaacgccaacgacacggatcgcgctggcgaagaggtatctgatctcgaccgtctattttctaatccatggacgccctggcgtcttcaacctcacgctgcccatgcacagacgccatgccctcccagaactctctctcccgttggtcaaccgacatgcacaccgctcggac

SEQ ID NO: 41183 - DNA, 448 bp, Zea Mays
cgaggagggcgtgatcggacctgtggagagctggccacggcgagctcacacactgcggtgttcttgacagatttgggggaaatcccaaattggggagctgtggggacgattggaggtgagggctggttcactcggtgcacaactacttagcggagctcactggggcagcaatttataggttccatcggcggtggcggctaattttggagaagacgcacgtcggccagagagagggactaagtcactggcgcgggtgacagtggctgttaccgtggcaaggccttaggcaatagatggctgtgtattgggatcaattgcgatgtggtaagatggctgacggcgtggcataacagcgaggaacgacgacacgacggtgatggtcgcgcggccacgtcgccggcaagtagatgagcgacagagcgactgttgtgctccaagttcatccacg

SEQ ID NO: 41184 - DNA, 291 bp, Zea Mays
caatcaagggtaagatacgtaaggttccaacaaaatggtcgaagtaatagaaattattactgagggaagttataaggaaacgatgagatcagcaaggatgtgcgaaatagaatggtaactcatggatcattaggaaataagggtggtcaaaagcatgttaaccaaaatgtcttaaacaaacaatgggatataaaggcaagcacatataaaaataagagtatgcaagattccaatggtacgagcataccaagacgaagagagtacaaattgccaaaagatagcgacttaaca

SEQ ID NO: 41185 - DNA, 387 bp, Zea Mays
gttgacgagcttgggttttattacatcccttctgtgcccagacaaaaggttaatggggaacctttagcacttgtggtgaaggttatagggggtttgctcactgagacgcaggtgatttcagagttgcagaggttggtttctagtgagtggaattgggaggttgttaagatgggtttcaattgttttagtaccacttttacatctcgtgctgagcttgatcatatggtggagtggggagtggtacagacaaagtacaatggcaccatgaaagtggaagagtctgtgttgcataagaaagcaaaggcagagctcagaagggtttggattcaatttattggcctcccatctgagatgaaccaattccttcttatttgggcggtgggttcc

SEQ ID NO: 41186 - DNA, 585 bp, Zea Mays
cgcctctgcagatagcaccaccaggcggttcgttccagtgtttggcgcccagattgacgataacagttacattcacattagtgaccaaatgatgacttgtgttacaattcaagtcatgcacaacaactatacatctctactagagatcagaaaaaagcaagttcactgttgagacttgcttcagaaccaacggacttggcgaaatagcatggaaaagcaagatgattgggagtagggatggaaacggtcggtaaacactaaaaccatttccgtattcatatttttttatcggaaatgaaattggaaacggtaaacctggaaacaggaacaataccggtatttcggaaacatcggaaaccaaatggggcctaagagttagtcttctctctggacaaccttcaattttcatgtgcacccttcagttctggccttcttttctgcggcagtttcttctgaagtgggcaatggcaggaatactctattttggacagatatatggttaaatggccaaagcctacaacagttggcacctcatcttgtcaggttggtatcttcaagggctaagaaaaggactgttcaggatgc

SEQ ID NO: 41187 - DNA, 280 bp, Zea Mays
ctgaaccaccctaatccctatagcaaagttgtagccggtagagaggggagcaaatcggctaaagctgggcgacttttcgtgctctcaatttgtctcattcgcgcctgcgagtcatagatcatgtacgccatgtggcgtgcatctggacgcgtggagctcgcgcccaagcgcatgcgttgtgttctcctcgcgtgcacgcctcgcgcctggctgctaggccaaagtggagagcacctcgcatcgccagcactcatttcctccactctcactcgccctcact

SEQ ID NO: 41188 - DNA, 304 bp, Zea Mays
tcgacggcagtagttcttgtgtgctagctgttgtgcaccgcttgtgcgatgcgggaagcaactgactatataacagccaccccgcccctacgccggtcggtcgtgcacgactcacgccttccccgacacgtgcgcactggctgcactgtacgtcctgtcggtgggcaacgacgtgcatgcaacatatacatgcttcgaaatgaagcaactcacctagctcccgccaccaaacaagcgagctagggccattaaaaccctctcgtccctgcccggcacgggcccacttggtagccgctacgtgcac

SEQ ID NO: 41189 - DNA, 382 bp, Zea Mays
acaaatttcagaatattatacacattgattgctcaagatggagaaaccggagaacagtccagagaatgatggcacagaaactaaggcttcctcaacatgtaatggctatctttgataaacatgatgaagatgatgatttagctggtatagatgaatgctctagggttgagataaaagtggtcaggaaagagatctcccgagctctacaaggacagaactccttagtagtcttccacaatgggagccatagcatggttaacttcaatgaccttggcattactctagatgctgcagatccttcatcaaatattcttcggaaggtactgtggacattccaaggaaggcttcgtgccatcaatgcacgtaaggaaatacagggaac

SEQ ID NO: 41190 - DNA, 771 bp, Zea Mays
tttttgtaggaatcctatgtagcaaagttatagctggattgtggctctataactttgatgcagatctttggacaggatgccacaaagatttgagagaaaaatcgagttcaaacgttgactgtcaggccaactgactgaagaagcgccatggtacaatgttctctgtagatcagaacgccagcacgacaacctcaccgccggcgacctctttgcgccaaaattcacgccgccgccatccgggtttgtgcgcagtagggaacggataacgtcggggaggaacaaccttacgtggcgccaccgccctagccctgccggagccttcaccggcgaccaccgtgactcagtgagctctcgccgcgctgtcacgcatgccgtgatttcctcactgtgcctcctaccaacgtgttatgcatgcgcttgcgatgttatccgtgggcggaggtcggctgttgggtcgccgtggctataaatagcacggtggtccacggcgaggtgttttcctcttcaccagcgaaccgatcgcaatccaaaattcgcgctgacctctccaccttctcccaaatcaattgcgcacggtgaaagcacagcttcttacggccgagtagcctcaatctccaaccccaatttcaaacagagccaccacggcgcctttttcccccaattcggtccgtcgcgccgccaagcgcagctcatccgtggccagaccactctggtaaggctctgcccaaatcaaatgatgtttctgcaactccgttcgcttgtgaagctcat

SEQ ID NO: 41191 - DNA, 295 bp, Zea Mays
accatttagagcttccggtcatgtggtgcaaaaagccaaaatccatgagccatgtgttctacaggcctctgtcctgcatcaataataagacatgggggtgagcaaatggcacaacactagggttagtaaactgtgaaggataccagtgctgcagcatttgcccctgaaaagtgttaggaaaacaccaaacatccccgatcctaaagggggtagcgttcacgacgagaaggaaactgtggtccgctagaaaagtgggaaccaaatccacttgcacgggatccttggtcatatggca

SEQ ID NO: 41192 - DNA, 393 bp, Zea Mays
aaggttcagtcacgtggacagctatttttcatttgcttttattcaagtctaagtctttgggtgcattccattctttcaagtctgcttttactgcatctttccatgccaacttcgacttccccctgtctctcttcccatttactataacaccttagtattccactacacactggtgcctctggatgtttccattggatatgtccaaactatcttaatcgatgttgcataaactgtttttcaattggtgatacctctaacctacacatattatcgattcagacacgatcacttcttgtatggccacaaatccaacgtaacatatgtatttctatagcacttatctactgaacatgacgtctttcgtagactaacatcctgcatcatacaacttag

SEQ ID NO: 41193 - DNA, 445 bp, Zea Mays
ctcttttataaaaacacgtggtcgaaggggtatcgtgggatgccagccgctggattagaaaccaagggctaggattagatcatacttaaaatgaatcggtatgctattatggccgtcagattggagatctatggcccccattaaagtacccgatcaacccatccggtccatccgagactaatctaacggcacagaaccgatcaccaaagggtatgcatcctatctgatctggatcgcttgttcgggaatcaacggctcacatccacgcagcgaaggaataccacgaaactaatcctagccgtatgaatcccaatcgacggaccaggagccatcgcctacctccgttttccccgggcggcggcgtgcacacaccgcgcggtggagaagtctggcaacgcgccccacggtgaatccccaccccattcacgcaccgaactcggtttcc

SEQ ID NO: 41194 - DNA, 525 bp, Zea Mays
cgtggacctcaacggcgtggagacctaccttggccgcccctataggaacttctcccacgttgccttcatcaagaagtctctcagtcgtgtggtcagccccaacggctgggtagcgtggaacatgaacaaggtcgtcgaggataacacccggaccgtcgtctaccttgaatacggcaacgacagcaccgttgccgacacgtccagcctcatcaagtggctgggcttccgcgacctaaacggtgctgctgaggcggccgtgtacacggcggacacattcatcaacacgagcaagtgggtccctgagcctatccagtacgaccacaccctcagcgtggcgccgtcgccgcgcgcctgacattgctccgctcagcacgcttaatttagtactgtactacgcaggctggcgttccgtttcgagatcccaccaccttattactatgacattgtatgtctctagtatccatccatgcatcattgtatgaattaaggcatattatggcatgcatgacgtcgtatatatcgtgt

SEQ ID NO: 41195 - DNA, 342 bp, Zea Mays
cattactgccactcagattcgccagctctttggatttcccgagtcgacgactcgacttcacagcctctgctacggcacctctgacactcctcgtcgacctcacggcggtgtggctccgggtacaactcacgtcgcggctctgttccgcccgcccttctcagatgggtcgcgacgttcaccgacagattttactacagcaaccaagtatttatttgagcttatcagacggactcttctgccgaggatgggatacagggaggctaccacacatatccagctctggctccttggtgccctggtctctcactctgagtttgacgtcgtggatttccttatttgtga

SEQ ID NO: 41196 - DNA, 456 bp, Zea Mays
acgattgaatacggtgattcagtcagcccggtatcagcaaactctaaggcgctatcatgacaaggccatacggcatcgatccttcgcggtaggagacctcatcctccgccgaattctaacgggggagggacggcacaaactgtcaccactatgggaaggaccattcaaagtagcagaagtcactcggcctggatcatatcgtctcactcaaatggatggcacggaaattgggaactcgtggaacatagaacatctcagaaagttttacccctagctatatctcaaaagctattgggacgacaatgtattctataaactgggaaatatatcatcaataaaaagacttcaaaggcactcaaattgtttactgtcaacctgcttgcttacttaactcggggtgaccactataccctactaacggagcaatcggcttaagtcggcaacgacttaaggcgg

SEQ ID NO: 41197 - DNA, 1068 bp, Zea Mays
cgctgataagcttacgacaaaggaggcgtggaagaccattgcagacctgcgtgtcggcgatgatcgcatgaagaagactgttgccatgctacttcagaggaagtttgacttggcgacgttcaacgacggttggtccatcgaagatttcacgctgcgcctaaatggcatggcagcggaactctccacccttggagctggcgttgaagagaagatcatggagaagattgctcgcagcgttccgtcgcggttcaagcaaatcgtcctctccatcaccactctgctcgatctgtcaaccttctctatctctaacatggttgggagacgcctttgaggaggccccaggatcactgcattacattggtcgactctacctcacggaagaagagtggaatgcccgacgcaagaaggaagtcgggcaccaccctgacagcagttccggtggaggatcagggcaccgtggtggagggtatcgtggccgaggagggcgctcaccaggtgggccaccgtctagaaaggccaccagtgatgagtgtagaaggtgtggtaagatgggacactgggcgcgcgagtgtccatcaaagcacaagaaggagcaagcacatgctgtccaagaagaagaggaggctacacttcttgtcgcaagaacgttcccggtaaaatcctccttagaacttcaatcatgctgcaagatgtctggttctcatctagagatcagggagaaggtgtttctgcagcgtgaagaagaggagaaactggaggagggaacctggatcttggacactggagccacaaaccatatgtctggatccagggctgtattcactaatcttgacacaaaagtgctgggcactgtccgatttggtgacaatttggtggctcggattgagggacgaggaaccatcaagttcatgtgcaagaatggcgagacccggtcatttgttggcgcttatttcattccccgattgacaacgaacatcattagtattaggcaacttgatgaagcgaagtacaagatccatgttgatgatggggtgatgcatattcaggaacctgatggaagattactgg

SEQ ID NO: 41198 - DNA, 387 bp, Zea Mays
ggaggaactagtggaatggaagagggagcgggagcgggagcagtggaaccatgtgtggtggaggctgtaggtgcagtaggtgtagtggtaggctcgggagtggcagaagctggcagagtggaggaaggtggagtggtagtggtgactggggctgaaggattgaaccgagcaggagtggagcgagtctgaggcgaggggcgacggaccctgaaggcaatctgatcagaagctatcctcagctgacctccctactctgcccgatctgttgctgctgttgttcgagtagctctatccatcttcctcttcttcttgcctccctgctgctcaaggtacacatacttgcccttgcctgtctaaaggggcgaggagtgtcctggtcatctcctc

SEQ ID NO: 41199 - DNA, 351 bp, Zea Mays
gtggtattgttctttgccaatagccttcgtctcgtataaaagctcgtgcatactacagaagcacttcgcgctcggctccagcccctggcttcttacaacccagacaaacatccccatcctaattatagctttgggggtaatctgatgaagaaaaatctgaaaaatctttaatacctcaaccacaaatttgctcagtgggaaccggagacctgctttcaggaagcttcgataaataaccacttcgttttcctcaggagcaggggcagtgttgtctcctccaactctgacaatagacatgtcgcgaaaatatcaccccctcatggcgtcaatatggctctgtttgatagtcga

SEQ ID NO: 41200 - DNA, 599 bp, Zea Mays
caaattcagggtgttacaggtaagcatatatctcagccatccgattacatgccgacacaacagattaattccacgccctcgcgaaccgttatgccgcgcgtatccttggatctagatcctacggttctacgcgttatgaaaacagaatccagttacgaccgcacgatacaaatctgaccgcctgcattcaatgaacataagggggactctagatctgatctacgatgcccgttagagatcctacggctcccaccatcacgacccttcatcaaatcttaaccatttgtcatgagatcgacggctcagggcttgtcttctttcccccgtcggccaatcgcggcggcaccgctcgcagcgcggcgaggataccatcgacacgcaccgatttgccaccctgttatactaaagttcctaccgctaggtgcgacatgtaattaaggacaaaatgaatctggtaaagtactcgcacctgtgtatcgcgcgccgtcgagcttgttcgcccacttgtggtggcccacggcaaagtcgtagcaccgacgagcaataccgccgccacccgacccgtgccaccgcagagcccctccccacaacgcccgtcg

SEQ ID NO: 41201 - DNA, 322 bp, Zea Mays
taccatcttggaaatgggaggacctcagcatggattttattttgggtttacccaacacatcccgacaccaaaattctatttgggtcattgtggacaggctaaccaagacagctcatttcttgccagtacataccacccacaaggcagaaaagtatgcagaaatatatattgaccaaatagtgcgtttgcatgggataccaaggactatcgtgtcagacagaggagcaccgttcgttgcacgtttctgggagcagctgcaagagtcacttggaacccatgtgataagaagctcagcataccatcctcaaactgacggccagac

SEQ ID NO: 41202 - DNA, 465 bp, Zea Mays
ttcttgccagccagattcgccagctatttggatttcccgagtcatcgactcgtcttcacagcttgtgctatggtacttctgatcctcctcggcgccctcacggtggagttgctcctgttatagctcacatcgtggctttgttccgatcgcccttctgagatgggtcgcgacgttctccgacagatttcaccataacgaccaagtttttatatcagctcatgagacggacgcttctaccgcggatgggttacagggaggctgccactcatatccagctctggctccttggtgccctagtctctcactccgagtttgatgttgtggatttcctcatttgtgagatcgaggacaccgtattggatggtctacgtgccaggcaacagctaccgtatgctcactatctttgccacatcttcgctcagctgattcggccaccacagtttcagggcactcttgaggcctctc

SEQ ID NO: 41203 - DNA, 391 bp, Zea Mays
agggtggtgagacttggttcactggctaaagactatattgcacctgttactggattgattacaaccaacatttccccctgcccattcttttgtgcacactcttggatgagattcatcacccctatgttatcttctacgtgttgtttatgcactgctgcttagtgtccatgctaggggagttgttggcatccccagggtccctctccatcgtgccctagccgagctcagtgacatctctctacctatcccttactcaaattgttgcttctgtgattcttgctgtctcaaactctagttagtatccactgcagaggagtggggtagtacttctgttccagcctgtgtaaacccccttctcagtcaccatgagtgatctgctctagttgatgtg

SEQ ID NO: 41204 - DNA, 599 bp, Zea Mays
cgcaaagggctactaattcaccgtgcaccgctaatttggggagaggtggagaggattccatgaatttgtgcttcaaccgagttcacttgtgaagtggtgagtaactcgccgtgggtggtggggctatttataggcacagcggtctggctagcgatccgcggccacgaattgcattgtcagtgcatggttaccacgtaaggaagagacacagtgagggaggagcaaggcacgagtgacacggcggcggaatgaccaagccacgatgaacgctggtgaattatcccgggtaggctctggctaggttcgcggaatcatgacacgacccaaagttatctccccacggtcgatcacttccccacatcactcgaacacatccaattctagagtgccctggatctttttcatcgttctttagatattttcagtgctctaatcttcagtgttcttctgaaccgaccccctttcaccctctccttctcttgattcttgttaagaacagggtaatctccattaataaagattgttcactaaacaactgtcttcattcttactataggatccctagaccaaaactgaatggaatcaaagatatggtgctt

SEQ ID NO: 41205 - DNA, 522 bp, Zea Mays
agttcccagtgatggcgtagcatcgaggtcggccatggcggcgattccttctccctcaccgtgatgcgatgatgagctggggcaagcgctgggtttatatagtacggggcacgagggcaggcaaagtccgatctcgagaatcccgccaggttcgtggtcgtcccatccgtcagctggccggagaaatcgcggattcgtcgtgcggttcgttgcaacggtcgaccgatgttgggggtagaagatggacctgccaacctgggcccacatggcgatggaagaggagcagatgtgcgcttgacaggtcggaataccactgacgagaacgacccacatggcagcgagcatgagagaacaaaggcgagagctgggagattggcatgcggtgattggggctgacccgtgggtcccccatgtcggtcagacaccgcgcaactgggaaagaagagggcgggagtgggctggctagtgtgggccgagaaagggaattcggtagtgggccggttcaggtgaatttgacccaag

SEQ ID NO: 41206 - DNA, 391 bp, Zea Mays
caaaaggcacgaactctctagcagcaagttcatcggggtggatgacaccggcgcaaatccttccaccgagcaccggtgcattccatccaagtaggcggtataccattttgagcactcactcagtctaggcgtgctcgggatgaagtcacaaggccatggcaaactacgacaacgtgaagcagagaccttgaaggcaaaagggcgtagagagctcggaggcgaaaggacgccgtgagtgggagagaagcaaggcatggctgctactcgagggatgaacccctctttaaaggcagactcccctgctcccgcctcgaagcgccgcgagaagcctcccccgatgcacaccggggtatccatcccatgacacgggggcccggtcccacaagtcata

SEQ ID NO: 41207 - DNA, 2097 bp, Zea Mays
cataaccaaaaattcaaagtgcccatggtgcgtccggaaggttgttttgtgcacgtcatctgggtgaacccagacgatgataactagaacagaggtccaattttgtgaagaaacgtgcccttgaagctcatcgaccactggtatagggtattatccttgactgttttctcattcagtgccttgtagtcgatgcagaaatgccatgaattatcttgtttcttcactagaaggacaggtgtcaaaaatgttgaggtgctatatctgataatgccttgttgtaacatgactgggcattgtgcctcacgctcatccttttgaagttgtgggtacctatatggcccaactgctactggtgttgttcctggcaaaaggtggatcctgtgatcacaccttgttagggaaaggccactgggtgttccaaacacctcctggaactgctggagcaagcgatccatcataggttttgtgtcggcacttgctgtcttgactatcctgactgcaaggtgcatgtgaaagtcatcccgtgatgagaccagacctttccacagaatttgttgtcctcttcgccagaatgcgagacacaagtcctccaggtcccaaagagttggccccagggtgcgcagaaactggactccgaggataatatcgaagaagtcaagtggaatggcatatgcgtccattataaactcttctacgccgatgttgttggggaacctggagcatgtgaccttgccaccgttggccaccatggcctggagacattggttggggctgtactcaagtttcagagctctcgcggtgcctaggttgatgaagttgtgagtagaaccagtgtccagtagtgttgtaagagcctgacccatgatagatacctcaatctgcattgtgccctcagattgaatgtcagcgagatcactggttctgggtactcaacatcggtctccacggattcgtcctcctaaaaatcagtgacctctagataaaatagttgagggcatcagtgtactcggacatacttctcgtcacgattgtaacacagcccctaacgtcggcgctcgaccatctcgaccgggggaagttgcttgaatggtcactgtggcgttgtgttagctgatgttagaagtgttggctatggtgatgggacagtgactgatgggcgctggggctgcctcagggacattctaggtgttggtgtggaggttgtcaagtgcctgggacctcctttcatatgcccgcgctaaattcagtgcttgattaaagtcctgtggcgccatgagctccacatcaatcttgatatgatccggaagtcctacagtgaacagcagcacttgttgctcctgggagagtggtgttgtttgggctagtagatcccaaaatctttcctgataatcatccaatgttgggcaaaagggtagtcgtgccagttcacccaagggattgatgcgaaatggcggtccaaacctttgctgcctgagttgtttgaagtgattccacgacaacggtgatgcatcacgctggagcgtccaactccataccaggtttgggcgacccctatcatgtgataggaggccaggcagaccttcagctcttccaatgtgcgttggctgtcaaagaactgcttgcaccggtttaaccattggatggggtcctccttgccattgaacgtggcaaattccagtcggtgaaaacgggaacatcgaccatggacgacggaaatgggttgatggacacgggatgtgggatgttcgacaatggtggtagaggtgatgacgagtgtggcaagggtagtaggtggagcagcaggggtgtggtggtggtggtgtatgcggctaccgggttttgggtagggtgcggaagcggcgtggtggtggtgtatgcgccggcagtgggtgggctgccgcggcagggatccgtcagtccctactccctaccgtgtcgcacagtggggaaaacacggggaagcaaggaacaatctcatctttagattaatctcttgctgaccataatgattacagaaataggactatatagtcctggacccaacagactccagatcctaacaaactcatttaacaaactccttatcttaaggattta

SEQ ID NO: 41208 - DNA, 396 bp, Zea Mays
accctgtctcgacagacgtttgtgtcttgggtagaggtgcagacacctcaagcctgagcaccgacacgtccggaccaatggacgggcccactaaggatggctcggaccagagcctaaccttggggttgaagccaagccagacctccatcccctcgtcgtcgtcgccgctgccgccgccgatcgtgcttggggatgcctctagcggtagcccctccctctcctgcgctcggtggtgcctctcaagggcatcgtgagctgcccttttctcgtggatccgcttcttctccttgtccttcttcttttgttgctctatagccaacctacatgtcgcccaaccagtcacatctttcgggatcgggggcagggcggttcggtaaacccatagcccctatgaat

SEQ ID NO: 41209 - DNA, 283 bp, Zea Mays
ttcgctgaattccctcgggatgactgtgtggtcgcgccatgcttttgtttgagcttggtatttgtttagagcctatagggcgaagacgcggtctccgtcgatgaggtctttcgaagtaggctcgtctacgtcggggacggctgacgtgaccatccgtggtgacccatgttttatttcttgtgggtcatggcctccgatccatacagaaggcggaaaggggtgaacccagtcgccctgcactcagttgtgttcagcgcccagaccgcttcaggtaacaggtcgg

SEQ ID NO: 41210 - DNA, 656 bp, Zea Mays
ctgctcaaccactctggtaagtcaataaaggacacgagtaaaccattgcaggatgtgacaaagtgtaatggcttgcttcagggtggcattgacgtggctacactaccttgatggcaagagggttcatccacggtgtccatcggccagtgggaaccctagaggacaacatgctatacgacagtacccgacctctactcgcttcgcttgacccttcgactcatgtaacatgatcctcctctcacctagcctataaaaggaaggaaaggaccacggttcaagacacgagcatacataggcataaaccgccagcacaaatcctatacaaagcacttttacccccatgagcactcattcacaagagacttgggagcttgatcgctctcttgcctgtttgtaacctcctactacaaactagtgcagggtaaagcaaatcgctcaattggacgtagggacattccgcccgaaccagtataaacctttttgtccactgtacacaccattgctccgagacgggcaaagcacgatagttactaaccggtggttacaacacatcaacaatcctcacacctctatccttgtgtcttggttgcaccaatatgtacggttgcactttataccttcccttcatttaaatgttaatattgaacatacaagcg

SEQ ID NO: 41211 - DNA, 568 bp, Zea Mays
cggggctggaggatccccaggagcaggagtgatctctaggacaggaactgaaacatcatggtggactggcaagcttacctctggcccggccaacaaactagtagaggacaattcgttcgggcgatctataccgacatcaataactctgattttaggtaattcaagcaatagatccttaggaatggtatcctcgagcacaccatcaatggccgaaatagttaaacctcgaatatccatcatctctgtggcaacaaggtttgaggtgttactgcgagccttagatcgccgctcacaccgaactaggggaagcacttcttcttcctcaacatcttcctccaccacatatctagtcgttttcaccccacttccaccttccacgacatcctccagactagcatccaccagattatcatcgaggtttggctcgactagggcagtcatcggctgtaggtctgacgaatgtcaaattttcttcttcttcttcttgaattttgagactcggcctgagtgtctgcttggcatgatctcttgcgccacggactctcaaggttgcctaccttcttccctc

SEQ ID NO: 41212 - DNA, 313 bp, Zea Mays
gtcaacaacatcattcattcccttcttttttagtctcatcccccaccttcctattgggtggaagcacttcacactaccacctatcttttcaatcgttatccaaccaaaaccttatagttctctacctcttatgctctctataggcaccctcccctctactcccacattcatgtgtttggttgcaagtactatcccaacctatccgctacttctgcccagattctcgctcctcgttctgtcctctgtgtcttccttggctactcgtccaatcaaaaaggctaccaatgtcttgacctatccacaaactacatcc

SEQ ID NO: 41213 - DNA, 326 bp, Zea Mays
gtggtggtctttggacaaacataaagttctaacgaagtacgttagactcattaaatacatgtacaacaatcttgcgactagtgttcgaataagtgatggagacacgaacgactttccgattttaataggactatattaaggatcagttttgaacccctgtctctttgtgatggatgaggtcacaaaggacatacaaggggatatccctttgtgcatgctttttttgcggacgatgtagtgctagttgaagaaagtcggacatgattaaataggaaaatagagttgtggttggagactcttgagttccaaaggttttagactcagta

SEQ ID NO: 41214 - DNA, 464 bp, Zea Mays
tccaatagttgttgggttgctgactttggggatcagggttatgaaagagctgttaagagcagtcaactgaacttggccactgaaaaatttatcacacaattggtatatgtcatgcttaatgatttcccaacaactcttgtaaaaggcaccgttaaagccgtctggaccaggtgctttatttgctggcatttccttgaccactttgtcaatctcatcatgagtgtaggactgcggaagggaggttaagtctcttggggcaatgagatgatgcagatcgaagagcatcggtggcgttgtggtagacccaagtctgttattgaactcatcccagataattgcttctttacaacgatggtccgttatgagcgtaccattctgatcctcaagcccagttatggtgttaaacctaaaccgctctgttgctgccgcatgaaagaaactcgtgttttcatctccaaatttgg

SEQ ID NO: 41215 - DNA, 556 bp, Zea Mays
caataattcatttcttgcgacacatgcactcaaaatcaatccattctacataaaatacacttatctcttatttatgcgcagacttaacacctttcgggataaagcgtcactataaacacactacacctaattgccttaggaacctattagttcactcgaagacatctattcaagtcataagcacaatcatacacttatttgtgaagcacaatttaaggaacgcctaacgcgtatagactcgacttataattgtagaggaagtgatgactacttatggcatgacatcacctctctaattaagccaagacaatttctacctatattgacccgacactcatgtcgagcacactctattttttgccatgtctcgcatacaaccatattgtggcgtgcactcgagacactttggttcaacttaacgcaatcactactactacgcattcggcatacacgtttgacaacaccgtgctcaggcaaacccacacttccaatctacttatcacatccaaccaacaccacgatgattgcataaaatatatttaacatagactaactc

SEQ ID NO: 41216 - DNA, 508 bp, Zea Mays
gaagctatgtccaaagccgcgagctctgcatccatggtggattttgtaagtattgtcttcttacatgatatctaagagatagcgccaccacccaatgtgaatatatatccactagtggatttcatatcatctgcatctgtaatccaatttgaatcactatatccttcaagaacacttgggtaccctgaatagtgaactccatgattcattgtacccttcatatagcacattacatgatcaataccacaccaatgatcatttcctagattagatgcgaatctactcagcatgcttacaacaaataaaatgtcaaggtgggttgcactagctagatacatcaaagagccaacaatctgggagtatctcatatgatcttttcctagtcttttattctttcgaagtaccagactaggatcatagggtgatggagaaggcttgctatccatataaccaaaaaggttcaacacattatccacataacaagaacgcaaaagtgtaatcccattct

SEQ ID NO: 41217 - DNA, 453 bp, Zea Mays
ccgtcctcttccatttggctgaggctcacgatgttggtggtgaggcgcgggatgtagtagaccccatcaagacgacggtgctcgtcggacttgcacacgaagaggacagtgcccttgcccttgatgtcgaccaccgagccgtcgccgaattttacggtgccgatgacaccggtattcagtacgacgaagacaacccgcaagcccgtcatgtgattcgccgcaccagtgtcgagcacccagcgacgagaaaccgcagtctcctactggctgagatggaggagcaccttcggttcatcgaggtggacatgaaccggcggctagacgaggtgcagcggtgacctgtgaggtgagcacgacatatccggcattgttacctcgacgtcggcggcaacatacatgagtctgtgctggtcttcctcggcctgcgcgacatgagccgcacccttcttcctc

SEQ ID NO: 41218 - DNA, 349 bp, Zea Mays
ggaggtcttcagagctacacgtgcggatggtgccctcaggggtaggcgggttctccatgcaaggtcggttgttgttgactgctcgatccttgagggcctcatgagggacgttgccgacaagggctgccttgcctttattcttagaaaggactaccttcaccgcgtcgtccaaggaggtggtggccttcgaagtcactttcttgggagccattgtgggattggtttgtcgaagcacgaacggtgggcaccaaatattgggactgactgacacgtggtcgagtgggcccaagcaatgggaggtaggaacactctggtgctcaataatacaacgggcaggggcaacagtgtt

SEQ ID NO: 41219 - DNA, 459 bp, Zea Mays
gtggaaagaagggaataacaatacagtccttaaggctatctccaacaaattatctaacatcatatatatattcaaactttactctaagaacagtacatcatacatcatacggtgcaaaaaaaatagtgtttttactgccgagggtaatctgcttcaattcagcataagccgtcgctgtgatggaacttttgaattccaggctgggctcgaatgggccggtatgtgactaaaagatatgactccacgggcccgtcctgccagcctttttttgtctagcccgctggcagctagtacccgcgaggcccgaggtcgcaaggccctacctccatcgaatgagttcgaaaatacttatgtctcttgcccgtgggcccgtacctttcgtcacaattcacaacacgactcccgcgtgcgctcccgtatctgtcttgtagtggcagaggattcaaactagcgagcgaa

SEQ ID NO: 41220 - DNA, 635 bp, Zea Mays
gttgttccgtgttcgtgtaagactctttaccggctatagcgcgtctcgagtggccgtgttgccatgcatattcttccggcgcgctaacccgtggtattataggaataacgagtgaactttggtgagttgttgggctaaggattgggcgcaagttagagcccaaagcgcccgatcaattgttgcggtgaggggggaggcgtggacatggctatggcgagtccaccgtcgagcgcgccatcgactgtacctggatgtctcgccgaggaagacgattgatcgaccgttgatccagtgatcgatggctgtgaccaggcgtacacatcgtatggatgagagtgaatctgtgcctttcgtgcataatcggacgacattagttaggtccgaagtcataaaatatgggtcgctggattgatcacgactggtgtagatgcggtcataggtgttttaaatcgtggccattgggtttagatccgatggctatcagtgcgtaccggttcgagggaacctaaatctgatcaccgccatcggttgttgatggggcggaccagaactcaccataccccttcgccgtgtcgtttttgcataagaggccttctgaaattagaaaataaacccgcagtccacatagcagtgat

SEQ ID NO: 41221 - DNA, 307 bp, Zea Mays
tgcccgatgagtggaggagtacattagtaccaatcttcaagaacaagggagatattcaaagttgtaccaactatcgagggattaagccccatgagccacactatgaagctatgggagagagttattgagcatcgtctgagagaaatgaccaccatgaaccaatttggatttatgcatggaaggtcaaccatggaagcaattttcttaatgaggcaggtcatggagcgatataaggagcagaaaaaggacttgcatagggtttttatcgacttggaaaatgcctatgataatgataaagtacctagga

SEQ ID NO: 41222 - DNA, 626 bp, Zea Mays
agcagattgactagcatacaatacctaggaactcatattacaagacattggtatgcacttctgttctcagagtctgtagacacttcagaatcagcgtgcttgcagcttgctcatcggttctattgccgctcttgctgccttttttctcgtagagacacaactgcgttaccttcccttccatacgaccacgaccctattagttttgtatccatgtttttgtgtgcactgctaatgatggatggggacactcgtgagagcatggcgtactgccgttaaagcccgagtgctcagcgttctgcgattttgtgaggtatgtactggtatagctaccttctttaggtttaatatggcccctggttatgccagtctagctctttccctttcgcctacacaaatatagaaccgtttcgtcttcgaacgactgctgtcgagcacattagctggcttccgagcgtttcacgggacctcctcctcttcccgccaaatgcatactttgtcgcagagatatgcctgtggtatctccccttccatacgaaactgttagtttggcattcctgttgttgtgtatgctgctgctaatggatgggggcacatgtgagaacatggcgtgttgtcgtcgaaacccc

SEQ ID NO: 41223 - DNA, 397 bp, Zea Mays
ttgttaacgacttcgtcaacaacagattcagccatatttatgatttctagtgcttccttcgttgctggatcggctaatggatcgaatggttccagtggcggagataatttagctacaatggaaaaaattagtcagtctgaagccacaaaaacaaaagccaaagctaggtgctgcgaaacaatacctatgtgtctctcgcgctctacagcttattcatcttgttttgcttgtactcgggcgtcgtgaatgtctttctcacttttcttcataatttcgtgagccatttctcggccaccatttacccagatgtcattgtaaaattttccgtccattaaacttgcttcagctgagggatccattgtgtcatccacagagaaggcagcttcggcttgggcca

SEQ ID NO: 41224 - DNA, 442 bp, Zea Mays
gtccagtccccagcacgcaaatggccatgttacgggtatggtctgcagttgctgtgctggtaaatgctgctgctttgataagtattggcaagcttcacacctctggactagctcgactgcatcactctttgttgttggccagtagaaaccagacctgaaaaccttcccaactagagtcctggatgctgcgtgtatcccgcattgcccggcgtggatctcatctagtagtagcttcccggtagccgaaagaatgtacttcatgaggattcctgtcgcgccccttctgtacagtgcttccccaatgagagtgtagtgggctgaatgccttgcgatgtgttctgtcatagttttgtcattcagttcttcttcattctttatatatatctgatgataggctccctctagtcatctgaatttgactctggctgcctcagaacattgc

SEQ ID NO: 41225 - DNA, 528 bp, Zea Mays
gtcgcacctcagtatcgtcacgctccctgaagcgaggtggtggaatgggcagagcagaattgggagcgggagggggaaaagtggaagctggagtggtggaggtggtgggtatagcggaagtggtggatggctctggagcgacaggagctggtgaagtgggaggtggagtagaaacagtggcggaaggtgtagagggagcagtggagagaggtcgagatgcgaggcgacgaactctgtaagcaatctgatcagaggaaattagcaactgtcctcctcgctctgcctgctctgttgctgatgcctctgcaagtgctgcacgggtggctctgtccacacgccgcttcttccgaccttcctgctgctcaaggtacacagtctcccccttgacctacctgaaggggcaaggatggtccttgtcatctcctccccctggcgctgagacattcttcgtccgcaccatcctgacctgagtgttggaaacctcacgagagagagagagagagagaatccaggcaggacaggagacgg

SEQ ID NO: 41226 - DNA, 309 bp, Zea Mays
aagagactgagtctgaagatgattatagcgtagcgccaagtaaacccagccatctggatttccggaaatccactatctccgaagatgatctgcctaagatgttgaaattgggctatttcagtgaagcgaaaaaagagctggttcatttcggtggggaagagactactccgaagccaggaaaggatgaagtagtggtcttcaaaagttttttcaaggctggtttgagatttcctttgaacaagatgatcgctgatgtactgaataagtttgggatttaccttcatcagctaactcctaacgctatcgtta

SEQ ID NO: 41227 - DNA, 368 bp, Zea Mays
gaaagaagaaaggctgcggatcgtccgatgtggcttgggcggtccggattagaagtcgggtaaccattcgcgccgtagcacctgaaccgtcgatcgctgatcgagcggttgtaatcgcgcgatagttcataaaaaacgtggtcagatcctggacgtagattcttgatccaacggttgaagggagagcgggagacttgaccaggttggttctaatacggggcatccatttctgatctgacggctcagatcggctgataccccttcggctagcgcattttactaataagacctcgcactttacatgaatagaacccgccgtccagcgcctgtgctctatgtcggagatgtattacacagaggcccctgcc

SEQ ID NO: 41228 - DNA, 350 bp, Zea Mays
ccaaaactgcagcgatgctgcttgacaatttcatatctttaaaattatgacagcagtggtaataaacaaaaactcctgaaccgtctacataaaattccccacaagttttgtattccaacgataattaaattccaacatctaaatggccccaaacagcccacaagacacaccatgcaatctgtttttggacagcaacctagccgggttcaaacatcgataactcctaaaatataccaccgaatcaagcgcgtaagtactctttggaaaggtataacaaagctctacttgattatcacagtgattaccactaattacccacgaaaaatccctagaaactaataatactactg

SEQ ID NO: 41229 - DNA, 704 bp, Zea Mays
ggacgaacacgttccggccaaacgacggcggggacgaccaaattgaggctcaggaagggttcacgggttcaccaggagttatgcacacactttggtttgggcagaatacgagccgaagagcaggtcgacggtgagggtgggttacggcggacaccgagcttgggagcacacgttcccgccaaaccatggtcgactagagcaaatggatgccactatgagcttcgcaagcatgcagaggcacgcagacaacacatggattgaatagggacttactagaacgagctagccacggagcgcagagctctgggttcgccggagacagagaaaggggaaatcggtgtcgcggcggctctaggtgaaattgggagttgggatcggggctatagggccgtaagaggctgtgttttcattgtgcgcaatcaatttgggcgaagatggagagggcagtgcgaatttgacttcgactgagcttcactggtggagatgaaagcacctcgccgtggtccatggtgccatttatagccacggtgagtcagctaatgatcggcggccacggatagcatggtaagcgcatgactaccacgtagaggaaatgcacagtaagggagatcgaagtatggcgacagcgcggcggacaacgctgagtcacggcgaccgccggtgaggtaactccggccacatgcggctgggttcgcggagtcgtg

SEQ ID NO: 41230 - DNA, 467 bp, Zea Mays
atgcaactgcctcccctcaagggtgtgccgcatcacaagcctgtgcgtcttcttcactcttactcggttactcccgtttacccccctttgttacggacgcttctgtgagcatgtgattgatgtgtgggtctggaatatattattgatgcagaaatgtgagtgggcacgggaacatctcggcgatcccgcgggagctattcaatttgacagaactggtctctctgtgagtttttggaattgatggttgatgctgcacaattgcaaactctagggagtaatagaatgcatctgtttagggagttgggatgttagattaaaatgagtttttcaagagaaattctcattcatacccccattttaggtgcacttctaatctattgactactttctcctcgagttgccattgcaccacaattaacttcttcagaattcagagcacgccacagttcaatatttcttcaagagta

SEQ ID NO: 41231 - DNA, 440 bp, Zea Mays
gttatggatgcgggggtgatttggttgagtggattttgcaaaatttaaagtggtagattatatagtggtatagatgatgatgtgttacatttgggtgcaattaatttggtgaatttagtggatgttatggatgtgggggtgatttggttgagtgggttttgcaaaatttaaagtggtagattatatagaggtatagatgatggcgtgttacatttaggtgcaattaatttggtgaatttagtggatgttatggatgtggggtgatttggctgagtgggttttgcaaaatttaaagtggtagattatatagtggtatggatgatggtgtgttacatttgggtgcaattaatttggtgaatttagtggatgttatggatgtgggggtgatttggtggagtgggttttgcaaaatttaaagttgtagtaaaagtcgcctagag

SEQ ID NO: 41232 - DNA, 280 bp, Zea Mays
atgtgcttgtggttgttgacgacttttctcggtattcttgggtgttcttcatgaaggcgaaggatgcggtttttactcatccttgagatttgattcttaggttgcaaaatgagtttcccaaaagtgccatgagagcgatttaaaatgacaatggcacataattcaaaaatactcatgttaagaccttttgtgcttctttggggtcgagcatcagatttcctcttcgtatgtgcctcaacaaaatggcattgttgagcgcaagaattggacccttgttgag

SEQ ID NO: 41233 - DNA, 496 bp, Zea Mays
ggtgttcggtccgtggtctcgggctcggacgacgagctctgccaagctcgctgccgcgactatggctcggctgcaggcgtaaggtaggagatgtactagtgtcgttgatctacggggtaacggtctagattagaaaagtggttgtggctgtcggatcgatgacggacgacctggattatatcaaggataccccccttcgagggattggtccagatccgttgatcttggatccatcggctggggctctcgtgtcggtgctttaagggaagaccgttagatcgggatccgaccactgacgttggacaccggttcggagcctgggcttctaatccgcacccttgatttgtgatcgcgcgaccaccattcacccataccccttcgctgaaaccgttttacaaaagagcccccacggtttatacaaaacaacccacagtccacctctgagttgcctgagtctgggaaaaacttctggttctgcccctgtgtttctctgtat

SEQ ID NO: 41234 - DNA, 304 bp, Zea Mays
atttaatacttctggggattgaaatcaagtgcacaacattggcacccatcttcggtgaactcacgaactccacaagaagcttcatcaccacaccgatgaataacatggcaagcttcaacacttcgtcaacaagctcgaagaagcttatcctccaaatcatgggagtaccaagcttcgatctagctaacaagaggaagaaaagaagctcaacgaagggtacaacatgttggagtccaaggaccaaacatcaaatctaaatggtctcacatcccaatcaccttgttctaagaggacccttcttacg

SEQ ID NO: 41235 - DNA, 659 bp, Zea Mays
actatgatgaaaaaactgggctacttcggagagtctgagagcaagcttgtttgatttgctggggaagagataattctggagccgaggaatgatgaagttatcgtctttaagagcttcttcagagcagggcttcggttcccgctaaatgacatgataggggaggttctaaagaactttgaaatataccttcattagctgacccccaatgccattgttagacttagtgtgtacatatgggctctccgaagccagggaatggatgcgaatgctgaacctttctattgggtgcacgaacttcactaccagacgaaggctagagcagatggccttcataggaactttggctgctacaattttgcgtatcggaaggatacgaaggccccggttattggctatcgtactaagtggctgacaggatggactaatgaatggttctacatgaaagtggatgagaaaaagagggagaagctaatgagcatggttatgagtccgttagagttaaactttggcatgactcgacccttatgcaatatgcaattggagttaccgtgccagctggctgaagtagaatttagagtggtggccgagcacatcagtactagagacttagtgcaagagtatttatcagacagaacatatccgacttctagtggctgggg

SEQ ID NO: 41236 - DNA, 401 bp, Zea Mays
cgggatgccagtagctccctcaccaccttggagaggagccatcgcttcaccatgacagagttggagtgcaagagggatgagttgaaagagtccaaggatgaggtgtcgaaactcagcaagtccttttctttgaaggattccattatcaaggagtcgtatgcctcgaagaaactggtgtcacaagagctggaggctgctcgtcgcgacacggaagccgcctgtcgtgatatcaaggtcttggaggacgaccgttttatcatgaaggcatggtgtgacaaggtgatggataaggcgattcgggctggtcgggtattgatgaagaggcctggcgtcgtggtgcctgatgatattgcagctgatgtactcactgtatcgggtgcttcaaattatctatctgcttc

SEQ ID NO: 41237 - DNA, 392 bp, Zea Mays
gagatggtaaaactccaaggccggcctttgtgaacaaaaccctggagactgatcctagatatgaaatgattggtctattgaagaatattctgattgctttgcttggaattacactgagatgtcaggattaagccgagagatagtagaacatcggctgcctattaagtccggtttcaaacctttcaagcagaaagctagaacatttcatctagacctactaccacgaataaaagacgaaattcactggctgctagaagctaattttattagacatgcagatgcgtagagtgggtctccaatattgtgccggtggagaaacaagaatcaggtaagctcagagtatgcattgattttcgcaatttgaatagagcaactcctaaagatgaatatcc

SEQ ID NO: 41238 - DNA, 429 bp, Zea Mays
taggcacgcgacaggttctggacgcggccggaccgtccgagcatcatctcagacagcctagctacatcgtggaccgttcggcgtatttcgtcggaccatccgccccgacacaagcccacacacatatcgctcaggtcacaccatgcatggttagataatacgggtacaaccccagacaattcagccctgtcgcggaccgttcggtacattacaccagaccgtctggatatgtcgtagaccctccgataccttacaccgaaccgtccggatattgcatgaaccgactagcgtattacgccgaaccgtctgactctacacgagtccacgcgtagaccgcccaagtcacaccatatatgaccgaaccgtccgggtatagccctggatcattcggcccgatcacggaccgtccagccctttacgacagacggt

SEQ ID NO: 41239 - DNA, 418 bp, Zea Mays
aatttatgtacaggtttaaagagaaaagaagcacccttaaaacaaggcgcccacataggtgcaataaactaaaacctttcttaaatttctaccctccccaggttaaggcccttttcagttgttcgatgtcctctttcgctctagaggccacctgcgctgccgtttcaagggtgttggtgaagatccttctatttcgttctttccagatgttccaaagagtgtaaaccaccaccccattgaatcgccttctatcacttttcggaatattggcctgggtttcctcccaccaccggattagatgggcaggctcatccgacagtaggatttgatttccattgaaatgcatccatgctagggttaggctccatactgctttggcaaaggggcaaatcagaaccaaatggatacaagtatccag

SEQ ID NO: 41240 - DNA, 370 bp, Zea Mays
cacttgagtataataaattcgcccagtattcttgacatttttgcccgctggattattagccatgttccctttgccttgatttgagctcccagagtcttgctgattgttggacttattctgcctcggatatggacatacttttataaaatgaccagacttcccacagttgaagcagccagttgaggaactagggagggcagggaaacgagcaccaggggcactcagctgatttgtagaagtgggggcagtggtaggacgaatgaaaataggctatttgaaaggataggagggtggacgaggcgaagaacgattctgattaaatggacgtattaccaacctggttcgcttctcgggtccctgattgaatctg

SEQ ID NO: 41241 - DNA, 525 bp, Zea Mays
tttgcctgaccttggcttgcaagttgatacgctggcgcttagctgtgaggatttacttctgttttagcatgtgattgttctttatggggagcgcacatagctttagatggtccttggccaagatgcctaggaccttgctgtcctcgatgatatcgtcagctcccggagggtgaagccaggcgaagggtttcgaggtggtcctttagagcttcacgtgcgaacgatgccatcagggtaggtggattctccgtgcgtggtcacttgctgttgactgctccatcttcgagggcctcatgagggacatcaccgataagggctactttgcccttcttttcagcgagggctgctttcgcagtgtcgtccaggtaggtggcaacgttcgaagttgctttcttgggagccatcgtgggattggtttgttgaagcacgaacggtgggcgccaaatgttgggacctgctgacacgtggccaacggggcctaagcgatggcaagtaggagtgctttgatgctcaacaacataacga

SEQ ID NO: 41242 - DNA, 339 bp, Zea Mays
cggatgccgaggtattcttggggccattcaccgagttggagtaggcgggtcctggtggcttcagctgcggacagttgttcttgaagtgactgggatcaccgcagtgccaacatgcattcgccgggggttggttgcttgccactgagggggtatggaaagagctctgactctgttggctgaaccgtgacggggtgggtccagctggtctactgaagtttggccccttgggtggaaatccaaatgatcgagtcttctggtgccggtcctgctgctgtgcccggagaacctggaactttcttttgagatgccctttttcttcctcctttgccctttcaactt

SEQ ID NO: 41243 - DNA, 298 bp, Zea Mays
gttaacataggcgaactccttataataaccacctatgttaataaccattaacataagcaggtgtcctaaggagcccttgtccgaatgcatatttgtgtgtcaatcaagtttactcacacacgtggcgatatcattagtgatagtattattccatatcaagcttagcacgttgtcaaataattacataaggactcgtaggtctaaaagaaggaaaacaaaatagcacaacaaatgatcacaaagtaatggaattagtcgtagtggcttccacaggcattggtcaagaagacaacaagca

SEQ ID NO: 41244 - DNA, 725 bp, Zea Mays
ccactactacacgtgcccatagctagcagtaatagactacaaccttttgctgcccgagtcgaacacctgtcttcgctggccacaacacaggtgaagcatcggctcggcaagcgcgatcccgaggccgccatacagtagaaccttaatcaaacgcgcggagagtatcactggtttacctgaatcttggtgcccacacaaaatagctcgagaaaacgtggttcgtccggtcgatgatggggtagttcttgatagtgcttcgcaacgttgcgaacgcgttaagcctgcaaacttctgaggtggtccggccatggcgatgtggtgagacggtggcacagtcaccagacaaggagaagataacgcgcgacggacttaggcaaaacgaatggcgaaaccaggaccattgctgattgtgagggcatgagcgagagagacccacagcgagcctagcctagtgagcacaaggtggcgaaaggcttcattaagccgagcaatatggcaccggagaaaacaaaggccactagctgcatgcccatatcgcgacggggaacgctctcgagggtgccagctctaagcaaaacaaggcacgtggccgcaatgcaacggcgcatggataactgaatttcagcaaagcggtaaattttggataaccatcgcattcaccaatcaggactggaagcactgaactcactcggccttacgtaccatccattcaaacctcaacttgc

SEQ ID NO: 41245 - DNA, 402 bp, Zea Mays
acttctgggagtggtccaccatgctccgcgtgtgtctcaacagctagcgcatatggggtcaccttactggtttgtctcctcctgtcccggagcgtcctattgaacccatggtcagtgtcgatggtgttcctcctgttcaggccatggagggttatgcccaagatgttgagcaatacatggttgttttaaccgattacaatgtttggcttgctgataaggcttgagcgactaaggttcttcttggcagtatgaaggtggaatttgccatggatctctgctctgcccaccactcaggcgatgtgggagtgggtgtaggctctctaccagccgagcagcaccgctctctacatctccaccttggagctcgctagctctattcagcagcaggaatcctccgtcgat

SEQ ID NO: 41246 - DNA, 450 bp, Zea Mays
gagactgaggctaccgagacagctccgatttctgaagttatgagacaatcgagtttagttatgacagaaagagccattaaggaaggtgcacctgctgtcgaagctgaacaagcagatgttgaggaagaaaatgttgatgaagaagaagaagattatagcattatgatcccatcaaaacccagccacttggattttgaaaaatctactgtgtctgaagctgatatgcccatgatgataaaactgggctacttcagagaagctgagaagaagcttattcgctttgccagggaagaaaccactccaacaccgaaggatgacgaagtagtagtttttaaaagttttttcagagcaggattatggttcccgctgaacgagatgattggagaagttttggataattatgaaatctatcttcatcagctgacccctaatgctatcgttaggctcagc

SEQ ID NO: 41247 - DNA, 990 bp, Zea Mays
gatggctcgacgaaggatcaccaaccggaacaacccgcaatgcatcagtgggaaccaattcagtgtcatcagcagaagccagaactctgtcatcaggtgtgctagcctctaaagcgaatccttgacccaaggcttgggctatcgccatgcaaccagaatgtggaggagaagaccctacgtgaacatccatggaagtgtgggagggagaacccactcggacaccctcgggggctgggtaagcgccagcaccatccttgagggccaagttctctgcaacagccacctctaaggctgaaggagcctcagtcactttcgtgggagcaatgcaatccagaccagcctcttggcccttaagaccacgctccaaggtcgatgaggcgcgggacgccgcccgggataactccagcccagcatcaggcacatcagtgcaaacatccatcatgccaccatctgctggctccgacaacagatcttctgggaccatgtctacaagagtttggtcaaagttcgccaaagacaattcttgcagaccaatgagggcacataaagctggagaaggaacaccactgctttccccgctggctaggtaacgccggctgttcttctgaattagagggatttcatcctcctcttcctcaccttcatcaacaacgtggacagtacacccattggggtcagttttggccagatcacacccattgggttccacagcagtcgggtcacacccattggggtcagctttagcaaattcaggcactagcacttcctcagtagcaggaacagaaggatcggcatcctgatccaagctagacactcgacgaagacgcctcttcttctttttcttccctcagcaagagaagtgggttgattggctcggcgagaacgcttcgggcgaacactgtcagaactctgagcatccaaatctttgccggcctcagtgatgggcgccaccaccagtgtttcagcaggagcggcatcagaagaatcttc

SEQ ID NO: 41248 - DNA, 2278 bp, Zea Mays
aaaacatccgctactggaaaagagcggttgtgagtattaccagttctccatgatcttagagctaataatattttctctcatttgacatttagctcttgcaaattctgcggaatggtttctggccttggctgttgtctgtaacttcttcgttctttctcatgcagagccaaagcagtaagtcgagtccagaagctaacagtacccaaagtcggccaagcatcaagcttgaggcctaaaccaagagatccttctgctcctaaatcttcaggtaagatacctctttgcacttctgttacaatttaatttcatgggaatgctaatcttgaggagctggtatttgtggcaaatggatctgagtctgacacggtagttttagggttgattaacttgatatgactaagagaacactaatagaatgtgccaaacggatgtctattttaacatttgtttgtatatggatttacctctagtttgtgcttgcattgccaacattacgaatttatgatcatcttgacaaggtttcttaaaacaaattatattgtccaaggtgcattaggctatccatactaagggctcgtttgggaaatacggtatcaagtgaccctggtcatttagcaccggcggggcaaacctgcaaataatttccccgtctctgtgctgtccggtgggttttgggtgccctgtggccatttggaaactgtcgagtagaacatgtttacattctccaaacaaaacagtagcggcgaacatcattgattccaaacaaaatagtagcagcacacatatgccaaacgtttggcttgtgcaccaaaggcaaaccgatacaagcattttgactggatcagttttcgctgaacaaaaacatatacaagccaaccgagaggcattttgattggatcatgtaaactcatgtaaatagatacaagcatttccctgaacaaaaactgtaaactacaagcaaagaagaccgtccaaacgtttcagtaggatcagttttctcaaaacagagcatgatgacaagttgactacaagcagatacaagagactgggttcagacacaagaggatgtagttcatgagacatggctggcggcttcttcaagatggctcccttccctgtggacatgcacagaaaattggcatcaaattaatgaaaaatgaagagcaatcaacaaaaaagatgacacaccacaactctgactctgcgaagttaactcaccctacaaggtgcataatcagcacataatcagtttaataattagtattctttccatgcatccataagaacaaagtgcagcagaatctacaatagaatcggaaccaacttgggactgaaagtcatcacctttctaaatccatctctcaagtatacctaagtggtgcgcggggtaaggaaacctgcatgcagtccttccaaacacgcagacagcgtgggcgtgttttttttgtctgtggcccgcccgtcccgccgaaaccggccagtgttggtgttcccaaacgaagcctaaaagggaataaagcagaccattaaagaattatattcgtatggcagtgcaactcaccaactcttgatgcaagcaatctaatgtagtaccatgatacaattttattgaagctcttgagttcaaaaataaagaaataatattggaaattttaaagtttcttgtatacatgtgactctttaacagctcacagaaaccttgataaagaacgatggtaatggcatgttttacttttactccctggggttattcatttccctctattttctgtgcaatttatttcctccaaagtgcatgttgtcttaaatccacataccattctgttagttatacatcatattttgcataattgcagtcacaccaggtgtgcgaaaaggtaccaccactcaagcaactccaccagcaaaagcaagcggcacttcaaaaagagtaccatagatcaagataatcatttggcgaagccgcttcccagccatttttctttttgcatagctttttcagatcttattgccatgtgtaacaccgatgccaattactgacttgtgcatctcaggtggataggttcttttcttttcattgtttgcaatgagggtgttaactgcatcagtatgtgatgttagcatgccatgagatatcattgctcaatgtgttagtacaaacagtgaaggaattcggattgatccattcatgttgatattgtggcgttcagcagtccctgtaatttcatgcaacaacgcagagtcgttcatcgtaaccaaaacctcaatattcaaaaat

SEQ ID NO: 41249 - DNA, 437 bp, Zea Mays
tcgtagattgtaactcgatggttcgtgccgggggcacgaggaagagagaatcggttgattttctgcaggttcgggccgcttgaggagcgtaataccctacttcctggggtggctttgtatgtgtgggatgtttacaagtggtgtcttccgaatggagaggtactaataagatgaaaatgatggggatccccctaggctttatatacacgactgtagggcactccctgcgcacatgttgatcacactcttccagcttatctcctagctaatagcgaacagactttgcttatcccgaggaaaacccggcacctccgagctatctccgacgtttaaggatgtcgggcgcgggaaaaacaagtagcttcaacaggatcacgcccaagtcgtgaataatccagacgtgagcccatcgccttcctgggtcggcccatttccac

SEQ ID NO: 41250 - DNA, 483 bp, Zea Mays
ttcaaaattcgcgagctctggcgaaggactgctagcgattagcggtggctgggtggaggatgaccttgcggagctagcgggggcttcaatttatagggctcttcggtggtgaccgtgaatttgggcgttgatgtgcggcggtcggaagtgaggaagaacgctggtgcagtgaacacgtgttcaccatcgtggcagtaactccgatggtcgacggggagtttagagggagtcacagcgatgcggtggcgcggttaggacacgcggcacaaggccaaaaggtggcggtgcaccggcgagccaatttgcccagccgcaaggtagaaagggaagccccgatgagtcaccagagtgacctccagctcaccgtcggcgaggatccttaccccgcaacgttatcaatccaccccgcacgcgaatcttaaggctggcgacgcgaatcgcggcggaggggtgatcgacggcggtgaagtgctctgaattccc

SEQ ID NO: 41251 - DNA, 528 bp, Zea Mays
gcgagaggtagaagatgattagccgcccgagtgagcaggagtccaggggagaccatcggctatctgagccaatactccctcgacctcactcggtgtgttcttggcgcgggcgaattcagggttcaggttttgcgcgaagagagggttctctcggtgtagcctcgcatcctgctcaacttgctcttaagcctaccgacgatcacgtcggcgggaattcctcctttccctgaagactcgttcgtcaggggtttctcccacctctgagatctcatctcgagatacaggctgcgtcgggtctcgttctccagcttcatgatgtcgccgaacattccagcgttggttcctccgtcggtgagcttctcgcttaggaggttcttccccgtgcacggttggctcgtcgtcgaagatgggagacgattccactcttccccggatgaagaggacgttggggtagaatggagttgttgtggtgacaagcttctttctatccttctttgagggcgaaggtgccagaagagcagcttggcg

SEQ ID NO: 41252 - DNA, 413 bp, Zea Mays
ctagaggcagagttgctggagcagggcctttgtaacctgctgccagtttcagttgtgatacgtggaccaccgggtggatcttactggagataggcaggtccaaacgatatgcaaccttaccaacccgagctgtgactttgtatgggccaaaatacttaaaactcagcttatgatgaactcgcagcgagagaaatgactgcacatagggctggagtttcatgtacacccaatcaccgatggcaaacgagcgctcagacctgtttttgtcggcctgacgatgcatcctgagttgggctcgaaccaagtgctgatgaaccaattcttgcatttgggagcgctcctgtaaccaatcagacagtgtagcagggagaacagcatcaatggaaatgccaagtgaccaaggcttacgaccg

SEQ ID NO: 41253 - DNA, 273 bp, Zea Mays
tacatgcgaagcgcgtggagcgtcgccatcaggaggatggttcccctaccactgttgggactcagcgcccttaccgctcaccgccccatcatcgttatgcttatggcacccctgactacaggacctggataaacttggagccctagatcgctagtgttgagtttgtaataaatgtttaagtcagtgtcttagtcttagtcagttttagttagtcagagtagttttcttatcatgtgtttctatgtttgtcgttgtgaacctatgatggatttg

SEQ ID NO: 41254 - DNA, 677 bp, Zea Mays
aacaccattgaggtcctgaaaaattagctccatgatgtgctagaggaacttgaggaggtcaacgctcacataaaatgcatcaccaaaacatgaacgcaatgggggcaggcagtgaagaggaagaggatcccgaggagattgagccagcttcctgtctggacacggcctactccagagtaccccctacacctagggcctgtgttgcctctaccactcagggttagatgggttagaattaaacatgttaggagaatggaatgactatgtaagcttagcttttggcaccaacttttgaactaggcggtaaggtggatctcctaatatgctgtaacccggaaaacctgtatgaacaatgcaatgaatgaatgattatctttgtttggttcaatataatgttgtgtcactattctcctcatgatatgaagtcactacttgaaatcttgggtcaaagtaacaacaacagaatttctattttcagatggcagctagacctcgtcgcggacaaaaggagcaaattcccccaccaccaccccagctccaatgatgcaggaactaatggctcaacagaatgagatcatgcaacagtttggtggagggcagcagcaatgcccaccgactgctgctacttatcaggaattcttaagcactcaaccgtcgctgttcaccaaggcggaaga

SEQ ID NO: 41255 - DNA, 448 bp, Zea Mays
ttgctcgatagggagttggtcggtagctccgccacgtaggtgtcggatatcataattaggggtacctagatcacaaccctaaagtgcctagacgattgagtaagaaggggtcataagaaaaacacgcttccgaccttactaacgcacgagggacccaagtcacaactcgccagaggctaactccgagcactatttcaaccacccagagcatggctacatgcaacatccgatcctggccttggcctcgggagaaatctctgccttgcccgagctcgaccttggccaaccgccccagcagatgcgcattaaatgccacctactctcccacgaatctcatagaggaccatgcgaagcactgtttcaaccactccgactcgacaattccgcacccctgtcaagctggggctcggacacatgcccatgctcccgagcctagcctcgactctct

SEQ ID NO: 41256 - DNA, 498 bp, Zea Mays
ggggcatgtaaacacatgcagtctccaatgcaacaccatgtgcttaccgagcacagagacatggttagtagcagtttttttttgagacaacagaaccacaggtgacgcgattctttcgcctactgcgctgtgttctgtcgctcataatgcctagagagcccttttcctggacatacgggcgacagcgatttgccttgcagagggtcagctgagaaacaccaatcattgcacttcgctcacacgctgttactctgaaacttctgtctgccttcctgcccatgcgcccatcggaactgggacccttctattgttcctgcctttttattacctttttacttgccctctctgcatgtttattccttttactactgcttcagtcgtagttcagttcatcactctcccgctgttcactttcagacatgacacaagcacggatcggaacacttgttgtatatgaactcaagaatgccaagtaagcatacaaagtcccaaccaaga

SEQ ID NO: 41257 - DNA, 527 bp, Zea Mays
cactaccattttggacgttcctgctcttatcttcagcatccagttcactatatatgcctcacagagaattgatctctttctctctgcaggtttttacctttgggtcagtccctctcaagacttacttacccgatggtgacattgatgtcactgcttttagtaatagtgaagaattaaaggagatttgggcaaatcttgtccgggatgcattggagcgtgaagagaaggatgaaaacgctgaatttcatgtaaaagaagtccagtatattcaggcagaggtatttttctgtgatatctcatttagttgatgtataagcatcagagaagctcaatacaaggttacacctctgctaacgtgtacctatgatggagtttaaatcagcatcatgggctcatgactgtctttatgacttatgattttgtcgaagttattaccagaagttgcctattgcatgctacgccatataaatctgtacaggacagaaagtaacaaaatatctaagttaaacttaagtttagtatgtggc

SEQ ID NO: 41258 - DNA, 299 bp, Zea Mays
acaaccgcgagcggtgtcacgagtgatgggttgggtgatccattctttcggctctggctcttccgaaagctccatgctgtggcccgaactgccaccgtcatcatcgtctccgtcagtgtctcctccagcttttgcggtgccctgtggtggtgcagggggcacctctagctgaggcgcaggggagggctgcctctaaaactcaaccttttgctgaggtgagggagaagagtcctgctgctcctgctcctgacgtcggcgctcctgctccttgtgcatgcatcggtgcagtctctccaggt

SEQ ID NO: 41259 - DNA, 336 bp, Zea Mays
agcagccacaccatgtaactaaaatgcatgtatttatagtatctgttgtcaaccctaattttggtcgggatgcgatattaggcaacatgaaaccgtcggccagcaatttcaccctcaaatagatagaagcgtgcatatggaacaggagcaccaaaaaatagcaatagcaaatgtgctaatctaagtccatgggatccttttatgaaatttggaccgtcacgtgtgttatcctctttcttgcgatcttgtgatgtccatttaggtataaacgttgccttcctcggtgtagctggggaaaactggaaaaggtagtcgtcgagttacctacaatgtgtc

SEQ ID NO: 41260 - DNA, 274 bp, Zea Mays
tagtagtcacataccgacgttggtcatgcacattgcgggctggccacggcagcggcggatccgcggtgaagttcccccaccggcgagaaattccagagccccgaggcaccaatctagccaaggaagcccgaggagaccctacgcatgccccccatcacatagtggcctccaatcgccggcgccagcaagctccacgtgcggcgccacccttctgtcgcacggcttctttgtaggcggctggaagtggtaaacaagggaagagcgcgacggtgtt

SEQ ID NO: 41261 - DNA, 429 bp, Zea Mays
caaaaagtggataagtataaatgctttcgtcaggacagcaagggtactttatggttcgaagaccggctggttgttcccaagaatccagaactcaggatgaaaattttggacgaggctcatctctccaaattttccatgcaccccagaagtaacaagatgtatcatgacctcagatccttatattggtggaccaggatgaagagagagattgctaagtacatatctgagtgcgacacttgccaaagaatcaaagccagtcatttaaaggtagtgggtaccttacaacctctccccataccatcttggacatgggaggacatttgcatggactttattgtgggattgcccaacacctctcggcaccacaattccatttgggccattgtggatagactaaccaagtcaactcatttcttgccagtacatacc

SEQ ID NO: 41262 - DNA, 466 bp, Zea Mays
gagaaagttcagctacatcataaaacatgtttgttaagttccggagctaaaaatggattatgaagctaaaactaaaaaaggtacctataagcctcgcacgctcagcagcttcttcaactcttttggcttcttcttgagcatcgtgagattctttttcattctttctaatagcttcatcaactatctcacggacgccgttcatccatacctcggagtaaaatttcgtgtctaatgcaaaagctttggctgaagggttttttatgtcgtcggctgagaaaacaaattctggttgaactacaaccttggcatgttcgcaaccagccttctccaagatggatgtagcccccccacgcaccagcaaaggcgcaaaaatctcctcggtcacttagaatttcgtcaaaagcatcggtttccccgcggatccactggacaactccatcagggtcgccacagatgaatctctact

SEQ ID NO: 41263 - DNA, 444 bp, Zea Mays
cttgagctatggtgagatccacatggagcttacggttgcgcttctctgcatctttttcttgggcaatcatctgacggtggtgccgagccaagaaataatactgtgcatcaagggtgagcaggtatgcagtgaggtacacgactgtggggtcgtcctcaagcagctgcttcccttccaatgcacgcatcctggccatccaaactggacggtctctctgaaagggcggaaagaatctgagcggggtgtcggccatatcttcttcatagatctgacatagggtcctcaatgccttgcgggcgacgacttggtaggtgtctttgaatctatgcccagcagcagtgacactccattccacatggtgcggactggatccaatgtatacagtcatgacacacttctttgtgccatgctcgacgaattcacgaccatcatactctggctggc

SEQ ID NO: 41264 - DNA, 276 bp, Zea Mays
cccgggtagccggcatatggcagacggatcaactcaaaaacacggttcaacctaacatttgaaccgcggatatcccagctcctcagagtctccgtcttcgacacatactttcctacaatctttgtggcctcggcctccacttcacgcacaaacacggccaggtttcaaccacgtaaatccaccacaaaagtaggacttcgcaccaatcggtcgcccagggtcggtatatgatgggggcacacttcgcccagtaaccagccatgtgccaagggccac

SEQ ID NO: 41265 - DNA, 391 bp, Zea Mays
gcttattcgttttgccggagaagaaaccactccaacgtcgaagaatgatgaagtagtggttttcaaaagcttttttcagggtaggattacggtttcccttgaacgagatgattggagaagtttttggatatttttgaaatttttcttcatcagctgactcctaacgctatcgttaggctcaacatcttcatctgggcccttcaaagccaagggatggacccaaatgctgaagctttctgccgagtgcatgagctgcattaccaaacaaaggccagagaagatgggctacatgaaaattttggttgttataacttcgcatatcgcaaggatacaaaggctccggtcctcagctatcgcaccaagtggccaactggatggaagagtgagtggt

SEQ ID NO: 41266 - DNA, 490 bp, Zea Mays
tcgatcacaagtttaattgatcacctgagggggttgtaatgtgaccgttgggatgtgtgatgtattactatgcgacttttggtttcccaaagcgtttattcgggctaaaagaccagcaccgcccgtgggagaatacttttcttgcgcttgctgaaacgttctcgcttattgtcaccgacatcaccgcgcattttctagtgccgcttgcatcacgaaaatgcttgtcaccggtgaactagccggagtgaaacagactgctcaccggcatagacggtacgtaatgtcgtcttcttcctcgttatcgtctgtcgcgaccgcttcgtcgagcgcgtcattgtcagagaagacagttagcgatccggcgtcgattgtagagctgctgccagggcatatggtggagttcaggatgtctaggatctcctcagggcgtgtgcatgaaatgcaacgtttgggttattttggaggcggtgttgcgcatgctctaggggct

SEQ ID NO: 41267 - DNA, 586 bp, Zea Mays
ctagggtttctctcagtgctaacccaagaattaacatttcatgtgaacaaaattaagcatgaagcatcaaattaacttaagaagaaaagatctactaagtgtatatctaaagaatcatgttccaaacaaataagatttttcaaaaagggaaaagtgttgaaaccctaataccaaccctaattgagctaattgagtacaaataaagaaaaggggtaaaagaccatgaaaaatataagatcatggcttaggccaaatataaacaatgaaatatactaaataagctacaataaagattatggaagcttggccaaaatagtttaataaaaactccaaacaagcttctcaagtgagggttcaatagggatttctgaaattcagaattctgaatttcagcccttgagccaaagaccgagcgtgttcaccttgatacctagctcaatccctaatgaccccattgacaaaattgtgcctaactaacctctctacctcataccagaagatggcatcgggacgcgtgccttggacacgtcaaacccacgatcttctctctgtgcgcggcagtgagacaaacccgatttctcccctc

SEQ ID NO: 41268 - DNA, 541 bp, Zea Mays
cacaagaagttgtacgtgatgtacggcgggagctgggagctcacctcccataggaacgtcaagtccgtgcgccaagaggtcctttcggcggaccccaggggtcccgaaggctgctccacatcagcggtggaggagcaccactatctcctttggggcatccgactgccccgaaaacatgggcaggggccggtatactaccgctcatcaccacccctgtcatggccaacatgcggctgcatcatgtcctgattaacggtggggctgggctcaacgtcattagccacgctgcattcaagcaactgcagatcccagggtctcgactgggaccctctcgtccattctccagagtgggcccacaactggtgtatccccttgggagcatcgcactcccggttactttcgggaccgaggaaaacttccgcatagagaacgtccagttcgacattgcggaggttaacctcccttttaatgccatcattggcaggccggccctgtaccggttcatggccattgcccattacgggtatttggtcctcaagat

SEQ ID NO: 41269 - DNA, 346 bp, Zea Mays
atttcgaaagtgatgagggagtccgacattgccgagccaagtactagggaagaatgtctacttcgggaaaaagtaattctaaagccgaaggtgaagccaaagttgatggtgacgaagaaaatcccaatattctttgtcgagtaagcctagccacatcgagtttcgaaaatctactgtaaaggctacatatttagatgtgatgaaaagacttggatatatcggtaagaaggatgatgatttaattagatttgctggtgatgaaatcgtcccggagccggaggatgatgaagttgtggtgttttagaagcttgttccacgttgggcttcggtttccgatgtacgaaat

SEQ ID NO: 41270 - DNA, 370 bp, Zea Mays
gaaaagagatgtcattgtacaatgactgaacaagaacaccagattcacccctcctcgtcgccggtgatcttgcgcccagatccgcgctagcgtcgcgattcacacctggccaagcactgatagcgctcctcggtaagaaatatcatcgctggagataagctccggccactgttctcaccgaccgtcatgtcccgccgtggtcaatcgcgctggcatcatcggtgttcgctgttatctggccaggctacgtgcctcaatgctttactatgtcatgctgagtcaccataaaccgcccgatggtcctggctcgtcaccggtgggtctgccacggtgaaggccacgaatcaccgcgccagtgactcatttcttc

SEQ ID NO: 41271 - DNA, 417 bp, Zea Mays
ctgacgcggaggaggtgtcgcagcagaggttgctctcgctcgtggccgagcgcctcgtcccaacattactgggcaggttcggtcctaaatctccagagatctggatgttcgtgttcgatgcgtcaatgcgggaatgacgttgtgttaggatgcagcggcagtttgtgagctggcatgtaatagtttggtttgttgtttgtggcatttcctggcgtgttaatcatttcgattcaaaggtcaaggatgaggggtatgttaacacccgggagcagaacatcacaaatgctattgatcttttcctgcacctcacgacaggcattgcgtcaacgtgatgttcgggaagtgcaatgagcacacacacaatatagttgtcgtcactgcattggctgttatccatggtgtcgctggacacctcgt

SEQ ID NO: 41272 - DNA, 513 bp, Zea Mays
tatgtgaaaaactgtgtcaattgtctatcaccgagaaaacgaataaggtgagccttttcccttttcttactttgtttctctcttttcccccttttttggtagcatgatgatgaatattttcccccttcttactttttatctctctctttttctttttttggtagtactatgtgttggcccaataagagatccgctttcttcaattctgagatggaattctatcgattcttactccaatttccctaactaccatactccatctaatctccagattctggatgtcgccatagtagaagatgctagcgagaagaaactctgaacgtaactgcaaggaagcatgacgtgggccgactctccatcccagatcttcctatcatcatcatcacatcattatctttttccttgccaggtcagtggtgctgtggacccattcatccatgaatcacaatctgcatgtcctgttcatattttccgtccctctgtgttatatagatagtcggcaccatccattta

SEQ ID NO: 41273 - DNA, 300 bp, Zea Mays
tgccaacaagctgatagtcgtttagaggggagatgaatatgtgacacctgaaatttcaaccctgaaaacaaactaaattccaaaatagtggttagagcgagagagaattgaatcggagtagggagagttctagcaaagtgtgctcaaatgattgtggaatagacatgggagtaacacttaatgattgaattaaaatccaagcaagagatcttagaggggagagggaagaacaaatcacaataaaaatgcaaaacatacacaaagaaacacgcgatttgaactactggagtttggttccaa

SEQ ID NO: 41274 - DNA, 308 bp, Zea Mays
tgtttctgatgtagacctaggcagttcaagcaattggtcagaccataacagccatgcacccggtgcagtagcagcagcctcaacctcaacttcaaccgcaagtgctgatgccacagatgccaagagaaaaacgtgcggagttcatgagaggtcatcccaatgtgattgcccactcagcggaccccatggatgtcgaagactggttgcgcacggtgcagcaagagctgcgtaccgctcaatgcagtgaccgagagaaggttctttatggtccccgtctgctaaggagagcagcccagtccttgtgggat

SEQ ID NO: 41275 - DNA, 522 bp, Zea Mays
gtatgactgcagaagctgtggtcgctgactttgttttcaagaacattcagccactgaaagacagagcatatccggcttatatgtaccgaggcttggctgactcaacccgggtaaccaacagaagaattcctgctgtggatttggtgagccggctcgagatgatactcagaggcaaggtgtcgaacatcggcgctcctgttgcatactcggcctggaatttgcctccttcccaggcttttactagtttcgtgtcaaatcctcctgctggtgatagcggtttgggtcttagagtgcgaccctctcccgaagaagttagtactttggtttcctcgctcggagaaattcctgacgacgagaggcaggttcattttgaggtgcctttgaatccaagtgatgcagcgataagtgccatgctggatatgttagctgaggtttcttctgatgctgctcctgctgaaacattggtggtggcgcccatccctgaggctgacaaagctttggacgctcagaggtctgtcaacg

SEQ ID NO: 41276 - DNA, 364 bp, Zea Mays
gcggctataggcagtggcaagcgacaacaattgttgcattgcgacgacgtggtgggaccctggtggcatagtgagggcagatggtggtggcaccatggtgccaaggcaggatcccaccaatagcttgcccaccagtcgatgtggaataggaggcaaagtagtggcgctgcgtgtgggatcccgacaacgcgatgaactaacgagtgacgagaagacaaggtgacactggtagcggacgggtctggtcacccactaccgatccagtcatgatcgaaggagcaatcgagccacgagtaggtcgagtagctagccgctagaggaaggaatcaaactatttgtatggagagcgggctgagcaatgaac

SEQ ID NO: 41277 - DNA, 489 bp, Zea Mays
gccaaaatctactctctcgcaatcgagggtgaatctctatgaaatttgggtctttgggcttgattacgtcagaagacatcttatatagtgcattaaggacttcactatacttgcgactaatagtttccaaagagtgaccaaacttattccgtatctacctaaatgattgtggacccccacatgcccacaagaaaatacctaaagcttccgttgtactgacacctcggcttggaagcagaccataactttccaccaacgtatcatgcaaacgtcgaaaaacagtacgcccatgcgaaacatgtcaaagcagtcgtcactattctccaatgttcgctcaactcattggatacctgtttcaaccattgttcttctagaaaccccactgggagagctcccccaaatgtctacagcacatagggcaacaagcaattctccagccctctcatcatcagatgtgtgtgtatcaggttcacacatctgcaaacacag

SEQ ID NO: 41278 - DNA, 339 bp, Zea Mays
ccaggtcttaatccggcactttgctggcgacagaatcacttgctgcaaaagctgaatccttagagcttttcagtgttgagagacaactgattagttccaaaggtaggaagttaatctccagctaggtaacgactcgttgatagctatgaaagctaggttttacggcttacagaaccttgttaagcaaggaatcagcaccacagctgggaatgtttgtgccattttcacttccagctcctgctctaatcaagtcaattccaacttggactatcacacagatagtgctaggcgagtaatcactaatcaggtaagttgacttgccataggggcacacacttg

SEQ ID NO: 41279 - DNA, 300 bp, Zea Mays
gcgagatcaccaaggggaggggcgccgacatggatccttctggcaaacgctggcgcaccccatccgagcaggttgcgcaccaagttgagtgccacctcggactggaagcactcgggagggtctagcaaggccatggcagctacgacggcagaagagcgcggagagctcggtggcgaatgggtgcagcaagtgaaaagaatgactgtcgcattggggggaatccctttttaaggaggactctctcgttcacgccccaagacaccgcagaaaatatcgcccgacacgcaccaaggtgaacca

SEQ ID NO: 41280 - DNA, 553 bp, Zea Mays
gcagaactcctctatattggatcagactaggggaagacagttctttggacctgaacatattcaagaggcagaagaacaagttcgaatgataagagaaaatttgagaattgcgcaatccaggcaaaagagctatgctgataatagaaggagactactggagtttagggagggtgatcatgtctatttgaaggtgtcacctctccggggtatgaggagatttaaagttaagggaaagttgtcccctcgcttcattggacctttcttgatcttaaagcgagtgggagaagttgcatatcaattggagttacccgatcatctgtcagatgtacatgatgtattccatgtgtctcagctgaagaagtgcctcaggatacctgaggagcagttaccaatggaggaccttagtgttcaagatgatctgacctatgctgagtaccctatcaagattttggacactttgactcgagttacgagaaataaggtgattaagatgtgcaaggtacaatggagtcaccacggagaagatgaagctacttgggaaagagaagaagag

SEQ ID NO: 41281 - DNA, 456 bp, Zea Mays
ataaaagcagcaggggcattagttaagccaaaagacatgactatgaactcggaatgcccatacctggtgcaaaaggctgtcttctcaatatcctcctcacgaatcctcgattgatgataaccagagttcaaaccaattttggagaacacctaggcacccctcaactgttcaaagataacctcaatacggggtagcggatatttattcttgattgtcacttgattcaaagcacgataatccacacataacctcttgcttttatccttcttctcaacaaacaatactggggaagcccatggcgatctgttaggcctaatgaaacccttagccagcagatcatccaattgccgcttcaattcaacctgctcctttggagccatctaatacgtggccttatgaataggttgcgtacccggaatcagtttgatttcaaaagctacatcgcgctctggtgga

SEQ ID NO: 41282 - DNA, 493 bp, Zea Mays
gagccgtggagattagacggtggctgggctgttcatttctcgccggagaatcgctccgccacggctccgccgttgggaccctgtgcaccgccgcggctacgtaggcacggtcgtgttctgtcgcctggggaagaagaagtagcatgggccgttgatccggatttgaacggccaggggcggacagagcggagaggtgttgagaaccgtagatctagatggacgatcgtggtgagatcagaggctaaacataactgtgaccgcagatctgggatcgtgcagctattaaggcataccggttcggtgcgcgctcgatctaatctgagtcgttagaatttgatccaacggtccagcgccacgcgtaccccttcggctggcagtcttttaaaagagcccctcaagtttactcggataaacccgtagtccatgcgcctgtagcctgggtctcgggtatctttgtagtttagcccctatggttctggtaattagcgcgccg

SEQ ID NO: 41283 - DNA, 387 bp, Zea Mays
gcgctgtcgtcggatttgtatcgaacgaaggagattagatcgggtctgaaatacatatgggtcgttgatcctgtttcgggtggctgggattagaccaatctgtaccctttcactacatctgatccatgccatcaattcatccacgggcggtcacgattagatgcatgatgtcgttttggcattttaaatctgggccacagatcggtgaacgggtgaatcagttggggtcatggcagggggattgtgggccgtggatcttggatccaaaggcatgtggcgcgtaccgtttcatttggtcgaggacttaatatgaaccgcttgtctgtgatccagcggctgggtggttgtgtacctcttcggctcatgcttttgctaaagagaccctgc

SEQ ID NO: 41284 - DNA, 1026 bp, Zea Mays
ctcggccgaccgagtcctcacctccgacatcgcccacccaggcatggccccggatcactcggtgaagagaagcatgtgcctctgggactagcgcgatcccgaaggcaccgccgacgaccatcccgaccactccatcgtcaaaggagatggagggagtgtgcatcaccacacccagctcgttctccccgaacgccctcttcatccagggaagggtggaggacgcactcatttccgacgatgagcccaccttactgggggaggaaccccaccccccagcgtgacgcacgccgacgccgaaacaggcatcgaaatgtgcggcgttaccatgaagctggggaataggatccagcacaacccatctcccaggatgaggcctctaaagtaggggaaacccccgacgaaagagcgctccaagaacgctgcaactcccaccgttgtgatcgtcaccacgcctagtaacacgagcgggaactagatgaacaggacaccatgctccgacccgagaacccgcttctcccttggaacctattccctgactttgctcgagcactaaatacattaagtgaagtcagaggggtcttgactcaaatcgccaatggcctaccacgcaccccaggcacggagggctatcgacgggtactcacctaagcggtgaaccaccttctccccctcgcccacccactaaatgatctatgtcacactgtcaacagtcggcgagacacacggagtaacatcaatgcttcgctcgatcaccgacatgaggaagagatgaggcgatgagaagagtacgaccaggatcatggtgcactggtacacagccgtgccaccaggaccgagtcagcagcaacctccaccaaaagtctggccccgggtctatcgaggcgacacgacacccgacatcactcgccttcccgagactatcgacgtgatcagcgctgggaggatcgaggggcgtgtggagtctccgcccttacctctcggctctgagcgatccaatggccgccaaacttcaaggtctccaacgtc

SEQ ID NO: 41285 - DNA, 487 bp, Zea Mays
gaattggggctagggttagggttttgggcggggcgctggaggctgcgggtgaagcggaggaggtggttgttgtggccgttcggcgtaggggcggcagcagggagacgacgatccttggggacgacggtgacaggttcatcgatgtcgtcgtcatcgagatcgccgcagaggtcgaagggaggggagacaccatctagccacggagacacccaagaggcaagaggcaagaggacggaatcgaatcgaggatgcgcagtggggatgggtgctcttcctcgtcggttcacacctctctcacttaccgaggagaggaagaagagggcgagaggcagcagcgagcgtgtgtgacccatgctccttaggcgctagacatgcgggggcgacagcgaggatcccgcatggttgttgggatggaggcagctgcgcgcatggcggggatgggggaggctgcgcgcatggcgggaaggagcggttgtgcgcatggcag

SEQ ID NO: 41286 - DNA, 362 bp, Zea Mays
ctagcacaccgccacccctcactctctccctctctgccccctgtcctcacccagctcgtagcaccgtcactgccattgcacagtcgttctgccatcgttgttgggcctcggccatgaccggagatctccgccgtcgtgtttcctcgtcgtccaggcgaccggagtctcccaacgtcatgtcgagctcccccgagcactacccctgagtaaggaacctcaccgagcccttcttttgccttaatttcgtctccccgcgatggatttgggctcgccggtgtcgctgctcgttgggccgccgcgtctccacggtgcctgactaatacagcctttccctgtgcccaaatcccgacctagaatgcccc

SEQ ID NO: 41287 - DNA, 422 bp, Zea Mays
ttggaccgatgagcatcaaggacatatcagagcactgaaacaaaggatcagagggtgggaatggacctgtaacgcgctggccacggcgaggtcacttcgcgcggtgctttggaccgatttgggggaagtgagcaattcgggggctctggtgaacaattgaaggcacgagttgatggattgggtgcttgactaccttgcggaaccgacgacatgctcaatttatagaatccccgagcggtggcccgtgaatttgacatggcacggtggtggtcggagaaagaaaagagcactgtcgcaagagattggtggctttcaccgtggcggctcaccggcgatcaccggatatgtgtaatatgagctactgcgacgtggtaagacaccaaggcacgtggcgcacaatcgttgagcggcgaactctggtg

SEQ ID NO: 41288 - DNA, 624 bp, Zea Mays
tgctgttacaaaatagatataggatttacgctaaatttcgtactcatttatgttgttttagctcacgttttacgctggaatcggcccgagccaggaccccgctcatgatcggctgcacgcgattttcacgccgtaattttaggccccatttgctgttacaaaacagatataggatttacgctaaatttcgtactcatttacgctgttttagcctacggtttacgctggaatccgcccgagccagaaccagaaccacatactgcatgatttatgctgtcaagtacatgtcattatgcagtcgtaaacgctgttggagattttaaatgttgcatggtttacgctatcatgtctcacagcgttatgcaatcgtaaaccgacatgcacatgcaaatattcgttcccgtgaatcgtggcagaaacttttccatttatgcatgagttatgcacatttccacatacctttatgcgtgcgtatatcggttgcagcgtctcagccgggatacgttgctatcctatgcatggctgacgcaagctggcatccagtgggccgaacggcgacctgatcggcctcctggctggggcttcgtccactaacggaagcccagggcttccattacctcttcc

SEQ ID NO: 41289 - DNA, 491 bp, Zea Mays
cacaaatgtcggcaaggcgtttttcagaccgtaaggcattacgacatagcagtaaagcccatccactgttacaaaagcggtatgcttcctatcttccctagacatctagatttgatggaaaccagagtaagcatctaagaaggacaagaggtcgcacccggaggtagaatccatgatttgatctatacgtggaagtggatacgggtccttgggacaagctttattaaggctggtgtagtcgatgcacatccgaagcttcccatttgcctttggaacgatgactggattggccagccacactgggtgatgaacctcttcgatgaagccggcgtccagcagctttcggacctcctttcggatgaagtcctgccgctcaacggactgtctccaaggcttctgactcaccggtttggcgtcagggtggatcttcaaatggtgctcgatcacctccctagggatccctggcatctgcgacgattcccagcttccgt

SEQ ID NO: 41290 - DNA, 449 bp, Zea Mays
attctgggagttcgattgtgtggacagaggagtcttcggatgaggatttggattactttgcggcattggatgtggctgcggcggaggcttcgccgcgtgtaatgggtgatgaggatcttccgggtgcgagtgttgggcataggcggcgaagggcgatggcgaaacagagggtgagtgagttgccacgaggtgataggcgtcatcgtggtgaggtggaaggtggtcgccttcgtgtggacggggctggcaagcaggaattgttgtcctcgccggctggggcgagtgtgggtgagggggacctgcgaagtctgtttgcgagtgaggaattgaggataatgttgttcaactatagggaaatgggtatcatcccgaaggttgagccaatgtaatgtgcgatgccctcgctgtatgtatgtaaccacactcttgtgtgatgaagctgcgcgctt

SEQ ID NO: 41291 - DNA, 426 bp, Zea Mays
cccccagaagcttcgaggcgtgccaatactatttccattccattccattccattccacgccgacgacataaatgaaaggccacgaacctagaaacacacttgttttttccgcacgtagggagggatatctatctatatctcgtcggatcggagagtagtgattcggatgatgcaggaaatggttcgtcgtcatggtcatgcatggaatggaatagtggagggaaacgtttgcctgccaacggctcaaacactgcgagaatgtagacggcggacagctccgatcgatacaacctgcgttggttgccatcagcacaaaagaaaggacactgcgcacatgaagcgtacgtaccattcacatattcaactcgtcgaaaacgagagcagttaattcgggtggaccacccatcgccggggcgcacaggctaa

SEQ ID NO: 41292 - DNA, 688 bp, Zea Mays
tcgtctggaggtagagggcagcaggctctgccgggcggtggtggattatgtgttgacatgcttccggagccacgacccagccatgtccttagcaccggtgctcaatggtccggtggccgccatagaagacgccacccatgagagcgtccaagacgctgtggagacagtggccgcacgcttccatcgcgaccctgccgatgtcgagtagctcgtacctgcagagataaggctagggttccgcttgaaggcggatgtaataatcttttggacacataacatacttttgagaaccgttaatttaacagcacttatctgtacgccatttgtcctcgctgtgtgtagcgctaccaacttctccttggtacttggcccccctaggatgtaggctcgacatgtcgaggctggataccagcataccaaagaaagaattggtgacccggcccccaggatgtagtctggactgggacctggacctgtacacaactttggctaggaagctttagtagcgcacccataggacccaccaactggtatcttttatcctttgattcatgcaacaggacctgtaggatttagcttgagaagccaagttgtatgcccggaccccctggatcacagctccaaatgctaggacacccatcgcagagtggtggagtgtgcaggcttagggtacggaaccaggctaagc

SEQ ID NO: 41293 - DNA, 306 bp, Zea Mays
ccggtgatgggactggcaaacttcaattggtcggctccgagagcaataggaagctataaacaagctagaacaggaagcaatcggggagttactgacccgaggagtgctggccacggaggagttcttcacggcagcgcgaagaatagggcggaatggttttgtggactgtgtgagttcttctggtgaaattgagtagattgctcaagagcttgtgtgcgtgatgtggtgaagaagaaggatccgagctcaatttataggccgatggccggagttggatgagaatcgcggagctgtaactgcgctggc

SEQ ID NO: 41294 - DNA, 365 bp, Zea Mays
gatggatggatcagtcaagagctgtagatccaaaattgcagaaatatctagctgtgatctttttactccctgccgtgtccaacttttgggataagctgaagattgagatgaggtggtagcaggacattcagattggtgcatcactgaaatatcacctgtgcaaatatcctgtatagtgcgcttcatccttaccccctcttttcttttgcccatagataatcttcaccctacgtgactaggctctatgaatttgcgtggatcttctggagggagccacaactacatctcgtgttcatagctatccttgtgcaagatcaaaaatccagccccctgatcttttcactgcctatataaagaacagccgg

SEQ ID NO: 41295 - DNA, 514 bp, Zea Mays
gtttcataggcaaagttttttttactgaatttcatgtgagtatatatgaactacggatcaagtagtttagagtctgtttacttggtttaggattatgattttctcagatgagattgtactgttttcagattaatatgactgcacttctgcttcctataaacatatttgaatgtttccacgtgttaaaataatctcttgatttgaaactgggaaatattttaatgatctttcaattcggacagtttttataaccttgaccggactttgtaccttatatgatgctgagttattactattcagaacagaacttgagatcattgtactagcatgctttaccaagttttgcaacgatacctgtcatatactatatatgtgctctttgagttgtatggctacatgtttttttcaatccaagattttctcaaactgtctctaggctttgcattgcaggtaataatgtattggacaagtctgatttcctgcacgttgatcccaatgtatgtcaaggtttctc

SEQ ID NO: 41296 - DNA, 380 bp, Zea Mays
tcccacggtcgcacaggcagatcacaaggacatggcttcaacaacgattcgatgcatccacaaccttaggctcatggcaacaacttcaacaaaaacaacatcgataccaagcccaagtgtcggctatgctacaagaggggacactgttctcaattgttagcatatgtttgatgaggactttatgctagatgagctacgccagatctgctacatcttatgtagtagattccaattagtagacgaacacaggagctacaaatcatatcaaagaacttgagaagctggcggtccaagataaatacaaagggactgaccagaccctcactacaagtggcgcaggtacgaaaattagccatactggacactgtttttaaaactcc

SEQ ID NO: 41297 - DNA, 478 bp, Zea Mays
gagcagacagcatggactaaccggaattgcgctggccgcggtgaggttgttttcacggtgttcttgagcagatttgggggaagtttaaattcgcgctccctggtgaatgattgaggatggttcttggtggctgggtgtgtgatgatcttgcggagctcacggtggcttcaatttatagggagcgaccgcgagcacaacgaatttgagcggcggattgtgatctgtaaaacggggtgagtcactggtggccgcgcaacgtggcttttaccgtggcggcacctccggcgatcaccggacatgcgaagcacggttagccacgacgtggtaaagcgtctggacacgcgacagatgacggtgatggttcaacggcggtgagaatcttatccgagggatcggtgagcaaggggaaaggtacggcggctagccggagtggtgtccagctcaacggcggtgctgatccttctacccgagatgttat

SEQ ID NO: 41298 - DNA, 471 bp, Zea Mays
cgcgaaccggtacgccatgggatccacacgatctaagatcaacggtcaccatttaatgaatatagagataagcgcctatcgtccgatttgaaatcgacggcccgaacgaagggggtatcactgatctaatcagaatcgttcggcagtaaatcaacgaccatgggtgcatcttctcctccgctggccacacacggcggcgctctggcccaacggcggagccattgccgccaacagtggttgtgcgccaccgtcaccccaaattctgattgaaaagagcaacacgtatggcagatgatgacgaattgtttggtggatcccataccttgagtcgagacggcaggggccccaatcacgtaccgcagcggcacccaacgtgcctaggaaattgcatagaccgcggatggagttgagaggtggcagccagggactcctacactgcggctgcccaaccaacactccccagctggcggc

SEQ ID NO: 41299 - DNA, 570 bp, Zea Mays
cactcctggaaacgcgtcgtatacgaatgcacgtgtcggtgttgtcggtaccgcacgtactaggtagaaggccccaaccatgtgtcagcgtctgaagggaccagtagagaagacctcaacgacggttgtggtgcggtatggcaggagtgtcgtcgcagctcacggttgtcagagcggagtaacgtagtcgaggatgagacgacgacaatggcaacaagattgtgctagaagaaggcgaagaggtaggcgttacgcatcgaggatcctggagtcgcgacggcgagagccacgacacacacaggaagaagagactcgacgacgctagtggagcgcgatggcggtacttatcggcgaagaactcgatgacgaatgtggtgcagaccagcgacagatggtgtcgacgcagcatgcaggtgcagcgcaaatcgacgggtgtgccgacgcagctcacaggtgtcgaacagctcgcaaaccgtgcgcaggagacgcgcaccgacggagtcgacgacgatgtagatgcaacagtgggggtcaacgacgaacgatgatgctgctgcccaaagaggcgac

SEQ ID NO: 41300 - DNA, 575 bp, Zea Mays
ggattttctatgatttatacaagttataggaattgtttttatattaaaaactcattttctaattcattttcctgattttataactctctggactgggcgccaattaacaaaaagcccggggtctaacctgcaaacactcccagactcagtttcactctgatgcggaccgcgggtttatttctaaaatcttaaggggttcttatgtgaaagtgcacggtctaagcgttatcgggtgactgcagccgttggatctgggtttgacgcttaggattagatctcatccctccccatgcggtacgccacaatagccgcaggatcccgcatcaatggttcagatttaaaatacgagcgcgcaacaggaatcgtccgatcacgatcggacgcgtcatcgcgccgttggccgaaccgttaacctgcttctaatcgtgaccgttgcataaaggatcaacggtacgcgctacaatggccgcgcccgcccaactccgtcgccggagcttgtttcccccgcggcggcgccatggttggttagccctaatccccgacatcacgcgcgaagcttcaatctgagaagtcct

SEQ ID NO: 41301 - DNA, 729 bp, Zea Mays
gtcaagttcaatcaaaggagtcgtgaagcttgaggaggacctaaggacactagaacaatcgaccagagtgcttgaacgaacctggaataagctggccgcggtgagggtgtctctgtggtggcggaaaccggattgggggatgtaagaaatttgtggtctctggtgaacgatttgaggcaatacttggtggcttggtgcgtgatcatcctacggacctgaccgcgcgctcaatttatagaagacaagagcggtggccggtgaatttgggagggacgcgcggcggccggaggaacaagaagttactggcgcgcgcgattagtgtccgactaccgtggcaagctctccggtgatagacggagggttacagcaagtcacagcgacgcgggggatgtgccaaggcacgtggcgttcggtcgacgggcagccaactccggtgacttatccggaccggccgcaaagcaaaaaggagcacggcggctagccggattagtgcccatagtccaacagtggtgacgatctttttaccccgcggcgttatccgggctaaagtgggcacgaatcacctgatcggcgcgaatctacgcgcgaggtcaccgacggcgagctgaccaagctggcagtctgatccaggcactgtaccatggaattcatctttagtgcgcctgacagccgaggtttagggcaggttttctccaaattttccatggcaacatcatcatccttctgcac

SEQ ID NO: 41302 - DNA, 372 bp, Zea Mays
ctgatatgtgtggttgggtggatgctggacgtggccgttgttgtatggttgttgttggtggtggtggtatgtgtgcgcgacaactctctggttgtcggctggttgtgctcgagacatcctgtccctggtggcctttgttttagggaaatctcttgttgggtgtgcacaatcctcgccatggaataggcagtaaaatctacgcggttgttgcgtccatccccggccccgccctctcgtgccattaccgcggccctagggggatattcctgacggcgagcggcctcgccggccgggtgctggttggctatgttgtgcacctgctactgactgtggctatcccgtccagagtctgactgcgaaggcctggtccag

SEQ ID NO: 41303 - DNA, 489 bp, Zea Mays
tcacgggccagttaaccgtggaaacaggcatggccgccggcgtgaccataggcgggccggcagcaactgcatcaacaggcgcgcaggagcagcaggccaaccaccaataagactctggccccaccaataggatcgtatcctctcctgaggcaggcccgggggccactgtcagtaccctaaattaggggtaccctcttctagagcataaagacgccgcacccatacgatgactctaggccacacggagaatggcgcctgacctcatcgcgtgggcaggcctaagggcgccacgcggcaagaaaggacaacacatcccagtacgtatcatgggggtccggaccgccacagaaggacacatcccagtacgtgtaagtccggagcctccgagtaagatccgaacctcagcaaggtcccggaacaaggtggaccttagcgcaggtgggggtccgacgctgacacatgtccgggctttgcccttcacttcccgct

SEQ ID NO: 41304 - DNA, 347 bp, Zea Mays
gagtgactaagggttacctatctatgggggatgactacataactatgactacataactcttggaggggtgagatccacctatagtacttaccacctaggccaatagtggggcagcatgtggtgtctactacaagtgatatgaggaaaggacaaggtggatgatagaagggaagatttgtaccatctacatttgtccaaccatgaggcaccatgtgggcatggtgtggctcgcttggcgatgacgtggaggaatccaaatgaaggggcaatttgggttgtggcgttgggttggaaggatgatagaagggagagtatgccagggccaaaaatggattgtagtgattttt

SEQ ID NO: 41305 - DNA, 397 bp, Zea Mays
gctttggttgcagaagggggtagccaagcacttgctctcaccgatggacttttgaggtcaatttattgcattgtttatgtggtacttttcctttagtttaatgttaactttcatggtttccaaataattttacactgcagtttatttttaccacattatgtgaagtgctccacctcaactgcagatgtgtagcttttaccagtgaagattgggaaattgcagagtcaaccctgcaattttggtaatgatgcttacctttcacctttattttcatgtacgaaaagctcattcacaatatcatgtaacaattagtccatgtacttcgggagcaaatcatgggcttcttttcttggtttgtattgaggtggcatcagtgttttgtctgtgtgcactaatt

SEQ ID NO: 41306 - DNA, 376 bp, Zea Mays
ggagtagtgtggaaggaggctccagagtcgaacacccaatcggtgggagagggagagggtggtgaagccatgaggtgcgaggagagagccaagggagggactccgacagagccactaggacgggagggagacaacaagggctcgatcgccagggaggcaatcatagtacgggggaagacacgtggtctaggcacgtgacggcctgcatgagggtgaagctcaacgcagtcacgaatgatagggctcatggcaatgatcgaaggccatagcgtgtcgtcgtggaggaggatgcgcatagcgatcccgagcgtcagggaagaggcggcggcatacgagctgtgcgccgcgcccgtgggggcaagcaagccggcgccgg

SEQ ID NO: 41307 - DNA, 493 bp, Zea Mays
gaagttgcattgtagactcctcgtgctctagcgggtctggtaacattcgtggggaggtcgaggaggcttcggtgtggtccgaacatgagcactagggcttctgggcggcgacatcaatggtggcaaggagatggtgctttaatggttgtaggttcgagttgaggggaattgagggtgtgggggtctagagcactagagcaatcgaatggagcaccaactcttttgctatgtttcttagctcccgcactcttcaaatggctaaacgctgtggtatttataggtctcaagtttaaaactagtcgtttgccaaaagctacacattctgcgtacgcaacaaacgacttctatcaattcaaccgttgttgctcttttgtgagcattggacaaaaccggtggttcaatggaagtcacgattatgccttgtgtacaccgtacttgcgcaatggacatctgcaccagatgtcataccagacatgtcacgacacacttttcg

SEQ ID NO: 41308 - DNA, 675 bp, Zea Mays
cttaacatctggtatcagagtaggcagccctggagtcgcttccaccaattccaggtcatcgtcctcattctactgtcgcagtcggcatggaggtcgtgatgcagaaggtggtcggcatggaagcggtgatgcagaagatgctcgacgaaatggcgaacatagaatcacacatcacggacgcgatgtgtgggcactgcgatgacttggagcaccggatggaggaagcataacagaaaaccgaagcccgtctcatttcccttgagatggaccaaggcgagtttgcagggtggaagccaacgctggagaaacatctcgataacctactgtttgaggtgcaacgcgcgaacaagttcatgaaatgcgaggcgttcgaccatgacttcacgcaatcgggtcttctccaccctaacgagtcggcgaccaggcgcacatctgccagggttcagttcgtcgacgggccagatggccaccgtgacgacaacaatcaacgggtacacgagtggggtagaaattttccccacactcatgtcctggtcaacaataacttccataatcccatccctggtcgtgtgaatgatacgttcatttctgggcatgatcgggagtcccaaggtagtctgtcgtgcataaactttccccacttcgatggcgacaaaccccagttgtggaaaactt

SEQ ID NO: 41309 - DNA, 750 bp, Zea Mays
gggaggaagaggtcgaagatcatggcatgctcacctatggctcaaatcgacgatgagggcttgtcctctggtttgaagagtaaggcacgcgttgttcggatgtgagggtgacaatgagatggtgactggactgtgaggttccgtggcaagggcatcagtatttataggcggaggaacgacaatttataatggagggagtctcgaccggcgtactgtgattggcgacgttgccacagtgcaatcgcaacatcccgaggttggcagggtaacttggctcatggtgggtcattcatttagttgtgattgtgacaagtgactggcgtgtgctcaggcgggtgcatgaggtcttgttggagtgactttctgcactgaggtatcacttcaaggtctgcaacccgaccctttaatatagcagtttggcatgcatgacaaggctgtctcagggcagagggtgtaggtggggcttgctaggacgcacaaatgccaaggcatgtagaggtaggcttacgatttatttacgcatgtgttttgccacaagtggttgtgggctccctctgtctattgtgggcgggcattagacattttcaagaatttacctcgatgaaagacaagcttagcctataatttagaaggatatcaaggaataacccatagaggcactggtttgcatagctatcaataattctgaacaagttttattccatagttgaaaattgggatgttacaaacctaccccacttaggtcgaatc

SEQ ID NO: 41310 - DNA, 637 bp, Zea Mays
gagagagagggagaagtaatcgttgccaagccatcacgtgatacaaaaatcgttgtgacttctggacagtcctgggtgcgttattgggtggcactgaggcgctggtgtcggcaggaaaggcggctggtcaaaacactggggaaatcctacgccggtctgaagaaccaccacagagttaccacaccgtgtctcccgtagctagcccacacgtcctcttcttttcttcgttttctcttttgtttattttatggccggtcacttgcatcattatggttcatacaacacgttaagtttctgcatgtttcacgaccatgtggaatgcctatagtgaccgttccgcgtccacagattcttcctcaggattatagacctcttcgatttctggatcatcgaatagatctctggttcatcgttaaaaaaatcaagatgaccagtggcaacgtgagattgaagggcttgattgtaaggtaaaatagtgttagattagaggtctgtcccgtatgatagggttgacgttttccacctaataaataaccaccaccacatacctttttacatgcaagattgctacacagcacaaatttaaatcatgataagttggtaacagcttggtcgtggatttataaacaaatctttc

SEQ ID NO: 41311 - DNA, 816 bp, Zea Mays
ttcgtcaaaagaatggattatgctccaacatttttcaaggtaactatttagagtaccatcaaaacattgatattcttctaacacctgttggacgaccagctgagaatcaccaaatgcctttacatgttttactcccatacaatttaaaagttccaagctgaacaaaagggcttcatactcggtttgattgttagtgcaataagttttcaatcggctagagaagtcgaaggagacattacttggtgaaacaagcacaatgccaatcccttgcccttcattgcaaaccgatccatcaaaatataaagtccaaggagtaatagtgaggtatgacatgtttagtttatgagtatcattattccgatgttctacaataaaatccgctacgacctggcctctcatagatttcaatggttcataggccaagtcatattctatgagtgcataagcccacttaccaattctaccactcataattgggttatgcaacatgtatttaattacatcggcttgaccagaaacaattcaatgactagacagtaaataacatctacacttggtgcataaaacaagcataagcataacttctcaataaaagtgtacctcgtttcagcatccaccaacctccgacttagatatgtcaccacatgcttctttccttcagtttcttgtgttagaacagccccaatgaccttatcttcagctgcaatgtataatcggaatggtactcctactcgtggtgcttttaatacgggagccgaagacaagtattttttaatgagatcaaatgcttcctgctgctctgcccccaagcgaatt

SEQ ID NO: 41312 - DNA, 504 bp, Zea Mays
ttgccttgctgcttcccatcaaacctgttttcgtttcaaattttaccttgacaccgaatcttgctttgcctcaaccaaaaaaataaacagaagttgtacagacggatctgaatggaaggatgaaagatctgtagacatcagtcagccagttagcaagtttagccatagcctgttagcatgaccacttgaccaccagcttgatacatcttggggcctacttggctacttcatcttcttcctcttgggccttcgatgctagtttccttccaaccgcgtgcctaccattctgtagttttgcgacctaaaagctgtttgattcgtcacaaaatcaagattttttttattacacgagttaggatgatcgagttcaaagtggtatcatgaactttctgatcagagtaggcctgcatctgtatgtgggatgcaaatttcacgtgcacggccccagaactagccattctgaccagttcttgtcctaatctggacgcgatgtgtgctgctgtg

SEQ ID NO: 41313 - DNA, 559 bp, Zea Mays
ggaatgatctataggagaaaaaaggtacttaatgaactggtatcaccaaggtcaccaaactacaataatattcaaagacttctctctgaatagagtacacaagcattttgttgataccaacgctcttagtcaagttttgctggtaacactgtactaagtacattttttcttgtgatgggacacaaagtacaaactgaccaatgatcatacagaagtacagttgaatgcttaatatatgaggggtcctactaccatcgtcatgtatcacgaaaaagttaaatcttactggctagtcatgtttaagatcatagagcaagctgaatcaagtatggccgggcttctgcttgcaggagctctaatcttgagccaacacccaatcaaagccctactatgcacttggcagagtaagcagcaaagcatggcttgcatgatcagatcaccaacaccaaatagattcatgggtcatgacaagtaataaggtagtttcgcgtgaaagtggaacagcttatggtttgtaagtccataattagggttttagccgattgcatttgtcttcgga

SEQ ID NO: 41314 - DNA, 383 bp, Zea Mays
ccgagggctgagcaggtatggagctgggatagtagtaacgtgcagtgctccagcgctttccgaaagctgtacgtgtcatcgatctgttggtgcacgcacacacacacgtacgtacgtagaaatgcatgacaagctagccaacagtcttggcaactccattggccaccacgaggttctcggttgttgtgcctaggctgtacatagagttctctctactctcacaatcaaccttacaaatattttagaaagtcagcaaaaagtaggcaatgtgctcaaatcttgaataagcaattaatgtattttagtttgaatgcacccacttttaagttagatctgctgctattgtttcggacaggataaggaccaacaaaagtgattaattc

SEQ ID NO: 41315 - DNA, 312 bp, Zea Mays
tcctctctatcaaagtgagagggttttccaagtggaatagaccataaatgtgcattcgaattgtaaggcatacgagaataatcaattgaataattttgattaactgttttcttttttatggatgagtcttcgtcgtcgtcccttggtgaagaagatgaggcgtcgttgtcgtagtagatgatcttcttgatgtgcctcttcttcttcttcccatctttattcttgttgtttgagcctgagtcggtgggcttgtcaccttttggctcatcaacaaagagagtctcctccttgtcgttgatcatcatccccttg

SEQ ID NO: 41316 - DNA, 411 bp, Zea Mays
ttaagcattgttgacatataaaatctggagataaatagccctaaagtctagctgtcagtcagcccttagactgaattctgagaaacagtgaagttggatgaacttggagattgattttgagtaggatcctgtgactatttcattgtggatactataacaaagttagagagggattataggacaacaatttctctataggccgaagatcatgttgtcacacaagaagtggagaataaggcatttcattcaactctgtcaggcgctctgaatgggatcctaatggtacagtgcctgacaaagatcacagattcagctcccctcgccgccggtgacccgcgcgctcgtattcgtgccgacgccgcgattcgtgccctctatggcatggattatgatcgaccatggaaaaatctt

SEQ ID NO: 41317 - DNA, 347 bp, Zea Mays
aaaactgatattggcaggctttgggcatcctttaaaataaatactcatccttcggttaaggccttctcagcagcggtttcttcggtggtgggcaacagtaaaaacaccttgttttggacagataaatggatcgatggccagagtctaagtcagttggcccctcatttggtcaagttggtctcttctagggctaaaatgaggagtgtccacgatgccctcaattcaaggaactgggtgcatgacatcagaggagctatcactgtaaatgttttgtctgatttccttaatgtttgggacctcactgcagactgggccttagacccggatcaagaggataagcataattg

SEQ ID NO: 41318 - DNA, 385 bp, Zea Mays
cggacgtcgacaagcagagcttcgcggcagcgcaggaactccagcgaccaattctcggctcgcccgttgacaatcccccccgacgcgactatgaagacttgcagggacctcctgcgaagtgccccgaccctcttctctctcctccaccctaccttctctcagattttggtctacggtgatggcttccagcacaacaatggcgctcttactgtgtggttcttcggagtcgatctcgatgccatacgggattgttgaatcgcagagcaccacagccggtatttaaaggcgcaaggagataggattgaggcccacgaatcctaaccaccatgatccgatcgcaacaacctaccgcaatacccgatcgagctcggtcacggtagaagat

SEQ ID NO: 41319 - DNA, 295 bp, Zea Mays
ctgggatggatgtaccctttttgttgaagctctgcgatttggagttttaattctgctaactcagtaggagccatgcggtatggtctctttgcgatgggtgtcgtgccagggatcagatctatgtagaactccacttctctttctagtggcattcctggcaactcttctgggaatacatccatgaattcttctaccactgacatgctttctgttgctagattaaacaccattggatcattggcgggtggctaagctgacaagagtctgactttccttggtggtccgtgagaaggac

SEQ ID NO: 41320 - DNA, 328 bp, Zea Mays
gggtggcacaaccactcgcatcctgagcaaagatgacctcttacaaaccaaaggccgggagctcgcctacccaaagaactccgctgtccacctcgcccacaaaggagtggacacggatcactcgaaaaaaggaagcaaacaccccgagtcaggggacgagaacacgccgagccatctttccgacgctttcgcccacaaaggaggacggaagaaagagcgccatcgcgctggctcctttctaccccgacgtcctctttattgaggggagattggagtcatcacccatctccgacgatgagcctaccatgcaaagggaagaactccccag

SEQ ID NO: 41321 - DNA, 625 bp, Zea Mays
aatttgttgagatactacataacagtatctcctccttgcttgagtctcatgaatttctcttgcttcatatggagcactctttctggaatgtagtgctcacgaaatgccaatttaaattcgtcccatgtgacctgatgtccggcaggctgaatggccacataatttccccaccaggtgctggcagggcctcttagttgctgagccatgaacaacggcttttgggtctccatgcagcagatgagtccaaatttctgctcaatgacccaaacccattcgtcagcctcgaggggatcttctgctttgacgaatagtggaggacgagtttccgagaaatccaagtacgaagttttgcggggtccctgtggataagccctctcgccttgttgctgaagttgttgtcccaccatttcacttaggaagtgggtgttgtcagcggtcgcggtgaccaaggcagcgatagcctcggccaatgtgggcggtaccaatggtggattgggtgtatcctctcgaccacgggatgttcccgcgctgtcatgtgcacgagttctagatgacatctgaagcaaagaaatatttgggataaatataccatgctaacatataccatcattttacattaccaaaa

SEQ ID NO: 41322 - DNA, 406 bp, Zea Mays
tcaaccgatttggtggtaatcccaaattggggagctgtggggaatgatcggagctgagagttggtttactagacgcacgattacctagcggaacgtgctgaggcttcaatttatagaactagtgggcggtggccacgaatttgaaggaagatgcgtggcggccggaatgaaggggtgagtcactagcgcgatttactgtggcactcaccggttgaggagctacggcagttatcggtgagctggtgtggctagagacgacgtggtgaaaggctcagagcatggcacaatcgctgtgaagcacgacaactccggtgatggccataaggccacgtcgccggtgcaaagggtaggggacagcgaggccacaatagctcatacaaatccgcgacgagatcttttcatggtg

SEQ ID NO: 41323 - DNA, 401 bp, Zea Mays
ctcggaaggatttaactcatggttgggaggtagtccgccctccctactggtggcgtaggcataggccatcaaatcagtattcatgccagctccaatcggccgacagggaggagagcagaaggaaattcatcaggcatgcagatgggaggtgccttaattgttttgcccaagaccatagagtggcggtgtgcaccaatccaacaagatgctggcgttgctttggggttgggcatcgagctcgtctgtgccccaagcttaaaaggccatcctctcctcacagttcttcatgctcctttcagccaaggccagtacctcccctcccacggcagtcaagcaagctcaaccccacctcctaccttcgcgcgctcacggggtggtcgccgcccatggcttaccctggg

SEQ ID NO: 41324 - DNA, 605 bp, Zea Mays
gagggcccagtgtggctcggtattgccccagcaataccttagcctaacccaacaacggaccagcagtaaaacaaatcccaaccctagccggctatttcctgttcactccgaaggaggcgcaagccacgactgtcaacgcctaccaatccacacgaccacaaccgcccccagcctaaggtccgagctccgtcagtcgtgtgctggtggcccgaccacaatattcatgacgacgcacctcctcccatcggtccagaccatccgcctgcattgagatccttcccgcagccaagctcctccccgacaactacgtcgtgctgagctcgtcctatagaacgttgctcctcccacttcctaggatgctgcaccaatctcctcccctacagccgcgtgtcggcgctcgcgtcgagctcctccccagcatttcctccccgactaccatcgcctgtgagtgactttgttggcgtcgagctcatcctcggtcatcatggcgagctcctccgagaccattgtgtgggtgcatgtgggttgtgccgaattaaacaaacaatttacatttaaatacactgaatacatgtggcctctgtacagcattgagcattccgcct

SEQ ID NO: 41325 - DNA, 453 bp, Zea Mays
ggccgattgaatgaactccacgatggtacagtgaccggattgggccgccagctcagagacctcgccgccggtgatcttgtgctcagatctatgccggcgttgcgattcacgcccgaccgaactcggataagcgctcctcggtaagaaaaaacacgctggagataaactccggccactgttctcaccgccgtcgtgtcccgccatggttagtcgtgttggcatcaccggcgttcgccattatccggcctagctacgtgcctcaacatttcaccacgtcgtagtgagtcactataagccactggttcgtcgccggtgaggctgccacggtaatagacaccaatcacgcgcgctagtgacctcctatttctccgaccgccgcgcgtcttcatccaattcccccggccaccgctcatgcctgctataaattgagcccgtcgtgagctccgtagggta

SEQ ID NO: 41326 - DNA, 288 bp, Zea Mays
tgtgcttcttgaataccccagcaggttcctagctccttcgggagggtttcacagtccaaaatggtcatatctccaaaaacctaactcaccgcataccacgtgttcggtgaaatgcccacaccagccaaaaattctccaatcaatcccaaatttttcaggcaccttcacaacacctccagtaacatattcgccaaatttcacgccaatccaatataccaggcttcaatttcactcaaatccccgtttcgagcgatcaattccgagccaagtgcccaaattccattttct

SEQ ID NO: 41327 - DNA, 315 bp, Zea Mays
ttcttaaagctggtctaaggttccccctgaacaggatgattgctattgtactgaagaagtttgggatttaccttcatcagctgacccccaatgctattgttagaataagtgtttacatttgggcccttcgtagccagggagtggaaccgttcgatgaaggtttctgccgagttcatgaactacactatcagactaaagccagaggagatggtctgcatgagaattttggctattacaacttcgcttatcgtaagacttcgaagtttccagtaataagctaccgaagcaaatggccagccggatggaagtctgaat

SEQ ID NO: 41328 - DNA, 324 bp, Zea Mays
tgctccagtacacgtgtgtagacgagggtccagaattgtgttacagccaccgtgtgcgacagctgtaccaaaccaagtcccgtccactgacctgactgattcgatgcgccctcatccatcagcctgccacacccagacgctgccaaactagcaggcagtcaaatcatctcatgcactaacagtaacagttaacaggtgagaaaacaaaaatctcgcgccacaacaagctttctgaaccatccaacacgacgatggaacggcttcacgtgccgtgtgaccaccgtttcagcaggcagcaggcttcagcagcacactggcatatcg

SEQ ID NO: 41329 - DNA, 350 bp, Zea Mays
ggaatattaaagctttggagtgatgataggtactccggaactccggaggggccatcatcccctgtttgcagcgtgtgcccaagctgccctgccctgcctgcctcctccaaagaagcttcaccacctctctgcaacaaaacactaggcatgctagtgaccaaaaggaagtctccaaagtggcaatcaatcggaatcaacttgtgtgccacactaatcaataaataaatatcatggtgtcacctcgacaaggcaacaccaagcgagccattatatcatggtgtcaaacatctatcaagcatctctcacatcatcctttcagtcttaaagcatccatccatcatccatcaaat

SEQ ID NO: 41330 - DNA, 380 bp, Zea Mays
ttcgttcaaatcgcgagatgtccgcgagattttcttcatcaggagtataaatccctgtcgccctagtcccttggccaccattgacgaaccgagagccacgaccgccatggccgctgagagggaagaagaaagggaggctaccgcggtcaatcctcgcagttgctggcgttgagtactcactgggagctcgggactgatggtcggggtatttcgaccactcccatagcattcccatgcggtgtggtggttgggagtcgtcgcaatggctcgttggcgcacggtgcccgccgccaaactacacgttgacgaagaccaccttctctgcgccattcccctagggtatggattgccctgggatgttcacgcgtgtcggtatgacg

SEQ ID NO: 41331 - DNA, 349 bp, Zea Mays
aaataaatgtcttgttgatcgattagaggtattatatgagcattattagcccaataattattggaggcgagtagcgttcataagtcagtccttgttaaaattgaagaacaatccgataagatatacacataagtgctttaggtccttcagtagcaaatgtagtcttatggagttttatgccatatgttaatgcctctatgttagacccccaaaaatatgctattttaggtgacttgtgtgttaactaatttaagttgagcaatggttaagaaacgctgattaatctgctccaacccatgtttttgagttgcgatgtcaaaaatagtttgctaagttttatactgtgttg

SEQ ID NO: 41332 - DNA, 372 bp, Zea Mays
ggggcggcgcgcttaggtgatcaggttggactttggagactcggagatgagggacagagtggcggaccgggatctgctggagcctggcgggcggcggctagggttaggacttcaggaggagtcgagcctgtcgaggtctgggtcacatactcggcccactgggctggccggctggcacatgagagaataggatctgggtccacatgtcatatgcccaacgggtgatggtctatccatacccgcgaaattattaaccgcggatactatcatactatatagtatctaaacccgtacctgcagatatgaaaatccaccatatccgtacccgataggtgcggttatttacccatatctgtcatccgttatgcttgc

SEQ ID NO: 41333 - DNA, 472 bp, Zea Mays
ttcggatcagattgctagctcagttagctcgtcaccgacgatccacgcgtctggatgtgcgctgatcaccgtgattcgtgcttggaacgcagaggatatccacgggaaggtaaaagatctcacgggggaatggatttgatcgcggattgaagtttatcactgtgcctctagccgtcgcgacgtggccggaccgccagcatcgccgtggaagctccggtgaccccgattgcgccacgccgtagcttcttactgtgcggtagtaatcgtggcacccttaggagtattatccttgcgtcgttgcaccggtgaacgccacggtcacagccacctgtgttcttccctatctccggccgccagcacgctgtgatcaaattgagagccaccgcccccggagcctataaattaagtgcatcatcggcttcgttatgtattcaggcatctagtgcacccacccgtacctcagatccccgac

SEQ ID NO: 41334 - DNA, 610 bp, Zea Mays
gaagtgttgaacctgcaccgatgaaggagagaggaagcttctctcttttatccaagtctgtacatatgaaagcaaccagggttgaactaacttcagaaacagccttaaatcaatcatccagtgcaagtaaagtgataaaaaagatgactacacatcctacagacttgaagaggttatagacagatggacatattagcatctattcatgaatattaatagtgtatcgaataatgaacgtggtttgaaatatgcagggaacacatgcaagctaatgcagtccctcacaaatctaaaactgctttatcaaaaacatacagcaagctagcatcaaatgggctattggccacctccatgaatgccaaagttgacacgaatgccaaattagggtaagaaattgtcatccttaatcttgtgcattatgaatgcaccatatttaaaatttgttctgcaggttctttttgggcatgctgcatgcacaatacttctcaagttctctttggtcttctgtgcatgttgtcaatttgtcatggatgagacagtttcactatttttcagcgtctttgatttatctggtacaagttgacctgatattaacctgaatgaagcctgc

SEQ ID NO: 41335 - DNA, 418 bp, Zea Mays
ctgttctggccgtccgattagagatcgagcgccaagatcaaaacagcgccgcgcgaatcggtattctacactgaccgtcagatccagatctatggtcagtatccactgctacgtgatcccatgcaagccgttagatatcgatcggtcgttccacccccaatcggtatgcgcgagccactcccattcattcgataggcatccgacgatcgagcttcattttccccccagaccaaccccggcggcagcgcaagtatcacacagcggcgcgccatggccggagaaatcgcggtgaggcccggctacaccaactctgaaggaagtccgctccacacgaagttaagactatggcgaacccatggggaatgactgctccaatcaccttacggcctaaccctactgcccacgatacgggtggtgc

SEQ ID NO: 41336 - DNA, 547 bp, Zea Mays
gtctgtagctgctgtgcgggtaaatgatgttgctttgataagaattggcaagcttcacatctctggactaactcggcggcatcgctcttcgctgttggccaatagaaaccagatctgagaaccttcccaaccagagttctggatgcagcatgtactccacactgcccgacatggatttcatctaacagttgcttcccaatagccaagtgaatgcacttcatgaggactcccatcgcaccttttctgtacagtgtatcccttatgagggtgtagtgggctgactgtcttgcgatgcgttctgttgccgccttgtcatccagttcctcttcattttttatgtacctgatgataggctctctccagtcattggggtccaactctggttggctcaaggtgttgcactcttctgtctgatctgagagaatactcgggcgtgaaacttcttgaacgaagatcctgggtgggacctaggcccgactggatcccagcttcgacaacgcgtctgctgccgcgttgcggtctctttccacgtgatggaactccaacc

SEQ ID NO: 41337 - DNA, 353 bp, Zea Mays
atgagcctcatagggcatgtattaacgcggcgcaaaacccatggggaggaaaacaacataccaatatccaaacaacctcacccatattggatcaaagagccggtggtctcccaccggctaccatcgatatagtaagagaggaaatagctggggcgttccgagataagctcggagttagttagtccccgggggcagtcatatcgtagaccttatggtagccattttgactgtctcccatacccacagcggaccagaatacccgaattcacgaagtttttgggtgaccaaggaaagagcacgcgtgagcatatagaccagttcttagcacaattaggagaattggccgacaccga

SEQ ID NO: 41338 - DNA, 304 bp, Zea Mays
catgattcttattactctatccaccctggtagcactaagatgtatcaggatttgaagcagaaatactggtggtatggattgaaaagggatgtggctgcacatgtggctaagtgtgatgtgtgtcaaagagtcaaggctgaacaccagaggccagctggactactgcatccactaaagatactcgagtggaagtgggaagacattgttatggacttcattactggattgcctcgcacctcgaaaggatatggttctatatgggttattgtggatagattgaccaaagtggctcattttattccgg

SEQ ID NO: 41339 - DNA, 393 bp, Zea Mays
tttcggtgaaactgcattacctcaacgtacaccttctaacgagttagcaaaatgatgttccatgggaccatgaaaatgttgtgtggattctgagttgtcataattgaggaccagcaccatatgacaattgaaacctcatcacagagccagaagctcaatcgtaagcatcgatcatcattttgtgcggtcaaagtgtcaaacgatcaagtaatataccatgctaccaaaaaaacgttcttatgattgtccatagatcttgtgatcgcgtcatcgttatactatattgacatatgacagaaggataataactcttagggaaccacttggcactttgtggtggctatgtgtgatgatccttgaccaatgataataatgttaacaccctccaatgat

SEQ ID NO: 41340 - DNA, 1365 bp, Zea Mays
tatttaaaatacagtgttcttacagggcatgaataaagggaacctgcagctagaggatgaggaagagataattagtgcaatcacacatgctttaagttctataagtgaaaaagagttgaagaaaagttcactggccaggttactttgttccagttactctgcagtggaaaagattgtatgtttacttttcctactgcagccattcttacaaaatccacatgtgaaatgttgatgaatgcgtcatcaccttttggacttccattttccagattgacattgatagagatcaattgctaaggcaaaatccagctgcttatacgcaatcattggatcttgctgtccgtggtctctacaggtatagttttgtattgttttatgctctagtttgatttccttttcctttaagtaatgctgcactagcactagcactaggtggtgagcaatcaattggacttccatggctccttgacatgtcagaatgttacagctagtctgttcctttttttacacaaggcagtatatcacttgccagttttttaccttttggctattaaattatttgttaagaagctggaagtttgatattatcagcaatataagcaatttatacccttctacaggatgagtgctttgtttcatcatttggcaacatcagtcacatctggtctggtcgatgatgatataattatagttcttcttggaatattctggccacttcttgaaagtcttttccgatcatctcatatggagaatgtgcatttatctgcagctatatgccgttctctttcttctgctatacattcttgcggtaagttaaatggttttaaaacgagaaaattcaagttgcatagcaaataaatcatttctcttatgcagttgtattttgcaggacaccactttcatattttattacctaaagttatggagtgcttatctgcaaatttcttgctatttcaaaggcacgactgcttcttgaggacaggcaaggagctatacttttatgcacaacgatttttttttcttccaaaattcaaacttaaaagattcttctttgcacctcgtcataacaagggccaatagttgatcataatgtaagtttggctattgttgatctcttaaacttgcaaatatgaatgagcttatgttgtattcaactcaatccatatctttaagttaaaagccttagggaacacttacatgactttgttatggttggtgtcacctactaacgatgccaacacgcacgtggctaggcaatgggcccaaattatcctttgattggttgcctaaattatcctttgattggtttatttccaattaatttccattaaataggagatcaaatcctagattggtgtgtattag

SEQ ID NO: 41341 - DNA, 397 bp, Zea Mays
agataatttttaacaaggcaataagtgcaatacatcgagtgacactgtgttctcttttctcatttttccactggaggtataagtagtcatgatattcgtctaagagagagtgttgagaaaccctaaagaggttttatgggctaataccgaaactacctccgaggggtttagagtttctataaaaacattcataccctctcattataaagagtagagaaagagttctccaccggtgtcgtctgttcattgtgtaggttctgtaggaagagaacatgcttctatatcttttcgcctccctactgcttcgagaaggatcgtagtccggatcgacgatacgtgacgatgactagattattcaacaatgtcctcattttcatgcccattgtttcgtttcgat

SEQ ID NO: 41342 - DNA, 337 bp, Zea Mays
cgcattcatttattactacatcatgggtagaagcacataatcttccaatcactaccatgtcaacccccattcaaattgactcagccggtgatagaattcgagccaatagcatttgcttgaatgtaagtgtggaaataagggggatagcatttctcgctaatctcatagtaatgggtactcagggaatagatgtcatcctagggatgaattggctagataagtaccaaacaattatcagttgtgataagagcacaattaagttggtgtccccactaggagaagaagtggtagccgagctaatctcacctgagccaaggaaagggagttgttatcagat

SEQ ID NO: 41343 - DNA, 498 bp, Zea Mays
acggccgtgaaacgtatactacgttatctgcggcacacttgtgatctcggcctttccttcaccaagtctggctcactcctcttaagtgcgttctccgatgccgattgggctgggaaccctgatgatcgccgaagcacaggtggctacactatattctatggtggtaacctcatttcatggagctctaggaagcaccccactatttctcgttccagtacggaggccgaatacaaagaaatagctaatgccacagccgaactaatctggatccaagtattacttcgtgaacttcaaatctctcagccacgctcgccggtcttatggtgtgacaacattggggccacatacctcacagctaatctgatctttcatcggtgggccaagcatgtggaagttgactatcactttgtccgagaacgtgtggcgtccaagcaacttgatgtacacattatctcatccaaggaccagttggccgacctcatgaccaagcctctacca

SEQ ID NO: 41344 - DNA, 392 bp, Zea Mays
caggaactaaaagctacattcagaaatttagcagcggtctaaataattaccagtgacacttgtaggaattcagccaatagaaattgaagatcagactcattgaaatagattacttgctagttctaatgggcactagtatatgacatacaagtacctgaacttgtatatatgagagtatttcaatctgactgttgtattgcagaatttagatcaaaaacaccttgtacgttaaaagggaacaaagtagcaaggttgaatcgaaagtatagaactgagggttatgtggtctactttgcccttgcattataggatacatgtccaaacgggtttccttggatgtgtaaaggtggcaaaaggatgttcaaattcagtatgctgctggaatgttactc

SEQ ID NO: 41345 - DNA, 461 bp, Zea Mays
gtcaatggcaggaggggcagcaccactggaactcccagcctcatgatcatgagtgcgtggaggcataggaggcggaggaggaggcgggaccccaaagtcatcatcatcatcagggactgatgcgccctaagtctcgaactggtgaaaggtggtatcctcggcctgagtatcaatcactggagcaggtgccggcacaggatcctctagagctggacggtaggacccaaagaggaggcgagaggcctcaagagtaccctggaactgtggtggccgaatcaactgagcaaagatgtggcaaagatagtgagcatacggtagctgtcgacaagcatgtagaccatccagtacggtgtcttcgatctcacaaatgaggaaatccacaacatcaaactcggagtgagagaccagggcaccaagtagccaaagctgaatatgagtggcagcctccctgtaacccatcc

SEQ ID NO: 41346 - DNA, 349 bp, Zea Mays
gcagcaccattaacaacactactgaagaaagaaggtttcaagtggggtttggctgctgacacggcattccaggaactcaaaaaggctctttctatagccccagtgttgcaactgcccaacttcgatcaaatgttcattgtggactgtgatgcttctggttctggatttggggcggtcctgcatcaaggatctgggcccctggcattctttagtaggccgtttgtagcccgtcatgtcaagctcgcagcttataaatgtgaactcattggtctcgttcaggcagttcgtcactggcgaccatatctctggggtcgtcgattcatagtgcgcacagatcacttcagtctaa

SEQ ID NO: 41347 - DNA, 656 bp, Zea Mays
gtggaggtggagctaagggttacattgtggagtcctatctaagtcatggcttggcagtggggctccggcctctggatcctcgtcggtgcgtcctcctgggcgtattctcgtctaagtctgtcattgtgcgtgtgtcctctgtccgttttgggaacccatggtccgggggccaacctcttccttttataggccgagtaaggggtcggtcagtagtggcttccttaggaagaagtcaccaggtgacagtaccaagcgttctaccatgggatgaatccacacgtgctcgtgggccccggggtcgcgtagctgtctcgtattctttatagcggacggcgtgggcatcgtggggcttgagcgccatcattttgagctatgttgacccctgtccttcgtagcctggggctcggtgtggctcattgtgttatgccctgccagcagtctgtgcactcagacctagtcccgatatatcatgagtgtgtcgtagggcggggggtgcacgggccataaatatgtcacacgaggggttcataggtcatgggtgttctatggcccgaggggttcataggtcatgattgggagggggacccgtgcctctgtcacggcttgtcgttaggcacagttaatgtgaccgatcacttataacaggtcagtctcgg

SEQ ID NO: 41348 - DNA, 276 bp, Zea Mays
gggaagtaagcacatgatggtttcgagttagagattagtggtttacgggtcgtatgatttggtggatgtgtgaaaatacatgtgaatatgtatgtttataaaaatgttgtggtatatgttgtgtctcggatttcgataataataggctagccgacaagtatgttgtatgcctaggttgttgctcatgttaatcaacttgttagatggctttagttaagctcgtggtcacgatgaattgcttgtggttgtctaaatgcgtatggttatggtcgcggg

SEQ ID NO: 41349 - DNA, 596 bp, Zea Mays
cgagtttgccagtcatgtgtagtgggtgataggcgaaaggtgtgaaaaggtgggatctgaactatcatgcacgcagaacacgggcaaatagtacctccttgggaaccgcggtggtggtaaaaaccattttactagtgcggtggtgacgagcatcacgcgcatgatcgggcataccactaggagtgggggtcataggtcatgtgagtcgcggagacagatgtgacatcaagcatgacaataggtgagctacgactagtttggcaacgagcgtgccaccgctgtacgccagtcacgatcagattgcttgacatgagatcgtagttgtggcctcacctgtgggttcgtaacatctcctgaggtgggccctgggccactgtcggtaccctgaaactgaggtaccctctcctactgtgccaaaggcagactcccgcgtggttacctataactgcatactaaggaaccgagcagccaggcccatgggtccagactcgagtgacgggaccattagccttgggacccattcctcgctcggggacaggtccggtgccgccatgtgtcccaggggtggaactgctcagtgactagtgctatgagtc

SEQ ID NO: 41350 - DNA, 552 bp, Zea Mays
cgcgggggccggagcggctggtggagcggactgccggcggacggagggcgccggtaatcgaaggcggcggtggaatgcgggtgggtagcatgtttttcattttaaatgaggtggaaatgcgtcttgccgagctccttcctgtttttcatttttaatgaggtgaatgatttgttcttaattttgtttgggtggcctgggaggagaaatgtggggcatgggatttgggtcttcgccaaattagcgccatcctggatggctttcgggggttggttgttcataaactgctagcttctgggtccaattcgttgctctcagactctcagttttcgaatcatttttgggcacatgattttctagtttatggttctgggagcacgttgcttgctgggatactagtagaattgaactcgtgttgtgttgctctggtgtctagattcggttttggactagaaatacatgcgtcacgacccgttggagggatatatgctgcaaggttgcaaatggatatgttgcaaggttgagtttgagctcaatttgtgctgtttgattttc

SEQ ID NO: 41351 - DNA, 687 bp, Zea Mays
gggagaaggccactctcatcgccctagagtggcaattgaaggacgctgaggaggatgcaaccttcaaggaggacgacgatcactccatccccgacgatggcggcacctacgaggccactaaggtggccaatcccacgtgtaggcggcttctgtctagaacatccgctccttcgtcatgcttgttctgaatacctttcatccaccacatgtgatgtcatgaccccatgttgctaacaattcgcgctactccctcgatgatcatgtcatcgacgtcatctgcaacaccccatcttggtacaggcacaacgacatcgttctgtcttggctcttcggcaccatcactaacgagatttagaagattgtccatgagcccaatgagacgacacggcacgcttggctctccattgaggcccagttccttggcaacaggtatatacccgtcgggtagtcgtggtcgaggaagctgtcgaggacgtcgtagaagacaagccgcacaagtcgcgggcactggtgcggcacgcgggaaagtccgcagcgcgccagaggatgccgtggtgacggtggcgctgagaagcaatcgtagacaaaggcgcgatgtgtcgaggcagatgagggtatcgatgtcgggggcgacgcgtcaaacaaccatggacgatgtgtgttccaggtttgccaagcctagaaacg

SEQ ID NO: 41352 - DNA, 681 bp, Zea Mays
ctacgtaccctactgggttgattcctccaacccagctgctcgtacgaagtgggctccctcagggtctggaggccctgcctcctctgatgagccacctcctcagcctcctcatcacccatcctcctctcgcgccgccgctgcctcgcgtccgatggaccgcagcgggagaggaagtggtccgggccagggtcagggccgaggccggggacttttcattcgtctggccaagggccttcttggcgtcttcgccatttgccgcacccgggcggtcaaggagtctgtgcgccgtcgcaggaccgaccggctgcatgaggatcttcgtcgttatgtagccgagactggtcatcctctccctcctgggtcccctccacctccagcccctaccttccccgtagaccttaatgagtggcaccaataggagtttggtgtgccattcattaccccggaggatgaggttgaggactatgatgaccctttctacacctcggaccctcctcatcctcctcctccctactcgggtcagggacccactctcggtgaccctaggccgtccggctctggtcactatcctcctcctccctacccgggtccgggacccattcctggtgacccgcggccttccggctctggttaccatcaccaccctcctcctccacctcctcctcctcatcgtacatcttc

SEQ ID NO: 41353 - DNA, 338 bp, Zea Mays
atacgagagggcgtcggaaggagaaacggcgctgtacaaatgctcggcatctattgaaggtagctggtgactggacaagaaactgacgtggttaatggagaggaattagtcacgagaaactgtcacgacgagtaacgggcgtgggacagctaggcaccgagtgcggtgcggcagtccactgcctgggatgcgagcaggcggggaagacaaagcagcagtgccgggcgacgtgaaggcagattgcggcgacagcgctgcctagaccggttcgaacagacgaacagagaagaagactggagcagcagtgggatccacctgccattgaaagaaagaaaaag

SEQ ID NO: 41354 - DNA, 443 bp, Zea Mays
agatggaggcggcggctggaatggtggtgaggctgcggtggaagattgggtggaggtggtgggagaggatcgacgagactgagataccaggttgtcaagggcagtgagcccgaggatagggggaccttggctacgtagatcgtagccggtgtccgtgatggccggccgggttatacccccttgccgccgttcttcgtcggtgggttattcccctagccgccgacttaggtagaggaagagagaggattagatagtaatatctttcttaatttccaagtgtttgattacaacatatttatagcctccggctcaaccaaaaggagtaacaaactccactaattaaggaccaaccaaaatagctaaagatctccacatttatagcctttcggctcaaccaaaaggagtaacaaactccactaattaaggactaaccaaaatagcta

SEQ ID NO: 41355 - DNA, 818 bp, Zea Mays
cgcctaccgcctccgggattggagcagggtttcccctaggagctgaaggagaagccggtggagaagggagtgagacccacctccccgcacctccggagctgccattagatttagcccaagttctagccaaccaaacccgactcattgaggtcctcactagaagtctagagaatcagcgcccgaatggtgggagaccacatgacaggatgggagattttctgagactcaagcctcccacattcgttggatccagcaatccccttgatgctgatgactggctgcgcacgattaaaaggaagttagaagccatcggatgcccagagaatcattgtgttcaattggctgctcatcaactttcggggatggccctagcatggtgggataccttcagcactgccgtcagagatgctacctggacagagtttgaaactgctttccgagagcaccttgtgccctaagggatcgttcagctcaaggaagatgaatttcgggaactaactcaaggtggaagatctgtcagtgagtacgtgcacaaatacacagaattggctcgctacgcgcctgatgacgtcagcacagaagccaagaagatggcccgctttttgaaagggctcataccagaactcaagaccatcctagccagccaagatttcctcagcttctcgcacctctcaaacaaagccatacaagtggaaagggcaagggaagaataaaaaggtcacctcaagaggaaattccaagtcctccgagctcagcagcaagaccggcaccagagaactcgatcctttgggtttccacccaagggaccaagcttcaat

SEQ ID NO: 41356 - DNA, 311 bp, Zea Mays
aggattattacttgaattgttttccgattgaatattcggaaagcagacgaaatttgtttaggttcaaccaaattaaacgtcgactaaaatatcgaatctaatctcgtctggtttaatccgtctacacctcgctcccgtgacgatgctaacatcgtctccgggagaattccgattgctttaaaaggtaatgatacagactagaatttacaacaggaccacattacctattatacattaacactatttctatactacactactctagcttcttatcacttttggtagcttcactgtcgggtgtaggaaaccat

SEQ ID NO: 41357 - DNA, 386 bp, Zea Mays
gtgaattgtcgcgaagtggtaggcgttattgaagcgaggtggagaggggtcgtcttcgcgtggatgggactggtaagcgagaattgttgtcctcgccgattggggtgagtgtgggtgagggggagctgcaaaatctgtttgagggtgaggaactgaggataatgctgttcaactacagggagatgggtatcatcccgaaggttgagccgatgtaatatgtgatgccctcgctgtgtgtatgtaaccataattttgtgtgatgaagctgcgcgctttcgttgatcaggccgctcccgtacgcgacttctatacggcgtcttttgtaaaggacttcgattttgcgtaggcgacttttgcgcggagacttttggaaaagtcttcgattt

SEQ ID NO: 41358 - DNA, 1687 bp, Zea Mays
gaggaaaatggaaatgagaagagcaaggaaactggaaatgagactgaatatgaaaaggtagaatgcatgtttacactaatacacattatttaccagctatttatgtattattagacatgcacacacatgatactttcattaacaaattataggtgaagaacataaaactggttcacatagattatattttggagaaggctgaaactggcattcagttcgttggcaatgtcatgcgtagcagtagtcagataaggcgggcacactgttggtttccttgtgttgatagtgccagagaacgctgtccgtaagttaatttcattcgttcatgcttttgtgaatcctggtacaatatttgcctttgcgtgttaataattctctctctatttatcatgttatgctcagatttgatctagaatttacagttagcatggatttcattgctgtcagcaatggtgacttgctttaccaggtatgcgttcagtcttgatcaagagatctggagggaaaatattaatttccttgtttttgaagaactaacttttgtgaagtaacaaggaagctcttttagctttaatacacttggtattacagttcatttcttttctgtgcatgttagttatgttctgttttctgatcttagaaggtctctagtaaggaagatccttaaaaaagaacttatgtgtataaattgaacactccagttagtgcacagtggatatccttggttgttggcgcacttgaagttcttcctgacagaaatgacataaatgtctcacacatatgtttatcccctgctttggcaaagcttcagaacactattgcatttttccacaatgcatacaggtgccgatcaatctttttttttctgtgagaagtgcttagattggtgttgattttattagtatctcaataagcttattttttaattgatttctgaaatttgcatttcttttgcagctgttatgatgactatctttctgcaccatttcccttaggtttatacaagcacatttttcttccatctgaaatgacaatattaccagcaagcttaggagcctccacatgcatcctcagttctggtatcttgcatgatgagaaagttatagatcaggtgtgtttgtttctcttattttactaccctgtcccctctgatctagaccaatgatttgacaccatacattggtgctttcattgtactatgatttgataacatctgttacgttggcaattaaaagaactataatctctaagaaaaccttttttttctttgcacttgaatttcatcagatgatttttttaaaataaataggaacctgcacatcagttttcagctttcgtaacgatagaacttctagagtactttaaatgctacattttaaactatgagctatcagggaactgcctaacccaactaaatgaatctacccatctattctacctttttgcacttatattttacttgcattacatacgaattagtatcttagaaagatataatattttttatcaccatgttcttcgtattgcaatcatttagtaccattttttggcacttatactcaagtctaaacacaaacatagaaaatctatataatgctgatggagttgctttttaattttttgacagtacagaaaaaggtccatttacaccgaacaaagcatctacttttaaattgctagaagaatc

SEQ ID NO: 41359 - DNA, 295 bp, Zea Mays
ctccaggtttatgtcaccgccattacggcagcgggtggagacaccgccgtattggcaacctacttccatgtggccctgtctggaccagcccggacttggctcatgaatcaagccccaggatccatctgctcctgggaagagctatgtgcgcggttcatggcgaacttcgccagcgcttaccagcggcacggagtggaggcacacctccacgcagtgaggcaggagccccgggagaccctccgagcgttcatttcccacttcaccaaggtacgtgggacaatcctccatatctcgg

SEQ ID NO: 41360 - DNA, 286 bp, Zea Mays
gccgcatctcgtcgtggttaggcacctgcacggctccaaattaccggtaaggtacctcatgattgttcgcctaggtctcaacatgatgtagcaataggcctcgaggggaatagtgcaccctggtagatgggactaggccatggatccggggtcgacggtggggatttgatgagggtcgtcgtgcctgtgtagatgggactgtaccgttgatcacatgatgaacggtcctggttggatggagccgtggtcgcgggatctgaaaagaacggctctaatcaaatccttg

SEQ ID NO: 41361 - DNA, 470 bp, Zea Mays
aagaccagggttaagtcttccactagggtcgaccctctcttagtcttgaccacgatgtcatcaacgtatacctctaccctgtccctaatcaggtccccaaatgtcttactcatcgcctgtacaaatgttggtaaggcgtttttcagaccgtaaggcattacaacataacagtagagcccatccatagttacaaaagcggtatgcttcctatcttgcctagacatctggatctgatggaaaccagagtatgcatctaggaaggacaagaggtcgcacccgaaggtagaatctacgatttgatctattcgtggaagtggatatgggtccttgggataggccttattgaggttggtgtagtcgatgcacatccgaagcttcccgttagccttgggaacgatgactggattggccagccatactgggtgatggacctcttcaatgaagccagcgtccagcagcttccagacctc

SEQ ID NO: 41362 - DNA, 442 bp, Zea Mays
ggaaaataccgcattaaccatttgtaatctgccagcctgagataaaaagacagaagttgacacaagtcttctttcgatcttctgaatgagggggagaaacgctcccaagttggggttttaaggcccaagggaagcccgagatacgtgaaagacataactccaaccttgtagtgaaacatatttgctaagattgccaatttctggtttgagacattgatgggataaatattagccttgtgatagttcacatggaggcctgtagaatctgcaaatgaattaagcatcgctttgaggaagaatagttgtctagggcaagcctccaagatcaaaatagtgtcgtctgcatattgaataaccggaaagtcagccccacatgcattcgggagtggaagcatgagggtgccacaatctttagccttgttaacaattgactaaaggagat

SEQ ID NO: 41363 - DNA, 300 bp, Zea Mays
gcacgagcgtgtatatatacgcacatggggacatcccgttttgattaccagccccgggcaatgttggtcgccattgatgtcgtgtgtcgtcgtgtgtttgttgttccggtgcccgcgtacaatatatgccatgcagatgcacactctccttgcttgcttgggccctcgcacgcatgtcgtcgtcgctcgatcgtaatagttgactagactgatcgtacacgaacctttacttctatcccgagtaaagaagcgccagtatcttgcattgcatgttgtgtggtaggtagaccacgcatgcat

SEQ ID NO: 41364 - DNA, 334 bp, Zea Mays
caaacactccgtcttcatatgattttggaccagttcaactccatggagttcttgtagctctagtttattttggtggagcacccctttcacggctccaaaactcttctaaatgaatcaagatatgtagttagagggaaattacccaccaatgccatcagttacataaaaacggttcgttgtctatttatcctcccgtaacccttcaacatctctaggcgcgtcttctctctgtgacaccttcgtaggcgtgtcttctctccacgacggcgcgaggcagcatgccaccatcctccaggctgcggagccacgaccccaaggcctacctccgccatct

SEQ ID NO: 41365 - DNA, 525 bp, Zea Mays
gaagtttgctctgttcttaacaagaatcaagagaataagtgggtggaagggggtcggttcagataaacattgaagatctagtgcactgaaatatttgaaacaaagatctgggcactgttgaatcggatgagttcggatgaatcggtgggggaatcgatcgcgggggaaggataacctcagacgtggcaccaccccgcgtacttagccgggcgtggccagagatattcaccggcggtcaccgtgactcagtgattttccgccgcggtgtcacccatgccttgctcctccctcactttgtctcttccctacgtggtaaacatgcgctaacgatgttatccgtggctgtggatagttagccagaccgccgtgcctataaatagtgccatgaaccccggcgagacactcacaacttcaccagtgagtttgattgaagcccaaaattcgcactgcctctgccacctcttcccaaattgagtgtgcacggtgaatcgatagcactttgcgaccgtgtagctccaatctcac

SEQ ID NO: 41366 - DNA, 288 bp, Zea Mays
actttgattaagtacttaagccttggtattgtgcaaaattaggagctaaatggccctaaagtttggctgtcagataatacagagactgaatattgactgtcagtgagttttgaagaactttaggcttgattcatgctcaatggagtaagcaactgagcaagatctctataacagaattgtagtttgtatgtagggctacaagtttgttatagacggattggcatgttcttgcacagaaatccaagctctaggcgttgcaactctggctgtcaggcactctgaattggg

SEQ ID NO: 41367 - DNA, 515 bp, Zea Mays
tgctgattgaatcaccgcatttagtcgctcttcttcgagtacgtcaacgtcttctagcctagtagcttcagcttctgctatgttatcaaagattaaccttggtgccctgaacttgagattggccggtagcactgcctctgaaccataaaccataaagaagggggtatttccatgcagagctcggctgggttgagttctcaggctccaaactacatatggcaactctctgatccattttcctgcgaacttttcattcttgttgaagactttctttctgagtgcttctaatatcatcccgttggctctttctacctgcccgttggctcttgggtgcgccaccgaggcatatttgatctgaatgctcttttgctcgcagaaattgaagaattccgagctggtgaagttggatcctaaatcagttatgatgctatttggtatcccgaacctgaatattatatcctgtatgaattccactgacttagctgaagttaaagaagcaatgggcttgaactcta

SEQ ID NO: 41368 - DNA, 296 bp, Zea Mays
caagaatctaaagaacagttttggaaaggtgggagaatactcttccgagcagaagttcatccgcggtgaccccgatggggttatccagtggatcagcggggaggccgaagcttttgacgaggtactcagcgatcgaggggatttctgtgcttttgctggtgcccgcggggctgtatcaattttgaaaaaggtcggttgtgaccatgcgagggctgttgttcaaccagaatttgttatctcagctgacgacattaagaatccttcagccgaagcgtcttcgttaagcggtaaatttt

SEQ ID NO: 41369 - DNA, 451 bp, Zea Mays
attgacaacatccagaaaggttgtttcaaacacaaccaaggtggcaagttgtaagggattaaaatgacaggccatatagtgtacgcaacattgaccatcccaaatggattgaagcagacccaaccgaatgttacgaggatcagaagcaaaatctttgcatatgttatctacccgcttccatgccttagagtcagcagggtgcctcattttgttatcttggactaagccctccttgtgccaacacatatattcagatgtggtcggatccatatacaaccattaatatcgaggaataactgggcaatatcttaggattttctgcggggcacgctagttggttgcctcctcctgatgcctagaaaccgttagttgcccgcgagtataaaatacccaatataaacttggccaaaaaataaacatgggtacttggcccagcccaaaacaaataaaa

SEQ ID NO: 41370 - DNA, 307 bp, Zea Mays
atagtgagggctgcctctatagtgacggctgttcttgcggatcagtggaatttcttcttcttcttcctcttcatcctctttaaacacaccgctagcagcctgcacatcatcacaaccttcagcattgaccttggcaatggcatccactagaacatcaccaaggatcgacgcagaaggaccagcatcttgatcaaggcacgacagtcgccgaagtcgcctcttcttcttcttctcctcaataggtgtagtcgggcggttcactcggcatgaacgctttgggcgggcaccttcgggtttatggatcttc

SEQ ID NO: 41371 - DNA, 361 bp, Zea Mays
gtgatatgagccgattaatcggccagatgggccgattagccgagctgtcgagtaggggtagggttaggttaatttttccccttttggcttcaaatcatttgaaattattggacctccgattctagcaacgaaagacaaggttcatcttcacccctgcttccctatgtcaattatccggttggtgaggtaacacagcaaccaacgaggtgggtgtacgaatgggaggaccctgagtagcgtaggaccactcacacagggatcggacaccaaggcctacagcaagcatattggacccccgattctagcaacgaaagacaaggttcatcttcacccctgcttccctatgtcaattatccggttg

SEQ ID NO: 41372 - DNA, 349 bp, Zea Mays
ccacaacacagcagcagacacgttgtcgaagctgggatccagtcaggcccaggtcccacctagaatcttcatccaggaagtatcacgcccaagtattccctcagatcagacagaagaatgcaacaccttgagccaaccagaattggaccctaatgactggagagagcctatcatcaggtacataaagaatgaagaagaaccggatgataaggctgcagcagaacgcatcgtaagacagtcggcccactacaccctcatagggggcgcactgtacagaaggggtgcgacaggagtcctcatgaagtgcatttcctcgactactgggaagcagctattggatgaaatccac

SEQ ID NO: 41373 - DNA, 631 bp, Zea Mays
gtcctcctcattactggatttgcgttttcctatggtggctaccttgtcgttggcggctttgtcgtgtctaccttcctcggtggttagtggcctatggggtgatcgaattcgttgcctcctaggctcccttccaagccaaagcttaccatgtcgcacgcatacggagacaacagtgacatgtgggtcggggctctcagattcgatctttccccttcttctgcagagcttcatggtgcggcggtgtaccttgtgctgctctttgtggttgcgacattgtgatctgcgaccatgacttgatttgactgtgcgactgtgtgttgggagagggtgcttggtgaaagccttgatgtgaggccgacaatggcgatgccctttgggcgccattttccaccttggaggcatgtgtcatgcatgcaccttccattctcatcgtggatcttttgggtgaaaacctatgactgtgttgtctgcatcgtgttcctccttgatggtgttgtcttgaagttcccttgccatggcgatggtggcacacaaatggctacctaccccctcggtgttgcgtgtagttgtcgttgccgcttgtggtcctaccacgtcatctatctagctatggagctcttcgttgttttcg

SEQ ID NO: 41374 - DNA, 465 bp, Zea Mays
tgtaacgttgtgtgccttcccttttatagtctaagggaaggcacatacaagagtgctaagccccgacatgtgggcctaggaacataatggaaagaatacattatgtgagtaactaatgctagtaacgcctgagcaatcaccgggagtcttgatgaccgcagtccatgaagcattgatagctgaaacgtacgagtaatggtgaataacagcacggcccgcgtatcatggactgtgcatgccacctgtcagtggaatggacaggcgcacgtgttatccgtaatgaatgcagaggcacgcgtagcccagaggcgtcatgctaggtcccgcccattggcttaagccgcgcgctgtatgccacatgacaacaatgggtctccgtgtgagtggggggcaggagtgtatgcggacaggtccggaacccaccagactaggtccggacacgtgtcggcactagaccctcacctg

SEQ ID NO: 41375 - DNA, 497 bp, Zea Mays
cgacagtactgagatcactgtttgtttgttttgcttagatggcggcatgttaatatatgctaggaattgtggtgggatgtgtctaccccgaagcgagatgtaaaagcagttctgtttgcttgtttacattgatattagggcctaatggaaatgaatactggtatatgatgaatagtttgtctcccaacacaagaagtggttctttagttcacttcaaataagtattgatagatggacgatagatacagttcggattaattggtactatttgtgtattcctgtcagcgttgttgatagcaaaaggcactgaatcagtgctcataatccaggtgcttgttcatgattgctgccgttttggtccacacgttctcttctaggggcttatatagcttctgttttttctttagctagaacagattatgctataccttctgtccagtttgtggcttctcttcagcttgtagtaatatagtgcctatcatgagacatgtaggaat

SEQ ID NO: 41376 - DNA, 331 bp, Zea Mays
caagactagaatagtatagtttagaagtaatacttatgtaaaataagtaatgaagtcatgttgtacgcgtgagtctgtataattacattttggtaatgtaacatgatggtatgtgttggcatgtcatatttttcccaaatgtctctttgcctcagatgccatcgcggactcgtgcgcacgacggtgcggggacttcccgtggttgggaagatactcctaatccgccacctgtaccaccagcactggccgaggctatcgctgccttggtcaatgcgactacagataatacccactttttgcgtgagatggcaggtaatcaattccagcaaca

SEQ ID NO: 41377 - DNA, 414 bp, Zea Mays
tgatggacgacgtccttcaggtacgcagttagggtttcctatcgatttccttgggtcgcactcctttccccatcttgcttcgcgtcattctcgcctctggtcgcttccgagttcgtcgcgtgaaagtttctgcggagggtggatctcctctccgtttcacccgccttcgcttggtgaggagtggcctcttccgggccgctctggtgtgtcggctccgatggattcgaaaaatcgaaaccctaactgggatcgatggggtccgaaggaggcgccgcagggttctcagtcgtggggaaagaatcggaacctcagctggcgcttgaagactggatctggaaaatctaaggtcaaagatgatattcccgtctccactcccggtgatgccggtctgccaggtatcctcaaaaccccccc

SEQ ID NO: 41378 - DNA, 510 bp, Zea Mays
gtagcagtacagccaccaacgtggtctcgattgttgtcgccgatgcttgctgtcgagatgctgggggttgcgttcgtggggacggaagggggccccgggggcttgtggtggaacaaggaattgtgtgttttgtgcgcttcaagctacggcgaaaacgtacgtggattcagcgcgtgctcgaattggcttccgtctcaaggattccccggttccaatcaagctcctcatggtggattaggctggagttgctctctcccacgggctcacggctcacatcaaatttgacaagcattggattttgttttggaaaggagataagaactcagcttctaggaaagggacaagcatttggactgctatcagattttagtaaagtatgaaattttggcaaggatttggattgcaagcgtattttagtaagatgcgtcctagacgatgcaatccacattcagccctatctacaagagaggacagtgacttccgttcgtttaaaaaaagagaatgactttc

SEQ ID NO: 41379 - DNA, 682 bp, Zea Mays
ggatggaagcgttccgaccaaccgacggcgtgaacgaccaaattgaagcttgggaaagcttcacagacctaccagaggtgacgcacatactaaattttggactgggcacgaaaagaaacgtggggctacggagagggtgtcacggcggtgttctacagagcagaggggtgttccgatgatgagactcgggtaaactccaattggtcggctccgagagcaacagggggctacaaacaagcaagaactcgaatcaattgggtatgcactaacccgaggagtgctgatcacggtagagttcctcgcggcggagtaagaacagagagaaaggggatttgtggactgcgttagttctgcggcgtactcgattcgagtgcttagttgttgaggtgcgggatgtgatgaagaagcggagtccgggctcaatttataggctgtcgaccggagttggagaagaagtgcggatttcagatgtgctggcaagctttccacgcggcggattccggtgatggcacgggggttcgccatttaaccggagcctgccacctcagtgaccttctgccatgacgccgaggatatttaccgtggccaccgacgaccatccccatgctgcggtggcgttcttatcgccggcgacgagcgtctgagctggcattctgatccccctttggtctactgtaccatc

SEQ ID NO: 41380 - DNA, 389 bp, Zea Mays
gcagcgagccgatcaccagtcaaactctggccccacctgcaggctcgcatcctcccctgaggcgggcctgggggccactgtcggtacccgagattaggggtaccccttactacgatataaaggcatgatgcctgcggagctacccttaaccgcgcagagaacaaccccaagggtatctcgtgagcagttatggtggcgttctcggaggcaacgtcgtcggacccagaaggcacgggacccctgtacgcacaacccggacccccgaagtaaagtagcccggagccattggatagggttcagaccccatcaagtgagctccagaccacccgtaacaaggacctgagagaggaagtgccgtgacctaggcatgggtccggtattgacgcgtg

SEQ ID NO: 41381 - DNA, 1582 bp, Zea Mays
cttggataagaacattgattatgctgtgaatgagcatcaagttttgttacatgcttcgagatgttcgttcgtttccagtctttttccacatgaagtatcagctaaatctacgaaatttacatcaataggttcaagctttaaggtaaaatagagtgttgcttgttccatcttttgtagctttgttatcaggaaacttattgtttctgataacatcacagcaacaattacaagctttgctggaaactttgagcgcaacagagccacattacatccgctgcataaagcccaataatgttctcaagccagcgattttcgagaacagtaatgttctccagcagcttcgatgtggggtaagacattgttacaagtattttcactggaagtacatgttttgacagatatagaatggtttaatagaaaaataacgataggcttattctggtaaatcaaaatgattttgaaccatccgcccttcttccctattcaaccatatatggaggctgctagacgtttgttcatttgaaactgatctaaggacatagacaatcatgtggacaaaacaatatagaatatacagcatacatgcacttctgtcctgaaaagagtgcacatttagatttgtcaaagtcaaagtatttcatgttttactaaatttgtcgaaactagtgtcaacaattataattccaggtaatactataaaaatgcattccatgatgaatctaaggacacttatgtcaacaatcatagttccaggtaggtatacttataagggcatgcccacccacctggttacctataaatgcacccacactgtacacttatgggacacacttaacaaaacaccacagttccctgcctactgttttgttgagcacctgaatactcccgtgtcctagcgcttgggcccacttgaccacgtgtcagttggttccaacagtcttcaattagttctgtggtttgaagtgcactctttctaggacttctttttttcatcgaacttgcaggagaactgcatatcattgtataagaaggtaaagaagggggtatattataaaatattgactttctcctgtgcacatgatggcggtatgcccagggatttttatgcttttaaatcttgctccgatgcagttttttatgaactaactgttgaagatagagatgctaaactgatacattacctaatcttgtaaacagggagtattagaggcaataagaataagctgccttggatatccaacaaggaggagatttgatgaatttgttgaccgttttggtgttttactacctgaagttcttggtgaaaggtattcttaataccttgatctgtctcttgcattttggtttccattttgatcttacagtttgtacttactgttacattggcagttatgatgaagttactgctacaaacatgcttcttgacaaagtcaatctcacaggatatcaggtcagctacaagtggctgacatttgtagtttttatgtgtttaaatcaatcaagtactatgtttggtttttctttgtcttctctattgttttcctttatcttgattcatcatatttcctgtattcttgtaatc

SEQ ID NO: 41382 - DNA, 530 bp, Zea Mays
gtttgcaaacgccctagagccaacccgccatgtgctcgactatatgctccaggaacttgatatgcacgtgtgcgcccatgccatggccgctacgtggagctccctgcccttctaaaccaagcgcggagcacaccaccacctttccctcgcctcactttcgccttctcgtccgctctcgtcgtgcttctcccacacctgagcccaagctgtcgtctgcatcgttgtcggagctatgctcccatgaacacactactctagcctccctcctctcaaaccaagacgccatcatcttccccaagccctgatgaagctttagtgcgctttcccgaggccgaaccatgccagcgaggccaccgtcgatgacgctgctcgcatcgctttgcctatgcctgtgactagcctcctctcggccatctctgggcaaaccaagtgcaccaatgtgttcattttcaaccctagtcctctcccatccttccccgagccgaaatcgccgctcgagctcgcgcccgcctcctttcccccttgcccct

SEQ ID NO: 41383 - DNA, 706 bp, Zea Mays
ttcaggccgaaggggtatggatgaacgagagccattggatttaaaggctatggcccagattagatctggcacaagcccgaactggtaggagatgatgacagcacgatcggggatctttggttccaatttcattagcacaagattgcatcgagtccgtccacccgaggatccatggtcataatccatcagggtgaagcggtatccagccttcaatcctaccccttcgatcgagaatctacagctatttcttggttcgactgaaacactacgaccgctcgatcaccaccgtcgatccacggacacatgaccacaacacatctcccccaaccctagtggtccaaaacaacggcacacgcatgcccagcggcgccatcgctgggaaactcgaactgatgcatgggcacagtacttccctaacccaagctggctacacgacgctacggactccacgaatcttacaaaggacttaccagagcgggagatgacccatagacgagtgcccacgacggatagaagattcgcagcatgggtcgatgcccgacgaggaattttatccgctccaaccaattatgcccgccttaccttctctatcgcaagtagcagcgaccgaagaacccgacgacgaaggcactcatggcctggcccctagcgcaacggcgcggcacacactctcttccacccgacgccggagctcccaatgcaaaat

SEQ ID NO: 41384 - DNA, 294 bp, Zea Mays
ggcttatacacgaaggattgaaagtgtgggcaacaagtccttttggccaaaagtgtccctagccgatgaagtgaatgcacctattggtaagaggagtgttgggcgacaaaggaagaatcagatgaaaagttgcctagaagatggtgctgcaaagaagaaacagtccatacctgaagaggaaaaggagaagaagctactcagaggaaaaattaaatgcccgaactgtggccaactcaatcataggaaggccaatccaaaatgccctcttaatgggtcaaaaaaaggcaagccatt

SEQ ID NO: 41385 - DNA, 443 bp, Zea Mays
gtttcaaatggaatcgatgatagcatgtggcatcatagtggagggtgcgtcaaggtaaagcaacttcatgtggagcgcgtggccgtcagatcaaaaacctaggagttggtctactttgttccgattaagtgtataagctctatataaataggggtagtttaggaaatatgaataaccctctataaatagagcggtagggctgatggttcagctatctcttggcatatctctttggctttggtttcattagacactagtttagaactcctagttttgcttcctagttttttgccagtttagttgagagatccacaacgctttgaacctttgcgactttgttttgtaatctacaatgattaatccaagaagggtggctggtaccggccacgctttggttggctctcaatctcggttttcatccttactaaaatttttagtcactt

SEQ ID NO: 41386 - DNA, 337 bp, Zea Mays
agtagctccgtaatgcattaattaatttgatgtgataagaagaaagtagaagtcactctgcatgacatgagatttgaacactgagtataaggagctagaaacgccgaaccatttttaagctaagttgcatggcatgaacaaatgttaaagccattgatttaaatactcagactgatagtaaaatatttactaccaccaccaaggccatacactaacccgatacacgtccattggtggatatgtaggccaatagttgtaaagcaaatatatttatcagaactacataaacataaccaacaacataaaaaagccagcttgtcatgctaggactctagag

SEQ ID NO: 41387 - DNA, 294 bp, Zea Mays
ttcctcgccaccgaagcttaccagggaagctgtcgattcctgctgtcacgactcacgtctagggtttggcgaaccctaggccacgggtcgtgacaatttggtatgagaggacgatcgacttcggagctgtcaagacggcgccggtggtgaaaccgtctgtccagacgcgtctcgtgctggaggctatggcgactgtggagcagaagggagaagataagtgggaacagatgatgaagatgatggatcgagtggtgaagaagttggatacggtggaagctggacaacatcggctgg

SEQ ID NO: 41388 - DNA, 280 bp, Zea Mays
gaagaagagagttgatctttgaagtttgagacttcgtataccttaaagtttcaccagtgagaggaataaaaagatttaaggttaagggtaaactatctcctcgctacattggcccattcaaaattttggaaagaaaaggtgaagtagcatatcagttagagctacctgatagtttattggacatgcatgacatatttcatgtgtcacaacttaagaaatgcttaagagtgcctgaggaacaattacctatggaagaactcaatgttaatgaggctttgac

SEQ ID NO: 41389 - DNA, 495 bp, Zea Mays
cccaatccccttcctaaatatcggacagcggcggcaccgcccctcgtgaacagaggaggacctcaccggaattgcccccagtgactcccggggccctatccgctgacccaacacgcgccacaggtagaggagtatatggcgaactcgatcgaggcaccgtgagcaggcgaaaggcaatggatgaggcaggccacgcgacgcggcggggatgggcggagttggaactcaggcgagcaattccgcgacacaaagggccaaattcgaagcgcggttgaatgatacacgatcatgaagtaaggatgggcacgtggaagggcatcataccggcgatcgagggacggcgaggtaggtccacggcgcggttgaagccgcggcggtttgcacactccgatgagcaattgccgacggtgcagttgattaattgtcacgttcgatgcccggtgagcttcaacagcgccaaacgaagtccctggactccttcccggagcacgggcg

SEQ ID NO: 41390 - DNA, 474 bp, Zea Mays
tacaacagctcccctggctccggagctaccagtattggcagggacacaaggtgctgctttacctcttgaaaggcttgttcggcctcttcggtccaagagaatggaccggacttccgcatcagcttgaagaaaggcagcgccctctcaaccagccttaagatgaagcggctaagggcggctagggaccccgcaagcttctggacgtccttgatgcgggctggaggcctcattgcctcaattgcccgaatcttctctaggtttgcttcaatgccccggtgtgaaaccaggaaccccagcaacttccctgcggagacaccaaagacgcacttgtccgggttcagctttgtgtgggttgctcgcagcctatcgaagaccagggataagtcttccactagggtcgaccctctcttagtcttgaccacgatgtcatcaacgtacacctccactctgtccctaatcaggtccccgaaagtc

SEQ ID NO: 41391 - DNA, 864 bp, Zea Mays
ggctcgggcggaggttgcggaattgtgtgctgagtgcgcagcacgccactatctggatggtggttctcccacccctgccgggattctgcacccttaccgttcaccgccccgtggtcgcttcgactatggtaccccagactgcaggacctggatagatttggatccttagatcgatagagtcaaagtctgtaataatgcttagttcagtgtcttagtctagccagtcttagtcagagttagtttggttatcttttgttggattctagttatgatggacatgtaatgaagttggatctttgtaatgattgtcaccaaggtgtgggtatcccctacaacttggtgtagttattaataaagtcagttatttagttgggtaatccatttatttccacttttctctttatctaagaagctgtcagtgaagatggtcatttcttcagtgctatgaagattctctatacatcttttgttatggtgaaagactgcagagtcagatttgatatatgtatgttatttatacagatgtctgagaacaggcgccgaggtgcgaggcgtgctcaaccagaatagcaggcaccccaagaggaggcagctccgcagttgcatttgccaccgccaccaccgatgaccattgagcaaatgttcttgatgcagacccaagcagtttaggcaatcggacataccttagcagctatgcagcaggtgcagcaccagccaccactgcctcaacctcctgtgcaagtccagatgccacaagtgcctagagacaagcgggcagagttcatgaggggccatcccccagtttttgcccactctactaatctcatggacactgaagattggctgcataccgtggagcgtgag

SEQ ID NO: 41392 - DNA, 415 bp, Zea Mays
cttgtggaaaactgggaaatgccgaaggaaatcatcactaactctaacgaaggtgatttggtccggctgaagtatacattcaggtttgaggataagtttgatgaactaaatgatgaatggttgaaatgtatcaaagctacaagtgatgaactgcttggagcatattccaaggcagaagataatgcactatccgcagccttcggaggtcggggaaagaagagattgaacagagtttttgacgccattggcttcgtttacctcgactaccgctattcgctacgtggacagggaaaaaagaggaaagctgctacttcgtccaccccagatgagcctgtgccgaagggaaaaaagttgaaggttctaactcaccgaccacgtttcattgaaccggctgcgatacctgagtttggcaaag

SEQ ID NO: 41393 - DNA, 428 bp, Zea Mays
aaagatcttggcgcctggatcgactcgggctcggtcacagctaagctccacatacccacttgctcgtcgatcggtcgagatagacctcgccgccgttggccgacttaccactgtgcgcacgtgctaaagcactgaaccacgtcgcagtgaatctagccatgcattcccggtgatccctggagagccgccacggtgaaagccactaatctcgagcgccagtgactcctttcttctccgaccgccaccgcgcccaacccaaattcatgcgccaccacccccggagtctataaattgagcgtatccgcggctccgttaggtaattacgcatccattgcaccagtccttgccccggattatccaccagagcctcccaatttctctcttcccccaatttggttctccgcgccgtcgtgtgttggctcaccatg

SEQ ID NO: 41394 - DNA, 541 bp, Zea Mays
aagggaggctgctctgttcttaacaaaaatccagagatatggtgggtagaaggttgctggttcagataagtcctgaagatccaatacgctgaaaatctgaagaacaccaaaagatctacgacactgttgatttggatgaacttggatgaatcggtgaggatttgatcgcctgggattaactcggtacgtggcatcgttccgcgagccgagccacgcgtggccggagtgggtcaccggcgaccacggtgactcgattaacttttgtcgcggtgtcacccatgcctcgatctccctcactgtgtctcttaccgacgtagtagtcatgcgctaacgaagctatctgtggccggagatcgctagccgagccaccgtggctataaatagcaccatgatccacggcggggtatgcacacctccacccagtttgatgatccaagcccaaattcgcacagcctccgcccccttctctcaaattgagtaggcactgtgaaactacagttcctaacggccgtgtagccccaatctccactgccaatttcgc

SEQ ID NO: 41395 - DNA, 423 bp, Zea Mays
tcctgtcctgcctggttcctctctcttctcaagaagttcccaggtagctatcgcactctattctagccttacctactgctctactactctcgcttatcttttctccttatcttgcagcagtcagttcaggatggtgaggatgaagaatgtcacaccgtcagggggaggagatgaccaggaccctccttgccccttcagacaagtcaaggggaagactgtctaccttgagtagcaagggggcaaaaagaagagatgtctggacagagccactcatgcaatgatttcagcaacagcagtagtagatcaagaagagcaaggaggtcagttgcagatatcttctgatcagatcgccttctgagtccgtcgcctcaggtctcggactcgctcctccactgctcgctccactccttctgacccagtcac

SEQ ID NO: 41396 - DNA, 1018 bp, Zea Mays
ataaataagacagaaaaatacctcataaagatcatccttcagttgtctgcaattgtagttcgatgctcctacacacacaacatgtggttgatgatcagtcataaactttaagactcgctgctggtcgttcttcttccgctgctgctcagcgacaccttgagacctgttactgatagagcctgcatacagaacatcaaccaactctcctgaggagtctaacattacaaaggtggttgctggcttcccaggaccccagcagcaagccataactctcaactctgattcatcatccaaatcaatgtcagcatccttcttgtccgcatctttcttcttccaaggagcaacagtaaccttgttccacaactgtttcccatattccatatggagccaatgtttggcttttgtcatcaacagtgatcgagcttccttttccattgatggaaggagaaaattgaagaaagcatcatccagtatcatcttccgttgctcatcccacaattgtgcagacttgctgacacaatcacttagataattctcacgtgcttcagacatgagttttttctttgcatcttctggcaattttacggtaaccttgaggagcttttcttcctctgctttctgaataaggagccactgtgcatcaacaaacttgctaagtggtttctctctcagccacttaacacccgatagttggtgatatggatctatgattgtatttccctcagatgtgggacttgttgacacaactgctttattcatgaagatgcctcgtacatgctttctcacaattggctcacaacctatctcaactgctgcctgtgaacaaaggaacaggggggcaaggaacaaacctatcaactaagtttaatgcattacttctccatcccaaattataaggcattttggattttctagatgcatagttttttttttgctaactccgcctatgttgattggaagacttccttaagtcgtttcaacatagccggtcccaagcccggtaaaggaggagggttgt

SEQ ID NO: 41397 - DNA, 326 bp, Zea Mays
aagatcttggcgcccagataagctcggacctggtcactggatggttcaccgtacccacttgctctatggccggtcgtgataatcctcgccggcattggtcgcctgccacccatgcgccacgtgcctaggagctttaccacgttgcagtgaagcgtagtagggagtccatccatcgccggaggctttgccatggtgaaagccacggtagtgcttgcgccagtgacctcccctctctccggccgccagcacttcccgtccaaattcgccctcctcactgtcgtcctctataaattgatgccccggcgaactccgttaggttattacgc

SEQ ID NO: 41398 - DNA, 403 bp, Zea Mays
gaattattcctctactagaattcattttctatattaatttatctgatttattttctctctgggtcacggttatcaatttccaggaagtccacggttactttggctaaaaacaggacctatattaaaggttttatcactgccaccggactgtgggttgattacatagaaacataagggctcttttgcaaattatcgaggtcgaaagggtatgagctgtttctggccgcgtgatctgagatggagggcccagattacatcgggatgacattgaaccggtatgcacgccaagccgttggatttaagatccagggtccatgttttaaataaccgtgatcagatcaccaccatacatcagccatcccacggtcaatgatgcacctcgaatcagtacgcgccctgcact

SEQ ID NO: 41399 - DNA, 399 bp, Zea Mays
aaggtatccaaagggagcgatggagggaaggtaaccgcctgaaaatgtcaggagaggacgcacgaaggcaaagtggagggtgcgatagaggaaggtatccagagggtgtgatggagggaaggtaaccgcctgaagatgttgggagaggacacacgaaggtaaagtggagggtgcgacagagaaaggtatccatggggtgcgatggagggaaggtaactgcctaaagatgttgggagaggacacacgaaggcaaagcggagggtgcgatagaggaaggtatccagagggagcgatggagggaaggtaactgcatgaagatgctgggagaggacacacgaaggcaaagtggagggtgcgacagaggaaggtatccagagggagtgatggagggaaggtaac

SEQ ID NO: 41400 - DNA, 313 bp, Zea Mays
ctagatttcagcaccgcttatcaccctcagacagacgggcagacagaaagagttaacaaagtcctcgaagatctattaagagcatgtgtgctagcattcgatagaagttgggaatccagtctaccctacacagagttctcatacaacaacaactatcaggccagcatcaagatgtcaccattcgaagcgttgtatggacgaaaatgccagacacctctcatgtgatccaacgtaggggaaaagcactagaaggacctgcctttgtcaaagaggcagaagagaaagttgccctgatccgcaggagattacttga

SEQ ID NO: 41401 - DNA, 741 bp, Zea Mays
gcgggtcggactcagcgttggagacggtgctcgcgacggcgggtggattgcctagggttcggcgccgcggtggatcaaatgcggctcgttctctgcggtggagaagaacaagggggcagcgccaccttctctgcgattctgggtccctcaccggtgaagaagaacaaggcgacatcgtctccctctatgcggtggagaaggtgaatgcgacgacgttcgggcgacggggggagaatctctagggttcggcaaccgcagtggagaagaagcagatggcggcgataaagctagggttcggccgccgcgagcgttacgggtgaggagagctggaaaaactgcgtgcttggttgctggattcgtgggcccgatacacgtaatctgctgggcgaaatcaacgcgaaggcccatggaccgacacgtggattactgtttcgtaaacggaaacataagacatcgtaagatcgtctaaggaaagggtttgacgatgatctaagcattagatccttcttcctgatactgtgcaataggttgttgttccctactgccagctggggaataactaaccatgaggttcttttaactgaggaaatgtatcgtttccacgagatagactggtaccaactaatattcaatgatttatgccaaactgccaagaagtgacatactaggagcgttacaaatgtttctacaacaatttacggatgttccatcatcattcttgtaagcatatcacttttttgt

SEQ ID NO: 41402 - DNA, 349 bp, Zea Mays
gcggggcacgaagctataacatctgaagttgttatggtattgttcctttccggttgcctttgtctggtaggataacttgtgaatattgcagaaacacctagcatctggctctatcccttgactcctcatagcccatataaaaacccccactttgataaatgcttcgggggtaagttgatgaaggtatatttcgaatgttttcagaacttcaaccaacatcttgtgtagtgggaagcaaagcccagctttcatgaagcttttaaagaccaccacctcatcagctttgggaaggggaacgatgctttcccccgtccctcactatagaaatatcatgaaaatatttgctctt

SEQ ID NO: 41403 - DNA, 403 bp, Zea Mays
cctagtgccaaccatgtagtcgcatcctgcactctgcagcaggtcacaacattgccttggaccaattcttgggatcaacaatctctggctaagtcatttagcacaatggctctcaaccctcccccattactgactcggtgatggactcaggtgcttccaaccacatgacacctgatgctggtatgtctccctttttcaacttcctgtttgcacatcttcatcatttttagcaatggatccattctccttgtcttgtctatcggccctatagttcttcctggaccattttatcttaataatatccttgttgctcctaatattattcagaatctcctttccatttgttggtttaccattgacaacatgacccatttggcctctctgtgaaggatcttcactctag

SEQ ID NO: 41404 - DNA, 313 bp, Zea Mays
ctcgaacttgttttaccttgacacaacctctgtgatgggtccatgtgccacctctgattctgtcagatctatgccctgagttttgaggccaaatctatgaaatcattgttgggtggttttgtggatcgacctccaaactaccgtaggtagcatactccgtacatgttgccacgtcctggacatgtgtctcgccagtcctagaccgcactggtgacacaatccgctctgtcatattcttgaacctgttagagtatgtatgtgtcagccatcacatttagtcagctaacttcttcattccctcatttaagtccta

SEQ ID NO: 41405 - DNA, 433 bp, Zea Mays
tcctaccacttttgtcattatatatttatttgattattgtgtagagatccattatcagatacacatgagttctcaaattgtttcttgatatgtcacagtataagttttctcctacagaagataggattcaatgatgacatgccacaaaaaatagttgtgattttgtccatcctactgcactgtatgttagtaccatttcaacagtatatttaaccataagaaataggttaatcccacagcagactttaatactatatgctaaataaagtgttatctttctggatcatctagtctttgaaacacatgcagagcttggtctaaatattctttgcggtagcatgtaatagaaatcattgacttgggtgtttgacatagcaagcacttgatggttttaagttactaatgttcaatttttctgagtatccatattaat

SEQ ID NO: 41406 - DNA, 435 bp, Zea Mays
cttaccagttcctgcgccacagtccgcatggagtccgtttgccgccacgtacacaggagacgatagtgggctcttgcaatcagctccaggggatgagggattcgactggactttatagccatagacccacgacggccacggaaatatctgttgggaattagttgagggagctccgtgaggaccggaccagagtgacccaaatcctgggaaggggacgtttcttacagcacgggcccacacgtcagccatgcacgaaaaaagggtgaggagctggtgcgggagatgcttctgggctgaaggagaataaggaagtgggtcgccagcatttacatgtgagaagacatgggccaacagtttcttttttttctattttgttttctatttcagattttctattcaaattctcaaatttgagtttggacttctctattcaaa

SEQ ID NO: 41407 - DNA, 295 bp, Zea Mays
ccaaccacttaggtgattacattgagaatcacatcatacgagataaaatacatgtatcatatgaccttgggtcccgagatttttcttaggaatcgcaagagtgttcctaattatctcctcattcagaaaacatagataaataagtttcctctgacataatgatgagcctcttggtccaagagttgttatctactgccaaagggaacaaaccaagatgtctctaaaaccaatgcttcgacttctaggttggagttcataatgactgacagttgtcactccatggtgcaatcataag

SEQ ID NO: 41408 - DNA, 506 bp, Zea Mays
atcttgcacctaagtgctcatagtaggggatatgagcaagtcgagagagggagtgagttccaatctctgagtattattgaggcgagtgccaatatgaggagtggcatgaggaatgaacggtgaagtgttgtcctccacccatagaaggcctcgtgctcctccttttatagtcgcaaggaggaggcccaggtgttgctagactagtgttgtggtcggaggagatgtgtccgagccctgtagcagtatggccagcaagatggccctcatccttgttgtcgtctttggtcaggagatggacgctcaatccctatagctcgttcctttgactaggtagagagtcgaggccaggtttgggagcatgggcatgtgttcaagcccggaatgtaaaggggtgtagatgagacatttccaagtgtgttgagtaagagtgattgaagcagtgctcgacatgggtcttcagcagggtttgcgggagagcgggtggcattaatgtgcgtgcttccatg

SEQ ID NO: 41409 - DNA, 489 bp, Zea Mays
ccactttatccactctactttgattctatggctaacatcttcattagtattctcgtctctttgtaacattgtgtcatgtgcggacgcacctacaccaggcgcaggcgcgcccgcgacgtgtgccgggcagaagagcacgcgatacgcgctggcagttaggcgcgcacatgctggtttgttacagatagataggattactatctgtttcaagttcctagaattaaggagaagatttggggggctagttgttaggaaagataagatatctatccctaggattgaggagtaattatctctagtttgttagggccgatcggccatatatatgtgtaaccagccggctggaaggattaagcaaagtttattctctctaatctctactctccactcaccaacaaagcctgcgactgaggagcataacctcgctggagaagacaggtcgcgactacgaactgcgtacgaactgcgtagtcgaggccctgctgttcg

SEQ ID NO: 41410 - DNA, 695 bp, Zea Mays
tacacggctcggtagttatgctactctggcgatcgagttatgtaattatgttactctggatcggcttcgatttgttctggacaggatcattacgctgtgtggcttttgtttgcttcacttttcgagagcgtccctttcttgttatgcatgctgagtttgctataaacatgtagcagcactgcactgcactacaacctcgttggcactctatccgtcctctgtttttttttttggtgatgacaattgttctgtttcccatctggttctactccatgtttgtagaaggcggtgctgcgattattcagtacttgcgagcatgtgttttttttgtactagcactaccgtgtgtgcacgattcctatttttgtagaaggtggtgctgcaattgttcaggacttggttgttcatgttgtctcgtgcggagttgtttaggatactgatgtcatctcttcgtatattgcttgactaagatcatgctagttttgattaggtagcttgcatagaaaaagcttgagtatgtatgtactaatcaaatcgcgccctgtggcaatcccgtacatacattaatttcacttggcattgttcattggcatctttctttatgctatctgcagtaacgtagaaggccactttccgtttgtccttttctgcttttgtatggctttgaagttactcaggagacagagcttttctgc

SEQ ID NO: 41411 - DNA, 596 bp, Zea Mays
atcaccaccaacactactactagtagtatcgtatcgcctggttagtggttactgtttgattcctcgtccccccgtcttcctctgttttcgcctgttttaacgccaaaaaccaaacggaattagattctcttatatctagatttcattaattgattaacggcccaacccgtggattttgcttccaattgcaacaattcggcagaaaacctccctagacagccgtggattgcttcttgtacgtgccagctttttcctacccaactcgttaatttcgtcagtttgccgcctcctgatgaatttctgctccgtcaatgcaggaaaagtaggagtcctttttttatccgtcagggaaaactcgtcaaatccggtccctattaggaattagggccacgttccccctctcccatacggctattggttttcaccgctagggtgcttgttttcgcctcgttttcgttttgtgctggtagtatatatgaggttgcagagatactcctgccgaaccgctagtacaagtcaagttacggttcgttgtccgattcttgacgtgtgagcgtttttgtgcgccacctccaccgccctttttccacaaattc

SEQ ID NO: 41412 - DNA, 582 bp, Zea Mays
cgagagctccatgtctcggtgtcgtgaaccagagaacaactactacatcacgtgtatgccaaaaacaaataatgccatgtcgcggcgacccctcgagctcgaagaaagagtgacatagatccctccccgctggccttgaaggtcgggtcgaagcacgtgaagcgtgcctgatcacaagactggggaggagggatgtgatggatcaagtgactctcgtcggtacaaacaacaccgtggaggtcgtctcgaccctgatgggaatcgaagcctaagcccgccaccaccagggccctgagcttttagccgtcgtatccttcaaacaccggtaccacaacattatagtgcgcccaccaatatcacgaagtattcaggagaatcgaaccccaacctttggctgggaaattatcgactggcgtggcatgcaggaggagcgactcatgacgacttcataatccacaatctcccctgtacctagtagacttagcacgggcatgttggaaaacttgaggcccggttgcattcagaattgggccgaccttgaagaaaattttgtggggaacttccaaggcacatacgtccgcc

SEQ ID NO: 41413 - DNA, 271 bp, Zea Mays
gaagaagaggaagaatattttgatgatcgtgagcagtatgccccgcttccccaccagggggatccgggtcaatcttcttcatatcctccaccccaggatccatcgggcagctatcctcccctagctcagcctggggaagaaaactttgcggctaacttggcgtctcaattctttgatccgactcctcctcagtggtgatttgtggttgatggttctctccatttttggtgctagttgccaaaaagggggagaaggattgacagcttggcag

SEQ ID NO: 41414 - DNA, 288 bp, Zea Mays
gaagaagtttcggtggagggcgatttggcaatcaacctagaaaactgtactgccttttttatggtaaggacaagatccacacaacaaggacatgccaagtcacaattcagaagcagaaggaaattgccgaagctgaggcgcgacagagtcagccgaagcaggtcctccacactgctttgtgttactcctcatatatcctagaatatgtggccaatcaacaacccgcgacttctgttgcttcggcaagccattcccgagcttcatggccccagttaccaccacctccaa

SEQ ID NO: 41415 - DNA, 273 bp, Zea Mays
tggctcaactttgggggcctatatcttccaagttataaagttcttgccctaggtcaccacatcaagtttgtagagctataaaaggggaacaattttgctatagagattaagctttggtcacataagaaatttggagataattagacccaaagtctggctgtcaggcaaccctaggactgaactttcagtagcagtgaatttgggtgaactttgagcctgattttgagtaagattctgtgactattttatggtgagcattgtgacaaagttaaa

SEQ ID NO: 41416 - DNA, 437 bp, Zea Mays
cgcatcccgcgcaggcccatctctccatcgtgttgcgccgctgaactgatggacaccgctacgcgggccccactggccagttcattctgccgcatgtgctcaggagcattgtgactgcgtgtgggaccaacctgtcggacctatcttctttcccccaacaacttttctggatcctcgcgcaaccgaccgcgcaatggactccaaattcctgggcgcgtatttggcggatgcctttgacttggggctcagtcgttctccctgtgcgccctacataaactccagccgtgccgccgcgttactccctcttgttcgtctagttgcatccagcagaagaaaaactctcgtccccattagagctcaacggtgcagaggagagagaggaatgggggagggaagtgcgcagtggcccagtgcggacagcattgtggaggttcgcg

SEQ ID NO: 41417 - DNA, 398 bp, Zea Mays
atcagtccgaaagtctacaagcgcaaccggaccgacacaataatgtaccagaccgggtgcgcaacaccttacgaacacacccagatgcgcgaaggcagtcaaccttatcatacaaactacagttacacgcgtacagcgagggcatcacaccttacataggctcaaccttcggaatgatccccatctccctatagttaaatagcattatcctcagctcctcagcctcaaaaagccttcgcaactccccctcacccatactcgccccaaccggcgaggacaacaattcctgcctaccagccctgcccacacgaaaccgaccatcatcaaacccgctcactctacgcttcgccactgcccttcgccgcctacacccaacactcggaccaggcaaaatttca

SEQ ID NO: 41418 - DNA, 338 bp, Zea Mays
gggtaagtcacgttctaatcagaaccgttcaacgaggatcggacgaccagggtgttttcccccaatcctcagctagcgacggcggcgccgctcaaggagcacgacggaggatcgccggcgtacaccaaatctcgcctccccagtgttatctactacccgatttctagcgcaatgccaagagcagtgaattgcgaaactaatagtggcgccataccgggagattaggctccgagggagttcgtcctcgctgcacggcggctcggccgcggaagccgaagtccggcgagcgatttcgcccccaccagtcgacgtctgcgcccagtgaaccgcgcctgccc

SEQ ID NO: 41419 - DNA, 384 bp, Zea Mays
gcgggacgctacccgggatgaccccaacccggcgtcgaacacatcagcacaaacatccatcgcgtcaccatccgccggctctgataacagatcctctggaaccatatcttcaagagtctgatcaaagttcgacagagacaattcttgtagaccaatgagggcagacagagcaggagaaggaactccactactttccccagtggctacgtatcgccgactgttctttcgagtcaaagggatctcattttcttcctcctcgttttcatcagcaacacagacaacacacccattgggatcagcgacagatggatcacacccattggggtcagcgtcagtaaattaaggcacagtcacttcctcaacagcaggaaccgaaggactagc

SEQ ID NO: 41420 - DNA, 274 bp, Zea Mays
ctaggacctgccggtcattgagcttctgttgtcttctgttttcttgcgacccatggcctccgaagatgatgttgacctccctgtcaacgcgtgggaatgctccaccccctctcccttctggttgctgaggctgcctgggctcgccaggccctcctcacggtgggggaggtggtagaggctggaacggttggccatttccgatggagtgcttgaagtccctgcagttccgtaaggtgtggcgcatgtccttatggtacgggcactaggcgtagag

SEQ ID NO: 41421 - DNA, 431 bp, Zea Mays
tcggtgccaatactgcaataaattgttctaccccaacaagatgaaggtgcacttgatgtatcactgtgggcctaatgctaaacgcacagaagctcaggctaagcagcagagcaagaggaagtgggacagcagcaaggaaaaggtgaaggagaagaggagggttcataagaagggtgatgaggcgaataaggattttcaggaattggctgatgaactgggcagacagttaaggggccaatctcctctgcattctatgcggtgggagcgtgttatcctggatgaggtgatttatgtgcctttcatgtttcattttgatgtttttaattgatatcattgcaattggaaaactacccatggaaggatcaaataatcaaacgaaattctggaacaattgttgcaactgtttctttgatttattcattgaaataaag

SEQ ID NO: 41422 - DNA, 384 bp, Zea Mays
tgacaaaattgaagcttggggaagcttcacgggttcaccaggggttatgtacatgcttgaatttggactaggcaagagtagaaaagcgggttaacagagagggcgtcgcgacgacgttctactggacgatttggtgttccagagtgtaggcttcggtaaagtttaattggccggctctgagagcaatagaaggttgaagacaagctagaacaggaagcaatttggtaggtactaacccgatgagtgctggccacggaggagtccttcacggcagcgcgaagaacagggcggaatggatttgtggactgtgtgagttctctggtgaaattgagtcgattgctcaagtgcttgtgtgcgtgatgtggtgaagaagcaggatccggg

SEQ ID NO: 41423 - DNA, 359 bp, Zea Mays
ctcattatgatggacgacgtgggaggcatgggaccctggtgccatcattactacctctatgacacgtcgtctcctggcctccgtagcctgggtctcggcacggctcgttgtattgcaggtcctgtagacagtctgcgtacctagacctagtctcactatgtcatgagtgcgctgtaggccgagggacacatatgtcatgagtgtgtcgcgggttgaggggttcgcaggtcatgagtgtgaggcagaccgacactcctaccgcggctcactgtcggtcatagttaatgaggccaaccacttatgcggggttagttaggtcaagcgaggaatccactcgagtgacttccttttggttcatc

SEQ ID NO: 41424 - DNA, 694 bp, Zea Mays
tcgcgaggccttttctcccagcgcttgtccggctgctggttcgtatcccgtcgtggcatgggtggcacggatttcatgcctccgatgacatcctaggcccgctcatctgtggtgatgtagatgtcagcctcccggaacaattgttcggaggcgactggcactttttggagtatggctcagacgaaggccgagtcgttggatcccagatagaattcttcaattacggtcgcctcagcaacttcggggatgtggttcctcattgcttgaaatcttttgaggaatgatcggagggtctcatcattctggcgcctgatggatttgaagtcccatggctgcgccagcttatcggatagagactggaaattcatgataaaccggcgactgaagtcattccaatcatcgatgcagtgttgaggtaggtgtcagagccactacagctcgtcttgcccaaggacaatgggcaagtacgccatcatgacatcctctgttacagcagcagcctgggcaacagttgtgtagatagccaactagcctctcgggtcctgttaggctcatacttgtcgacgttggagaccttgaagtagggaggccattggatggtccgaagatgcggagtgagtgcggaaactctgcatgtgtcttcctgtcgatgttcgtgtcgtcggtctcggggaggggagtcggtagtaggtcg

SEQ ID NO: 41425 - DNA, 566 bp, Zea Mays
ggggaatacatcgatatatgtttatgtgaaaagtgtattggttttatgcatgtgatcggtgattgtaatagtcgatgcaaataagggtatgattagtcctgttggagtcactatgctgttgatgccttgtgcgtaacgtggggacacatatgtgtgtgtgccatggtgtattatagtggtggtggcgtaagatatttgtttgaggtgtgcgggtatatgccgtaatatggttatactctcaacgaagaaagatgtatgtcttgtgtaacacaacgtttaggttgttgtcgtataatcgaataaaggatgcgcatgatggtcatgtgactaaagggtggtgtagtggcaaagcgagaagtaagtttaatatttttaaacgattagttgatagcatctgtcggtgtcgtcatgctttccgttgtatggtggatcgatgccttgcttggtcaattagtgcattccattcccattggataaataaatatcttgttgattgattagaggtcttatatgagcgtgatcgcagcccaataattattggaggcgagtagcgttcataagtcggt

SEQ ID NO: 41426 - DNA, 541 bp, Zea Mays
gaactgcccagatgcctcatgcctccaaacatgttgatcagtttctggagacaaaacaacctcactaatagagtcccaaaggagaaggtattgttgcattccaaccagagtgagaggtaacttgatatctctgatccactgaccattaataagggcttgggccacagttctagtggaagttaacttcttgtccacctttgagaaaaccaatggagctaaatctttgacggaattcccgctcaaccacctatcaatccaaaagagagtatcattaccgtttcccacatgggagatcactgaaatggcaaccaacgccttgacttgtggctgaacagggatatcaagaccaatccaggacctgctagggtcagttttctgtagccaccatgcttattaaaacgacgtttaaacgtcgtttaaacttaagacgctgatagaaagtgaaacggtgaaacattttacaattctttgtaaaacgtcgtttaacgacgtttaaacgtcgtgttttgacgtttaaacgcggtatagagtgaaacgccgc

SEQ ID NO: 41427 - DNA, 380 bp, Zea Mays
cgaccgccgagggactcggtgcgccagcacggctcgggttgagggaagaagaaagggtgcgtgtcgttgatcttgcaatctacggtggggatttgaagccaagtgaacggttcggctgggacccgatggccgttggatgggaaaggagcgcccgagattagatcgtgtgaactgttgattcctaacccttggatcataatcggacgataggcgcgtagctctgtattcagtagatccgggccgtagatcctcaatccgagggcggtcatcgtgtactggttgatgatacctagatctaatcgtggcccttgattcgcgatcgggcggccagaaaccgtgcataccccttcgcggtcacgcattttgcatatgagcccccg

SEQ ID NO: 41428 - DNA, 422 bp, Zea Mays
tgtgacaggagtaggttggggagaagaaggctacaaataaagggaatcgtttgggttctgtaggaagctctcagcagatttgaaaacgaatttgctgagtaattgtcctccctctgtaacttctctctttccctccctttttttctgcagggtaaatatacacgccaaaagcagaaattgccatgcatgcattattgatttcttgggccgggtgcttgcattgcattgcatgatgaagctttagggttttcttggcatgcactggatggtgcaatagcaaggcacggggcagggagaggtcaaattcgctttcgagcatcacatcctttttgctcgtgcggttccttcgccagaatgatgccacggctctccatcccctctctgcaaacacgcgagttgccgtctgcattcagaactctcgc

SEQ ID NO: 41429 - DNA, 449 bp, Zea Mays
gggtgctgctcagggtgctggtggtggaggagtgcccgggggcgctgtccctgcgggtgctgctccaggtggcggggctgaggtgcctcttcccgtcagaggtctttctctgatgcagcggttgggcatgaagttggacacttttgatggtagtggtactccagttgaggcggcggattggctaacttaggtggaggataagatgaatgtctttgagattgggtatggagatcgtgttcgctttggcacatagctgctgaagggagaggcccagatttggtggagaggcatgcaggcagctcactcctcttcaccaggagtcctgtcttgggatgttttcatcaggcagtttgagaggaggttctacccggtcaccttcctggagaaaatgaagattgatttacagtcctacaagcaagagaagaagtctatcacagagtatgaagtgg

SEQ ID NO: 41430 - DNA, 359 bp, Zea Mays
ccggccaccgctcttgcctgctataaattgagcctgtcgtgagctctacagggtaatcacgcatctaagccgccaagtcttgtcttcaattgtccactaacgcccgtgaattgctccaccgcgaaagagacctcaccgtggtcagtttgctctaggttagttcaagctccttggacgattgttctagcctccttaagaccccctaatgctgttcgacccctttgattgaactagaccactctggattaccgtgaacgcccgtgttcatccttggtccacgctgtctccgtggacaggatgatttagattcgtagtcgtgaaattgagtggggggaaatgatcggcgagtcttgaatttg

SEQ ID NO: 41431 - DNA, 722 bp, Zea Mays
cttttatagaaagcatactataagctgtacaatgcaatcatgatggggctgccagcttacaaaagagaacagcaatgctcaaaacatgagtagcataaccaccacctctttacacaccctaacacagggctaaggtgtttttagaagggacgttgccacccaagtcttcgacttgctcagcctgcccatccatcctagaggcgtcctttgttcttgccagaacttgccatttctaaaaaaacaaaaacaaagagtttgtatagacccggtttgacaaaggcagccaggactcgtggaactccatgttagatgtcaccctactcaaccccaatgcttcgttgatgcagtaccatgtgaagttcaccgagacaccggaaaagaacatggttgacattcacaggtttctacaaagaacagaattgctgcacctcttccgcttcaggggcattttgttttgggactcatatggtttctcctcagtcatttttttgttgatgtctggtttgctttataatgtgcattagttgaaagactagacaatagacatagttctgaacttgattattgaagcaccaatagatcaatactgcaaatggcatatctgaacctgttgaaagacttgattttctcttctctaaagggcttttgaccacttagtgtgatttgaatagtccaacctagcgatccattttaggttcctcactaaccttcatccatttaac

SEQ ID NO: 41432 - DNA, 460 bp, Zea Mays
cgaccgccaccgcgcgagctcaaattcacgggccaccactcaagggccctataaattgagcacaccctcggctccgctaggaattcaagcatccactccactcgttcgtgcctccaattactcactagagagccccaatttgggatttcccccaaatcggttcgaaacaccgcgcatagtgacctcgccgtggctagctcgttccaggtccgttcatgctctctgctttcctgttttagtgtccttagattcccctgatgctcctcgacccatttaattgagctaaaccatgctagatcattaggaacacgtgtgttcgtctttagttcgcactgtctccgtggccagggtgatttaaagctcataccgtgcaattgatcgaggggaaatggttattaagggttcaatttggtgtcaaccgcacgggagcaccggtagttgagctatccgaccggtatag

SEQ ID NO: 41433 - DNA, 448 bp, Zea Mays
ggcaatcgcaaataggtggctgaacgcgggaacctgttcttcgcatcgcggacggtccgatacacagacgcggatggtctgggaccttgccggacagtgcgggtcattccagtaggcggtccggcaacgccaaggagccacggcgaccacgtaccttcaaaccacaacgaccagaaataggtacgtggaaaaccaacacgttcaaggcagctgatcggttggtcaaattgagcccaacctttgattaattattgtctaaatatgtgaaaaagaaggctggccccagtaaccgaccaccaaagcgacctcacttacccacccaggagcgacaacaggttaggccgattggaccaccttatcaattagaaaggacgagaggtcataatgttccattaagacctaacacacgtgcgtggacaccgccacctccacatacacccatgtcatg

SEQ ID NO: 41434 - DNA, 344 bp, Zea Mays
gtggaagttgagatttcacactaacataagaccagatatcctttttaccttagactttacactatacaaacaaacaccataatattggaaagtgtatcttgcctatgtgaaagtaatgcatgggttgtttaccatgtaagagtgaatgccactttatcttgttttaatgttttattgataaggaaaaaacttggtcccatgtttcatatgaaggaagtcttatctccatgcagccacagactggtagtttattgagagatatggccaaacatactagcagaactatttaaagagttggttgcctatcacacctgacgcttgggactaccctcaattgatctttt

SEQ ID NO: 41435 - DNA, 619 bp, Zea Mays
gcgtgcctcggtgactctccgtgccgtcaatggggattcatccgggacatccgtgcggtggtacgggcgaccgtggggagaaggcgcgagctcgggtctgcacggcttgaagtttcaccatggtgagttttccttccctacctgttggtcatggtcacgtatggttcgagcgggatcgtccgggcggaagttagggctcggatggcgagcacggaactgctcgctggtgcggctatggtgttcggccgtgggggactagctgggaaagaaaagagagaagagagaggggaccagtgaggttgaagacgatctttggggcgtggatttcaggattaacggcttagattgaaggtacctgccggttggatcctaacccttggatcgtgatcgcatggctcagattggtttgggtatcataaaatcgagagcgttcaaataacatccgatggtcggcgttgcataccgtttcgttataagatacgatctaatccccatcgtccgctgtcgatccgacgtctcagattggcagataccctttcgctcagacacaattgcataaggacccccgagagaaacagaaatcaacccgccgtccttgcgccagtagtctgagtctcgg

SEQ ID NO: 41436 - DNA, 279 bp, Zea Mays
catggagacacttcttgagttgagatacgtggaatacatcatgcacatcagatagatgatctggtagctcgagctggtaggccatctccctaactcgcttaaggattttgaacggtcctataaagcgagggggataacttgcctttaactttaaacctcctcattccatgaattggtgacacctttaagtatacatgatcaccctcttcaaactccagtggtcttcttcgattatcagcatagctcttctgtcgagtctatgctatcctcaagttctcc

SEQ ID NO: 41437 - DNA, 339 bp, Zea Mays
ggatctttatatggtgggttacagggggattctctagtatgaaggatgctagagaatggagtagacgactgatgaatgacctgcctttgatggggtgccccctgggccttatatatccgaccgtggggcatttacatatgtgtacgataacgttgcatgcctaagtaatagtgaaccgaccgaacttatcttcctatgatcttgctgacttatcctcacttagttccgatgtccagggtggtcgcgcgggagaatcggatcagagctacggataacgctcaaaacctcgcgaaccgccttggcccccgcttgttcatttcttgcgtcggcccattccgc

SEQ ID NO: 41438 - DNA, 394 bp, Zea Mays
caaaaacactatctctccccttctttgttctaggcagtcctaaaacaaagtccattgaaatatcctcccatggtgcattaggaacaggtagaggcacatagaaaccatgaggattaaggcgtgacttagctttttggcatgttgtgcagtgagcaacaaatctctccacatccctccacatcttgggccaaaagaaatgatcagcaaggatgtcttttgtcttcttcacaccaaagtgtcccatcaaccctcctccatgtgcttcctacagtaataacaaacgcatggagctagctggaatgcatagcatgttagctctaaaaacaaacccatcagttaggacaaatttgttccaagttttcccctccttacagttcagcaacacatccttaaa

SEQ ID NO: 41439 - DNA, 299 bp, Zea Mays
agaggattgaaaggagctcattgatggagcttccatgcgagcggaggtgaggctcggcgtgggcttagagaaggcggaggagctttggagaagctccctaagcaactagacaagcgggggcgagcacaccggcgataaatttccacgacggtgctcagcgagctcggcagcaatggtggcaatgtcggctaggggaggaaggatacgaggtagggtttgtgaacaaggacatgggcttatataggcaaggtgcagactgaaaagacgatccgaacatgtgtcattggctaaccattgca

SEQ ID NO: 41440 - DNA, 297 bp, Zea Mays
ggtaaaggtggtaatgatgaaaagcataatcatggacagagttaaggcaatactgataaagtggagaaaacaagcaagggtaagataggtaaggttccaacaaaatggttgaagtaaagaaaattaattaccaagtggagttacaaggagacaacgagattagcaaggatatgcaaaataaaatgaccgctcatggatcattaagaaacaatggtggtcaagggcacgttaactgaaatgtcttaaacagatattgagatataaaggtaagcacatataaaaataagagtatgcaag

SEQ ID NO: 41441 - DNA, 458 bp, Zea Mays
cactgccgaggaagtaatgtctgtcatgagtggacaaccttccaagatttgctgcctccagtattctcagaatctacagacttgccaccacttctatttcagatgaaggaattgtgtctgcagctgtattaaataatatatctacaaagcctgatcctcggtacccagcacccttgatgctgacgacaattcgcctgtttcataaaaatatgcaatttgtagctcgaagaccagacccattatgatgcagtctgtagctccaaccgtcttgccatattaaaataagtgatgagtatggctcagttagcagttgccgtagtggaaggtcagcaatgaactgattactgatatagagcaaaagccgcaacccgactttgtgcttcctgttcataaaattggttcaataatagcaatttagataagatataggataatattctgtgatttgttacgctgtt

SEQ ID NO: 41442 - DNA, 366 bp, Zea Mays
tcagcccgtggaccagtgcttcgtactctgctgcattattggatgccggaaacaaaagctagagtgcatacttaagttgttcacctccgggagcaataaagagaatccctgcacccgctccttgtagcttcagcgagccatcgaagtacattctccatacttcagcaaattttgggctttccgggacctggtgctcagtccattctgatatgaagtcaaccagtgcctgagtctttatcgtcgtgcggggccgaaactctatgtcgtgagctcccagctcgcatgcccacttggctatccttccaatagcttctttgttgtgaagaatatcacctatcaaaaatcatgtgactactatgactttgt

SEQ ID NO: 41443 - DNA, 570 bp, Zea Mays
ggcatggtgaccccgacgacatgcggcacaggggcctagtcagcccgaagcttaaactcagcgggctcatcactagcgtcttcaacttctccctcttcttctcatcggccttgatatagaaccactcacttttccaaccggttggccacttagtgcgatagctaagcaccggggccttcatatccttgcgatatgcgaagttatagcagccaaagttttcatgcagcccgtcttctctgaccttcatctggtaatgcagctcatgcactcggcagaaagcttcagcattcgggtccattccttagcttcgaagggcccagatgaagacgctgagcctaacgatagcattaggggtcagctgatgaagatagatttcataattatccaaaacttccccaatcatctcgttcaagggaaaccgcaatcccgctctgaaaaagctcttgaaaaccactacttcgtcgtttttgggctctggaatggtttcttctccggcaaaacaaacgaatttcttctcagcttctccgaagtaacccagcttcatcatcatggtacatcagcctcagacac

SEQ ID NO: 41444 - DNA, 441 bp, Zea Mays
gtaagattcccgagacacagagaatagtactctctggatggcgggttggtttctgtttctctcgggggttcttatgcaattgtgtctgagcgaaagggtatctgccaatctgagacttcggatcgacagcggacgatggggattagatcgtatcttataacgaaacggtatgcaacgccgaccatcggatgttatttgaacgctctcgattttatgatgcccaaaccaatctgagccatgcgatcacgatccaagggttaggatccaaccggaaggtaccttcaatctaagccgttaatcatgaaatccacgccccagggatcgtcttcaacctcactggtcctctctctctctcttttcttccccagctagtcccccacggccgaacgccatagccgcgccagcgagcagttccgtgctcgccatccgagccctaacttc

SEQ ID NO: 41445 - DNA, 596 bp, Zea Mays
aacaagctcaccagcgcgcgcgaaccctcgcccccagagcgaaaaaccccacgaaaaccgtgctacatgatacagggaagaaaacaagtcgattggtggtgttattaccgtggtaggagcggtgtacaggtccgacgacgactcggtgcgatgctgcggcggagcaccctcaacggtgagaaatactttgctcaccaatggttttcgcacacggccatgctctcccacacgctccatgctctctggtataccctcacacccacggcccaccccctgttccccgagtggccacacagacgaggagcagcggcggcgacacttctctccattctcggcgatgattctctccgccttcgatagcgagctctctgtgcgggtctccgaataccaatgggatggtgaggcggccgcagggatcaggtttttatacccccaagcgggatgacaacaaccccgagtttgttacatcggtggagatcacggtggtgcgattggttgtagagatctgatgaaaatcgtaacaaaccatagaagattcctccagcttcgttggccccacgcgtcggcgactactcgggcaaaacagtacgggtacg

SEQ ID NO: 41446 - DNA, 385 bp, Zea Mays
aacagatcttctattctgggcaaggggtacttgttcttgatcgtgacctcattcagagctcgataatcgatgcacatccgcctggtgccatctttcttctccacgaataggacaagggcgacccaaggtgaggtgcttggtctgatgtaacctttctctgacagctcatctatttgcttcttgagttcaaccaactctggtccagataccctgtaagctcttttagaaatgggggcagtaccaggaagaagctctatggcaaactcaactttccgctcaggtgtcatacctggtaagtctttcggaaacacatccaaaaactctgacacaaccttgatagtctcgagtggatctgcctcactgctatcaatagccatctgatgac

SEQ ID NO: 41447 - DNA, 299 bp, Zea Mays
gaaaggtccatcagtgacccccaaaagaaaaaggatggttaatgttctagatgtactggagacaataaagtcttcaagctctactccgagaaaaattgccgaagctcaacaagcacaaattgaaacaacaacctccagagccgaagctacaaagcaccaggctgagatcgaaactggaccttcagagcctgccaaggagaaatccgtggaaactggaggagaaactaaaaaggaggctataaagcaaattctgccagaaaaaactctctcttcaactcccgaagcatcttccaaattac

SEQ ID NO: 41448 - DNA, 321 bp, Zea Mays
aaaacaacttcttcagtcgatgataagtggcgtgcacccctaagtgaccacccgtggcactatcatgcaatgttgccaccaacttcatcctgagagcagaattttggccaacccaaatcaaacttcccttcctaatgactccttgagagagtagccctgttcatccgggctgtggacacacaaccgagccagaagtgactgcgcagccgagtcagtcacataggaattcataacttcctggacccagagaggttgaacctcacttactgctgtcaatgccatcacacaacccacacgagatagagcatcagctactttgtt

SEQ ID NO: 41449 - DNA, 438 bp, Zea Mays
atgtcccaactatgcaaggtctccgtcctcggcacgtatcgccctacaatcctcgtggcttcggcctccacctcacgcaaaaacgcggccgggttcctgccccgcaaatccaaggcgaaggcaggacttcgcaccaactgatcgcccaaggacggcatccggcgggggcacactttgccaagtacctagccatgcgccaagggccatactccatatctaatgaattcctcaacaagatcgcgtccgctactcatgcgggcagcataccgaagggccccttcgtcctcatagtcctgcgccacctcgaatggtcggaacaccacataaccgtgagagcacataatggctgcagggagcctagggagattttcgacttcctcaccagagatataaaaccaaaagtcccaccagttgccccacttgttccgagcacaaggg

SEQ ID NO: 41450 - DNA, 347 bp, Zea Mays
tacagggtacttggtgcccgatacgaattcttgcacagatcctacgctgctagggactataggtggactcatgtggcctggcttgagttcaaatgatatgcattctgttttcttcattttgttcatcacgtcattaatagccttttgtaccctttcatcaatagtctcttcaagggtccttttcaacttctcgtgtttcctatatgacgccgcatactctagaaacgcctctctccaggaaatcttagaagagattccccgagcccgtccagtgtgttcaggattgcctagtgctgcagttagtatgtcattctccctccgaggcttaaactcgcccttctttctct

SEQ ID NO: 41451 - DNA, 308 bp, Zea Mays
tccagccttgcagggtggttttattacttttagccatgttcttcaccgttacgcaagatgctcttgtccttaactacacaaagggacggttcataaaatgcttggtaaaattttcatagttgcttggttgttatctgctccacagtgcatcttcttcttgttgcgtaagatctcggtttacatgtggcaagcttcactccttttcaatataacgctttcaagcttttaattgttgcctttacaatttgggcgatgcaagtcctctatcaaataaggctatgggggaaagccgatttttttccccagac

SEQ ID NO: 41452 - DNA, 379 bp, Zea Mays
ggcaggatattaccgccgctttatcaagggattctctagcatagcaagacctatgaccgagctcctcaagaaagacaataagtttgtgtggaccccaaagtgtgaggaaagtttccagatcataaagaagaagctcacgaccgcacccgttttgacactaccagatatacatcaggatttcgtcgtcttctgtgacgcttcaaggcaaggcttagggtgtgttctgatgcaaaatgagaaagtcattgcttatgcatcacgcttactcaagccgcatgagcagaattatcccacccacgatttggaattggcagccatagtgcatgccctgaaaatatggaggcactacctaattgggaacaaatgtcacatcttcacc

SEQ ID NO: 41453 - DNA, 294 bp, Zea Mays
ctataatgtccgtttggttctccggaaatgggatctctttccagcatcctggtgcagactgcagactagctcaacagtgttatgtccaccttagtgatggtgtcatgatttcctaacagcagcaggcaggatcacatgggaatgagggaaagtgccataatagctgacttggaatcatcctttctattttccagtatataagaatcttatactgttctaggtgggtttcactataattgattagaattgtattttcgttctaaatagactcaaacaggctacataattaatatg

SEQ ID NO: 41454 - DNA, 771 bp, Zea Mays
caattatatatgttagtaaggcacatatggggtagacaccatctacaatttataaaaaacttctctgctgaatccattaatatatgtgtattatgatattgattttttcatgtagatttcaaggaagaggaagacagacggctgctactactgctgacatttgtgacgccaacgttgaggactgaggtaagatgttccaacccgatctcacctttgctttgatttaccctgtgtcttgcttgttaggttattagatctcaactttcctctctgtttcaaggaggagatccatatgtttattttgtaatatatgtttgacttatgtggtcatcattcccaatgccttctcttgtttccatctgctgcacccttaggttgtttccgacgagagaagaggagaacatcggagtgcgctctccatcggagatgttgctacgtcctagcgaacaagagttacgacgaaggaacttcaaggtgtcggtaactgcagctgatgggctgcaacgacgcgtaagcatcatgtacaactccgcaaggcgagccgtgggagcgccttccggaagaagcgctcctccaaggtggtgtcgcatgcgcaatcacaccagtcagcacttgagaatacagtgggttcccatttgtgttttttctttttcttttcttttcattgtacagagatttgtttgttccgttctatttcattccctgtttgacgcagttgatgatgagtggctagttaagtttggcagatgggaaatggaaggtgtatatgtg

SEQ ID NO: 41455 - DNA, 466 bp, Zea Mays
gcttatctaatggacagaaatgtattaaccatgtcatttgcacccagagattcacatgaagctcaggttcaatttgcgttggagcgaggtgtccctgcagtaattggagtacttggaactataaaggtcccatacccctctagatcttttgatatggctcattgctcacgctgtttaatcccatgggagtcaaatggtgagcagtaaaactatccatattcataagagttaaatatctgagtcaacctttaccattacagatgtaaatatgcaatgactaatgagttatattatttttcttcatgcaggcggtatgtacatgatggaagtagaccgggttttgaggcctgggggttattggatactttctggacctcccatcaattggaagaaatactaccagtcatggaaaaggtctaaacaagatgcagaggaagatcaacatagaattgaaaatattgcagaa

SEQ ID NO: 41456 - DNA, 424 bp, Zea Mays
caaggggagaatggtctcgataagtacatcatagagcggaaatgggatagcgtgacgacgaggtggtgataggagagcgagttgaggagagagttccatgaggcgaagtcgtgcaaggcgtcgggatgtccacgaagacgatgaaggatgcgtggagtaggggctatgggagggagcaacagaaagtgatgagattgcaataatccacctcttgaagttatttgataatctagcattaattgggcactcaccgaccacgatctactggacacccaatggagatgtcgcgtagcataggtgcgccacgtgaagcctccatgtgcgcccacacaatgccttgcccgcgccgctcgccgctcacgcaccctccctcgcagtcgtgctagccaccgactacccgcaaagcaagaagcttgtgccttcc

SEQ ID NO: 41457 - DNA, 370 bp, Zea Mays
ttcagaaccgcaattgaatcctccaaaccctccacctgctgggttggaagctttcttcgtggtccaaacacagcttctgcagcaaatggccaatgcaatggccattatttaatcccaactcaataataaccaacatcacccacaccaaccaccacccagagacaaacactgtgaattcatgagccataaactgcccaccttttctagctccctagatccactacaagctgacgactagctaaaatctatggaggaaatgctcaacattgcccaattcaccgataaggagaaagtgctatatgcattgggttgccatactggccccgctacggattagtgggacagctattgcgtacgacatgttgtcgct

SEQ ID NO: 41458 - DNA, 331 bp, Zea Mays
ttagtgcctcgcggtcgggggtgcgttgtcgtgccgattgttatgtggaaggggaaaatggggtcccttctccttggcgcttcgttcttctggggttcgggccctttcccgggcggtgactccttgcttagaaacttactaagcaacacacaatccttgtaggcgtgacgacctaggtgctaatggttcagacatgggggcttggaggagtttctcgaaatggtcggtggcctccccggtcggggtcttctccccttctggtctaccgcaaccaccaatatgcctactgccatcagtctcccttccttcttgctatgggccggtagccgga

SEQ ID NO: 41459 - DNA, 366 bp, Zea Mays
cgtggacgtcgtctcccgtcgtccttgcctcaccgattccctactccgttccaccgggcgtccccggggtccgcacccaagacgcctccccgttgtcctcgcttcctccctccaacgcctgttgcctgtctcactccacgacatggatttggaatggtgaatccctcactgaggccccgaatcccgcaaccaatgccgccttcttctccccctcccctctgcacgacattgcctccccagccggcggctgaggtgcagcgccaagtggccaagtggcgccgccaatcccccatgtgatcacatccctactcggcaacaacctcctttctcgcaccgctgacaccgcgcatcatccacatccacgcc

SEQ ID NO: 41460 - DNA, 471 bp, Zea Mays
ctattgcagcagcgtcaaaaggcatgtccgggtgcagtcgagcatacagtacatgtacctcttcatgtaaactattatagtacacttgcaggctgtcaagggtcgcactaagctctaccacatgagctcgagcttttgcttcgtggtcccaagcgatcgaacacgagttgatgacccaatcaatgaccgagaatcccgttctgatatctcatattgcaaacggctaacgtcagctgacatttcagttatacactggctgtcctgcgcccatgccctatttcggtgacgtaactctaatcgaagttgttccacattggcttccaggtctccaattgggtcattgctaccactactacttccttcatgtctgggggctagctgatggcgaggcacgccaaaaggtccagtagatttgcgtgttgttttccttatacgtgtcatatctccataagaggggaagatttattagta

SEQ ID NO: 41461 - DNA, 414 bp, Zea Mays
acgaaataaaacatgggtcaccatggacaagcgcttcagccgtccccgacgtagacgaaccaacttccaaggacctcatcgacggagaccgtgtcttcaccctgcaggctctcaacaaataccaagctcaaacaaaggcatggcgtgaccacacagtcgtcccaagagaattcaacgaaggggacctcgtactcgtccggacaactcggacagagtcacggggcaagctggagccaaagtgggagggtcccttcatcatcaagacgaaggtgtcccccagcgcgtacaggctaacaatgccattcggcgaggacctagagcattcctggaatattgataatctccgtaaatttttttgtttgaatcttcagggctaacacgcccttgtaattcaccaaatagtatcattccggc

SEQ ID NO: 41462 - DNA, 374 bp, Zea Mays
tgaaggggtacggggcactgtgatccgtccgatcctaaaccagtggcccagattagaaattgtctaaattgaaccggtatgtgatcaggtccgcacatcacagtaccaaaggtcagcaacgctctacgccatgatccaatactagccctcggatggaacgttaacggcccagaccaatccattgaagcggtacgcatacatctaattctaatcgtcggatagaggatcaacggtggacgtgttgtcttcttctttacgaccccaagctacgatggcgccatcgagcagccaccgtgggccccgacagggtcatcaaaccaacgacgcggcgcaagaatccccaccgtacctatcctaagcacttaagcgactaa

SEQ ID NO: 41463 - DNA, 337 bp, Zea Mays
gaagattattatcaggaattacaaatgggtatgctgcgttgtaacatagaggatgttgaggaatctgctatggctagatttttgggcgggttaaatagggaaattcaggacatccttgcttataaagagtatgctaacgcaacccgattgtttcatcttgcttgcaaagctgaaagggaagtgcagggacgacgtgctagtgcaaggtctaatgtttctgcaggaaaatctacaccatggcagcagcgcacgactacatccatgaccgatcgtacaccaggaccaactccctcgccgagtcgaccagcaccaccgccttcctccggtgacaaaccac

SEQ ID NO: 41464 - DNA, 474 bp, Zea Mays
ctttatcttagccaaaataccaagaaagatatgagttgaaaaggagagctaccccttgctcggtcgcttgtcctccttcagctaacaaggtggtactattcgggagagctgcactgcgtggcttcgttcatgttacacttgggtgttttcttacgacccatatgagaggtaacgacctggttgttaggcaagacgtgggggacaaaacagatctaccctatgtcatgttgggattgggtgttttctcacggcctatctgggatgtaatagcctggttgttaggcgagacgtggcggagaaaaacaaatatactctaagctgcttcgcatgtgacgcatggcacacgacgcacgaaacttgtgctttaaaggagtagagattagtattgctgtgttgccattggacttagatcataagttctcttgtcgtaataaggatctgtctgaacttcaagtactcatatattttgctact

SEQ ID NO: 41465 - DNA, 372 bp, Zea Mays
gatgtgcttggtcaacttttctctaaagtagatgaggaaggtttgttacaacctctttctactaggcagcttcaacaccgggtttctctttatgctgatgatgtggttctttttatcaatcctgtggcggaggacatgattatggtttcggacatccttcaactttttggtgaggcttctggtttatataataataatcagaaatctagtgtctaccccatcagatgtcatgaagacaatttagagatgattcagcagttttggccttgtgagatatctagctttccttgcaagtaccttgggctgcccctttcattatataaattaagaagggagcaggtgcagcccattgtggataaaatagctaatcaa

SEQ ID NO: 41466 - DNA, 373 bp, Zea Mays
ggaatcttgagtctgtcatatcaaagcataatgcgtgttaatttctcccgtacgtacgtggtctcctgtcgaacctaggacctgtatgacgatgatgatcaaattattggatgagtagtaaccagtagatcgaggaggacagcttaaatttgttgtttgagtctctctcttggagctatagccagtccaaatcgccagctatcatctgtttgcgaattccgttggcagttgcattggtagctgaaacctaaatgctggtgctggaacctagctagctattaagacgcctcctttgccagtagtacgcaaactacaatcaatcccctatggggaaaaaaaaagccagagagagagctgtgattcacgagttaat

SEQ ID NO: 41467 - DNA, 364 bp, Zea Mays
ctcgccaatttttcccaaacatgacaatacatctctgaacttcatgtgaactgtccataaagaccttacaaaccaattttcagcttgggagaacgacagagtgcctccaacacgagcagctgttgccaccgcatatgcattacctcgccattttctgtgtcaccaaacgcactgagatttattattcacgctcgaccgaccaaagccgtgtccttgaagcagagagcagaaaaggaaaactgagctgtatcgctgtatcaggctgcttgcttgatctgcactcatgataactataatgcgtatgcgtcgtaacctgtagcgcgtcatcaactagaccagaatccggacaggccaaagaaagcac

SEQ ID NO: 41468 - DNA, 306 bp, Zea Mays
ctttcaagtcttctcagaaatcatttttatcttcaactcatgcttttagaagtcagcattgttttattttcatcttatgctttagaaatcagcattctatcttttggggttgatacccaatgggcgtagcccccgagctttgagtggattactgaaaataatccattcgaaggtcttcatctcatgctgttttttagaaatcatcctttccttttcgtcgaatgccttagaaatcggcgttatatcatcaactttatgctttagaggtcagcatacagttttgcctttgaaatcgagcacgcgatc

SEQ ID NO: 41469 - DNA, 496 bp, Zea Mays
atcacaataacttcagttgttttggattcattgctcgctctaatgcaagctacccagttccagcatttcggaaaaggtggcctgggtcctggatggaggagtggttctatgttaagaataatctgattgaaaaggaggacatcaaggggatcatccaacaccctatctggtctcgcttcggccttcaaaggccgaccgtggcgattgataatgatgccgaagcatgtcaaaaggctttcagcagtgcctgtgctttcattggcacaagaggcctgatccaagagcacatagcctatagggtatggccacttgtagataactaggagatgccgaaggagactgttgccaggtccagtgaaagtggattaattcgtttgaaatataccttcagatgtagagaccggtttgatgaacctaatgatgactggttaaaatgtattgaggctactagtgacgaattacttgggtcatataccagagccaaagatgatgcttt

SEQ ID NO: 41470 - DNA, 455 bp, Zea Mays
gaagatcacgattcacccccctgctcgtcgccggtgacttttcgccgggattgttgatggatcgccacgattcgtgcaccgtgggcagcagttaagctcgggcaggtaaatatatggcgcccggattgagttgagcctcgtggcggctaagcccgccgtccttcctccccagctcatcggtcgaacggataaccttgccgccgtcgagctgttgccgttgcgcgccacgtgcttaagcactagtcctcatcatggtgactcacggggtgcatgtccagtgatcgccggaccagcgcggctataaatagcgcatgatccgcgacaaggtatgaacatcacgcacaccgtaagttgatccgaagcaaaaatttgtgctgcctctgtcccctcctcccaaattggttgtgcacagtaaagctagaaccccttatggccgtatagccccaagccccgcc

SEQ ID NO: 41471 - DNA, 384 bp, Zea Mays
cccagtcattcacaagaggccacaccttgtaagcaatgtgttcctgtaccaaatccctggtaacgatgtaagtgcacacagtgttgaaatccattaaacacgcttgcacttcgttcccaattgcaatggacgaccttctaatgccgaagcgtgaccatatgggacgctgaataatgcccctcacatcttccctctcgcttagatcattcttcatatagaaccattgtttcatccaagagcccgaccatttattccgaaatgttggcacgggatatcttgcgtcagagcggggcacaaggctatagcacccgaagttgttatcatactgctccttcccagttgccttcgtctagtaagataattcatgaatattacagaagcacc

SEQ ID NO: 41472 - DNA, 286 bp, Zea Mays
catgagtgggaggcaaaccgacgcctcttacgtggctcggtgttaggcatagttaatgtggtcagtcacttatggcgggtcggtctcggaccaagcgagggatccactcgagtggtttcccttcggttcactcggtgtcgcatggttcgtctaatggcaggtgcttccagggcagacatttgctttctcctcctgctgactaatgggccccagacacagaggctttttcctagcgtgatcgctgatagatgggctctaatgacctgggatctaatcatcgacagta

SEQ ID NO: 41473 - DNA, 439 bp, Zea Mays
agaatccatctcactccttattgcttccttctaaaagtcagcatcaggagaggaatatgcctcttcaatggtacttggggtgtcatccataagatatacaatgtaatcatcaccaaagtactttgcaatccttggtctcttactctttcgagttgatacattgtcatcttccacatgattatgtatatgggattcctcagtgtgttctactggaataaaatgctcatggggtgtcgttggttcatcactagacgtattatgtgtagctttcatgggaaattcgtcttcaaagaatgtagcatctctagactccataatagtacctaccagcatgttcggtactagagtttataattaagaacctatatccaatgctgtgaaaagcatacccaaggaaaacacaatcaacagttttcggtcctaatttgcgcttcttgtt

SEQ ID NO: 41474 - DNA, 512 bp, Zea Mays
agagatgagccgggatttcccagagtttgacatcaaggagcagaggcaaggcacctccaccagaagcaaacacatgtcgagaccaccgcttcacatgcaagcggagggggggggggcgaagagcgattgtccatgattgacgacacaattagccaagtccactgaagggaaaaagatgaggaatgagtttggcgcttgacaacagagttggagcgcatccgcttgaaggtcaaatctcgatgcgagcgcatccctgatctccgtggcgcaactagaatcctcccgatcgacgatggtaacgatcagcgcacgctagagctcctcctcagcccgatcaatctttccagaacgttcgatgacacacacgtgcccgatcaatctttccagaacgttcgatgacacacacgtgacgagaagagtccactgcactggaaggtgggtcctctcggggagccctggtgaccccctgacggtggcgccatgaccgcccaacccgccatgaccccctgatg

SEQ ID NO: 41475 - DNA, 469 bp, Zea Mays
gcaggtgcagtttcggtcgctgttgtgctctcaacaactggtgccttcggagccgaagcttgtggtggtgtcccttcaataacttctgtcacagtgacaattcttcgcctttttggcccagttaccttctttgttagcaagggcttcttttccttctgaaaaagcttcgtcagatgcggccccagtggacttagcttgataggcaaagatttaatcattacctttaagatttcctccacgtcggttacagaaggtgttgcagcagtttcttcttctatatcagttgccttctgcttcggagccgcagcctttcttttcttcgaagcatctgtcttcggctcaggcctcagcttcttctttttcagtttttcttcatcatctttcactaatttagcgtcttctttattcaagacgctggcaactctctttctcttctgtccttcggcccctcggtccagccgctcatagt

SEQ ID NO: 41476 - DNA, 362 bp, Zea Mays
gcgcgctccatgacgatgttggattgtgggtgatatactgaggcgaaggcaagtttggtgccaatggagaagcagaagtctctgaagtcttggctgtcaaattgcttgccattgtcaactgtgagctcagacgggactccgaatcggcaaacaatgttttgctagaagaatttctgggcagtcttcgatgttatcgttgatactgctcttgcctcgatacacttggtgaaatactcgacggcgacgaaggtgaacttgaggttcccttgggccgtgggtagtggcccgacaatgtccaggccccagcgctgaaggggccacgtgtgggcgattagttttgtgaactacgaagggcttcccga

SEQ ID NO: 41477 - DNA, 360 bp, Zea Mays
aattgtcgccactatgggaagggccattcatagtagcagaagtcactcaacctggatcatatcgtcttactcaaatggacggcacggaaattgggaactcatggaatatagaacatctcaggaagttttacccctagctagattccaaaagctattgggacggccttgtattctgtaaattgggaaatgcatcatcaataaaaagactccattctcaaaggcactcaaactgtttactgtcaacctgcacgcttactcgactcaggatgaccactataccctactaacggagcaatcgacttaagttggtgacgacttaaggcggtgtgacatgctcacgcttacttaactcagggtgac

SEQ ID NO: 41478 - DNA, 318 bp, Zea Mays
agaatttgattgggaaaaaataatctaaggtcgactaagatctgtctctgagccacaaccacctcctctgaagtgcccagcccaagttttgaagattggaaaaattcccagcccaccaagctcctttggagacaaactttgaaccaagcacaagacaatggccacctctagcgtccttccttctacgccaaagaagcccttgtttaatcttgtcaattgccttaatcacctaggttggattaatggccatggccagatacgccaacatggatgtggaaattatagtatcagtttacttaacacttagtgttttacggg

SEQ ID NO: 41479 - DNA, 327 bp, Zea Mays
tccaacagtcttgcaactaggctcgttagaaccagtgtatgatatatacttgtcggtgttttgccccgagaatcctactgactagtgaattagtgttgtatgcccaggcccagacgggtgatgcacggagacagaagcctttatcctggttcgggcaagagaagtccctactttcagcagagggagatgagacttatattacttgcacctaagtgcttatagtagtggatacaagctagtctggagagggagaagttcccaagtccctggtgattgaggcaagtgccaatatcagctgtggaggtgaaaaaccgtgaagtgttctcc

SEQ ID NO: 41480 - DNA, 299 bp, Zea Mays
aaccctgaattctgctacagcttgttggcatggtgaccccgacatcatgcggcacaagggcctagtcagtccgaagcttaaacttagtgggctcaggaccatcgtctttaacttctccctcttcttctcatcggccttgatatagaaccattcacttttccagccggttggccacttgttgcgatagctgagcaccgaggccttcgtatccttgtgatacgcaaagttgtaacagccaaaattctcatgtagcccgtcttctctggccttcgtttggtaatgtagctcatgcactcggc

SEQ ID NO: 41481 - DNA, 464 bp, Zea Mays
cggaggggctctagccacggcgaagcttctcatggcggcgatggtgaccaactccagggaaacccgaagcgtacgagctatggtggatgagaggggctgtctgagggtgggttggacgcgtaacagagaggtggagcaaggggaacactctatctaaaggagctgattgcttgcttcgcgaatttgggatgagagtgcctacgacagtgatgagatattctcactgggctcgttcaccgtggcgcgcatgtagctcaatgatttgggtacttgtttcaccgtctgccacgctcgctatgacagggtgaagcaaagctacgcgtggcacatcatgggcgaccaacggatcaggatggtggtaattccaccacgacaccgggcaagtgggcattgcgggtcgaccgactccgtgcccaagttctcccctcgccgatcttttcacctccagtaatatctactccaat

SEQ ID NO: 41482 - DNA, 334 bp, Zea Mays
ccggcgtgttgcgcgaccgtggatgggcggcgccgccgtgtagagacgtccgaggacgaagacgcgctcgggccgttagattggcattggacgattacgattagtcctcccaggaaatgagtctggatggttagatcgggatcgggcgacccagattaagtccagcgtacctcttcgtccaactggatcttggccgtagatttataatccgatgcatgtgaatgaatcccgataatatagaattcaagccattgatcttgatcctgcagctcaaatttaataccagcccaacctccccttgatctgttctggaccgtacagatctaatccaaca

SEQ ID NO: 41483 - DNA, 392 bp, Zea Mays
cagctagtacactcgtctcggcggttcgcattcttcacccgcgcggctatataaacagacgagatgatgagaagttaccacaatattcattgctattgcaccgttgtgccgctgaaattttttactgaagccgaagtttgttgctttctgtgaaattgctgcttacgcttcagacaaacgttccatcgtttaagtgtaacttcatctgtgaaagactaaaaactgaaatggctagagtgagatctactgctagagtggcacgcgaaggagaagaggctggaacttctgagacagcccccattgcagagatgatgaagcgttctgggttggttgtccaagaatagaaagaaccaattcgaacagaagatgttgttgataccgaagctgaaccg

SEQ ID NO: 41484 - DNA, 280 bp, Zea Mays
agaagcacgagcacgatcgatcgtgcagtgcaggtcctgatgtgaggcggcactgtcgtacgtcagtggtgttaactgccagaagaacccatgacccattttcaagcttcaattgttggggggtcgatcggtgctgggattacgttttgcgccttctctttctcttccttctggaaataggacaagtggatgtcatgattggtgtctatcaaaccattttgtatcatattagaagtgagttatttcttttcctgttcatgatatatctggtgtaatcacc

SEQ ID NO: 41485 - DNA, 953 bp, Zea Mays
tgcagattgcaattccttatcatgcccagagcctctaacagatccacctgcgggagcaccatgtgcatgtgtgctaccaatcagagttggaattcgtctaagcgttgacctttactcattttttccattggtctctgattttgctgaagaggtagcttcaggggtaaacatggcacagaggcaggtccgtgtaatgggtgcgaacgttgcaggtgatcaacctgacaaaacaatggttcttgttgatctagttccagtgcaagtgaagttcgacaatgctacagcattttcagcatttgaaagcttgtggagcaaaaaagtttctttaaaaccatcagtctttgggaactatgagattctctatgttgtatatccaggtccgtggtcttactagtgctcctgactcttttgtatttcgttattctattgctgatcagtgcatctatttactgtccaatttattactgtcaatttatttgatatgcataaagtagatgacacagtgtaaaataaatcgtgcattatcttaattgttgaaattgttaaaattctgcgccactagttctcaccaagaaatatgaattttgtgcagggcttcctccttcaccaccttcagggcaaggtgttggggatggggcgtttggcaacaacagaaatgcaagggccgtgaagccccttggggtcgatgtaagaagtcccaagagaaaagtgaatggcagcctcattgctattgttgttttgtctactgttatagcattgattatttgctgtctggctgcatggtcgctaatcctcagattcaggggtccgagccacacagctcggggatttccacatactgcacttccaaaattttctaggtcatctggtacgtgtaactaacctgctaattttctgataattgcaccttgatgtgatgtaattggactagctctttgattcgtagcagaata

SEQ ID NO: 41486 - DNA, 301 bp, Zea Mays
ccactgataaggcttcggaggacacagagttggacctatggcacctgggcggccaagaactgtccgatgaagttatttctgaattgaaagaattcacccttgctggcggatacaagcccagatccgtgctctttagcggtgtggacgaagagattttggggtgtattcctcaccaggccggagcaaagattgttaatactttatcaaagactattggatttccaaagcttgagcgggacctcagtaactatagaagataacacattactgggagcttattctactcaaattttaaggtata

SEQ ID NO: 41487 - DNA, 333 bp, Zea Mays
acagtcatatagcgtatattgtttatatatgtctgttggctctacaaaacttttaaagacctaattataagtcaacaacacggcaacaacaagcaaggagaattagacgtaacccattaatcttgatttctatattctagtagtagtacttcgtaatctcaggcccatctgactaggctctcagtcgcaaacagacaggcggtcgtgccgtctcctctcggtagccaacacacgacattgggtacgacaacgcttttgtctttccctacatagcgaacacgaaactaacatgacatgatcgattgatctcacaacgtattacatctatttgat

SEQ ID NO: 41488 - DNA, 470 bp, Zea Mays
actgttagtgtctcatttccagccacatcttcctctcctttaacctcctctgacatcacaaacacccatacttcatctcccttcacccacttctctaactgcaacacagacacctgttgcacctccctctttaggtctacatccccctgtagtctgaccttcaccccctgatcacagaaggttagcaccttgttgatccagtcataatgcattgggctatgttgtttcaaccagtcataccctaatatcacatcataagcctccaatgccaacaccctcatggcagttctatagacatgcccccagccttccacttcacctctctgacatttttttcacacaccatgatctccccattagctaccttcaccttcacaggagggcagtcttctgtgctcaaccccagtttagtcaccattctctgactaataaaagtagtggagctaccggagtcaatcaacataaacagc

SEQ ID NO: 41489 - DNA, 293 bp, Zea Mays
agacaaaacaccagcaagcttggtttcatagtcttgccttttgcttcttgagaggtgtctctatattctcttcgctagcttaagaaaaaagacgaaaccgacaacttgacctgagtcgcgcgttggagtggcttagcatcgttcatctccattttcacaggtggatagatgtcactactttacaaccattggagtggacaatagactattttttgttattcaatctttaccctcggcgagatggcaatgtcacaatctagcttgactgatttcattgcagctagtgcatcctt

SEQ ID NO: 41490 - DNA, 295 bp, Zea Mays
acaaccatcaccatcagtagattattcagcacaccaagaaaagcattggcttatggattatttagcattgcgatagatcgtgcagtaggcttagcaccacatcaatctacaaagatacttccggctacctggaaatgcgcgaaaatcaaataatcaggaaactctggagttgcatggcaccacgaaaatgtggattgacatttgataccgaactgcaataatcatcactgctgctggtgtgcgcaaggactgaaaacttgcctagcccaggcaacgattctcgtgtaggattttg

SEQ ID NO: 41491 - DNA, 441 bp, Zea Mays
cttagcttcttagtcttagtttgatttcttggaattataattttagagatggaggacgctattggcgagggcattaggtcttgcctctagctaacatatgcacactgaatctcctatcttctgatgtgagagttggataggtagagcaccatgtctatccgagagctcaacgagtcacccgcataattccctatatatcgaatgacattgattatcgatgggcatcgtggaggtcgagtacctatagagatatgtcatgcatcaaatctagtggacatgacttatgtagatgaggaggacgaggccattaaggttgtgatgcagttagagctagatgggatgtttgcaacactatgagactaacgatagcttagacaaggactacgatccaatcccacatattccaccacctagatcacatgacttagagaccaggggctc

SEQ ID NO: 41492 - DNA, 442 bp, Zea Mays
atcgcaagaagccgcaagtgcccgtttctcctcctacagacaagaatcaactctcaaatacctagtaagcagtaaagtcatagcagatccagtcaagtaagcttacctcgttagctaccctttcagagtcaagctgaacactaagagaggaattcaaggaatttgcatcgtctaaagaagcagaaactcgagccaagtcaatctgacatcgagaatacttcccctcaagctcagaataccgccggtttgaatcggcttgatactggagatatttcacctcgagttcagagtaccgctaggtcatatctaacaaaaagcagccgaagaaggatacacggttaaaaacagactaatcagtcagccagagaaaaaacaaaaacactaaccaatattcgatattttcaaatcagatatctgcttctgaagcagcaacggattccac

SEQ ID NO: 41493 - DNA, 362 bp, Zea Mays
gaagaaactatgcctcgcttgaggttggcctcagcctcgaaacaaactctgcctcgcccgagctcggcctcggctacctgccccccgcgaatcccatagaacgccactccttcaactgtatcctgcatggcagcgagccccaaagcaagctcggccatgacctcaggaagacttccgccttgcccaagcatggcttcggcctcgataataccaatgaaagaacgcccaacgtcacaagaagtagcaggactgacgtattaccaagagcttttctccatactcaccactactccaaccaatacgatttggatagcttccccatcagacaggctcaggtaagtaaccgagccctcagctctggc

SEQ ID NO: 41494 - DNA, 476 bp, Zea Mays
gcgaggcggagttttgggaagacccctgagggggacctcaggcgaggcagagttcttgattccttaacctcgggcgacgtactctgatggtgtagtttgggtacccctaattatcatactcgacaataagagtatcttctgttggcgttcacatgatcaacatatgtataccaccacttaatttttctagtggccatgaaacgaccattgttacattcgaggacatgtggttgatgatgaacctccagagactcgacttatagctcgtaatggtgtttgcattgtaagtgtcactcatacttacacatacatgtgttattattagtgagttgtattaattctcaacatttatcatgcacacgcgccttgcagaatgcaacatgatcaacaggagatccgttacagtctgactcctcattctaatgtcggtaaaagggttgggtatctcaacacaatgaaaaatatatgagaatcag

SEQ ID NO: 41495 - DNA, 343 bp, Zea Mays
ccggagtggagcaattgctcaccggagctcggcggaccactctagaccccatcctgccgtgggcgggtgccttcacggcctactacactggtataatcccactcctagctttgcctccccctgctcctcgcgatgccctaaaccataaaagaaatagcgctggtggacttcgatttggaactcgcgggcatgaacgccgatgtggcatcacccttcgccgccgcgcttgggaaccagggtgaagacgcggatgcaccgtccgatcaggatcgcgtgtcggggattggtctgagagtataactcttcggtcatttaatcctagccactgaatctttggtcaatg

SEQ ID NO: 41496 - DNA, 344 bp, Zea Mays
gtggcatagaggttgccctaagatgagtaatcgcaaatgtgcttgtgttggattaagtaggcgcgagcgtgccgtgtgaatttaagtcattaccaacttaaaccgaccactccgttagtagggtatagtgatcaccccgagttaagtaagtgtgtgcatgtcgcatcaccttaagtcattgccgacttaagttgattgctccgttagtagggtatagtggtcaccccgagttaagtaagcgtgagcatgtcgcaccgccttaagtcattgctgacttaagccgattgctccgttagtagggtatagtggtcaccccgagttaagtaagcgtgagcatgtcgcac

SEQ ID NO: 41497 - DNA, 317 bp, Zea Mays
gctgcattggatcattaccccccccccccttcagcacgagttcgcaacgaaggacttggatcctcttcatcattttctaaggattgctattgagcgtcatccaaatggccaccctggatgtcctggagcatgctggtatgttggattgcaagccatgcgcgacactggtggacacacaggccaaagtctctagcgacggttctcgtgtctgcgatcccactgcctactgtagtcttgccagcaatcttcagtgtctcaccttcacccggctcaacatcgcgtatgttgtccgctagctctgtctttacatgcatgat

SEQ ID NO: 41498 - DNA, 373 bp, Zea Mays
gccactgtaggtaccctgaatcaggggtgccccttactacagtatgaagatacggtgcccgtgcgacgatctctagccgcgcggtgaacagcacccgaccccaccacgtggacggctcaaggggcgccacgtgaccagaaaagatgatatatcccaggatgcaatcagttggaccggacctccacgaggaagcgccggacccctgtacgcacaacccggaccccccgaatacggtctaggactcctaagtagcgtgccggatcccttggatagggaccgaattcctccgagtaatgtccgggccacccataacaaggtcccgggacagaggataccctggcctaagcgagggtccagtactgacacatgtcca

SEQ ID NO: 41499 - DNA, 545 bp, Zea Mays
tgggtttaattatcagacattattaattttagagaagtaactacaatgttctgtttatactgaagacaacaaaagcagttgagcacagttgatttcgttttctgtttttctaaccgatgaagaggaggctcgatctctttacctttatcattgggagtttcctacaattgttaaacagcaatgagtgagctgcatatatatgtattaaagaggttattgaaatgaaatgtcaatatgtttttaaaactgtcatgttaccagtaggatactgtccagctccttatttccttaaaaatgctataaaaaatctgatactttggttataggtctgcaccatgcaggatgatggcttgaaatgcactgatgtcccatagatctttttaaagtgtttgcttgtcatttgcagcccctattgaagtgcactctggaattggcttttgccatggatccatatcgtatctaaggaaaaggactgcatgtcagagcaaataatacagatataaatggaatttgaaaagggaaaaatgaaatgggaaacctgctac

SEQ ID NO: 41500 - DNA, 300 bp, Zea Mays
ctcttgtggtccgtgtagatatcacacttctgtccgtaaagataatgtctccaggtcttcaatgcatgaaccacagctgctagctccaaatcatgagcggggtaattcttctcgtgaactttcaattgtcggggcgagtatgccactactctcccttcctgcattaacacacaccctagttcggtgtacgaagcatcacaatatactgagaatggcttgtgtacatttggcagaaccaacactggtgttgttgtcaacttctgcttcaacatctcaaatgattcttggcacgctggggtc

SEQ ID NO: 41501 - DNA, 335 bp, Zea Mays
ccatccgtccgaacgcgctgcggaggttggtggcacggcgaggctgtggctattcgtgtccggagacgagcagcgtgagataacacggctccacctcctacccctcccaatcgacgcaagcctctactgcgaacccgtgaagaaatgcgcggacgacaccgaagccacgccgccgcgctcatgcacccgcacgaccgacgatggccggtgaggcgccgccgccatccttaccatctcgcctgcgcattcgctcttcttcatctcatcctgcctccactcttcttcacaaatatgcatggcggtcttcgcagaccgtccacggcgagtgtttcctc

SEQ ID NO: 41502 - DNA, 444 bp, Zea Mays
atccatgttcatcatcatctccttgaagttgtaggcttgttaggtttattttctcctttattcttgccgaatttcctatgaccaagtttgtagtgaactggacttagcgtccttaccattagaatcttgccttctcttcaacctcaagtgacactatcagactggcatactagtcctcttgtgtcttgagaagttttgatattcgtcgctgagggaggctactttgctattacgcaactggcgacaaggatctagtatgacacattctaggatctcaatggcttgacaatccactatatctcatcggctttccacaacaaagcgattgtccaccatcctattgtcatgcaaattttccatgacatgcagttgactacttacatacgatgcaccaaatgtgacatttgatggataccatagcacctttgcatctattatttgtat

SEQ ID NO: 41503 - DNA, 412 bp, Zea Mays
atcatgcttattgcttcaggtcatggtttagctagtcagaaagtttcttctcaacagagccgtagactagatatttcagttgctgtatagttgaattgtgctacaataaagaatgtagagaagagacctgagctgtctcagatagtcagatgcttattgcagcatagaactggtcaggggcggaactagaggcttttattggtgtcatttgacactgatagattttggaaaaccaatgaagaaacagtataatttactgatttacggtgtagatgatactatcctgtaatggtgatgacaccggcagctttattggctggcttcgcccctggaactgggacttctctagatgaggaaaggcgtggtgagtttttcttttcttttatatcagttgcctcctgcatggcaccta

SEQ ID NO: 41504 - DNA, 488 bp, Zea Mays
tctatatgtggactacactctcccttatactgagtccggggtacgcatgctggttccagtttgggaccggagacagaagactgcatggacattcctagaacctttaacagctgatctatggttacgaactggagccttcattgtcttcaccggctttgtagtttggtttatcgagcacagaacaaatcaggaattcagaggaccgccagccactcaaattggatcactcttctacttctccttctcaacatttgtatttgctcatagggagaggattgtgaacaacttgtcaagaattacagtagtagtttggctttttgtggtgctaatattgcagcagagttatactgcaagcttaagctcaattctcactgtagaacagcttcaaccaacagtcaccaatttagatgaagttatcaggcgaggggattatgttggctacctcagtgattctttcatgcctgagcttttgaaaaggttgaaaatta

SEQ ID NO: 41505 - DNA, 325 bp, Zea Mays
tctagagaataaacaaaagggcctgaaaaccaccatgggaggtgagataggagacatgaacggggtcaatttccttgtccataatgagtagaggcgttacttggtgggatggggtgttgtaacgtatgtacatcttgtagtgttgtgtgctgcagcattcatttaatcattctgaaaggatgctgataaaggtcgtgagtgatgtcaatatgctatatttgtaatatctactgccagtaattgccatcaaatatttgcatttattgtcttatgaagcgcatctaagtgaaaataccatgcagcaaaatgcgattccagcaaaaac

SEQ ID NO: 41506 - DNA, 687 bp, Zea Mays
ggcatatggttttgcactcgtcgccacgctgttaggcaggtccctcgtcgccacgcctttaaaacaaggataaactctatatagtaccttcaatgtagtctccatcaccaaaaacaagtctcccaacaattccgtaagcaacatcataaaagaatccaactttgtttctgaaccttcagttagctccttctgtgcatagcttctcagtacttgcagacccagcatgtgcacctgattagttaaaacaatttcataactaaccactagcaaagagtgacatgtgggtaccattaataggtgaagtagttatatacctgtatgttggtactacgaaatgaaccttgaataacctgtacgcacagcctgaagctgccccaaaggagcacatcattgttacttacattttcacttcgataaatgatctcaggaacaagttttgcaagagcagtggcttctcccaagcaaaaaagtagtatcttattcaacagcttgtaggaatcagaaatcttgttttcgagcaatgagatctttttatcacactctacatagaagtatcccactaggccaaccatagcaccaaagacaactttaggacttgtgcactcaccatctgattcgactctttctgcaaaaaaaagggggcaccaattctcaagcatcaccattcttcatggacaattattattt

SEQ ID NO: 41507 - DNA, 378 bp, Zea Mays
cccgagtgaaggtgatcgggtgttccgaccatcggtacggagcgggaggaccggtggtcgccaccaatatctggcgatcgttgagcttttgttgtcttctgttctcctgcgatccgtgcccgccgaagatgacgttgacctccccgtcaacgcgcgggaaggctccacctcctccctcctcctgctgctggggttgtcgcggttcttctggtcctccccgcggcggaggaggaggtagaggttggaagggccggtcgtgtccgacgaagtgcttgaagtccctgcagttccgaagggtgtggcgcatgtccttgtggtacgggcactgggcgtcgaggatgtcgtccagcgtgcgttcgcctccgcgaggtcctcccc

SEQ ID NO: 41508 - DNA, 340 bp, Zea Mays
tgccaatttcgccgttcttcctgctgctgctggaggagttcgaacttcaactccagcacctcacaccccactccatcctccaggtggccatctttgtccatttctgtgagatgttcgtgggagtggcggcttgcacttcccttttccgccagttttttgtgctggtgaggtctgggaagggcaaagatcacctcggggcctactacttccagtcaaggacagatccgacggtgacctacatcacttcccttggcggtgcgaggtgggagaactggcgaaatgactgggtgatcgccagtgctgaggtcagcgaccgccttgccctcctgagtgacgggcc

SEQ ID NO: 41509 - DNA, 503 bp, Zea Mays
gacctggtctggtgggatccggacctatccgcatacactcctgctccccgctaaggtggagacccgatgctgccacgtggcatactgcgtgcggcataagccaacgggcggaacctggcatgatgcctctgggccacgcgcgccttcgcattcattacggataagatgtgtgtctgcccattccactgacagacggcgtgctcagtccacgatacgtgggtcgtgcagttactctcatggtaccatatcgagggcaatgagtcgccattactcgtacgtttccaagaaaaagggttactgcctatcaatgctgcatagactgcagtcatcatgactcccgctgattactcatgtgttactctgtcagcattagttattcacataatgtatttcttccattatgctcctaggcccgcatgtcggggctcagtatccttgtatgtgcctcccttaaactataaatgggaaggcacacagcgttacaagggacacgctcaattaca

SEQ ID NO: 41510 - DNA, 381 bp, Zea Mays
cgaactcttggatgagttacacggtgcctgcttcttcacaaagttggacctccacagtggatatcaccaagtacgcatgcacccagatgatattgagaagacagcgttccacactcatcgaggtcacttcgagtttctagtcatgcccttcggcctcaccaacgcaccgtccacatttcaggccctcatgaatgatgtcctgaaacccttcatccagaagtttgtcctggtcttcttcgatgatattctggtatccagctcttcctgggcagcgcacttacagcatgtcagggaagtatttacaacactccgagcaaacaagttatcagtcaaacagtccaagtgttcgtttggcaaaacatcagtcgcttacttgggtca

SEQ ID NO: 41511 - DNA, 462 bp, Zea Mays
ggaatcgatccgggggaggatagcttcgaacgtggcaccatctcatgagttcagccgggcgtggccggagttattcaccggtggccgccgtggctcggtcaattccaccgcggtgtcatccatgccttgctcctcccttactgtacctcttctatacgtggttgccatgcgtgagcaaagccttccgcggtcactgattgttagccggaccaccgtggctataaatagcgccatggaccacggcgaggtattcacatctccaccagtgagctcagttgaagtccaaattcgcggaatcctctccacctctcccaaaattggtagtgcacggtgaaactatagttccttacggccgtgtagccccaatctcacctcccaattccacccagaaccgtcgcgacgccattttcccccttttctgtcaccagcgagcacaacttctccgcgctccgtggccggact

SEQ ID NO: 41512 - DNA, 411 bp, Zea Mays
ccaagggcatgggggatctattcttgatagtcatagagttcaaccttctgtagtcaatgcaaaacctccagctgccatctttcttctggactagtagtactggggatgcaaaaggactggcactaggtactatcagacctgctttcaacaagtctgtcacctgtctttcgatctctgttttgtggaatggtgagtacctgtagggtctagaattcataggtatggaacctggcaacagaggtatatggtgatcatacactctagcaggactgcaggaggtagccctgtgggtgtagcaaaaacatcctcaaactccttgagtatgagctgtaatggttcctgatgcctttcaaccacttcttcctgcattgactctaacagcaccagaacccatacttgattacctttcat

SEQ ID NO: 41513 - DNA, 271 bp, Zea Mays
aatcactgctgcctcagtgacctcggggatgcgatttctcatggtctgaaacctcttgaggtacgaccgaagtgtttcatccccccagcgtctgatggatttgaggtcccatggctgcgccggcttgtcggggagggactaaaagttggccatgaaacgccgactgaagtcgctccagtcgtcgatgtagtgttgtggtaggtgtcatagccactacaatgcatcctgcccgagaacgatggacaagtacgcagtcatcacgtcttcagtt

SEQ ID NO: 41514 - DNA, 587 bp, Zea Mays
ctcgcgtgtaggttgactaaccacccacgggtatggatcggagcgcggatagaacctatgcagtgaggatggaatgttgaattacagggacgtcttcttaccaagttcgaagcgcaagtacagttgcccacggaggcttgcggcatgatgtcgattcctcaacaccgcccgtgaagctcccgatttccgaattggcgaatacatgaatgagtcttcgcgcagtacggggtgatatcgcagcttgacaccccacgcaagttgttggagaacccggctcccaccgcgcggcagagacgacgctcacaccctcacgacggcggtgaaacacggtggcgcccgcatgaatggcttatctgctggcaaccgggacagcgatttccaaggacgagggttttgtagggtgagggaaggcggggtttgcggcaagcgatttaagcccgcgtccatctctagagagaaatacaagcacaactacgaaatgggacccacatgtcattggtggaggcaccgtagagatgagatcatccgtgacctcagcgtgatgtcaccgcccacgatacattaaagaactccggcggccgaaaaag

SEQ ID NO: 41515 - DNA, 507 bp, Zea Mays
aggagtctgaatttcgtcaggatctggtgcagttccacgtggggattgatttgaacgaccgtgattataaagcgcggctcacctttcgatcaacctagtattccttgcttgcttcggtttaaaacccaccctaaccagatgcatctttcgatcagctgtggggggaatccagttaacaacgactgcatctgaaatctggggagctgtgcaaaaccactggcggagcaatgtgactgggaatccagttaacaatgactgaatctgatctggggagctgcgcaaaccactggcggagcaacgtgaccgaacatgagcgcggcagccttccagtgcatcaccggccggccacatgtggacagattagcgcatgcgtaagtgcgtaacccatgtccctaagcagtattcaagcggggcacacgggtacagcccgcctcggtttctgcgctaaggaatcgagagaggtcttattcatttcttctcaggccatatccccccaccccgatcaag

SEQ ID NO: 41516 - DNA, 408 bp, Zea Mays
gttggtgttttgatccgagtatcctaccgactagagaattagtgttgcgtgcccagacccagatgggtgatgcaaggagacacaatcacacaagcctttatcctggttcgggcaagaaatggcctacttccagcagagggggttagacttatattacttgcatctaagtgcttgtagtatgggatacaagccggtcggtagagggagaagttctcatgtccctggtgatgattagggcaagtgccaatatcggtcgtggaggtgaaaaaccatgaactgttctcctccttgaatgaagccctggtctcctctatttatagcctcaaggaggactcccaggagcgccacggtttgtcacgtatgggagaggagatgtgtctgagcccctgtagctggtatgaccctcgg

SEQ ID NO: 41517 - DNA, 413 bp, Zea Mays
aaataatgctgggaatgctgctgctgcgcttatggcccgccttgcgccgaaagccaaggtccttaattatccatttagtcttacatttcactgtattttccatgcatcatctttgcagtgcctatttgaaattggaaccgatgtttcttgctggtggctaggtgcttcgtgatggccgttgggccgaggaagaggcagccgtccttgtgcctggggatgtaatcagcattaaacttggagatatcatccctgcagatgctcggctccttgatggagatcccttgaagatcgatcaggtccttatgcctgacatttagtcactttcacactttatctcttgatctcacattttttgtctcgtctcttattgtagtcttcgctaactggagaatcgttgccagtcaccaaaggtc

SEQ ID NO: 41518 - DNA, 313 bp, Zea Mays
cacgattcgcccgagaccctgctcaatggtcgcttcactcgagcacatcctcgggcgaaggcatcgctcgggagaaatgctcgtatcgactgagggcccctcttcatggaatggcaagactccacctcgctcaagcctgtctcgggcaagaggacaaccccaatcctagcctcagtcaaacgtcacgggaaccgtggggacatgcgcattaaatgtgacgattcagatatctaccccacgtgacacaacaataaaacatgaaatggtgggaccactgttccatctactttcactaactacgatgatgaacgcc

SEQ ID NO: 41519 - DNA, 351 bp, Zea Mays
atgattggctaaagtctatggagaagatgttgattattgcccaatgctctgaccgggagaaggttctctatgcttctggtcatctgataggtcctgctactgattggtgggattcatacactactgcccacaatgctgctaatactatcacatgggtggagtttgctacgcagtttaggaactatcatataccagctggactgatgaagattaagaagaaagaatttctatcgctgaagcaggggagcatgtcagcgagtaccgcgataagttcattcagctctccagatatgcactggatgaagttgctgaagatgagaggaagcaggagcactttattgaaggactcaa

SEQ ID NO: 41520 - DNA, 342 bp, Zea Mays
ggaggggcttaccggtggtgagatcgctctggtgaagaggtcgagggtgtaggggaggtctcgacagtcacaccgatgtgcggatcgcctccggggatggtcggaataggccggtccacgtgtgtaggcgggtgagctcgtcagcggcgagtgttccggcctgctcaccgcgcgatagttcaattggttagctcgggaggctcgaccaggtgacatagaggcggtatacggaaggaatttgagaatggcgcagagacttacccggtccacgttcgtcggtgagcggaagaagtccggcgagggtgattcggggtctccggtgaggctctgccgggtccgagg

SEQ ID NO: 41521 - DNA, 314 bp, Zea Mays
tagagttccgacccagcacggcggtaaaaactcaggcactggtcgacttcatatcagaatggactgagcaccaggtcccggaaagcccagaggtcactgaaatatggaggatgtacttcgatggctcgttgaggctgcagggagcaggggcagggattctctttatcgctcctggaggtgaacaactcaagtatgcactccagctcttgtttctagcatcaaataatgcagcagagtacgaagcactggtccatgggctaagcatcgttgtttcactcggcatcaataaattaatggtatatggcgactcactg

SEQ ID NO: 41522 - DNA, 400 bp, Zea Mays
gtgccaaacaatttcagatatcaacctttttgtcctgctacggtgacttgtttattaaatcattggtgcaaacagagtttcaacttgaacttctcatgcggtctttgttcttctcacgggtaattttctccaagacttcaactgctgttatactttacagtttgatttgttcactgttagtactgtccgctgatgatatgcttgatttagaatgcatgacctcgtagaggatttaattacaagtttttctttatcttaaaggcaagcatttcagacggcgaatgctcaaagaacttatcttgcatcaaggtcggcgggatgtttctgaggtactatatctgtccttgttactcaagactacacaagtcctgatggttgtgtcattcacttacaaattgag

SEQ ID NO: 41523 - DNA, 483 bp, Zea Mays
tgagagcttggatacacagttgaattttagttcggcctaccatcctcaaactgatgggcagaccgagaggactaaccaagtgctggaggatatgttaagagcttatgctcttaaacatggtggcatttgggataagagcttacgatatgcagagttctcttataataatagttaccatgccagtctgaagatgtcaccatttgaggctttatatggcaggaagtgcaggattcctctatattgggatcagaccggagaaagacagttctttgggcctgaacttatacaagaggcagaagaacaagtgcaaatgataagagagaattggagaattgcacaatcaagacagaagagctatgctgatacccggagaagactactggagtttaaggagggtgatcacatgtatctgaaggtgtcaccgatccggggtatgagaagatttaaagttaaaggaaagttgtcccctcgctttattggacc

SEQ ID NO: 41524 - DNA, 626 bp, Zea Mays
atacagcagcagcaagcctattgacagcaaagaggccctcaatattttggaatggatgtgctgctcattgcctagatctcatgctagaggatcatgggaagcttgagccagtggagcaaactatcacaagtgcaaggcagatcactaatttcttgtatgctcacacaagggtgttagatttgatgagaaagtttctgaagaaagacttggtgagatctaggattactagatttgctactacctacttgaacttgaaaagcttgcttgataacaagaaagaattgacaaggttgttcagatcagatgaacttaatgagttgggttacttgaaaaaggacaagggaaagaaagccaataaagttgtgagatctgaaaccttttggaaaaatgttgatatagctgtaaatttttttgaaccattggcaaatgtgttgaggagactggacagtgatgtaccggcaatggaattctttcatggattaatgcttgaggcaaagaaagaaatttctgagaggtttgacaatgatgagagccgctacaaagttgcttgggatattattgataagcggtgggatagcaagctcaaaattccgcttcacttagctgggtactacttgaatccttac

SEQ ID NO: 41525 - DNA, 553 bp, Zea Mays
tggtaccggaggttgtgggattcctccctccatcgtctgggcaagcagcctctgccgccagggcgtgcaacttctctacggccgcaagtgcggcgacatggtcaccctgcacggtgaggaccccaatcggggatggcatcttgaggaccaaatacccgtaatggacaatgtccatgaaccggtatagcgtcggcctgtcgatgatggcgttaaaggggaggttgacttccgcaacgtcgaacacgacgttctccatgcggaagttctcctctgtcctgaatgtaaccgagagtgcgatgctcccaaggggatacaccggctgtgggcccactccgaagaatgggcgtgagggtcctagacgggaccccgagatttgcagctgcctgaatgcagcatggctgatgacgttgaggcctgccccaccgtcaatcaacacatggtgcatccgcatgttggcgatgacaggggcagtgatgagtggcagtatgccggcccctgccatgttgtcggggcagtcggatgccccgaaggagatggtggtgctcctccatcg

SEQ ID NO: 41526 - DNA, 419 bp, Zea Mays
gagctggtttactggatgcacaactacctagcggagctgatggcacgctcaatttataggattcatgaacggtggcggctaatttggagaagacgcgcggcggccggagaggggaaagagcactgcgcaaaggattcgtggcattcactgtggcaagcttaccggcgacgacccagctatctaaagcggcttagtgcgacatggtgaatagcctgaggcatggtgcaaccgtggtgaagggcacaaactctggtgacggccgcttggccacgtcgctggcgcaagtgggcacggcataggacggaacagtgcttcaagctcatccgcggtgaagatcttttcaccccgaggcattatctgggcactagtgggcacaaatcgcatcgccggtgttaatcacggcgaaaggtcaccggcgg

SEQ ID NO: 41527 - DNA, 493 bp, Zea Mays
agatgtcatcctagggatgaattggctaaccaagtatcaagccagtcttagctgtgacaagagaacggtgaagttagtgtccctattaggagaagaagtgttagtggaattggtcttgtctggatcaaggaaaggaagttgtcaccaagtcaccgcccatattgaagatattaaaccatcagaggctatcaatgtagtatcagagttcccagatgtgtttcccgaggagttaccaggtatgccgcctgaaaggaaggttgaatttgccatagagcttataccaggcaccgcccctatttccaagagagactatcgagtgtccggaccagagttggttgaactcaagaagcagattgacgagttgtcagagaaaggctacatcagaccgagtacctcgccttgggcagccccagtgctatttgtggagaagaaggatggcacgaagaggatgtgcatcgattaccgagccttgaatgaggttactatcaagaac

SEQ ID NO: 41528 - DNA, 576 bp, Zea Mays
gctcatgctcgtctttcaactcaaggttaaaggcacatctgtctgaggcaaaaagaactaggaaggtacggatcacctaatgaggtgactaggagagtagtcctgttcccaacaatgacaaaagaaggatgagacaggtgggggatgggaagaagagagtatcccagtgtctggagtggtgtggtaggaggcattggggtcaaccacctagtcagtgatggcaggagagttagggtcatcatgctaaatgagttagcaagtgattgctgatcccacccaccggtccaaggggtccatggctgatacaagggaggtagtagcaggaggagtggtgtgggactgagggtgccgtggggggtggtctgaggggacacctggagccgctgagggtgggcaccacgacgagagttagctttgccgaggctggggtgggtgtaacggtggaccacccatggacaggctgggccacatggagatgtagccggtccacaagttgtagagggatggccagggtgtgtcagtcttcccaccaccaccaccctgacgtcgaaagacgacatcaactgtctctagagc

SEQ ID NO: 41529 - DNA, 473 bp, Zea Mays
ccggtgtgacctcagccgcgggcgatggccgtccgtcgtggctggctgtcggagggtagaaggagagtccttggcggtcggtttcttgatggacggctcggattcaaccagagccataccggttgggtggataattcgcagcccctggatcgtgatcctgcggctcgggatggaatcgctcgtgattaagtgcccaccgttgatctttgatcttgtggactggaatgcgtaccggttcaattggggtggggatctaatctggaccatctgggtcagatcttatggccctgtgtaacccataccccttcggcctgtgtttttataaaacgaaccctagaaaacctaggaatcaacatgtctttcaatgcagcagccctctgtgtctgtggaatcttgcgccagaccccctgcactttccagaaatcgaggcccagtccagagtggattaaaaatagtgaaataatatttgaaat

SEQ ID NO: 41530 - DNA, 392 bp, Zea Mays
caggagctgattcaccagcatttagtccgtgtccaagctcgtatgaaacgacattgctgatcaacacaggtctgagcgttccttccaagtcggagactgggtctatatgaagctacaaccatacgtccagtcgtcggttatgcctcgctcccatcagaaattgagcttcaaatactttggcccctatcaagtcgctgctcgggtgggggaagttgcttaccgtctgcagttgccgtcttcttcacgcatccaccccgtgattcatgtgtcacagctgaagcttgttgctggtttcaaaggagttgcatcttcttccttaactgcttcacttcccgatttcaatgttccagtgcaggtccttcagacatgcggcgtcaccaagggacatcgcc

SEQ ID NO: 41531 - DNA, 451 bp, Zea Mays
gcagcgtgagcgctccgacgaacttgtaccagatgccatactcaataattcatgctctaattcggtctacacctaattctgaccttggcgattcactgggaatcactaatttaacccgaacgccgccctagagctcggtccacgtacacccgcggagcttgagactttcccgacgtgttcccgacgacatagtgcaataacatacaaattgggagcacggtaagctttagcatcgtaccaggactcaagaatggcagcttggaaggcgggtggagggacaggacggtgggtcgacgggagggggtgctcacggcggtgcggagaacggatttgggggaaattctgaattagggcgctacgatgggtaatcgggggcgaggagtggttcactgagttcgtaacgagtaggtggaacagggggtgcttccaatttatagacttcggccaagct

SEQ ID NO: 41532 - DNA, 480 bp, Zea Mays
aatatatagtttcgttagaatgctcgctgctccgccaaatatattttttcgccatcagtatatcgttcataacaaaatcagtatatagttttctattagagccagactaggggcagactggagttacaaccatttaggtttcagcataacatatttatttgacattgcctttctttcttattttccctgcagggaaaggagttcttggttactgtcactataaggaaaattgacaacaagtggtggtataactcatgcagaaaatgtgcctgcacagctgtcactcacggagactcttacaaatgcacaaaccgtgattgcgctaacattgctatgcccgtccaaaggttagatgacatgccctcgagttgagcagcactcttcccttcgtaaacttactgtaccagtttcctgtgcatcaaacatgacatgaatctgtacaacaaattcagatactggattctctatcacccctcagcc

SEQ ID NO: 41533 - DNA, 521 bp, Zea Mays
ggccaacacccagaaaatatgttgttaaaataaggtaatgtggtagcacatccagttcatcttgctccacattttcttttatcgtaacaagattgccccacatttcgaaaatgtactggttcaaggatcaagaagtctaaaggcatacacattgaatggtagtgtaacaacctgcttttactggtctgcatctggatacaatagaaattactgctttctgaacctgatagatttcagtttctgaagcttcctggcttcctgctactcaaacagttgcagaactagccatctagttgagaaaaatgtatatgagaggtgaagtcacgttctaggagaaaagaagaaaagatcatgtgcttcttcattgtcttctatctattttcttctttttcttgtttgtttttggttcttgatacatgtgtagtcagtttgttgtggtgataatttctccagaaaagtctggtgaaatgctcctctaactctcatgaaagcaaggcccatggaccatggtattgctgcat

SEQ ID NO: 41534 - DNA, 838 bp, Zea Mays
gcacgacataggctccaccgccgccgcctgacccaatgtccatgtccaacacaatcaacctgcataggagctggcggtcgtggggcactccccaagcgcgacccgcacatcgctggtgccagccgacaggaggtggagcgctgggattgccgtggggatttgatctgaagttcatcttttgtgcgatgattttgtggttttaggtcgggacggtgaggaggacgtgatggggcgtggagaatcacacaacacagcctaccaccgtctcttcctcccccatcggtgccgaggtgatcgccttccgcgtgccgtaggagcagttcaccgccgaccactccatcggcttgtactccaaggttaggaccttaccgctactcgcttactacacgggtgtgtcgtggcctgtggccgcctgaatcgtgggaactatggttattcaccgaggtgagatgatgatgaaatggcagatggttcgggccaagaagaagaacacggactgtatctacacactcaagatcatggacaagaagttcatcacaacaagatctcatacgtcaagatggagcgcatcatgctcaaccacctaggcgtcatgaggatcttcttcactttctaggacatgtactctctctgttagtgcccctcctcaaacaatcgtaagtagtaagaacaaacgatgaagagctaataatttgaatgtaaaacaatactgatcttggatcaataccatgactcttttgtcgtgcagacatggtgctcgagtcgtgtgaaggtggggagttgttcaaccaaatcgtccgggttaatgtccaactgcttgtaatatagttcattcatg

SEQ ID NO: 41535 - DNA, 517 bp, Zea Mays
gtcccagggcctcggccgtaccccgtacccccacacgctcacagtcccacccaagcccgagttcatcggacttttccctgagcacgacgcgccactgcctgccaagccacccgagcttcgcccaccatgcccagctcaccccagccactcctagtccacgccagcaattcggttagctttgccagaggctcgcaaagctccccaagccctcagacctggcagagcctcaccggaggacacaaatcacctcgccggacttcttccactcaccagcgaacgtgaaccgggtaagtctctgcgccattatcaaattccttccgtgtaccgcctctatgtcacctggtcaagcctcccaagccaaccaattggactatttcaccgtgagtaggtcgggttactcgtcgccgacaaactccctcgcctgtgcacgaagacccgccaacttcgaccatctctgatgacgatccacacctcgacgtgaccaccgtaacttccccgacctccctggacacctcac

SEQ ID NO: 41536 - DNA, 543 bp, Zea Mays
aacagggcggaggggatttgtggactgtgtgagttctccagtgagattgagtcgattgcacaagtgctcgtgtgtgtgatgtggtgaagaagcagtgctcgggctcaatttataggcagatggccggagatggatgaggttcacggagttgtaaacgcgctggcgagctcacctgcgcgggcagagccacggcgagggtccggtgaccgccgattaaccgagcagcgccacctcaatactttagtgccacatcgcagaagatttttaccgcggccgcagacccatccccagtcgcggtggtggtcttatccccggtgatatttttctgaactccggtgaacagtacgccaatcagcccgatttcaaacggcaatttcttcaaattttatgtgacaacctcatcacccatctgcatcaaagttatagacctataaaccatattcacttttgctatagcaaccctagtcgaattcctactgaatcaaacccaaatttgaacctcaagtgtggccaatgtcactggtggccatacttttctgaaac

SEQ ID NO: 41537 - DNA, 309 bp, Zea Mays
caagggacatgattagatcggcgtattatgcgaaccggtattcaatccgggccgcatgatcaatcacagacgcctcagattttataacccgagatctatttccgagcgcccgatcaacgaccgacggccagattcgatccacgccacgatccaatccggaccacacgctgctcgatcaacggcacagattcactactgaaccgatgcctacccattctaatcctagccatccctccaagatctgacggttcgcgagcgccacacccatccacggcggcgcacagggaaagcacggcggcgccatggctg

SEQ ID NO: 41538 - DNA, 298 bp, Zea Mays
ctttccaaggtagctacacaggcttgggttgaggtgagatccacaaggagcttgcgattgagcttctctgcatcttctgcttgggcaatcatctgacggtggtgccgagccaagaaatcatattgtgcatcaagggtgagcaggtatgcagtgaggtacacgactgtggggtcgtcctcaagcagctgctgctcttccaatgcacgcatcctggtcatccaagcgggacggtctctctgaaagggcagaaagaatttgagcagggtgtcggccacttcttcatagatctgacacaggg

SEQ ID NO: 41539 - DNA, 407 bp, Zea Mays
agttgatagataagtgccgactagtcacaacattgggacatgcaattggggtcattttacaaagcctaatttacagttacctggtgaactagtttctattgccttcaaatcttcctgtagtcaattactacgcttccacatagttaaacacatatctgatgatgttaattactaatctggctatgatgcaatgtatctagtttgtgacacgttaatcctacaattacaatgtagaccactggatgtgaaatgcttgatctgaacaaaatcccaaacttcaaacacacattaagagagtatgtagttcactacataagaacttaaacagtcgctaaagagaatccatgcagttagcaaaggtagcatgggaagaataaagaaaatctgacagagagactcaagcttgc

SEQ ID NO: 41540 - DNA, 409 bp, Zea Mays
gttatgcatgaaggagaaagcgaacctttggggaggggtcttgccagcgaccgcggagtagattcagctgttcacggcgccaagcaacctggcggggtcggcctagctccgacgagcaattccattgcgatggcacaaccaccgagcgtcggaatgacacgagagcatacgagatgccaccacaatttccccaagccacccgccgaggacccattgataccctccagcaagaacgacggcggcggctgggttcttcttccgcccatcctgctatggtgaatcatgtactctcgatgtcgaacgcgagagctgagctaggtttgtgggagaggcgagcacaacgcgaatatatatgcgctgcatgggggaatctggataggggtggtgagcgactccatccgaattccgc

SEQ ID NO: 41541 - DNA, 355 bp, Zea Mays
gccgctccatcgtccccaaacacaccctctccacccgacggcacggcgcgccgtcgatgcacagtcgacaccggcgacgtcaattgagcttgctacagcgctattcttcaattactagattctacgcgcccgcaaggaggaaacggatcgattgggagttaccttaacggtgattaggtgccggttgtagccgtccacgcaccgggtgaagatgcggccgagagcgaacaacggcgagcgattgccgttggcccgacgatccccaaaccttccggttggcacgcacacgatccacacgcgctagagaaccccaatctagcctttcccgaagcaagaacggcaacgctccgaggaa

SEQ ID NO: 41542 - DNA, 300 bp, Zea Mays
ttcccgaaggagcacccgtcattactggtacctttaccgtttttaatcagcctgctcttgttttatttgattctggcgcatcacataacttcatcagtccaaggtttagtgtcaagtaccaactaccgttttttcacacaaaaggggcaatcatgatcgcaacgccagggggcaaaattgcatctaaccaaattgttcgacacgcacctataaagatgggaaccaaagtattcaaaactgatctcactattctagggctagaaaatgtggacatcattctgggaactgcttcgatgaccc

SEQ ID NO: 41543 - DNA, 478 bp, Zea Mays
atggtacaggagcggtcggtgtaggagtaggcgtggccaggaactgagggaaaccctgcataggcacgaactgaggagtctcgggcatatagaactattgctgaggggatggtacagaaaattgctgctcagcgcatgacatcatgttgatagtgccctgcgaagaggaagaagtcactggctcccatttgagtttcccattgggattcctcctacacaccacatccttgtgatccaggctgcagatagagcacctgccattccactgacactcgacacggcgatgtgcttcaccacaatggaaacacaccaaccccagcctgggcttaggaacaactcgatacctctgagtactccctcctgaagtacccgatgcagagggtttgccacgataggggatgtggcgctggtgttgtgactttcccctcttgttggctggacccccaatgttgccccttctcgcgtcctagccacgagg

SEQ ID NO: 41544 - DNA, 397 bp, Zea Mays
atgagtagctggccatcagagcgaaagaagacgctttggcacgtttgcagtcccctacctagcgcgccaattgtcgtggttttggaaaccgaggggcaatagatttgtgtttggtggcgatgcaagtgtggactcacggagattcaaacaaggaactgaggcacaaggtttatactggttcaggcattcaccctagtccaatgtactgctgattgtagtattgctctatggtgtgttacaactggtgtgcttctatgaagaaagaaagttgcccaacccttttatagctcaagggtggactttacagtgggaactcgtattctactgggagggagcttggcttgctgcctttggatggcgtagtcctcctgacatcgtctgtagggtcgtgcgttgt

SEQ ID NO: 41545 - DNA, 324 bp, Zea Mays
aggttgcggaattgcgtgttgagcgcgcagcgcgactctatcaggctagtggttcccctactcctgtcgggattcagcacccttaccgctcaccgccccgtgatcgctttcattacggcatccctgactgcagaacctaggtagatttagagccacagatcgacagagtcggagactgactattacaaactacaaaagaaaacaaaaagtcttcgcctcatgtagtcgtggatggttgcatgcgtacgtcatatacgacatgatttcattgttgatgagctaacaaatatctctttattgctagcttggtcaactctcttccca

SEQ ID NO: 41546 - DNA, 546 bp, Zea Mays
atcttttcaatcttttgttagaggtaaggtgttgctagttggtatcgcaagtggaaacaatgctcatgtcaggtggaattatatactgagagtaccattatatattgcagtgatattggcctgtaagttacatgttttcctcagaaaacaagctgcagtactgcatatacagaaaagttaccgctgctattttgcttggaagacttactcggagctatgttcttcagccattacattgcagacaggtttaagggcctttggtgcttataacgagtacattatcagaaaacaaaataaagcttctatttgtgtccaggtagactacagattcattctattctttttatttaaagggaaggctggttataacttccagtttacagattgatattttacttgttcatctctgaactgacactctgagaatggttgcctgcaggcttgttggcgttgccatagagatcatttgaattaccttaaaatgaaaagatcagtgttaatttatcagtgtgcatggagaagacggattgctagagaagaactcag

SEQ ID NO: 41547 - DNA, 388 bp, Zea Mays
gtcttgttcctgagcacgaggtagagaatggtatcaagctgagtgggggcaaggtccggcagaatcgtgtgtttagtcagatgaggatcatgtatgaagcgcaataggctcgcctgaggaggggatagaaaacgccaacggggtccctgcccaatcgcagacatcgacggagactccgttagcctactcaggggagtggacatggggggctcctctaaagcctttgccattgagttggctcgacgtggaagctagatcctcgaaggactttgccaagcgagttatcgggggtaagttatggaaacatttgattccaatgaagaatggggaaagattgtgcgactatagaacatgcaacatgcgtcagcaataaacaagaatactgtcg

SEQ ID NO: 41548 - DNA, 455 bp, Zea Mays
ttttggatcaaattcatttttaaagaaaaatatttcatccacacaggaaaccggtttatatttatttgcatatcaccataaaacatgtcgacaaaaagataagacaattgcaagaaaacaacgaaataaaattcgatgggccataataggaaataagtttttttggcctgttttatgtatgtgtgtcggtaccctgaatcaggggtaccccttactacagtgtgaaggcatggtgcctacgcggctatctctagtcgcgtcgtaaacagcgcccgacccctccatgtggtcggccccaggaccgccacgtggtcggaggaaagacgatataacccaggatatcaacagtgagtctggatccctatgggaaagtgccggacccctgtgtgtacggaccggacccctgggtaaggtccagaatcgccacaagcgtgcccggacccctgggacgagcc

SEQ ID NO: 41549 - DNA, 393 bp, Zea Mays
gtggtagtcaagctaagaagcaacagagtggagtcctagtgacgtcttcacttggtggtggggctccaacctcctggtcctcatcggcgcccctccttctcctgttcgtctgtgattcatccttgtgggtgcatgcccgagtgagatcaactctgtctaaaaacatcccccttgtttaaaggccaatcgctcccttttatagggtaggagaagggtcggctaggggtggcttctttaggaaggagtcgtaaggcaagggtaaaaccagtgttctacccagggtaaagccacgtgtactcgtggggcccggggttgcctggatgtctagtatttaccatggcggatggtgcagggatgtgagggtcccaggcgccatcatctaggctatagcaa

SEQ ID NO: 41550 - DNA, 511 bp, Zea Mays
aggtgagagaaattgaggaagtcttggctagccagaattgtcttgagttctggcctgagtcccttcaggaaacgggccatcttcttgccctcggtactgacatcatctggcgcgtagcgggctaactctgtgaacttgtgcacatattcgctgacagatctttcgtcttgagtcaattcccggaactcgtcctccttaagctgtacaagtccttggggcacgtggtgctcccggaaagctgcttcaaattccgcccaggtagcatctctgatggtgacgttgaaggtgtcctaccaggctaaggccatcctagaaagttggtgggcagccagttgaacatgctgattttctgggcaaccaatggcttctagtttccttttgatcgtgcgcatctaatcgtctgcatcaagggggttgcttgatccggcgaacgtgggaggtttgagtctcaggaaatcccccattctgtcttgtggtcttccaccattcggtcgttgattttccagatttc

SEQ ID NO: 41551 - DNA, 357 bp, Zea Mays
ggcgtaccagcacggagtcatgccacccgagttgagtcggctacagcctcaactagtgggccgtttcagggacagtcgagacgacctactaccgactcccctccccgggaccagcgacacaaacaccggcaggaggacacatgcggaatttccactcttactccacgtctccgggtcatccattggcctcccaacttcaaggtccccaacgtcgacaagtacgagcctaagcaggacccgggcagctggttggctgtataaacgactgccgcccaggccaccggggcgatagaggacgtcatgactgcgtacttgcccattgtcctggggcaagacgcgctacagtggctctgaaac

SEQ ID NO: 41552 - DNA, 544 bp, Zea Mays
gtttagagggacgtgggtgcagcaccttggggaggagaggagcggctacaatggggaagaaggggggcggctgctgcaaaaatgagggaaggatgggggacggctgctgctatgagggaaggggaggggtggctagggtttttgagaagaggagggagcgatgcccccgatgcccttgatgctaaactgacggctcacaaccaaatcccccatccatgccccgattcagacaaatgaatactcaaatgatatcgtttaaatgagatcttcacatctgcggactccgaacttctaacggcccacaaccattttcccacatccacgcaccgaagatcaacttttggtcaacattttttaggatattacaaggagcactacctcggggtctgcatgatgatgccatcgtcgcccaaggtcaagccccggtgactggtcagggaggatggggagcgcgtgaggaagtcatgggtggaagcatcgggcacaggaacaatcggtgcgccgaaattgtgtcatcgtgcacaaagtcgtgttggggggatca

SEQ ID NO: 41553 - DNA, 401 bp, Zea Mays
aaaaggggtacgcttgcttctaatatcgccgtccaatcaaatcgaacgatccatctcctctttgaactcgatctaatcctcaccaccgttaagccgatcaactgtcaagcgctcatcttccccaccgagcacccacggtggcggtgcgagcatccacgatggttgcgcccacaccgggcagtggtccatggtcgtgcttaagttcaaaagacctaactaattgatgctacataggcgaaccaccacagttactatttgagaagaaccttaccaggtgtagatgcacagggtctccaacccacggtgaatcgtggatgacaacaagtttcgaacgccaacgagaaattccctctatcccggctaataaccctgcccgagaagtccaccaacagacgccgcga

SEQ ID NO: 41554 - DNA, 328 bp, Zea Mays
agggtgttggaacaatagcacagagggcgagatcggacctgagttgagctggccacggcgaggtgttcttcgcggcgtatttgaaccgggttgggggaaatgcaaaatttgagctcgctggtgattggctgggagcaatactgggtgtgggggtgcgtgatgatgttgcgaagctgacggcgggctcaatttataggccaagtgagcggtggccgggaatttgggttgagcgcggtggcggtcagagaagaagtgagtcaccggcatggtgattcgtggcctccttaccgtgatggccctcccggcgatcatcagaccagtatggcac

SEQ ID NO: 41555 - DNA, 383 bp, Zea Mays
caggattcaggcaggatagtaccgagggggtgaaaagatcggaaggggagtggatttggtcgcgaggtgaagcttatcaaccacgcctgtagctgtgcgacgtggctggaccggcggtgccgtcgtggaaccccgacgacctcaataatgccacgccatggctctttactgcgcagtagtaaccgtggcacgcctaggcttgccatctcagagctgctgcaccggtgaacgccacgactaagccaccagtgaccttctttctctccggctgccagcgtgccattccaaaattgagtgccaccgcccttggacactataaattgatgcctcagcctgctccgctaagtaattgtgcacccagtgaaccagccctcacctccaat

SEQ ID NO: 41556 - DNA, 374 bp, Zea Mays
attttatatatttacgcaacgcgactacgacattacaagaacacgcatttactacgctcaccttaatcgttcatttgttctcctattgaccacacaagagcaaccaagacaacgtaagttaaataggacctaggcatcaatgtctatgaaactcctatatcacaatcaactagaaagaaacatataaacatgacacatatgttatctcaagcttagccatggcaagtctacattacctaagtgttaaccaaacatttttagcaaacagggtgaactaaacaatcaaatgcgcacatgcagatttttaggacagcagcacaacagttacttgttttaatcataactcttcaaatattaatccaaaaatatcaaac

SEQ ID NO: 41557 - DNA, 363 bp, Zea Mays
gggccacaatggaggcaccggtctgccttccactcatgacctacaaacccctaaggccacagagcactcatgacctatgagcccctcggactgtgatgcatttatggctcgcacatctccggcaagcggcacactcatgacctatcgagattaggcctaagtgcgtaggccactggcagggcgcaacacgacaagccacgctgagccccaggctatagaggccaagggtcggcatagctcgaatgatggcacttatgccccatgctatccacgtagtctggcataaagaatataggacaaccaagtgaccgcaagcatgtgtggctttacaccatggtaggacgcacagttttaccaccaccc

SEQ ID NO: 41558 - DNA, 967 bp, Zea Mays
ccacggctgccataatatcaggagctgctggtgtttaagacgactagacgagtctctttagctagtagattagacaatgccttggacatagtgagagtataagaactgttgagcaatcgtgcatgaagtgagtcatattcaatccgaacactcataacaaatatatatttgaagaatttctcaataaacctatgagatggacatggattagttgtataggccggtaccatgtgtcagcagtaccaaaggcaatgacgatgggcaagaagtactgaaagaaaagatgaaggctgaagcaggaagaaaaagggaacgcatgccaaatcccaagtacataggcgagcagtggagaaattaggccagtcggaccaggcccatcggatgatatatatatactatgtgctgtaataagacatgtgaacttggctgaacctaggcggcggcagacactatcacaatacgaaataccacccagcggcggatttgctgcggaggcgcacctgtgtgttcgtcttgaggagtgaaagtaatagcgatcgtaacagttggtattcggagccgtgctggagcaccaccacgactaccggacgaggctgcaattgaaggccgaagctatggcaccggcgaagagtgatgatctggtgacgtagttgttggcgaaaattgaggaagggaacaaagagacacatccgagaatggaggtgacgcagacggcgattggcaacatggaatccacggtgaagagcgtgatgggggaacaagtggagttccagaggtggcgacccgaagtggagaccagggtgacagagatcgccgaggcgctccaagccatccagccaaggtgaatgaagtggcgcagagatctgtatctgcttcatcgaaggcagaaattaaggcgacgaatggtgcgtcgggtttcgcacatctggaaccaccttctacggagacgatgcacgggcataatcgc

SEQ ID NO: 41559 - DNA, 545 bp, Zea Mays
tgggaacgccgcctctacccgctgctcttggaactgctggtactaagaggaaagcaaccacacttactcctgcaccaactgttgcatctctaggtaagtaaggatatggttgtttttgtttcaatttttgtgttcgtcggatggctattaggtctgaactaaaatctgatggcaggttccaagaggaagacaagtgaggatgttttgctttcatcatctggacctgcagctagagctaggagtgttgaagttgaagatacactagcaccagcagcacctacaattgttgatagtaccacaaatgtaatagatagcagtggcactggcactggcacacaagaggatggggatgaacactcccttccaaagagggataagaagcgcacatcagtagtatggcaatattttgagaagacagatattgaagttgaggtggatgggaagatttacaatcaaaagtggggttcttgcaagtttcctaagtgtaaggcaaggtacagatgtgaaggcaggtatggaacaactgcatttctaaaccatttgag

SEQ ID NO: 41560 - DNA, 341 bp, Zea Mays
gctttcctaggacaaccccatgaaagggtcctcctgtctgtcaaaggtggccctggtctaatcccatggcgtctagcgtagcagagtaaaggatgttgagcccgcttcctctgtccatcaacaccttcgtaagtcataccaaccccatgatgggactaacaatgagcgggtatcgtctgggccgggggatatgtttcgggtggtaagtgcgatcataggtgatggtttgatcggaccagtcgaggaaaactagagacgcttgtcgagcctagagcatttcacgtcgttccgacttccgatgtcttcttggcgtgtagtaatctaacccccctaaaaatcat

SEQ ID NO: 41561 - DNA, 436 bp, Zea Mays
catgcctcgagatgatgatgccattggaagagaggtcaaggcaacaatatcctttgtgatggtcggaatagccaaggaatacacatagggcagacctgggtgcgagtttgtggggagctgtggcagacaagttcgggtagcatttgcagccgaacacccgtagatgatcatacgtcggaggagtgccatgcaaggcaaggtgcggcctagagaaggcaagggtcttggttggcaggatgttaagtagtcttgttgttgtggagagtgcctcaacccaatatgagggggcatagatgtttggaacagaagggagcaaacaacattattaatggaccgaatgttgcgttcaactttaccgttctgaggtgaggtgtaggggcaggacatgtgaaggtggatgccctggctgagaagaaaggtacgagcactggagttt

SEQ ID NO: 41562 - DNA, 519 bp, Zea Mays
attttattttagatatgatgatgaacttgtgggactaaagggggctcaggctgtttcccaagtatctctccataaggaccgattcgttgagagatcactcgagatcaggtgaggcgtaggaggagcgacgacgacgacgagatatccggtgtgacatgataggggatggctatgaagagcttggactacgactaggaggagggagccgtgagcatggacgttggggtgatgcacgaggacggtgccgttagagatgtaggatgtcatgcccgcacagaggatgggaggagctggttcgacgcactcatcgttcctccaacgagttcacgctcgcagttcgcaccgatgcacgcagcaagttgaagcccatgtgcttttcgtctctgctcctcccgggcatcctcaccaaactccatcacatcccctcgatcgaggcctccatcgacttccccgttctccacctccatcaacacatgcacgagtggtccccctgcataagcacatccccttcctaaatac

SEQ ID NO: 41563 - DNA, 411 bp, Zea Mays
ggcatcagtaggagcgatcgatcatgtgggggaagcgcgtaacacacgtggttgtttcgaagctcgatcttgtgggagaggctcatggtcgcctccaatgactgggggttgtggatctccacatcatggttgagtggacagaggaggccgacgatgaacatctagacatgttgcacttcatcgagacagcccacgcgcggtagcagggcctagaatgtgtcatggtactcttccacggtgctggatcagtgacaagccgctatcttgtcgagtggatttgatcggagaggaggcccatggcgtaggtggaggagctccttgaaatggagccacaaaggagtaccctcgtcttgctggacttggtagtaccatagctagacgtcgtccttaaggttgtacgatgccatcaag

SEQ ID NO: 41564 - DNA, 383 bp, Zea Mays
gtgggaaggagagctcgctcagacaccctcgggggctgggttgcagctcacactacccatcggagccggatcactaccaacaacaccctcaggggctaggttgcagcttgcgctacccaccagagccggatcattaccggcgacaccctcgggggctgggtaaccgccagcgtcacccttggggggttaggttttctgcaacagccacctctgaggctgaaggatcctcagtcacctccatgggagtcgggcaatcctgaccaacttcttgacactgaagactgccttccaaagtcgacgatgcacgagataccgcccgggatacctctaatcccacgtctggagtgtcagaggaaacatccatcatatcaccaacagtcggt

SEQ ID NO: 41565 - DNA, 356 bp, Zea Mays
gggcttggccttgggcgattcttgacagcctctcccgcccgagagtggtctcgagcgagtcatgactgtgtatcccaccggaggatggcctcaggcgagttgtgactacttgtcttgtcggaggttggccttggaccagtcgtgactgtctatcccactcgcagatggcctcgagcgagtcattacttcctgtcccgcccgcagatggcctcaggcgagttgtgactatctgtcccacctgaggatggccacagacgagtcgtgactacgtctcccgccaggggttgcccttgggcgagtcatgactgcatgtgccacccgagggtggcctcaggcgagtcgtgactgactgtcta

SEQ ID NO: 41566 - DNA, 310 bp, Zea Mays
gtcagccatcggatccgaaatgaaggctctagattagaagagggataccccttcgtcgttttgaatctggcgcgttgaaaggaaatcgtgtggccgagagggagtgaagggcatcgtgcgccgtggaccgcggatctgggatccaacggttgtcagcgtagcagtgtacataaccgggtccgggttaatctggacgcgtgatttctaatcggacggccgatattaagcgataccctttcgctctggctttttagcataagagaccctggaccttttggaaatagaacccgccatccagagcacagcgctc

SEQ ID NO: 41567 - DNA, 772 bp, Zea Mays
ttcacgtcggtgggagcctatggatcgatatcggcctgctgtaccatagccttgtccactaggttgcggaggttttggtaccacgccctcgcttatggctcggggatggactggagcatcatggctgacgctaccatgttctatccgcggttgaggaagtattgcaccctatcactgcactcggcaagttggtcgtaaactttattcgctcgagaccattcatcctcgaggcgtttttgctcgatgtcactgtaaactcgattgagcttacgcatgagatcatcgagctcttcttgctgctgccggagtgtgttgtcgtgagcaaggatgcgcgcctggcgctagcgctgatactcctcctcctggatgagagactcattgtccccctgtcattgtcgttgtggtttcatggcggtattgtcacaaagcaagccctctccagcgcttcatcggtgttggatcgagttggccctggtcgagctgtggctcgaatcatccttgagcaagtcgagcatggatgttggctggtgaccgacgacgaccaccagagttgacggcgaggctcctgtcgccttattcttgacggcgttagtgtgcctgttgaggcagcgcttcaaggtgacagcctgcctcttcaggcgtcgcttctccaccttgctccttgtggagcatgcgcggggtgctcgaggtgacaagtgcgtcgagggtggtgaggcagagatcgttggtggtagtggtgaggaagttgagggtgccgaacatgatgtggttc

SEQ ID NO: 41568 - DNA, 463 bp, Zea Mays
tcgcgtgcctcctactcatgcagcaggtttctccatgtgcctccttccgctgccccacctcatgccaccagcctcaccagctactggcgcaggttaaaaacagagcagcgaccttgaccagtgcggttgccggaggggtcaggacgtagggaagggtgccaatggatgacagtccggctgtcgacatgggcggggtgcgcgaccagcccgcgaccgcgaccatgatgaaggcggtcgaatgagggaaaagaccaaatgcttgggaagacggaggagggccaggcgccgcgcatgacgagcccgtgaccatgacggacgtagatggaggtaggagcgcggtcgtgggaaaagcggttgcaaccatggaggcctaggtgcggtagagtggatgggggagggaagagaagcgggtgggagggttgccagccatggtcggaatggcgagcagcgagctctggggagg

SEQ ID NO: 41569 - DNA, 333 bp, Zea Mays
tgcggcggaaaaaagtgctatgcattcttacaaacaggcaagtgcagctgtcgattgtgctaaggagacagtggccaagtattctgaggtttgtattctgaaacttatactgagccagccaattattgagattgtatagccctgtgattgaattgtgaacttgaggaaatgtgaagtgagttaatccttgttgcttagccctgtgatgatttctttgaaaatactgaagtgtatactacactttttttgatgcgatgaaatctgtgagggctttggctgttatcagccagttagaactgaggcttgaggtaatttgagattatgaggtgcctt

SEQ ID NO: 41570 - DNA, 434 bp, Zea Mays
tttccgtggcaagcgaagtccccatctcattttcacaacaagcaatgtcgtcatagtttacatacacacaacgaagggtcaccggccacattgcacaaataatacaaatcacattttgtcgccctccctctctattgcgagccaggggagggcaacgttttccctcactatcgcaacacgagagcgaggacagcaaacatgctacatcggctcagccttcgggataagacctgcctcacgaaagttaaacaacatcatcttcaactcctcaccctcaaaaagattctgcagatccccctccccaatacacgtcccggacgtcgaggacagcaaatctcgttggccacccgatctacccgaagacgggttcgttccatacccatcagacgacgtctaccacttcacgacacctcgccaatgttatgcttcgacac

SEQ ID NO: 41571 - DNA, 400 bp, Zea Mays
ggggtatcgagcgtttctggccgtccgttcgaaaatcaggggctctgattagatatctaaacccgcgaaccggtacgccgcactggccaccggatcaagatcctacgattatggttttaaatagcgagatcgcctgggaaccgtccgatcgaagatctgcggtcaccgtctactaccgcgaatggttatccccacatcgatttactaccgaccgaccaagatcggacggcgcacgatccaacctaccccgagccacacgactagaatccgatggcccagattaaaacgacgaaggggtatctctcttctaatcagagccgttcaacaaaagatcaacggctctggtactctctcccaccttcaggcgcgcagtacggtagcgcagggccaaccgcggtgg

SEQ ID NO: 41572 - DNA, 483 bp, Zea Mays
ccgcgccatcatcaattcaagcgccaccgctcgctccgcctataaattgagcccccggccagctacgctaggtcataccaaagccatagccaccactcccgtctccaattagcccccatagccagagaatcactcacttcccccaattcagtttctgtcaccgtgaaacgagcctcaccgtcgccagccatactccggtcagttcccgtcttctgctcccttgtttaagcgttctcatgcatctgcgatgctccccggcccctttaatcgaaccaaatcgcctgggatcgccgggaacgcaacactttaaccgccatgctcacggccaccgtggccagagctacgtagttggttttagctgcaattaggttgggggaaatagtcagggtagccccgatttcatggccgccgctcggagaacccagccatagccccaatcggccggtccagaacctcgtcggagtgctccccgcgctgccgtcg

SEQ ID NO: 41573 - DNA, 656 bp, Zea Mays
ctcggaccgggaccccatcttcacgtctaccttctggagcgagctgatgcgcttaacgggcattaggcagcacatgtcctcggcgttccatccacaatcggatggccagacggaggccgccaaccgtgtcatcggcatgtacttgcgctgcttcaccggagatcgcccgcgcgagtggcttcgttggctgccgtgggccgagtacacctacaacaccgcctaccagtcttcactctccgacactccattccgggtggtctacggtcgcgacccgccatccatccgatcatatgaagcgggcgacactagggtggctgcggtcgccaagacgatggcagagcgcgaggagttcctggccgaggtccacgaccacctagaacaagctcaagcagtgcagaagcgccactacgacaagtcccacagaccagtcacatatgccgtgggtgactgggtcctgctgcggctgcgcaatcggtcgattgcttctctgtcccaggcatcaaaggggaagctccagcctcgcttcttcggtccataccgcatctcagaaatgatcaatgaggtagttgtacggctggaactaccggcccaggccaagctccatgacgtcttccatgtcggcctcttaaaaaaatgggcgggcgcgccgccagacg

SEQ ID NO: 41574 - DNA, 273 bp, Zea Mays
tcttaatcacttttatgctttttcttagtgatgaaatgaagtttttaatctttgcacatgtctttcccagacagagacaacataatcctacacctgtttcattattggagtaatgcggtgctacatgtatggttctcttcttaaagctgtaagactaaggatcaccttttcctcttcgaacaaggtgacaagtcattatgagtttatcacagtgatttgcttgttttctgcacaacacatgtccatacatatgttatagttgcactattttta

SEQ ID NO: 41575 - DNA, 370 bp, Zea Mays
ctgcggctacctcgcgtctgatggaccatagcggtggaggtagtgcttagggtcggggacagggttagggtcggggcctgtttgtgtgtcttcgccatgtgccgcagccgagcgatggaggaggctgtgcacatgcgccagactgaggcgttgcatgatgactttcaaggattcacagcctgcatgggccatcccttgacccagtgccctcctccgccttcgtcccctacctaccatgcgaaccataatgaatggcaccaacaggagtttggtgtgccatttgttactcctaaggatgaggcccaggagtttgacgactccttctacgcatctactcctcctccctacccgggtcctggacccattcctg

SEQ ID NO: 41576 - DNA, 385 bp, Zea Mays
cttggaggtggattcatcgctacttaaggtctatggtgtcgttgatgatccggttttgtagtagaccaccttcttcatcttcttatccttttcatccttcctcttataggatcggtataacttggaacccgtacttgtggattcctcgaccttctctttgtgcttttctcctaagggcgctttatctctttgttcttttatcataatttttaagtttgaggcagcaatatttgaatcactctggtagatatggcatgcacttcactttggtggtttctaagttccataaccatgacataatcaaacaattcctgcagccatgatatacacttcttctttggtagtttgtgttccataatcatcataacaccataaaatagctcct

SEQ ID NO: 41577 - DNA, 491 bp, Zea Mays
cgagcgtcatcattttgggctataccgacccctgacattttgtagcctggggctcggtgcttttgtcatgttgcgcccttccagcggtatgtgcactctggcctagtccgataaatcatgagtgcgccgcaggccgtaggtgtgtggtccgtaaatgtgacgtagttctagggattagtaggtcataagtgggaggtggaccagtgccaccaccgtggctcgttgccatacgtagttaatacggccggtcacttatgatagatcggtttcgagccatgcgcgggatcactcgagtggtttcccttcggtgtgccctacccctgtcaggttctgccatgcccgaccccgggctcggtgccgtggggtttgtccgggggtggatgcctcaaggttagatgttacctatctcctccagctaaccagtgggtcccagttaccagaggcatttccacagtgtgctcgctgaccgacgcgtcctagagaccggggat

SEQ ID NO: 41578 - DNA, 277 bp, Zea Mays
gcaagattaaagctggattataggacaataactttgttacaggaagattagtaagttgtcacatagaaaatggagaacaaggctccacaaatcacgctgtcagaacaactgaagatgatggccatggtacagtgcgcaaaagatctttaggtacatcactccttgccgccgatgaccctcgcgccgcgatctgcgtcgttgctacgattcatgctctctggcggggagatatttgcagcagagtaaagatcttggcaccggattggctcggactcgg

SEQ ID NO: 41579 - DNA, 488 bp, Zea Mays
gggtgtgttcttgggaagcaacacagaaaaccatttcctcaagtgtctagctttagagcagggaaatgagctagtgcatgcaaatctatgtggaccaataactcgtagaagtataggggtgcatcctattttctactagttgtagatgatcatagtagatacatgtgggtggaaataatcaagtccaaagatcaggctctagaatacttcaagaagattaagtagagggctgaaactgaatctggggtttgttaaagaccctgagaacatataagggaggagagttcacatccaacctgtttccagtgttctgtattaaagaagggattaagcactatacaaccacaccttactctcctcagcacaatggagtggtggagagtcgatagttgagatggtgttggggaggagaccgaacacaacctcgatcatagagcccagccagccgaagggcatctgggaacttcgccatttttccggaggtgact

SEQ ID NO: 41580 - DNA, 487 bp, Zea Mays
ctctgaccgccaccgcgctcaacccaaattcccggccaccgctcacttggcctataaattgagcccgctgtcagcttcgcaacatcatcacgcaccaccacatctagtattgctcccagccgatcaccagcgagctcaaattttgcatttcccccaacccggttcaaatacgccgcgaagaacacctcgccgtggccagctcaactcaggtccgatctcgccctctatgctattgttccaacaccctcccatgtccttgatgctcaccaaatcatccaattgaactagactgccacgggtcgccgggaacacgcttttccttagattcttcgcactgtccccgtggacagggtacggtagagctccaattcgaaaattgagtgaggggaaatactcctctggggtagaatcaggggtgaatcgaagactagcaccggtcttggtcccctccggccggtctagctcgccggagttgggcttcccgtgt

SEQ ID NO: 41581 - DNA, 290 bp, Zea Mays
tagaatcaacgcgagatcatcggcccattagactcaacatatcaaattcataatattcccgtcccatagatgtatacttccctttttaaagtgtcgaccaacaacccatgaccccgctcctcaatccaatagattcaggaacattttgactatggcccagtcccattcttatcgacaccgtctgatgcagtccgcttcgatgtctcgttccttatgtcgcgacactacacaaccccaccccttcccggtgcccccgcctcgctcgtcatcctcatgacgctagctagctc

SEQ ID NO: 41582 - DNA, 413 bp, Zea Mays
aagcaattcaatcgggtcgagtgatggagaggtgttcttcttgcaaatgtttctcttatgattgttgattaacttgggagcaacacaaatgatttagatttaaacacagagaagaaaactttggagagggaagggaggaataaatcacaagcaatacaacacaaaagacccatgcaatttatttaccagagttcgacttcccaaataaacctatgtctctgttgaggtgtccctaaggacgagtctctatcaaccctctcgagcgattccaaagatcaagcttgagccctctctttcttcgcaatcaaatgacctaagtccccgcaaggatctccacacaacatggagtctcttgctagcttttacaaagaacatgagagtcaaaacacaagcacaagaatgcagcaaccaac

SEQ ID NO: 41583 - DNA, 326 bp, Zea Mays
gagacttctcgcgacgtttcgaggcgggagcgggggagtctgcctttaaagaggggttcatccctcgagtagcagccatgccttgcttctctcccactcgtggtgccctttcgccttcgagctctctgtgcccctttgccttcaaggtttctgctttgtgtcgccatagtttaccatggccttgtaagttcatctcgagcatgcccagactgagtgagtgctcgacatggtatacctcctgcttggatgggatgcgctggcgttcggcagaaggatttgcgccgcgcgccatcctccccgacgaacttgccgccagagagttcgtg

SEQ ID NO: 41584 - DNA, 495 bp, Zea Mays
ggagaatttgtgagggcctccacttattcaccagctaatagttcggccatactcaacctgtacaaaggaagcaaacgggttgatgatgttgtcattgcccaaggctctgcagaaagtgtccagagttcatctgatctgttttctaataatgaaatggtgagcattcatcatatctaagttttccactgacacaacctatttcatattcttttgatgtacactaacgatcagtgatcagaactcttcacttgaaacagatgacaaccattccagtagatcaacaagtgattgcattttgattgaattctaccaaagactgagagaagagtccttgacagcaatatcccggcacgtgaaggatcttagggtcagttattacattgcatttgtaaaaggacactttttgtatggtttgttgcttcataattttgttactaaggatatgcattcagggagcacagaagggatctacaatctctgatgaaaacaacaaag

SEQ ID NO: 41585 - DNA, 406 bp, Zea Mays
caaggacaccaacacagctcccagtcatctgagacgcaacaaagctccttcagaccaccagccccaagaggtagaggtggacaaagctttggaggaagattcagctcacaaccaagaaggttgttctgcttgttctatggagaagataaggggcacacaactaggacatgccaagttacaatacagaagcaaaaggagatagctgaggccaaagcacgacagaatcagccaaagcaagtcctacatactgcttcgtgctattccccatacattcttgagtatgtgggcaatcaacagccattttcacaacccatagtgtcagtagcttcggcgagccactccccaattgcatgggccttgccaccaccaccaccggtcgttgctccaactttgtcccacaatcaac

SEQ ID NO: 41586 - DNA, 387 bp, Zea Mays
aaagggtacgcgaccccaatcgcaggatttgatatcaagggttcatattctataacgcgaaggggtatgtgggtcaacatttctaccatccatctcaaatcctacggtcagatcactaccgctcgtccgtcgatcaatgaccacggtaagtcctagccccaatcgctacgccaggctagatctgagccacacatcgcgaatcgacggtcaataactcgtcttctttcttcccccggccaccagcggcgctgccagccggaacacggcggtccatggccgaactccctacggtcccgcgcacagagcgctaactttcaaaatcgaactactctacacacctaccagtgaaacgcgaagagcatggtacactgattacctctaatcgtg

SEQ ID NO: 41587 - DNA, 397 bp, Zea Mays
gctaattcatccaggtgttctgttatttggcacacaggatgtcggccaacagttttaggtcagaacttgtgttgtggatctcatgcattacccaggattgctatgagtaagggtatggactgtaatgctgcaatacaagttcttaaaaagaatagaagaaagctgctgttacaaaattgcatgactaattcagaatctcacatcgatgcgaaaagttacttcataaagcaaaatgcccactataagtctaaggtttgcacattttgtttttgtggtcacaactattgtcagtgcacctaatgaatattctactatgtttggatcactgatatggttgtttccccccgcattagggctctaatagtcacagggtgtacttacaaaggtacatgctctc

SEQ ID NO: 41588 - DNA, 379 bp, Zea Mays
cgcgcagtgcggcaagggatctggccccatggccccacgcgccagctagatgccagggtagtgcccaacgttggcaggcacatggaattggggtcggttgttgtaacagaaacgagctcagaccggacttatggtggaagaagcttctgatgtttcgggcccacgtgccaatgtcacggtgcgcgcgtgggtggaagtgggggaacggtctatgatggtgggctagcatgtggagccactgaccaccagggcccatgtatcggcgtgggggggtgtttgactgggtggcgcgagctacgagtggagaaaagaagatgtgccatcgtgggaaaagcacatgggtcggccagggagttttgggcccaggcgcagatctgcc

SEQ ID NO: 41589 - DNA, 396 bp, Zea Mays
gtgagcactcggctgggtgtggtcaccacttcaaggggcaacttcggttcaggatttggcaagggaacacatgagatggggaaaatccgagggcttgatcaaggcatggaggattggtcaggcatgatgatcctgctaggtgaatagcaggagcacagcagggctctgtttgtactcctttctgtggtaagactggaacctagaaggggaaaacaaggggtaatatgttccacttatccactgcatgtcttccacgcaaggcatgacacagggagatagtaattgtgtccaaccgcacttggacagcagcaatatagcaacagacagcctagccagcatttggataagttttccacctcctcatcacttctttgtgtgtgcatgggtgccaagtac

SEQ ID NO: 41590 - DNA, 402 bp, Zea Mays
cccctcgtggtgacttcgtgtttgtcgaatgccgaagaccgtcgatgcggtcttttttcgacgttgtaattttttgcgggggattttttgcgtgtatattacatggctccacctcattaaaaacctcacccccgggaggaaaagagtgcgggccggaataaaaactgtcttgcgaattacaagggcgagctagccctgaggagtcaaacaaaaaacttgcgaagattgtcaatgttccaagaatgttctaagtcttcgccggatggcgttgtgagcctgtacgctctgggggacgccttcgtcttgacgatgaaagggccctcccattttggctctagcttgccccgggactctgtccgagctgtccgaacgagtacgaggtctccttcgctgaattccctc

SEQ ID NO: 41591 - DNA, 379 bp, Zea Mays
gttcaattgggtgggtcggcgagcatcacggggttatgaaagcactcaaacgagaaagcagagaggatgaactgaccgggattgtgctggccgcagtaaggtcgttttcacggtggcggagactgtaattgggggaaatgagcgattctcggtcccaggtggataatctggggcaaggtttggtgcaatcgatgcgtgattatcctacggagccgtgggggcactcaatttatagtgaggttaagcggtggcgtctaatttttcgcagagagaccagcggccgagacgaagggtgagtcatcggcgcggtctatcatggcgcgccctggggtgattcctccggtgaggaactaaccttctcaggatgtctttggtgacg

SEQ ID NO: 41592 - DNA, 377 bp, Zea Mays
atcggggctatagggtcataagaggctgtgctttcaccgtgcgcaatcgatttgggagcaaggtgagaaggcagtgcgaatttgacttcgatttagtcactgtgtttgcgatgatctcacctcgccgtgaacccgatggctatttatagccgtggcggtccggcgatcacctcgcggccacggacaacatcactagcgcatgccgaccacgtcggtagaaggcacagtgagggagatcacgacatgagtgccaccgcgacggaattaactggtctcggtggccgcatgtgaggtctccggctggactcggggaacggtgccacgtatgcgctgtttaactctgactctatccgtttcttatcacgcgtgaatccgga

SEQ ID NO: 41593 - DNA, 477 bp, Zea Mays
atatacattcaatacatccttcaaaatttaccaagtctgttaaaaaaactatgtaaaagtctgaaatgaatttgtggtatgtttgattatatttgtcagtgtagttaaagttactagaagatttgctcttcacatccttgattggctagtggtttatttaccagtttgtgacattcaaagattcgtttctgatcatgaaggttatttgtgcattaagaatcttctaaaacttaatacattgattggttgatgagtaactgattcgcaatgcagcgggcacaggacctctctcttagaaaagtaaacttatgctatcttatttgctcagaattgttcctccaaaatctcatggtttcatgctaatttcatctattatgtctttagaaagtttcccataccttgttgcttctgatagtcagagttaaagttttgctaccaacatctttttgcagccacctcgcacccgacactgccatg

SEQ ID NO: 41594 - DNA, 589 bp, Zea Mays
tggaggtgtttcgacctcggcagcgaccggaatttctcatcggaagcgttgctccgccgcgtaaccactcgcgtcgtggacagcttcactccaccgcccaaccctcggtaagtctcaatttcatgtttctccatgcacctaggtccgcgttacgccggttcaatttgtgttagacgctcgggtacggttgattgggtgcctcgccggcgtgctccgccggatgaacagggcggcgccaccggtttgagagcctgaggaaggagattagcgtccaccgtcagatttggaatgaacagcccagattagaagttgggaggagatgggtttctggccgttgatccgatcacgtacgcgcgagattagatcgcgtgcccccccttcgcgggattagctttgaaccgttggatcacgatcgggcgaccacggttcgatactggttcataaacatgcgctttgatctgggccgcccacgcacgatcggatggcccagagaccttcataccccttcgcgatggttattttattaaagagcccccgccaaactttgaaaacaacccgcggtccacatttagggaaacttgagtctcgg

SEQ ID NO: 41595 - DNA, 280 bp, Zea Mays
ttattactgtcattgaggctattgaagaaacaccgccatcggcctcagcgccgaaaacagcagcagccgaagctgctcctaccgaagcttctacttccgaaactgcagcagccgaagccacaaatttggaaaacacacttactgacattgatgaaatgattttgaatatggctgaggaagaaactgctgccgctactgaggaaaccatgaccacagtgcctgaagaaagggagaagatgcctggaaaagagaaggagattgccgaagatgcttcggaaga

SEQ ID NO: 41596 - DNA, 316 bp, Zea Mays
gtacattctactatttccaacactgtgcatgtacatgtttttttcttcttgtcttatatgcctcttgtcttatatgcctgtaatttgtacacatattttctttcaccataaagcacatgaaatccacaaaagaaccccacaaatatgcataaatcattgtcttaatgactctctacaagcaatcttagttgggtgagaggctaccgacctataatggtaggaagaacctgtacatagctggcccattgtcgtttacttcacatgaatttcatatcagtttccttgacgatgatgctggttgtggtttttagaggtc

SEQ ID NO: 41597 - DNA, 307 bp, Zea Mays
gtggaataccatggagtctgactatttctttaagatatattcgggcaagggtggctcctccgaaggtagttttcactaggatgaaatgggctaccttggtaagacggtcgattatcacctagatagagtcgttccctttttgggtctggggcagtacagttacaaaatccatgactatttcttcccacttccattcgggtattggaaggggttgcagtagacctgcaggcttctgatgctcggccttagttcgttggcaaatgtcgcaccgggccacatattgtgctatttctttcttcattcctct

SEQ ID NO: 41598 - DNA, 461 bp, Zea Mays
ggtttgtcgcgattttgcctcgacgcacccttcgcgatgacgtcacgtgctgcctccaattcccacaggaaccacaccgccaagttttgaggcccaaacttggtgaaacccaccattcgtagcgttgggtgattttgaggctcaagcaccaaaccgtcgtgagtagcctacttcatacgcatacccacgtcctggacacatgtcctgccaatcctcgaccccgtcggcgacacgatccactctaccatatcctcacgctggtgtgggtcctaggtgtcagccgacacggctagtcaaccggcttttgtagtcccttagtcaagtcccaacgcctgtccttcaccgctcgatccatcgacacgaacatgcatgaccttcaccttcgccgtcaaccatcgtccctgttctccacgtctgcacaccataagccgacaaacatggttgcgcaacacaagctctcg

SEQ ID NO: 41599 - DNA, 306 bp, Zea Mays
ttcttcttcttcttcagagcaatatcggacaggtcctcttctgacaggttacaaaatctttcccctaggcgtctgatgttcttggcagaaagggaggggggccctcagacttgtgctgacacatcaaacagttctttctctggcaggagccctgcctgaacccagcccgagcatcacgaagtctcttacttctccgaaggtcagactccaccaccgcaggcttggatgtgcgagaggccaagtctggggtggtagagacgttgccagtaggatcttcctggagagcagcctcaagaaacttgccat

SEQ ID NO: 41600 - DNA, 961 bp, Zea Mays
cgtgatcatctctgatggcggcggcagattctcccacaaaacacgccgatctcgggggcgggccgaccatgcgggtcctcatcctcgtctataaaaccataccgtgaccctcttccccaccatctggagcgctgagatcggagcagagagatggagaagtggaatcgagggtaggagagagaatttggcgccgcctcttgcaatctacgcttgcgcggtggctcaggggtttgggaggacttcgcaggagcaagccagtggccgaccggtggacttggcgtggtcatcagtggcgagctcctttccccttgccgtcgtgccgtggactgagttcaacactgctcgatcccctgtaagttgcccaccatctaattcgcgatcgcctctgcatcgttttacgtcagcgcttgtggtgaatcggtcgctgggggggaatcagctcgggtggctccgaatgtggctccgccgttggcgacaccgccgcgactggttgaccggaagttgggagaaggccactggtcattgatctcctgctgacggccacagttagaagttggttatcatttcacccaggcgatcggtgaccatggatctccgttgggtcggccggcgttgatcgccgccgcgagcggggcctcactgtcgcggtggatggaggataggggaaagaggaagacgggtccctggccgtaggattgagatgaacggccatgatttggggctccataccggtctggcaccagctcgtcttgatcgttgatcgttggtccagcgtgtggagttcaatcacggtattgtaaatcctgaccggaggatctagatcctgcggccttcgcgccataccgattcgatggagattgttttaatccggtccgtccgttcttgatcgtgtgatccacagtcgaagataccccttcggccagcgctttttgcataagaacccttgttattttgatatacc

SEQ ID NO: 41601 - DNA, 766 bp, Zea Mays
cagtgcgccctcaaggcaatctaagcagacaattacgccctgaagaatgactcctcagtcctggtgctgaagagcgacgcaactactgggtccctttgggatggcaaccaagaatctactggtacgtgtctgaaccgacgtacccaggtagcagtggctcgctgaagatcaagcagatgtggatcagcagcaagcggtggcacctcggtcttgtcacactccctgaagcgaggtggaggaataggcggagcgggagcgggagcagaggaagctagagtggtggaggtggtggacacagcgggtgtggtgaatggctcatgagcgacaggagctggcgaagtgtgatttggagtggatactgtggcggaaagagtggggtgagcagtggaggagcgaggccgagacgcgaggcaacgacaggaggaggcagtctgatcagaagaaatttgtaactggcttccttgctcagcctgatctgctgctgctaccgctgcaagtgctgcacgagcggctctatctaggcgcctcttcttcctgccctcttgctgctcaagatatacagtcttgcccttgacctgtctgaaggggcgaggagggtccttgtcatctcctccccgtgacggtgtgacgttcttcgtcctcaccgtcctgaactgactgctgcaagatagtgtgaaaagataagcgagagtagagagcagtagataaggcctcaaatagagtgatagctacctgggaacttctcgagagagaaaagatccaggca

SEQ ID NO: 41602 - DNA, 527 bp, Zea Mays
gcttcggaccatgggaatcgctcaccaaatttctctgctaccgcggtgccgcgaaataccgtcgccggcccacttctcgacccggctgccggcaagtagctcgtgatcacgttcgccaagttactcccatacgtaaagcaccatcggatctcattgcggggcactggaactcagaatcgggttggggctgctccggttatggcgttgccgtgccggtcctattcgccgcctcgacccctgggcgacggccgttggcatcgttgggaggtaggagaagcactgatagccgtcgatagtgagtggatggagtagattagatcctaggtacccccttcgtgtcattaaagctgtgacgttgatctctgcgtgggcggtcaggattagaatcagcataccccttcatcaaatggatccgagccgtaggatggtagttcgatgaccgggattagatcgcatcttcataacaccctagccgtaggatcttaatcggatgccccacgttgggtaccggttcggagtgaatcggg

SEQ ID NO: 41603 - DNA, 293 bp, Zea Mays
gtgggattgaaaattgtgccgaagctttcttgaagccataaggactgcatagaggactttctccatctctatatagtttcttttggatgggtccagcacttcggatacgaagtagacatgcatttgcctttttacaccttcgtccaccacctcttgcaccaaagcagcacttacagtcgattgtgaagctgatacataaagcaatagaggagcccctggcgaaggcggggaaagtgttgtcagctttatcaagtaatctttcaattcttcaaaggcttgctgctgagagggtc

SEQ ID NO: 41604 - DNA, 586 bp, Zea Mays
tccatgcgcgacaccgtggatagagagctccttgcccactctgcttcgtgctttgacttcatcgacaagctctgacaggcccagtaggaccacccggcccttgtcgctctccgtggcaagatcacagcgggcacctgactggctccttaggcgctggtggacggcatggtgcaattttccaaacggctgtacatcccgaccgactttccgctgctacaagagatcgtgggggccatacatgaggacggacacgaaggcatacagcggacgctccaccggctgtgtcgtgacttccatttttctaacatgaagcaagttatgcaggaacaggtgcgtacgtgtgaagtctgccaacgctacaagtccgagcaccagcactcggtgggtctccttcttccggtgctggttccccggggcgtatggactgatgttgcactagactttctggaggcactgccacgggtccgcggcaagtcggtgatcctcactgtggtggataggttcagcaagtactgccatttaattccattggcacacccgtgctccgctgaatccgtagcccaagctttcttcaacaacattgtcc

SEQ ID NO: 41605 - DNA, 466 bp, Zea Mays
ttaaatcccggccgactaactcgagatcgacggtcccagacaaacgcgcccgaaccgatacttggttttcaatcagagtcgcgcatagagcatccaacggtccacggtgcatcttccctagccctcgccgagtaacagcggtgcccgagctcccacggcggagagccaccggaagaacatcaatccgatgcaccgagcaccaattcctccaatctagataatctacacgttgtcatgaatggcccgagcacgtggacagaacccaactaaagtaaagcgtgcgcgcgagccctggccacggcgcacggcggttccaccactccggcgagcaatcgccaggtgacgcgtgccttttattgaacgattctagttgcaaccagagtaggaggtacgagcgtatgtccttaggagtactcacagctagcggagcggcggaggtagccttccttctccagccgacggcggc

SEQ ID NO: 41606 - DNA, 430 bp, Zea Mays
aagaaaatgagcattggaaggacaatgatgaggcggaaaatgagcctgctgtttctgatgacgaggagggcacggccgaagctgatggcgcaacagaagccgaagaggatgaggaggaggcagggcagtccgaaccttctgaagataatgatgaggtagacgatgacgcggacctgcccgatcctactgctgtcgagcagctgctaaccaaagctgtcgaggagatcaaagcggaggaggagaggagtgcggcggacacagttggggagaacgtctccagcaaagagccagacgaggggaaacccattgcaccttcgagaccgagagacgaggacggcggtatggctgggttttcttcttctgttttggcatgaactcatgcatggcagttgatctgctctgggccaaagcaacaagtagccgccttctg

SEQ ID NO: 41607 - DNA, 532 bp, Zea Mays
cccctcttgaatcccctctgcacctttctcttgatctgtccccccctcttgaatcccctcttcaatctgctgctgccttagccacgattagtcgacctagtcgtcgtcctaatcgcgattagtcgcctagtcgcccaggtgtgtcgactagcaagtcgctcgacttgaaatcattgcattggattactgacataaggggtgagctctctccacaagcattctttaaatattttcagatttgggatcaattacaacagattcaattatgctcaaaaactcatgatcaacatagatggcttccatcatctacggggatctacacttccaagtctgcatatgagcgtttctgcttggggacaacagattttgaacccacttctcgtatctagaagagttggcctccacctaaatgcagattctttttatggctggcagccttgaacagatgttggactgctgaccgtctggctcggcagggattggaacatccagaacactgccttttttgtgatcaggaggaagaaagaattga

SEQ ID NO: 41608 - DNA, 660 bp, Zea Mays
agaaattgttttggcttatatagagaggtggtgacatgccaaagtagtcatcacttcttctatatcttgagtcgggtcaatacgcgtcatgtgttcatgaattgggaaggacgcgcatgatggtttcgagttagagattagtggtttacggttcgtatgatttggtcgatgtgtgaatatacatgtgaatatgtatgtttataaaaatgtcgtggtgtatgtcgtgccttagatagtgataataataggcaagcctatgtgtatgttattcagcgggctatgtcgttgctctagttagccgactgttagatggctttggttaagctcgtaatcacggtgatttgcttgttttggtctagacacgcatggttatggtcgcgggtaaaattagtggtgttcatgtgatgtctaagtaaaaatgcaaattagtgtgtgaagggcgcaatcgatatacacatttataccgggtttaattgttgtggtgaatgtgtttgttgattgtgtacggtaattctaacacgcgaaataacttgcataaaattagtaagtctatttattagtcctcatttgattaatttaacactaacaaagggtaaagtgttagaatggttcgagtctctagaacgcgacaatttttgaagtaaatagaagctgaatttt

SEQ ID NO: 41609 - DNA, 378 bp, Zea Mays
ggcatacctcccaatttgaacattaccaaagagacggcaggcactcagcaagctcctccaaacagctgccgctggtttgattggcatcttttcaatgaactcctgagcagaatgtaatttccctgaacgaccgaggagattgaccactgaagcataatgctcagtgcccgggtcaataccatattttgatttcatagagttaaaatggtgtaagccttcatccacaaggcctgcatgagcacatgctgatagcacaccaacaaaagtcacatagtttggttctactttggcctctctcatcagctggaaagcacaaagggcttcttcagcatgaccatgttgtgcatacatagtaatcatggagttccaacaaataac

SEQ ID NO: 41610 - DNA, 318 bp, Zea Mays
taaatttgaacatgtgatctgtatcagaacataaaaaaataatcccaggccatatccatatatcacaagaattattgcaccatacactggtgtatattttacacccaaatccgtctaatgcagttgtcaatctgcaactctgaagtatggttggttgactcataatggtcggatttggatgtttgctagcctattgtttgtcaatatttaatcatctcttgtttcaccaatgcatcgaatgattaaagtggtgttcattcattccaaagaaccacataattagctaggacccctcccatgtgtttctagtagcggcca

SEQ ID NO: 41611 - DNA, 744 bp, Zea Mays
aaaaccgagcgctttacccatgtgaagtcgtgctcgttcgtgagcgtctgggtcgcctggtcatctcgtatactttatggtggatggtgcgggcagcgtggggcctaggcgccattatttgagctgcgccaacccctggccttcatagcctgggtctccgcacaacttgtatcattgtgccctgcaggtggtctacgcaatcatgcctagccttgatagatcatgaatgcaccgcaggccgaggggcacgtgggccataaatgcaccacaatcctaggggattgtaggtcatgagtgcgctgcagtccgaggggttcataagtaatgagtacgctgcagcccaaggggcttgtaggtcatgagtgggaggtggactgatgcctctaccacggctcggcgccaagcatagttaatgcggccagtcacttacaatgggtcagtatcgggccaggcgagggatccactcgagtggtttcccttcaattcgcctgccacctgtctagctccgccatgcccgaccctaggctcggtgcctcgaggtttgttcgggggcaggtgcttctagggcagacgtttccttcctcctcgtactgaccgatgagctttggttgccaaaggtatcttcccagctcccttgttgaccgatgccccccagaacaggcatattaccccgacaatattataaaaatgttatgaggactaggcccatggtgcattgctaggtcaggcacgactactgctcac

SEQ ID NO: 41612 - DNA, 313 bp, Zea Mays
cttgaaccaggaggccgtcctcgcttacgtccagataggttagccaatcgaaccctattatcctccacagttaaacacatacggctgttgtgaccatcagctatgccacatttctggcacttcctgctcatcttcttagctcctttcgcacccaatttaagaacttgttgctcactacttttgattgttcttcccttaggcttggccttatctggtcttgctaagtttacaccttccatatgaaactccagtttctacaaatcaaagatattaagtcagtttttatattcacgtatttcatcaaatattgtag

SEQ ID NO: 41613 - DNA, 378 bp, Zea Mays
ttctgtttttggtgcggatttttagtgtgtgcttttaaacttgccctgaactgttggtttaagttttgagttcaattaacttgagctcgaggtgcctcagctgtttaagttttcagacaactgattcaacatcacagaagataactcattcagcatctgacactgatacatggcgacatgttcagaaaatcataaaatctaagacaatatttatttgctcttcaagttctcttcccgaatgcacattggccttgtcaggtcctcatagctagcagcaaccatcaaattgtagtccatgagtacaacaatgtaaacagaggcaagttttgcataatgataaaaaaaagtctttggacacagagagctgacatgatgcaa

SEQ ID NO: 41614 - DNA, 309 bp, Zea Mays
atggtcgtgaccccttgaaaccaaaccagatcaccatggtgagcatcgaagaactgaggatgtgccaccatcgtcatgctccaggctgtggggtgctcgacattctctggggagggctgagtgcttcgacgccttcctggggtgttccctgggacacacggtcggggtccgcgacgtcacggtggcaggtttgcagaacctcaccggcggtgatgaagggtcaccgtcgtccggcgtctgtagtgtcgttgtgtggacatacgatcgtctgtggtcttcacaagttcacctcgatggtcctcgtcgaca

SEQ ID NO: 41615 - DNA, 353 bp, Zea Mays
gttgtgctccggcgggagctccaccgtgtggcggggcgacgtcgttactgcccgggatcgagtggggagaaaggctctggatcattgatcctttgatcaagggctgggaatagatcactgttgtacccctttttgtagattagatccgatccttcaattcgtagatgcacggttacgacttaatattggcataccagtttgaccgtctgtagtgagcccttggatccagatcaaatggctatcacaacataccagttcgtgtcttattcgtggtcgtcaatccgtgatctgatggcctggggtgcacccacgttatgagctgagaaagttttacaaaagagaccatgaaaaat

SEQ ID NO: 41616 - DNA, 503 bp, Zea Mays
cttcaaccagtgcctccaaatcctcatcattgacggaggaaatgggccatgggtcgtgaggaggaagaacggtgatcttttccaccatcaaaacagaggaagaggacgagaagatgacgaaaggctcttttgcggaaggagaaaatggtgtatgaaagcaagaaggctggaacgacaaaggtaacggtccaaagtctttgtctcggtcagctttatataggacggacggagccaccaaggtgcgaattgtaaatggtcgaacgacggtcgttttgaatcccaaacacgccgagcgtcgttccgcattctgcctcaaaaggtacgctctccaccctcagcttctctaccctctatcctcttggcaattaaccggaaggaagcgtcctctgcctcggaaaacacacctcggaaaggaaccaacaaaccgaaagaaggcattttctgcctcaggcgggaggagaaaaagcaaggaaaaatactgttaagaggttcgaaggttcagc

SEQ ID NO: 41617 - DNA, 466 bp, Zea Mays
gccatggtacagtactaaaaaaatcttcagattcatccccctcgccgccggtgacctccgcacaagaattcacgctgatcgcggtgattcgtgcaggactcgggcaggatagtacaggggggtgaaaagatcagaagggaagtggatttggtcacggggtgaagcttaacaaccgcgcctatagccatgcgacgtggccggaccgccggtgtcgacatggtactccggcaacctcagttacaccacgtcgtagctctttaccacatagtagtaatcgtggcgcgcctggacttgccatttcaagagccgttgcatcggcaagcgccatgactgaaccgccagtgatcttccttctctccggccgctagctttcatttccaaaattcggagccgccacttaacacccctataaattgatggcccggtctgcttcgccatgttgtcacaaagccagagcacccactcc

SEQ ID NO: 41618 - DNA, 295 bp, Zea Mays
cattgaactaatgaaaggttagacgaatgaatactagatgttgcacaaagtaaacccattgttcattccttttctattagtcaagggacatgacccattatacaatatggaaatgacacggtcgtggtatggaagcatgcccaaacacaactattctttctaaaggcaatcctaaactcctttgcagaatcaatcggtccccacgtcaattgtcataagtccaacatgtacccaattaatgtgtcaagccaaaagatggagatcctggcaaacactttccaatgttagattggga

SEQ ID NO: 41619 - DNA, 578 bp, Zea Mays
ctagaatctcgttacgcagcgtagaatattattatgctggtgttggtgtccttgagggtgactttgcttgaacggttggggtggattgctagagaaacggggacggttgctgctcctagcctacggttcatcgatcttgcacttccagtcttccatctcctagcgcttcctcttagtcatgatagctctatcgattagatgttggaaggtagagaaggtatggttcatcagcttgtagtgaagggggtcaaccaaacctcttagaaacatgtactgtattgacatcctcaggtgcatagcgagatagttgcataaacttgtccttgtacacactaacaaacaggggatcttgcttcaaggccaggaattcttccttcctcgttatcattaaaccctcaggcatgcggtaccggtggaagttgtctctgaactcctcccaggtgatgaggtaggactcccaccaggactgtgttgctccccttagcagacggggaacatacatacccttctcatagtcattgcactgaacggtatgtagctctagctccactatgtgcaactattcttcggcatccatg

SEQ ID NO: 41620 - DNA, 2679 bp, Zea Mays
caattgcaggggtcgaggaggatgttatgtttcatgcagttggtaaggacatcagagactgtgatagaaattcattgatttaacttgtcctggaaatggtgttttccttggcattcatatggtattgcaaacagaaagggctgaaatggatggagggcttgagaggaatggagtatcatcagtagcagatatactggcccaagatgttcatgagcttcatacgaggtaaatcgaaattgtagattgctcacagttatagtttttattacattttggggcaaatctggctaacatttgctctttgcctgttgaaattatgcgaattcagctcaattgttcatgaagatggcgttgagaataacttattagctcagataccgagcttcactattaagtgagttttgatttatctttaaccttattcatttgaagatgttgttgtctgcctcctgttcttattgcttgcttgctctcgtcagtgtccaaaatgcatggcaatcctttgttgcatatgatgcatgcttcaggttatgtctgaatgcatgggcaagaaactgcatggaagctccagacttccttcgggatgagtgcatggtactgcgaagtgcctttgggtatgcaacagcttatgcatgagtacatgttctgagtaatctagtattacttcactatttttgccttttagcacacaacttatgtgcttctttttatgaacagaatacagaacttcttgcttcatccaaaacacaatagtcaagttgatggtaaacaaatgtatgataaggatggaaattgtactataaagggaaggaaacttgttaaacagattgagattgaaggtatgtataagcaatcatttcagtcatcaacattactcgccttgaaacattacatcggaaaattcttcaggaaaaggctagcatattacaataaggaatgtccgaactgtaaacttgtagcaatgtttgaaaaacaaagcaagcttacactaacatatttttattaacagtaaaaaagatacgggttgtacctcaaagaccaaagcttcgagcaacatcatcctttagaaatctctacatgcaagctggcagtgagtatgtcagacagatttctaagattctgaagagccaggttacgatgttgacatccacatcatctacatctttgccggaaggttaatatgaaagtttttgttttcctatagcaaaccccagtcacagtaatatttacatcgacagtaacacagtgtctatggctctatgctttcagaaatgttcacatgcactctagaactgcaaagttcttgcaaaggtcataagagagattcaatttctccacaatatttgaagccagggactggtgaatctcaactcttgtaagttacatccttagtcgttgttctgtgatgtacttgcatattcattctttcattggaactatgaaacagatagtattcttgaaccgtctgttatcacttatgttttagttatctagagagccagggggatgttattcttgttgaagtacaagacaacaatagggttgtcataggccgtgcaaaaattcaagtttcatcattgactgatactcaagtatgtctaaacaaattcatgagtttagtgcaaatgtttcatgataattctgtagtcactgaaggagtttgtatttggacaaatttgaaaagcagcaggatgaaatcatcaggtggtggcctctatatcttgatgatcaagattgtgtcggaaaagttcagcttggtatgaatttatccatgtcttccaataactatgggtccgaaaaggttagttattctcatcttttctttctccaaatccatcaaacattgtgttaaccttgtctcatctatattcttataagaaaacatattgtattatcgttacagatgctgcaaggtggccctgcagtggataccatcatatatgacatggttctggaagcggcaatgagggctcaaaatttcaacagcaaaatgcttcatatcaatggtccatggatttggctgttggacgagttttctgattactatggaatatctgatgcatatagaaaattgaggtgaacaattgttttgcttgtgtatagtcaatgatgattggtgaatataattatacatgatagaatcacatcatatgttactttttacaggtacttgtcttacatcatgaacgtggcaataccaaccaaggattgtttggaacttatatatgaacttatcgttccagtcacaaaagcacgagaagatagaactttaacaagacaagaggtatcatctaagttctctctatatattattgcaaaactcggagaactcggagataaaattgcaaaacattaaaatgctcggcaaaatatttaccaaatcatgtccacaaaatacactgggcaaattgagaaccttctacaattccaggtttcagtagtacacatcagttatcgtgttttgttctttgttacagcgaagtattttgatagactgtgaagatcggattaagagtctccttgcagctctgtttgaaaattacaaatcactggatgaatattctccaactggcttgtcagatttatttggccccataacagattctgctgcaccagctttggcacctgctgttcagatattcagtgtactgcatgacattctctccaaagaagcacaag

SEQ ID NO: 41621 - DNA, 464 bp, Zea Mays
gcgccattcaccatgctgtccagcatccattcaccaccgccgtccacgcccctcgccctgggacctccgccaatccgacatgcccgcagcgcacaatgatggaagacacatcccgtagtccccacccaccaccgccacccccaccctcgcgtcatcccccacccatctgcaaccttgctccctcgtcgtcccccacgatgggatcacccctcccatcgacgcccgaccaaggagcggacgcagttaatcagaggttaggacgggtgcgggatggctaggagtcgtcgtccagtcaacgacatggaacatcaacggtgacccctgcaccatcgctgccacggatggcacaaaaatcgacaacgacctcacttcaacccagccatcaagtgtgagtgctccatctagaacaacgatactgtttgccatgccaccaagctgaattggttgtgtttgtctctacgtgg

SEQ ID NO: 41622 - DNA, 445 bp, Zea Mays
agacactgaactaagcattattacagactccgactctgtcaatctagggatccaaatctatccgggtcctgcagtctggggtaccgtagtcgaagtgaccacggggcggtgaacggtaagggtgctgaatcccgacaggggtaggagaaccaccatccagatagtggcatgctgcacactcagcatgcaattctgcaaccttcgcccgaaccttgcccaacttgtcaagggcgtggtccaactctgtgttgagtacggcggccaggttgaccatgctatgtagcctaggatttccctcaccaactggagagacaataacacatctagcattgccggtcgaacggcgagggtagtactttaggtcaaggccatcagctaccccgctgaacaatgagcaacactgaaaaagtgttcgtcgtgctgcatcttgcatggctgcctcggc

SEQ ID NO: 41623 - DNA, 306 bp, Zea Mays
gttatgtcaaggcttacacgcggtgaagaagaggatattgccaagggtgagataagtaaaataccgctctcaaattgggataagagattggagattttagataacatacataatgtaatcaccaaggtatggtcgagagatgggaaaggtaaatgcaacactaaacagaagcacaacaaaggatggagttgagaactcgcaagcgacaaagaggaggatacgaccaagggaaaaataggtaaaacataactcccagattgagatggaaaagaggagaatttaaagggcaggtataagataaacatc

SEQ ID NO: 41624 - DNA, 694 bp, Zea Mays
aaattagtagagatcctaaatcatagggatcagtttccttttagtagagatcctaaatcagagggattagtttcccctttctgttacaccgtaggctataaagccttgtagctggctcctttgtgataaaggcaataacacagtcatttcctccattctccctacaactctcaagccttcggaagaggggtaaaacctcaccggagaagacggaccgagggtacgacctacgtagccgagggcccccttccctagactctaaggcccttgacaacctggtatcacggtcacgtcgatccgagacttccaattcttccgctacttccgcagcaaccagccacccagcagccctcaacaccgccaacccacgctcatcacccacctccaccgcacccccaaccagcgccatgtccgaacccaccatcgccgacctcgccaagttgatcgaggggctcaccggcaagatcaatacccttcaaaccgacatcgacacgatgaagaaggacaagacgtcgtcctcaggcgcccaggtgccgagcggcggcttcgacgggcaacaccacaccgatcggccaccgcgtttccagaagctggacttcccgcgttacgacggcaagtccgacccgctcgtcttcatcaatcgctgcgagtcgtacttccatcaacagcggatcatggaggaagaaaaggtgtg

SEQ ID NO: 41625 - DNA, 477 bp, Zea Mays
tggggggaatgacagcgatggacgaactcgaggctttccgcttgggcgccatctcaacctcgccggcgagcgggagcggaagtagaatcgcaaaagggcagagagggcctagatgcaggaaagcaagaactagggcacagaatgtggagatgcgcaacaatgcagtacatgtggggttttcctcgggccagataccgtttccaaaaaatgtccagtcatcacccgtcggttatttctaaaatgctagcgtgccatgtcatcactcagctgctatttctaaaacgctggcatgccatgtcatcactcagctgctatttctaaaaaagctagtgtgccatgtcatcactcggacgttatttccgaaacggccgacgcggctcaaattgactcagctgctgtttctaaaaacgctgacatcatctgacttcactcggctattaccttcaaagtggccgacgcggcccgttctaactcgac

SEQ ID NO: 41626 - DNA, 617 bp, Zea Mays
tctcgccggagctcatacaccgtcgcggcgccacacttcgtcgtggccgggccgctcgagttcccttgccggtgagtgattcacccctgtgtcctcgccgtgttcatctctatcttagcgtgcttctcgttcggtgcttgggtcgccgggggtcgccgttgtgcagggtctgccatggccgccgccgcggtgagcgtgcgcgcttcgcggcttgctctctggcatggggagagaaatagctgtgggccattgatgcttgagggaacggtcaggatagggtgcatcacgtgcgttgatcagcgaaggagtggtcgggattaggttatcaggggcgatgcgtcaggatgcatcacaaccgtagatcagtggaggaacggatgagactggactatgggtattcatcgtctggaccgttggatggggatctaacgtaccacagcgcgtaccggctcgggtcgtggataatttaatcttagccctccatctgtgatcgcacggctcagaatagacgatacctcttcggccgatctttatgcagaaaagcccctcagttttcagtgaaccaacccgcagtccatgcgccagtagtctgagtctcgggtaactttgtagtttag

SEQ ID NO: 41627 - DNA, 846 bp, Zea Mays
atgtccttcggtcttaacccttgcacccacgcatcattccaaaaggacacctttgtcccgtctcccaccgaaatcgaagtcgctgctgcgaagagctgtcgttcttttgtcgtgcaagggagttcaaaggccgtccagaacctagttgatgaagcccaatcttgccacaaccaacgcaaacgcaaggcccttgcaaatttggttaaatgaaggatacccaagcctccacactcttttagccttgcggaacggatccaatttaccttgcatttacctcccgtaatttgtgcacacccagcccaaaggaattttttccttctcgaatcaattaaattcaatatttccttaggagcccgtaaagcagagagaaggtagattgcttgggaggtaatgactgacttaactaaagtcagtctgccagccatagagaggtttttcccattccagccattgagcttgttcgaaattttgtcaattaagaactgaaattcgctcttcttcagtccggatgatgagagcgggaggcccaggtattttaaggggaaggtagcccttctggctggcatattccttagggccgcgttgaggtcaataccttgacaacagataggcacaactgtggacttatggaagtttgtcaacagccctgacgcctcaccaaatagcccgagcagctttagtattgtctcgacctcctctttttttggtgcaataaacaaggccgcatcatcaacgtacaatgagagacaaggcaaggcgagcggcccctaattttgctgagaagtcccgtctctattgccaagtctaaaattttctgcaatgggtcaatggcaagcacaaataaca

SEQ ID NO: 41628 - DNA, 456 bp, Zea Mays
tgtagttgcaactcagtacgcatgctcctgttcaatttcctgataatccttgtgttgcagattaaatacaggaacatgacccctgaagcttctattttattgtcttgaagtgaaatggtaatgtactttcttctattgtgtgggcaatgcagatgcgccaacagagagaaaccctaggaaaacatgccatgcactttcttgctggttatatttccatgttttctagacagggtccttttcagacagggataacacgatatgttgacttttatattcaagtctaggctttagttttagttatttcaatgggcgctttttttgttagctactggtctacctctcttttttatcttggaattgaatgtaatttggttgtctcagtatgtagcaaattgaaccttatgttcatacatgaatatatattgttgctggtagtctaggatcggttttcttgct

SEQ ID NO: 41629 - DNA, 305 bp, Zea Mays
atattttcctaacattggaaccattagtattatgttgttgaccttagggcaaacccagcgccagagactcccgcatgagtgaggtccggggaagggataaactgatgtttttaatgtgatttctgtgcaataatgtggataaatctattgccacacttcactataattactacatgcttatcccattttataaagtgcaagattacctgagatgctatggtttgtatactccacatcaaactgttttacgatatagctaaacattgataaatctgtctgattaccttattgcagttcccagtaag

SEQ ID NO: 41630 - DNA, 555 bp, Zea Mays
cgcgctcgtgctcatcgcctggtcccagctcttcgacagcgaggtcggccgctcccgtaagaccgccaggatcctcaactacgtctccaggttcctcgcctccatgctcatcggctccgtcatctggctcgtcaagaccttcctcatgaaggtggtcgcgtccacgttccaccggaaggccttcttcgatcggatccaagagagcgtgttccatcagtacgtgctgcagacgctgtcaggcccgccgttgatggagctggcggagaatgtggggcgcgagggcagtggccttgggcgggtcagcatcagcagagccaaggaggagaaaggcgtgccagaggtgatcgatgttgttaagctcaggaggatgagtcaggagaaggtctcagcatggacgatgagagggctcatcacaacaatccgaagttctaggctgtcaactatatctaatactatcgagagcagctttgatgatgtagatggcattgaacagaaggataaagagataaatagtaaatgggaggccgaggatgcggcatatgccatattcaaaaa

SEQ ID NO: 41631 - DNA, 775 bp, Zea Mays
ctaccgctatccagtggcgcacaaggacgagctggagcgtcagtgcgccaccatgctcgaccagggcatcattcgacggagctcctcggcgttctctccggtactgctcctgcggaaggccgatggcacatgaagtttctgcgtcgactatcacgccctgaacgcgatcacggtgaaggacgcgtacccaatcccggtggtcgacgaactgctcgacgagctccacggcgatcgtttcttctccaaactagacctccgatccggctaccatcaagtccggatgcgcaccgacgacatcgccaagacggcattccacacgcatgacggcttctatgagtttctggtcatgccgttcgggctctgcaatgccccgacgacatttcaggcactcatgaacgacatcctgcgaccgttcctgcgccggttcttcctcgtcttcttcgacgacatcctcatttatagcaggacatggaccgatcatctgcgatacgtgtgcgccgtcctcgacatcctccaccaccaccacctcttcgtcaagcgctctaagtgcgagttcgacgtcacctccatctcctaccttgggcatgtcatctctgtggcaggcatcgccatggatccgaccaaagtccaagtcgtcgtcgagtggccgatccctcgttccccacgagcggtgcgcagcttcctcagcctagccggctactaccacaagttcgtcaagacattcggagccatcgccgcgcccctcaccgctcttctccgcaaggaggggttcacc

SEQ ID NO: 41632 - DNA, 299 bp, Zea Mays
cctcaaccaaatcgcgctcgctactcaagcgggtagcgtaccgaagggccccttcgtcatcgtcatcctccgccacctcgaatcgagggaatgccacataacagtgagagcacagaatggccggagggaggccaggcaggtcttcgacttctccagaagacacatagaaccaaaaatcccaccagttgccccacttattcatgatacaagggactatctccacgacttccaccgaagtctttccagtcctcggcgtgaaggtgcacgatccaaattgtgcaatcttatttcctattttc

SEQ ID NO: 41633 - DNA, 387 bp, Zea Mays
gtcgcaccagaggatcttcttggttgttgcccactctgctactacgtgctctagtcctcgagaatgtttattgttgcagattggtccacgcacgcgcttcatgcgagcccggtcgactagacacgcttggaagatagaaaacatacgagttcatcgctgtaaatggtagcaatatatgtatggttagtgtctagtttcaacatctccctttaagtcggacgaaaattatctcccgcggcttgtctatcttcataatatacactgaaaaaatagagactaaaatttagcacatgtaatgttaaatcggacaatggactcggatccagacaacaagaacatgataagagtgatgtggccccgagctttttttacaaccctagtataagg

SEQ ID NO: 41634 - DNA, 358 bp, Zea Mays
ctggtgcttgatagcgagagagagagagagagagctctggtccgttcttatcgcctcgttgcgaatccgggctgtcgctgaaggcctgaacccgataagccgtaataacatcacatttcaaaatctactgtgcatgcgtaataacacctgaataattggacacgatggagttacaaaatctactacatcacagttcaaactgttttcctgtcgtgctgcccttgtctttgtcatgtagtgaagtctacacgccatcatcggttgatttcaatcgcgactgggatgtatcatgcatgcacgcgtgatgagcagcagtatgtagtccatctccgaaatccccacgaaacgaaatgtcttc

SEQ ID NO: 41635 - DNA, 353 bp, Zea Mays
ggagagcgtgcggtggccgggaattttaagaaggacgtgtggcggtcggaggtagaagaaggcactagcgcacttgaatccgtggctaacgtcgtggcaacctcaccggcgacgatgggacgacggtagggagtcacgatgatgcggtagatggacagagacacgcggcgggcaacggagaaggtttgacgacggtgagaaccttatccacgggcggtgagcaaaggggaagggattacggctggccggagtggcttctaggtcaccggcggcgaggatttttactgggctgtgcttatctgatggccacggcgcacgaatcacagcgagcaacaatcaacggcggtagcacg

SEQ ID NO: 41636 - DNA, 708 bp, Zea Mays
gcgctcccactcctagccttgcctgttttccccacccagcacgcagtagcgtcgtcgccgttgtgaaggtcattccaccgtcaccatcgatctccttccatcgcccttgtcaccatgagcttcgtctcggtgccaatcactcgggacttgcccccaattcccctttcaccctctggtttgctctgctcatgctcacctgtcgttccctggtgcagtcccatcactatcgtcgttgttcgaagctgccaccgtgtcgttgccgccttcgaggggatctggggtctcgccttgaggttaggaacctcccttgccccctccatttctctctcttgatcttgattgcacgcgattgctcaacaaagttcccaacatcaccgtcaagctgacccaccgtgaaccctcaccctttggtgcccctaccctggttcaaccccccgccattgggttccccgcacccttccacatcatcctagtccatcccaatagctctaagacccatggagcgcccacacccctcgtctccgatgagcatcttgtcgcggacacgggtggtgccgcctttggtggcaggagaaaaggactgaagccgaccgctcgatccctactgttaaccccagatccaaaggttggattctaactaactcgagcctaaacctaactatttgcccaagatccaatggtccatgctcgcacccgagccagcccaac

SEQ ID NO: 41637 - DNA, 555 bp, Zea Mays
tcttcattggtacaagtgatttaattcaagagcatatagcattcagagtatggctgcttgtagagagctgggaaatgctgaaggataccatcaccaagtctagcgaaggtgaactggtctggctgaaatatacattcaagtatggggataagttcgatgagccaaacgatgactggctgaaatgcatcgaagttacaagtgatgaactacttggatcatattccaaggcagaagataatgcattatccacagccttcggaagttggggaaagaagagattgaatagagtttttgatgctataggcttcgtctaccccgactatcgctacccgctgcgggggcaagggaagaagagaaaagctgctgctttggccgccccagctgagcctgtgccgaaggctgcgggcaaaaagacgaaggcacttacccaccggtcgcattacattgaaccagatgtggtgcctgagtttggcgaggaggcctcttcagctgctgaatcaagagaaactgttcctcccatgcagaggactgaagagccggctataataccgaagg

SEQ ID NO: 41638 - DNA, 541 bp, Zea Mays
cagcgcccgactgtttgcatgggctataaaatggaccgccacctcaatcgatagtcctcctagtacacactagagcagtcgatggcctcctccatttcactgctcgtcaccatcatgttgttgctgctgctgccgtcgtcacctgcttgctcctcgttgagttgcaggcttgacttcaccagtgtggcgctgcactcctgccaggagacggcaccacaaaaccctactgccacatgatgcgacgccctcctctactccatcgacatctggccaattcatgaactagaaaaaggtctttgctgcctatgtgtgtacatggtttcaaggaacactacctttgacctgcctacgtctcatgcgggggtaaagactcaagtaatgtgctgcagtggaatgccatcatccctcgccctatagactgcaacggtaagtcacggactttccttaattaatcatgtgggggtaaagactcaagcatgcgggaatgcagcagcagcgtagccggcaagcaatgctgctgttgggctggtagtggtacgat

SEQ ID NO: 41639 - DNA, 464 bp, Zea Mays
atctgatccacttataccctgttcaaaccctaattttagagctcgggtttgtattcttttgttgaagaaaatgggagaaaaatctaatttctcttttactaatcatcagccctatcttcagccgcttggggcttctagccttttctgtagccggcattgtcctctcaagaatggatcccatgactccttaagggccttatcctggtgtaaatcgcttaacaggagattctccaaccatccttatcctttcagccaccatggagcctagttttcctcccccacacgtgagatcccttcaccagcatctctcttcctcaagcgccatccctggcttctcccatgccgagcgtctcaaatgcccaaacctccaaggccgacgtcgccctgctcaggtccaaccagctccccttcctgttgttgtgtccagccgatgcccctccctccatcttcctctctacagcaac

SEQ ID NO: 41640 - DNA, 323 bp, Zea Mays
ttctagtagtaagtttgggcgaaatataaacggttaaactatacgacatcggcttcaataatttacactgcgtgatttagctgaaggtcggctggaacattatctgctaatgtacattcaatttcgtcgccaaaataacgtgctgaagaaacaatccaataaaaaatccttagacgcgatgtcccggttgacgagaggcgactaaattattttacaccccaaaaacttagtcgtcgacttctgataattttttaccagtcatttatacccgtcatttgtatctgggcgagacgcaattggagcgaaccacgacactggcttcg

SEQ ID NO: 41641 - DNA, 377 bp, Zea Mays
gtcgtcgtcgtcgtcatcaggaccgtgcggtgccaaggcgctgaagctcgacgccggagctggaggtggcgaggttggcactgagctggtcctggcgacccccacctactgacgagttcttataaatggacagatgaccactgaagttttgcctcacctcacctcaccgccattaacccatcgtcgcctcacatctgagaacatagcacacatgacaggatagctgcagattacctacccttttacctttgctttaattgtcagtcagtagccgtcactagtctcagttggaacttacttgcaggtgggtttacttacagctgagcaccatgttgctgctgcttaatccctacagtagtttgtacttttggttggag

SEQ ID NO: 41642 - DNA, 296 bp, Zea Mays
cgggcaagggaggttgtcccttgctggtaggcgtctaagtcgacggcttggtgatcaccggtgccaaggaagaacaggtggaggtgttcaagcttgctttctagatgaacggcctggggccactctccttttacctggcgatcaaggtccatcgggacaactttgaaatctcactccactagaccgcctacaccaaatgccttgtcgagctggacggcctcaccaactgtaacccaacctacactccatggaagagatgttgaagctgcgccatgatagcaaatagcatagtgaag

SEQ ID NO: 41643 - DNA, 405 bp, Zea Mays
gtcggttcaggcgactgaagaacaatctccatggtacagtgctttgagtggatcagtacgccagattagctcgccatcattgatcgccgtcccgattcgtgcgcggtactggatggataacgccggggaaagggtaactcgtacgtggcaccatctcctgagctcagccggagttattcaccggcggccaccgtgactcagtgagctctcgtcgtgctgtcgcacatgctttgatttgcctcactgtgcctcttccttacgtggttgccatgcgttaacagcccacctcgtggccgcggatcgatcaccggaccgtcgtgcctatatataggatagggagccacggcgaggtgctcgcagttcttcaagtaagcttgagtaaaaccaggaattcacacagtctcc

SEQ ID NO: 41644 - DNA, 300 bp, Zea Mays
cgaggacctggaggctagagccctgtagccatgacttagctaggactccactctgtaacccttagctccacttccaccccgataagatacttgggagcctctcctccctcactcacccgcttgtaacacctactacgagttttgatcatcaatagtgttggtagcgcaatttgtcgatgactgggagtagggacgttcttcttgaaccaatataaatcttatgcccaccgcacacaccctcagaagcccggaacgcgcacaatacatttacttgtcgaagcaaagttcgaaacaccgaca

SEQ ID NO: 41645 - DNA, 276 bp, Zea Mays
ctagttagttggatattcttctacaagcagtatctcatgctctatcaccttgcactcttctctcgagtcttgcggagtactaggatgatgtatctcctgtacaaaaacaccaggtggaacctgagctctggtggaacaaagctttgatagtggatcgatcgctataatgcaatctatatccacatgatgaaacttcaggacttcgaacttatcttcaatctaacggattgcagcacaatacttgctcatgacctccatggaataatcccaatcttt

SEQ ID NO: 41646 - DNA, 529 bp, Zea Mays
ggaaggtgaggggtggccgccggacccgggtggatgccagcgtgggctggtggggagtcaaagcgtcaggaaggcaatgcaaggcgtcggcgagagacaaggagacgtccatcccgccaacccctgaagtcaatgcaactcaaacgtcatgttataggaaatagaatggaacatttaagttagacttggaactacaggacttcatttttatatttctaggtagggttaggactcagagtatggaagcagaagcagtgatatgtagctattggcaatcacactcagattatggaagtagtgatgtgtagctattggcaaccacactcaggttattgaagcagtggccaataggtatgggcaatcggcttaacctacagaacttggccaagatcatacagttatggaccacagcaagtggataattctaagacaagacaatgtgactggcagcagtcaatgtgatagagatagactgatagcgaccttgttttaaatatgatagctgacaacctttagtcaagaagcccat

SEQ ID NO: 41647 - DNA, 377 bp, Zea Mays
gtgggagtgggggaggtacgatttgtacctcttggtggtgttggtatgcgtgattgggtggatgcagaacggggccatggttgtatggttgtgggggttgttgatatgtgtgtgcgacaactcttgggttgtcggctggttgcgcccgagacatcctgtctctagtggccttcgtttccgggcagtcccttgttgggtgcgcgcagtcttcgccgtggaacaagcagtagaatctgcgcggctgctgcgcccatcctcggccccgaccacgagttccgttgccgtggccctggggggataatcttggcggcgaggggcctcaccagcggggtgttggttggctatgttgtgtacctgctgctgactgcggccgtccc

SEQ ID NO: 41648 - DNA, 273 bp, Zea Mays
ttcgacaccatggtcaatctctggcttatctagtatatcaattcaagtgttggcacccgtcctttaccactcttagtccatcgatatggaccctagttgacctttacctttgtcgtcaacgtctccgaggtccaaacatgttgcaccgaggtccaaacatgttgcaccacgcactcatataatagttgatccataaactccactaaagctggccatctcctagataatcacccatcacaactgaacatagtaagcacatatgttatgtgttcg

SEQ ID NO: 41649 - DNA, 279 bp, Zea Mays
agaaaatcgacgaaccttaatcgtgtctcaagctataagacgaagcatcgtccaagcaccaaattacctccaagtcgaaaactggctagaaagtagaaaaggcgaagtctataaagttctccttgccaaccaggacacgacaccaatgatgctattgttgccggtccatggataggcagagtcttcatccaaaggaagctagcagagtagagcgggatggatgcctccaaaaagcaaatgacacccgcaagagtcgccgtccagggttttgccttgacc

SEQ ID NO: 41650 - DNA, 357 bp, Zea Mays
ccgactgtctccctgaccgtggggggagggaattcccatgattctccatgatgaaccattccaggcgccatcccttgatgctatccttgagtgggatgtcgaggtagtcagtcttcctcccacggcgcatctccaagctcgcgccccccaccagctggtgctgccctccggccatcctaggccgacagtggaacaaatacttccaaaggccaaagtggggcaaaacaccaagaaaggcttcgcatagatgaacaaaaacataaacttgaagaatggaattggggttcagatgggtcagattcaagcgatagaaatcaaggagaccgcggaagaaaggagaaatgggaagagcaagtc

SEQ ID NO: 41651 - DNA, 313 bp, Zea Mays
aacgatctaaacaagtttagtagatgatggcttactaaactcccctcagtgattttgagtctaaggaaaaccctgagtcgggccacgggattcacgctgttcttcctggtctatggggtcgaggccatcatacccacggacctagagcatggctccctgaggctacaagcatatagcgaacacaacaatcaagtcattcgtgaggactcactggaccggctggaagaggctcaggacatggtactccttcatttggccaagtaccagtaatcgctccgacgctaccatgcaaggtgtgtccgacctcaggaat

SEQ ID NO: 41652 - DNA, 364 bp, Zea Mays
gatgaatggaccctcccactttggctccagcttgccccgtgactctgtccgggtggttcggacgagtacgaggtctccttcgttgaactctcttgggacgactgcgtggtcgcgctaggccttcgtttgagcttggtatttgttgagggcctgcagggcgaatacgcggtctccatcgatgaggtctttggacgttggttcgtctacgtcggggacggctgatgcacttattcggggtgacccatgctttatttcctgcggggtcatggcctccgatccatatagtagacgaaaaggagtgaatccagttgcccggcattcagtcgtgtttagtgcccagactacttcaggtagctggtcggcc

SEQ ID NO: 41653 - DNA, 287 bp, Zea Mays
gggacctcgacgtaaatacttttaacagattaggatggcgggttgattaaaccaaatctcagggtctctttattaaaataccacgcagttgaggactcagacgcgcctgggccataggatcaaagatccacggtccatatcaaatacgtgaaggggtatgaggaggttctaatcctgaacctacagctccaatccgatggaccctatatatcctcaatcttgttcgtggatctatcaatctacggctcagatcttatgaggatgaaacggtacccgaatcaatctcg

SEQ ID NO: 41654 - DNA, 363 bp, Zea Mays
ggaaaaagtatgaacttgtacgacttccttatcggtttaaattccaaaaaaagattcagcaaaccctacactgaatggttgcagctaatagaaacaatgtgcaaggaaattcttgggaactacacgaagaaagaatgttagttgatgacaactgccttcggcacccatgaaaaatgaaggttgaatcgaggtgatggatgctcttaactttgaatatccagattacgacaggcttgacgaaggggtcgggggagcaaagagaaaaagggttgtgagtattctgaaaaggcagccatccggtccatcaaagaagatcagagggtcgttaagaagcagaaagttctagcggagtcgaaggattcg

SEQ ID NO: 41655 - DNA, 522 bp, Zea Mays
ctactaacatatatgttgatctttcctgacataggttgatcgatggaggtttctgcggcataacagttggctccggtggcgatacattgatttgtccaaggtattttctttatatttttatgctcattcaagattttatatatagttgatacatgttttgatcatgcaactataaacagggtggatggaagtgtcacttgcatgatggttaattgagtctatgctccaaggaagctctacaacgtaagattttagattttacttttaatttttcaagattggtatatttgactaacatgttgattttgaattatagaattgtggaattgtttaagatacctgtaaatcctgggatttgtgttaagttgatatggtgagctatattctgcccctccttagtcaccatggttgggctcaccacccatttgtttagtatatttaaatgtaatatgaactttattgtagggttgactgttttgcattggtggataagaaacaactgatcagcatttacaaacaaaa

SEQ ID NO: 41656 - DNA, 275 bp, Zea Mays
tgcaccttcactttccagttcattgttaaattcctctttcatctttcggtacttatcctgcttcatcaataaccatctgtgtcccatgaacaccaacttcttggatgatttaaggtacaaggaagcagtttcatcgacgcacactacacaaccattcgttcattccacaactttgtcatatcttccataagaggctccaggaacacatcaatgtcaacaccagctgctttcgggccttgaataagaatagtcaacataatgtactttcttttgtg

SEQ ID NO: 41657 - DNA, 302 bp, Zea Mays
ctctaacaatatcaataatatgatgatggaatttatggtgatcataataaactaagcaaatttgggaaaggcaacaatgacatctttgggtgcccacaagccatatgatacggaatgcatccaatgtgtttcggttacaaggacactacatccaattgataaaatatacctagagtccgagttgaactgcacaatgaaggcaatgacgagaaataattcatttcaccagtccgcactacatattggactaacaaaaggcatgagcaatatgtaagtcattaaggcatgccattaaaagcatg

SEQ ID NO: 41658 - DNA, 852 bp, Zea Mays
tcgtgatatatccaccatccgatcgaaccttggcagtccagattagatcggcgccttcgcgaaccggtacaccactaacaaccctccgatttcaaattaacgcctgagatttaaaactctcagatctattttcaagcgcccgatccagatcagacggctcacatcggatctgggcggaccagtatacatagatctaatcctagcctttgctcagaagatcaagggttcacgacgctctgcccgaacacaacgccgacgacgacggcaaccccacctcagcggcggcgccattgccaggatctaccagcactcgactccacgcctaaacctcgatccgaaccgggatacacatagcaagggcaatggtatactactgaaacccgtactcaccagcggtgacgccgcagaagcctcctaccacggagttccctgtcacgcgatggagtttgaatgaccgcgaggacccccggttggtcttcatcacccgacaggctacgatcacgcgtggcccaacggtggttctccctggtatttcgacggcgcccgcccaatggtgtccagcgccatagcatgatcttcacccctcggtctcgctcacgacggcggggcgcagctgcccaggagctaaaggaccatgcaatcggtagatggcaaaaggaaattgagggcgctcggttttatagccccctggcccggccaaatctccaccccgcgcggccataacaaactcctagatagcaatttctctggcggttacaagaatctgagatctctgttagctgagcccaaatcacacgcgatgaaaacaatggcttctgacaaggcgtgcccaccgtacaaagaaacaaggac

SEQ ID NO: 41659 - DNA, 322 bp, Zea Mays
atgccccaaggtggttcacggctcaatttaaagggatggtgacatggctggctacccgtggtcactaaggtacgacgctagtgcatggagacgatgtaacaaggaagcacggtgtggtagaatttgggcacgggcgacaccacgacacgagcacacaagccacggtgcaggttggtgagatgttcttgccccttccccggcctaatcctcaagatagtgaatcggctcaaagctatcccgccctggccatctctatctcctcttcgtttggacgcatctagattccacagcgacgtggatcttttcttcagatatttcccag

SEQ ID NO: 41660 - DNA, 790 bp, Zea Mays
tgaaaatcaaagatccaggctcctgaaatcactctgtcaggcaccctgataagaagtctgatggtacagtgtctgcagaaagatcttcagattcatccccctcgtcgccggtgaccttgtgcccgaattcacgccggtcgtcgtgattcgtgctaggcgcgcagtggatatcaatggggaagtaaaaagatctcacgggggagtggatttggtcgcgaggtgaagcttatcaccgacgcctgtagccatgcgacatggctggaccaccggtgtcaccgtggtacttcggcaacctcagttatgccatgccatagctctttaccgcctaggcttgccattttagaaccattgcaccggcagacgccacgactgagccgtcagtgacctcccctctctttggcagccagcacgccattccaaaattaggagccatcgcccggggacactataaattgagcataccactagctccgttaggtaatcacgaagctagagcacctgcccctgcctccgattagccaaaatagctctctaattcctctttcccccaaatcggtttttcgcaccccatgaacatctcgcagtgaccgaccttctacaggttagttcaagcctccttgattaatgttcttgcctccctcaagtccctgatactcatagactcattggattgaactagaccgctctggatcaccatgaacacgtctgtttgttctcggttttcgctgttgtcgtggacagagtgttcccaacatggaattgtgcaattagtagagagattcatgtcgcc

SEQ ID NO: 41661 - DNA, 376 bp, Zea Mays
tcggggggaggcgccgctacgggcaaggaacgggtgagcgagattaacaggggcgtgctaagcaaggggggtgagttcgatcagaattaaacatggggttggttcgggtgatggatagcgtcgacgtatgtgtcacacgtggaagcgatggatcaaaaggcccatcacctaaaccagcatatcgacgctaattaacccacccaccgaaccagtcacaccagcgcgtcccccgctcggccatgcatcgtccggccacggcccctactcgcgcgcccactcagccaagccccgctaatcgcgccttcactcgtcgtgcctccaccacaccccagatatctgcaatggctaaagtaactattgaatggctgaagtaacc

SEQ ID NO: 41662 - DNA, 994 bp, Zea Mays
tgtcccttacctctgttaggcattgaagtgtaagattctgataagcagccatagggaagaacttcagtaatgtctccagctaaataaaaaataagaagaaaaaaggtaaggctcagcattttttgtaggcacggttggcattcagtcactcacaaagttcagccatcaacataccaacggtgactcaaaaatgaatccaattgggatccatgataagaaagcatggagtgtcgccaatgtagcacggatgagctgtggcctttgcgttgcagataagacatacaagcatagctcatgaatgagccggaattcactgaacaaagaaaataacatataagttaaaacagaagtatccttgactaaagagccaagtaacttttttgttaaaacatagattcacgaataaattatcacacagcacatccaaggtagccatgaaaatatagaagttgacaacaaacccaacctattaagtgaagacttcagttctttgatcttttgttgtgtcatttcacctcttgagaagtcaaaaatttcttcacttagaagctgcatgttattaaattggatatgcataatgggtccaatatgtaaattaaagatgtcaacgaaaatgtcaaaactgaaaatacagacaaaataacttgccttcaatatagccatgcaattttcacatatagtttcactactctttgcagctgcaacaagatcaggtacgaaggatgaccatctggcaggccactcatgtttcaggacctatcacattgcaaggaagcaccatgagaaataaatgtatcaaaacacaaagcatcatatcaatgttgggaacaagaacattaaaattcagcgcatagtttagatgaccttgtaaagtagctgccaaggtgaagaaaaaagaaaagctaaatgtgcagcttacctgcaccaaaataatattgagtttattgacgtaaagcctctcctgccgaaaggtaacttcattgctagaaagctg

SEQ ID NO: 41663 - DNA, 447 bp, Zea Mays
tttcccctttctgttgcaccttaggctatacagccttgtagctggctcctatgagagacaagcaataacacagtcatttcctccctcatccctaccactctcaagccttcagaagaggggtaaaacctcaccggagaagacggaccgagggtacgacctacgtagccgacggcccccttccctagactctaaggcccttgacaacttggtatcacggtcacgtcgatccgagacttccagttcttccgctacttccgccgcaaccagccacccagcagccctaaacaccgccaacccacactcatcacccacctccactgcaccccagcccagcgccatgaccgaacccaccatcgccgacctcgccaagttgatcgaggggctcaccggcaagatcaatacccttcaaaccgacatcgacacgatgaagaaggacaagacgtcgtc

SEQ ID NO: 41664 - DNA, 319 bp, Zea Mays
gtgtgatgtattgagcttgagagcttgtatgaacttgtgagcgtgagagtctaagtgagcttgagcctaagttgggtctgccttgtaacaccatgtgtcctcccttttatagctcaaggggggcacgtacaaggatgctgagccccgacatgtgggcctaggggcaaaatggagggaatacgagcgccataatgttcgtagtgtatacaatcttgatatcctgcgctgcttcctcggtaacgtgcgagtgatgatgagcatagtgtacgccgtagcacgggcgtactgcctgccaacggaatggacaggcacgccgcct

SEQ ID NO: 41665 - DNA, 328 bp, Zea Mays
cttgtgtaccacatgagatctaggccttcgaggactatgatgaatgacttggccatggtggcgtcgtctcccctagaggactccactgtgacttgatagctcatgatgtattgagttgggtctgcattgccattgtactttgggttggtgcctgctctaatgttttggggctaggggaggccaggagttgtggtgcaagagggctctgttcatcaaggtaattcaacccttggaaggtagcggccacgtggtggtgaggcacagagtcatgtcgttggtaaagggggtcttcaccctgcatgtctgcaatctgatgctccaattctct

SEQ ID NO: 41666 - DNA, 521 bp, Zea Mays
gctggattttatagaaaatttgtcagaaattttggcattattggtagacctcttttcaatctgctcaagaaacatgtggtgtttgtatggacagcagaggatcaaaaggcttttgaattatagaagactgctctgataacagcacctgtcctagcgttaccagatttttctattccattctgtatctacactgatgcctgtcagactggtgtgggtgcagtcttaatgcaacaaggacaccctctcgcattcttgagtagagctttgggtcccaaaaatcaagggttgtcaacttatgaaaaaagagtatatggccatcatcattgcaattgctcaatggagatgttacttacagctagcagagtttatcatatacacggatcatagtagcttggctcagcttaatgaacagcagcgcctgcatactacatggcatcagaaagtctataccaaattggctggcttgcagtataaaatcatttacaagaaaggagtagagaatacggcagctgatgctcttt

SEQ ID NO: 41667 - DNA, 296 bp, Zea Mays
ctcggaaggacccgcccccaaatagccccaaggcaccgagctcgggatcgggcgaggcgaaggcagaagggggcagggggtcgagtgaaccaagagaaagccactcgagtggaaaccacatccgaccaaggactgacccaccataaatgactaaccacattaactgtgcctagcaccgagccacggtagggaagttggtcctccttccactcatgacctacaaggccattgacctgcaacccactcatgacctacccagtctaggcctgagtaccctagcaatctatagggcccgc

SEQ ID NO: 41668 - DNA, 353 bp, Zea Mays
ggattaagaagtctcaaactcgtcggagacgtcgactagaggaagaagaagacgaacactgaaagcttaccgtaaccaaatccgtgagcgaaccaccagccaagcagccaccaagtgaggggaagccagagctcagaggtggagggagcggtggaggaccctaccggagggcggaggcgaggcggcggtggagacgaatcacccccaaaatcgcccccaaatcgtagacggagggaaggagggcgagagacaacgggcgaggcgagcgagtgagactgacgaggcggggcccgatgggggagggggcgacgagttttaggttaacaacagagcgggctaaacgtgcttcgggg

SEQ ID NO: 41669 - DNA, 1789 bp, Zea Mays
catgatataaaatatatagaaggaatgtgaagggagagaagattgaattggtcagcatgcagatcgctcagaacagcggggcaagatggcagcggcgatcgacgtgatcggccatggcgatgctctgccgcagccacaggttgagagggatggacggattcgcgacagtgagtgaccatcgtccctaacccggtaactcctgttcatcctagcttgcaactaatcaatctaatgtgtctatttgtttcaaaaaaactattaatttgtcccaattaaccagaatgcatgtatggtgcaggcatgttgacgtttctcagctgaggcgtgtagggacccaaaataaatggctcccgacgaagtgatgacaaaacaaatggctcccgacgaagtggcttaaaatttggatatgagggagtagaaaccaagcctaagtgctttaaattcatatatgaaatgtacggcaatttccatgcacctttaattcatattatagaacatctaaaaatgcatctctgttttcatagaactactaccttacgttcaatcttccaagtttgtcaactagttaaagaagggacagacccagtgccagagactcccaatgagtgaggtctagagaagggataataagccgaggcaagacttccccataaatgcggagagactgcttcgaacccacgacatggtgactcagtctcgcaccactgcaccaggcatgcccttcttaaagtatatgcaccgataatgatatgcaacaacaatgttttcaagtcgtctagtcgagcctagtcatttagctaccgaccagttgactagtcacaattagtcgtcgaccagatcaactaatcgagcctagtcaagctagctgtccatatgtttctggagatatatagtatacacaatacaacaagcatcaagatggtgacttatctgtgtgtttgctgctgaaataacaaagaatttaagtaatacagtgatggctctgtcttcgggctaggggtggcactccgtcttcggcggaggcgggcggcggcgtccttgtgctgctgcggtggccgcggccttgtgcgatgttggcggttgtacggccttgagtaccggtagcggctacgctcttggcaaaggactgcaggagcacgagtgggtgctcggcgtccaatgctccaagcttttgtcttgtgcctgttggccaaccctagaagcccacagatgcagcagcctagctccaaaagcccatctacaacgacacgtctaatctagtcatcccagttcaaatcgaacgactagtcgtgactaatcgtcgactaatcggacaactagttttcgagtcgaactaatcgcattggtgggtatggtcggatgtagtctaacaattaggctgacaaatcacgattagtcggacgacttgaaaacattgtgcatcactcctgcgttttcttgcaattgtacatgcaccacaagttccccaatcaactttgtcatatggtatgctgaaatatagttttacctaaagacaacttacagtacatagtcacagaaaacggggttcaaggcatcgacctccgtctagaagtgtcatccccgacccgagtaccaagggtcattttcaacccacccatgtaaaaacctgtctcaagtagtgtaccaagttccttgaccctgtttctcatccccatcgacccgtgaactatgtaactgtggttacagtgtcaaagtaagttttcacaaagacaaaagattacacaactggagctaaccttcattgctttgtccttaagatttggcagca

SEQ ID NO: 41670 - DNA, 272 bp, Zea Mays
aactttacaagaagggggtcagtcaacccatgcttaaatgtgtcaccgaggccgaaggcgtccagatcctgcgcgatgtccacagcggaacttgcggctctcacgcagggcccagggccctagccgccaaggtgatctgtcaaggcttctactggcctgctatgatttgcgccgcgaatcgggtgacgaggtcctgcgaagcctgctagaaattttctccacgctcaggaaacccttcgcagttcacaaagctaattgcccacacgtggccc

SEQ ID NO: 41671 - DNA, 360 bp, Zea Mays
tatgaacgctactcgcttccaataattattgggctgcgataacgctcatataagacctataatcgatcatcaagacatttatttatccaaaggacatggaatgcaatgattgacaaaacaaagtatcaatccgccatacaacagaaatcatgacggcaccgatggatgctatcaactacacgtttaaacatattaaacttacttctcgcttcgccactacaccaccctttagtcacatgaccatcgggagcatccttcacacgattatacaatagcaacctacacgtcgggttacacaatacatacatcttttcttcgtcgcgagtataaccacattacggcatatacccgcacacctca

SEQ ID NO: 41672 - DNA, 298 bp, Zea Mays
gacgagctcgtagaccggccgattggggcaacggctagggttcccgagcagcagacatgaaatcggggctaccttgatcattttccctaacttaattgcgcttatgatcaactacggagctctggccacggtggccgtgagtatcgcggctatactgccgtgttcccggcgaccagaggacctctagcttaattaaatgggttgtcgagcatcacagagctatgaaaaggcttaaacaagagagagaagaagatgagctgaccggagtacggctggccgcggtgaggttgagtttcgg

SEQ ID NO: 41673 - DNA, 488 bp, Zea Mays
tggtgagggtggatccgaagcgaccgtgggctaaccggacacagcggtcggagtgaacagtggccggagttcatccactgggtgatatttcttactccctctgcgttatccaactgcgtcgagcacgaatcaccacggcgggcgtgaatccgggcgcatggtcgccggtggtgagttaactgagctagcgctctgatctggttactgtaccattgaagccctgattcagagtaactgacaggccgaattgcaatgtctagatctcgaatttttatacaacaacttgccaatacatctctagcaaacttgtagcccttcatacaagctacaattctgctatagcaactaccctcaatcgagcaatagatcttactctaattcgacccaaaagtctggccaatgtcactggtgaccaaaattcagtcagtagagtgactgatagcacaactttgagcttatttttctccaaactctgtatgtgatcaaag

SEQ ID NO: 41674 - DNA, 273 bp, Zea Mays
ttgatggtcgcattgtggccctctcatcactgcagcgttctatggctcggagtcgctctaggatctcatggttggctgaaggggatgctaacactgcctttttccacctccatgctaaatactgcaaaggcaagaattttgttggcaatctgatttttgatgatggatcggtgaagacatcacatggggacaagttggaggttatcagtgagtttttccacaagctgctgggatgttcacctgaccgggcgcacaccattgacctggctcaac

SEQ ID NO: 41675 - DNA, 1064 bp, Zea Mays
atataaagggtgctcgaagactgtatttgtcgaatatggttaactagatgctatgcacataataattggtaacgatgatttggtgtagaacgttaaggagatgatcgcctctatggttaaaatgtttggtggtaggtcataattggttgtgttagcaacgtggaattatggtaggcatcgtcagtatccatgatgtattagattaagcgttgttatacgataaaactaaaaacgtgaatgtcatatgttgtgttccaattgagttagcccgtagatttaatatgtgtcgttcgcaatgaattattagtagggcctaaatggtgagttatgtgtgaactgtgttagagcccttccgagataaatagatttaacctatgctatgttgtcatgcaaataacctagaaaggtggtatatgttaataattggaaggacagtcgttcaaattggtcagtccaattaagaatgattttgcgtgtgaggtgaggtggtgacatgccaaagtagtcatcgctttccctatgtttataagttgagtcaatacccattaggcgttcattaaatttcacgtcgcacatagtgtatggttgtattcgtgacaaggaggtataggttttactcaattagaagtttggttgatgtggctaggaaatttgtttcggtttgggtaatgaagtggtgacgtgaccaagtagttcccccccggttatgagtcgagtctagatgtgttatgccttcgccgtgatacccatcgcatatactaattggatgtatataaaaaaaatgaaataggtgcatcatatgatttagtggtactgggattgtgatctaagtgcattatatatgtgtgatgagtgttgggcttgaggattgtcattcgggcgaagaaggtgtaatatacttatatgcgtagtatgattaagctagtaatacaaaatgacatgaataaaaattagtaagtctacttgttagtcctcatttaattaatttaactctaagaaatggtaaagtgctagaatgattcaagtctctagaatgctgcaattcttgaattatatagaaactg

SEQ ID NO: 41676 - DNA, 325 bp, Zea Mays
tggagctaggcgagcggctttctagtaggtcagcaaggtcgagatccgctttctagcaggagggggctaggagaggggtgagcagcggtggcgagcaggtcagggtgtcagggaggaaggacgcgagcagggggacgaagatcaacaaatcgcgacggctaactcggaggagaagaacacgagtagggggacggtggctgtcgcggtggtgggtgtgcccgcaagtggggtggctgtctcagggtgaggggaaggcgcgggcgtgcagggcgcgagctcggtggcgagaatggtggcgctcggaggcatgaatggcggggcttcc

SEQ ID NO: 41677 - DNA, 376 bp, Zea Mays
cttccagacacacacgggccactatgagtttcgggttatggcatttggtctcaccggtgcaccgggaacatttcagaaggctatgaaccacactctagcacctctacttcgtaagtgtgctcttgtcttcttcgatgacattctagtgtacagtgcatctctggacgatcatacccgtcatctgcagcttgtcctcgaattattggctcgagatcagtggaaggtcaagctatctaagtgctcttttgcaaaacagcaagtgtcttatctcggccatattattgatgcacagggtgtctccaccgatccagtgaagatccaagctattgctgagtggccaacgccgaatggtattcgcgatttacgcagttttttg

SEQ ID NO: 41678 - DNA, 331 bp, Zea Mays
tcccaatgggtgtgctccatctgccgctgatcccaatgggggtgttgtctgtgttgctgatgaaaacgacggggaggaagaagatgaggtccctttgactcggaagaacagtcgacaatatgtcgccagtggggaaagtagtggagttccttctcctgctctgtctaccctcattggtctacaagaattgtccctggcgaactttgatcagactcttgaagatatgattccagaggatctgttatcagagccagcgaatggtggtgcgacagatgtttgtgctgatgtgctcgacgccgggttggggttatcccgggcagcgtcccacgcc

SEQ ID NO: 41679 - DNA, 402 bp, Zea Mays
aattcctgttgcatctcactccaagaaataaattaaagccaccacttcagtctctcacgttcttgtctattaggcaactgttggtcgtcaaggcacatagattgtatttgtaggcaagtattagtgccgtttggaatggtaggcaaaaactgaatttcaccacccaatgcaagcacgtaaccatctttccttataaatattgtaatagctacaactttcctctgccagatgtgatcaccactgccctgaacacgacctacacagttcaattgtaggagtagcttatgagttcaaaaggaatgaggcttaactacaaaatgactcaaaatatcattgtaaaattttctgcacatggagcccccccaaaaaaaatcaaagggctatatatacatgatatgttcc

SEQ ID NO: 41680 - DNA, 460 bp, Zea Mays
ctggtccgagtgctgggcgtaggcggcgaagggcggtggcgaagcatagagtgagtgaggtggatggcggtcggcttcgtgtgggcagggctggcaagcaggaattgttgtcctcgccggctggggcgagtgtaggtgagggggagttgcgaagtctttttgagggtgaggagcttaggataatgctatttaactatagggagatgggaatcattccgaaggttgaaccgatgtaaggtgtgatgccctcgctgtaagtgtgttactatagtttgtatgatgaggttgtgcgccttcgcgtatccggctatgtctataggggcggtgcgcgcttggtctggtgcatttattatgttggtccggctgcgcctgtagctagtctgtgcgcggatagtttcttggtgtagacttgtgcatggatgtaatgcgcttgcgttttggcgcgcttattgaattagtc

SEQ ID NO: 41681 - DNA, 583 bp, Zea Mays
gataatcaatgttatggaaactaccatcgacacttttgggactgtcctaagaagcctcaaactaggccaatatgacaagttcttgtacagaagatttgcaaagaaagaacaaaaactatgaccaacgatccacatatccaactcattatcaaatgccctcgagaactttggctcttgccatacaccatagatggcctcatctctaatgtttaggtgttaagactagggctgtgatgagaccttgatgaacttctcactaaaatgatgtatctttagccaaatgttggttgctgtagtagttttggtaggaaattgcccaattttccatctaccatggcaatgatgagtggggccttgactggtggtaaccgcatgtcatgcggtgtttttggcaagccctggctttgtcgttactcgtactagatttgaaagcaaacccctctgcaacagcatggttttctcaaggtgtaaccaacaaaagcattgttcttcaatcttttatctgtaccatggtggccatttcctagtttcccaattttatcacagttttcagtgttgttagatttctatcagttcattttcc

SEQ ID NO: 41682 - DNA, 430 bp, Zea Mays
cctgctaactgcaattgacatctcggcgagggctgagcaatggtgcagtgcaacgttgtcgacggcagcaacatatatatatctctctctctctcttagttcaggggttacgactagaaatcctggtgcagcataggctttcgtggcttatggccagaggagtaggcgaccaggttcttatatcccaagcatcgatggtctagctggcgcacggctagcaagatccctacgagtttgttacgatccgccagcgagtttgttacgaagagatttgaattcaacgctggttgttacgaacgggaggatgaagatgatgtcatcatgaggttaagtatataatgcaatgtccgattaatggaataataaaaaggtgataaaatgcaagggatgtgggcttgtgcggtgggaaccttgggccgggatcgaacaa

SEQ ID NO: 41683 - DNA, 376 bp, Zea Mays
gaagaatccactagcacaagtgaagtagaaccttagggtggagatgattctggcgccaactgaccgtccacatgattaaggggcaccaagggtcgtttccttggtcggcgacgatgcttcttagccagacgaacctctccatcaatagacggaccaccaatagaagaaacagctggaacaacaggatctgcatgctacaaaacatcactgacaggagtgattctcctccaaactaggatccttgacacggttcttcgcataggcgccaccttcgcagaagacgaaaacctcggcagggaggtcctttcacctaggaggtcaaaccgatcatgatacgtcatccccgtgcctagcggatctgagatcgacttcttgg

SEQ ID NO: 41684 - DNA, 443 bp, Zea Mays
gaagctgacggggtcgttagccgcccttagctgcttcatttcgaggctggctgagagggtgcttcctttcttcaagctcctgcggaaatccggtccattcgcttggatcgaagaggccgagcaagcctttcaagagttgaagcagcacctggtgtccctaccaatactggtagctctagaccctagggagtcgttgtatttatacatcacggcagccgtagaagtggtgagcatggtgctggtggtggaaagggcggcgcaagaaggccaggagcctgagggcccgagactagctacaggggtccggaccgtttagaggccggtctactacgttagcgaggtcctccatgaggcaaagaccaggtaccttgagacgcacaagctcctctatgttgtacttgttgcgtccaggaagctgcgccactacttccaggcacacaggg

SEQ ID NO: 41685 - DNA, 276 bp, Zea Mays
gagagggaggctgcaatggcagtaataagtacaccaactggcgataaacatatgcagagatcatgacaccaaccacaccaccttcctctcatcttccccgtcactagcactagcgcatccagtatccattttcctgattaaaaaccgattccagtacgattagtttaagtgtccaggccaagatccaatcaagcctgctctttagtagcagcagcacactgtcacacacaacactgcaacaatcgttcaaaaatctgttctttcgcttggtttttc

SEQ ID NO: 41686 - DNA, 403 bp, Zea Mays
gtggattggtgatattaagggagctctgactgtgggagccctgattgattatctgcacctctgggatgctctatctgatttggtgctgcagcctgatattgaggatagacatatattttctattgcttctgatgatctttactctgcaagaactgcatacaatggtctcttctatggttcaagggcctttgttcaccataaacagatatggagatcttgggctccttctaagtgtcggttcttcttgtggatggtagctcagaacaaatgatggactgcagaccgacttgcaaaaagaggcatgaaccacccagccagatgccctctctgtgaccaagaatccgaaacaatcaatcacctgctggtgtcctatgttttctctagagtcttctggtacaacatc

SEQ ID NO: 41687 - DNA, 512 bp, Zea Mays
acggggccttatgaataggctgcgtacccagaatcagcttgatctcaaaagctgcatcgcgctccggaggaatgcctagaagctctgccgaaaacacgtcagcaaagtcacacaccacacggatgtcctgtacccgcaaggcagcctcaccttccaccaccatggagaaaaagattcccgacttccttgaccggcgatctagaagaaattgcgccaacaaggataacgtgtactttggggaacttcccaagaataccacctccctacctgacgacgcctgcaataacactgttttccaaaaacaggatataactgcgcgatactgagataaccaatccatacctaagataacatcgaatgcccccaaggaaatcacaacaagattggccaaaaagacctcatcagcaagaataacggaacacccctgacaagctgaacagctactaatggagccattagcagaactaaccaaaattgggtgacccaacctctgcaccgaaagaccagcccgc

SEQ ID NO: 41688 - DNA, 443 bp, Zea Mays
gtccaatccggtggaatcgatgagctttgatcgagctcgattggggatttcggggctgggtcatcagagtgggccgaacggcttgaacttgatctgagatggggtggaggcgagagaaaaattaatcgatacgagggagggtgttcgcacctaggggcaggcggctgagcatccttgtgcgcacggaggggttcaagaggaggtagcagcgcttacgccgcacatcgacgatgcgggctgcggagaaggaaaaaacacagagcacgggggcaatacgtagctacatgtgttgtagtgtatgcctctgtatgagtctatcttccacgtgcatctattaaaagaatagttagataaagaataaaatgtagacacacttatagaaaattgtactgaaagtcgactagaggggggtgaataggtaaaacctaaaatttataaacttt

SEQ ID NO: 41689 - DNA, 443 bp, Zea Mays
gcttcaggtcttctttattaagccccttagggtatttagtatatatgcttcgtctccaggaccacactgttggcagtacgagttttagattcctcccttctatccctttgctgcaaatcttgaactaggaattggaaagaccagcaagaacttggtcttaaggaggtggcctcgggacaaaagaggtagatagagtccatgtgcttatcactggattgcttgaagcatttgatgctgaaggcaaatgcggcctcggctcctatgactaggcttgaacatactactgaacatatggtgaacagtacgaagatgtactgaacacttccttcgactgggaaggttgagcagctgatgaagcaatttttttgtgcttattaattgtatggtggaaagttcttgttgtgtggcccttgtcataaacgcaaaacaagcaaaatagcttc

SEQ ID NO: 41690 - DNA, 351 bp, Zea Mays
ggcaccaataaccctgttcctgcagaggtactaccatccaaccgacatcaacgaggcaaagcgcctcaaacaccgaagccgggacttcgcgttgatcgaagccaactttacaagaagggggtcagccaaccgatgcttaaatgcgtcaccgagactgaaggcgtccaaattctgcgagaggtccacagcgggacctacggctctcacgcagggcctagggccttagtggcaaaggtgattcgtcaaggtttttactagcccgccatgatttgcgccgcaaatcgggtcacaaggtcctgcgaagcctgtcagaaattttctccacgctcgggacgcccttcgcaattcacg

SEQ ID NO: 41691 - DNA, 285 bp, Zea Mays
tgaggactggggacaaagtcaatctgactagagtgttggcctgctataggtcactaaataggattctctcttcccaaagaaagtgttgccgatcaacaggttaaaagctacagtactgcaaaatccaagactttctctcccttctgattcctactaccatacccaaaacctccatgaaccgtctcaaaatctgcacttgttgtacctacatgcccattgagatcttctatgaaaggcttcacaataataggtataggtctaaccatgccatctaaggcttcccag

SEQ ID NO: 41692 - DNA, 330 bp, Zea Mays
ctttggtggccggtcactggggtcgtccttctttttcacatatttagacaataattgatcaaaggtcgggctggatttgaccaaccgaccagctgccttgaacgtgttagttttccacgtacctatttctggttgtcgtggtttgaaggtacgtggtcgtcgtggctccttggcgttgccggactgtctactggaatgacccagactgtccagcgaggtctcggatcgtccgcgtctgtgtatcggaccatccgtgatgcatagaacaggttcccgcgttcggccacctatttgcgattgccccccagcgtttgtgatggtaaccttcag

SEQ ID NO: 41693 - DNA, 415 bp, Zea Mays
cttctcaacaaatgcttgacgattgaaagaacatcaagaaatatgtatttggcagtaacttgcagtcagtcagacaccacaccattaccagtaacttgcagtcagtcagacaggtgcatccttcattgtggcgataatatttgttaggaaatgacaaacatacagagcaacaaagagaagaataccaaaatccaccaaaggtgccactgctaaagaggcagaaaatcgaggccattttgatccaagtttagacaatggcacacatatagcatcagccagtagcctaccttaacacaatacttgtaattcaggcataccttcgaaaattggtttctagccatcccaaatgggggcctaacgcaggtgaactacttacgtagcagaactatatattcaatattacatcaaactgaag

SEQ ID NO: 41694 - DNA, 358 bp, Zea Mays
ggcgtactaccgctcatcaccgcccccattgtcgccaatatgcggctgcatcacgtactgatcgatggaggggctggcctcaatgtcatcagccatgcagcgttcaggcagcaacagatcccggggtcccggctgggggcctccctcccattttctagggtaggcccacagcccgtatatcccctcgggagtattacgctcccggttacatttgggacggaggaaaacttccgcacggagaacgtccagttcgacgtcgcggaggtcaacctcccatttaacgccatcattgggaggctagccctgtaccggttcatggccatcgcccattacgggtacttggtcctcaagatgccat

SEQ ID NO: 41695 - DNA, 454 bp, Zea Mays
gtggattatgcacgctcggcagtttgtcaccataataagttgttgtgaagtttgacacctcctctagaatgtatgcctctgcaatggaagcctcgattttgcatttatttctacatttctttcaaatagtctttagacatctctcgtttggatagcaccaacgtccctgcacggccccccattcgtgcctcataggggagatgaagaatcaaatgctgcattggattgaagaagtcgggtggaaatatcttctcaagcttacacagtaacacgagtgccaatctttccaagtctgcaaccacggtctgagataactcttttgcacaaagctaatggaagaaatagctcaactctgaaagcgctagccagacatgctcagggacatagcctcgaaccatcgcagaaagaatccattcaatccatatgtggaagtcatgactcttcatccctaaga

SEQ ID NO: 41696 - DNA, 576 bp, Zea Mays
tctttaacaggtactacaacgaactctgaacttccagtcttccaccatggtatggcatgcatgctttcccttttccatggttgactttgttagcattctgttgtatagcgtagccaaggttgttagcatctatgctagattaactcctagattagctcctagacggttttagttttgtatctatcctgtgcacatgctatctatataaagaaacaaagcaagcaccgaggtgctgtgccaccaattatattcttcctattgcattgttcaacttggtaatcagagcattcgatccattttttttcccccaccccgcccatcgtccatcgctgctccagtatttatggctctcaccaattccaccttcccaggcaccattgcctcctcctccccgagcctatctctttcttcccttggtcacgccatcaccgtgcgtttgactcgggagaattttttcctttggaaagcccaagcttccccggtgctgcgtgctcatcagcttttcggctatgtggatggttccatcaaggctccgtccgagttcatcactaccggatctggtgctgaagcacgtca

SEQ ID NO: 41697 - DNA, 371 bp, Zea Mays
ggataaatacaaatgcttccgtcaggacagcaaagggattctatggtttggagaccgattggttgttcccaagaacctcgatcttagaaagaaaatattggatgaagctcacctttccaaattctccatgcacccgggcagtaacaagatgtatcatgacctcaaatccttgtactggtggaccagaatgaagagggaaattgcgaagtatatatctgaatgcgacacttgccagagagtcaaggccagtcatttaaaggtagcaggcaccttacagccccttcccataccatcctggaaatgggaggatatttgcatggatttcattgtgggattgcccaatacctcccgacaccacgattctatttggg

SEQ ID NO: 41698 - DNA, 331 bp, Zea Mays
gttactttcagataaatgaaaactgttcattctagtgtctactgtctactttcttgaaggatgacctttctttgcggtagtcaaatatatcccatccaaagttctttggtaagtttctgaaaccttaaccaaatggaatggtattttgcacttgttttaggtgcaaatcaaggttcactataggttgtatgaaactaagagttgctgctttactatttcagcctagctatattctcaattcagacattaacattattttaattgtctttacgagatactagaatatgtattcgtactgcctggatcctacacatgtgaataaggttaacat

SEQ ID NO: 41699 - DNA, 284 bp, Zea Mays
tacatcttccatcagaactccatccggctgttgcacctcgtcaacatgttggctcacatgttgtctgctgacattccccctgtcttgaaaggacgcttgcccccaagcgaccgcacatggaaagcgatgacggacatcacattcatcttcccaagaatccatagcagcatcacaccccgaccacctgatcaaaacctgatcgatagaagcacctccgcgggaaaccactcgacgctgcagcacttggacaggaacacgaagagcgtcaggcactgagggaagag

SEQ ID NO: 41700 - DNA, 1367 bp, Zea Mays
ggagagccggttatctccaagcagacacatgccaatgccactcctactgctcctgattcagtaacttctgacagtcgggtggcatcccttcgtgcatatcgtctcgcccatggactctaccggttttgtgctgaaaaatgggtaaagggacacatatgctcttctactgtgcagctttatgcgatgcaagaattgtgggacatgttacttcctgacaagcaagaatcagaattcagaaggcgaatttgaagactctgctgaacagtttatgatctgtctgtctcaagaggctgcttcacccaaggttgctgctaaaacattcaggctgcaaggctatcttcaaggtgtggagttgctcatgtaagtggactcgggtagttctcattgtttcctgagctctacagtgggttcctctctatccgttgtccaacctttggagcaacaaatctcagtgcaggtggttaatggtcagaccctctagtgtacccaacatattccagatgttgaatggtctgttcaagggttcacttgttgttcaacattcaagctgctccctctgcctacttatgatgcaattttgggaatagactggttgacccaatatagtccgatgtatgttgattggaagcacacgtggctgtcctttcctcatggtaaccaatcagtggtgcttcgtggtctgactccattaatgccatcagggtcattgctgcagattcagcttgtatgcactttatatggggaaccattgtgtgctgtcaccgatctgtctattccaccttcagttcaacaactgctatacacatatgcatatttgtttgaagaaccaaaaaccttgcccccgagtcgattttgtgaccactccattcctcttatccaaggtgtcaggccagtcaatattcagccttaccgccttacaccggccctcaaggatgaagttgagtcccaggtgactgacatgttgaacaatggaattattcaacacagcaacagtgccttttctttcccagttctgttggtgaagaaaaaggataactcttggcgcttatgtgttgactatcggcacctaaatgctcttactgtcaaatctaagtacacagtacctgttattgacgaattgctagatgagctatttggagcatcgtggttttctatattggatttaagggctggtttccaccaaattcttttgcaccagggtgaagaatacaagacggcattccaaacatatctgggccactatgagttccgagttatggctttcggccttacgggtgctcctggcacatttcaaaaggccatgaatcatacattagctccaatgctccgtaaatgcgctcttgtgttctttgatgacatattagtgt

SEQ ID NO: 41701 - DNA, 620 bp, Zea Mays
gccggtgatgggtttcgccatggtcccgctgtgctacgtgggcagggccactgccgccccaatccgtggtatggaatctacccttgtattcgctagatctcgtacaacgttttgcacttttcgcttgtgtattcgggcgcctggtggtagggattgaccggtgccggccatggtgctgccatgcccttgccctgcgccgccgcatcctggtagcgtggggagaagacgcactgatcaccgttggatcttacaccaatggcgtaggttagactgggtctaccacttcagagtatcgcgcctggggcgttagatcgagatatgagggccacggctgggtctcgccttaattaaatttgggcggctgatctcgtatcggatggatgagatcgcataccggttcgatgcgtagcttgatgtaacatgggccttagatccgtgatcggatggcctagaacttgcgtgcgttgccagccgtggcgcttttcccaaaaaggccctagagaagtactaaactaacccgccatccccgtatgcataaaattcactacagttgagtcatgtttttagcagtcgagcccctgatctcttagaaaattatgtgcttaggaaattcagaaaat

SEQ ID NO: 41702 - DNA, 525 bp, Zea Mays
gaaggtactaatgcgctgtctattggcgctgctggctgttcggtgacccacatcaggaacccaaagctaaaagagaactacacttatgttgatgttcgttctggtacaattgtagcacctggtggccgtatggattggatcaatgtgatatgcctgctgttcagttcaggttcaaatggaactgaaaagtcagttgataataacacagtaaatagctaccaattgaatgatccttattcgtcatctttgtttctcgagttctctgatgttgctgttagctatgaacctcattttaaaaatttcactcttagtgctgcaccaactgaccccaagtttttctcatgccttttagctgcatcatcatttaaactccataataaatctgcatcagcctctgcagctgctgattttgatatccagttacgtgatcttggaatcctcatttctcaatcatctggctcaacaaatgccacctgcagttacagtgtaggttaccttcatcaagcaggttatactaaggttgcc

SEQ ID NO: 41703 - DNA, 363 bp, Zea Mays
ccgcaggtcagggcgggtcttcttctccccaaccgaagcagcgaccgcggcggacggggatcacaacaaaccgagcgattctctcgcttctagccggacttgcctcaacaaaccccaccgaacaacttcctctcaccccctttctcttggtgcgaccatgggactgtaggcgggcctcagtgcgcgctcgtttttccctcccgatacgagctaaacagagctgtggattccacagatttgccgccgtgatcctcgcgggcgtgggcgacttccctccattccgtgccagggtccgtggggcataaattggtgccctctgcgctcctctccacttgtccatctgcctcgcgacttctctctcgc

SEQ ID NO: 41704 - DNA, 319 bp, Zea Mays
gcaatatcatcatcgtcaacagtagcatcagcactaacttggttgactctagcaatattggaccccttgccggtagccagagtctgttgcttgcctttaaacattgcttcgagcgggtgtgttgggattcctcttcggacaagcattggcgtagtgcccaacctcaccacacttgaagcaagtggtgactgtagtagtaccctggccagtaggtctcgttggggtgccagtgggggcagcctggcgagtatgcggagtcgcctgtggtatatgcagagcaggtcgttggtaggacagttgccctcctccaggacgagct

SEQ ID NO: 41705 - DNA, 421 bp, Zea Mays
tcaaaatcaattattggaaggcatccatagttgtgtttgcaaagcctctttggtatcagtgatgtgtgtgatctatccaactgggaaatttgatttggcatgactaaactgtctctgtgtaccaatcacttacctgacaagcacaataaagctttgctatacctgatctcagcaatctcttacattttgttcatagtggtacaattttagcatgttcttactgttgttgagcaaaccacaagactgaaatcttctagataccaatatggaaacatggatgctttagttacacatgtaaactgtgtgagttgtggtttttagtcttgaagagacatggggaaatgaaaatgaagggtatgcacaaaagttgtgctgttttctgtttttaaacaggtggttaatgattttgcatatagttttc

SEQ ID NO: 41706 - DNA, 754 bp, Zea Mays
ttctgatgttcggtctttgttcgctggcaggtgtcacatcgggccacatactgtgctatctcccttttcatccctttctaccaatacctggtcttaaggtctaagtacatcttggtggtccctgggtggatagagtaagctgagttgtgggcttcatcgagcagggtttctcgtgtttctcccactggcacgcacaggcgatccttgaaccagagggctccttgattatctgtcctgaggtccgggagttgctcctttcgtgctctttccataagcttggttgtttctgtgtccaggcgttgggccttgcatatgaggtcttctagatttggcttgacttccaggctaccgttgtctcccagacatgcatttagccgagctgattctttcttccaatcttccaaaaagtttgctcctttaaccccgaaaggttttctgctgagggcgtctgctaccacgttggcctttccggggtggtagtggatttcgaggtcataatctttgatcaattcgagccaccttctttgacggaggttgaggtctggttgcgtgaagatgtactttagactcttgtgatcagggaagatgtggcatttgttcccaatcagataatgcctccaaatttttagggcgtgcactatggctgccaattccaggtcgtgggtaggatagttctgttcgtgcggcttgagcagacgggatgcataagcaatgactttctcattttgcattaagacacaccctaagccttgct

SEQ ID NO: 41707 - DNA, 811 bp, Zea Mays
caataacattatagaattatagagatttgaatgaactaatttggagttaacatgaataaaatatgaattatacaagttttacaactatttttatactcaaaattcaatttctaaatctatttttcttgttttatttaattcctggactgcgcctcaaatacaggaaagcacaggggccaaatcagaagtaatccacagactcatcctagcccgagggtggacggcgggttagataaccaagactccgagggctcattagtaaaatgtacccacgaaggggtacggggtctttacggccgttggattgtaagcggacggtgcagattagatcggtataatcccgaaccggtacgcagcgtggggcatcagattaagatcctacggctagggttttatgaagatgtgatctaatcctgcgcgttcatctgcaaatcaacggccaccgatcaaccatcgccagatccgatcggagccataaatccaagatccaacggcgcgcgcacgctcttcctcctccgacaaccagcgaaggtggagcagaggcccgcggcggagctcaccggcgagcatggccgaacggcaccaaagcacccatatcaccaacaaaaacggctacacgatgcggacgtcctagtgaacagtactagttcgacataccaggatttagggcacggacgaagcctgcccacggagacgcgtgacccgcggcggccatggagctgcggcaagcaatcccgggccaacagtggacttccacccgattaaccccccaagcaaccttgccagggccctgaacgtcgcggtgccggcc

SEQ ID NO: 41708 - DNA, 431 bp, Zea Mays
ctctaattttggttggtgtagcagttgaaggtggcaagatcatttcatttctcagttcaccaacagcatacaatacttccctgaagtatctgctaatggtctcaatagaccttcgaaaggtcatatgtataactctaaacctttggttatgacctaccacatgtaaaaacatggcaacctgctcctctactgagctatgaatgctatctctcaatagctgcctagtgcgaaaaagttcacacaattgcataaaaggggctcttctcatcctgagtaagtcaacacactcaacatcagtggattcaaaaataaatctcaagttgttttgcctctcttggtctctttggtgcattgggccataagtgatagacctcctagcatgcattcggtgcctcaaccatgcagccaaccaggctgacataactgctaca

SEQ ID NO: 41709 - DNA, 290 bp, Zea Mays
ccggaagttgctccttgcgagctctttctataagtctggctgtctctgcgtccaggcgttgagccttgcatatgagatcttctagatttggcttgacttccaggctaccgttgtctcccagacatgcatttagctgagctgattctttcttccaatcttccagaaagttggttcctttaatcccgaaaggttttcggctgagggcgtctgctaccacgttggccttcccggggtggtagtggatttcgaggtcataatccttgatcaattcaagccatcttctttgacgg

SEQ ID NO: 41710 - DNA, 310 bp, Zea Mays
cgaaggtacacttgggctaatactagggataatccgacttatgagaagttggatcggattttggtagctacagaatgggaggaaaaattccctagagcttcggtacatgccttgtcgagaaatatatccgatcatactcctctgcttcttagcacaggagttgtaaccgcccaaacaattcctccgttcaagttagaactaggctggtttctgcgggatggttttgtggatatggtaaaagatatttgggtaaatgagacaagaggttctactcctttggagaaatggcaagccaggattaggaaggtac

SEQ ID NO: 41711 - DNA, 503 bp, Zea Mays
ccaccgcccttgggccctataaattgagcgtgccatcagctccgctaggtagtcaagcatccagcgcacccactcgtgtctcggattgtccaccagagagctctaatttgggatttcccccaaatctgtcaagaacaccgtgtgtgtgagctcgtcgtggccagctctccacaggttcgatcatgtcctcctcgctcttgttttagcattcctgtgtgctcttgatgctcatcggcccaaccaattgcactaaacctgagtagatcaccgggaacactctgaattgtcctcggtttgcgccatcaccgtggacagagtgattgtgagctagaaccttgcaattgagtgaggggaaatggttgttaggggtagaattaggtgttgtgcaacggagaagcatagccgttgcgtcttccggccgatatgggctcgccggagccgctgctctgccgtccacggtaggggacttcaattcgcgaaggattagaaagtgaagggcctcg

SEQ ID NO: 41712 - DNA, 355 bp, Zea Mays
aacccgtttaccgccagggtctttaccttgttgagtgccatggtagcaatgctctggtgacttacctcccctccgatcgcaagctcatcccatcccaaatttgtgaaatactcgagcgatcgctataaattagcgtgctccgctagcttgttacgaacccagagcaccgttgccaccgttgcccgcgattttggtatttcccccaaatcggtcaaaatcgccgccgtaaaacatctcgccatggccagccatccacaggtcggtttgtgcttctctggttcgtgttctagcatccttagggtcttctgttgctcatagactcgatcaattgaacgctaccacgcttagtcatcga

SEQ ID NO: 41713 - DNA, 375 bp, Zea Mays
cgagccagtgtaaggcctcgtatcggcgagcggcaaggcagaggtcctgagtcacttccacatgtagcacatatagtcgattcctcccatggttgaccttagcgaagagatgacaacggtggtcctagtcgcggccacctatgaaccgttttcatcaagctgcccaaggttgttgatggagttccttagcgtgaggatgtagtagatgccactgaggagcctgtgctagtcggtcttggccacaaagatgacggagccgacacctgggacctcgacagcagacatgtcatcgaactcgacggagttgcagatgctctgatctaggttggagaagtggtcccatcgctcgatcatgtggtgagcggtgctgctgtt

SEQ ID NO: 41714 - DNA, 671 bp, Zea Mays
cgccacagttgtagcatccgtccttggacccgccacgccgccggctcatacggttgttgtggaaccgcgtgaatccgctggccacaagtgccagctcctcatccccaaggctctccacctgctcctctataatagacaacaaagaagatagagcaaacatagcaggtgaggagttagaagcagaaccacctccagagaccagggccatggtgggtgcactagggttctcaatcttggcccgagtctggtggtcaatctctatggacttgagcttgctgaagagctcatccacggtgagagtctcgtagttgggcgactcgatgatcgccgagaccttcacctcccaaaccctccgatctagagcatgtagtaatttcagcgctctctcatgatcactatagggtagttgtgccttgttagcacacatcttgttcacaattgactggaacctggagaacatggaatcaatggtcactctagccaagtgtgtgaagttctcgtactctcgcctgtacgtctcaaacagtctggtcttcacatgatcgttgcccttatggaatctctcgagggtagaccagatctgatgagccatagccagatgtccaactcgctcaaactcaccaagcaagagacacgagaacaaagcgtttcgagctttgttgttcgaatca

SEQ ID NO: 41715 - DNA, 334 bp, Zea Mays
gaatagccatcaagagcttccaagactgtctttttcttggtcgttcttttgttaaccttagaaaaagagcaaggggaccatatcagcaattctttgactatgaatccatctgtcgtaccaaaacaaagttgcagagccagaggtcgatcagcatactgtgaccacgcccccagaagatgaaacattggcgagctagctgctcgagtgtgatgagcaaggtgtggcacagtccccacctcgtcgacgctctaggtcaggcaggaacaggcggagcgtccccgacctaaagaaccagccatcggtcgtcggtacaacttgcgtcgtggaggacgtt

SEQ ID NO: 41716 - DNA, 671 bp, Zea Mays
ttcttttctttactgttcatatatatttgctgtttggaacaaagaaaattgtgtacaaatgcttagttagtagcagttacatgtgttttgttatacattagttcatagtcagatgcttactaatataattcttatgggctgttcttttctttactgttcctatatatttgctgtttggaacaaagaaaattatgtttacattcccttatatatttgctatcatgtacaaatacttagtcagtggtagaagtgtatgaagaagaaggagatgatggagatggtgaaggattcctaaactccacacccactagtagtagccgcaaaagggccagtagtacaacagacacagccactagtccacctaaaaaaggaaaaagttctatgataaaggtgttagaaggaataattaatgaaatgcaaacatcaaggactacagatactgaagttttcacccaaattacaaatacccagcaaaatagaagtacactacccatagaagaaattgaaagttgtttgaacttggcagaagcaagtggagctgataaagcatcagatgaatactttgtggccaccaagttgtttagagatgattacaacagagctatcttcaaccgatttacagcagaccaaaggttcaagtggctgcagagatggtgcagggagtactatgg

SEQ ID NO: 41717 - DNA, 339 bp, Zea Mays
cagagagccattcaaacatgcttagccgatcattggggcaagcgtgtggaggcctacgtagatgatgtggtaatcaaaacggagaattcggaaaacttcatcgaagacttacagctggttttcaacagcctgagacgatatagatggaagcttaatcccgaaaagtgtgttttcggggtaccagaaggaaagttgctcgggtttatcgtcagccaccggggaattgaggctaacccagataagattgaagctatcatgaagatggaagctcctcgatcacaaaagaaggttcagcgacttactggatgtatggcagctttgagcagatttatatccagg

SEQ ID NO: 41718 - DNA, 416 bp, Zea Mays
ccgggggtcagaaaatatcacgccgtggaaacactccggccattattttactccgaccaccatacccgagcagaccactactgatttggatgagttcgccagagacagccgcttcacggcctcgcgccacgtgccttggcacatccaccacatcgtcgtgacttgcattagccgtccgttcatcgtcggggagcttgccatggtgaaagccactaagcttgcgcgccagtaaccttcttcccctccggccgccagcacctcttcgtgaaattggacgccaccgcccccggagcctataaattgagtgcgccatcggcttcgctatgtattcaggcatctagtgcaccgacccgtacctcagatcctccaccagtgagctccaattcgggattttccccaaatcaaccaagaacacc

SEQ ID NO: 41719 - DNA, 719 bp, Zea Mays
gtgttattggtagtacgaatgatgcgctcagctttaccgttctgaggtgaggtgtaggggcaggacatacggaggacaccatgggtgaggaagaacgtgcaggagctggagttgtcgaactcaagtccgttgtcacattgcacaactttaatggtgacaccaacctatgttttcacataggcgaaaaactgagtgagtcgggaaagcataagatttcaggtttaaaggaaaagtccataagtagtgggagcaatcatcaagaacaactaagtaatatttgtagcctgagacacttaaaatgggggacatccacagatcacaatgaatgagatcgaaattgttaaccgcacgagaagtagacgtacggaatggaagacgaacatgacgactcaactgacagacatgacataaagtggagctagcatccttattacacatgcgaatggctgatgtgagcttggatagggtctcgtgaccagggtgaccaagacggcgatgccaaagtgatggagtggagcttgcgacgaagctgtgtgtagcagggaggcacagggggtatagtggtctggaactattgcacctgacgatcacgttccgagacagcagatccttcacagaccaaccatagggatcaaattcaatggaacatttattatctgtggtagactggcgaacagagaccaggttcttaataagtttaggtgaaacaagaacattgt

SEQ ID NO: 41720 - DNA, 424 bp, Zea Mays
aaaatccatgcctatttcctcccacttccattcaggcactgggaggggttgcaataggcctgcaggcttctggtgctcggctttcgttcgttggaaggtgtcacaccaagccacatactgtgctatctctttcttcatccctctccaccagtatctggttttgaggtctaggtacatcttggtagttcctgggtggatggagtaggctgagttgtgagcttcattgagcaggacttctcgtgcctccccttttggtacacacagaagattcttgaaccaaaggtctccttgttcatctgtcctgaggtccggaagttgttctttgcgagctttttccataagtcttgctgtctctgagtccaggcattgagctttgcatatgaggtcttctagcattggtttgacttctaggctaccattgttt

SEQ ID NO: 41721 - DNA, 1076 bp, Zea Mays
ctcacgtcgacgaggtaagttcggtgtccaatttggaggatgaagaccgtgaggatgatacagcaggtgtcttctcagtggattcatcgtcggtggctgccttgacggagggacctaggggtcgtttctgggtccttcaagctgagggagaatctgacgatgactccaatattgagcgggatgttgtcggtgcggagaggcagatgaattcggtctctcccatggccaacaataatcacagcagggatgtaggtactgcgttctcgagcacgggctcgcattctccgggagtgctatcgttggaggtgatgcacaacggtgagatgcgggggtcgtcgtgcggcagatcggtgagtcgccaaaatatgcttgaggaggaagcaggttgccgtccatctcgtgcttcggttagcttgaatgggagtcgtcgggcgagagcatggcctaccatggcttgccctctgaccactccttctcccaccgacccgaggaggaagacaaacagtgtggggggtccacatgtcagcggactaaagtaccccgaagaagaaggtagacagtcgcagagcgtaacagagcgccagcctatgggcctgggcagtaattacggattagagcctcagcagaagttcaatcgttacaggccctacaagccgcctaatggtcttgtggcctttttcgaaaagtctttctcgctgttctcactccgtagagctcctagtaccagtactcgccgcttaggattcccatcctacgctgcagcagtcaaggctaggccaccggggacgatggagaagcagaacccgcagccgccggctcaaggaggcaagatgggggacgctggctcagggcgcccgatggcgagaggcaagttccagtatgatggtcctcaccattttcgtcctgggcatgccggtccacagtacaacaaccgcggccgatcctgggcgagaccgggatacgggcgggggtaccgcggcttgcagagaggttggggggagtccagaccacatcaagaaggtggtgccctgggcgctgctaggcagactactacagccaccaatgctaacgtggtg

SEQ ID NO: 41722 - DNA, 277 bp, Zea Mays
atttttgcgggggatttttcgcgtgtatattacatggctccgcctcgttaaaaacctcaccccccgggaggaaaagagtgcgggccggaataaaagctgtcttgcaaattacaagggcgagctggccctgaggagtcaaacaaaaaacttgcgaagattgtcaatgttccaagaatgctctaagtcttcgccggatggtgttgtgagcctgtacgcgctgggggacgccttcgtcttgacgatgaaagggccctcccactttggctctagcttgccc

SEQ ID NO: 41723 - DNA, 323 bp, Zea Mays
gagttaataagaaacataccatacaccacgtcggcatccttaggaactgattccgctgtcacatgattgactcttcctctactctagttctacagagtcttgttttgtgcagatccacgagtaggtgtgttctggtcagtcctctggttgctgttcttctggggtgtctgttgattacgtcttgggaagttgttagcatagtggccaagttcgccacacttgaaacaacatagtggttagtccttcttcagggccttttcgtcttcccacatagaccgggtagcttgcatgctcagaatgctgtcaaccctttttctttttgc

SEQ ID NO: 41724 - DNA, 474 bp, Zea Mays
ccgggagggaggatgagaatgagatcttgtttgccataaatgacaatacactaacgatcactactgctcgtagcagtagcatcaatcaagctagatagaccgtggcctgacggagcattgaatcatggacggtcaagagcagacacgtcgcgcgccatttatattctcgggggtggcgtgtttggcagcgccattactactgtgctgtagtaccgtagaatagattgcacaagagtcgggcagctgggggctgtgtagatttccacgacggattcgatctcaattctcaccgatgagtcgcatcacacccgtacgtacgtacgtactacagtctacagctgccgactcaaccatgaccaggatccatggcatttaacgccagcgccatcagtcggggtcacgctactagactagcggtgctgtgctgtgctgtgcatggatcggcagaccctgcggagagtccccgactgatgg

SEQ ID NO: 41725 - DNA, 332 bp, Zea Mays
cgaaaatttcttcatctctcggtctgtcatccctcgctcccacccctcttcttccatcactcactttgactgttctcgctttcacggtcgtccctcactcatgcctttcttcttttgttccttggttcgtcatctcttacttagcttgcagttgcaaaaccttcattggcattgcaccgctcatgtggtggcctggtcagccgaacccaagcccatgtgcatcatgacttgacacatttataacctcgcaacagatgtagacctagccctatttatctcacaaagtcacaattataacctcacaatagatgtagaaatggccacctatttat

SEQ ID NO: 41726 - DNA, 542 bp, Zea Mays
aagtcacctaagggtgcagccggactagcacaacaagtgcgtaaattcgaagtcttctcaaaaaagactatccgtgcaaaagtcgcctaagggtgcagccggaccagcacaacaagtgcgtaaattcgaagtcttctcaaaaagactatccgtgcaaaagtcgcctaagggtgcagctggaccagcacaacaagtgtgtaaattcgaaatcttcctcaaaagtctacccatgctaaaccctacaccaaactgcccgcgccaggaccgaccacaggcgcgccggaccggcataataaacatactagaccaagcgcacaacgcctttacaagcacagcgcaggcgcataacctcatcatacaaattacaattacatatgtacagcgagggcatcacaccttacatcggttcaaccttcggaatgatccccatctccctatagttaaatagcattatcctaagctcctcaacctcaaaaagacttcgcaactcaccctcacctacactcgcaatggccggcgaggacagcaactcctgcttgcca

SEQ ID NO: 41727 - DNA, 468 bp, Zea Mays
gccagatccaaaacgacgaaggggtacccggattctaatcatgaccacacgtccgagaatcaatggtcgacacgatatcagagccgggacctaatctaaccctccgacgcggaatcaacggtcagcgggctatcttgcaccttctgcccaggcatcggcggacacgccatggcctctcccccgcccctcgccgcggcgattaaccggctgctacggtctctaacctgcgcctaagctttaccccacaactcaacaaagtccgctcgactccaacgatgctatgggttaacacgctggaagaagctacacaacggtgcgaacacccgagacgcggtatagcaggcaaagagtcatacacgaacacggaacgacggcgagcaaggagcattggttaccgaggtgttggacgagttggtgctgcccacgactcggccctagattccgcccacgctccgcaaggaattcggc

SEQ ID NO: 41728 - DNA, 489 bp, Zea Mays
aattctccccctatacactactacctccataaaatatcattttaaatacctatttattatccattactaatttttcatccactaacaaacactgccatgcacgcgcattgagggaaggggtctggttgccgcacctccacatctggtggtgtcctgtgcaagcgctagcactgtcgcacagtaggggaggaggtaggggaagcgatgcatgctttggcgtaagactgtagcccctacaggtgtgaagggggacttactgcggcaaacgttgaagacggtctaagatgcccaccatgtctagcgagcctgttcggctggcagctgcgtctgctgttcgtgatagattagttcagaccggaattcttatgccttgggtgtctatcccaacaaattttgcaggaatccttagttcaggttggaagcttcaccgtagctaatatatatagacacacaccgaccaatcctacgacctggttggactgtattggc

SEQ ID NO: 41729 - DNA, 354 bp, Zea Mays
cgaggacggacctggaatcagctagccgcaagtaggcggttcacggcggcgcagtcgactgaactgggggaagaaggaaattctcctgctacggtggctaattgagggtgagaatgggtgcttcggcttcgtgataacatggcgcaactgactcggccttcaatttatagaaatgctaagcggtgacgtccaattttgaaaggagagaccggcggccgagaagagagatgagtcatcggcttgaactgtcgtggcgcttcctggggtaatttctccggcaaggaactgacctcttacggatatctacagcgacatggtacatcttctaagcacgtggcatggttataatcgccg

SEQ ID NO: 41730 - DNA, 475 bp, Zea Mays
atggggctcctccactggagcaagcgaagaggtgacgaggagtcgaggagtcggcggttgcgctttagagaggaaacggtggcggcactgtgtcaacctgagatagggatgaaaactggatgggtacctgggacgggtaccggatatgggtatgaaaataggacaacttttcggatacagatacgggtaattttttttgtcgagacggatacgggtcttacctggatagtgatcaccggataccggtaggatacggaatcaccaatacccgataagtatccgaaaattccacgtaggatacgggtacaatacgggtgggtacccggaatgaagtggcaaactggcaagtcattgtgtttgcgtctgtgctagtcttgtgtgcacgcgaggcaagcgtcacaagcttgctggcctgctccctactggtcggcccattaggacattacgacatttgccattatgcccccaaatcgtg

SEQ ID NO: 41731 - DNA, 278 bp, Zea Mays
tgggcaaggttcgggcggaggttgtggaattgcgtgctaaatgcacggcacaccactatgttgatggtggttctcccgcccctgttgggattcagcacccttaccgttcaccgccccgtggtcgcttcgactatggtaccccagactgtaggacctacatagatttagatccatagatcgatggagtcggagtctgtaataatgcttacttcagtgtcttagtccagtcagtctagttagagttagtttgcttatcttatgttggatgcttgttatga

SEQ ID NO: 41732 - DNA, 282 bp, Zea Mays
ggcatgccaattcctatcaaggcaacaacacttacccgcgcagcagttgcagaccattcctgtaacatggtcgttcacatgctgggggatggacatgattggacctttcaagaaagctcagggaggctatactcatataatggttgccatttataaattcacaaaatggatagagtacaagccaattgcctctttgacctcagcaaatcagtgcagtttattcaagacataatattcaggtttgggataccaaatagcatcatcaccgacctgggatccaac

SEQ ID NO: 41733 - DNA, 464 bp, Zea Mays
tgacgagggaatcgctagccggacttgcagcaccgccattgtgccacctccttccgtggtctgacaccgtcatgcgtgtaatcgaggtgatgatctctcctttgtgttcgcctggcttcccgggtcgcgtagcactcgtcacgttgggatttgtgtagagatggggggttaggtgttgcgggcggggcaagtccaccgtcacggtgctcggccggctttggctgagtgtcgcgaggaggaagatagggtagcggccgtagatctgggtatgggcgatggagatctagcgctgtgttgatgggaagcgtggtccattgatttttctgttgacggctaagattagatcgcaggaatactgattcgtggtgatgatctggtgcgtccgattctgatcgagcgagcgagactcagtttaggtttttttaaatctgcgccgttgatatccgatcgtgcagtgatcgtcg

SEQ ID NO: 41734 - DNA, 452 bp, Zea Mays
tgtcgatatcgaagacggtagccctctgtgtcgatatcgaagtaaccaagcgcgaggacgagtagtcgggtcgagttgctgtgcgtcaagtagatgtggtcgatgtagcgtcgatgatgccaaagacaacaagggtatgcaggaaggcccacaacgcgctaagaggcgtcagggtgatggtggtgtaggaggacaccatagatgaagacggtgatgcagtagaggcagtcgtaaaagtagtcgatgccgaggatgatgctgtcaaactgccgtggacgatacgtgctccaggtttgccacgcctggaaacgcgtcgtagatgaatgcatgtgtcggtgttgccagtaccgcacgtactaggtagaaggcccgaacggccgaaccaagtgtcagtgtctgaagggaccagcagagaagacctccatgacggttgtagtgcggtatggcgggag

SEQ ID NO: 41735 - DNA, 772 bp, Zea Mays
gttacgatggtcacatcgaggtgcgggttggcgtcggagatggccggacttggccggtcctcgtgcgcaggcgagggagttcgtcggcggcgagtgttctggcttgctcacgtcgggatagttcaattggttggcttggggagctttaccaagtgacgcagaggcagtatacgtgaggaattgggaaatggtgcagtgacttacccggtccacgctctccagtgagcggaagaagttcggcgagggtgattcagggtttccggtgaggttgcactaggtctgagggcttggggagcttcatgggtctctagtgaagctaaccaaactgctggcgtggactagggacgactggggtgagctggccacggtagctagagctcgggcggcttggcgggcggaggagctatcggttcacggcaaatgctccggtgcttaagcgtggtgagtgtgcaaagctgaggcaaggacgtgcaggagctattggcctttataggttcgggtgctaggagggcgcgcggcggacttgatcgtgcgtgggggcgagcgcgcgtgggttgggcgaacgatggcgtgccgaccagggtcgaacacgtgtgtgcgtttcttctacccgagttctggcgcgagttgtcactcatccaagcctgctctttccatggtcagtgcacaaaacctcttccccttcctataagctgccaattatgtgtgggggtcaaattatttggcctactggttccaaagatatggagctctcaagtagggtctgtctcac

SEQ ID NO: 41736 - DNA, 433 bp, Zea Mays
cgattcgtgtgccttggcgtgcagataacggtcgatggtgaaaagatcgtgcgcatggatgatcttggggcactgtttggccctgttgtcgtacccacttgcatcggcgacgtggccgcgtgaccatcatcgccatgacgccgtttcttgtggttacgccacgctctcggtcgtttcaccacgtcgtcgcaagccatgaaggttaaccagtgacagctgtaagtccttgtcttgtaaatgccacgatagcgttcgccggtgactgacctctctctccaaccgccagctttcctcttcaaaatttggagccaccgttggcgggggctataaattgagtgcatagacggctctgttatcttatcacaaatccagagcacccactctcgcctctgattagccaccatagcgccctaattttgttcttcccccatat

SEQ ID NO: 41737 - DNA, 352 bp, Zea Mays
aagctggctgttgaggtcgatgggcgggatgatagcagcagcggtgctctgcctcttctgcttgggggtcgtcgcgatctttccggtgagacgagcaggctcggaatttcagggaagcacaggaatggccgaggggaaaagtgaagttagggctcagaaatcaaaaaggcacgtcgacacgagtataaatggggtttcttgggtcgggcactatctctaaagtgccaggtcactactcagaaaagcaaagcctcaggcatcactcggcagttacctctaaaatgccagtagtatcaggcacatggatgaactatcaaacgtgcaaacagaaaagcagcaaaaaatagcgatc

SEQ ID NO: 41738 - DNA, 387 bp, Zea Mays
tgagaatgaagtctttctattgatggtgtatttcccaattacagaatacaatgccgtcccaatagcttttgaaatctagctaggggtaaaacttcctgagatgttctatattccatgagttccctatttccgtgccatccatttgagtaagacgaaatgatctaggccgagtgacttctgctactatgaatggtccttcccatagtggcgataatttatgccgcccctcccccgctagaattcggtggaggacaacatctcccactgcaaaggatcgatgccgtatagccttatcatgatagcgctttagagtttgctgatacctagctgactgaatcactgtattcaatcgttcttcttctagtatatcaacgtcctccagtctag

SEQ ID NO: 41739 - DNA, 289 bp, Zea Mays
aagaaaatgctgatgaagaggaagactacaacactctagtcccatcaaagcccagccacttagattttgaaaaatctaccgtctctgaggccgatgtgccgatgacgatgaagctcggttacttcggggagacagagaagaagcttcttcgttttgccggcgaagaaaccatcccagagccaaaagatgacgaagtggtagttttcaaaatcttttttaaagctggatttacattcatgacacagggcgcagccagtgtggatttacattcatgtcctttataactggt

SEQ ID NO: 41740 - DNA, 416 bp, Zea Mays
gtaactgtgagaagacgctcacccaaatttataaggaagaaaagtgcccaatcctaccccgagtcggagcgagctacgtcggagatggttcgactcaatgacagggcaaatgccgctcgacccggaaatagcccccaagcggagacactctcacctcgggggcagaggggctattgtcgggaaaatgatctctgggcccctgaggtccaccagtcagagagagcgcacatgataaggatcttcatactaccgaggaccaccgatcagcgcgggaataagggaactgtctaccctagaagcgcctgcccccggataaaccctgagtcactgagctcagggtcgcacgtggtggaactagagaggggggaggtgaatcaaaggaagccactcgagtggattccttgcctggctcaaga

SEQ ID NO: 41741 - DNA, 559 bp, Zea Mays
ggacactgcaacatccatcaatttgaggtttatgtttgagctagagatcaatccagacctgcaggatctgtttagctgggtgcattcctgcttccgtacttgtccagatttcatcaagccatgtatcttctacctatcattttttccaagagaccacaacattcgacgaaggcgtctagtaaggcgttggatcgctgagggttactgcagggacagtgatgataaatctgcagaggagaatggggagttcttcttctccaaactcctcggtatgagcataatccaaccggagtccagtgacgcgaggatggtctcgtgtcaaatcaatggatttttccgtgagtgcatcctctcacggtcaggggaaatggaagaccttgtcattgaactggccgacagatgcaacctaaccacccaacgcagtgggcgtcatcttgtcatatcggaaagctgggacagagataagattttattcgagagcatcgacttctcacggctacggtcaatgacagtgtttggaatgtggaaatcattcttcatctccaaaagtatgaagctt

SEQ ID NO: 41742 - DNA, 368 bp, Zea Mays
cgagctgcaaatgcagtttgatacaaaccatgaggcacacgatatgattgtggcactcaaggatatattccagacccaggctaggactgaaaggttcaatgtgtccaaagccttttaggaatgcaagctagcagaaggcacaacagttgggccacatgtaatcaagatggttggttacagtcagaggttggagaagctaggcttcccaataggccaagaatgagccactgacttcattttggcatctcttccgcccatctatggaaacttcattacgaactaccatatgcatagggcagagcagggcctcaatgaacaacagagggtgacataaagaaaagagcttccagtagcaaccatgtgatggc

SEQ ID NO: 41743 - DNA, 357 bp, Zea Mays
ggggatagggcctttgtagacagttggccgactggtggcgtggcttgagtgagccggcgctcgtgagctcgggccaagctcatggacgtctggaggttcggtggtctcttcagcccgacctccgcccgcaagggttcaccaaggcccgcaataaagagctcaacctgctggttaggcgtgatgacctgcgcacgacacaggagctgtgagaattgtcgctgatcgtcctccacggtgccggtgcaatataaggctttcagctcggccaagctgttgtgtcgaagtggaggcccgaaccgcatgttgatgtactgggcgaagcggcgccatgagaccataccgtagtcgagctcgaag

SEQ ID NO: 41744 - DNA, 399 bp, Zea Mays
acaccaggacacattacctgggtgccacaggcacacaacacaaatgaattgctgatcattcaaccttgagaattgctgaacatattagttttatgccccatgataggatcccagttcatgctgattattatcttgagaaattccaagctgttttttgtgcttggcaaaactctaggtgatgctgatcatgtaccttgaggaatgcttatgccccacacataatactagttagtataatataaaagtgcttttacttggatcggtgctatcggtacaatatcatatgattatctcatttttttaccttgtgctactattagaatgtcttttgttatggaagaaagatattcttttgaaataaaagtatgaatatctgaatttgcttcgatgttaccaatt

SEQ ID NO: 41745 - DNA, 306 bp, Zea Mays
gtgacgtcgaagcatgccagaaggcctttagcaatgtttgtgccttcattggcacaagagatataatccaagagcacatagcctatagggtgtggccacttgtggaaagctaggaaatgttgaaggagactactgctgaatccagcgaaggtggcctagttcgattgaaatataccttcagattcagagagaagtttgacgaaccaagcaatgactggttgaaatgcattgaagctaccagcgatgagctgcttgggacatattcgaaggccgaagatgatgccttgttcgcagccttcgggggtc

SEQ ID NO: 41746 - DNA, 285 bp, Zea Mays
cgcgccttgtgtagtggagcggagccgccagatcggacaccaagtctgataccacttgttatcgccttggcgaggaagaagcagaagacaggcaggaaggaaagaacacggataggcagaggagcagactgaccctgttctggtatatttcctgtctatctttccattacacgcttgctttatattcctgtatagctatggcctaaggcccattactctatcccttgacacggagattaggcctacgaatgcgacggcccaccatttgaacgccatcccttggtt

SEQ ID NO: 41747 - DNA, 317 bp, Zea Mays
ctcagatggtcaatactaggaagggtggtggaattgatctacctcccaattggcacactcggaggatatttagacaaccacaacaacaacctgagatggatcccccaccgcctccaccagccggagcttatcccactgttgcaacccagatgcggataatgcaacagatggcagacaccatggcggatatgcacgcgcagatgcggcaggaacaccaggagatgctccaagagcgagaggatatcgctaggaaatgcgccaagagtgagacgagatacgccaggagagaagggcgcaacagcaacaacagcaagcac

SEQ ID NO: 41748 - DNA, 273 bp, Zea Mays
gccctggggaatcaaacaaaaaatttgtgaaggttgtctatgttctaggaatgttccaggtcttcgccagattgtgttgttaatctatacgcgttgggagacgacttcgtcttgaagataaatggtccttcccacttcggttccagcttaccccgtgactctgtccgggttgtgcggacaagtacgaggtccccttcgttgaattctcttgggacgactgcgtggtcgcgccaggccttcgtttgggcttgatatttatcgagggcctgcagg

SEQ ID NO: 41749 - DNA, 325 bp, Zea Mays
cgcaggtggagctcggagggggccggaggaaagcctggagtccagagaggtcgccacctagatatctcaaccgctgccgcctggagcttctctcaccgtaaggctttcttaccccgcgtccctactccatcatgtaaccttgccgacactcaaagcgccgaagcaacgcctcaaaccctaaggcggaaaccccaaccgacgaactcactttacctccccccaccatccccttccatcagcgcccgaggggatcaccacaccagtcaaggccatgcccttgcccaacaccacccctagatgcgcgctcgctgagacaaccccccac

SEQ ID NO: 41750 - DNA, 858 bp, Zea Mays
aattttctaattcatttattcaatttaattgggctctggactgggcgccaaaatccgagaacagcaggggttattctacaaaaaatcctgagactcagttctatgccacagtggaccgcgggttgattcgctaaaaagtgaggggctcggctacaaaactccctaactgaacggatacatgattttcgtagccactggatctgaagcgaacggtacagattagactcactattgtcgaattggtacgtgctcacggggggtcggattaaaggccaacggcctagatttaatgaatctgagactactcacacccctccgatacagatcctatggtcgcgttttactaccatgaatcgttattccgcttctaatgtaggccatcgatacaggatccaacggcccacgcggattctaaccgaatcgatatagcaaatccaatcatggccacacgatcccagatcgagggcccctagctcatcctctccaacacactgagcgcacggcggcgaacatcgccacggcggcgaggcattccggcgctacagtcctggtacactggctactatccaacctatggatcccctaaatagcaacagaccgatacgggaatcaaaaagcagggcagggttctcaccggagacctatgcagcaacgacaccacgaaggagagcgaaaccgaaggtgatccgccgcgcggaagagaaattcgtcacaaccagtgcacaatctctcccaccccatctatgagcaccccacaacaatcccagcgaatcacccggagccagcaatgcgacaatagcgacgacggcaaggtggaattttgttgacggccggtcgctggctttttccgcccacgac

SEQ ID NO: 41751 - DNA, 516 bp, Zea Mays
tattttctccagtacatctagtacgttgaccatccttttcctcttggggacgttgtaagatccttttgcgccttcggcgctgtcacctctaccgaagggcttataacttctaatatttttgttctctcgacctctgtctcttcaatactatcggcctttggctcacctaatttggctggtgatgccttcggcattgcagccggctcttcagttttttgcgtaaccgcaggttctttggcttcagtagccgaagaggtttcactgtcaaattcaggcactatggccggttcaatgaagcgcggtcggtgagtaaggactttcaccttttttctcttcggctcgagctcgcttggagcagctgaagcatcatctttcccagaagttgcacttttcttttttgcccccgtgatgggtagcgatagtcagggtacatgaacccaatagcatcaaaaactctattcagtctcctctttttccggcttccgaaggccgcagatagcgcattatcttccgctt

SEQ ID NO: 41752 - DNA, 395 bp, Zea Mays
cggaaagctccagacagaaagactaacaagtccggaggcgctaggggcagactcaatcaagcagcagagcaaagctccctgcgtgcggacgatttggtgctcatgcgaacggtctggctgactcagccggacagtccgcccctggccagaagggttagcctccacacaaagcaaaaaaagagacgcgggggaaagcaaacataatgcacatgatcgactggtaaaagtcggccttactttcgaccaattgctcgccaaatatgatggcaagaaggctattctatgcgatcggtcaacaaagaaaccccaatcacccactaaaacaaaacagccgaacaaaacggcccgaaaggcgacacaacaagcatcgcctattcgtcctgtgatgccaagat

SEQ ID NO: 41753 - DNA, 301 bp, Zea Mays
ccgacattgatttggtttgttttatagtgattaactgttgccacatcctagttaatcaatgcattccgctagcaatgcatattaagtgttgtcgtatcatgattaaataatggatgccgctagcaacacatattatgtgttgtcacatcctagtaaatcaacgaatggtgctagcaacacatattaagcgttgccaccaccctaataacttaacagatgatgcttgcaacgtatattaagtgttgcccactaatttcttacaacgcataaaaacatgtgttgctacggatgcgttgctata

SEQ ID NO: 41754 - DNA, 325 bp, Zea Mays
gacaatattgggcacactaaatctctaaaccaaatggagatcctgcagcctagggtagatgcaaagctattaattccgaatggatgttttgcagccaattgtaggatggcttagctttttttgataggtaaatttagcatattagaggtatgaatcatgtcaagtagatttttctttttctgtttggtattttgcgaaggtacatgttgagcacattatttggatatatttcttgtgttcttgttgtaaatgatcctctcatgataccggaattcatgccgggacttgtatgtctcctagaaagttttctttagattatgtgtcc

SEQ ID NO: 41755 - DNA, 318 bp, Zea Mays
ctcctctcacccactcattttcagtataaactggagtagcactttagtaccagtgccttgcttttactaaaaaatgggataagttattggatactcctctactatgtgggcttgtattgatattccattttgatttttgtttgtttatttatttaccaggtcattgtgcttgttgtatatctatgttgcatgtgctgctactccattgaacatatagatgtactacggccaccccgggtaggagacatagtcacgacttgtccgaggccaacctcgggtgggagatgagccacaactcgcccgaggccaaccctggac

SEQ ID NO: 41756 - DNA, 738 bp, Zea Mays
agctctctgcggggaattgggggctggcgtccaacgaattcgtcaacgacgtcgaagtgccgccgtgaccgtgctcgctgccgtggccagggcgttcagcacatcgaatcaaggtattaacactgcccttgcattcgctaactcatggggatagagtagaagcagagaatttggttatggggcctcaaatcgggtgcgcgctgtgctccagtgatggtccgccgtgtgccctgggtggtgccgccgtagctcgacaagggtattgggggagacacctgggccgttgatgcggagatggatggctaggatcagaagccgggtaacagttcgacctaggcttgttaggaccgtccgatgcggggcgagcgcgtaggatttaatgcaaggcaaaggagtctggatccatcggatcgcgatctaacggactggaccgtgtaccgattggggatggggtcggtctaatctgtaccgccagtctctaatccaacggctaggaattaaccgtaccccttcgaccagcgctaatgcaaaagagcccctgtattttaagtgattcaacccgcagtccatcggccgcgtgtctgagtctcggtaatcttgcgccagtgcccctgagttctttggatattgacgcccagtcctgagctcatgaaaatcaaataaataaattcagaaatggttttttaatataaaaacaattcctagaacctatttaatccatagaaaacccatttttag

SEQ ID NO: 41757 - DNA, 344 bp, Zea Mays
tacaagtgtatcgttcaaaaagaagaggggagagaaagaattgtgggcgggtgcaagtgcaacatacaaaaagcatgctaccagctaagcctcccatctataatttttttatctaagaattagcatcaacctctatataccggaagcatgctataaactttatacagcccaaagaataccccaaatacacacaagtctggtattttatttaatgtccctaattatcaaccatttattgattagtgataaataatgaacaaccactaagattatgtcaaattacaatttagaggactcagaatttagcagctaacaaatactaagtgttatatattacagaattt

SEQ ID NO: 41758 - DNA, 312 bp, Zea Mays
gtgaggttggatgaacttagggctcgattttgagtaagatcctctgactttttgtgggtgcacaatgtaacaaaattaaagctggttaattaagcttcaactttgatacagggtgatggttgggtcaccacataaaatatggagcaaattgaccccaaacatgctctgtcacgctcttcaaacagagattccaatggtacagtagactgaacgagatcgcaggttcagtgcaccttgccgccagcgatccctaagcctggattcacgccagtgaggtgatttgtgctcaccggtgccccaataatgtctcgc

SEQ ID NO: 41759 - DNA, 328 bp, Zea Mays
aatttttggggcacaccatctctcaggatggggtatcagttgatcctgaaaaagtacaagaagtgatggattggaaacctcctaccactatatggaagatccgtagttttctgggattggcagggtattatcgacgatttattctggatttctctaggattgccaagccaatgactgaattgttgaagaaaggagtcaagtatgaatggagccagaaatgtgaggatgcctgtcatacactaaggcagcatttgacaacagcacccgtattagctcagcctgacaacaccaaatcttttgaggtttattgtgatgcttctggtactgg

SEQ ID NO: 41760 - DNA, 327 bp, Zea Mays
ctgggtgccaatttaacagaaacacaggggctatggagcaagtattcctaagacacagagcgctgttaactgaactgcgggttgatatatataaagtgcggggtctctttaggaaaatggcatggcgaagaggtatctgttgatatgggccgtcagatctaagatcaagggttaggattagatcctacttaaaatgaatcggtatgcaatcggggccattggatttctaatggacgcctaggattttaaaatactcagctcaactcatgcccgtcggattagaatctaacggcgcctggcacatccgaccaaatcactacgtttcat

SEQ ID NO: 41761 - DNA, 274 bp, Zea Mays
tgacatggcacgctagcattttagaaataaccatcaggtgatgactgggcgctttttagaaatggcgtttggcccaggaaaaccccatatgtactgcactgttgcatgtctctgcattctgtgccttagtttcgcttttctgcatctaggccttctctgccctcttgcaatactgcctccgctctgttcgccagcaaagttgagatggcgcccaagcggaaatcccagagttcgtctgctgcaatcattcctcctatcgatcccaacattcagt

SEQ ID NO: 41762 - DNA, 493 bp, Zea Mays
tgcttcttgagctccaccaattctggtccagataccctgtaggctcatttaaatataggggcggtgccaggaataagctctatggcgaactcaactttccgctcaggtggcatacctggtagatctttagggatcacatcaggaaattctgacacaaccttgatagcctcaagtggatcgacctctgtgctattaatagtcatctggtgacaacctcctttctttggctcgggtcagactagctcagtcaccacatcttctcccagtggggacaccaacttaattgtcctcttatcacagctgataactgcttggtacttatctaaccaattcatccatatgataacatctattccctgagtacccatcactgtgaggttagcgagaaactctatcccccttatttccacacttacattcaagcatacactatcgactcgaacttttccaccggctgagtcaatttgaattggtgttgacatggtggttattg

SEQ ID NO: 41763 - DNA, 345 bp, Zea Mays
gttgctttgtcgaggcacgaatggtgggcgccaaatgttggtaccgactgacatgtggtcaagtgggcccaagcactcggagagagggtattcaggtgatcaacaaaatagtaagcagggaacggtagcatcttgttaagcatgtccctccaatgtacagtgcgaaagtatttataggtaaccgggtaggtgggtgtgccctcctaagtacagttatgcccccggttacctgctaaaacttcagaatatttccccgcacgaggtcattacatcgatgctaaatacaacctgatcaaatacactgcaaaccctaccccaaggagggtcttacaaatgggcccgaat

SEQ ID NO: 41764 - DNA, 371 bp, Zea Mays
ggaagggactgagagaatgtttttgttgctcacaatgatagaagaaggataagatggtagatgtgggtgggaagaagagagtataacaacatccatagtggtgtggtaggaggcgtcgaagttagtaacccagtcggtgacggcaggaatcacggtcatcgtgctaaacgagctaccaaaaggcagctgatcccacccactagaccacatgttccacgatggaaccaagtgtgttggcagaggtaggagcgatggcagaggtgctgatggcaccaaggcggggtggaccaagagtaaacctagggtcgggcatcgttaggtgagccgactatggttggggtgcgcatggtgaaagtgcacctgggtatggg

SEQ ID NO: 41765 - DNA, 579 bp, Zea Mays
tgatccttgagttcttgaatcttcaggatgtctataataattcttgaaaaagagatttccttgataatcataattgctgatggggaaaagggtcaaccataattgctgccctgaagataatataatttaatcctagcttcgttagaccttaataacaggcacactgtacactgcccctttgtcgatttgtggtttcagaatagccatggagttaagtgtttattcagctgtttactgtggttcctattaatatttctatcaatcggcgagactccatatttctaggcaatttgttacaatttacaaggggccacagtcgaactgattgtacatgctaccctacaatgtatttctcgtcctactctggccctgtttggcattggaaaaacagcttacctgagaaactggtgaagaacagagtttagattgagaagcagttgaaatggtaagctgatgtagccttgtttgatacagattctgtttaaacttgtgaaaagctctaaaataagccgtgccaaaacatcgcctctgatttatactcatgagataggcctttgccggcgttcatttgcattgtct

SEQ ID NO: 41766 - DNA, 342 bp, Zea Mays
taaaatttcagatgtccttgtttctttagccttcggttcttctattttctctatcaacggcattatgaccggctcttcaatattcggcaggggagtcgtctccttggcttcggtggccgaagaggattcaccgacaaactcgggcactgtggccggttcaatatagcgtggccggtgcgtaagaacctttatctttttcctcttcggcgctggctcactaagagcggctgaagcaacttcctccgcagaagctgtatctttccttttttgaccccgcgttgagtaacggtagtcaggatatacgaacccaatggcatcaaatacccggttcagccttttctt

SEQ ID NO: 41767 - DNA, 505 bp, Zea Mays
cctgttcaacaagatgccggccctgcagttggccgacctccaaccgctcgacatgccatcccgtgtgtgggccgacatctcatggacttcatcgaggcctccctaaggtctataggaagtctgtcattctcatcgttgttgaccgcttctccaagtacgcgcacttcatcgccctcagccacccatacatggttgtctcggacacccacgccttacacgacttcatcacctccatcctcagtgaccgtgacccgatcttcattagtcacatgtggcgacctcttgaagatggctggcatcaagcttcgtttgagcacatcaacaaggtgattgccactaccccaaggatcattcacgcgcctgcgttgactagctcccttgggcggtgtattgctataatacttcgttccacatggcgtccacatcacgcccttctaggtggtgtacgaccgacccttgccacctattcttctgcacgtcacaaagacaactcagacagtggcgg

SEQ ID NO: 41768 - DNA, 373 bp, Zea Mays
gactctccttaaaaaacagactccttaatattaggatctctaaacagattctccttatctaaggatcctcctaatccttatctatatgtccctctataatgggccgactagagggctgtttaggcctcctactataaaccataacatgtgcctactgcccaagtggcgtacacaccaagggaagaccgtcaccgtcagtcgggatccagtatcaaacctgatgacaacagactcacagctttgaaagcatacagaagggccaagggattgtgtttcaagtgtggagatagatgggggcataaccgtaaatgctctactagtgttcccttgcacctagtggaggaaatgttgtcaattcagctgaagaagagga

SEQ ID NO: 41769 - DNA, 491 bp, Zea Mays
aaagacactgacttgtctgacagagagcaaaacagtaaatattaagtgacatcaccatgctggaaaataactgagatatgttcactgcaaacaattttaaagtgttctacaatttaaagtaggtgcagattacaaagatgcatagctgatacatcttatcttaagaacgtgaaaattcagtataaagcagtgaacacaatttcagcttccgaagcagcatgctcaatctgcaacttgggaaggaatgcatatcaagaacaggaaggcgcacatgattggggagggacaaagaaactacagtctagtaccaagaggaaacaactagattgaaaaattatctgtcctaattcattctacaaaatgtataacactgttctaaccatctataggtagattgctgagtcagaccttgttcagttattccccatttcaccttaccgaaggttatttacattatgttacaataagttctcaggtaatatagagaaaat

SEQ ID NO: 41770 - DNA, 293 bp, Zea Mays
ctttaccagcttggtttttcttattcagttgatgattctttgtttatctactctgctaactgcatcaccatgttcatgcttgtgtacgttgatgatattttcattactagctcctcttctgaagcaacaatgcgattactgcagtagctatcagtctcttttcctatgaaggatctcagtcagttaaattactttcttggtattgaaatgacttacaattcttggggcatgacactcactcaacaaaaatatgccagagatattcttagtcaagttcatatggaaacttgtaa

SEQ ID NO: 41771 - DNA, 428 bp, Zea Mays
caggggcctcggggtaagtttcctaagacacagagaatagttcctgtggaccgtgggttgattctctaaaatcataaggttctttccgcaactgcgcaaacgaaggggtacgaagtgttaacggccgtccgatcaggcgcggatggcccggattagatcttccctggttcaggactgacgctcccagataccgcttgatcgcgcgccaacggctcagatttaattaacctagatccaatcgcacccgaacgcttccgatcctacggtcccggttaacctatgcgaaaggggtacgcgcagagccatcccaaccgttcaccccatgatcgacggtcagcaccaaccatcgaaacccctccccgctgacggccgaaccagggcggcgccaccatggttccgcgttggtgcactcaccggagtcacccaat

SEQ ID NO: 41772 - DNA, 302 bp, Zea Mays
cccaccagagctgggtcattaccggcgacaccctcaagggctgggtaaccgccagcatcacccttgggggctggattttctgcaacagccacctctgaggctgaaggatcctcagtcacctccatgggagtcgggcaatcctgaccaacctcttgacaccgaagactgccttccaaagtcgatgatgcacgagataccgcccgggatacctctaatcccacgtctagagcgtcagagcaaacattcatcatatcatcaacagtcggttccaacaacatatcttcaggaatgacatcctcaag

SEQ ID NO: 41773 - DNA, 631 bp, Zea Mays
cgtgaatggatgtgtcgacctgtgggcccgactcgtcaggttcgtcaccctcgttgtgatggcccgtggccgccggcgagtggagatcgccgtggcgtgagcgaggagaccgacaggatcaggtaacgagttatctggttatatttcttcttcaattatttcttgacccctctccaagtctgagacaaaacttatatagttcgcttacatgggccagcccacaacgcaactcacgcacacaaccaaaacagcccatcaaggcgcacgaccacccctgcttcagacttcatctcctgctgactccactccctggctcactgcattctccgctatggcatccaccggtgtgacatctgcccccctgcaacgcttgcttggccccaagcaagagcatctggataacgctgacgcagaacatagtaatcctcccaagttgtggcatccgctggaatgtggctccacctgatcagcacctgcggcacagcccgactccctttcttgaccaatctgcgatccaatatctccagaggctgaacgttgtgaccactcagatccgaggaagtaggaagagtggtaaagacaggagtgtagtctgggatatatggtttcagttgtgagacgtggaacaccg

SEQ ID NO: 41774 - DNA, 333 bp, Zea Mays
ccttgctgtgcctgtgaacctgcgtggtgcctgggatggaagccacgtgctcaaacccaagcagctggtggcaccttttgggggcatagtgtagaaaaatcgagcttggccagcgcatgtttcttatcttgttacttgcgggcatagtgtagtgaagctctccactaccccactcgctagttctgttcaccgtgtgcctttggggttcacatcatcacgttggagttaatcccagccacgccgtctgttttgcttagtactctcacatcgtcgtccctgtgtcctgtggccacaccactggatgtccacctcacctcgggcagggctcttcgg

SEQ ID NO: 41775 - DNA, 564 bp, Zea Mays
cgagaccgagaccaaggggtcgtccgtacgcctgagctctcgagggagagaccgagtagtggttgtaacagtgccagggtatgggccaaaggctacttacgggcccgtctttgtcctggcgcgtgatgacgtcgagattctctgcagcacttatcgagattagagattagagccctcacttggttgatgcagaagtcttcctgaggtgccagtcgagccatctctttgacgtgcgctacagtcgagtggagtggttgtctatgtgattcatggcgtagtcggtggccgaggccgagctcgggcgaggcggggaatttgcctgaggggtgagcttgggtcgggcgcgacggagagattgcacccgaaggctcgtccgcttggcttgtcgtattaggtgtcccatcagagggtgtcaggcggcgtgcgcgcactgtttggcacatgcgtaatcataccactgcgcttagacgtgatcgctgtcttgtccaccatggtactccgttgccacagcgcgggttggcacatgcattaaatgtgcctatcccttacctgttttcgagcgcc

SEQ ID NO: 41776 - DNA, 358 bp, Zea Mays
cctgcgatggttcgaggctatgtccctgagcatgtctagctagcgctttcagagttgagctatttcttccgtcagctttgtgcaaaagagttatctcggaccgtggttgcagacctggaaagattggcacccgtgttactgtgtaagcttgagaagatatttccacccggcttcttcaatccaatgcagtatttgattcttcatctcccctgtgaggcacgaatggggggagcccatgcagggacgttggtgctatccaatcgagagatgtctaaagactattcaaaagaaatgtagaaataaatgcaaaatcaaggcttccattgcagaggcatacattctagaggaggtgtcaaac

SEQ ID NO: 41777 - DNA, 445 bp, Zea Mays
ctaatctgcaaaacattctacataatatctaagagtcaccgacaccttacaccgaggtccctggaactttgcttcttccccaaatacgtccctgaccacggcgcgctcgccgtcgactatctcgctgctcggtctggccaaaaacttcggcggctacccaaaccagctgctgggtaagcatcactgacccgaggcaaccatagaacaggctccaatgtgactaacccggaccaggatgtgcttgaccacggtgatggcggacaccaagcatcgatcaatacgtttcggttgcatacgtaaggtaaaactccctgggttgcgtggataacaatcccgagcacatgagggcgctaaaacacgagcaacaagggcgaggacggacctggaatcagctggccgcaagtaggcggttcacgacggcgcagtcgaccgaattggggggaaa

SEQ ID NO: 41778 - DNA, 411 bp, Zea Mays
ctacttcggcatgtcaccacctctctacagaccaaatcaatattaactacatcgatcggacctcatatcacgcaacacttataattttactatctcaaatacaactatatcacggcatgcacttgagacacttcagttcaacttaacgcaatctacaacgcatttcgacatacacgttcgacaacacagtgctcagacaaacccacacttccaatctacttatcacatccaaccaacaccacgtgcccactgcactcttatgaccaaattttagcacaattatttatgacaacatttattgattagacgagtgaaacaccaaactgattattcgcacatctcgtcttcaaaacaccaatcacatgtcgcataatttatattttcaacccattctaacctatcccaaaaaca

SEQ ID NO: 41779 - DNA, 365 bp, Zea Mays
ggaaaggctcataggtagtgagagaagtcgtcaaggatgattagatagtacttataaccgaagatgctagggattgaggatgtccaaaggtcatagtggacgaggtcgaagggggagtggtgcgagacattgaagaagggaagggtaagcgagtgtgatggccaagctgacaggcatggcaaagcaatgcatcagtgtcgtgggggctggtgatggccgaggtgcctaggagtctagagaggatgttgtgactagggtggccaagacgacggtgccaagtggaggtggaggcagtagcaccgagagcgtagggtgtgggaacacatgataagggagatggggcatgaaagcaaataggatatatg

SEQ ID NO: 41780 - DNA, 331 bp, Zea Mays
gcttgccacggcttcgagtacgtggtgaaaagactacggcatggcgcaatcgcggtgaatgacgatctccacggcgacgaccgtctggccatgtcgctgcgcaagtgggtacggcaactatgcagtaacagtgccccaactttatcccctgcacgagatctttcactttatgtaggtatccgcgcgccaccgggcacgaatcgcaacgccagcgaggatcatggcgcaggatcaccggcggcggtgcaccgaacctagcgatcttcgtcaggttactgtaccatgtgaattcctttcattgctcctgacagagcagattgagaagctccat

SEQ ID NO: 41781 - DNA, 987 bp, Zea Mays
aaacccgagtgatgcagagataagtgctatgctggacatgttggctgaggattcatctgactccgtcgctgctgaaaccatagctattgtaactgtcctcgagcctgaaaagaccttgactgctctaaaatctgatggtgctcgcccaaagcgccttcgcccggccagtcatccaactactcctgccgaggggaagaagaagaaaaagaggaggcttcggcgagtgtcatgtttgaatcaggatgccggcccttctgctcctgctgctgaggaagtgccagtggaactttttactggagctgatcccaatgggtgtgaccctgctgacgctgaccccaatgggtgtgaccttgatgatgctgatcccaatgggtgcaatccgcccagagctgaccccaatgggtgtgttgtttgtattgttgacgaggatgaggaagaagaggaggaaatccccttaatttggaaaaacagtcggcgctacctggtcagtggggggagtagtgatattccttctttagccttgtctgcactcgttggtctgcaagagttgtccatagcaaattttgatcagcctctcaaggatatggttcctgaagatctgctatccgagccaacagatggtggtatgatggacgtttgcactgacattctggatgtggggttagagttatcccgagcagcgtctcgagccccatcgaccttagagtgcggtcttcacagtcaagaagctggtctaggttgctccactcccatggaggtaactgagaatccttcagccttagaggtggctgttgcagagaacccggtccccaaggatggcaccagcgatgacccaggccccaagggtgttgccggcaatgatccggcccgggtgggtagtgtgagctacaacccagcccccgagggtgctgccggtggtgatccggctccgatgggcaatgcaatctacgacccagcccctgagggtgtccgagtgggctccccttc

SEQ ID NO: 41782 - DNA, 410 bp, Zea Mays
aaaagattcggaaaccttatccggagtccgggcaacatgtctagtcgccaacaactagttgcagctgcacaacgacagtcacagtcacaaacagagaggcgacatggagccaccggagttgacccacttcttgcccgttgcattcgtggcgtgcagtgctggcctctcttcgccggtgacacttttgtcctgttgccggcggtggttgggttattgcagtggccacggcggagcacgaggttttgtctttttcagcatgtgctacgagggttgggccgttggggattgtaagcgtgtacggcagaaaggagagatccataatggacatgcgtgggcctggactttacatgtactcctacttagggagcataagtgggccacgagcccatggacaaggactcgtgattctg

SEQ ID NO: 41783 - DNA, 345 bp, Zea Mays
tcaagaagctggtctaggttgctccattcccatggaggtaactgagaatctttcagccttagaggtggctgttgcagagaacctagtcctcaaggatggcaccagcgattacccagcccccgagggtgttgccgacaatgatctggctcgggtgggtagtgcgagctgcaacccagcccccgagggtgcggtcggtggtgatccggcttcgatgggcaatgcaggctgcgacccagccctcgagggtgcggccggtggtgatccggctccgatgggcaatgcaggctgcgacccagcccccgagggtgtccgagcgggctctccttctcatacctccatggatgt

SEQ ID NO: 41784 - DNA, 530 bp, Zea Mays
cctcttcgatgaagccaacgcgcagcagcttctggacctcctcacggatgaaatccttccgctcaatggactgtctccgaggcttctaactcaccggtttggcgtcagggtggatcttcatatggtgctcgatcacctccctggggatcctaggcatctgagacgtttcccatgcgaatacgttggcatttacctggaggaaggcgacgagcgcgatttcctatttctcctccagattgcccacgatgcgagtggtctgggaggaatccacgccgacctggatggtcttaacgggaccgccgtctgctctagatggttgcaccttaggcacctcggtaggcgccttggtacaggaagtcgaggggtccctccccccatcatccaggcgagcggtttctgccgccaggacgtgcaacttctcgacaactgcaagcgcagcggcacggtcaccccgcacggtgaggaccctagcaggggatggcatcttcaggaccaagtacccgtaatgggcaatggccatgaaccggtat

SEQ ID NO: 41785 - DNA, 392 bp, Zea Mays
tgggaaaattctgatgtagatcaaacatttttttcaagaaactgcagattgcagataatatgaatttagggctgactcccattatcttcatatataatataatttatgaccaaaaatctcacatgaacaaccttgtaacatattacatgaaaatatctctaaggaacagcagagatataaattgtcaagtaaatattgcatagaagcatttttgagattagtggcatgtcgcttggattgaaggctaaacacagtcacacattaatccttgaagcagaaagggtcaaaggtccaagaatcattgtataaattatttacctaccaaactcataattcgtattccaaaatagacctatcaagctcgtaaatattgtgttcagagaatagcgtgt

SEQ ID NO: 41786 - DNA, 309 bp, Zea Mays
caccgtcaccaaagtatccaagctgctgcatctcctgcacgcgaaccgaggagatcctcgaagtgccgaactccacggtgtggcctggctgcaactccgtcgccaccaaatcacttaaggtatcctcggacgacggatcggccgacgatgcactcgcagcacatgaggaagaagacattgctacgtaccgtcggcggcagcgtgcggtctgcttgatgcgggccagatttccgaagcggaagaacaaggagggcaggcgagcagtttgaaaaagttagggtttttatggtgcacgcaagggtaagaaac

SEQ ID NO: 41787 - DNA, 326 bp, Zea Mays
cgcgtgtgggcgcctgcgcgactaggctcgaggaatttctcgccggtgtgcatccttccgcctctcgtcgtggctggcgtatcacactgctccatcaccggtacatcctaactcaatcgaattaacctgctctgtagatcatgcagtacttgcccatgaaggaaaatgtgttctggggcgcgagatcagcttgcgccggtgagaccgccgccgtggagctttctgcgtcgtcgccccgctgattgagattagggtggttgcgttacccgtagatcagatcactgacggctcggatgaaagccgcgcaatagtatgtggccgggacc

SEQ ID NO: 41788 - DNA, 396 bp, Zea Mays
cacgattgttattaccttgctggcggtgtggcataccttctgtgttttgaagaagacggtgatgtaggcgcaaatctctggtggctgcttcatcataattaccttcttcatcaaacaccgcatcatcgagaagacgtggacgaggaggtggtggtggcggtgcttgttgttgcgtctccaaaacagcaagtctgtcgatgatctgggacaatcgtcgatccagcctctcataagtcttgccaaggttcatgtctatgaaggcatcatgcactgacctgtggaccatctcctccatttggtccttcaggagcttgttgtttgcctcaagatcttggcggctaacacattcatcgaagtctgtagggatccttgcttcttcttcgtcgcctgccatcg

SEQ ID NO: 41789 - DNA, 895 bp, Zea Mays
cgatgagcttattaagctgctgatcgacttccactttcatcaaatccaagtattctgcgtaagtaacttctacatttgcatccaagaagtgttgatgcagccctgacactacagttgcaaatggtttgaagttgcttgcgacactagagcaattatgacacgacaatcctggcgatggcgcagttgcatcgttgaactcgattaaaccattgttaagctctgcagaagtcttagtgtcactggaagccggtctgttgagcaaggacagatcaccctgggcggtaaaccatgattggtcaatggtgactggtctagccaatctaccaagaaatgggtccattctttcatccaacacctgcaacatcgatcatataagattcaacagttgattgcacattcagaacactaactagctaaaccattatgaatctaaaactcgatgcctggcatgaaagcaggagatacttaatttcataggaaatgaaagtttaacaacaacaagtatcgactcacatgcattactgttctgaaattcactaaccggtagcggtaggatccgtccagtaaagtaaagtaataaatcaatgtagacggactctggtggcggatgtgaagtaacatgtaacattgatagcagcaggacgggtaacagaacgtgaacgccagtacatagacaattattccatacttgcattccacaccacactcaatcacacacagaagtgagaagccacagccagctgcggtaaggcgtaaggaagtaacggcaatactgcaaggtgagatcagttttgacccgctctgttcgtcacttcgtctcccttgtgatttccgaactcccgcaccaaaagcagagcttgcactggagcagtgaagttgcctgactggaatcgct

SEQ ID NO: 41790 - DNA, 330 bp, Zea Mays
ctcccaagaaagacatagtcgaagtatccactgataaggcttcggaggacacagatttggacctacgacacctgggcagccaagaactgtctgacgaagatatttctgaattgaaagaatttgcccttgctggcggatacaagaccagatccgtgctatttggtggtgcggacgaagagattttggggtgtattcctgaccgggtcggggcaaagattgttaatactttatcaaagactattggatttacgaagcttgagcaggacctcagtaactatagaagacaacacattaatgggagcttattctactcaaattttaaggtataaa

SEQ ID NO: 41791 - DNA, 614 bp, Zea Mays
gtggaatggcatgaacttcaagctcaatttcaagcaagatccattgactttttgtgggagcacaatatagcaaagttgtagctggtttatagcactacaatattgctgtagatcattggttgtgttgccatatgaatctgggagcaaaattgatctcaagatgctctgtcaggtcgtctgaatgccaattgccatggtatagtgtctgagcagatcagaacgccagcacggcagtccctcgccgccgacgatcttctcgccacgattcatgccgccggtgtcccaattcgtactcggggaaagtcgataacgtcgcaggctaaaagatcatcgccgccggtgagctggaagccactccggctagccgcagtacctctccccttgctcatcgccctcggataaggattctcaccgccgttaagccgtcgctgttgtccgccgcgtgtctctgcctatctaccgcatcaccatgactcactctagctccccgttgatcgccggagcaatggccacggcactggacaccaagccattgcgctaataaattttccctttctctgagcgccgcgcgtcaccgatcgaattcccggccgccgccctcccgtagtataaat

SEQ ID NO: 41792 - DNA, 299 bp, Zea Mays
gagctgtccttggacaggcgggagacggatctcgccaggcgagagacagatctcgcctttagggaagaaatgctcacccggcgaggcgagttgctggtcgagcacgagctcgaagcagaggaaaaggagaggaagctggaggagcagatccgccagttcgatgcggcacaggcgacgccgggcccccaggcaatggaggccaccagaaaggccctcaaagatctccaagcagaacaccgcgccggggtccagcgcattgccgagtgggccggcgaggcaagcacgacactggtgccact

SEQ ID NO: 41793 - DNA, 407 bp, Zea Mays
gtgcggtggggaagctgtgagagcactgagtgcgtgaagaacttgacacttactattgaaaatttgtgcttaagttccgtcgatttctcgaagaacccggggtggcgacgcgtaccatgctagggcttgttagaatcggtagcaggagccaagtgttcggagttcttgagggcgctaaacctctgccagctcgtgttcttggtcgtagcgtcgcctgaagtatgccgtggccggggaagactctgcgtcgattgccagaggtcgtcattggaacagccgagggacgggcttgtcccggcggcaaggaacacaagctcgcacaacctgtacagtcgtcgtcttcctcggtgcatgcaacgcggaagctcacctgctgcccaccgacgcgggagccaactttccttctc

SEQ ID NO: 41794 - DNA, 489 bp, Zea Mays
gataactcagttgcgatacaaaacataaataagttcaaagtcacagaaataaaacacaaagtcaaaagcaattaagcaatacatatccgcctttcaagttccgcagctttctcagctgccttcgtcgcttcttttgcatcatgagaatctttttcactcttttttattatctcgtgcgccatatctcggccgccattttgctagatgtcagtgaagaatttcccgccaactaagcttgcttcggctgaggggtcttttgcatcttcaatagataaggcagcttcggtttgagtcaaagctttcacgtgatcacagcctgatttctccaaaatagccgcgattcccctggcacctgagaagatgcagacatccccacgaccactcaaaacttcatcaaacgctacagcttcgttgctgatccagtcaattgggccttcaggatcgccccttacgaaattatcctcgctagagaatgcgccaacattggcg

SEQ ID NO: 41795 - DNA, 440 bp, Zea Mays
atataagttcctaggattatttttgtattcaaaatcaatttctaaacttgtttatttgatttctctgagctctggacagcgggccaaataataaaaagctcgggatctaacctgtaaaactttcttagactcagattactgttgccgaggatggcgggtttatttgacaaaaggacaggggctctttaacaaaaagtacccgcgaaggggtacgggagatcctcgatcgcacgatcctacatctacggttaagattagatctacgttattctacaccagcgcatgattattagccctcggatgcctaatcaacggaccagatcacaaactggccgaggcgcccgacacccgcccgatcacgatccgacggcccatagctattttccccagatccgaacctagccgtcaatctccaatctaacggccagcggcccttcttc

SEQ ID NO: 41796 - DNA, 348 bp, Zea Mays
gggagggataactcgtacgtggcgccatctcccaggcccagccggagttactcaccggcggccgccgtgactcagtgattccaccgcggtggcgctcatgccgtagttctccctcactgtaccttctaccgacgtggtcgacatgcgattgcgatactatcctcagccgcgaggtgatcgcaggaccgccacggctataaatagccattgggttcacggcaaggtgtgatcatcgcaaacacagtgactagatcgaagtcaaattcgcactgccctctccaccttctcccaaatcgattgcgcacggtgaaagcacagcttcttacagccgagtagcctcaatctcca

SEQ ID NO: 41797 - DNA, 467 bp, Zea Mays
gtgattgagaggcaggtgatagtcaatttgaggctgcatcagattctcgacgaacttaaacagggcttcaacaaacaccatgctttactgattaggatgtcatcttctccatactattggttcttgatttgtggctggccggcggtgggtgtgcttggtggaggagctcgtcctccatgctctaatgcccccacagccactcgcagtcgcagccgagggtgagcacacgggacaggactgctggaggacagatcttggaagctactgttgctagagggtggtggaccggtggtgtggttagccaccagggtaggggaggactcaagcagagtgcggagggccggagagtcgagggaggtgtcagggagacgagacgtgattgctgcggcggtacggccttccagttggcagccaccaaggcatcaattcccccacgacatgtgagtcttgattccctagggtttctt

SEQ ID NO: 41798 - DNA, 428 bp, Zea Mays
tctgtcagaatgactgatgaagatcacgatggtacaatagatgaaaagatcttcagtgctgtgaactcgtcgccggtgatctccgcgccgcgatccacgccggagctataatttgtgcttagtagtgcgtggataactgctagcggtgaaacatcttggtgttgggatgagctcgggccatgttgtcgctcagttcgccgtacccacttgcatgacgacgtggccggacgatcatcaccgtggtggccaccgttctttgcgattgcgccatgccatgaacatttcaccatgttgctataaccgtggccggcctggagttactgctcttgagtcgttgtaccggcgggcgccacgacgaactcatccagtgtaatatcccaccgccgccgtgatcgtcttcatctcaaattggagaagcacatagccag

SEQ ID NO: 41799 - DNA, 337 bp, Zea Mays
acatggtgtgccacgacatcagttagcctccagacacgaagggagtagcagtggcagtaatgacccgattggagacctggaagccagggtggagcaactccggtcagaactacgccacaggaatagggcacgtgagtgggatagccaccgcatagcggagctgtcagccgaggttagtcgcttgcaatacaaaatttcggaacgtgatacaaccattgattgggccgtcaactcgcgctcttttgcttgggactgtgaagcgaaagctcttgctcgagtggcagagcttagtgcatcccttgagaacctgcaagcgtactgtaacactttacataaa

SEQ ID NO: 41800 - DNA, 303 bp, Zea Mays
caacctgacacttagggacacatgcaagtcttaatcatgaattgcaccaataatagaggtgggtgaaatggaaccattgacatttagcattttagagaacttaaaagtaagactttaccgcataacatatttggaaaactaccagcgagtcaaaatctaaactataaacacatcgattgatctagggagctaatttggtgtgttggagttgggtgggtcccacagtgggtgcagggagtgttttccagagtagttaaatggtgaaaggttgtagtgccttgttgggaaatgagaaatttattg

SEQ ID NO: 41801 - DNA, 326 bp, Zea Mays
agaatagcagccgcccctattgccgccgttggtaatgcccgcgcatggggttctctggctttggtcggctgcttcggttgcatcgcctggagccttgtgattccacgccggtgcgaactcattgccgcgcctggagagagatgagattgagggagacggtggatgcttctgtgcgactgaagttgtgcttgcgcaatggcgacatgcgcccgaccgcacccacgctgcagggtcgtgaagactggtcaggtgtggagtcctctccctgggacggtgaccccgagttcacccgccgttgagccttgctgcgtggtcagaccccccac

SEQ ID NO: 41802 - DNA, 362 bp, Zea Mays
cggggtgaccactatgccctgctaacggagcaatcggcttaagtcgacaacgacttaaggcggtgcaacatgctcgcgcctacttaacttggggtgaccactatgccctgccaacggagcaatcggcttaagtcggcaacgacttaaggcggtgcaacatgctcgcgcttacttaactcggggtgaccactatgccctgccaacggagcaatcggcttaagtcgacaacgacttaaggcggtgcaacatgctcgcgcctacttaactcggagtgaccactatgccctgccaacggagcaatcgacttaagtcggcaatgacttaaggcggtgcaacatgctcgcgcttacttaactcagggt

SEQ ID NO: 41803 - DNA, 523 bp, Zea Mays
ggcgtttgaggtcggttatgcttaccatgctttctcgcccgagcatctatggcccttcccctcagagagcttctcccgtcctcgtggtgacctcccttccatgatattcttccctgcccccatgggcaccttttccttgtgctccgctacccaagagcgcctcaatgacctcgataggaagggattcctccctcatgagtcggtctcctgttggcgtctagaggagaagggtggtgctccggcgtcacgcgatggcaaggtcgtggtgatggcctccttctatgagtgcggctttgggcttcccttgcacatccttcgtgcgagggttgttcttttattatgggctagagttgcaaaacattaatccaaacatgatcctccacataacgtgcttcatgacgctatctgaggcctacctcggcatgagccccactggaagctatgggcgcttctgtccagcccgcaggcaactctggccaagccaaccaatcctttgtcggttcgttctacatctagctccggg

SEQ ID NO: 41804 - DNA, 518 bp, Zea Mays
acataaaatttgaagcaatagccagttgaattcggcctggcagtcgtactgttcaccggagttcagaaaaatctcgccggggataagattgccaccgcggctggggattacactgcggccgcggtaaaaatcttccgcgacgtggcgcataaactttgaggtggcgctgctcggttaatcggtgatcaccggacgctcgccgtggctctgcccacgcgggtgagctcgccagcgcacttgaagatccttgaatctcatccacctctggccatcttcctataaattgagcccgagcgctgcttcttcaccacatcacacacatgagtacttgcgcaatcgacccaattccaccgaagaactcagataggccataaatctcctcctcactgttcttagcgccaccatgaaggacctcttcgtgggtagccctcctcggggtcagtactcgcccaattgtctcttgttctagcatgtctttagcttcctatcgctctcggtgctgtccaattgaattttac

SEQ ID NO: 41805 - DNA, 288 bp, Zea Mays
cgtggtgaagatctttttaccccgaggcgttatccgggcaccagtgggcacaaatcgcattgctggcacgaatcgcatcgtgggggtcgccggcgggaaggtgcactgcacctatgatctcattcagttcactgtaccatcagaaactctatcaggacgcctgacagagcggtttgcagtgcctagatctccatttttcatgtaataacttgtaatccacctttaacaaaagttgttgtcctataatccagctttaatcttactatagcaaccatacttcaattctca

SEQ ID NO: 41806 - DNA, 382 bp, Zea Mays
catgaagttagggctcgaatataagcatgatctagtaggaatttggctatagttgttatggcaacattgtagctgaatcattggtctacaactttgttgcagagctttgggtgggatgccaaagaaaattgagagaaaattcgccctaaacatagactaacagactgtctgaatgagcctcgcgatggtacagtactgaaacagatcgactgcccagccgttcaccgtcgacgatctctccgccatgattccagctgtcgctacgattcgtgttgcgggaaaggggataagcacgatggagtgaaaatctcggcactggattagctcgggctcagacacagataagattcgtcgtacccccttgctcatcgatcactcggga

SEQ ID NO: 41807 - DNA, 660 bp, Zea Mays
gatgattctgatgattctgtgtctaagtgttttgagtctgatgattctgggagttcgattgtgtggacagaggagtctttggatgaggatttggattactttgcggcattggatgtggctgtggcggaggtttcaccgcatgtaatgggtgatgaggatcttccgggtgcgagtgttgggcataggcggcgaagggtggtggcgaaatggagggtgagtgagttgtcgcgaagtgataggcgtcatcgtggtgaggtggaaggtggtcgccttcgtgtggacgggactggcaagcgggaattgttgtcctcgtcggttggggcgagtgtgggtgagggggagctgcgaagtctgtttgcgggtgaggaattaaggataatgttgttcaactataggaagatgggtatcatcccgaaggttgagccaatgtaatgtgtgatgccctcgctgtatgtatgtaaccatactcttgtgtgatgaagctgcacgctttcgttgatcaggccgctcccttaggcttctgtacggagttctttagaaaagacttcgattttttcgtactagtattccggctgcacccgtaggcgacttttgcgcggagggtcttttggaaaagacttcgatttttcgcacttattgtgctagtccggctgcaccctt

SEQ ID NO: 41808 - DNA, 604 bp, Zea Mays
gtccggtggtcaagcccgcgacaatccgagtggttctctctctggctatttctcaggactggcctattcactaactagatatgaagaatgcattcttgcatggtactctcacagagacagtgtactgcatttagcccacaggttttgtggattcctctcgtcctgattttgtttgtcggctcaataaatctctatatggtctaaagcaagctccgcgtgcttggcatcaacggtttgcttctcacctcatttcgattggttttattaaagcaaagtcagacacttcactcttcatatatcgtcgaggcgccgataaagccctgttgttactctatgtggatgacattgttatcactgcttcctctgctggtcttctgaagtagattattggggcccttcagcgtgagtttgctatgacagatatgggtcagcttcaccattttctgggtctttcagtggtccgctctgctagtgggttatttctttctcagcgccagtacacgcaggatattttggagcgggccgggttgagtgagtgcaagccatgcagcacccctgttgatctacacccccaaattatctgcagatggacctcctgtcgccg

SEQ ID NO: 41809 - DNA, 604 bp, Zea Mays
cagcgcgccaccgtacggcgcgccaccaactcacccagcaccacctccgctctagcctatgaggacctctaccacaccaccatggtccccgttggctggaagctgggatgccaacgccctcgccctcgcctacagcacatggcgttggctccaccttcctctgactgggtcatcgactctggtgcctcctaccacaccactcccactacaggcatgctatctcactctcaccaacctccttccacacaccctacctcgatcgtcgttggcaacggatcaactcttccgatcacctcagtaggtgcctcggttctccctggaccgttctacctcaacgacgttctcgtagcccctcacatcactcacaatctcctttctgtccgtcggttcaccaccgacaattcttgttccattgagtttgaccccaccggtttttctgtgaaggatctggctaccaggaccccactcgcccgatgtgacagcgtcgggcccctctacacactccgggcgtcgtccaccggcgtgtctccgccctccgtcctggtctccaccgccacctccaccacttggcatcgtcgtctcggccacccaggacctgacgtca

SEQ ID NO: 41810 - DNA, 406 bp, Zea Mays
tgaccgacttgtggaaaaggtgatcagccttgaacttgccactacttcacagaatgctcagatcgatagaatgaagactgagatagatggccttcacgagcgcctgcatgctttggagcaagacaaggtggctttggttgttgattctagtaacttggctgacgggttgaggaaagttgaagaaatgctgcaagaagtacaacaaatttggaagtccgtacaaaatggtttcgagaacatttgtaaacaaatgactgaagccgcccatgaactaactgaattcgtcgaaacattacatgctcctgagcaagaaagcagtgacttcgtggattcatcgcgagactccaaacacgatacttctctggaagattactcgggactaacaagtctgtctgtgcaaaacgag

SEQ ID NO: 41811 - DNA, 551 bp, Zea Mays
cgcggagctcggaaccgaaatcgacctgtgcgccgtgatttaccagccgcggactccgtgcgcgcaagctcaaccacctccgcgatctccccggttccgtggcgcgtgggatgcggaccccctccttctttccggatataaatcttggcatgcccctgcctcgctcgtctcagccgagcaacagagaaggcgcagaccacgaactgcggacggcgcgccaccgtgggatcgggcctctgcgtcagccggaacatcaaggtttgcaccgaccccttctctggagttgttagaaggcagtagaagtagcgccacgcggaaacctcggcgtgtgcccccggaatttcacaccggagcaccgccggccgccctaaatcgcgaagcaccgtggaccgagggtctgcgttgtgtggcgattgaaattgaggggtgaaataggattggggcatcgtcaatttcgtgtgggtcgtgcgaatttggggtatggcgcttgggaggaccggatttcgcgggctccgatgaaccggtcgccgtgcggtggcctgctcgccgtg

SEQ ID NO: 41812 - DNA, 619 bp, Zea Mays
gaaatggcaagaggaggaaaatcatgcagttgcgcttgagcttatcacggtaggaaaaagtcttgacgcacggtgccagctcctggttttcaaaagacacgcggctgccataggatggtgctcggccaggttggattatggataggcggtaattccttttttttaccgacatcgatcaatctggaaacagcaaagaggctcggccgacgtacacagcctgagtatgccgtccttactgcccaaacagatcacagctagccagcacattgcaccagaagattcattcattcgggcaatgtccctttttttattaaataggtcaaactgaatggcgtaagtggaccacagcagagacatgaatctctctgctccctaaagctgaattttaaattgcattcaaagtgcttgtatcaaacctgaacctgagacttccaatcagattttctctcattttcttatgctagtttgatacagttctttactaggagttgttctcctacgatcactctcccactttgctttaaaagatatcagctaaaactcaacaaacctcaggttagagagctccaaagtttgggcaataccactgaactgcacccgtcagctaaccagattaaat

SEQ ID NO: 41813 - DNA, 554 bp, Zea Mays
gggggcttttgctggtatattacatggctccgcctcgttaaaaacctcaccccccgggaggaaaagagtgcgggccggaaaaacattgtttgctggattacaagggcgtgtgggccctgatggttagacaaaaaatttgtggagattgtcaatgttccaggagtgctataagtcttcgccggagggcgttgctagcctgtacgcgctgggggatgccttcgacttgacgatgaatggaccttcccatttcggctccagcttgcctcgcgattctgtccgggtggtccagacgagtacgaggtctcctttgttgaactctcttgggacgactgtgttgtcgcgccaggccttggtttgagcctggtatttgttgagggcctactgggcgatgacgcggtctccgtcgatgaggtctttagacgttggttcgtcgacgtcggggaccgctgatgtgcttgttcggggcgacccatgctttatctcctgcggcgtcatggcctcggatccatataatagacgaaaaggtgtgaatccggttgcccgacattcggtcg

SEQ ID NO: 41814 - DNA, 366 bp, Zea Mays
ccgaaagaagaaaaggctaaatagagtttttgatgctattgggttcatgtaccctgattaccgctacccaccacgggggcagaagagaaagagtgcaacttccgggaaggatgctgcttcagctgctccaagcgagcccgcgccgaagaggaaaaaggtgaaggttcttactcaccggccgcgatatattgaaccggccgtagtgcccgaatttggcggtgagacctcttcggctactgaagccaaggaacctgcgcctacgcagaagattgaagagccggctgcaatgccgaagacatcctcagccaaattagctgagccaaaggccgataatataggggtcgaagaaacaaagatatcagaaat

SEQ ID NO: 41815 - DNA, 549 bp, Zea Mays
ttgctccttctgcgctggtgatctggctcgtatcaagcaaaccgcgcgccaccgctgacggtacgtgacaatgtcgtcttcttcttcgtctgctacgagcgcgtcgccggccacgtcgtcgtctgaggagacattgagcgatttggtggtggttgaactgcagcacggtcataccgtcgagttcgggacctcaaggattttttctggccgcgtgctagagatgcgcggctaggttattttgggaacggtgtagggtgggctccagggatagaagaggtccctaagccagaggggggattgattgtttttgaagctttttttgctgctggtcttcgcctcccgacgcatcggtttgtagtggatgttttgcggaagttcaaggtgcaagtccatcagttgacaccaaatgcagtggtggcacttgcgaagtacgtctgggccatcacctcatacggcgggcagccatttgtggaagtcttcgctaagaattattgtctgcactggcagaagagaaaaataggtgataagatagcccaatttggatcgtgc

SEQ ID NO: 41816 - DNA, 322 bp, Zea Mays
caggtttgggccacttgaggagcgtaataccctacttcttgggatgactttgtatgtgggaggtgtttacaagtggtgtctacctcgtggtgaagtgctagtgagatgaaaacgatggggacccccttggccttatatacacgaccgtagggcacttcccgcgtacacactgatcacactcttccagcttatctcctagctaatattgaacagacttcacttatctcgaggaaaacccggcgcctccgttctgagctatccctggcgttcgaggatgtcgggcgcgggaaaagcgaatagcttcaacgggatgacgcccaag

SEQ ID NO: 41817 - DNA, 334 bp, Zea Mays
gaagatagattattcatgtggttctttcatttcatgacgatagatcacgctcttcaccttctctatcattgtgtcccacatctcatatcaaatagaggcatggcttgtcagtatcatcttcccgtatcatagcatagataggctcaatgaaactaagaaaatagctcatttttataccaccacagatcattcaatcttctccttgacaaatcgagcttgacgaggattatctttcctataggcactggcgcactgcacttttcactcactaccatcactgaaagagcatcttttatagcaataaatctcttcaacatcacaatagcagaggcaa

SEQ ID NO: 41818 - DNA, 353 bp, Zea Mays
ctttaactaaagttgatgactccctcctttgaattctgagtctccagtttatgtttcatgtttgaagtcttgttggtattgaactccctattttgctcagtttttgtgtccttgctatttgattctagtgacttatctctctcggccgacctttactccgaagcaaattctctgtccgactccacttgactgacttatcatcctttcattcaatctgaaaaactgctccccttgtgctgatgctgtgataggtctggggtatacaggttctacgcctgacggtttctggcgaaaaccctagttctgttttcgctgtaacttcctctcgaaattctcatgcctccgcgactccg

SEQ ID NO: 41819 - DNA, 330 bp, Zea Mays
ttgcatgacatggttgatgaaaacaattttcaaccaccacaagcacctgtggaagagggatcatttctgaaaaatgtcattgaacctatctttaaggttctgcaaaaagtgagtgcataaagttcaaagagcaatccacattaatattctagatgtattgtgcttaaaaagttattattcttcattcatcctgaaggaagcacaaaaaagtagagggggtacagcaggccactcggcttggagaaattatgatgacctgaatgaactattttggtaacttctctgccaaactattgcaaaactaggctattagtgtgtatgtgtttttcc

SEQ ID NO: 41820 - DNA, 349 bp, Zea Mays
ggttgaggaagactgatcctacggtcttaccaagccttggtcggcttttgctttgcaactctgtcctagtatgctgaaactcttctctttggccatggctaccgatactgagttgggaaatggaaaggagaccatgttttggactgatagatggttgttggggcagtggcgcatgcaggaccttgccccccatgtctataatcgggttccaactagaattgctaatagcagaacagtcgcagatgctttactcaacaataaatgggtgcatgatattagaggacatgtctcctggctgcttattcgtgattttctgaagatttgggaggctgttcaggaggtggtgctg

SEQ ID NO: 41821 - DNA, 1125 bp, Zea Mays
aagaactccagaggactatgaaaaaaagggtgatttgacaggagtaagctgccctaccttttgtcattattttttttgtgcttggttttaatgaccaaattaactgtctgcatttctttttgtctaggcttctgttcttcgacattacaatgaaatattaagatcttgtaatgctcttgattaccatgatttcattaactcatctataacccttctcacaaattttcctgaaggtagtttcagctatagtctcagtacattgttggactttgattacttgttgattaaaaaggtgtgccccttgcttgtgcagtgtacaaagagtgtcaggatatgtggcgggcaattgtagttgatgagtttcaggataccagtgctatgcagtattgtcttctgaagattctagcttcccacaatcatataactattgtcggtgatgaagatcaggtacacagatttgatatacatataaaaaagggcaatctgagtaccgcaggttctcatatgagtggggcctggtgaagtgataaaccgagacaagcttccaccatgaatgtggagaggctgcttcgaactcatgactttgtgactcagtgagatagctttcatcactacaccaggcctgcacttccaaaatttgatatgcatatatcatcctaaaacctttggtttcttatatgtttcccctaagctttgtcttctcttatgttagtccatcttcagtttcaatggtgccgatgtatctggctttgattcatttcgtaaagattttccggatcataaagaggtatgcattgtgttgtctgcatgaaattttcaaaatgttttagtcccgtgttgttctgttaagtagcttgttacgccaatgactgcagatcaggttgagcaagaattaccgctccacacgtgcaattgttgaagcagcaactgctctaattcagaacaacactaagcggcatcatcctaggcttgtagagaccgacaacccttctggctgtaaggtatccttgtaaattgcactgatggattgttgccatttgttctcatatcctctcagttacatgtctaatccttaactttacatagatcactgtcaaggagtgccacagtgaagattcacaatgc

SEQ ID NO: 41822 - DNA, 271 bp, Zea Mays
ccaatggagctatctgacgacaagccagagtgctggttactgagttgtagtttgtccagctgaatgggttgctcatctggcaggatgggctatggatcctgctgattgggctggacattcacaatccactgatcccaatccccctggccaaagtcatcctactgagccggcagctctccacccgcaggctccggagggaagtttaggtcaagcccagccggaggcatgggctgacccagcccgaagaaaaccagggggagctgttggccat

SEQ ID NO: 41823 - DNA, 470 bp, Zea Mays
tgagtctgtgagcttgagagcttgagtgaacttgtccttgcaacgttgtgtgccttcccttttatagtttaagggatgcacatacaaggatgctgagccccgacatgtgggcccaggaacataatggaaagaacacgttatgtgagtaattaatgctagtaacgcctgagcaatcactgggagtcttgatgtccgcaatccatgctgcattgatgggcagttaccgtacgagtaatgcgggagtaatggtgagtaactgcgcggcccacgtatcgtggactgagcacgccgcttgtcagtggaatgtcaggcgcacgtcttatccgtcatgaaggcgtgcgtagcccagaggcgtcacgccgggttccgcccgttggcttatgtcgcgtacagtataccacgtggcagcatcggggctccgcctcagcggggagcaggagtgtatgcggataggtccggagcgcactaga

SEQ ID NO: 41824 - DNA, 281 bp, Zea Mays
ctttctttaagtttcctacgtcctgcccccactcaagctctggtggttgtgtgagcgtagccctagtggtaggtattgcccttgccttgcctatggcgatcgtgggcatggtgtcctcaacatgggtgtggtaataggatctagatggctagaagggtgaatagcttataaaaatgttcttcaaaactcaatattattactagagccaagatcatggatgcaaaagcatatacttgctctagttctaatttactctatgctagaatctaatcaatctagta

SEQ ID NO: 41825 - DNA, 322 bp, Zea Mays
ggacgacttgtgaatcgcggaattgacatccaatgcctgcggcggcgtgctcccctcgtctctcagtgttacggcaacacaaggcttaacttggggtggcttggtcgggaacggggaataggtggcggcagcacgacttttatggacgcgagacggtgcccaggtttaagcaacggagcctgagtccgtgccccgggataccgcagcgtctggtcagggcaggtccgaatttttcgcgaggaggaagaacgtgcggctgcacgtacggtgtatgacgggacggacccgcgtaccagtggaacggagggagaagcgatcacga

SEQ ID NO: 41826 - DNA, 274 bp, Zea Mays
cctctgccctgcagcgtagatcgtgtggcctcatatgggtgtcctaaccagcccactcgtacgatcgacctctcggccttcgtctcctgaggctactagcttggcaacaacagtgtcggtgtcaagccaaaacacagcgcagctacaaggctcgagctcgatggagcgacgacggtcgacggactgcgacacggcggcaacggacaaaagtcttctaggctccgacaccatgaaataaagaggactgcgaaaacgcagatcagtcaagatccag

SEQ ID NO: 41827 - DNA, 350 bp, Zea Mays
atcagggaactgccatacgtggtctggagcctacgaatgcagcccagccgagctctgtatggaaacaccccgttcttcatggtgtatgggtcagaggtagtgttgcctgccgatctggtctttggggcgcctaggctgacctttgaaagcatggctgaggcagaagcaaccaggctagaggacattgatgtgctgaagagaacgactaaacatggtaatccagtcggccaggtaccagtagactttgaggcgctaccatgacaaagctgtgcgacactgatcctttgcagtaggagacttggtcctcccccgagtactaacgggggaggggcggcacaagctatcaccac

SEQ ID NO: 41828 - DNA, 447 bp, Zea Mays
atccacgttcacacgacgcaatccatgtggacctaggggagtcgggtagaaacggtctagaggacatggccctcaagggactatcgaccaatggcgaggtggaacgcctcttgccagcaggcatagaacgtcgaggacgagaggcatgaacacatgaatgtgctgcatgacaataacctatatgtactatggagattgagtgcgacgacctaagattgaggggcgacgacttttcacgaagaagggcgttgtggatgtctggtgcatcggcggtggatgcgtcgttcttgaggttgtcctcatcaaggttggtgtcgttcggaggtggctcagatgcgatcgagggcggcgtggatgctatcatcgcgctttgcctaggctaggcggcctaggccatgcactcgcgctccttggcaaggcgagcaacatcaccctgttggagagcag

SEQ ID NO: 41829 - DNA, 355 bp, Zea Mays
gccggtgatagccgattcacggccttgcgccacgtacctaggcacattcaccacatcgccgtgactcactttggccgtctgatcatcgccggtgagagctgccacggtagatgccacaaatcccttgcgccagtgacctcccactcctccgaccgccgcgcgtcgtcgtccgattcaatggccaccgctcttgccttctataaattaatcacatcgtctggtccgtaggataatcacgcaccaagccaccaagtattgcctccaatcgtatacccaagagctctaattttggatttcccccaaactgagtttccgccaccgtagagacaccttcaccgtggccagcttattccag

SEQ ID NO: 41830 - DNA, 280 bp, Zea Mays
gtcgaccatcgatgcaccgcctcggttgcctaacccgcaaggagaagaatcagaaggaggtcaggacgtcggcgcaccaacatacaacaccatgacaacttctagcgccaccatccaccttggccctgaagatatgaacatctgttcatctccttctctcatcctcactacagtattagatcacacgcgaatacatctataggactatagctaagattttggatggtaagaaagaaaagggcagctagatcctagaaaaaatagacctaaacaaccatca

SEQ ID NO: 41831 - DNA, 400 bp, Zea Mays
cgggctaccatttcgagcaggaggattggagacaaattcagagaagggcctattcggaggcaggttccacgtagagtaagctaagggagcaccagcattcgagaccctacccctcagtatcatatccagtcggctcaacaagtcctcattgggaatctgtctgtttgtgacccgggtggaatcattgatgccggtatacaagtaagcagggtaaactctgtccttcaaaggttgaatattcttgaagacaaagtcggcgaccacggcctcagcagtcagacccctatccttcaataagcagatttcagcgagcaacactttggcttcggctacctctgaaaaagtgggagactccacccagctaggcgtgcgaacgtctggttgccttcctgaccgaggg

SEQ ID NO: 41832 - DNA, 278 bp, Zea Mays
gcaaagaggcttcggtcgagcggtccttagtgtcatctgctgagaaaatagattccggctaggctgcggccttgacatgttcacaaccggctttttccaaaatggctgtgacccctcgtgcaccggcgaaagcgcagaattctccacgatcgctgagtatttcatcaaaagctttgatctcttcatcgatccactggataaccccttcaggatcaccgcgaataaatttttgctccgaagagtatgcccccacctttgcaaagctatctttcaacttc

SEQ ID NO: 41833 - DNA, 450 bp, Zea Mays
aatttccagaaaacgcaggggctacggtgcaagactccacagactcagtgaatagcgccccgggacggcgggttggtttattagaaatccaggggcttttatgcaaaacgctcagcgcgaaggggtatgatggattcgtggccgcaggatagaaatcggacggcccaaattaaaagtcggcatcataactgaatcggtacgcgatgtccgcaggatcaaagatccacggtggtaaacccccctgggcgaaacactatgccccggatggatccagcccgatcatcagtcgatcaacggcccacggtgactctctcccagatctaaacccatccctacatcctgaatccaacggaccagatgactctgttctctaccgacgccagagcgtgacggcgccgcccacacgcgcggcggggccatcgccggagtacgccaaatcgaggccacgat

SEQ ID NO: 41834 - DNA, 307 bp, Zea Mays
catatgttgaatcctgttcgggttcataaaatgaagctgcacctacaggtacttgaagagggtcacaacaaaaggatgaaggagcaaagcgcgacctcgctcatggaaatgaatgaacaaaagcatgtaaccaggaggtggggtcagggcgttctcggcgcccggaatcagccacctgcctccatctagtaaaccacacccgatgaggtactggaggttctcctaactcaccgaggatcggtgccagtccaccataggaggcacaatggaagaactgagcctaaaaggaatgagctcggtgaggaag

SEQ ID NO: 41835 - DNA, 545 bp, Zea Mays
aaattctgactgtcagatgcactgaaaggggctcgccatggtacagtgccagaataagatcagaccgccagcgtgacagcctcgccgccggcgacctctctgcgcgaagattcgtgccgccggcgtaccgattcatactcggggtaagtcgataacatcgcggggtcaaaagatcttcgccgccgttgagctagatgtcaccccggctagccgccgtacccccctttttgcactacggcctgagctgataagctcgccggcgacagccatcttccgatcttgcgccacgtgctctggtacctccgtcgcgttgccatgactccctatagccatctaatcatcgccggtgaggtcgccatgacggtagacacgagttcacgcgcgctagtaactccctgtccctccgaccgccgcgcgtcgtcacccaaattcgcggccaccacttgcgtgctctataaattgaccgtgcccttagcttcgtcatgtaatcaagcagcttctgcacctacctgcaccccaaaccctccaccagcgagctctaattc

SEQ ID NO: 41836 - DNA, 384 bp, Zea Mays
tctcggggcgggcttatgggcgacacagctctagtgcttgtgagatcaagctagtggcagctctgtgcttttagtcctttgatcttgtagagttaggtcagccacaacaaatgaagaggtgggctgtgtgggccagtaaatggtagcctatctcgcccttctttctggtttttcttctatatcccttcttaatcttgcattattgaatatataattacagttaaggctctaatctgtatcctcttctaatatactaaggaagatgcagaaatgtactttttaatattccttacatgtatatagtaggtttaagaaaggaagataacagtaatatttgttagatgaatctctgtacctatttttgtatagtacactgcatcagac

SEQ ID NO: 41837 - DNA, 369 bp, Zea Mays
ttgcgctagccatgttcaccggtgggcgggtgaagtccggcgagtggtggtacgcccctggaggggagtacagagtgagggggctagtcagggagcttcaccgtgacttagggtacctaacaatggagctcgctcgggcaaagggtggctgtgatgtctggaccatggtggctgggctcaagtgacaatggagggcggtggtgcgctcggttccggcaaaattctggcgagggtgcacttgccaactggttaggggcttgcgcagggaatgaccgagggcgagggtggtcttataggtgcgggcggaactaggcggtggccggcccctggcacaagggcacgcacgggcgctggttgggcatgcactgg

SEQ ID NO: 41838 - DNA, 1114 bp, Zea Mays
agggtaataatctttctctctcttttgaacgtctgcaatttcttgcaatttgtattgttgttgcaagggattaagcaagtgaattgttgctgcaggattgatcccaagagtgcgtgcagagtggaggtcactgtcaattcctacttcactatgcaagatggtagaaaggaatataatcgaggcaagacagtaagctatgttgttgattcagaagaatactcagttattgatttagagaaagatattgcttcagaatttaaatgggggagcgaccaacagcctaatttctgggttctaacaaggggtaatatgacaagcaagttggcttcagatgcacaacttcttgacttgttaagggcatctagagtagtgaagttattaatgatagtgggcaactgtgagcacaatgtaggacatgggcatattcctgctacatggaacatacaagaagagatacctgttgcagtgaacatagaagaagagatgcttgatgcaatggataataatttggaggaagcagatggaggatttgcatgggcagaaatacctgaatatggggaaacaactgcagggccaccaatggctaaagaggaagaaaaggagcactttatcactgttgggtgcgatcctaatggagataagccagctggaataaatgaagaatggaggtactttaaaagtgttgatcatgtagctattgatccactgcaaaatcttaaagttgagggacagaaaagaaagagggcaagacctgttttagaaataagagactttgatactgaagctgttcctgaggatgagactactctgcttgatgtttttattgtgcctcacacatcacatgacagtgagaatccagtcattaaggagggtgacacctttgtagacaagattgcttttgtccacactattaagcaatatgccatcaaaaatgagtttgagactaggattgaacatagtgacaaagaaaggtacagggcaaggtgtgtagatgaaaattgtgattggagagtatatgcaaagaagctacatggtggcaacacatttatggttactattcctttctttgctgacttgttgacttctattgtttctatcttgtgttggatctttt

SEQ ID NO: 41839 - DNA, 303 bp, Zea Mays
cgctgagtgaggtctcgagcgaatcgtggctcactttcttgaccttggggaacatgttttatggtagtttaaggttaaacgcgttttagaggcgtgatctagatacccctaattataatactcgatggccttttggaaagaacgattagatgactactggtactggattcaacgtgaactagtccatagcttgatagtaagtttgtttcaaggagcatctactgtaagcgtggtcaacacaacttgttcaaattattgttttctattgttatggtctaccgctcagcatagcttgcaccattt

SEQ ID NO: 41840 - DNA, 310 bp, Zea Mays
caaacgcaagtttggagagttataattcgaaatctaaccactgaatcaccctaacccctatagcaaagttgtagccggtagagaggggagcaaatcggctgaagctgggcaacgcttcatactccccatttgtctcatttgcgcctatgagtgtcacagatcgcgttcaccatgtggtgcacgtctggacgcgtggagctcgtgctcgagtgcatgcactgcgttctcctcgcgcgcacgcctcgtccgtgtcgcgcctgcctgttaggctgaagtggagagcacctcgcctctctaacgctcatttcct

SEQ ID NO: 41841 - DNA, 304 bp, Zea Mays
gaaacaatggttaggacttgaattcggtttcaaccgaagtagggtgccagtctttgagcaatttggctggtacacgagctcgctggagctctgcgcaacgccgctcgacgtcggggacttcgagttgtaaagggaaggaagtgcaggggtttattggtaaatgtcagcgattgtttcaaatagtactttgaactccttcggattattcaaaaaggcagggaccaccatgcaaagtctgccacgtgggcgtgcgcgcgggcagtttctttcggtcgtgggctggcctgtgctggtttcggcctag

SEQ ID NO: 41842 - DNA, 326 bp, Zea Mays
ccaggcacgtccacactgcagacgcatccatgtgtcgtacgttggcgccggaccaatggcccctgcctgctccgaacaggttgcatgtgtggccgggctgacaccaccacggcaccactagtccacctccactacaccccccctgcatacatacagtacacacacatcaccgttctatgcaagccgcctgtgtgctgctgctctccaagatcacatgttcgattctttacaacgacgcgtttgtttgggggaaaaaacaatgttcacacaacaaacgtttggtagccggccgggaggggaaacacacgaagcctcctcgccctctg

SEQ ID NO: 41843 - DNA, 456 bp, Zea Mays
ggaaagggaagctcggagagtttcactgacccaaggggatgatggaacatgcacacaacaaacaaacaaccccccggaaagccctggccacggcagggtggggaaactggacggtgtggtcacaggctacaggaagacggcgcgcgatagacctgggcaaacaactggggtgacatgggaggattaacgtagacgtgggaacatgaaacacaacaacacacggtgagctgggttagacccggggatagaggtagggctttactgaaccaagattgtggcaatatggagcaggcaaacagacgccggtcgagcatgatcagaccacgcaagacaagggccctgaggtgtcaatggttgcatgagcttggctacgtggctttactcacccatcaccacgctggttcaaagggacagcggggcagtgaaccaggtccggcaatgggtaaggattttatc

SEQ ID NO: 41844 - DNA, 289 bp, Zea Mays
ctgggcttagcaatcatgacgggcgcctaaactccagttagattcagaggcctaacaaccagcacgagccgactcccagaacaatccctaccccaaaacaatgccagccacccaacacatcaccgaaatgtccaattaccatgcaaggcctagccaggcggatattagcacatatctttgataaaccaaggactagctgtgatggaacagatccgctacgtggggactcaatgggacgccaccctcatgctcgtggattccacacgatggcagcaaaatagtcgcagtc

SEQ ID NO: 41845 - DNA, 294 bp, Zea Mays
tgaagccatacaggcaagaggagggacgtccgggagggtatatccctcagaatcggggtgcactgcgcgccggaagtccgggaatctctcaccggagtgggagcacagctgttcgtccgcaccacagcgcctatcgatcagtgtgagttgtccgcgcctgtaagaattgctcccttcgattcatcatcaatttagttacgcttagaacctcgggttcgggaatttggtgcgatattgcctgggattgcgttcctccggcgatggtccgccgtgtgtggggggcggcgccgccgc

SEQ ID NO: 41846 - DNA, 450 bp, Zea Mays
ctcaattccagagaaatccaggggcgcctgggtaagaatatacaggcacaacgcacagtcgcaaaaggatggcgggttctatttcaattaaagctagggtctcttaagcaaaaagtccccaggaaggggtatggagtgcctggggccgttcgatcctagatcaacgcccctcaacagatcataacccgcaagaccacactacctctcggatctaacatctacggtttagatcaattgcgcgagagggtatatcccgcactgaatcgcggccggacatcgcgagatccacggctgaggtgctatccagaccggagtcgaatctgaccgcccactacggatctaatggctacccgcctttctctttcccccagccaccaacccgcagcagcaccggatcccacggcaaagcgatctccggcgaatcgcaaaccggcattctactggtccaaa

SEQ ID NO: 41847 - DNA, 445 bp, Zea Mays
ggtttgtatatgcggtgtattacaagtggtgtctcctggatggagaaaggctaatgagatagttgaataggatagatcggatgaaaatgatggggttcaccctcggccttatgtacacgaccgtggggcactccatacgcacatgatgatcacgtatctcctaactaatagtgaaccgactgaaccaatctcccaaaaatcccgccgactcatccctgatccacccgacattagagggttccaggcgtgggaaagtctagcggtttcttggggtagcacacgattcgacggatcatctgggctcaagtccatcgcctccttagaccagcccattccaccagtagtttttgcccggcccacgaagagatggtcttgcggggtaattggcccgaggcctcgcgcaaggattttttgccttctagtggacccgggggatatctgtccc

SEQ ID NO: 41848 - DNA, 285 bp, Zea Mays
agggttttcctcagtatctggctatgcctgctcctgcaccaactactcctatgccgtctcagtttggacctccgcgtctgcctcacccgacggctcgagcttcctcttctgcgggtatttccggagcttatgtgctacccgctgcggatggcagagagcaaggagacatggtgacaggtacgatttcagttgattcatttgtggcccatgctctttttgactctagcgctagctattcgtttgtttcgaagaattttgtgtcgcgggctggtctttcggtgcaga

SEQ ID NO: 41849 - DNA, 403 bp, Zea Mays
atttcctgacgtctcgtgtctttgctcggcagttttagtacaacatcttgtccccctttggcttagggcatctcactccagtctcgaaggcctccacctttgcacattggtggagagaagtgagctctaggagtcacaaagacatgaagaagggccttaacagcgctgtcatactcggggcttggtgtctatggctgcagaagaaccaggttgtttttgatagagtcaccctccttcggaaagatgaaaagtagcttcctaaaagaattatcctgttgggtgatggctggggcaaagcagctaggtgtcttaggactagctgatgcccttaaggaggtcaggtcgagccataattgattgtttttgttttaatctgctgtttgttttgtttgtccgtgtgtgc

SEQ ID NO: 41850 - DNA, 475 bp, Zea Mays
cccctcatcccgcgtgctcgctctccctttctcactgccatgtgggccccctcggcagtcaatccttcttcccccacgagcgctcaggtccgtgaggttcggatcgaactgttgcaatcgtgtgcggaatccgcgggtgaacgccgtgatcgtcgggttctggatcttcctcgcttgggataaagacagaacgcctacgccgttgcccatccaacaagttgtcgtgggattccatcgaatttcgcctccgtgagatccatggcgggcgctccctgacgctgctccaaaacacgcgctcccgcggactcggcctcctggatccggcctgcctcgggctataagacaggacgccgaggttgccgtctctccctcccttcactgtgagccacccccgattgtgcaatggagagaagagttcgggcgtggcgtgaactgagtccgggagccatccgccatggggttacttcgacctcgg

SEQ ID NO: 41851 - DNA, 529 bp, Zea Mays
cttaaaggctcaaattctacatcatacttaagagccaatgaccatttctctcgtttgaatttaaacagctcttctgttttctcttgcaaatccaactcatgcagccttcttaatttactgatctcagatctgaaatagttaagcatttcatgtctagtcatacccttcagatgtcggaagtcggatctttctgatataacttcactaggacttatagatttctgtgttgcagaattctggttttgcgtggaagataaagagtgatcctggtgtgctcgctttctgaaaaagctgaacttccatctgtcactccagttacccaaactttcatgcctacagagggaaatttgtggttcctcttcagaaggtaacagaatattagaaatagcaatcagctcttcacgtatggaagcaaactgcgccacagtttcctggcagttttttcttagactgttcaccatggaactttgctcatacagtttcctctcgagttcatcctgaagacctctaatacagtctccaataatga

SEQ ID NO: 41852 - DNA, 428 bp, Zea Mays
ttatcgatttggactcttcttgcctaacaaatacttttatttcctaaacggatactgttcacgcctattgtaatttgagcccaagtttctaagtgaagtatttactcggtaactcaattgtcgctggcggagttcaaagaaagccatgattgaaatggcaatcggggctctgctgtccccccttggtcactatgaatgaccctaaaacgacgtggacaaatgaatggagggagtagttcagatgcatgaatctttccaggcatttaatgtgtctgtcaggtttgttgcaacatacttatgagttatggaacaactttctttcaataagaaccttatactctcttagagaatggaaaatgattgtcagaatgtcaaactaaggttaaaaaacattgttaccttttgtgttgcttcaattgagtgtgcat

SEQ ID NO: 41853 - DNA, 337 bp, Zea Mays
ggcgtcttcagtctaatctgctcacgaagatctgcgtggaacaaatcaagtggcttgtcagccctataatttgccacttgtgggaacagatctcgacgttgttttctgagtgcacatccgccatagaattcttcctcttgattcattagtgacagcccttagaccatccctttcacaccgagttgttggagtgaccaaaaattgagatgtccatagcaagcatttcatagccaagcctcatcatccgcctttgccaccgatagacaggagccgcaagctgcatcttcaacaaatacaaataattcttgatatgaggtgctcgagtcggtagtgagcg

SEQ ID NO: 41854 - DNA, 280 bp, Zea Mays
ttttttctaagctcaaggtgcggacgatcacaaagttcagctaagtctcttcttgcattcatgttatctttggtttggccggtgaagtcgaagcacatgcttatggtgctttccgcaacattacgttcttgttgcatcaaatctatattatgtggtaagagcaatgctttcgtgtaaggtagctcctagataaacgagatgtgtgtccaattgtgttctttactatacccttgaaaccgacctcctacacctggttttagttcacgatgttgtttcatga

SEQ ID NO: 41855 - DNA, 274 bp, Zea Mays
tagccattttgtccaacttcgggatgactagatccacaaacaatggagtcctcagctccgataccacttgtaggatctaggacaccggctagagggggtgaatagatggttttgactaaaatcaaaaacactagagaaatttaatcaatatgacaagaggtataaattctctagtggcaacaagtaagcaatctatgagaaacaactatggtaattgtatacaagaaagacaatatgcgaaatactaattacttgcacggtaaaaagtaatgcg

SEQ ID NO: 41856 - DNA, 387 bp, Zea Mays
gccgccgtgctctggcgaggcaggggggtggaagacggccgtggagcgtccatccggtgatctacggctgagattaaaacctgcgtaacgtttcgcgttgggtcgatctagagcgttgatcagcgatcggatgactccgggtatggatatgatctccaccgttggatcaacatctggtggtcctcgtagcgtaccggtttaataaatgtagatctaatctaggccgtaggtgtgagatcgtgcggctgagatcagcggataccctttcggcctggcatttttacataagaaacctcctgtttccgttaaaacaacccgccgtccgcgtatgggtctgtctgtgtcttgtggatatttaccccgagccccctgcactctctagaaaat

SEQ ID NO: 41857 - DNA, 389 bp, Zea Mays
gctgtggacgcggtggtcgggcgcttccagcgggatcctgttgacgatgagtagctaggcctgcatggagaaaaacgagggttccgctggggagcgggttgcaatatgtctttgattttgtaagatactctttaggtactacttgttggtgacattacaacttatcttcatgcctttttttccctgctatgtgcattgttgccagcttctttcccagtacttgccccccctaggatatggcctcgacacgtcggggccggatgccaggattcttagggtggcactagtgccatcacccccaaggggcaatccctattgggaccctacctgcacacggcttaggccaggtatccttagcagcgcacccataaggtccaccagctggtatt

SEQ ID NO: 41858 - DNA, 350 bp, Zea Mays
agagaatgccgcacaaggtcttaacttcatagatgaccgacgtttggcgcaaaacctgccggagcatgagcctcggggcggagccacacgacgtcttcgaccagcctcgctctcacctctgcaactatggtgagacaccccctaccattctatccatgatccccacattgcatagccctattcacataagaggttagttcactggaaagcctggaatgccattgacgaccatggcactgcagtattgcatgcgccagcgctgctacccgggttcgtggggtggaagaagagggtgtttgggccgttggaacatatgtgggtggccaggatcttatcatgcgtaccctttt

SEQ ID NO: 41859 - DNA, 391 bp, Zea Mays
atcctccttgagcttttttgaaaggtccaatcatatccaatccccagcacgcgaacggccaagttatgggtatagtctgcagctgttgtgctggtagatgctgctgttttgacaggtactggcaggcttcgcacctctggactaactcggctgcgtcactcttcgttgttggccaatagaaacctgacctgaaaaccttcccaactagggtcctggatgctgcgtgtactccacattgcccagcatggacctcatccagaagttgctttccagtggctgagagaatgcatttcatgaggactcctgatgcaccccttctgtatagtgtttccccaatgagtgtatagtgagctgattgtcttgtgatgcgctcggctgtattcttgtcatc

SEQ ID NO: 41860 - DNA, 842 bp, Zea Mays
ctgcatatcatattaatgtttgtgaagagaggtgtggtgttcagatttgagtgactgatgttttaaaaaataaaaaatctaacaagtgctaaaatagctcatgtggtgcactcaatatacacaggacacattgcccacaaatattgattcaactacaactaaaactctatttatttacggaatgggtacacggatgataaagctacagtcaattggagaaaaggaaacgtatataaaacttagaaacacaaacctaaaattgtcagataaacagccacacgagtaattctctattttgtaaaccaagtctgtttgtgtttcagagaggtgtggtgttcagatttgagcgctcagagaggtgccttacatctcatactcgagcatcgcaagatctgggcggggctggcgcgtagaatgggaagtactcgagcatcgaaagatccaggcggggctggcgcgtagaatgggaagaatgagatggcggggtggtcctgcacttgcgatgggatgcgggccgatggtggtactgtgcgctggatgacgatgaggggattgggttgcgattccttccatggcggcgagacgtggattgcgtttggggcgagcagaatatgggcggggcatccgcggtgcatgagaagaacgattaggcaatgagtggtcctgcgcgtcgtcggcaatgggattcctgcgtgctggattgctgcgaggcgtcgatagcggcgaggggatgtgcttccttctatggtgattttttccttccatggctgaggcattaatcggtgaggggattgcggcgaggaccatgcggatgcaggggtagaggagagagggcgcgcacg

SEQ ID NO: 41861 - DNA, 550 bp, Zea Mays
cgctgctccaccccctcctggttgggatctccaacaactcgtcaccaattcccaaaccaccactcttcaacatccccagtagcaagagtggttcttcgacacaggtgcctccagtcacatgacttccgacgctggtatactttcccacctctcctcttatcatcatctaccctctaacattgttgttggcaatggcaaccttcttcctgtcacttccactggcaccactcaactttctcacaattttcgtcttaacaatgtccttgtttcaccgtctctcattaaagatttaatttctgttcgccaattcaccactgacaataattgttctgtggaatttgaccctcttggctgctctgtgaaggatcttcccactcggcgcatgatccttcggtgtgatagctccagcccactctacccactcaggagcacaacatcttctctccatgctaccacctcttcattgtggcatcaacgacttggacatccaggatctgcagtcctcactcagctagctcagtcttctgtcattccttgtaccccgaataaa

SEQ ID NO: 41862 - DNA, 525 bp, Zea Mays
aggaagatggcgctcgtgggctgagaggagaacaactcaggagaagccatagagtgtcgcggcccaacaagcgcttcactggtgaggaatggcgactatgatggaaggcccatggggcagtgcgagacgtagcctgtaaataaccctggcaattgtgcggggaggggcagacgatatatgaactgggaaccggctgtgtccggaggctggcggctggcggtgcgccgtgtaaagaacctatagctaccttcaatactgagaacttcgagagaggcgacgggtgccgggagcggcgcccaactcatccccatatcagttgtcttacacgagcacccaatcgtacccagcatggcccggcgatgctcccgcgcagtggatttggttccttggtgagggctggtgggcaatcggcgttcaaccgcggcggaaatccctcaactctatgacagctcactcgtggttcctcccgttggttgatagcggaataggagaagagaagcgcacggttttatgggcgagattaat

SEQ ID NO: 41863 - DNA, 730 bp, Zea Mays
tactgattatagggggcagatgcagtggttcttgagctggccagaacacagcaaaggagagctccaagggcgccaacacaacatgaggtatacacgtggtgctgctcttttgacccacgccagcactcaaacccagccaaggcactgaacttggattgtttcataaatatagcacacaaatatccaatttgtctaggaataaggacaagagaaatagcagtgcccatgcttgatatttttttccaggggtgaggcctctagactttagttatgtgctacatccatatctcaacctttacagtcgagtgaaacagcccagaacactgaatttagtatgcctcacaccaccaaaatatcagctttgtctcagctgcagacaagagaaggcagctgagaacctattggtggataaacactaaagggtccatagtgtgatattttgcaggggtgaggccactataatgtttgttgtccagttcattcttatctcaatcccagcacacaagtatcacctttgttcccctactgtagacaacaaacaaaactaataattactcactgttcactgcttcacaacagtccaaactagatatttttagaggagaaaagctcctagcgcacgaactatgcacttcctccgtatctccatctctatctcaatccctaccaccagatgaaactcagcatggagagaagatattttatgcaccttagtctgttccagattcag

SEQ ID NO: 41864 - DNA, 753 bp, Zea Mays
gaaccattggtggagaacactcatgatgcagatagcaaagagcctcagctacccctgttgcaatcttcaacctcttaatccagtccaaagattgcaagccttcattttcctcccttgactttctgtgcagtgcatttgacaagtcaccatttcggacaaacctatacacaagaaccttttcttcttctttatcaaggcagtgccccaacaaaggaaccagcgtttcatgcactccttttgcaaacaaatctaactctgccagataagcatccttccgaggcacacgcgaagtgatcctcttcaccaccacggcagtcccgtcttggagcacaccatggtatagatcacctgagtgaccgtgcttgatgagcctattttccccaaatcccgaggtggcattgacaagttggtcgtaagcaaacgaatcgccgactttcaccgtgtttgcagacaatgcagaaggctgcgtgccaccagtagctgcagctgtgccggtagctgacactcccgatggtgcacttggtgatgccccactttctctctgatgattcctcctccctgtactcccagaacacacaaagcagaacacaatggctgcaacaacggctatcagcaggaggcctccaccaatggccccgatcagtatgtacttcagattcttgtgcttcttccttaccggtgaaggtgcaggctgtggtgcgggtgggataactggaccatcataaggcaagccacgactggcatagaactgct

SEQ ID NO: 41865 - DNA, 373 bp, Zea Mays
cttcgctagacccagcagtagtctccttcggcatctcccacccacttgtgagtggccatattctataagcaatatgctcctggactaagtccctggtgcctatgtaagtgcatacggtattaaaagcaggctggcatgcttgtatgttgttcctaagggcagtggatggcctcctaatgccgaaacgagaccagatagggcgttgaataattcccttaatatcttctctttcaaccaagtcatttttcacgtagaaccactcctgcatctagactttatttctcttttccggtggcctttatttcataggacaattcatgcatgttgcagaagcattttgcatttggttctagcccctggctcctaatggccc

SEQ ID NO: 41866 - DNA, 744 bp, Zea Mays
gtgaactcgtgtacaggaagggtgcagcattagcgtcagcatgtggtccagagtggttggtgataggacctcaagctgtgtggtgtccgtctcctctagaacctgcaaatgggagagggagagtagcctcatcaaatccatctaccggcggaagtccacggatgggatgtggtcagtggtgaggacaatatagctgcaggtatccacagacaaatcatcaaattaatcactcaaccacgggaatgaggaaagagcagagacaatgaagctgttcggctgccgtttttgagaaagctgcagctgcaaatgtgcactgtgctacagcagcaagcagcaggcggctgcagcagctgctgctgcaaaggccaccagccgaacagcgtcaataattcggtgagccaatctaccatgtaacgcctgagcgttgaactgcctctgtcgcttgtccagtggcactgggacatggatcagggaggagcttgacctcgcgcagagcagctagcgtgctggatggaggccttgggtcccaaccgcaggatcgcaaggtggccagcatgcgaccctgccgtgttgctgcaggcttgcatcctgctgccctgctcgttactagtccggactggagcctgtcatgcgaggccacattccatgcatgaggggctgaaggtgtacagaattgatggatcgaatgagtgttcacagaatgggaagttggggatcgagcaagggttctgcgtggaaagggga

SEQ ID NO: 41867 - DNA, 303 bp, Zea Mays
cttgacgattgtgtcagcagtaccaaaggcgatgatgatgggcaggaagtaccaaaagggaagatgaagactgaagcaggaaggaaaagagaacataggccaaatcccaagtacataggcgagcagtggagaaattaggcccagtaagaccaggcccatcagaggattttgatatatatactatgtgatgtaataatataggcaaactcggctgaacctaggcggtggcagatacattcacaatacaatataccatccgacgacggatttgccatagatgcgtatctgtgtgttcatcgtgag

SEQ ID NO: 41868 - DNA, 442 bp, Zea Mays
cccgctccttgcaaacatccaaagatacaagttttcacggatgtagtctagtttagatatgttagatattatgtctacaatatttcataaactttatcaggagttatgtgcgtatattatggtaatgacgatagaacaatcatgtgtcgatgttgatgtttcttatgttatgttaacgacaacctgggaaccgtaatggataaactgtaatgttttctatgtttttaacgtcatgtgtgttattttttatttgatcagtatgttgcatatcattgtgaactctatgtggacctagaaccacatgtatagtatattatgacccgtttttattggttacgttacttttgtcacaagtttatgctacaaacagcatcgtgttatgcttatttttacacataatgcgcaaactaagttactttgtgtagctgtgtaagttgttgat

SEQ ID NO: 41869 - DNA, 295 bp, Zea Mays
ccataccggggtgtatgcctacgcacgccagggggtgacgcaggcccgtgacgacaggcagaaccgcgccacgtacgaccgctccgtgggactgacctgagggaccctcccgcgcactactatggagatgtcagcaacggactagttacagggggccgtatgacggacgagcgagacgatacgccataccaggagtacgtctacgcacgaccctatggagaacacgcacgacgactcggaggagtcgatctcacacactctctcttgtagaaaacagatctcctctgtaatgtcc

SEQ ID NO: 41870 - DNA, 372 bp, Zea Mays
tcggatggtactgactttggctcttgctcgtgattggccaattcatcagcttgacgtcaacaatgcatttcttcatggaactctgtctgaaacagtatactgtgttcaaccttctggtttcgttgatcctcatttcccagaccatgtctgccgcctcaagaaatccctctacggcctcaaacaagctccccgcgcctggtttggtcggttcgctgctcacctactctcattgggttttactgaagcaaagacagatgcatcacttttcatttttcatcgtgggactgacatagtatacttgctactctatgttgatgacattgttctcactgcgtcctctgatggtctactccggcgcaccattgatgccct

SEQ ID NO: 41871 - DNA, 601 bp, Zea Mays
ggccaggatgcgaggaggggcaacactgggggtccagcccacaagaggggaaagtcacagcaccagcgccaccatccctaccatggcaaaccttctgaatcgagtacttcaggacggagtactcagaggtatcgggctgttcctaagcccaggctggggctagtgtgtttctgttgtggtgaagtgcatcgtcgtgccgagtgtcaggggagtggcaggtgctctatctacagccaagatcacaaggatgtggtgtgtaggaggaatcccaatgggaatctcagatgggagccagtgacttcttcctcttctcagggcactgtcaacatgatgtcaagcactgagcagcaattttcagtaccaccccctccgcagcagttttatgtgcccgggacttctcagttcgtgcctatgtagggttttcctcagtatctggccacacctactcttgcaccgaccactcctgtaccatcccagtttggagctccgcgtctgcctcgttcggcgactctgtgggtttcttctgttaacttcactctgggagcttcctcttctgcgggtatttcctgagcatatgtgctaccctctgcggatggcagag

SEQ ID NO: 41872 - DNA, 313 bp, Zea Mays
gcgggtgtagagcaggagagcgcgaatgcaaaggggcgcaaagagctcgaaggcgaaagggcgcagcgattgggagagaatgcggaagcgtaactgttgcacgcggggtgaatccctcttcaaggcagactctcccgctcgcgctccgagacgctacaggaaatcctaactgccgcacacctgacgcccaggcgatccagtctatgacacgggggcccgggtccacaagtcatacagctggtgtgctggtcttcgagtgcggaaaaggcaaaccaccgcgcggaaagtgaaccgtcgcccgcagtagtgcgcc

SEQ ID NO: 41873 - DNA, 899 bp, Zea Mays
cacgagtgggtataccttccattgccgccaccgagcttccatagtaggtggctgacctccatagtatgcggtaagtttccaatcagcgcctccgccccccatccatatataataccccattccaaccttggcgcaacctttcaacgacgatgcctaccttccactcaacatgcccaccattactgcttttaaaggaaggacacaggtgatgccgccaacccacccccattccccatgcatcttccctgtcatggatccacatgaacaaggtactgccagtttgttttgaattgtgttctactttctgcattttagatctgatgcacaaacctgattttgactgtcccctgcgcagctaagttcaaacctgaaaagctagaggggtggatgataatttgatgatagctattgaaactggtggatgatagttcaaacctgaaacgagacaccaatttattctacactgcaatgaaattttaacatgtggttactaaattttgttggattcatcaaacaaattatatgtgaatccctgtaatgcttcgtcttaattggtcactaagatgaaatgcctaattttttggtttgagtactttatattgttctcctgagatgttttttagttcctgtcccagagtgtctcgatgtattatgaatttgtgttatgccagaaacatgcattgtgttgaaactgtgttatgccagaaacatagcagtgtgatttgcttccagcctctatgcttaacctgtgagatgaacatgatgtttgtctctctcactctctccgtctctttgtcacaatagttataatttctgtcaatgattttttatgctttattaacctataaatggttcactgctctgaaccaccatgtgtcaatcactcagtcttcaacata

SEQ ID NO: 41874 - DNA, 449 bp, Zea Mays
ctcaagcatcaagaagagcccacgcgcacgccgccatggacatggagctggagcacggagggaatgaagacgacagggggagtgagtcctcctcctcctcctccaagcggagcttcggcgcctcgtcggacgcaaccgtcagcagcacgccaagcaagctacaggctctgaggtttgcggaagatctctccctcccatcggtacgcgctctccctttcttcctcatcattgccagcaagctgatcagcgccaagaaatgagaactccgcaatggcttgcatgtcgttgggttcttgaaacccagctgcgactatcaatcactctgctagcgactctgtctttctgccggagcaggactctgtgctctctccttcctgcctcgttgaggatatgatgctagcctttgctgttcaggcttcagtggtagtgtcgtagcacagtaaagtcac

SEQ ID NO: 41875 - DNA, 480 bp, Zea Mays
atggactcggctcgaacgacgagacatcttcgctctatgcgaaaaagacaagattaggcgattctcctagtagcctactggggtatatttttataatatataataccacacaatgcacacaagcaattcattcaagcaccatacaagcatttattcgaacgaacagggatacatggtacaacggattacaataacgtggctcgacttttaagagtcggccgaaacgacttgactactggttcctacggcacggtcttcggggtctttgtctttagcctcatggggtgacacggaaggtgtgggtggtaccgattcgccaattctcctgcgtggttgggacaaggagtacaatggaattccctctaggatatgcggctcagtaccaatcctgggatggtgttccttgcgcttggcacggtccacaaggtagacacccctaaggagctgactatggcggtctgcctgctccctaaggttctc

SEQ ID NO: 41876 - DNA, 440 bp, Zea Mays
cggtggagtagcacgccggagttaccccgcctagcgcaatgactagtgttgatatactacgcggaggtgactgcgagttcactagggaaggactcacctgcggttaggagcgaagcctggcgtagtgcagtccatggcagtgcctgtgtcccccgcgagccgtcacctcacaaccacgatcacacaactccagtctccatgaccccgtgatcagcacacgctagcaaccctcctcgactaaactttgagggctcggcgagggcgatgatcgatctctctctgttcccttacgcccgcactcgacggtggccatggctgtcctttctcacggcggcgacgcgctctcccatcgctccctctacgtgttctcggtgttttgacgatggcagaaaggggcgttcatgcctgcatacttatacatgcagaggggaaccgcttcc

SEQ ID NO: 41877 - DNA, 449 bp, Zea Mays
gggagattcgtgcttgccgcatagtggataactgtgggggagtaaaagatctagcagggagtggatttggtcgcgggtagaaacttattggctgcacttgatggtcgtgcgacgtggccgagcggccggtgtcgtcgtggtatgccggcgacctcaattgcgccatgccatgactctttcaccacgtagtgataaccgtggcacgcctggaattaccatcttggagcccttgcaccggctggggccacgacgggctcgccagtgaaatatcccaccaccacagtgttggttctggccaaaattggcatgacgcgtagtcgatcccattaaattgagcattgccctcgctccgtctctctattaagccttcattccaccccctaatcagtgttctcgtgcatcgtagcctccagtcttcggatttcccccaaattggtcattgtcgccgc

SEQ ID NO: 41878 - DNA, 417 bp, Zea Mays
cggtagcctctgtctcaagtgtattattttgcccttttgggtctccttctgttttctcatgccctgaagacccgtaacctttggcggatttcgttgcaccattttttctcagaagatgatgaacccccgaaggcagcgctgacaagacctagaatgcgcgagctctctacctcctcttcagataaaatttcttggcccttcgaagatttttcgccttcgtagaatcctttgaagttggcataaaccaagtcaatgttggtccaaagggacttaaaggggaaaatggtagcagttgagtcattatctcgagaatccgggtgcagttatatgacgaagtggtagtgatgctacccttttcatgctcttgggcagctgtggtcttctttggagccgaggtcttcttcatagttgtatctt

SEQ ID NO: 41879 - DNA, 426 bp, Zea Mays
gaaataataaaactcgcgctaggctgaatcctcttctctcggcctagtctcatgcacccaccggcccaactactctcctatgcacatccaagcacccacgctcaaccgcactcactgcagagcggggaccggttgtcagccccttcacccaaagtctgtgtgcgcgcgtagtaaacctgagacactgtcgtgtggggccgctaccagccacacgagccgctcgccagctccttcgttcacctgcgcccgcatacactaacaagtgggaccctcgtgtcaccgtgttcctcctaatcttcacagcagccgcgcaaaccataataatctccctgacgttcgcagaattcttttgcaaccaccattgctgagacatgtgccaccgtgaaaaggagagatagaatgtcgccgccatcaaccatggtcccc

SEQ ID NO: 41880 - DNA, 324 bp, Zea Mays
agattgtgaatggttcaataaagcgaggggataatttgcctttgactttgaatctcctcattccacgaagtggtgacaccttgaggtacacatgatcaccttcctcaaattccagtggtcttcttctattatcaacataactcttttgcctagtttgagctaccctcatgttctccctgattatacagacttgttcttctgcctcttgaataagctcaggcccaaggaactgtctttctgtcatataaagcctcaaatggtgacatcttcagactagcctggtaactattattatatgagaattcagcatatggtagactcttg

SEQ ID NO: 41881 - DNA, 320 bp, Zea Mays
tctgttcatatataaaaaaataactgtagtattattgcttatattgattttaaatgatgaccttattagatgtgccatcgagaccacatatattagcattttgtgactagaaatacaatgcatgaatatatatagataacctttacatcgtgctacatgctttcgggaaataaggaaccattacaacatatatatttttatgatgtacaatttcgtcatcggatataccatgtgcatatgtgcagtaacccattatgcttttgtttgtgtatacaacaagttacgcatcaacatacatggacaaaatcaaacaagataat

SEQ ID NO: 41882 - DNA, 468 bp, Zea Mays
cccgcaacactacgagccttgccgagacctaggttacgaaggctaggggtcgatgtggcatagaggcagtaatgatggcaccagggtcccgcgcctcccatgtcgttagggttgggcattcaggttacccgaaaattttcggcccgggtaatttggttaatataacggggagatcaacgttggcatggcggatgcaacattagctggaagaacgaccacgacggacgaaggggccgctccgcccaacggtagagacacgaggatcgagggagttgtgagccccctcaccacagaattcgcgtccttcaccgacttggcagaacacacatgctaaccaagaaaatcagagaaaagaaaatggaatgaagatcgaaaccaaagacaagaagagcaagataaccaaacatagtgcgaggagcgcttccgggtggtaaccttttttcgggtgaccaccggaggtgccggagg

SEQ ID NO: 41883 - DNA, 303 bp, Zea Mays
tacaacccctaataggctagctttttggggggagtgttgacccaacatacttaaaacctgctgccatgtgttcgggcgcctgtgtcacgacccgacggccttggtgagtgtgacgtgtatgcaggcgacctggcaggtgtgccgtgtgtcggcagtatggttccaacagggaaggcttttggagggacatccggacgtacgagatgaaatctgattgatgtatgacgaatttttggtcggacgctagaggatgcagcgtgctgcaacatggctgtgatttgttattggatagcgaggatttag

SEQ ID NO: 41884 - DNA, 383 bp, Zea Mays
gtcggtcgttgagcttctgttgtcttttgttttcctgcaacccgtgtcctccgaagatgacgttgacctccccgtcgacgcgcgggaatgctccacctcctcccccttcctgttgctgaggtcgccggggctcgccagaccctcctcgtggtgggggaggaggtagaggctagaacggccggccattcccgatggaatgcttgaagtctctgcagttacgcaaggtgtggcgcatatccttgtgatacgggcactggccatcgaggagtcgttcagtgtccgctcgcctctgcagggtgcacctcgggcaagagagacgggtggtccggtggcgtggacctcttcactaggcctcttctcccaacacttgttgggttgctggt

SEQ ID NO: 41885 - DNA, 652 bp, Zea Mays
aaagacggacgacagtagcaagttgcacaccgatgtgtgcacgaggcgaggaagcacgatcctgtggcccgctgagaaatggctgcgcacgggacgggaggggcggacgacggtagtaggtgagacgccaacggccggaaggagcgagcgaggcaaggtgaatagacggtgcaggacacggatgggcgaacagtgggagtaagtggcacgccgactaccggacggtgcgtgacggatattctgaccatcaaatcggcgtttgacaaggtcgatgccaagacctccgtgacttcgggaagggaatatgagaagggataacagagggagagggtgggagcattgagcgttaccttcagaaggaagaaaccggaataggaagcgatggaggaagaaagcaacgaagaaaccggaataggaagcgatggaggaagaaagcaacgacaacgcgaggttgcctaccgtcgtccgcggcctaggcgatgttgccctcccgtcaccactcctcgcttcttcccagggcagagctttccagaggactcaggataggcatactaggagtgggagcagccagaatgcaatatagagctcctatggtcctatctaaaatgtaaaacattgaaaccagttagatgtatctctgaatactaataag

SEQ ID NO: 41886 - DNA, 366 bp, Zea Mays
cgggaaaggatgacacggttggataggaggtcaagacaccggtaccctttgtgatgtgacgagtagccaagaaaaacacacttagcggaacggggatcaagtttgtggctagtggtggcagataggttgggatagcaggtgcaaccgaacacgcgaagatgttcataggagggtatggttttgaagagggcaaagtgaggagtggaaaaatgaagggtcttggtgggtagaatgttgagaagaagtgttgccgtgtggagtgcttcaacccagaaggttggtgggatgctggcctgaaagagaagggagcgaatggtgttattggtagtacggatgatgcgctcagctttaccgttctgagatgag

SEQ ID NO: 41887 - DNA, 588 bp, Zea Mays
agttaacttgtcgggatgtgagatgcgtatctcttaccatgacgcagaatcgtagcttttctttggtcagccttacacacatcatcctgcccaccttacgcttcgtgccgtttccgtcagcaggacttcggcggcagtttaaaccgtgcctgtgtttgtcgcggtgtgctgctgtggtcctgtttattattgcccggttcagaatgcaaactttagtggaggatttggggattacacaactactactagcattttctgattaggctagctagttatttgctcttgcgtggctttcagaattagcatggatgaaaatatctgctgtacgctaccctcagtcagtgaagagaacctttttgagatgagatactctctctctttttctgatcgattagcactaccagagatgatgtttaaacgagctgctatttaccaactgtagaaatttctcagcttgctttctgatgaattaattcccaactgtagatatccttattattgagttcgtgcaccagatttaatttctgtaagcgacaaggctgtgcagttggttctcatatttcactgtcaaactgcagtaccaattcc

SEQ ID NO: 41888 - DNA, 438 bp, Zea Mays
cgagaaacgattaaaatactccaagcgtcgtgtggtccaccgtttagcggatacgagcgatctggcggttcaccttccaggcgccgggtggtccaccgttcaacgggtgcggatgatttggcggttcacattcccacctacagcactatataaacggacgggttggtgcagagttaccacaacattcattgccgttgcactgttgtgctattaaaaaatttaaccatagccgaagctttttcactgcgctctcaagcgaacacttcatcatttagaattaacttcgtcaaaagagtgagcttcgtcaaaactgcaaaaaagaaatgtcaacttcgtaagaaccgcaaaaaatccatcagatggccagagtacgttcgactgcaagggtgactcgttaaggagaagagaccgaggccaccgagacagcgccaatttctg

SEQ ID NO: 41889 - DNA, 272 bp, Zea Mays
tgaatggtctcaccaggctgatgagcaccttatcgccagcgaggagccgccctcattgagccatggctgcatctgttgctgcccgtgaatcatagactggatcagcgcatcagatcgtacaccgccacgtggcccattggaacgaactgtgactggactcggccaccggttgtcaggtacagtcacccaagacaatgctggctcaacctcgcgaccattcacatcttctttggtcggtgcaagcggcaattactgatcgtctcacacgcgaa

SEQ ID NO: 41890 - DNA, 862 bp, Zea Mays
gttagagttggtgaaggctcggtctagtctagcaagcgtggggaagcggcgcttgttcgaccacgtgaacagactatcgagaagggggagctcacgcaggcttagcctgtcaatgcaactattgaagagatcacagagggaccgactgacagcacctttgtttttttcagacgcattgcgaatgaggttgaaatcaccaaggatcaaccaaggcccatcaatgtgcgagtggatctcctgaaggatttgtaggaagtccggagcgtcacggtgatcggagggagcatagacattggtaatgtgtatgacaacattgacagccaggagagtaaagcaacaagtaagagcatggcgcctaataatgtaagaatttagctgtagactattttcgttccaggccgtgaggatgccgccacgggtgccggcagccgggatgtgcagaaaattggaagcaagagacgaagggaggaaagaggcagccttgaacacagtaacgtcgctgagttttgtttcctggagacaggcaatagctggggaggaggagacaatggcatcacgaacaagaacacatttatccgagtcgccaagaccacgaacattccacgacattacaacaaggttcttaccacaactagccatgaccacacaaacataacaccaagggacaaggattagcaagccacccagaagagtctagcctaagcagcagaagacagaaaacaggctcacagagccgaccaacaacagagagacgaacaacacaacaggacgagcagatagcggcgacagacacaaacgcacggacgccgacctccaaagtgcgcttggaacaaaggctgaagatcttcatcccatggccggc

SEQ ID NO: 41891 - DNA, 378 bp, Zea Mays
tttcttttacttataaaaaacttacttagatggtttcaaaatcttaaagccatgcataagttttttaagattcaaatactatttagctgcaaagtgaacttttctctttcattcttcgctttgaatagtaggcgccatgacttatgttttttcatatctataactattaattacagattatattgatagtgtccggctttcctgcgcgcagtacagtcccttgtgtggctgagctattatgtatattgactatgtatgagggaaaaattgcagattgttttggatttttatttggtttgtgacttcgttggtgtgattctgtgcctcgagctagtttgtgacttcgttggtgtgatttttattatatggacactgctg

SEQ ID NO: 41892 - DNA, 298 bp, Zea Mays
ctaacataagcctctggcatggggccaaccagcacgttaggcgcaggcgggatgtgcacttgcccacgccaaagggcaggtgacgtaccctctacattaactgcacgtggcacgcctcgtctgcaacgtatgggatacattgttgcccgcatgtttccaacacaatgagtttgactcaatacaccgcttggacacccttcatgatgatctcttctgttcctcacgtgttaccgaggcatgaagagacatgcagaggagaccggacgacacaatctgtacatcccaacgcacgtcagcg

SEQ ID NO: 41893 - DNA, 528 bp, Zea Mays
cttgcgccacgacggggccgcacgaccatcgccggtgtgaccaccgtttaccagaatccgccacgctactaactctattacctcgccgcaaggtgtcgtgtgaattggtcagtcatcgtctcaggcctctaccccagtaaatgccacgttatgcgactccggtgactcacccctctctccggtcgccagccttctccttcaaaatttggagccaccgccctcggacactataaattgagtgtactactagctccgttaggttgtcacgaagccaaagcacccgcccctgccttcgattagccaccatagcgacctaatttttttcttcccctaattcggttctccgcgccgccgtgagccatcgcgtcgtggaccgccgtttccagatccgttcataccctccttaccctcgtttcagcacccttgtgtgctctggatgcttatcggcccagtcaattgaactagaccatgttagatcaccgggaacaccttgggttgtcctcggtttgcgccatcaccgtggaaagt

SEQ ID NO: 41894 - DNA, 299 bp, Zea Mays
atcaaacaccaccatgttcctatgattctagatcatccaggcccctaaggtaataagagaatccattcctttcttccctagaccaaatacctgagctgaagttctctcccaccagccaaagaagcctcaacttgctgagtggataagttgtgcagcccaaacttcctcaagaggttataccagaaaactcttgaaaacacataagagccagcagatggttgatgttttcaggttcttggtcacacatggggcatctaaccgggtgtggttcattgtcttttttccagccgatcaacagt

SEQ ID NO: 41895 - DNA, 305 bp, Zea Mays
tggaaactgaacccagagaagtgtgtgttcggagtacaggctggaaagctactcgggtttatcgtcacccatcgaggaatagaggcaaatctagaaaatattgaagccattatgaggatggagccaccgtgatcatagaagaaagtacaaaggctcactggatgcatggcagcgatgagtagattcatatcaaggcttggtgagaaagggatgccattctttaaactgctcaaaaaggtggataaattctagtggacgacagaagctcaagaagccttggaagcactaaagaagtttctgactac

SEQ ID NO: 41896 - DNA, 966 bp, Zea Mays
ttgtgggctgggggtctccgtcaactatccagccttcacttgagctcgtacctcattgcagactatgcgatgatggctctccagtgcgggcgtaacaccatggggtcgctgggtacctacgcttgggaccttcgcttcacgattggaggtaatcctggatcatgtacttctccgctacgagtagggcaatctagatcgatggttgggggcgggggtcgcagagtcaggggaacgacgatggcgccgccgtgttgacagccaggggaggaagaagatggtcctgtagccgttagatgggggtggacggctgagattagaagctggatacctcttcgtcgtattaaatccatgccgcagaactttgatcgggcggataggattaagacaaacacgtggacttattacgtccgtggatctctgatcctgcggccatcattgaataccgattcacttaattgttagatctaatcctagcccttgatttccaatccagcggcctcgattcaccgataccccttccttggcttatttgcttaagaatccctggttaatgcctgaactaacccgcggtccagtccaggattcgctgtgtcttgcgaagttttgcaccgagacccctagctttctctgtaatagtgcgcccactccagagacccaggaaactcaataattaaatgtagaaattgatttttatgtataaataattgctagaaacttgatttaatcatagaagatccattctagctccaaattagtatattccagttcctaaaattttgtaataatgttgtttattacatagcacctctgttttaacatgaaaatggtattaaaatttatttcttaactaatctcgtatcaaatacataaaaccttaggaaattcgtatctccttcgttttaaatccgatttgactcgttccagttgcgttagtctcgtagcaacgcgtagattattattactcag

SEQ ID NO: 41897 - DNA, 290 bp, Zea Mays
gcatctaaactgtgagatgtggtcaaatcagatgccatgtccatgtaaccgaagaatttggttcgtggaagttttaatcacagggtatgaactgttgaacgcaattacctcgagttatctctatgtttaatctaaagatgtggtggagatacaattcattctggcaaagaattgtggcaataactcgaaggtaaccaaaaatggcatgtataatttaatttgttgtgatttataagaattagtttcttgcaattctactaatttagtgactaaaataattctagaacatg

SEQ ID NO: 41898 - DNA, 288 bp, Zea Mays
ggggaacaagagctcgtcatcacatcacacaatgcaagtgttactgtacagtgtactgagtaagtagtatatatgctttgaagaaccatgttaatctgggtctgacttcgactcatttcggtacccgtacgtatatatatacatagctagtgtcatgcgtagagttcatggctcccagtcctgagagggctccgtgcattgcatgacagcatgagcaggctctggcattgctcagtgtcactcattattaggccttaattagtgcaggggccgtacgctagctgttcc

SEQ ID NO: 41899 - DNA, 768 bp, Zea Mays
cgagcacctcccactcacctgcatcggttgcgctagccaccattgccgccagctcggagaaaacaggatagctaccatcgtacttggaccacgcgtgttctggcgtcctgccggtggtcagggagattcgccagccgccacagaaacatctagttgcatcacttgatggattaagacctcggccttcgaccgatttctcaccgaagtataaacaccacggcgatacttcaccgtcgcgtggtcgaggtcgtcatcgccacaatccgaggtaggaactccctcttctatctcgtcttgttggtcgcgtcatgtagcacttactcccgtcaagttttatcatcgggtgggccgaagcactatctcggctcgccgccggtagcctgggcatcgcgcggtggtgatgttggccgttgaccgttagatcgtgataatgcggccaagattagaacatggaatatcggttcggaccgggggatcgtagccgttgatcatgagctggacggttaatattagatctcgcgtcatgaattttgatccgtggatcctagatcctatggacctcgcggcataccggttcagattattatcagatcagatctgtgccgttcagttgtaatcgggcggccagcgggcagcgataccctttcggttgcaacttttacaggagagccctctaactaaggtagaaatcaacccgcagtatgtctcgggatagactgagtctgggagatttttatggatgagccccggaactctttagtaattggc

SEQ ID NO: 41900 - DNA, 377 bp, Zea Mays
aattatggaatagagaacttaatattagcatatggatcatggtctcagttaggattatgatgatgacatctaccattaccctcatacctaatcgattacgtgcaaggcatcgttgcagcggtgcatcaacattagtttcgtcgttatcgtcttccgaaggtgagagcactactgcaccgttagctagtgcagcaggggctggagcttgtggtgtggaatgagcctcctactcgtccatacgtgtaacaagtctagaaacacgttgatcaatctgctcaaaggatgttgtcgtagtcctagtacttgttgaaatcatctatcatcatgtgcatcatctcctttaactctagatggaaggcacatcatcatcaataggc

SEQ ID NO: 41901 - DNA, 337 bp, Zea Mays
agagggttcatgactctgtcagctcatgagtctctgacgccgctatccacctacgttgcttcggtcagcgatgctgctaggcgaactctatggtccctcagccacacctactggtagcagcttcacaacacgaagtacaggcatcttcctctgcgtattcgtggagaaagccagactagtattgttccaagtggagttggagaagatagcctcaacaccctagctggtgtggtggcaggtcttaacaccaacctagatagtgctaccttggacctctctagggtacacttggagctggaggatgcacatgcaaggatcgcagccctggaagctcaac

SEQ ID NO: 41902 - DNA, 402 bp, Zea Mays
ctagctcaaactcctcattaatagcaaattgcctgacagccaacctaaattcatccattgatgggtacaatgtgccaagatccaattttgggtgatccttatcatatgttatcactacctcatctggtatggcatcactaataggaatggcaacatcttcagtattttcatctccctgctcacgcacgcattgtacgaccattcggttcagctacctttctcctctcatcctcatccctcaagcccaatatcacatatagctgatcctcactcaatggttcaactcttccttcctcatcatgagtctctactatttttaagttattgtgggataggtaaagaagcctcaaacaacaacaatggagcatcagtattgctccccatggcaacctccgaatctac

SEQ ID NO: 41903 - DNA, 552 bp, Zea Mays
gaggaggaggaggatgtgcttcctttggttcggtgcgaacagcgctccaaggctcggagtgatacttcgagtcttgctaccccagcgagaatggtggatatccaaggtttgtctatgtctgttgtcgatggtatacttgaagaggccattcctaaggagcccctgcttgagttacctaaaattaatgttatcgatgtctacatagctcgctcggatgaagcaccttctgctgtttgttggctgggctagaggtaagcctgccagtccccagggagctcctatattagtcggtcttaccgttgacccagtcctacccctagaggacatttaagcccccgagggtgtcacggttggttccccttctactacttcaatggagattcatgttgggttgccaatgcctcatattgacgatgttgtggcaacgaattctgtcttgcccatcaagcctggtccagccgacaaaaccactttggaggtcagcagttccgatgttggaatccccatgggtgttggatttagtctaggagattcacaacctttggcgcttgt

SEQ ID NO: 41904 - DNA, 355 bp, Zea Mays
accggcttgaaatgatacttagaggcaaggtatcaaacattggcgcccctgttgcgtactcggcctggaacctgcctccttccaaagcctttacttatttcgtgtcaaatcctccttctgctgataacggtttgggccttagagtgcgaccctctactgaagaagttagtgctttaattgcttcgcttggagaaattcctgatgatgaacgatatgtccactttgaagtgcctttggatcctagtgatgcagagataggtgccatgttggatatgttggctagggattcttctgatgctgctccgactgaaacattggtggtggttcccatccctgaagctgataaagccttgga

SEQ ID NO: 41905 - DNA, 401 bp, Zea Mays
cgccattcgaagcactgtatggacggaaatgccagacccctctcatgtggtccaacgtagggggaaaagcactagaaggacctgcctttgtcaaagaggcagaagagaaggttgcactgatccgcagaaggttactcgaagctcagagtcggcagaagagttatgcagacaacaagtggagggaactctgatttgaggaaggagacttcgtctacctcaaggtttctccaatgcgtggtgtcaggaggttccaagtaaaaggaaagctagccccacgtttcgtcggtccctatcccatcattggcagggtaggatccgcagcataccgcctggaattaccggaatccatgtccaacatccacaatgtgtttcacgtatcccagctccacaaatgcctgcaa

SEQ ID NO: 41906 - DNA, 428 bp, Zea Mays
ccggtattggagatctttttgaatctgaactgtctctgcctcaatgtggttctctggtacttgcaagcacttacggagctgggacacatgaaacacattgtgaataccggacatggattctggtagttcaaggcggtatgctgcgggtcccactctgccaatgacgggatagggaccaacgaatcgtggtgctaactttcctttcatttggaaccttttgacaccacgcatcagggagaccttgaggtatacgaaatctccttcctcaaatttgagttccctctgtctgttgtctgcataacttttctggcgactctgagcttcaagtaacctcttgcggatcagggcaaccttctcttcggcctctttaacaaagtcgggtccttccagtgtcctttcccctacattggaccacattaggggggtct

SEQ ID NO: 41907 - DNA, 552 bp, Zea Mays
cacagatcaaggccctgcaaatcactctgtcaggcgctctaatggggattctgatggtacagtgcttgaagaagatcttaggtgcagtgcacctcgccgccggtgaccccgcgctttgattcacgccagccgccacgattcgtgctcagcgcgaagtggataaccgaggggagtaaaagatcttggcacccggattggctcggacccagtcactggatggttgatcgtacccacttgcctagcggccggtccagatgacttcaccggagtctgccgcttgctgcccagatgccacgtactgagaagtgttaccacgtcacagtaaactgccttaggtagcttgttcatcgcctaagacactgccccagtgaaagccacgacaacttgcaccagtgaacttcccctctctccggccgccagcgccttcttcaaattggacaccaccgctgatagattctataaattgctgccccagtaagctccgttaagttattacgcacccagtgaaccagtcctcacctcgaatcgttcaacatagctcctcaatttgga

SEQ ID NO: 41908 - DNA, 312 bp, Zea Mays
accaggttagtgggaatgttgtccagaaaatcgaactcgtgggaggtgacagtgggtgactgttgggcaaaggggaaggtggactcattgaaaacaacgtgacgggaaagatgacatggttcgagagaagatcaagacaccggtatcgtttgtggtgaggtgagtagccaagaaagacacacttagcagagcggtgatcaagtttgtggctagtggtggcgaataggttggtataacaagtgcaaccgaagacgcgaaggtgttcgtaggatggcactgttttgaagagggcgaagtgcggggtggagaaat

SEQ ID NO: 41909 - DNA, 300 bp, Zea Mays
ggccaaggtccgggatttgcttctaggttccattcccatgtttctatataggccaagcccaccttctgttgttagttttgttgttctcatgccaatttcattattgttgctcgactcttatatattgccaccatgataagaaatatactcattcttggtcttgattgttccataaacgtaacactacttgcaccacaagatttacaagtcttccgtagcatttatttgtgaatgcatgagctagtatacctatttttgtagtttggatacatattttgtatatttttcgacagtaacaac

SEQ ID NO: 41910 - DNA, 350 bp, Zea Mays
tggggggcctccccatgactcggactcttaggatcacataagcaatcccttgaccatccccatctgcgctcatatgtgccataccgagtagccggccacctcaggagccccatcatcgtgtgcacagtgagaaccaccgccgccgccgccgtgggaacccgcatctggggttgctcgggtcataagggttggctagaggggcttcacagagatcgagggagatggtcgtcatcacaaagaaggcattcctcggcgggtgaacctagaattcctcttcggattccattcaccatcgcgaagacgccccttgccgtggcatggctcctccacatcgccattgctagttgttg

SEQ ID NO: 41911 - DNA, 351 bp, Zea Mays
accttctgttctaggttggcagcgttggcctgcttctcttcaaggagctagcgggcgacctacacaggtttgcgtgcgccgacaatcttctttgtagtgttgtcggtgatgattaggtcattgagccactacctaaaagcagtgacgtcgaagtccggcaacatgacgaggaggcggtggcctggaggggctacaactaggggacgacgtctgttggtgcggtggctagagaggcgatgacctaagtagggccgatggagcgaaagcgagtgaaaaacggatcgaggctttgattaccatgttagacaaatatatatgcggcaacggaagattatgtcttgcattgagccc

SEQ ID NO: 41912 - DNA, 1129 bp, Zea Mays
ttcgcacacagtgtgtcgctctggctagttttgaacctggaagcctacaactctatatccaagactgtatgatttaccgccactactataggattcaccagcagagcaatttatctcaagatgcatgctccttccaccaacggagtcggagaggtgcttcttcaaacccaaggacaatcgggattctgtcgatgctgataggtcgacgatgacgatacctatctttgtgagacatgcctctggagagctagctgtggaagctgatctggatgactggatgagcctttgcagaatctgatgcaattgtatgcacagaggacaaacacagtgctaggagaccagtatctcgtgtatggcaacacgagacttgagcctgctgccacccttctattggggtggaacaggatgccactgttgacgtcggcaccaagttgcgtggaggagcgtaagttcaaaacatttatctacttcactatggtcactacgcttattcacatcatgtcttatgttctaaattttatggctaaattgtaagtagtatatatatactctatgttatgaatgcaagtgggctaataaaactttattgactgtgtaaatattaactgaatatgtttcggcattgtatagtccttgacctcgttctttgtcgcgacctccctctttccttcccctccctctttgtacgtgttttggtgcttcgcacgcagtgtgtcgctctggctagctttcatttgctcagactttttgtttgcttgtcttttgtcggttcgggaaatctgcgacggcagggacttgcgtttaccactttccctgtaaagaacatatgaaaacaaatgcccgttggaaacttgcagccagatctgttgttgagaacagccgaatcccatatgccggagatgagaacgatctaagtagagctacgctatatgcggagattagccgagctcaagaagattagttgatccatcttagttgagaatatgggattcgcatgagaatagccagaacctaggggcaagcacaagtagatgttatccatcacgctagcagagctgcagtgattagcaccaacatgtaaatgccctaagatgtcaagtaacacatataattaacttgagtagaaaat

SEQ ID NO: 41913 - DNA, 449 bp, Zea Mays
aaaaaaaactatagcagcctagtgatggatcctggttataaatagcggatcctcttgcggggaggcgataacgccatggcagggacttgaactttagggggattccttccacctagttgagctgccagggctgcgttccttgcctgtgcatcctccatctccaaatgtaccctagagaggtccagggtagcactatctaggtcgttgttaagacccgccaccacaccagctagggtgttgaggcaatcttcttcagctccacctagaacaatgctggtttggctttctccacgaagacgcagaggaagatgcctgtactttgtgttgtacagttgctgtcgataagtgtggttgagggaccatagagttcgcctagcagcatcgctgaccgaaacagcgtaggtggatagcggcgtcagagactcacgagctgacagagtcctgaaccc

SEQ ID NO: 41914 - DNA, 298 bp, Zea Mays
actgaatcaccctcagcagtgcttttgggggttgaattatcctcaatcgtaccctcaggagctagataacccttgcatgtaacatcaggaaccaaggtgtccccatggatcaggctgccctcaaaggtcgaagaagaatgggaaactgtcggggttatttcttgcccgacacgaatgctagctgagggaatgtcatccaggacctctgcacggatgacaacactcctgcaatatcaatcctctaaagatgcaataaaagaccttctaggataatctcctgcaatatcaggaagttcca

SEQ ID NO: 41915 - DNA, 484 bp, Zea Mays
ctaactcagatggtcaataccaggcggggtggtggaattgatttgcctcccaatcgacacactcggagaatatacagacaaccccagccacagcctgcagagatgaatcctcctaatcctccaccaggcggagttgacccactggttgctgctcagatggcggtgatgcagcaaatggcagacactatggctgatatgcgtgcccagatgcagcaagaacgccaggagatgcgtcaggaaagagaagatatacgacaggagttgcgccaggaacgagatgagatacgctaggaaaggagggcacaacaacagcagcaacaagtgccactgcctccaccaccaccaccagttccaccccgtgataagcatagggagttcatgagccataagccacctacattcgctagctcacctgatccactggacgctgatgattggctgaagtccgttgagaagatgttgaatattgcacaatgcactgacc

SEQ ID NO: 41916 - DNA, 428 bp, Zea Mays
tcacaaatagtgtagggttgtgttcaagacgtcgagtagacactgcaagtaatcaagtaggtttgtaatgcaattgtgtgtaatttgtttataatgacattttatctcaagaagtgttatgttctatgcataaacaagaagtatgcatgttttgtgtagtgaggattgattttcaggcgtatgtcgcacgaaataaattaatgcgcataaaggcgatgaatgggtgtgacaaagtgcggcgccatcgatcttcgatctaatggttaggacggcgtaccagttcgaggtctgatctggtgtgttggatcttgatcgggtggcccacattatgctctgattcacttaaagcccggatctaatctggaccataggattctgatcggatggcttagaattcacgataccccttcgtagtgccattcttactt

SEQ ID NO: 41917 - DNA, 348 bp, Zea Mays
gaaagaaaccccttttatggtaaatctattgtgtgatactgttgtcaatagattttccagataaaattgtatttgccgaaggtttgcttcgtgcctcagcatattttcattcaacaagttattgccgaatatttgcttcgtgcctcagcacattttcattcaacaagttattgccgaagacttgcttcgtacccaatctttgttgttaatgcggtatgatgtatgatgtaatattatgcagaatggtgcaatgatatgatgcaacatgatgtttatgccgaacacacacacgcccacactgaaacactcaagactctgcatccccttagggacgtctttggagtcttt

SEQ ID NO: 41918 - DNA, 456 bp, Zea Mays
cttcatccgaaaggaggtccggaagctgttggacgctggcttcatcgaagaggttcatcacccagtgtggctggccaatctagtcatcgtcccaaaggcaaacgggaagcttcgaatgtgcatcgactacaggaaccttaataaagcttgtcccaaggacccgtatccacttccacgtatagatcaaatcgtggattctacctccgggtgcgacctcttgtccttcttagatgcttactctggtttccatcaaatccagatgtctagggaagataggaagcataccgcttttgtaacagtggatgggctttactgctatgtcgtaatgccttacggtctgaaaaacgctttgccgacatttgtgcgggcgatgagtaagactttcggggatctgattagggacagagtagaggtatacatcgatgacatcgtggtcaagactaagagagggtcgac

SEQ ID NO: 41919 - DNA, 290 bp, Zea Mays
tggtggaactggtggaagccaatgtgccatccctaatctgactatctgtgtgactcgatgcctcgccaaaacccgcacggcgggactgtactctcgagtgtcagtcgcacccacctgagaaaagttgctttttcgtgagctcgctcgtgtaaatgggaagcactgaaacgatgttaatggtacgtagtgggaaagctcgcctcaaagtctgaactctggagaacgcatgaatgagcacgtcgtaccagtaaaaccagtgattcagcaacgcatgcatgcgtggatacggc

SEQ ID NO: 41920 - DNA, 403 bp, Zea Mays
cagaattgtacggcggcgggcgaggacaacgtggaattccgctcggccttccaattgtctttgttgccggtggtgtctaggtgaactcaatggcgattccacaaggcgaggcaatggtgggggcgctgggctctccaattccctctctctccctctctgctacggcgcacgacgacggtgttctttgggttctaagcgcggcagctaggctagcagggagataggactggggagcttataggcggtcaggaagttgatccacgagcaccaaaatcgcggaaggcgcgctggtcaggtatggcttgggagtcattgagctagtggcgctggcctctgcgcgcccgccgttgagcacgatccgcgcagaccataggcccgagcgaccgaatcctaactgcctccc

SEQ ID NO: 41921 - DNA, 350 bp, Zea Mays
cccgcgggtacgttattggacaaaatcatatacccatcgggtatatcgggtacgagttcggctgcatagtacccatacccgtctactcgtgggtaatttatacccgccaatttatatacacaggcagtgtctgacacgtgggccatcaagcaagcactcaacgtctcaactactcaagctgtcaagcggtcaagtactcaagcgggcctcaagccgtcagcccgtcaagccaagccgtgcgtcagtggaaaaaatgtgtgcgtctggccggcagaagaaaactgcaaaccctagctagttggttccccggttcccccaaaaccccaagcggccaagccccaacccgccgc

SEQ ID NO: 41922 - DNA, 520 bp, Zea Mays
cttagccggggagctccaagaagatacagagatttttgcacccgacagcttcattttcagttctgggaaattaatcatctcatccaacctctcttgagagggaaattgcattaaaaaaccagagtgacacttggtagctttccaagtacggccccaggggaaatgaaaaccgaaatccttctcaagatcctcagccgagatcaaaccctcaatgattttaaccagaccaataaaactatgcttcggtttgtttgataacggcttggaaaaatgagaagagtagaaccctagcccattagccgccatcccaacaataggcatgctaggtttgttctgtttgggggagaacgcaccgagcagtgttgtgtgtttccttacgacagatctcacaccacaaagatttgaagacaccctagcatgatggccatccataccacatttttggcagaaaaccctacgcaccaattcattctcaactttcagaatggtcgggggaggggttttgaggatacctggctgg

SEQ ID NO: 41923 - DNA, 453 bp, Zea Mays
tctcaagccgcttgatccaactgatgtgcttgtcgcgccctgcaagtcagtcaaatgacattcaggcgatggaggacgtggatggatggatggatagatagatcgatcgatcgatcttactatgcagctgctctttgagcgttccattgtgcatgaactcgtagaccagaatgtttctcccatcctcatggcagtagcctagaaacgccactaggttcctatggtgtatcctcgagagcaagaccacctcgttcgagaactgcttcttcccctggtacgaatcgttgctaggcaccttcacagcgatctcctttccatcgctcagcttcccgtagtacactatcccgaaaccccctgagccgatcctgctcgcgaacttgttggtcgcctcttccagctcacacaggctgtagggatgagccgtctcggtggcgatcgactgcagctgctgcg

SEQ ID NO: 41924 - DNA, 543 bp, Zea Mays
ggttaattcaatggagatacggtcagggtcactgtggcaaaattgaagctctaacattagtgaaaaactttgctataccaaacttgactaggtgctgaacaatttttggagtaaatcgctctcaaacatgctctgtcgggcgctctgaatggagttctgatggtacagtacactgaaaaagatcgcaggttcgatgtatctcgccgccgatgactccgtgccgcgatcctcatcggcgctgcgattcgtgcccggtggagtgcagataactacacaagataagaaatatcgcatatgagatgaacttggggcactgtttcgccctgtcgccgtgcccacttgcccgacgacgtagttgcacgatcatcgtcgtggctgccgccgttcatttggtcgcgccacgccttgggccgttttaccacatcgctttgagccgtggaggctaaccagtaatagacgtacgcctttgtccaatgaacgccacgatagatcgccgcggtgactcatcccctcttctcggccgccagcacgatttcttcaaat

SEQ ID NO: 41925 - DNA, 276 bp, Zea Mays
cgaggcggagtggacgaccaagtccccactgagcaaatctgcgaggcggagcgactgaccaagtccccactgagcaagcctacgaggcggagcgatcgaccaagtcctcaccgagcaactcggcggggtggaggtcctagtctagtgctactaacccacgtcagctatgacatgacacatcatcaccaagttacgttcgaacatacgtgcagcatacctaaagagtgtcgggaggtcaccgtcaacatgactgcatgaccctatgaaaggtctcag

SEQ ID NO: 41926 - DNA, 278 bp, Zea Mays
attttttatccttttcttcttaaacttcatggttcaccttttctccctcgtatcttgctgcctgcaaaatttgagagtgttctggaaaaattttgtagttcggcactgctgcacctacgagcggcactactgctcgacgtttttctcagactttgacctagaacttttactggacctttgggttctctttcgaatttcatgtaaaagtttgggttcaaatcaagtctttttgtccctattgagctctgattgtcctctggaacttggtaggagcagtc

SEQ ID NO: 41927 - DNA, 376 bp, Zea Mays
ggaatttagatttctttgattgttgtgaatcccttgatggctgtggagaaggtggtggtgtcctaaatgttgatgcttgtggcggagacggtggattacaaagaggatgaggagcagcatgggaagattgtggaggtgatgatggatgtaaaggtactaaagttttaggaggcagagatggttggggatgagatgacgacggcgttggtggatcaaccaattcgacatcccttcgaggccaaatgatgaaatttttgatggcttgtccaagtgtctcgattccttcgggcccagggatgtctagcatgtcatcctcagatccttggacgaccatcgtcacttctaccctgtaataatcatctggtatgtcgcttcc

SEQ ID NO: 41928 - DNA, 293 bp, Zea Mays
atctctcaaacacttcaaacatcgtggttgcggagtctcagagttatagcatgctctagtaatgcttggtgtattggtagaggcgcctaggggcctcttttatagcccgaccaaggagtcattgctccttcatttggaaggcgcaaattgccttctaaccgcgggtgcatcagactattcagtggcgcacaggatatgttcgatgtcccttccagctcgttgcatgctgacgtggccagcggtgatcacgacgctgaccgttggtgcagggaggagccattggccacttggcg

SEQ ID NO: 41929 - DNA, 454 bp, Zea Mays
ctggactgttcagtgtgacatagtgcagcagttcatgcttggtaacttgcctgaggatgaagaacctgtgcccccgtaccctcataatgggcatcaacttctggtggaattttttgggttgggacaacctgtgcctaatttccaattagatctcaacttccctcccaatggtgaaatcgaagtagaggctgctaatgccaacaatgctgatgatggttgggatccttggctggttgagtaggttcagcaagaccctccacctgcacctgtaccaattgccaacaatgaggaggaacaattcagctatcagttctcgagtcttgaggacttaccctcagacaattcagtcggttttttcaacgatatggttattccgcaagttgttaactttccgcaggaggatgtccaagaccaagaagttgtcgtgctagctctaccagccctccccccccag

SEQ ID NO: 41930 - DNA, 360 bp, Zea Mays
gtctttacattcaagttgacttacaaacagtttcttcatagcctttttatcggcgatgatcgagctctaacagatcgaacgctctggtatataagtatacaatgtcaagggagtaaaatgaattaacataaggctgatttgataagctatactaaccttttcttagtcgtgagtcgttgtatgtcagggccgactttaggcgtatctacacttattaatgaggctacatgcttggctgcattgtgtccatgttctgcaatattgtcctacacgtatgaaacataataataagatatgacagctgcaagtagcactcattcaattatatcatggaaggtgatgcaccttactgtctctctg

SEQ ID NO: 41931 - DNA, 898 bp, Zea Mays
aacctgacaagttcaatggtcctaagcttactgggattcatggcatcacccaatagacacttcaagccaagttctgtcactcctctgcagtcattaattaccaaatgccttagcaatcgaaagtgaattctagcaaggttaagcattgcccaggtcccataaacctgagcatttcaccaggatgagagtagagagctggcgaaataagcataaatgatggaggactgatgattgtcttgcaacattcatatgtgattctccagccatcatgcccttgagctcaagtttatccagataaggttggttcatcagtaaggacaagatggcatcttgcccaatttgagggcagcttcccagagtaagggactcgagtctcttggcatactgcataagggctcttagagacgcctcagtgatggacaagcacccttcgatatggaggaacttcaggtttctgcattgcttagcaacctgaggaagaccatcgtcgctgattgaagactgtaacataacgaaattttctagtgcagggcagtttgaagcaatgatcctggcagctttatccgtgagagagaggcagtcaacgagacaaactgacttcagattgccgcatgcactgcttacaaaatggatagcactatcagtgagccgtggaacaccagcaacaacagtcccacatggtgcacaacaaagaccaagatcagttatcacaccccttgcacatatgttgacaacagcggctgcaagcttgacatcatcaacatcagacatatgcaggcaagggtgaacaccttgatgaacactgaaggggccccaaaaatctggccgctgagggaccaatatgttggcccgtctccaacagacacaggcacatgactggcgatcttctgggtttccc

SEQ ID NO: 41932 - DNA, 400 bp, Zea Mays
ccggatcccacggcggagcgatctccggcgaatcacaaaccggcattctactggtccaaaacccaattccttaccctacacgacgcgaagtaccaaagcgaattcgaagacgagattctcacccacaatgttgccgaaggtggagcagcccacgacgacgtgaggcacgtcgtgttcctcgccgcccgataagatattaccggcgccgcgaagacacagggcccgcctagatgtcacgattggcttccccgaacatgggcgaacctccccgatcacaccccggggtagaatccagcaccaccgagatttaccagtggcgccccggatcttctccccccggtcgccgcgagctcgagctttcccaactcccactgaacaaccctcggatgagtgcgagaat

SEQ ID NO: 41933 - DNA, 309 bp, Zea Mays
attttttgcccgatctaatcatgttcgtaccctgcaatcaatggactatgatgcatgtcccccatctgagctcgagcaatggcgacgtgctccacgccatggcggcggtctcgccgacgatcaccaaaccgttgacctagtgctcaaatgctacttcggccgagtgctacgggaagcagagacgaaagcgaacttcagagagggtttattagcggtgatcacgcaacagtaacctctatccatgatgcaatgtgctcagcaacattcttcgaactctagcaaggaatgcacgcggctccaagatctcgc

SEQ ID NO: 41934 - DNA, 471 bp, Zea Mays
atcctgtacaacatcccgtctacttcatcagcgaagttctgggaccatctaagaagaagtatcctcaagttcaaaaactattatacgcagtacttctaactgctcgcaagctccgtcactactttgacgaccacaaagtcatagtagtcaccgggtttccaataggggatattctccacaacaaagaagccattggaagaatagccaagtgggcctgcgagctgggagctcatgacattgagtttcggcctcgcactgcaataaaaactcaagcgctagttgacttcatatcagagtggaccgagcaacaagtaccagataactcggaggttgcagaagtatggcggatgtatttcaattgctcgttgaaactgcagggagcaggcgcggggatcctcttcattgcccctggaggtcaacaactcaaatatgctctttagttgttattctcaacatccaacaatgcatcag

SEQ ID NO: 41935 - DNA, 281 bp, Zea Mays
gttcgaagaccgactggttgttcccaaggacctagaactcaggaagaaaattttggacgaagctcatctttccaagttttccatgcaccccgggagtaacaagatgtatcatgatcttaggtccttatattggtggaccaggatgaagagggaaattgctaagtatgtatctaagtgcgacacttgccaaaggattaaagcaagccatttgaaggtcgcaggtaccttgcaaccactccctataccatcttggaaatgggaggacctcagcatggacttca

SEQ ID NO: 41936 - DNA, 406 bp, Zea Mays
gtgatcgctgtctcttgctgcgggtgttggacgactcctcgggtaaggcggtcaactagggtcgtgggaattcctcgccggtgtccgatttgccgccgtgaacccgcatgtctccgtgggcggcgagtcctgctacacgattcacggtaaaatcgctcccatttggttcgacatcccttcctcttccgtttgcaccatttagcgctcgagttagggctatgggggtcggtcggccatgttgccggtgggcgcaccgccgggtggcttctccgccgcagtggctaggattgaattgaggaagacggcgcctcggccgttgatcagcaagggaagggcccagattagatcggcgaaaattgattgtgggccatagatcctgaggcgtgcggcttagatgtaatacgta

SEQ ID NO: 41937 - DNA, 632 bp, Zea Mays
cagggcgtatggattgcagggcttcattccaggacaagatattgatgattttgatctctggtggtgttccaatagtgctcggctagatgggctgagtaaaaagggctttgactctttggtcgctctgggtgcttggatgctgtggaagcatagaaatggggttgtctttaatggtacccctccaagcttggtggtgagcgtttggctggccagggaggaggctctcctgtggtccttggctggagctaagggggtttcattcctccaagctcaaagccgtgtggggtagtttctttgttatgtgtgtggggtgtctgccagctgacaggcgctctgccccagctcgggctgggtggggttttcttctctctgtgtgtgtgttttctctttgtaacgtttgttctggggtctttccccttttcttcttaatacaattatacacaactctcctgcgtgttcgacaaaaaaaagttcggacaagagcaagtaatttcttatcataagttgaataattcaaggtagggccactcaacttctcactaaaatatgcaacatgtttcccttcttgcagcagcatgccgcccaacccaattccgctaacatcacattcaagctcaaacgtttattaaaat

SEQ ID NO: 41938 - DNA, 412 bp, Zea Mays
gccgtgaccatggtctgtttcctgtgtaccagtctccctgcaagaactggaatgtggccggtggaacggctccaactccaacacgcacaaaggggttgggagatcattaaaaggagaatggtttggtgtaccagcaaaagagtaacggaaggactagccatccatccatccaatacaccatcaatatgctgcctgccgccatgtgaatcctctgaccaaatggaattgaattgaaatatactagtatagtagtgtagaactggtgtatcaatatcattcacgcgtctctcgttttcgtcgtcggccatagaataggttcaggactccttcgttcaggcacaaaacgatcaagaaacttcttctaccaatctctgtgtgaatgctttctctctcctccacccctcaaattcca

SEQ ID NO: 41939 - DNA, 1138 bp, Zea Mays
gctcggtctagtacccttgttcctcgtgcccctgatggcaagccaaagggcaacgatgatcaatgctggaacaaaggaagggcaaatgtgaattttgatttcctagctccccttaccttttggttctagtggtatttctagcctatcggtcctactccacctttatgtttgcccttagatgttgagtgtggtgaatctctaattgggagtgaaataatcccttatgagccaaccctttgtgtagagtgatttcaatccctggattgaaactgccaaacattaactctaatttggagttaaagaatcccttatgagccaacactctgtgtagagtaatttcaaccctagatcgaacctgccaaacgttactctactccctctttttataaaggaagtgaggagagatattacgtcaattaaaccatgggtccctccaactaatacccaactaccctgatattatcctggttgtgaagtcataaacagagccatgcctttggtagtggcatggtgtcagagatgttcttttgttactgccatgctcatcgtaacggcacgtgttttatattgcctccatggatgctggtgtctgtgccattgggtatgacatagttggtagccggtgtagccttttatacttgataatacttcatggtatactgacatacgcacgtgtgactacaacgttgatgcacatattgaatagtgatcttgagtacattgctgcctaagtcgtggcgataatgcacctatcgaactgtaatgccgtacattacacattaaatgtgttgtatgggagacttaattgatatgtcagtgctaaggacctgtgaacatgccctaggcatagtgtccctactttggggtcgtaatgtcgtcggtgggaccagactcatccttccatcttatggacatgattacccttagtcgtagttagtcccttgttcttacggaaggcttcgagccccgatgggttcggggctcgatcgtttatattacgtgaagccaaatacctagtttcctaggggctagtagagggcctgcgtgactaattattgttgagtgccttgagggacaatggtctcgacaccaaactccatgagaaccccgaggcacgaacgaccctgaggacttggat

SEQ ID NO: 41940 - DNA, 295 bp, Zea Mays
cgggatcatatcgtctcactcagatggacggcacggaaatcaggaactcatggaatatagaacatctcaggaagttttatccctagctgtatttcaaaagctaccgggacgacaatgtactctgtaaaatgggaaatatatcatcaataaaaaggcttcaagaatactcagtttgttcatgattgacctgcattcttacttaactcggggtgaccactatgccctgctaaacggagcaatcggcttaagtcagcaatgacttaagacggtgcaacatgctcgcgcttacttaact

SEQ ID NO: 41941 - DNA, 378 bp, Zea Mays
agcatcagcagggccatacccattgggttcagcctaagcaggaccacaccgattgggatcagcatcagcagggccacacccattgggatcagctccagtaaagagttccaccggtacttcttcagcagcaggagcagaagggacaacatcctggtccaaacacgacactcgccgaagccgtctctttttctttttcttcccctcggcaggtgcagttggatgactggcctggtggaggcatttcgggcaagtaccatcaagcttttgagtgttcacggttttttcaggctctgggatagtcgcaacagccattgtttcaacagggaccgagtcagatgaatcctcagccaacatgtccagcatagcacttatctctgc

SEQ ID NO: 41942 - DNA, 496 bp, Zea Mays
cccgaggccatccgcggacgggatagacagtcacgactggcctgaggccaacctctggcaagataggcagtcacgactcgcccgaggccatcctccggtgggatacacagtcatgactcgctcgagaccactctcgggcgggagaggttgtcaagaatcacccaaggccaagcccagcgagagacacagtcacgactcgcccgaggccaccctcgagcgggagacataatcacgactcgtctgaggccaagcccaggcaggataggcagtcacaactcatccgaggccaagcccgtgcagcagacgcagtcacgactcatttgaggccaagcccgggtagcagacgcagtcacgactcgcctaaggccactttggcataactgtccgcacctggcctcctccacctcttcccgcctcttgctctaactgtgccacgttccacatgccgcgccctccaatctgcctcccgatgcaattcgcagtcccacacacccga

SEQ ID NO: 41943 - DNA, 437 bp, Zea Mays
catctgcttcagcaagtggaacagtgttttcccctccagctctcactatggaaatgtcgtggaaatattttcccttcaccggttcaatttgcccttgtttaatagttgatatctcgaaaacaacatggcttagcctccaacgccgatcttcgacatcttcattgctactcttcacatcaaaactatcactatcactggaatccccagacagtccaaccaacattttgtcagtgatcttctccacgttggttttttccatagcttcgtaaaaaccagcaagtgcgagatctatagtcttcttatcttccgccattgcgacagtgatcacaacaatagtcaaagctcaaaaagaacagttgcgctcacaaaaggcgagagctaaaatgacaatcacagcacaaaaagctagatggcacgaaaaatattcatagcacagg

SEQ ID NO: 41944 - DNA, 579 bp, Zea Mays
ggcccatgctcagcagatgacgaagggaaggaccaatgaattctgacttgataaattagagttctgaacccttgaccagcattctctggcgactgcaggggttctgtaatccataactcccttgaatccggaatcaatgcgggatcaacacaccatgcagaacatcgaaaagaggtgaggtcatccaggtccgactgaacgcagaacaccgaagcaaaggttttgagcagtcgttccaccgtggcagcctcccaagcatgcacaggaatgccatccaaatgaaaattcaccaagaaaggaaggatccctcctgaggaatttgcgaaccttgaccattgttggcagagcaccgaaaaggacggcgctttcaataatgattttttctcctccaagagctggatcagcctcacagaaggaaggaacagcagaaaactggacacagatagtcgaagaagactaagcgatccttcctcaacctctaaccaaggcgcgagcagggctgccacctcctcccctggaacagaagaacgctcgctgatcaccgagatcaccaccgccttctttaggtcttcctcagca

SEQ ID NO: 41945 - DNA, 295 bp, Zea Mays
gcggatttaaacagacaattacgacatcataaacctacgtataacttgcataaatggctgttacacccacgatcagcgcgcccacgatcttataatgaagcggataatggatatgcgccatgaatatcgcgtccacgataatggatatgcgcatgggcaaaaggaaatattcataagcttccaaaaaaggtagacagtacgaatcatttgttagggcgtgcctggctgaagggcgtaatctgatctggaagatggcggcgccactgagtaaagagtcaatcagtgagtatacgac

SEQ ID NO: 41946 - DNA, 418 bp, Zea Mays
tggagaggtcggtcaacgacaaggaatccttcgtcaacgggaggtacggcggcaatggtgcgagcaccaccctcgtggtggagtcggaggtcggcgtgaaggacgacctcatggagccgagcatgcacaagtacgtctccgtgcgtgacatccgtggggagaggagggagaccgagccgcaggagtctgcggggagcaacagctttgccagtgacgcctggacgtgctcgtgggagcccaagtccgttgactccacagaccggaccaggagtaggacggcctcgaagtcgtacaacggtgacaaggtggagcagtcgtggcagagcaagcagaagctgtcgtcatcccaggagcccagccaccgtggttctactagcaatgtttatgcttagcgtccagctaaatatcgagagtgtat

SEQ ID NO: 41947 - DNA, 327 bp, Zea Mays
ggcttttgagtcgcgttccatgaacactaacaagtccataacctcatttgagaccgacccagttcgtgtagaggttgctgctcagttgcaacaagtcatcgaagatggttcagaggaaggcagcgacttacatttatttgccactcatttgttgatggagaaatggtatagagatgtatttgcaaccctgaagaccaaagaaggaaggaacgcttggctgcgccgtgctttcgagatgaatgttaagtccagttagatggtgctcgtccgacaacgatgctggtggtccgaaatatgttggtgctgctgttatagtttataactatc

SEQ ID NO: 41948 - DNA, 312 bp, Zea Mays
attaggtttgtggttatttttcattatgtcatgtatgcaatggaattgatggaatgtcatagaattgttctacatgatgtcttggttgtataatctcacttttgtgcctttgtgattgctgatggcagaagatgagaagcactcataccatgccttttattttcctatacaactgatggaattgattttgtataatttttttctatagtatgtcgtggacctatcatttgtatttgagaaaacaaaaataccggtatgttctattctctattatgttctggttatttgtatagatagttgtataaaaacaag

SEQ ID NO: 41949 - DNA, 276 bp, Zea Mays
catggaaacagaacctgctgggactaggcgaaatgatgaacaagtacctttagacgtcgattttgttctagagaaagaagacacacccaagaatattgaatctcctactcccgaagcaccttctaaaggacttgactttataattcgacatgctttgggtaaaaggttgtctaaagaggaaattgcggaagccagacactacgcccgggaactgaagtacccgaagggggccttggtgtacaatggcaccgacgaagatgactttctatactgcct

SEQ ID NO: 41950 - DNA, 335 bp, Zea Mays
gcatctgcccaagtgtggctacgaccaagggttcaaggttacctgtgacaaagccaaggtgtacctcaagaactcgacctgcacgtaccaaatccaggccatcttctacgccatgaagctactcagagtcgccatcgtcggcctgtcgtaggacgatggcacttgcaacatcgacaagttcgtcaatgcctccttcgtccccagcccgccgttcgaaatcgagccccaacaaaaccaggagctgttcttcgtctacgactgcaacctgcgagcgccgcagctgcctcggtcttggacacccttgcgctgtggcaataatggctcgttcacctggc

SEQ ID NO: 41951 - DNA, 277 bp, Zea Mays
gaaaaagagtgaatgggagaaaggaaattcgcaccggtggatattgtgaaaccaggcgattagggttaggtgagagcgcaatccgatcttgcctgacagtctgggaggaagcgcaagtgcagcaaaagccacggacgagcaaaagttaaacgaccagcaaccctgtcaggcaaaacggcataggagttgagttgagctgggaggagccgtccaaatcggcagcaggaccgtccggctttgcccttggcccactttctagtactgggccacagcccac

SEQ ID NO: 41952 - DNA, 317 bp, Zea Mays
tcgaccactccaaagtcaccacgagaggcagcgtagaccaccctcgcgtgtgacactccacgcaaaagtcgcctaagggtgcagccggaatagcacaacaagtgtgataatcagtcttttatccaaaagacactccacgcaaaagttgcctaagggtgcagccggaatagctcaacaagagcgttattcgaagtcttttcttcagaagacactccgcgcaaaagtcgcctaagggtgcagccggaatagctcaacaagagcgttattcgaagtcttttctttacaagacattccgagcaaaagtcacctaagggtgc

SEQ ID NO: 41953 - DNA, 601 bp, Zea Mays
attgaagactgttaaatcaagaacaaaccttattaaggaattttgcccggttattcacaagaatcatgagagctagtcggtggaagggggacggttcaggcgactgacgaagatgtgccatggtacagtgccccgatggatcagaccgccagctaagctcgccatcgatgatcgccgtccggattcgtgcacggtatagacggataacgccgggaaaagggtgaatcgtacatggtgccatctcctgtgctcggccggagtgattcaccggcggccatcgcgtcaatcctttccgccgcggtgtcctcggcaccgtgattcttcctcattgtaccaattctctacgtgcttggcatgcgcttgtgatggtattcgagccgtgaggtgatcgccggacctccgcggctataaatagcccatggttcgtggcgaggctcggtcatcacacacataccagtgaaccaaatcaagtcaaattcgcactgccctctccacctttgcccaaattgattgtgcacggtgaaagcacagcctcttacggtcctttagccccaatcccatctcccaatttcgctcagagccgccgcgaccccattttccc

SEQ ID NO: 41954 - DNA, 393 bp, Zea Mays
ccgttttggaaataacggccgagtgatgacatggcacgccagcttttttagaaatagcagctgagtgatgacatggcacgccagcgttttagaaataaccgtcgggtgatgactgggcactttttggaaacgacatctggcccgggaaaaccccatatgtactgcactgtagcacaactccactctctgtgccctagttcttgctttcctgcatccaggccctctctgcccttttgcgattctacttccgctccgtcgccggcgaggttgagatggtgcccaagcggaaagcctcgagttcgtccattgctgtcattccccccatcgatcccaacagccagttgccttttgcaggtaaccatatctctgttgtttctgagtctgaccttctcc

SEQ ID NO: 41955 - DNA, 407 bp, Zea Mays
tgagagaaaatatcagaaccttttattattcatcttcctactttgtctagcgctgatcttcttccccaactctctcttgtacccggatcttttagaacattatagcatcttccttttagctgtgatttccctacttgctgtttccttcccaaactccatctatccagcacttgttgcttgagttatgctttgtctggttcagtgattgatcatgttctatcggtgagggttgctaacaagtggtatcagattcatcggtcctcggatcctcgttccatggcgtcttctccatccatcggcaccaacatcaccgtcacccaggcgctggatcatcaaacacgcgccctcctctcggcgttggacaagcgttttcaggctcgcgacagcaaatgggatttccgcgtcgc

SEQ ID NO: 41956 - DNA, 442 bp, Zea Mays
atattaataaaaactcacgctttggcggtttttgaccaaaaatactggccatatgcctattgatcgtcagtgagagtatcctattacttacccccacacaagtttccttgacataaaccacattatttgggttttggtggagaccatttatcgatcaaaaatctaaaggtgttagccttcgatattaaagaaaacgcatgctttgtccgttttttgccaaaaatgctggccatatgcccattgatcgtgagatagagtctcatattaattaccccacacatgtttccttgacataaaccacattttttgtctttggtggagaccatttatcgatcaaaagtccataggtgttagccttcgatattaacgaaaactcacgctttggtcgttttcggtcaaaaatattggccttatgcccattaatcgtgagtcagagtctcct

SEQ ID NO: 41957 - DNA, 318 bp, Zea Mays
ctttgttgtgaaaatgactgcgctatttctgcatcaatcaattcaacagcctgacaagagcatgttagtcatgaggatcaggggaagaacaatagcttcagctgcttatccattaccaaaggtagaagtggtagtgaatttggataatcaaagtccaaatggactctagttgctttgaatgcacttagataggatccaatatttataaattgtatagtcaaacctagttgccatgggacagactgggcaactaatcatgattagtccttgaccagaccgattactcaagcctagtcatagtcgtaactcgtacatata

SEQ ID NO: 41958 - DNA, 449 bp, Zea Mays
cagccaatatttctccatgggtaaaatcaaaagataggtaaaaactgagtagggctcacaggatttcaataagcaggaaaacgtagtaaggtacatgatgttgtgggcaatgcacaaagatcactatgaggtaaaaaagtgtaacaagattggcgtgtagagctctattacaagtagcaattactgagaaaacgtagtaaggtacataatgttgtgcgcaatacacaaagatcactatgaggtaaaaaagtgtaacaagattggcgtgtagagctctattacaagtagcaattaccgagatcccaactaaataattagggagtgatatgacaaatatgtaaacagggagatggagggaatgatggaagtgtcaaaaaccttaacccaacttcaaaattgctgacctaattcctgtggcaccacaaacaaaatgtattagctttttaaat

SEQ ID NO: 41959 - DNA, 803 bp, Zea Mays
gacacagtggaagagaatatgaaggtagtttcaagcgctataggacagacttcacatgtttcattatctaggaatcttctcttctgcaaattcacacgggtttggagtttgtcttttgaagcaagccaagtaaagaaacagactcttggggcacgctattttcccatatgaatgtagatagggggaggtaggtttcccatgggtcttcagaaatctatagaggagccctaagtggagagagtggtctgacttagcaagagcgcactgtctaaagtcgggtgtgtctgaaagcctaacattctaaaggagggtgttgtggttttcaagctcaaactttagcctgatctgaaaggtgggagacaaaggccataggaagcgggtgggagaggacccccccccccccaacaatctgattagtatttttggtcttgacttgagagcgaggaacctagtggtgaggtcgtcatccgagcaccaaacatcatgccagaatgatgtgctcttaccaacgcagatgtcgcaggtggtgatagcacgataaaggggagcagagagtgcaaggaagatgagtgttcacctaggaggtcacatgtgaggctcaccaaacaagcgtggcgacagacccagactgaccaggaagaacatgacgatgtttggacgcgatggatgagtttaaggtggaggcatgtgttgaacagtttgagatctctaacacctaggccaccggcaggcttgcttccaagcaccatttcctaggggacaagacaccgagacatatgggcaacttccttgcccgaccaaag

SEQ ID NO: 41960 - DNA, 290 bp, Zea Mays
cttgttcatattacacaccagtccagacgctgaaccaaagcagtccaatattaccttaacacagttcagatcttccactataggtttaacaaacagaaccacatcgtcggcataaatagaaattctgtttcggacattcccttcctgaaggttatggagcaaccccctatcttcggctagcagaaacatactgctaaggacatccatgattagcacaaatagcatgggggaaaggggatcaccttggcgaagccctctccgatgcctaataggaagaccaggagacccat

SEQ ID NO: 41961 - DNA, 615 bp, Zea Mays
tatggacatgtatgctaagtgtggttgcctaactgaagcacgtgttttgtttgatgggatggcgataaggagcttggcatcttggaatacacttatctcagcatatgcatcacatggtgatgtggaaaacacacttgctttgtttcatatgatgctggccgatgacaattatgtgaagccagatggggtgacgctgcttgcagtgctcacggtgtatgcacacaagggctgtgttgaggaggggcgcactgtgttcgatgcaattgaaagaggagattatggcaaagtggaagtgaccattgagcactatgggtgcatggtagacttgcttagtcgggcagggcaacttgatgaagcgtacaagatgatagagcaaatgtcgattccaaacaatgatgtggtctggggcgttttacttggtgcatgccgtatgcatggcaatattgacatggccgagaaggcagtccagaaactaaggatcctaaacccacatgagggtggttactacattttgctcatagatatgtacacagccgctggccgaacagcagaagccatggagattagacggaccatgaatgagactggggccaataaaactacaggctggagctg

SEQ ID NO: 41962 - DNA, 442 bp, Zea Mays
gttcattttgcagatttccagggactctttagcaaaacaaccagccgaacgggtatcggccaaggtgggccagtggattacgcacgaacggcgcggattagactgagtcaccagcgaagtggtatgcggcacagaccgtccaatccgcgatctatggcgcagatttaattattctggagtcactctgctccacctgatccaaaatcaagcgccaggatctaatctagcgcgaagggtatgtggatcctaatctggacggttgcccaaggatctgacggtgcccacctgtcttctaccctcggccaatccgcggcggcgcgaacagtctcccccacggccgcgccattaccagagaggctccactatggctccggtgcctaaaacttcaaccgagtggatcctacacaatgcggtgatgaacacgagttcgggcaagcaacta

SEQ ID NO: 41963 - DNA, 633 bp, Zea Mays
aaaaggcgagccagttccgtcagggcctgaaaccctctatcaggcatgctttgggcgcctttccgctggtggattttgtactacggtggagcaggcattgggcgtggagatgcagcatcagtacaccatgcttggaatcttagaagaccttgggggttgatcatcctcgtggccaggacgcgaggaggggcaacattgggggtttaacccacaagaggggaaagtcacaacaccagcgccaccactcctatcgtggcaaaccctctgaatcaggtactttaggagggagtactcagaggtatccggctgttcctaagcctgggttggggttggtgtgtttccgttgtggtgaagcgcatcgccgtgccgagtgtcagtggagtggcaggtgctctatctgcagccaggatcacaaggatgtggtgtgtaggaggaatcccaatgggaaacttaaatgggagctagtgactttttcctcttcgcagggcactgtcaacatgatgtcaagcgctgagcaacaattttctgtaccaccctctcagtagcagttctatatgcctaggactcctcagttcgtgcctatgccaggtttccctcagtacctggctgcgcccactcctacaccgaccgctc

SEQ ID NO: 41964 - DNA, 508 bp, Zea Mays
tgtcgcggatcgctcactcatatgcaccaaccacggcgcatggcggaagcactgggatgccctagtccgataagcaattatgctcccccgcataacccaaactcgactttcgatggctactaagtgctaccataaccaatttgagtaggtggggaagaatcttactagagaccgtggagcaatggcccagtccacggcgagatgtagcacggtggcgaggttcctgctccgatgagcaatctcccacacgccgatgggcaatccaacccgagtgaaccacgatcacgcgcggtgagtgcggcaaagccctaagatctccctccaatggtgtgccgaggctggggatcgtggtcgtcaatggcggtgaagtcctcttgtttcccctcacaattactgtacaacgacgatgatgaatgaaacacgacggggagagaggatttgggacccaaggtactcagcttttatggttctcgtaggccggtccgagcgcaggcaacggactcccgag

SEQ ID NO: 41965 - DNA, 751 bp, Zea Mays
ggaaaatgtttgaccctatttccctttcacctctcatccctaccagctcaggactaggcgtggttctaccaatttggtataggacatgccaggttcaacagcagcggatgacaccacatccacatccgccctgaacagcaccgcgccggaagcttgatctggttctgaagatcgtcagcgaccttgccactaagttctcggacctctccactcgtgtctccgacattgacgcccgcccccatcaatccctccactcccaccacaacccaccagaattcccatatggcatggctaggtatggagggattcctctggccaccatgcaaaccaccacgctccccttagtcgcaccccgacttcctgaacaccaaataccattcccacattcaccatcccccattccatcgcttccaccaacgttaccaccatccctaactttcccatccggccaccaggactacgccacaacgacagacgacgttccccacttctacaacatggtggagcgtgacaaccccaacatgtcatgggagcgcttccgggagctctgcaatgagcgtttcagaccaaccctctaacataatccactaggcgaactggcacgtctgcagttccgcaccacggtggaggaataccaagaacggttctgtgcattgttgggacatgtggaaccgttatcggcagcacaagtacatctattcacgataggattaccagatcacatccgcattgatgtcgagcttgtagggac

SEQ ID NO: 41966 - DNA, 388 bp, Zea Mays
gtgggagttttggggatttttgcgcaccacatgggcaccagaagtttctttaacaactttcttgccatagacatcttttgctcttgccttttgttcaacatctaaagagctaatgagattgacgataccaaactcttgtttattatgttgtagggaggtatcaaaatccaagtttgtggaaaccttgcaattatgcaacgcagcacaaacttctcaggcaatgcataaccaaaacccttgagttatttcagcagtacatgtgttgcatgagctttttctactattgaacgaccatcagttattatgtaatcatggaactgctccatgataaatagttcgctagtagcgtcagacactccatatttggtctccaatgcattcctcgttt

SEQ ID NO: 41967 - DNA, 392 bp, Zea Mays
cgtgttcttccctctgctgagcggccaaaacgtacgaatcttaccctagagcccgtgggagatctcttccctgcacctagagctacctagttcatgtgagttccaagagtagatgtggtcgggttagagatatatgggggtgggaagttggttgtgtcagacatgtccaaaccgagacaaaaatggtgccaagtcgtgtcaaacgtctaagggtaggtgtcaactctttccagggcattctagggttaatttggcaccactttgtcaattgggtcgaagtgttttgaattttggatgaaggtgaacatgtgtgatctttgtccaagggttagttttggacttaggcattttctgatttttcttttgtgttcaaccctttggtgaactttttg

SEQ ID NO: 41968 - DNA, 486 bp, Zea Mays
atcgtccgccactatatcgacggtgaacagaacataatacgactctctcttccccaaccctgcacacggcggcgcagagtgccccaggcaatgccatggccggcgttcggccaatcccagggttagggccctaataactcaattcctacggactacgcattgcccctagcgcaactaactggatgcgctactcaccgaggttggaggcgacagcagcgacgctacccacggcgaaagtcggctccacggcggatttggttcgatggcgagcaattgatcggctccgagcggtcccccaagcttcctcgatatccgcaagcccgcgacgaggttcttccttactccacaggattccgagggcacgacccgagccaacggacgcaacacgaatcgatggcggtggcggatctcaacacggcgctctccctccccaaatctttccctgcatgcggtagtgttgacggctttgcacaagggtaggcagga

SEQ ID NO: 41969 - DNA, 325 bp, Zea Mays
ggcggggttaggtcctcctaactcttcggcgatatgctctcaccaaccacgtcatcgatgacatcatcgccccaccgtctttgtcctagtatctgattgacagcatggtgctctcatggctccacgacaccatcaccgtcaagctacaagacatcatccacgaccaagcagacacacaccatcaagtgtggctcgccatcaaggaacagttccttaggaaccgggacgctcgggctcttcaccttgacagctaggtccaccagttctctcaggggacctctctgtggggggtactgccgctagatgaagggcctagcaggctccc

SEQ ID NO: 41970 - DNA, 295 bp, Zea Mays
catcgctatcactccatcagatcgtggtggagacgacccgacgtggacgtccatggaggtgtgggaaggagagctcgctcggacaccatcgggggctgggttgcagctcacactacccatcggagccagatcactaccagcaacacccttgggggctgggttgcaacttgcgctacccactagagccggatcactaccggcgacaccctcgggggctaggtaaccgctagcaccacccttagggggctgggttttctgcaacagccacctctaaggctgaaggatcctcagtcac

SEQ ID NO: 41971 - DNA, 438 bp, Zea Mays
ccgagggtgttatccaatggataggtgaagaagacgaagctttcgatgagatccttagcgatcgcgaagatttttgtgctttttccgttgcccgagggattgcggcaatcttacaaaaggctgggtgtgaacatgtcaaggccgcggcccagccagaatccattctctttgctgagaatattaaggacccctcagttgaagcttctaccctgggcgataaattctactccgatgtctggatgaagggcggacgagagatggccgacgaagccattaaaaataatgagaaataatctcatgacgcccgtgaggaagctaaacaagctgaagaagctaccgagagcgcgatcattataggtactttttgtttaaaacattttgccttgttgttcgttttttaccttcgcaactcatcaacatatacttattacagtcggc

SEQ ID NO: 41972 - DNA, 329 bp, Zea Mays
ggaaggatgttacttcagctgctccgagtgagcccgtgccgaagaggagaaaggtgaatgttcttactcaccgaccgcgctatattgaaccggccacagtgcccgaatttggcggtgagatctcttcggctactgaagccaaagaacctgcgcttacacagaagattgaagagccggctgcaatgccgaaggcatcatcggccaaattagctgagccgaaggccgataatattgaagagatagaggtcgaaagaacaaagatattagaagttataagcccttcggcagaagtgacagtgccgaaggcacaaaaagatcttacagcgacc

SEQ ID NO: 41973 - DNA, 440 bp, Zea Mays
cattttttggcaccactatgcggttgttaaaccataccactccttgatcgttttctcggaaacaattggcttttccagcccttatcttctcacgtatatgtttcataccctcatcatttttctgtgcgtcaattatcctttgtaagatgactgactccagcttcaagtgatttgaagtctcatgctgaatcattcccaggttcaagttttccatctcctggcataatgtaatgtcagaagtcctcatagttaaacaatggcaggaagccttgcgactgagtgcatctgccaccacattggctttgcccgggtggtaatggatctccaatttataatccttgattagctcgagccatctcctttgtctcatattgagttcagactgggtaaagatgtatttcaaactcttatggtctgtataaatatggcagacattcccc

SEQ ID NO: 41974 - DNA, 382 bp, Zea Mays
gttatgtgaatgttgatctctcagcactccgtacacctgcttgccacactgttttggccattgtgtcggggtctagattgggactgacttgagagtgtttcaggtctgttcagttgggtgttctggggccatgcagtctgattcagttcagcgtttcctttatcgtacctgctcaatgaatctaataccagatccgaaagagtgatcgcttcttcctcattgagtaaagggttaaccaagcatatgattgtttgctgtacctcaagttttcagtcggatatcagtgcatagttcctcgaagggccttccgttcaaaatcgtaactacatgtcacagtcacaccatatgagaagcacgaaccaacggttacctatacttgttg

SEQ ID NO: 41975 - DNA, 541 bp, Zea Mays
tcaagtttgcgctaccattggcacgcccaaccaaaggttaggcagcatctcttcgcttcaattgcctccattctaccattgcctcccaataactctcgctgttttgacttcccactcacatctaatatgcagcgtctacttttctatgcatcaccctgactgaacgtttccatttcctatacacatggcctacccattttcactgtgctgactcggtatcgccatgtgttttaggtacaaactgcttctcactgcaggggatgagacaggtgacacagacttcatcctctttggtcggatggcgcaacacatcattaagaagccgtgcgatatgctcattgccaacaatccgatcggctttattcctgatccaatcacagatctgctcgagaagacgtatatatggaatgtgagtttctctgaccacacaatcaatactggaaatatttgtttccaggtcaacgcagtcgtggcagagatagatactgcaaaggactccatacaagcatcttcatcggggccaaaacagtcacaaactgtg

SEQ ID NO: 41976 - DNA, 403 bp, Zea Mays
ggaggttgtggcaggggatgacagtagctcaccgatcgagcatgtggcgctgatggtgccggcacgagatgacccaacgacgctagtgttgacgttctggatgtgcagttgggtatgatgtagctagtagttggtgtagccttctgtacttgataatactttatggtacactaacatgtgtttgtatgactacttggttgatgcatggacctaatagtggccttgagtaccttgctcccaaagacatggtgacaatgtgcttgtcaatctacaaaaacgcacatcacatatttaatgtgttgtatgagagacttatccaatatgtcggggctatgtacctcctagtaggcactagacatgggatccctactttgaggtcttataaccctcagtgggaccagac

SEQ ID NO: 41977 - DNA, 407 bp, Zea Mays
gtttttttgtgtacttgatgatcaccaatttccctttattctgcacaaagatcttattgtgatatgtcctgttcatcttgtacatataacatactatgtcatatgctgaatgaatctttcctcattttgtttcacctgaattttaggatgctgatccagttcactatggtcttttgaagtatcttttcattcgttcctgtgagccatactttaacttcattaagtcatggatttaccgagcttctgttgatgacccttatgaggaatttctcattacacaaactgaaaataagggtgctcaaggaatctcttcagacataacagatgatttcatcctcttccccttaaaggtaaaatgttactttgttggggaagcttcaaatataaaaaaccatatgtaatttttc

SEQ ID NO: 41978 - DNA, 330 bp, Zea Mays
gagctgctagcaccgctgccttgccacctcgtcgtggatctccgacctccaatgctcccaccgtggtttggccctcaccaataaattccccgaaccctccccagcctccctagaccaacccgactgcacgatgacccctggaaccctcgcttccttcgtctttggtgggttctccatgatggtcgcgggcgtcgccgccttaggtgtccgtgggagaccgctggagccatccgtcttgatccccgtcgttcaccccagatccaacagttgcattttaattaacttgagcctaaacctaaccgtctgcctaggtctgacgacccatctaac

SEQ ID NO: 41979 - DNA, 631 bp, Zea Mays
cttagtagattattggggtatacttatgtgtatatatatcatctcacacaatgcacataagtgaaagcactcaagcagcacacaagcatttattccacatgcaggcattcacgatacaacaaggtacaatttcgtgtctcgaccttttaagggtcgaccgaaacaacttggctactggttcctatggcacggtcttcagggtctctttcttcagattcacgaggagatgcgggaggtgtgggtggcactgattcagaaatcctcctgcgggggtggtacaaagagtacaaagggattccctccaggggtggtgactcgacagtggtcctgggctggcattccttgtgcttggcacggtccactaggtagacacctctaaggagctgactatggcggtccacctgctccctaaggtcctcttcagccacagcaaggcgactttctgcttcggtcgctcgggcttctgcctgaactaaggcaagcttagccttatgccaacgggtctctgctttctcggcacgttggatgaggtccttcacacgctggtgtagttggtcgcacaaattgtcgaggctaagcacatatccagacatagcgacaatagtggggtctttctctgtcgtggtactcc

SEQ ID NO: 41980 - DNA, 351 bp, Zea Mays
gcgcaagccggtggtatctcacatataggtcttcgtctaccttgtgttcactaaggagcttagccacattagcaaggtcgatgacaggagcacctcggaggtgttcattggctacacgaagggctcaaaggcctacaacatttttgacccaggaacacgacatgtgtacacgacgtgtaatgtagttttcaatgaagggcgaggatgggcatgggacaaggcagtggacgaagacttgactccaatgtacgatgacttcactgtcgaatacgcccatttgagggagccgagtgagtaggcaactcttcttcaccaagcaggtataccctagtcccaagtctccatcgactt

SEQ ID NO: 41981 - DNA, 369 bp, Zea Mays
tctgttgtatgggtcactgtagagactccgatgacgaggtttctacgggcggggtcgtttggtcccactgttcagcagggatacatatccggtgtcgtgctgaacagacacccctcagtaccgctcccatagccccaggcatggctcggcgatgtcccatcgtgtcaacgtggcttgatagtactaggtcggtcggttgtcgtcttattgggttaatcaacaggcaggttggtcgacagccccgcctcgctgagttactcggcgatcggttgctcggtcgccccgcctcactgggttgctcgacgggcagactgtccacagccccactcgttgagttggtcagcttggcagtccatcacaggagagttt

SEQ ID NO: 41982 - DNA, 402 bp, Zea Mays
catcttaaacgattctaccctacactaatagatccatcttatctcgaaaagattctatcctatcctaatagatctaaccaatctcagaagattctatcttactcttggagactcatcttgtcctaatcagcatacttacccccaccaatttgcttatctcataaaagtgtaacaagcatgatctattctaaaaaaataaattaagtagatcttatctagtctatgtcacccatatccatcttaaccatactccggtaactttgatgatatacactgacctcgaatcaatgagctcaagaccggagaagaaaggatcaacctcgtcaagaaaggagagaggtcaaacccaaccttcagttgcattgccactcaacacggagttctttctcactataacctttc

SEQ ID NO: 41983 - DNA, 589 bp, Zea Mays
caagttcacatgaacaacaagaggttacttacctattggaagtctatttgacacttttgcattagcacaacgagagatggatgtgttgttcatggcaagtgtagcgacatgggtgatgagctccctcctcgccaagctcgctgagctgctcagagaggactacaagatgtagaaggcatgaggtgtgaggtcgtgttcctcaaggacgagatgagcagcatgaacgcgctgctggagaggctagccagctcggatgcgcttgatccgcagaccaaggagtggagggaccaggtgagggagatgagctacgacatcgagggttgcgtcgatgattacatgccctagctgcagaatgagatgcagaggcacgatggaatcttatgattcttccttgggtatgtccagaaggtgaaggatctcgttacctgtcacgaggacgccgagcagatttaggagctcaaggcttgaatcattgaggctggccacagaaggaagagatacaagaatgatgacgcggttaattctggtgtcgccaatgtgatccctatggaccgtcggttgccagcgctctatgtagaattgggtagcc

SEQ ID NO: 41984 - DNA, 279 bp, Zea Mays
ctgttgtgccttggacaacttcttcaaagataggggcaacccgggatatttgaagggaagccatccaccttacaagggggctgattctgaatggattctattagttttggcgcacaatgaataggaagcacactactcttctgaatgtttgtcttcagtccataggcctccccaaatagttgtaagatctttagaatcagctcattctctgcaggtgaaggtctcaggaagggttgaggaccacatcgtcagcgtacaaagagagcctatgaagattgg

SEQ ID NO: 41985 - DNA, 506 bp, Zea Mays
accaaaggacaccctggatctcaccagcctggccgactcaaatacagcatacaatcaggctgtcacagtactgcatgctacatagagaaagttcaggatcaagacaagggaatatggaaaatgtgtggagagttgcctgggcacgattgctggccttgtcgcttgcaatccaaaggggttgctgaattgatcctaggaattgcctccagtcccaggatgcatcaaatcatagcggaaaatacgtaatatatacgcatcataactagaacattttgaaaaactaaataaaactgtaccattttatgaactgaacaaagacgccgaactcggttctcggacaaggtgcacaaccttgagtacaagagaacacacaccatcaggaaaacatcattatgtaacaaacagccaacaaaacagaactaaattatgcgcacaaaagagtactccctagctctaatgagaagcggagtgcagccaaattctctcttctctccagtgaacaacga

SEQ ID NO: 41986 - DNA, 325 bp, Zea Mays
gcaatatatagacaatatacagagacaaacactatataaacaatagaaacccaataaagccaagtgaacaagatactaatttatctgtcattcatgggttagattgaaactggtaaaattaatcagagcgattagatactctctaatgggaatgttaggatcgctagtgaggagtagtagatcgagctgggaagagtagaatgtaggaaggaggagtggacgggaggaaggagagcagagggaggcggcgaacagcagagcttatcgcaatattcaggtttattactccttacacgtctggcgtcttatgccgactacctgggct

SEQ ID NO: 41987 - DNA, 510 bp, Zea Mays
gacgctatggggtggtggtcagcggcaggtttcaagcggtcgtggtgatggtggaccgatggccgctccctggccctccatctacaacacatggaccggtcgcatctccatgtggctcgacccagccccaggtgatcctccgcagcgtctaactccaccacatcctgctcacctgacactgcttgagtgcctggtccttggttacccctcgagcatctcccctctacgccgccaacgcctcagccactgaatatgcccctgttgccccactccactacgtcctggaccctatggtccgatgggtgagactagtagtctctagccagctcctttaacaccatggctttgaaacctcctgttgtcacttactaggtggttgattctagtgcctcctactcattccgaacgctcgtatagtctcttcttcccatccacctctcccctctagtccttcctctatcattatgggcaaagagaacatcctcccgatcacctctgttggtgattcag

SEQ ID NO: 41988 - DNA, 358 bp, Zea Mays
gaataattacatcagaaggttcatctcaaacctcgtaagaaatattgagttgttcatgcccttggtgaagatcaaaagcaattaggagtttgcgtggggactagagtagtgagtagcattcaacaatatcaagtcgtacctagtttttccattagtattggtgccaccacaaactaacatgatgtctctgatctatcaatcgacacaacctctattggcttagtgcttatccaagagtctaaaggcaaagagactgtggttttctaccttaggaggtgtcttcttgatgctaaaacaaggtatttagacatagagcaaatgtgtttgtgtctccactttacatacaccaaactctaac

SEQ ID NO: 41989 - DNA, 433 bp, Zea Mays
aaagcatgttttaaatctcctgatattgagtttagcggcatcatcaccgagctgctaacacagtgccaaacgcaccacccagagtcccagacctacctcttcagtccttgtccacgagttctcgctgacgctcacaccttttatctgttttcttgcccaactctgtcttgcctgcactctgccactctaactttccaatactcactctgctgcaaaacggcttctgctgcattgctgctggggaggactttgcgcccaacagcacacacgtttgtggctgcgcttggggagagtgtcgtggatgagatggccatgattcagcagggctcagtgctcctatcctagatcgaggaggagctcaagcacacatcacaggggctcaaggacactgaggtggtgggccagaaagcgccgagcagagggcaagagtcac

SEQ ID NO: 41990 - DNA, 473 bp, Zea Mays
cctcgtcaacaatgcagaccataaatggcatagagtcacacccattgagatctgctgtggtggggtcacacccatcgggttcagcatcgtcaaggtcacatccattgggttcaactcttgcagggtcacacccattgggatcaactctggcgccattgggttcagctctagattccaccggtactacttcaatggcaggagcagaagggccagcaccctaatccaaacacgacactcgtcgaagccgtctctttttctttttcttcccctcggcaggcgcagttggacgactgacctggcagagacgtttcggacgagtaccctcaggcctttgagtatacacggttttttcaggctctgggatagttgcaacagccatcggctcaggaggggccgagtcagaagaatctccagccaacatgtccagcatagcacttatctctgcatcacccggattcataggcatctcaaag

SEQ ID NO: 41991 - DNA, 436 bp, Zea Mays
gatcgttgagcttttgttgccttctgctctcctgcgatccgtgtccgccgaagatgacgttgacctccctgtcaacgcgtgggaaggctcctcctcctccctcctcctgctgctggggttgtcgtggttcttctggtcctccccgcggcggaggaggaggtagaggttggaagggtcggccgtgtccgacggagtgcttgaagtctttgcagttccgaagggtgtggcgcatgtccttgtggtacgggcactgggcatcgaggatgtcgtccagcgtgcgctcgcctccgcgaggtcctccccgggcgcgagaggcaggtggtccggcggcgtgcacttcttcgcgcggtctcttctcccagcgtttgtcgggttgctggttcgcgtcacgtcgtggtgctgccggtgcgggcttcgctcccccaatgaggtcttg

SEQ ID NO: 41992 - DNA, 438 bp, Zea Mays
ggagctgccgcgacgcggcaacgttcggttgtctgggccggagtgggccatctaagcgtgggctgaggcgctgagcccagcgaccgcttaaataaggtggcgtgtagcgcacgaagaactattccagaaacgaaacactgaatcgaacatggctgagcgatctgtattcttccccttcctacactatcaaagccctaacaaagcacgtcctgtcctgagcaacaaggttgagagagatgatttgtactcactgcgggtccaggtagcccattgtccctctcacgttggttgacgcgtgagagtccttgccctccgctgccagcaacttggatagcccaaagtcggacaccttggctctcatatgcttgtccagaaggatgttgctcgtcttgatgtctctgtggatgatcgatggcgtgcatccagtgtgaagatact

SEQ ID NO: 41993 - DNA, 1208 bp, Zea Mays
cgcgaggcccaaaacagccttactttactttttagggttgtgttttagggtttggagtttggggtttggagtttagggtttacagtgacactagtgtactatggtttggacactaaattggttgttcggccatgaaaacgtgtgttgtagctcaagcgaggccaaaaacagccttactttactgtttagtgttgtgtttttgggtttggagttgtgttttggtgttcgggttttcgttttagggtttggggtatagggttcacaatttagggttcagggttcagggttcgggctttagggtttggggctctgtgtttagagtttgggcgggaggcatgaaatcgttgttcgacgacgaaaacatgtgtcgcgggaggccaaaaatagccttaccggcctccggggccaaatgcgtgtacaatggttcggacactagtgtactatggtttggacactaaattggttgttcggccatgaaaacgtgtgttgtagctcacgcgaggccaaaaacagccttacattactttttagggttgtgttttagggtttgaagtttggggtttggagttttgtgttttggtggtcgggtctttgatttagggttcgaggtatagggttcacaaattagggtttggggttcaatgttcaggccttagcgtttggggctcgaggtttagagcttaggcttttgggattcgagatttcgggtttcgatttgagggttagcgtttggggtttaatgtttagggtttggagtttgggatttgtgattttgtgttttgggggtcgggttttagtctaagggttcgcggttacgggttcatggtttagggtttggggctcggggtttaggatttaagtgttttgtgtgatgtagctcaatagatgctaaaaacaacctttcccatgccagtagccaaaacatgtttggcgggcgggaggcatgaaattgttgttcgacgaagaaaacatgtgtcgcgggacgccaaaaatagccttacaggcctccggggacaaaaatgtgtactatggttttaacactagtgtactatggttggacactaaattggttgttcggccatgaaaacatgtgttgtagctcacgcgaggccaaaaacagccttacctgtcttagtggccaaaacaagggtggcgaacgggtggcatcaaattgttgttcaacgacaaaaacatgtgtcgcgggaggc

SEQ ID NO: 41994 - DNA, 550 bp, Zea Mays
ctctccccttttggttctggtgagagttctagactaactggtctctagatcacctctggctaccttctgaatcgagagctgaaaatcccttttgaatcctccttctacgttgctctatccctcccttttatagcccaagtgaggagagagatacatgtctgttgggcagtgggacctgcctagcagagcctcaactactcctatcttatctcagacgtggggtcgttcatggtgcacgtcttggtcgggccacaatgttgagcccaccatgcttcaggggttgatacgccctgtcgtagtggcaagtactaaatcctgcgccatctagtacgacgtagttgataaacgttgtagcagcctgtactttataatgcttgttggtacgtctagacgtggcaacagggatggtggcacgcaccgtatagtagcctcagccacgcttgctgcccattgttatgaatccaaggacggtgacacattacacagtggcctcgggtacacctgtagcccccggtgtggccacaatgcatttcattgaccacaatgttat

SEQ ID NO: 41995 - DNA, 483 bp, Zea Mays
atcatgcacatcataatgatacctttgctatgttggagtagaggatagtcaagattctttcgatttagctttccaatagcaatgtgaagtccaattgaatagcttggtgaagaccaattatcaataagaaatccattcttcaccagtatgaagttgagaacccatttaagatcaagtgcacaatttgaatgttgtagttcacatgcatttgtcccttcaataccacttgtatatgagagaattatgaattttcacgaaatataggaatatcacttgtaaggatgataccacttgttgagatattggtccagaaaattcctttgtctatgcaagactgctactcacggatggtccgcagtgggagctcagacggtccgtggcctgatctcttagactgtccgtggcctaggatcagacggtccgagacctggaactttgcactccattgagctgactgttaaattctcaaaagttgaattttaa

SEQ ID NO: 41996 - DNA, 468 bp, Zea Mays
cctcctcctcctctctctctcgctctctctcctcttgctctcgctccctctcgctcccccagtccgcctccctggcccatcagatccaattccttccccgacccccatcccggatccgccgcaattcctccgtgcgtcgagctcgattgctccccgcccgtggaatttgctcctttctcccgcaagaatcccacctcggccggcgacttggggggacctgccaaggtttgggcgcgcgctcctgcttggcgtagcgggccatgggcgtgctgttgccagctaggctgttcgtgcgccggatgctcagggttgtcaggctcaacccgttgcagcgcagcgccaagagtggatgaggtgaaaatttttactccgctggtcttagctcgcttcttgtgaaaaagacgcagcttttttccgcctttttttttctttcctttcttctttgagccgtccaaggttccgttttct

SEQ ID NO: 41997 - DNA, 553 bp, Zea Mays
cgcggagctccaaactgagacgacataggagtagacggtgcaggagtaggcgcggccaaatactgaggaaaaccctgcatcggcacgaactgagaagtcctaggcacataaagctactgcggaggaagaggaactgaaaactgctgcttagcacttgacatcatgttgatagtgccctaagaagaggaggaagtcaccggctcccatctgagcttcccattaggattcctcctacacaccacatccttgtggtcctgactgcagatagaacacctgccactccagtggcactctgcacggcgatgcgcatcaccacagcggaaacacaccagccctagcccgggcttaggaacagcccgaaacctctgagtacttcctcctgaagtacccgagtcataggatttgccacggaaaggatagtggcactgatgctgagacttgcccctcttgtgggctagacctcccgtgttgcccctcctcgcgtcctggccacgaggctgatcaacacccgaagacttctgcgactccatggtatactggtgttgcatctcca

SEQ ID NO: 41998 - DNA, 333 bp, Zea Mays
actaaagcggtctatgtcttgtaccgagcatcttagtgtgtttccctacaccacaattttatcaattttcgattacatacaagtacagttttgtgcatttcaaattgagtaacaagtttgaactagtaccactcggttaaagatgggtgctgcctccacttgggtccccactctagtggactagtcgtacaccatgtcttcgtcttcgaaagaatcaatgtcgacatagtcatcctgtgtccactgttggcatagcttacagcgagtcacaccttggtaccaaacttggtaccgcatgtagtcgttgttgttgtgtgactcgttgttttcaac

SEQ ID NO: 41999 - DNA, 437 bp, Zea Mays
attccctcgccttctttccttttcccagtgtgtatgacgcgcgagccccgcctcgtcaactccatcttctccccctgctttcccgataacaaactcggtgtccgtaacaaacgcatccccttggccgatgtggccacctctcgggtatatatgggtgggcagggacaccccttcgatccctcaaacccagtgcctgcatcgtcgccaaaaccaagtccttatcgtgcaccacgtggtgacatcgaacagagagaatggcacagggagcatgctgtcgtagccctcgcctgcgcgaccgataggaggtcgtgtaaggaatcaggatgtatcacgtgcatgcaaggattgtgcccgggggagcatctgggcgctggagccttcggtggcgccaaattgattcctcggtgcgactcagccacggcggagccgcaactcac

SEQ ID NO: 42000 - DNA, 674 bp, Zea Mays
ccctcgtccctccctccgtctatgtctgtttgcttgcttgtagttgtagctgtgcagaacacatcttgtagctgtgcagaactcatctggatttggtgcagtacctgtgtagctgcctgcctggtcgttgttcgcttgatggtcgctgttcgcttgctattgttgttcgcttgctggtggctcagtggttgtggttgtgctatgcctattcacttgctgtacgtcggtgtcagtgtgattcactgatgggtgatggttcactgtcgtgtcctcctcaccgtcgcttgtttggacatctatattgataactcatcatcctcccgagtcctgacctcctcactcaccctcctaattcctattcccatctggctgtctcccagtcccagactcctcacaagctagcacagtagcacctagaatccagcctctttgttgtcatctctggtgctctggctttcaaaggtatgtctttagtgtttactcatctctagttaatgtagcctatttgtagaatttagtttaatttcagttttggtacattgcagtcgttgaggaaccggaggcgacagttcacaggtctagctggtttagctcctcgggctcgtggtcgaagtcggggtcatggaccttgacgcggctgtagaggaggaggagcgccggcttgaggatcacaa

SEQ ID NO: 42001 - DNA, 432 bp, Zea Mays
ggttattaagtccattgttaaccctgcaacatcgtcgccgtatcctttatggacgtacaaaagacagagggtaagacatgacgaaggcagatatggcagtaagtagaagacatgttcagcgtcatcgtcgtgacctaggtcggaggcaccaacaccacctccacaagaagtagatcagccaccaatcgcagaagattacgaactcactgaaggaggcacaaacctctagcaatacgatagtgctcctgtagcaccaggggaggaagctcacacggaactggctaccacaggtgaacctattgagtttgctgacaggagtaggcattgatgtccggcaacatgaaagtgtacatgcaccagcagaggagggacctcccacggatcagggtatcacaaatgtttttgttgagttgaccgacccagccacgaatc

SEQ ID NO: 42002 - DNA, 791 bp, Zea Mays
ccttgcagctggcctgctcggacccctcctgtgcccctgtcggcccttcctgcaactcctgcaacatctccagctcctcaaccttggcctccttgggctggatcttgggatcagcgagctctcgccatcaccttcagtacaatgacacttcagccaccagccaccgttactgattggattccggaccaaccataccacagctcatgctggtaacatctctctctttcgacctcctggcctcgctactccttctatcattgttggaaatggtgccactctccctgtcacctcagtaggcgacacggttttgccaggacctttatatcttaaaaatattctccacactccccacattattcaaaaccttctctttgttcgtcgttttactactgataattgttgctctatggaatttgatccttttggtgtttctgtgaaggatctccgctccaatagcgtgattattaggtccaatagtgttggtccgcactacaccatgcgcctgtgcagttcatccccttcgacaacttgtgccctagctgcaatttcttctcccacatggcaccgtcgcctcggccaccccggcaccgatgttttgtcccaacttgatagttccttagccattcgatgttctcgtagttcccttgagttgtgtcatgcttgtcaattaggtcgtcacactagattacctttttctagctcatctacctgtactaagcaaccctttgatatcattcattgtgatctatggacatcttcaattgcaagtgtgtcgggttataaatactatc

SEQ ID NO: 42003 - DNA, 367 bp, Zea Mays
cgcggaggaggcctcgattactagcgtcttttaagactttagatgtcttgatgaggagcgcaatcccatccattttggttgaggccccaatcacagacactataataactacgggtaggattgacatggaagccaacaatttctgctcccaaaactctagtcaccacacacccacacctgacaccggtagattctaactcctctacctcaatattaaaataaagtcattttgaaggggtagctagagataggcaaagtatgtcgttttagatgtaagtactccattttggacggctttaccctccaactctttgtgccgaacccaacatatcgcaaaaaaaaaattgctgagcaatgaggaaaccaa

SEQ ID NO: 42004 - DNA, 315 bp, Zea Mays
acccaaattgatattaattcccagaaatttttcccagtagccaaggacgagtctgaatttccatcgttacttcaggaccaagcttatctaaataggtgtttaggtaatattctcatagaaaatagatgcacatgagcttaagacaagaatctcgagtacgtgttctcatcgtttaatatgtgactcttcagtggtcatgttttctttctaagcttcgccttgttttggttggtgcaagctgatatccctatttcagtttgcgtctccattaggatcacattgttgctttcttagtccaacctaggaaaggagtgc

SEQ ID NO: 42005 - DNA, 311 bp, Zea Mays
ctcgagcaccagtagccacagcgagcgtagcagcatgcgagcgtcagcgcagggacaagtgacgatggagcagggcctgtgcggtgccgaagcgaagcaaagaacgtgtgtgaggggagataaatgccacacccggaagatgcttccagggattgctcatctcagaataaagaaaggagcagcaacgtggatggaccagagaaaatgtacgtggaatagatgaagatgacatgcatagggaagagatgagcttcctgcgttggcttgatatggatcagggagaaggatacgtggctgagataagaacgatg

SEQ ID NO: 42006 - DNA, 386 bp, Zea Mays
gtcggagtcgtccggtgtacgtctccaagaggccggagctcgtcggtggcggtgttccggctagtcggcgatggtaaagttcgattccacccgtcggcgagcttcacagaaggtctgtgaggctattctctgaaggaattggactggggttggctgtggaagtgggtccacgctcaccaacagaatccgagctccggtgaagggtattttgtggctccggtgaggtagagctccggcttgggcctctgagagctctaggggactcagatggactgggtggtggctctggtcaaggcgaaatgcaatcgggggcggtggttcaccgtggtcggccttgggtgacaatggcgggtgggggtgctcttggttgcagtgggattccggca

SEQ ID NO: 42007 - DNA, 413 bp, Zea Mays
aactatcatataccagctggactgatgaagattatgaagaaagagtttttatcgctgaagcagggaagcatgtcagtcagcgagtaccgcgacaagttcatccagctatccagatatgcacctgatgatgttgctgaagatgagaggaaataggagcattttattggactcaatggacccctgtagtatgctcttgtggctcatacatttctatcattctagaggctacttgacaaggccctagctattgaacacaagcatgttcagctgggagatttgaagaggaaagctatatcccaaggacaaggaagcagcagtgtccgtccacgctacagttcaccctagggtacaccagttcgcactggcggaggccagcacccagctcagcattcaccttaggggactccaccgac

SEQ ID NO: 42008 - DNA, 345 bp, Zea Mays
gcctagagatatgttgcatatagttctctatatctgttgcctttgatgctaactcttcgaaggtgattggacgcaccccttgcagatatatggccatgtcagggctcaagttgttcatgcacattcgtactgcttctggtttagtaatgggctgaggacaatgaaggcttaagttcctccatctattgataaaaatcagctgccctttcattgtccctttgtagagtctgggtcaacacagtgatccctattgtcctttgcgtgctatagaaacgctcaaggaaagcatcttgcatttgttcccatgttctaatggagcccggtgccaacttactataccatgtg

SEQ ID NO: 42009 - DNA, 421 bp, Zea Mays
ggggaggcaagagggtgtgaaatggtgctgagtgggtggcgggtgggggctatttgtaccgccggaccggatagaggctggggagtgtgcggtgcggaggctcgctgatggtggtggtggtgggatgtgggacccgccttggtgcatggatggacggaatggacataacatgtgccatgcatggaggagcaggtggggaatcatgtcatacgtaccagtagtagtatgcatcaaggcgtcaagcatcatgcatggatgatggatgtttctagcgatcgacaaagggatgcctcttcattcttcttttcttattaatggtcgcgctcgtgctcctcgagtactcaacaaaaccttgtgattttgtgtgcctcaatatatagtaggcttgtttggcgagttgttgattgcgctattactcgat

SEQ ID NO: 42010 - DNA, 540 bp, Zea Mays
ggcaagtggcgtactcattgcctgggtgtcaacaatggccaatcgtgcctaaagacctgcaacacaagcattgaatgttcatactgtcaatcgagatgcctccatccgaccctgtagctcggccatcaccaacagcagaagggccgaggaccgacctctcaagacggcacatgagggcagggaggaggaagcaacgaccctcccgcacaagatgacacgatcggattgggggcagcaccaacctacctcacgaccatcatgaggcgaccaacaatgaccggggtgctgacagcaccggccggcaaaaccaacgatgtaggttcaccgccacaagggccagccttcgactccccgtctagcgagctggaagacgaaagggatatgccatatcctctgatgcttgagccgaccgccccacgaggaaagttaatcaccaatacgatggaggggtcggagtcaagtgagtgcttggtcactacccaccttccctgcgatgggcggcgcttggaccgaacttggtgagagcactctggagccaga

SEQ ID NO: 42011 - DNA, 354 bp, Zea Mays
caggaccgcacatccccaattcaacggctagtccgtttcttcttcatccatcgactgcacatggcggcggaacatgtcccgcggcggcgccatggtagtaacaggtacccgagagcacaggtgacccagccaccgggcgaggagcagatgaacgcagcgaggaacatggcgaagacgcgaggagggtatactcaccagtaatgagacccgagcgatccgaccacggcgtgccatggaacgacggcgaagctcctcaacagcgtgaggttcccagccgtccactcgtacggtttagtctacgaaagcattcctcacgatcctaagtcgaccccgagcgatagcgcgacatgcggt

SEQ ID NO: 42012 - DNA, 322 bp, Zea Mays
ggaggggtcagacaaatagtcaggagtgggttccgcgtctgaccaacggactgccccgccattaatgaccaactgcatcgatggcacctagcgtcgagtcgtggcatgtgaaggagtcgatcgtccttccacacatggcatgtacgccctaggacacaaccccacttatgagctaagagccccaggcctacgactcatttatggcctctacttgagtcccccaacgccctatgaaactcacgacacgatgagggacacccagagtcaggctacaaggatcaagagttggcgtggagcagagggagtaatgttgacacccgaa

SEQ ID NO: 42013 - DNA, 504 bp, Zea Mays
ggctcttctaaaatagaagtgttgtcgtggaatctgttaaaatggaaacgaaagtatctctcacttcacttgaataggaaattccctccttcaatagaagactaacctttctcagacgctcttgacgtggcaaacaaacgtcgtttccttccatgtaggctgttctcctcctccgacatgcaggcgtgctccaaaccacctcaagcgcggccagtggcgaagctagccggtcgttgaatcctgggcacttaaagtgtgatgccctagatctcatgtgtggcaccagaggaagggaaggggcagcgacgagcgccgaggctaggaagggacgctatccctccacgatgcacaacgtgaaacaccaatggcagagaaggggcaatggcgctatcctcggtttcgcgtgctcttcgctgtcacgtgtgtgccctgccgctcttcctcctctcgccgaagtcgatgcccaccagagcccgagcacgagcccgggcatgctgagcactg

SEQ ID NO: 42014 - DNA, 480 bp, Zea Mays
ctggactgcgcgcccgggcttgtcgccatcgtgcgatgcctgtacctctgtcgcggtgggccccactcgtcatgcttatctccctcaacaaaccgctcggcatcccgggatttttgagctccacggctcaaccacccgcgcgattcacggttgagctcaacgtactccgaagccgccgccgcctgatgtgttgacgctcccaatggcgtataaaggatcccagaaacctatctctgcctcctgtgtcgccattaaccatcaaccttgcctccatcactggaatttcaagccgccgtgggggaaaacgggcagccgccgtgggtgattcaccgccaccgtcatagcagccctttgcgtgtagtccgggaagccgccgaggatcgtaatacttgtgctgagaacctgcgggcgcggggatcaccggagtgtttggaatttctcaccgaagctccgtcaccaccaccgtgccgcccttcgtcg

SEQ ID NO: 42015 - DNA, 552 bp, Zea Mays
caccagtgtaccatggagtcgcagaagtctttgggtgttgatcagcctcgtggccaggacgcgaggaggggcaacactggaggtccagcccacaagaggggcaagtctcagcatcagcgccaccatccctaccgtggaaaatcttctgacttgggtactttgggaggaagtactcagaggtttcaggctgttcctaagcccgggctggggctggtgtgtttccgttgtggtgatgcacatcaccgtgcagagtgccagtggaatggcaggtgttcaatctatagtcaagaccacaaggatgtggtgtgtaggaggaatcccaatgggaagctcagaagggagccaatgacttcctcctcttctcagggcactgtcaacatgatgtcaagcgctgagcagcaattttcagttccacttcctccgcagcagttttatgtgcctgggacttctcagttcgtgccaatgcagggttttcctcagtatctggctgcgcctactcctgcaccgactactcctatgtcgtctcagtttggagctccgcgtctgcctcac

SEQ ID NO: 42016 - DNA, 598 bp, Zea Mays
tgttaatcatagaaggcaatatctattcgtagaatggcagggctatacttagaaacgtatcatctgtatttttggagctgtgtctccttccttccctgcgtgccatgagccgcatgtaacctgccatgtattcatcctctataaatatgagaggacctgcaccatagagagtaggtagcgccattcatcttaacatggtaacagagccataattttctaccaatatcgaccagctcttcttcctcctcctccaccatccctatccaccatgccgttaccattcgccttagcaagacaaactacatgctctcgcgcgcgcaactcctcccgtatctgaggagtgccaaactcatcagatttatcgatgggtctattccccagcctccccagttcgttgcgtcttccgctgcaggcgccgacctcgtccctaatccggcgtacgaccggtggtatgatcaggaccagcaactccttagcggtcttctctcctccatgaccgaggagatacttcttgatgtggtgactgcctccaccgcaaaagaagcctgggacatcttgaagcgcatgttctcttcggccatgcgcgcccgagtcgttc

SEQ ID NO: 42017 - DNA, 386 bp, Zea Mays
aaggaacagaaattaactgatttgtagtcatccagctgcttgaaagaaggcagtgtcttcaataggtaactctccaaaactgaagggtcaaatggacgaggagacttactatgttgctcctgctcctcaaagttcaatatagcctaataggatagagaagtattatgtaatttccattaaagatatgcatttaaaaaagaggtataaatgtagaagtcataccccaacattaacatctagaatgagctggtgagcattgagtggaggaatatgtttagaccagtcatcgcagacacactcaatgaaacattgcataaacacgttgtcgagacatgcgccatcagcaaaagattgttgtatgtcacaacaattggcgcgatgttcac

SEQ ID NO: 42018 - DNA, 779 bp, Zea Mays
caagataacaattcctcgttacaaaagataagaacacaattacgaattgaggtggtacttgtttgtttgaatcgtatgatgcacaccatccctagaacaaatgggatcgaatcactaaacgatgcacgtaaggtgcaaaccctaaacactgacgcatctatggtggaaaacctagaaacgacgtataggcaacatgggggggttgcagatgacgacgaaatgtggcagaccatacctttgtaggagccaacgacagctgagcggacacctgcgactgcctcatcatgtctgcaggagctgcaaccaagtctgacgtgacatgaatcaacgaggtgggatgcgcctaaggatgaaatggagaaggtagggggaatccggacgcgggcgagatggggaggaacgtcgtggtcaaaagcagagagcgagggggatgggaaatggaggagacggaagggcgggtcaggatgccagagaaatggaggagagcatacctgcgaagacgacgacacagcctcagcggatggtggcatcagagggtggggttgaaaccctaaatggcagcacgagtggtcataggatgccgatgacttctttaagatgaggggactttggtcgcttctttcaaaccgttgtggggtgcgagaactgatccggcgagaactagaagtagaggcctcgagtctgcacatcgcgcccaaaaaacgccaatagtaaaaaagaataatgagtataaaagacgttaggaaattaatgtatgtggatgagtcttataggacgga

SEQ ID NO: 42019 - DNA, 502 bp, Zea Mays
tttaaccgcaccgccgtgactcacgttagccatccgatcatcgccggtgagtctgccacggtattctccacgaatcaactgcgccagtacccttctccctctccggccgccagcgcgtcttcgcgaaattgaacaccaccaccttgcactcctataaattgatggcctggcctattgcaccatactatcacgaagccagagcacccattaccgccttcaattagccaccatagccggtgaatttccttcttcccccaattctgtttccgccgccgtggtagaaccctcaccgtggtcagtgaaccccaggtctgttcatgctccctgctgtcttgtttcaacatccgtggatcctcctgatgctcctcgacccggccaattggactaggaccccatagatcaacgggaacgcgcttgattgcctgtagtacccgctgtcatcgtggacagtgcgtgttagagcgccattagtaaaattggttgaggggaaacccttgttagg

SEQ ID NO: 42020 - DNA, 373 bp, Zea Mays
gttgttaaaaggaggtgggttaaattagatttgcctactccaacccatttcattattcattattaacaatgcctgttaagtccataattagatgcattttccttagtttccaatttcttcatattttatgatgcatgcattcaggaaggaacgtatcctcaccgattagagggatacttctagggcatccctactattctaagactggcctatatgacctacttatttagccacctatttcccctactcttaaggcctttcgtcctaggtctagcgttctactcttgatgatccaacactggtttctaagcaaatttttacttttgaaaagttggcattcatgtcttattgacttctttgtaatggtattcgc

SEQ ID NO: 42021 - DNA, 343 bp, Zea Mays
gtgacccatattcgccatcatctcttgtatgtgttgctctcagagtttggggaactgtggtgcaggaccgtcagcggcggcaatggctttgtcgtaggggcacagcgctgccgccgcatctcggcttgtgttgggggaaaccacatggaccgtccgacctggtgtaagcggtctggattaggagcgcgggcaacgtctcagccgtggggaaagaggaaggctatgagccattgaatggtcgatctgtggctccgattatgtgctggatgctccctccacgtaattaaatcaggaccgttggtctccggatggactgatccagggcgatctcgggtatttaaaa

SEQ ID NO: 42022 - DNA, 290 bp, Zea Mays
ctgagggggagtgttagaatgtaaacatatcacggacgatgggcttactatacaaggttccccatcttcctatatgtacacgattgtggtgtctgagtaatatacaatttacattctctaatacccacaacccgcgacaaaccatcactggtgcagaaccatcctctgacggtctgacccgattagatatttcccaccctgacccaggctacacgtcgcagatatgaaggcgaatccatgcagaggaaactcacagtgcgacacataacatattgttagggcgacgaacg

SEQ ID NO: 42023 - DNA, 313 bp, Zea Mays
tcatttttcaaagctttctaaagggtgggcttcggcttccgctacataaaatggtggtgggcgctgaagagattcatcatatatttgcaccagcttagccctaaatgccatcatgaggcttggggtctttatttgggctatgcgaagccaaggcatagagcctaatggagagtgcttataccacatccatgaactgtactatgagacggaggcagttgtattggaccaccttcacaacaacttcagatgctataactttgcttacagaaagaaagcatagttctcggctcttgcataccgtagcaagtggtcg

SEQ ID NO: 42024 - DNA, 569 bp, Zea Mays
cggacgggaggtggatttggtctcggacgtgagcttatcggccgcactcgattgcctagcgacgtggtcgagtagccgatgtcatcgggggacatcggcgatctcagtcacgccacgccataggtcgtcttaccacgtcgtcgcgagtcatggagagtaactagtgattgccataggactttgccccagtgcgtgccacaatgaactcgccttagtagcaatatctcgtcactgttgtgatccaattcccgttcaaattcggagcaaccgtggctggcttctataaattgagcgtttcccttgctccgcccccttgtcacgaacccaacgcaaccccaaccacgtcatgccatccaccatagcccgaggaattgagatttcccccaaatcggtcacccgtgtcgccgcgaggcatctcgccgtggccagagccctctaaggtaaccatggtcggacctgtgagtgttttgagttctcttacatgtcgtgatgctcatcgacccgcccgattgaactctaccatagccggaaccccggaacgtcgtgttgccaccgtggaacgccgccgc

SEQ ID NO: 42025 - DNA, 316 bp, Zea Mays
tgttgtttcacttgtaatttgactatcattgttatctcatatatatatgaagtgattttagtttgtcaaataggatattgtatatgggctaatggtacaaaggatctttaaaattctctactatattaaagtaccagttttaacaatttataaaaaaacccttacacttctttaaattctaacccgcggtacgttgcccccttctcgcgctcccaaacaatcgtccagcctcctccccttccattctcctccccacgccgccatccgctccgctccaaccacgcttatagcttatatccctcaccggttgttattc

SEQ ID NO: 42026 - DNA, 548 bp, Zea Mays
tagccttcgtctgataatgaagttcatgtactcggcagaatgcatcggcgagcggctctaccccttgacttcggagagcccagatgtacacgttgagcctaacaatggcgttaggggtcagttgatgaaggtaaatcccaaatttttccaagacttctgcaatcattccgtgcagaggaaatctcaaccctgctttgaagaagctcttaaaaactacaacttcatcatcttctagtttcgggatactttcttccccaccaaagcgaaccaaccccttctcggcttctctgaagtagcctagcttcgtcatcatagtcatatcagcttcagacacagttgatttcccaaaatccagatggctgggcttcgatggcataatgatgttataaccaatctctccttcattagcatcaccctcttcaatatctgcctgctcggtttcagcagcgggtgattcttcgtcagcagcgccttcagtcacaaccaatcccgaccgcctcataacttcggagatcggagcagttttagcagcttcggcttcctctccg

SEQ ID NO: 42027 - DNA, 610 bp, Zea Mays
gtccaggcgaaccttacgggagggttccacattggtgacgaatgcggtgacagtccgtccacagcgcctcgcggcaccgcgacggtgagcaggagagctggacgaacgagggggcagaatcgagcatggatgggttctacacgtggagcgggttgaggcgaactcggaggtggtttgcttaccggtgaaaaatggctggcgcctgttgactatggtgtgggtacacccggcgacggacgaagcggacctcggtgagcaatccgccatggacccaagcatccatgcccccaaaatccaccagtaagcacgaaccgtgacttcacaagcttgcaacctgacggtggccgacactctctctacgacggagctctcctgggcggcgtgaaaacctcagatcctggtggctgggttgaggagcggatgaggcggtcaagtacccacgatttatacacccagatgcgctacgatcggggaaattgggtaaaacgacagcgcgatatcagagccaaggcggaatcggaaatccccaaccaaatcgcacgcgcacgcggcttccgcggatcttgttgctagcagtgagtccgatttgaggaggaagacggctgacgat

SEQ ID NO: 42028 - DNA, 435 bp, Zea Mays
gcgagtataaaattctagaggatgggggttcattctgtaaattcctggacttggttgtgacgttttctgtataggctaggatggcgagtttatttctataaagttcaggggttcttacgtaaagctgcatccgcgaaggggtatgggctatttttggccgtccagatcagatctcacggccagggttaaatctcacataagcctaaccagtacgtaactgggatcattggatcccgatccaatggttcgatagaacccgaacccccatgcgctcccaaccctctgatttaagatctacggtcaccactgccccgcccaaaatggtacgccagatttaatcaccaccgcacatccagttttcgaccgcatccatgtgtcttctcatcccgaccgaactccggcgaccaacagagtggagggcagcccacaagtcag

SEQ ID NO: 42029 - DNA, 357 bp, Zea Mays
aaacagctggggagctatactatctacgcatgctcttgatgtttgttttaggtgcgacgagcttcgttgatataaggaccttccaaaatactgtgtacgaaacattcagagaggcgtgcgaagcacgtggtttgctcgaaggtgacaacgagtggaaccttctatttgatgaggcaatagtctctgcctcggcgtttcagcttcgacaaatgttcgttaccattgtcgttcattgtcctgtttgcaatgtccgtgctttgtttgacaaatattggatctacttcaccgatgacatacactgtggtcttagagaagcccttagcaacctgcactacacagctccacatgaacaactcc

SEQ ID NO: 42030 - DNA, 398 bp, Zea Mays
ggcacgccgcctgccagcggagtggataggacacattaaatgctgaggggcacatcgtctgtcagcgggatagacaggcgacgcgtcttctccgcaataaatgcagaggcagcacggccagaggccttacgtcaagctccgcccgctggcttacatcacgggcgatagtccacgtggcagcatcgggcctccgcctgagcggggagtggaagcgcactggataaagcctgggcacgtgtcagtaccggaccctcgcatgtccttgacctaggccagggtattccttgtcccgggaccttgctgtgggtgtcctggacctcactcaaaggggtccgaacctcatccaaggggtccagcttgctcacttgggagtctcggaccgtactcggaggttcggg

SEQ ID NO: 42031 - DNA, 462 bp, Zea Mays
acagcaggtcagcagttcctggcggtactcctgtaagttaaggagcctccaacaagaacgaagaagacttggaaaggaagaaggtgtttgcgtattctgttcttgcttccttgtttctcattaggcaacgccttaatacagtaagccacatgggccatgaacccactcacgcctaagcccactccggcccaactatcctgacattatgactccttggcctgctaccgcgacgcagcgcctcatatcctgtgttcgctctgacaacagaatgcttcatgttgacatcggtgctcctgacattccccctgctaaaggagctggttgtccccaaacagcagcttccgaaaattgttgcttcaagtcgatggcatcctcccaggtggccagcacgtcaggcatgaatgaccatcgcaccaaaacctgctcacatgatttggttcctcgcaagaccgtgcgtcgctg

SEQ ID NO: 42032 - DNA, 308 bp, Zea Mays
aagatattttattatattccaagtttgaactacatagatggatatgggtgacgcgctaagtaattgttttcataactctggtgatgcggaatatcttcctggagcacgcctagctcctgtagatgggcttcagtataccgaatgtacattaaatttgttccgaatttgatttgtatatttgacgtaatttcacgagcgaagttacgatttcaatgtcaaacatgacacaacattaaaccaatattgttctaaatggaaaacgtacgggctaaatgatttgatgttccatttattcattgatatttccc

SEQ ID NO: 42033 - DNA, 576 bp, Zea Mays
tgctgagacctttatgtatgcatttaaattaggttaaacatttaaagcactttttgaattacacttgaagtttgaatgggatttgaaattggaggtttaaatgaaataaaaagaaatagaaaagaaaacataaaaagaaagaaaaggttctccctcgactcatgggtcgaatccttgctcctggcccagcactactcacgcgccagccggccaaccctcacgcaatctcactgacaccgtggaccccctcgtcagtcgctagctcgtcaccgttctccaggccacaacagaaccgcctgtcgccgtggattacgcgctatcccggtcaactctcaccacgaacttcggttatagctataaagccatgtcccgcaccctgtcctgcatcggtccacgtgtgccgttttaaaccaccttgccgtgaaccatagccgccgcaagtgatgacaggccgggcagccacaatccaatgaacttccaccgcgccgccagcttgttgggttggtgtagggtggtcctggggcacgccacacgtttcttgggcacctctgggcaggaagaatctaggggtgaccc

SEQ ID NO: 42034 - DNA, 536 bp, Zea Mays
ctgcagacggattggcatgttctagcacaaaaatccgagatctaggcgttgcaagttgctctgtcaggcgctctgttgaacgtttccgatggtacaatgacctgatcagaacgccagcgcaaagaagctcaccgccagcgaccgtgcgcctggattcgcgctcgctgcgatgattcgtgctcggctcagttagagaggggtaaggaaatatcgcgtcatggatgaactctggccactattttactccggtcgccgtacccgagcatgtcacggccgctttggatacgttcgccggagttagccacctcgcggccttgcaccacgtgcctcggcatttaccacgtcgcagtcgctcgcgttatgcatgtccggtgattgccggtgaacccgccacggtgaaagccactaatcgcttgtgccagtgcaattcttctctccggccgccaccgcgccaactccaattcacaagccaccgcccccaaaccctataaattgagcacaccgtcggctccgttaggtactcaagcatccaatcc

SEQ ID NO: 42035 - DNA, 292 bp, Zea Mays
agagaacagtgaagtcagtgtccctatcaggagaagaagtgttagtggagttggtcttgtcaggaccaaggaaagggagttgtcaccaagtcaccgctcatattgaggagattaaaccatcagaggctatcagtgtagtatcagatttcccagatgtgtttcccgaggagttaccaggtatgccacctgaaaggaaggttgaatttaccatagagcatattccaggcaccgcccctatttccaagagagcctatcgagtgtccggactagagttggtggaactcaagaagca

SEQ ID NO: 42036 - DNA, 1051 bp, Zea Mays
tggtggtgtcctaaatgttgatgcttgtggcagagacggtggattagaaagagaatgaggagcagcatgggaagattgtggaggtgatgatggatgtaaaggtactaaagtttgaggaggcggagatggttggggatgagatgatgatggcgttggtggatgaaccaatttgacatcccttcgaggccaaaggatgaaatttttgatggcttgtccaagtgtctcgattccttcgggcccagggatgtctagcatgtcgtcctcagatccttggatgaccattgccacttctaccctgcaataatcatctggtatgtcgcttccatgaaacttatgtcctgggatcgcaatgctcgttcctactttcttcgtgcgattattgttaataccttatcttataactaatgtgcacgtcactggccttgttatgtcatcaactggataacggaccttatttcctgttgacgcgacagagccttgggatggttgtacaatcggtgcaagctggtggttgagctactggaattatttgcagctatggagtggtcatcagttgaacagacatcgcacttgccaactgctgcatcaattctggtggaggatttgatagcatttgagacatcaagtctttgaactctttctttgcctcctgcttaaaataatccgacaacacttctttgtatcgatcacgtttcttgtacaaaccttcccactgtggtccgaatccttccttagacgagattcctcgtacacggcctggatgctcagggttaccgagaccagccattaggatgtctctctccctttgtggcttaaatgatccttggctctgcttagctgtcattacatatatgtttttcgcaacttctttgacatttggatcatcaaaagatacaccagcctcagtttcccagggttttctagcacgaatctaatttgccgtcctttcaccaagttgctcggaaagcatcggcaaccctgcggccttcttctcggcgtcttcttgtctccatttagaaacttgacgcttgtaaccacctgtgcctaagtg

SEQ ID NO: 42037 - DNA, 578 bp, Zea Mays
caatcggcttaagtcggcgatgacttaagacggtgcaacatgctcacgcttacttgactcacggtgaccactataccctactaacggagcaatcggcttaagtcggcaacgacttaagacagtgcaacatgctcgcgcttacctgacttagggtgaccactataccatactaacggagcaatcggcttaagtcggcaatgacttaagacggtgcaacatgcttgcgcttacctgacttagggtgaccactataccccactaacggagcaatcagcttaaatcggcgatgacttaagacggtgcaacatgctcgcgcttacctgacttagggtgaccactataccctactaatggagcaatcgacttaagtaggcaacggcttaagacggtgcaacatgctcgcgcttactcgacttagggtgaccactatgccctactaacggagcagtaaccttaggtcggcaacagcctaagacgatgctacaggtccacgctaactcggcttgggggaaccactataccctgctagcagggcaatcgactcaaaagtcagcacgacacatctacctatcctaagg

SEQ ID NO: 42038 - DNA, 686 bp, Zea Mays
ttgattcgaagacctccgccgggctgctgcaagggtgaccgatccatttgcggatggagtcggcgtacagggcagcatcaattcgtcatcgacgcgcgtggatttcacggcaccgtgggcgcagtcctcttcaccctcacgactggtgagttccctgctccatgtcctgtagattctggtggtcacataacgctccgtggggtagagattagttcactagggcacgtaagccagaagtcaagcaatggcgccaccgcggttgatagccggtggggtagatggtgcgccgtggctgagttcgatgcgaggaagaagaagcactgtggccgtaggatgcaaaataaacggtgtagattagatcaatgcgtaaccctttgctgaaacggatccttgtcgttagatcataaacggacgggcgcgtagtgatcgtaacatttaaaatccccgttgttggtccccaatcggatggttctgcggcgctctgggtttgatccgtgcagatctaatgcatacctcccgcgcgaaatctgacggccagaaaccgtccataccccttcgcgtggcatttatctaaagagaccctaggttattaacaattcaacctgcagtccaccctggactagctctgggtctggggatttattgcaccagggcccctggactttctagtaatggtgcgctcggtc

SEQ ID NO: 42039 - DNA, 397 bp, Zea Mays
ggtgaaagtgatcgggtgttcggaccatcggtatggggcgggaggaccggtggccgccaccagtatctgacggttgttgagcttttattgcctcttgctctcttgagacccgtgtccgccgaagatgacgttgacttctccgtcgatgcgggggaatgctccgcctcctcccccttcctgctactgaggttgttgtggttctccgggtcctcctcgtggtgggggaggtggcagaggttggaagggtcggtcgttcccgacggagtgcttgaagtctctgcagttccaaagggtgtggcacatgtccttgtggtacggatattgggcatcaaggatgtcgtccaatgttcgttcgcctccatagggtgcccctcgggcacgagagacaggtggtccg

SEQ ID NO: 42040 - DNA, 884 bp, Zea Mays
gtcgaccaccagccaagctccaacctcgacacttacgaggacggcccaagtcgccgcataatcgaagaagtctgacgcccatcatcattcgggcagttggcagggcgcctgcaccattcatcgaaaaggtagcatgagagtgaactcttccttcgtaataggatagtgtttacctgtgatccagccggtgaggtccgccctcataaacccggtctctagaatccatcgcacagttcttttgtactcggtgaggtccaccctcataaacccaatctctggcgtccatcgcctaactcttacaaattcatttatgaaggaagaatttgctctcaattcaatcattttcctgctttaatttacatatattgtttcctctagccctcacgtggttcctaacttctgttgtgatcatgtaactagcttgtcgcttagtttggggccccatttgatgttgaacgaggatcgaatagctagggacctccaaccaggggaaaggaccacgttctcaggggtggtccggagctaggtagccacttagcctggttccgtaccataagcctacaccctccaccaccctagaattgttgtcctaatacctcggactgggtccctaaaggtctggaccttgaccaaacttaagggttggttcctaaagctctgctcgacaagctccagctacatgattcgaaaggttgagcacaacaaagtaggagccctgagggtatagtactaagccatgttcaggattgatttctggcttgatcacggcttcagaagtgcatcaccgcagggggtacaccaataacaagcaaggcgattaaccaccccatcacgccatctgtgcatgacttccactccaatggctcgcacttcagcattcaccg

SEQ ID NO: 42041 - DNA, 330 bp, Zea Mays
ggcgaacccttgccatccgatgtatttttcacatagtcggcacaccagccgtaagaaaccccgagggtctacgccgacgggcaccggatagtaaatctgataatggcccaagactggagggcaccaatcaccctttatctccaaggacactaccatccctccgagcaaagcaaagccaaaaggttaaaacacggaagcagagacttcgctatagccgacgaacatctctacaagaaggggataagtcaaccaatgttgaaatgcataaataaagtcgaaggcatagagctcctctgcgaagtccaaagtgatatatgaggatcacattcg

SEQ ID NO: 42042 - DNA, 369 bp, Zea Mays
tcctccgcctcctatgcctccacgctcacatgatcacgaggctgggagttctagtgctgcccctgctgcccctccggctattgaccctgctattgcttcgattctccagtctctcactcagcagcaggctcacctggcagccgagcagacccggttgtccgagaggatgctcacgatgtttcagaccatacaggacaggcaggattcacttcagcagcagtttctccaggatcgggctgagagtagggcattcatggctcttatgctacaacattctggtgtctcagttcccccagttcagtctgctccacctcctccgcttcaggctccagttgtgccagcgattcagaccggaccccttattccttc

SEQ ID NO: 42043 - DNA, 384 bp, Zea Mays
gggagtttggtttagttgtggtgagctctttcgcaatccatgttaattaagttgtatggtgggagggaatagacgtagtgattgggatggttatcttgtttatgtatatgtggagcgtgggctgaaacacggagataacaaggaacgtttgaataggccaatatgtattgttgtgaagccacgttttcttgtattggcgtgattgcgtaagtatgaaatagatacgtcatgtgaagtctaggttgagatgcaatttgtctaagttattcgatagatatatatgtatagtataattaaaaaaaagagagttcctatatgggatgatataatgtatagaatgtgcttggatgaatatgtgggcaggcctaacatgcttaaacagat

SEQ ID NO: 42044 - DNA, 320 bp, Zea Mays
gtacgaatacggcaaacatgccacattaccatacaaattacaattacatacacacgacgagggcatcacatattacattggctcaaccttcaggatgatacccatctccctgtaattaaacaacattattctcaattcctcaccctcaaaaggcttctgaagatccccctcgcctatgctcgccccaatcgacgaggacaacaattctcgtttaccaacccgatctactcggagacggccacgctccatccccatacgacggcgcctgccacttcgcgaaaattcacccacactatgttttcccaccacccttcgccgcc

SEQ ID NO: 42045 - DNA, 668 bp, Zea Mays
agggcaacgaaaggctatcttagatacatcctctccggccataaaaatctggttataccctgcattaccatccaaaaaactaataattttattccccgaagcctgattaacaagttcatccgctataggcatcggatattcatctttcggggtggctctgttcaaatctctaaaatccacacaaatcctgatcttccccgtgttcttcttctcaattggcactatattggagacccactccgcatacctgcatggccttatgaaatttgctttcaacagcctatcaacttcttccttaactctgtcatggatgtcgtggttaaatcgtctaggtggctgcttgtgtggcctaaacccatgcttaattggtagcctatgctcaaccaactccctactcagccctggcatctcagtataatcccatgcaaaacagtctctaaattctctaagtaaatcacataccttttgcctctgaccggctattaatttagcacttacaaatgttggtcttggcacctttccgtctccaatgtccacttcctctagttcatcaacagatgagaacccctgtcctaactttccaagatcatcaaaatcatccaccacctctcccatatcgtttttgtttaaacgatattcatctgtcctctcctgtaaccattttaaac

SEQ ID NO: 42046 - DNA, 384 bp, Zea Mays
gcagaggagagttgaaggacttgtgcaggagcacctagaccgcgcattcttaccactgaataaatgtggtggcaacacaaaaaatggctctgacatgactgagaatgcgaacctggatgagcagcatgattcccttcttgatcggtcagtcatggagaagatacttcagaggaagagcattcggatgcggaattttcagagaagttggcaggtatgacacacttcatatggtttgtaattctgtacatattagctaaagaagatgcgtgatttacaaaagccttctgcagctctcataatcagatatgaaaatgggtaatttcattgtacttctaacacaggaatcacccgaaggtgctaagatgctagaattccggagatccc

SEQ ID NO: 42047 - DNA, 548 bp, Zea Mays
tgctaatcagcctaatctgctgcctggtgaagtactgaagtggagtgctggtggctgctggtttctgcagttctgctaatcagcctaatcagtgagctgggcggtttctggctttctgctggtggccggtttctgctggagtgctgctgtgctggtggctggtggcctggtgcaggcgtgcagccgtgcaagtgcaatggtgctgggcgactgggcgtgttgcgtgtatctgtttgtgcatcttatattcttatctggtgtagtgtgttatgtgtatgtgtgatgccgtgatctactgaactactgagctgggcgtcagggcgtgtgcatctgtttcactgtttgtggctttgtgtcgtccgtgtctgtctgtactctggagtagtggagtgtatgcatgtgtgctgtactgtcatgtgctactgagcatgtatgttctgtttgctgtttttaaaattcggggaacacttgaatcttgagaacttgattgttttgtttgtgcgtctgctctggtggctgtgtttaaaatttaatttggttgtttcggg

SEQ ID NO: 42048 - DNA, 397 bp, Zea Mays
tgcagtttcatatagtatacaaaaagggggtggaaatgttgtggcagatgctctgtccaaagtgagttatctcatggccttatcccaagtgtctgaggtacaacctctttgggttcaggaggttttaaattcatatgaaactgatatggaggctcaagagttgaagactcagcttttgattcaaagtcctaatgagcagggctacagtttgcatcagggaattataaggaggaatggggtgatttggattggagacaactctgctctaaggactaagttgatcacagctttacatgacagtgctattggagggcattcaggagtgcatgctacttatcacagggtgaaaaaaatgttttggtggaagggacttaagaatgatgttactcagtttgtg

SEQ ID NO: 42049 - DNA, 397 bp, Zea Mays
tgctagaggatgatcatcttcgaaccttgtggaacggaatctaaaaccattgacatcataccaaccataacatctgccagttactgctcctagggataattgtcgaaggtccgggtgtatattgtcatttttacctacataatctcgaaaccaacacaagaatataagtcccccatcttttccctctcgacgaatctggtcacgttcacagccagagatgcaattttgagaatcaaattccctgttagtacaaggaaacaaaccttttagtatcacaacaaaaattctagcggcaatgactaaaataaagtttacacttacaggagaaactgactcatctcttccatgttgttatacatgtagagtaaagcagtcttccattcatcgttggtgaaac

SEQ ID NO: 42050 - DNA, 550 bp, Zea Mays
cttgagagagatggtggaaggaagagcacacgtgtatgtcaacttgtggaggaagttgctctccgtggtagtgttctaattctgtttttcttgcattttccgttttggttcacagactcccctttaacaatagcatgtaaatctcacttacaaactgggcccacatgatatccacaccacttagtactatattgtagagatgctaaggtaaactatgtatcttccccattgtgccatcactgttgctgatgtggcatgcctttccccgcactagacaaaactgtagtgttctgattctgtttttcttgcatgttccgttttggttcacaggatccctttttacaatagcgtgcaaatctcacatacaaactgggcccacatagtacccataccacttagtactatactatagagatattaaggtaaattatgtatcttccccattgtgccatcactattactgatctagcacgcctttccccgcactggacacgacacatagttatgcttatatgcattaagcaacacaaacaatttggtaattctaggt

SEQ ID NO: 42051 - DNA, 388 bp, Zea Mays
taaagccttaccacgtcgcagtgagtcaccataaaccgctctatagccctggctcgtcgtcggtgagtctgccacggtgaaagccactaatcgtgtgcaccagtacccctcctcctctccggccgccgcgcgtctccgttaaattcactagccaccgctcaagcatgctataaattgagcggagcagcggctccgctaggtaaatacgcatccagtgcactaacacctgcctccaattgttcactagagccgcccaatttcccaattcccccaaattagccaaaccaccaccgcgtgaacaccttgccgtggctggctcgtctcgggtctgttcatgccctctattcacttgtttcagtgccctgatatgctcctggtactcgctgac

SEQ ID NO: 42052 - DNA, 536 bp, Zea Mays
gaggacaacccgaggtgtttccagtgatctaacatgatctagttcaattggttgggtcgataagcatccatagcacacaagggtgctagaacgaggacaaggagggtatgaatggacatgaaaacggcggtccacgacatggtagctcacggtggcgtggagaactgaattgtggtggctaatcggaggcaagggcaggtgctctggcttcgtgacaacctaacagagctcactggggcattgatttatagtgtccattagcggtggcatccaatttgaaggaagtgtgctggcggccgaagagaggggaaatgtactgacgcgggtgatcgtggatggcaccgtggcaaggcctccggcgatggacgggcttgctacaagggttcactgcgacgtgttaaacctcccaggcacgtggcacacgatcggtaagcggccaacgccggtgaagatcattccggccggccgcagaccaagtgggtacggtgaacccaacagtgaccgagtccaagccaatctgggcactaagatctttt

SEQ ID NO: 42053 - DNA, 603 bp, Zea Mays
gctcacaactaaaacatgcagggagacaatgtcggagtgggctaggaagacattgacatcggggaggaccaaggagaaggcgaggatctggatgacagggaggtgacgttgacaccaagatctaccacttgggtgccttcgtcaacagcctcgacgccaagatctaacgcgccaagtcacccactatgtcggcactcgggcttggaatctcgacgcgaagactcatggtcatggcggcaagacatgtaactttgacgctatgagtcacgacaccgaacccgcagtcaaaaggaaatttaaatctcatagatataagtatgaatattttttgaaaaagattaaaaataaaaacagagagaagcaaaaactaaacaaggacaaaaaaacaaggaataaatggcaaaaaagcaagacgatccataagtatatattttatatttttaatctccgtcgccattctatcgcgctaagtggtaagatattcacgttaacattcattagcacaatccactaccatatacaattatatttttacttaaactatttacaggactaagaaccattactcactaacagcgacaaacgaaaagacatactacagtg

SEQ ID NO: 42054 - DNA, 274 bp, Zea Mays
ttgtttgttgaaggagagaggtctgaccgctgaagctgtggttgcagactttgtttttaagaatattcagccactgaaggacagagcatatccggcttatttgtatagtggtgtcaccgactcaacccgggttaccaacaagaggattcctgctgtggatttggtgagccaactggagatgatcttgaggggcaaagtatcaaatattggtgctcctgttgcatattctgcttggaatctgccaccttctaagtcctttttcgattttgtgtcc

SEQ ID NO: 42055 - DNA, 341 bp, Zea Mays
cggaaaggggtgaacccagtcgccctgcactcagtcgtgttcagcgcccagaccgcttcaggtaacaggtcggcccacttgcctttcttgtcgtcgaggagcattttcttgacggctgtgaaaattttaccattggcgcgttccacgactccattggattgcgggtggtacactgaggcgaaggcaagcttggtgccaatggagaaacataaatccttgaaatcttggctgtcaaattgcttgccattgtcaactgtgagttcggacgggactccgaagcggcaaacaatgttttgccagaagaatttctgggcagtctttgatgttatcgtggatacaac

SEQ ID NO: 42056 - DNA, 338 bp, Zea Mays
atcttgaactctgtattcgaaggaagggtggcgaaatccatccacggagtagtttggatcgtgtactctattttgtttgtgctacaatttttatcagagtttgtgtccattctagtttcctcccctctcctttggattttggaagaatccttgatttctttagctagggattgccttaggtggagagcctcgtggatgaggagctgccgcttgtgtctagtcggttcacgcggttccacaacaacgcttgagccgatggcatggcgggtccaaggatggatgctacaactacggcgaccctcatcacttcatcgccagttgacccaaaaaggtcaagc

SEQ ID NO: 42057 - DNA, 369 bp, Zea Mays
gagaccgtcccgcttggatggccaggatgcgtgcattggaagagcagcagctgcttgaggacgaccccacagtcgtgtacctcactacatacctcctcaccctggatgcccagtatgatttcttggctcggcaccaccgtcagatgattgcccgagcagaagaagcagagaagcgcaaccgtaagctccatgtggatctcaccacagctcaagcccgtgtagctgccttggaaagtcgtgaagtcattgttgttgaagccctgaagcaagccaaggatgagcacgtccagaagttgatggaggcctacatggtaacccataaccaacgtagagccctgcgggatccaagagcccgctccatccaaccca

SEQ ID NO: 42058 - DNA, 559 bp, Zea Mays
aaactggtgatggccatgacttggcttctggcattgctgattctaggtacatcctctgcctctctgtgccttcttgttgtttacaacaaagtctgaatgccactgttatcaaataggtcttagatttaattgtggccttccttgctcgcttttcttttgcctctgaaaaaacgttgtccagttgtgatgggcaacatctaaattagcaatgggctacagtgactcgtatgcttccattcctgttgttgcttccattcctgtcgtatgctgggccaacagtaactcgtatgcttccattcctgtcgttccagccttaagtaaaaacaatccagaaaccctgcaacatagtggacatgtatcatctgatgttttctaggccaaacgccatatttgtaggaaagctgggttggtaatggaactgcccattgcttttagtgtaaacaagaccaacatgtttagcatactagcataccgggatattccttcagaatagcaatcctaattttgcttttacaatacaatgaaaaacgctaaacagactattaatatgtatatccac

SEQ ID NO: 42059 - DNA, 491 bp, Zea Mays
gggaagagagttgatttgtcgaaggcggaggtggcgtgttcctcattgtcaaagttggatgaagagcagtcctattccttaccgatgtgtgcctcgcccttctttttcttgtaaaacttcttcttgtccttccccttggtgttcttgctttgatcctagtcatcattattacgtcaatttgctataaaatgatcggtcttaccgcacttgaagtaggcgcgcttccccttgattttgactttgttggagaagtccttgcgctccttgagtgcggtcttgaagcgattgatcacaagcgacatttcctcctcgttaaggccgacaacatcaatttgcaccaccttgtcggcgagagcctccttgttgttcgttgctttgagagcgatgagttgtggtttgttgtagtgggggctcccgtttgcagcgtcgtcgatgtaccttgcttccttggccatcatttgttgactcacgaacttaccaagcacttcctt

SEQ ID NO: 42060 - DNA, 448 bp, Zea Mays
aggagagaagggcgcaacaacagcagctgcaacaacaacttcaacaacagcagcaacagcaacaagtgccattgcctccaccaccaccaccaccagttccacctcgtgataagcaccgggagtttatgagtcataagccaccgaccttcgccagttcgccagatccccttgatgcggatgattggttgaagtcaattgagaagatgctcaacattgcacaatgctcagaccgggagaaagttctttatgccttgggtcgtctgacaggtcctgctactgactggtgggattcttatactgctgcccatgatgctgctgatactattacttgggtagagttcagtacacaattcaggaactaccatattccagccggtatgataaagatcaagaacaaggagtttctgtcattgaagcaaggcaacatgtcagtcagcgagtacagaga

SEQ ID NO: 42061 - DNA, 276 bp, Zea Mays
cgggtttccagatgtcatcaaccacctcaacgtggtgcgcggcaagggcatggcggcgatgtactcgtggtcctgcaagaggtaatgcacagcgttgctcggtttccgtggcagttttcttgaggtgatttttattggcgaactttttgggtggttgtttgttcccgtgttgatcggccggtcgaagggttgcaggagctacaagaacgggttcgtgtggcacgacctcgcggaggatgacctcgtcgtcccggcaaccgacggcgagtacgtgct

SEQ ID NO: 42062 - DNA, 587 bp, Zea Mays
gatgggaagccttttttaaaaggatagactgctttctagagatatttacaatatataagtaatagttcgattcatccgccaagatagggcttaaaatttcagagaaatcgtttattcaagtaaaggttggatcttgttgggatttccggtcacccacatgaacgacatgtgtatataccaggtggtggcctcatttggcaagcttttgaggtggcacaacagtccaaggatcaaaacctatgtgttggtcaaatgcctatacatctctgctatggaggtcccccagaagtgccttgctctcttttggtgatgacaacacgggaagggtgtgttcttgatccatccctaactatatcctgactccagatgatgattggcatatggggaacaatgatgcaattgcgatcacatggaagacaacatcccccaatggcaatcctcacccttccccgaagacgacaacgatgaagattttctgcaggctgagagggacttcatggaaaatttggtcaatcagaatctaggcggtattcaagaagcccagggtatccaagaagcacaaggcgaccctatttgggaaaatgctg

SEQ ID NO: 42063 - DNA, 549 bp, Zea Mays
gttcaatcgggtgggtcgacgagcatcacaggttcatgagagtactcaaatgagagagcatagaggatgagctgaactgtatcacgctggccacggtgaggtcgttttcacggtggcggaaactcggtttgggggaaatccgaaattggagcttcctggtgaacgattgagggtgattcttggtgtctgggtacttgactaccctacggagctcacggtggtttcaatttatactgatcgttcgcgagcacagcgaatttgagcggcgtattgtgatcggtatgaactgggtgagtcactggtggccgcacaacgtggcttttaccgtggcagcacctccggcgatcaccggatatgcgtagcacagttagccatgacgtggtaaagcgtttggacacgtggcggacgacaatgatggctcaacggcggtgagaatctatccgagtgatcgatgagcaagggggtacggtgaaccttatctgcgcctgcgcccgaactaatccagtgccgagatttcaatccatcgtgatcttacccgcgaacacgaat

SEQ ID NO: 42064 - DNA, 335 bp, Zea Mays
gagaaatcagtgaatattggaaaaatcatttagagaaaaatgttgaagaacttcacacatccaaggaaagatgctttgaaaaatccttggattgtgtgaagaaaataaaagaaagtttcgccaaagtgggtgcctattctgccgaagagaacttcatacgcggcgaccccgaaggcgttattgaatggataagtggagaggccgagacctttgaagaaattttaagtgatcgcggggatgtttgcgtgttttctggtgcgcggggaatttcagccattttggagaaggcgggatgtgatcatatcgagaccatggcccaggtcgaagctgccttc

SEQ ID NO: 42065 - DNA, 758 bp, Zea Mays
ccaaggttcctatggtcgaattggagctggcatataggagattaactttgttacagacagattagggacttgccacataaaaatttgtgaaaaacacccctaaagatgctttgtcagacaggctaatgaaggtcctgatggtacagtagcctgaccaagatcgtcagatacatcgcacctcaccgacggtgatccccgtgcctggatttgcgcaggccgtcacgattcgtgcttggcgcaaagtggataaccgtgggggagtaaaagatccagtggggagacgtattgggtcgcggacagtagcttatcggagggcttgggggctgtgcgatgtggccgaatggccgtggttgtaagaggtcaccggtgagctcgactgcgccacgctgtggtcctttaccacgtattcgtagccgtggcatgctcagaattactctccctgcatttgtaggccgtcgagcgccacgtcgtgctcgccagtgcaatgtcttgtcaccatcgccctccaaatcccttccaaattcggagtaatcatggccaagctctataaattgagcacctcccttgcttcgcctcctcataatgaacccagtgcaactctaacctcggtcggtcatccaccatagcctgagcaattccgttttcccccaaatcggttctccgcgccgtcgttagcatcttaccgtggccagccatccacaggttggttcatgcttctctacttggtgttctagcatcccttgagtcccctattgctc

SEQ ID NO: 42066 - DNA, 692 bp, Zea Mays
ctgaaaagtacaggggcgcctaggtaaaaatcccgagtcacagagaacagtatagggtagactgcgggttgaatagttattaatctagggtctctttagaaattatgccgcgcgaaggggtatcttgtgttttcagccgtccgatctagagtctagggtttagattttatgaagcctaacgcattatgaaccgttcgattaaacctacggcccggattgactcatccaggaggtatccccgattagatctgcaccgcatatcaacgatctcacgaacatctttcgcccaacccatcttctaatctcgaccggtcatctcagcatctacggcgacgacatcgtcttccacccaacagcccagacgccgtcttcctccctcgtgctcgcactctacggcggcggcccagccgatcccctacggctgaacaccataaccgagccagcacgcagttccgtgttcgccgtccaagccctaacttctacccggacgacctcgttcgataccccggtgttctgcgcgatactcgagcgacccactacaatctataccctgacgataccttgtgcgaaaatcatagcagcaaggatagcggaaaaagaactcaccccgccgagacaaggtagaggctgggcgcaggtgatgcttcacgaaagatcgccaccgaggaccctcctgcatagatggtttcgcc

SEQ ID NO: 42067 - DNA, 535 bp, Zea Mays
gcgggatcccggttttacccgagtataatatgcattagtatatatataaactaaagcctcgtgcctataggtgacaaattatatatagcacaagtggtcattgtaacaatcggctcttttcaatgtaacagatggtcggctcgaagaggtcggtcacaaagacccctaggggatcgtagttcgccccggcgccatctttgcaagggcgtctaccgcttcgttatcccgttgggggacgtgatttagttcgatgtcgtcgaatctatcttccagtcgtcgtacctctcgacagtacgcgtccatcctagggttgcgttattctgaatccttcaacacctgcccaacgatgagttgggaatcccctcgaacttcggggtgccggatgccaactcgatagcgacacataggccattcatgagggcctcttattctgccacgttgttcgaggcctggaagtagagtcaaatggtgtatcacaacggttcccttgatgatgatgtgaatacgaggccaccatcggccccttactttgtca

SEQ ID NO: 42068 - DNA, 565 bp, Zea Mays
cgactgcacctgtcgaggagaagaagaagaggcgacttcggcgactatcttgcttggatcagggtgctggtccttctgcactaatccctgatgatatcccagcgaacgccattcccaaggttgatgccaaaggatgtgataatgcacaggctactggcggcatgtttgacgaggatgaagaggaggaagaagaagaaatcccgttgatccgcaagaacagccgtttctacagaggtagcgcggggggtagcgatattccctctccagctctgtcggcactcgtcagtcttcgggggctttcgatatcagattttgatcaagcactggaagaagtcattcctgaagacatattatcggagcctcctgaagatgataccccagccaaatgtttagaggtcccagatggtgggcttccattgattggttctaccgggcaagaagtaacccgagtggtgtctcgtgcatcgtcgactttggagggcagtctcccatgcaaagacactgatgtgagttatccaactcccatagaggtgactgaggggccttcaacttcagaagcggctgc

SEQ ID NO: 42069 - DNA, 366 bp, Zea Mays
gtcgaattctaacgggggagggacgacacaagttgtcacccctatgggaaggaccattcatagtagcagaagtcactcagccgagatcatatcgtatcactcagatggacggcacggaaattgggaactcatggaatatagaacatctcaggaagttttatccctagctgtatttcaaaagctaccgggacgacaatgtactctgtaaaatgggaaatatatcatcaataaaaaggcttcaagaatactcagtttgttcatgatcaatctgcattcttacttaactcggggtgaccactatgccctgctaacggagcaatcagcttaagtcggcaacgacttaagacggtgcaacatgctcgtgct

SEQ ID NO: 42070 - DNA, 436 bp, Zea Mays
ggaaaagcgcaacgaacaatcaccctgacacctccgccctcaaaggaggacgagaagaagtgcactgctgcaactgctcctttcttccctgacatcctcttcattcaggggagactgggggaagaacctccccagcgtgatgctcggcgatagagaaacaggcgctgaaatgtgcggcgacatcatgaagccggagaatggtacccggcacaacccgtctctcgggacgaagccttagagataggggaaacccttgatgaaaaaacacatcgagaatggcgcaacacccgccgccgcgaccgccgtcaagctcaggaaagcgagcaggagctagctgagcaagatgctaggcttcgacagaagaatccgctcctcacccgaaacctgtaccctgacttcacccgagcattgaacacgccgagcgaagttggagggg

SEQ ID NO: 42071 - DNA, 313 bp, Zea Mays
tactcgaccgtggggcgttacatgcaggtatgataacaacgtacacctaagtaatagtgaaccgactgaacttatcttcctataatcttgtcgacttatcctcatttagttctgacgtctaagggcgccgcgcgagagaatcagatcaatgctgcggataatgcttaaatccaatgagccgtctgggcccaagtctatccaatcttgcatcgatccattccgccagcagttcctcccctggcccacaaagggatggtcttgcgaaataatgggcccaaagcttttcacgaggccttctagccttctagtggac

SEQ ID NO: 42072 - DNA, 383 bp, Zea Mays
tcgcaatcctaagaccctagtaatgtgtgcacgacatactaggaggtacgatgagacagagggaagagcatcattagcctatcatatgtggacaatgtggatacgacgcagaagctcatgacaagacattaatacctaccttagaggagggtatggctcattaagttaccaaagggtaacctcagtagaggcacattaaatactaggatatgtgtaatctatgaccctgacattcatgatgggcacaacacttatcacacccggtttaagaaggcaaatagaatgtaaaccatgtacatgccaggatcaaaatcgcgttcacaacaattacataaatgtcatacaattgcacaatgctcgaaaataagtttattaaattgtat

SEQ ID NO: 42073 - DNA, 359 bp, Zea Mays
aggatcgataatcaatacacattctcatacttccatcctttttagtaacgaaaagaacgggtgctccccagggagacgaactgggacggatgtaccctttttgctgcagttctgaaatctgaagtttcaattctgccaactctgtgggagccatgtggtatggtctctttgcgatgggcgcagtgccaggaatgagatctatatagaactctactcctctttctggtggcatcccgggcaactcttctggaaatacatcctcaaactctttgattacagacatgttttccgctgccaaattaaacatcatcgggtcgtttgcgggcggttgggcttgacaggaaactgtctttccttgg

SEQ ID NO: 42074 - DNA, 382 bp, Zea Mays
gccttgtccttctcaaagtgtagcaccgttctaatcagagtttagggtgttacgcaccgggatggccatctccggccatggtccgtcgccgtggggcgatgctccgtcgctcggcacggtctgtatggtgctgatgcacgaccgccgttggatcgatcaccggtggttaggattagagctgaggttggcgcttcggttcattaaatctagggcgttcagaattgattgggtggataggatttagccaaacacgtggacgtctcgtgtgccatggacctctgatccaagggctcatattgcatactgtttcatttaaagtatgatctaatctgtgccaccggatctagatcgggtggctctgggtacccgataccccttcgcg

SEQ ID NO: 42075 - DNA, 405 bp, Zea Mays
aggacctggagcactcctggaacatcgacaacctccgcaaattttttgtttgactcctcagggctgatttcgcccttgtaattcgcaaaaacaatcttgtaccggcccgcactcttttcctcccggggggtgaggtttttaacgaggcggagccatgtaatatatgtgtgaaaatcccccgcaaaaacatgcgtcgaaaaaagaccgcgacggcggtcttcgacattcgaccaatacgaggtcaacacgaggctaagcgctagccaccctcgcgtgcgacaaatccgcgcagaagtcgcctaagggtgcagccggaccagcacaacaagtgtgaaaaaatcgaagtctatcgcgaagactatccgcgcagaagtcgcctaagggtgcagccggaccagcacaaca

SEQ ID NO: 42076 - DNA, 313 bp, Zea Mays
cttaaacgaccagaacaagttcgtcaggcgatggctcgatgagctcccttcagtaatctggagcatgaggagtactcttagctgagccacggggttcacaccattcttcttggtctatggggtcgaggctatcctaccgaccgacctagagtatggttcccctaggctactggcgtacagcgaacacaacaatcaagtcaatcgtaaagactctctggaccagctggacgaagctcgggatgtagctctccttcactcagcaaaatatcaacaatcccttcggcgctaccatgaacgacgagtctgaccccgg

SEQ ID NO: 42077 - DNA, 290 bp, Zea Mays
aaagtttaacttcttttcagaaaattatggtatcacactctaccccccttaaaaagaattcatcctcgaactcgaccactccaacaaaacatcctaggtaccccatatagcagcaccatgcaaaacatgggtccattattggtcttaattaacacaagaacttctacatcgactaattgtctaaggaaactatatcacctaacatcaagcatgaaccaacatgtaatgaagctcaaaccaagtcatagatgcaatcaacactacgatttcacaacatcgaatttggatgc

SEQ ID NO: 42078 - DNA, 292 bp, Zea Mays
gatgaaattcatgcggggcaatgtggcgtgcatgcagcatcaaggacattagtagggaaagctttcaggtccgggttctactgaccaacaacaaagaatgatgcaacagagttagttcagaagtgcgaagcatgccaattcttatcaaagcagcaacacttacccgcccaacatttgcaaactattcatgtaacctggcctttcgcgtgctgggggctggacatgattgagccattcaaaaaagctcaagggggtatactcacatactcgtcgccattgacaagttcacaaa

SEQ ID NO: 42079 - DNA, 325 bp, Zea Mays
ctatgttcatgaatttgagcaggctcggtatggagtggcggtgcataatgctcaatatgatgaaacattctttgttacccactttgttcgtggcctcaaatttgaactacaggatgtggtgcaagttcaggttcccactacggtggatcgtgctatattgctagcacaaattcaacatgtggtgttgccatatctgatacagcaacatgcacttccaaaaggggatgataaagggcaacaaggtgctgatcttactcgagaaagacaacttagggacttcaggcgtctcaatggtttatgttatgcttgtggagaacagtttgag

SEQ ID NO: 42080 - DNA, 422 bp, Zea Mays
gcaagctgtgagcaaggcaaagggtcgagcctatgatgatctttaccgaagattaagttcaaaggaaggggagaaagatgtctataagatagctaggatttgggaaaggaagacaagggacctcaaccaagttaaatgcattaaggatgagatggatcaactcttggtgaaaggacaagacatcaaatagaggtggcagaggtatttgacaatcttttcaatggtgagaatgagactatggacatccaattggatgactccttcgatgatttaaatagatgctttgtacacaggatccaagaatcagaggtcaaaaaagctttaaagaggatgaaagagggcaagacgatgggcccggatggtatcccaatagaggtgtggaaatgacttggggatattggtatcgtttggctaaccaagtt

SEQ ID NO: 42081 - DNA, 493 bp, Zea Mays
cgagatatcataggtagttggctctgacagcatatcttcggggatgacttcctctagtacttgatcaaagtctgatatcgaaagtccttgaagactgacaagagccgacagagctggagaaggaatatcactaccccctcgctacctctatagtgctggctgttcttgtggatcagcgggacttcttcttcctcttcgtcttcatcaaatatgcaaacagcagcctgtgcatgatcacaatccttgacatcaacctctggaagggcctctgccggtacctcatcatgaaccggagcagaaggacctgcaccctggtccaagcatgacagccgccgaagccgcctcttcttccttttttcctcagcatgtgcagtcgggcggctcactcggcgtggactctttgggcaggcaccttcaggtttccgagtctccactgcttcaccaagttcttgtacagctgtgatagccattggctcggcttgggtcgagtcag

SEQ ID NO: 42082 - DNA, 750 bp, Zea Mays
gtcattgttcacaattttgtgtcacactgttcacagacacagactgaagattcacagacatggtgggaagttggcgcccggtgatgatacaggtggaggtggggagcagtccggccataggccactagacatggaggttgtggttctctctaaaccctaaaaaccctaaacacggcaagacaagcttcgacgaaatggaggcagagtcggctgcttcgccataacagcaggcgaccactttgctagaacagaatcatctttgtgcggtctcgtgatgaacgacgattaagcccccaaccccacgacgtcgtgaagcatcctcttccttgtcccctctctcttctcttccttgtcccctcctcggattttattggagcaatcgcaggcactatgaaggggaggtcagtgggactcatcgacgacgtccatgcatcgacgaaagttccacggatcaaccctgcctcgctatctgcattgccgtcgccgacgaccagtgagttcgatttgtgttgccccgatctcatttctccttgcgcttagggatctgttgtcttcgaaaatattctatatgtttgtagatgaaggtgcccaaatggatttggcttccaataatggtggacgtttggattggttggacgcgtccttggtgccacctgggcaagtggaggttaataaggtggctcatgttgtgttggtttagggtacttgtcaaattgataggctagatttcttttcattgttttcttgtag

SEQ ID NO: 42083 - DNA, 379 bp, Zea Mays
acctgccaagtcgtcgcccgcaaggcattgagggccctgtgtcagatctatgaagaagaagtggccgacaccccgctcagattctttctgccctttcagagagaccgtcccgcttggatggccaggatgcgtgcattggaagagcagcagctgtttgaggacaaccccacaatcgtgtacctcactgcatacctgctcaccctggatgcccagtatgatttcttggctcggcaccaacgtcagatgattgcccgagcagaagatgcagagaagcgcaaccgtcagctccatgtggatctcaccacagctcaagcccatgcaactgcattggaaagtcgtgaagtcattgctgttgaagccctgaagcaagccaaggatg

SEQ ID NO: 42084 - DNA, 518 bp, Zea Mays
acagaaaccactcctactgaatatgagaaacagagggcagcacatgtgatgaggaacaaccaaatgttgcaacggcttgggattaatcagctgcgcacaataatgactgctacaagagtaaggagcaaagatgattgttcagaggaatctgggtctttgtatgacggtgaggacagtgaaggctctgagcaagaggaggtcagcaagttactgattcgtctatttgttttctcattttacatatcattactcttgcatttgtaaacaaatcgatatgcacattattgtgttatgcctacaggatttccaagttgcaaaaggtgtacgtagccacaactcaactcatgttgctgaaaaaactatgcaaggaacacgaggacataaaagggttgtggcccctggtgtaaatgaacaccaaattagaatcactaggcaaaggagtgctaccataaaccaacaatccttcctaaacctaactaccactacacatcctagttcaacagctaccacaaaccaag

SEQ ID NO: 42085 - DNA, 389 bp, Zea Mays
ggtgaccacacgctcggattcgcgcccgacgctacgattcgtgctcaaagaagtaccgattgttgctcggggtagtaaatatcatcgtgtggatgaaattgagccactgttcactctggtcgccgtgtccgcctagctcacggccgcttcggaatcatcctcgctggtgatagccacctcgcgaccttgctccatgtgccttggtgtcttaccacatcgcagtagctcgcgttatgcatatccggtgatcatcggtgagctcgccatggtaaaagccaccaattgcttgtgccagagcacccgcttctctccggccgccgctcatggatcctataaattgagcacacccttggctccgctgggtattcaagcacccaacacacccactc

SEQ ID NO: 42086 - DNA, 415 bp, Zea Mays
gacttcgattcgggccacggaactctcggtcgcggttcaatttgcgtgggtggaggttgtgcgtggtgcgggagcgttcgttgcagtgaggactgggcggaattccgcgtggatctcatccgccgccgtgcgattccgccactgacgccattgttccgcaattggagctctgtgccgcaccattgccggtaagaaactgtcctgcctcccgctcgttaccccttgttacacaacaccgagaatcataggtagatgctcgccctagctacgtgaatcgctcgcgggaaccatagcgtctctgcaccgccacccccggtcagaccctgcctcatcgattggcttcacctcacacatcatttagcacctaaaagcttgagaaaccgagcactagagcatgggacgcatggttcgccgg

SEQ ID NO: 42087 - DNA, 594 bp, Zea Mays
tgcttgtgcagcgaaaatttgagggagaggcatgggagtgaggcaagatgggatgtttatagctaatcacaattaaggagactacgaacaccaacatcagggacaaaggaccaccgtcttaccatgtagggggcgaacatgccttcccaagtgaacttcacttccgggttcgaacatcatagtccgcagcggcacaggaggtggaaagaggtcatcatcctttccatcttctctctgtgtgtttctgtgtcctgcgtgtccgtatcaggcattgcattgagcgagcagccggtgggtggtggtgcttagaccctagccgtcatgtagcagcagcgccagcggtggacctggatgaggaacaaggccatgagcaggactgcggcctcctccactccgtttcttcaccacctggaggctgctgttgctcctctcgtctctgacgacgactgcactggttgctggactgtgatcctgatgtcgctgttgctgctggctttgttgtgggattcttggtgctgccaaggcctagcttttgcctccgcttcagccgccccagtccccactgcctgtgtaggtctgcgatctggtttgctc

SEQ ID NO: 42088 - DNA, 499 bp, Zea Mays
ggctgataatgatttccaccaaagaagggaagagttccacatatacaccgaagtcgctagaggcttcggaggaaggtaccatccaagacatgttcgaagcatctataatcgatcatagggtgaggaaaggatgactcaatcatagagtcaatcaggacaacatgcaagctctcagcaacaaacttctcatagcacatttcgaccaccttatccgagaggaaggggaggcagaagatttggtggaagattcaatgtgcccccaaggaagcaattctacttgttttgtggtgaggacatgggccacactacaagaacatgccatcataccatcaacaagcagaaagagcttgcttcgttagctactcaacctttgcagctaaaagaggtgttcagtaaatcttcatactgttcaccctacatcccctaatatgttcaaactcagtcgcaagagccaaggccaagtctgtcttcggcctcaaatgcctcaagcaacccagtg

SEQ ID NO: 42089 - DNA, 550 bp, Zea Mays
cacccctcgacctacgacgcacttatggcctatcggactaggcctgagtacgcagacctcccacagggcactacatgatggtctgcgccgagccctagggtacagaagccaggggtcacataaccaaaatgatgatgtctgggaccatcaccgtccccacgtcatccgccacggtaaatatgagacatctaggtagccccggcaccacgagtacgtgtggctccacccggggtaaaacacttgttttacccttgtcttatggctccttcccagggaagccatcgctggtcaacccctctcccagcctataaaagagagaggctggccttagggcaagggagatgaaaaggagagagctcttggggaaaccgaacgcctcagacggacacgagcccacaaggacgaataggaggaggaggagcgtcgtcgaggactaggaggccggagcctcaccgagccaagacttagctaggactccacccagcagcttctaagctccacttccaccccaataaatagacttggatagcctctcctctctctctcaacc

SEQ ID NO: 42090 - DNA, 453 bp, Zea Mays
gacgaaggtgatgtagccacgggagaacgggacctcgagtatcaggcccccgagcaagtcctcaaggacatcctcactggagactccgactccggtgatgacaacgaccgccgcaagaagttgtacgttatgtatggcggaagctgggagctcacctcccgtaggaacgtaaagtccctgcgctgcgaggtcctttcgacgaccccaggggtgcagaaggtagccccacatcagcggtggcggagcaccactatctccttcggggcatccgactgccccgaaaacatggcaggggctggcatactaccactcatcaccgcccctgtcatcgcaacatgaagctgcatcatgtcctgattgatggtggggctgggctcaatgtcatcagccatgctgcgttcaagcaactacagatcctaggatcccgactaggaccctctcgcccattctccg

SEQ ID NO: 42091 - DNA, 435 bp, Zea Mays
tgatcaaggattatgatcttgaggttcattatcatccttgcaaggctaatgtcgtggcagatgctttgagccgtaagtcccaatgtaactgtcttttggccaagcctttaactatgactttgtgccaggaaatggagaagttaaacatggaaatagtgccacaagcatcaatagccaatctccaattagggtcagttttgattgatcaaattatcaaagcccaaaagattaatgtcgggatagttcatatgaaggaaaggatgattattgatccaaccacacaattatgggtagatgataatggagttctttggttcaaagatcgtttagtagttccaagggttcctgagttacggcagcaaatacttgatgaagctcacttatcccggtactctatccatcctgggagtaataaaatgtaccaagacttaaagc

SEQ ID NO: 42092 - DNA, 272 bp, Zea Mays
cacatgtgttgtttggttgggctatgtatccaataacgtccactgcatatacgcacttgacgttcttcccagcaggttggctatggtctggatttcccttggggagcaagcctgccacgtattgagacgagaatgtatcttgagcaatacggtggaagtcgtgacgtatggatcggcaaggttctctacagaatgaacatggtgagcaacgacatgtacctcgaggtggcgaaagtcgatttcagcaactttcagagactatgccgactaga

SEQ ID NO: 42093 - DNA, 502 bp, Zea Mays
ctcacgcccagacggaaggagcagataaccatccatagcaagaacatgcgtgtagaaaccgcaagcctgcctctgacctccttggcgaccgggtactccagcaagcccccacctacacccattgccataaagcaaccttgtcgtgcccaacgagctattgagttaaagtgttgtattgcagaccttgaaatgatgcctcagtgcatagagctactactctggtaagaccacgtgcacccacctgagcacacgctagccatgcaccgcagtcatcgccgaacgtgtgccccaccatgagccaagttgccctgccaacctcgagaggttgtgactacattgtgataactgataacgtcgtccgccgcttacagtacaccgattgagattttgtcctctattgtgaaccgtcattcctcagcctataaatcgaccctgatgaccataccataaagcctcacacctgcttaagccatcaacatatccatcaaattgttgttgctcc

SEQ ID NO: 42094 - DNA, 596 bp, Zea Mays
gtgcaggagctttggcaccacttgcgggatctgtgcgtagagttattgggcggagtctcgaccaactctggtcggaattgctcgctagtgcgggcgcatcgtctcagggtcgtgcatcgccgaagccaagtcatccgcgcccccgccatcggtatgtgtccccatcaatttggtgcttgggtccttggagtggcgtagcaccaattagatgaccgatttggccataggcgcgcctgaccatgttcgtcggcaaagctccgtcgtcgaggtcagcggcgccgtcacattccaggctggggtcgagcgagggcggacggatcgttcgatccttttagaatggccaggattagagagggaatacccgttcgcttactttaaatcaataccgtagattgggtaatgggcggacctgggatgggtgaggcgtggccatccctcatccgtcgatatcagatctggtggctagggtggattacgggtttacgtaacacctgggttctaatctggaccaatcggccaagatcggacggctgagaggggctggtaccctttcggccgagatactttacagtcgggcccctgaactttatagaaat

SEQ ID NO: 42095 - DNA, 604 bp, Zea Mays
gcgggataggactattgactgggctgtaaattcacgatttatagcctgagattgcgaggcgactgcccaagcccgggtggaagagctaagcttagccctagaaaatttgcaagcatataataatactctgcacgagaaagtgcacgtgctgtatgaccagctacatctaaacgtgccaccggaggttgcggcaatgggagctggtgcatcagaagcagctggcggaggaccttatggggagttggatctctttggagcccctccttccatgaacatcgcggatgatcgttctcccaaagctgggagtggagcgggagcagccaaggacgcggataactagattagtgtagtagtatgtggtttccttatgtaatctaaataaagaaaagtgagttgtataagttgaatatgtataattagaacaagtttggaacaatgtaacagaggttgtgtaatcgtggcatgtaataatcaagtatgttttcttcttcagatgtcgtccagaactcgtgctcaagatggggctggaactttccgtggtggggaggaaactacgaacccaccgcttgtacctcccatgctggcagaggctatcgcttcccta

SEQ ID NO: 42096 - DNA, 377 bp, Zea Mays
taaagctgttggtaataacaaagatgggataaaattgaaaggacattgcttgcttgcgacaaaaactgatgttaatgaattatttgcttccacttctgttgccctacgccttggtatgcaaggatgctttgatttcaattcaagatatgcaacattctttgcctcctgttgttactaacatttcgcaggagtattctgatgtatttccaagtgagataccagaggggctgccacctatacgagggattgagcaccaaattgatcttattcctggtgcatctttgccaaatcgtgctccatataggacaaatccggaggaaacaaaacaaattcagcaacaagttcaagaactactcgacaaaggttatgtgcgtgag

SEQ ID NO: 42097 - DNA, 651 bp, Zea Mays
aaaagaataacctccacttctcctctttgcaaaccgggtatcacactctaccccccttaaaaagaatttgacctcgaattctgacgcttctatcggaacgacaaaagggaaaatttaatgaatcaacaacacttacccacaacaaaaagttccggatatttctgccgcatcagctcctcaagttcccacgtagcctcgcgctcagactgattagtccataagaccttgacatacttaattgatctcttcctcaaaaaacgctccgaggattccaagatacgcaccggacgacactccaaggtcagatcctgctgcaccgcaattggttccatctcaatctgatggttcggatcccgcaagaacttcctcagcatagagacatgaaaaactatgtgtacccctgccatggtaactggcaattgctagcgataagccaagctgcccacccgggccaagatagtgaacggtccaatatatctcgggctaagctttccagagacaccgaaccgaacaactcctttagtgggtgataccctgagaaggacttggtcacccactgcaaattccaaatcctgcctcctcacaccagcataactcttctgacggctctgagcggccaaaatattctgatgaatttcccgaaccttttca

SEQ ID NO: 42098 - DNA, 381 bp, Zea Mays
tgtaggctatgtgctccttaactaggtctcttgtggcaataaaggcacaaacattgttgaaagccttctagcaggcttcgatatcgtccccaagtgcagtagccggccttctgatgccgaagcgagaccagatagggcattggataatcccctttatgtcttccctttcaatcagattattctttacataaaaccattcctccatccaggccctgggccacctttttcgaaatgttggaactggataacttacatcagaacgaagaacgaagccatagcaaccgaaattgttgtgatattgctccttgcccgtggccttcgtctcgtatagtagctcatgcatgttacaaaagcactttgcgcttggttctagtccttggc

SEQ ID NO: 42099 - DNA, 459 bp, Zea Mays
aacgaaaggcataacaaaggatagagttaaggcaagactcgtaatggcgaagtggagaaaacaatcaaggtaagataggtgatgtttcaatagaatggttgaagtaagaattcattaccgagggaagttataaagaaacgatgagatcatcaaggatgtgtgaaatagattggtcgctcatggatcatcaagaaataagggtagtcaaaagcatgttaaccgaaatgtcttaaacaaacattgggatatgaaggtaagcatatataaaaataatagtatgcaagattccaaggatacgggtatacccagacaagggaaaagaaaaaggtaaaggatgacgacttaacagtggaataggaagggatctcagaagacaagaagttcatggacatataaactagagtgtttaagtaggcgggagaaattcagatgtaagtatttgaaacaagagtattaaag

SEQ ID NO: 42100 - DNA, 312 bp, Zea Mays
ctcgggactcaccagatgaaatggaaggcgcgcacacaggaagtggacgttgcagaggatgcgaagaggatgagcggaggatgagaggtgctggcatccttttaatgttggtgtgatgggatctgcgcggcattgccaaaacggtgtggatctccctgtattccatattacgacgaggtgctaggataaggagcggacgcatcatcgacagagggctgcaagaaacgacatcgatttataggtttgtcattacatcaaacacaaggcatgcagggacagtgaggtctcaccggggtttgacgacaccgcaac

SEQ ID NO: 42101 - DNA, 298 bp, Zea Mays
cggagacccgagtagcttgttcaggactcgacaaggtagtgttcgcctgctgcgagctgatgatatatgggcgcaccgcacatgcagaaacaagttcttcagccatcagtcaacgtgtcgtacgtagcaatgggaggaggacgatggcgtgaccatctggtactaatttcgtcaggcttccgttgtgggctttgcttgtcagcatcgatcctctccactgctctgcacatctagctaggcgacccacacggcttcagctggaacatggcaggcacagcctttcttgtgttcagacgca

SEQ ID NO: 42102 - DNA, 435 bp, Zea Mays
gagatcggccatgggtcgcggggaggaaggacacatagcttctcagccatcggtgctgaggaagaagacgagaagggagtgcaagagttttctgtggctaaggttggaggcaactagggcagggaagcgagagcagaagttaaaagaaccaaagagccctcctcggacgtatttatacgggcggacagagtcaccgaggcatgggccgagccacccaaattcagggtcgagagtgggctgagtcacttcgaattccccatgcacgcgtgctgcaacggtcggcctccaggccgacgggtctcgtcgcatttatatcccacccttcctgtcgggctgacgtcagacagcgagcgtcgcttcgcattacgcatcaaaaggtgtgaccctctcttcctcctcttttccatccctttcatagataacagggagaggcac

SEQ ID NO: 42103 - DNA, 502 bp, Zea Mays
cgaggtcgagctgtgcggtgttcctgagcgttttgggggaaatcccgaattgaggctttctggtggaggattggaggtgcagaagggtgcgctagatgcttgagtacataacgaagctgacggtgcactggatttatagactccgggggcggtggctctcaatttgaccgcgatgtgttggcggccggagacggggaagaagcttggcgcgcggttacgtgtcctatggcatggcaaggccttaggtaaaagaaggacggcgtatagtaatcgactgcgacgtggtaagatgaccgacggcgtggcataacagcaaagaacggcggcacgccggtgatggccgtgcggccacgtcgccggtaaggggagaagtgaccgagtggccacagtgctccaagtttatccacggtgagatcttttcaaggtgagcaacatccacacggccgcggcaccaatcccggcaaagaggtcgccggcggtgagatcttttctacggcggtcg

SEQ ID NO: 42104 - DNA, 439 bp, Zea Mays
cgatgtggctcgtcgtgtggtgccctaccagtggtctgttcactcaggactagtccgataggtcatgagtgcaccgcaagccaggtggcgcaagccataaatgacacagtttgaggggtttgtaggtcatgagtgcactgcggcctgaggggtttctaggtctgacaccaccgccacagctcgtcactaggcatagttaatgcagtcggtcacttatgacgggttggtctcgaaccaggtgcgagatccactcgagtggtttcccttatgcatgctcagtccccctgttaggttccaccacgcccgaccctaggctcgatgttgtggggttcgtccgggagcgggttccaccagggtggtcgttacctatctcctccagctgaccaataggccccagttgctagatgcctttccccagtgcgcttagacctaatcatgg

SEQ ID NO: 42105 - DNA, 405 bp, Zea Mays
gtaaacttttgtctgtgtgatactgaacctcggttgctgcgcaggttccgacgtttgggcctgcccaagcaaccgctggtgacaatactgattttgtggcggcctcaaccgtagtgcctgccgatgaaagtttgtttggctctgtgtctgagtgttttgagtctgatggtgaatctgggagtttgtttccttggacggaggagttctcggatgaaggcttggactattttgttgcgttggatgtggctgcggtggagactttgccgtgtgtggagggtgccggggatcttcctagtgcgagtactgggtgtaggcggcgaagggtggtgggaaaacatagtgtgggtgaattttcgcgaagtggtaggcaccatcgtatggggatggagcgtggccatcttcgag

SEQ ID NO: 42106 - DNA, 473 bp, Zea Mays
gggtgctcaatgtaaataatgggactaacctgcaatatactttgcataatggtggaccgcgggtttatttcaaataatccgaggggttctttagaaagagtagcggccgaagaggtatccatggatttcgaccgcatgatcaccatccgacggtcaccatgtgatcaattcacttaatgaaccagtacctaccctggccatccgatctcttgatcaacgcttcagattctaagtgctgaaagggtatcctcacgttctaatctgagccgttccttggagatccagcggccacggccccagaatcatccgatcgagatcaaacggctactgccacttctattcttatccgtccatcactagattagcggccctggacccatctccttcctccaaacacccatgcggctcagagcaaagagctccaaggcggcgcagatcaccggcaccataatccccccaagccaccaccccgg

SEQ ID NO: 42107 - DNA, 295 bp, Zea Mays
gacatgacgaggactatgcttggagattacaagactccatcctcggccactcctctaacatccgcgaagggcgaaaggggagacacgctagctgccacagaaactagagcgagaggaggaagggagagaccacaaccgagaaaggaaggtagctagatgtggaagggaacatgagccgataagatctgggcaaggtcctaagcgcagaccacgaagacaacatatgccctgcagtcccctaccatccgggtgataatatggacccaaaacaagcgcatggaccagagaaggagtg

SEQ ID NO: 42108 - DNA, 368 bp, Zea Mays
tactatttctcaggttgcggactgcttggccttgttgggcgaaccatctgcttgtgtaaaagctatgtgggtagagcttgggttctgaaagttgcgagatcttggactgtccgtctgggatcgatgaaccgtcaagatctaacttttctaacagccccgataggtttcaaacgagaattatagtcgttacttgtacgacaaaccatgcaaccagagagtgtgggtcgtccgcaagtgcacagaaagggggcaacttgcccataacatccagtattgaatggggagtataaatagaagtgttgatcgtgtatgtcaactctcttggccattcctagtgtacattgagcacatttgtgatcttccaacac

SEQ ID NO: 42109 - DNA, 483 bp, Zea Mays
gtcggaggtcgcgggcctttgcgaggtcgtggatgaggtgatcttctttgttcagacctagggtgtcgattgaggagagcgaattctcaatgtagctaaccgggagtgcctggtcgtccatcgtggcgctcatcgcggtgccgctggggctctggcctttgtgcagttctggtcgggctacgagtttggtactatggacttgtcggaggacacgaccgtcggtgctctggaggactttgaggatgacttcgacatagccaccgaaaccatggtcgacatctttccactggaggatgtgatcaatggatctccctagttaggatgtatccgtaggtagcttcgatcatgggacggcccaggtgtgtctgcccctatgctttttgcaatgttgtcatttatttctaaacttgttggtgaaatgtttcccctccctttcctgttcctgatattctattatcctttagtgtgaaaaaatgggttttg

SEQ ID NO: 42110 - DNA, 289 bp, Zea Mays
cttgggagcctttgggagctgatggctttacgatattgtgtaaaattgttaatctggtactggaatagggagtaatatgcttatgttggtagtggtgtagtttggttcttgtgttgcagtgtcctcgaggtaatagctgttgtcatggttatatctggttggcttgttgttgcacctttttgttatgctgtattgtatgtactatgtagtatcagatcataatattcaatgttttgtcgtgttcacatggatggacatcgcaacaaactgataaatgatactaggccgt

SEQ ID NO: 42111 - DNA, 340 bp, Zea Mays
tggcaaacggtgaccggtgtgactgtccaacgagcgtgggtgtgattgcaaaggagtacctgttctgctcgagagaaagctggagctatgggaaggctgactaaatatatatatgtggcacacaagtcagtaacaaatagcaatgctaaataagtgttccaagtactcgtcctagttgctagcctagaaaatataatagaacagttggaccaaagcacaagaaaggaggtacaagtatctagtgggaatggcagttctataaatagagcagatttttcagcactagtagaaatcaaagacgcgttttcaaaggagtaccagctacagacctcgaaatatt

SEQ ID NO: 42112 - DNA, 543 bp, Zea Mays
cagaggtgaaacctttatgggtacaggaagtgcttaattcctatgtgactgatgaagaagctcaaaggttattggctgaattggtgcttcatagtcccaatgaacaaggtttttctgtgcagcagggtgtgatcagaagaggttctcagatttggattgctcagaactcagcccttagaactaagatcattgtggcattacatggcagtatagtaggaggtcactcaggctgtctggcaacctatcagagggtgaagaggctattttggtggaaaggattgaagtcagatgttaaactatttgtgcagcagtgtgccaacatgctaagtctgaaagagtcctttacccaggattgctccaaccccttcctgttccccagggtgcatggcaagatttgactatggattttattgaaggcctgcctaagtcggaagggtgtgatataattttggtggtggtggatagatattctaagtatgcacatttttttgccttgaaacacccattttcggcagcaactgtggcacaagtgtttttagacaa

SEQ ID NO: 42113 - DNA, 418 bp, Zea Mays
tggaccgcgaacataattactagagagctccgggtcaaaattataaattccaggacccgacagtgataatctttctatagcttaggactccaagttgataaactaaaactacgaggtctcttttgcaaaatggcggagccgaaagggtatcagcacatgtcagtcgttagatcggcaatagagggctcaaattaaagttgtcttcaatccgaactagtatgcgattgacactgttggatcacagatccacgtactagacttaaaaccactaagatctaatctgcatcgttggacttaggatgaacgtcccagatgccaaccctgaagcggtatctcgatatctaatcataaccacccgatctagatccgtcggtctagggactatccccttcctcctgaccagaacagagtccgatgc

SEQ ID NO: 42114 - DNA, 462 bp, Zea Mays
gcgtgattggttgccagatgagcagaaccaggcccaacccagcagttgattggttgcacagttgcattagcaaattcaaacacacagatgcaagtagagtgattggttgcagctgcatacaagtggtatggtcaccactgcatacaagtggtcaggttacccaaaccaaatgatcaacaagagcacaactatcagtacaaactgagagagaatcaagccatctttccaactgaaaccaacacgaccagtcttaatgactgattgtttaaaagcagcaacagcttcatcttttgaggagtagcttttgcagcgtgctcctttgaaaccatgaacttgaacatgacaagcatcccaggaatcaaacacaccaacttttcttccatgatgaacaacataccacttcatgttggctatataggaagaaaaaacatcattgacattgcacatttgctcagatcataa

SEQ ID NO: 42115 - DNA, 354 bp, Zea Mays
aaaacagaagaaccggattttattttctggtataaaaagtcaatggtcttcccaagaacaactagtagcagatgcactgtcagacgatgaattgccaggttttccaaaaaggaaacatcacaaggatgctcatctccaaaaagaagcaaatgagtgttacattgatggatggactatcacctgcacacagtttcagcctcgtcgtcgcatcagttccaagaaacaaaaggggaaacatggaaaaagtcaagaaataacttcaagaaaagcttgctatcaatgtggacgtgaagatcattactttcgtaattgtcctgagaagagttcactaccgaacacctccgagattaagct

SEQ ID NO: 42116 - DNA, 373 bp, Zea Mays
caactttctgcgcttaacaataagaggagtaggcaacagttgagccgtcggcaaaacgagatagtttctgaattcctgcaattggggtgacagcaccaattcctcaaccaccagtgtcttcttccttctggagtaggccttgaaacacagcggcttggtacttaactagcaactcagcgaaagccccggcctcccatgcagatttatgaaagaactagaggattccacaatattaacatcagcaccccacacgtctgcagagcacaaattggaatcaacagcagccagggcactcgggagaattacagcttcaactggttcagcagacccaggcgccgtcaactctacaaccacagcacaaggattttttggt

SEQ ID NO: 42117 - DNA, 1284 bp, Zea Mays
ttcggaagccacgaggaggtacttcgacgagaggaggtaccctatcatggtatgactgatctcatcaatgatttttccttgccatttcgcctttagctgatcttacttgttgcttgttggattgctactattgagcccgaaataagtcttcttctctggcaagtgtctgtgaacggttggtaggattggggctatatattgttggattttttgagttttacataaatttgacttctaaaattctgcaacttataagctgtctcgtagttatgcaattgaattcaatataactactgcaatgagcacttttattacaaaaaggctgcacggcttttgttatgctaataatatgccactatgcatgaatttcatcagctgtaagcagcatgcttctccagtattttcttaatcaaatttggttagtccttgatctttaaaaccatcgaggttattacaaatttcagtattgcagtaagccagtaaattaggatctgtgtcaattttatgtatgagaaaacacttctaatgtgactgctttatagtacaactcaagtacaacaaagcatctgaaccatccattacatttacgacatttccatctaatgatccaaccagttgatactattttctcaaacaaaccattggatcctgacttctactcaaaatttgtaatgaaatggctatgcttagattacttttaaaatgcttaatacttagatctccttaatatactgtttttcaattccttccattctttggattttaaaagtcgactgttaaaacggagattactagttcgattgagtgttccactccttagttacatgtgcatagtttggcataatgtgtttcgtcatctggtaccaaccaacaaccatgtgccctattgttagattcattttctgtggagtattataataagtgtagaggtttatctgtaaataattaattattctcatccgtcgtaccgtcgtcatcgcctcatcggtgataatatatgtttgcaccttggcatgagcttcaattggactctgaaagaaggttctaaaccataataacgcatcattttccttttttgtgattgttgtcaattttgcatctagattgggtcgtcatcagggaactcttattttcttctttcgaggccaatgccatctgattcctctccaaaggaagcagcacctagcattgggccacaggcacctgtacaagacaactcaagttcaacaggacaaccaactgaaccaagagatttcttcagggatgctcttagtacctcaggaa

SEQ ID NO: 42118 - DNA, 831 bp, Zea Mays
gctcatcgcccatacatggtcatttcaacactgggggctagacatcgttggaccactgcctacagctcaagggaacctcaagttcaccttcgtcgccgtcgaatatttcacaaagtggattgaggctaggacagtatccataataacatcgaagaccgctcaaaaattcttctggcaaaacattgtttgtcgctttggagtcccgtccgaactcacagtcgacaacgacaaatagttcgacaaccaagactttaggaatttctgcttttccatcggcaccaagcctatcttcacctcggtgtaccacccacagtccaacggtgttgttgagcgcgccaacggaaaaaatttcactgccatcaagaaaaggcttctgcacgacaaaaagggcaaatgggccgaccaattacctgaagtggtatgggccctaaacacgacagagtgtcgggcaaccagattcacacctttccgcctcttgtatggatctgaggccatgacacagcaagaattaaaacatgggtccccccgaacaaacaaatcagctgtccccgatgtcgacgaaccaacttccaaagacctcattgacggagatcgcgtcttcgctctgcaggccctcgacaaatatcaggttcaaaccaaggcctggcacgacaacgcagtcattccaagggaattcaatgaaggggacctcgtactcgccagaaccacctggacagagtcatggggcaagctagagccgaagtaggacggtccattcatagtcaagacgaagacatcccctagtgcttacaggctgacaacatcatccgacgaagacttagagcactcctg

SEQ ID NO: 42119 - DNA, 326 bp, Zea Mays
gttacagccagagaaacagtgagctccggtgatgctagcgcgactaaccgcggcgggacacgacggctggtccggccagcgactggattcacccctccccggatattttcaccttgccccgacgttatctacctctctcgtggcacgaatctcccaggcgggcgcgaattgcggcggcagatcaccggcgtcaagtcacgacaccggagatttttctggtcattgtaccatggtgatcttcatcagaagctctgacagaacaatttggagaacttcgttctccatttttcatgcgacaactcactcacttgcatgcaacaattttg

SEQ ID NO: 42120 - DNA, 564 bp, Zea Mays
gtaaaatcgaagtcttcctcaaaagactatccgtgcaaaagtcgcctaagggtgcagccggactagcacaacaagtgcgtaaaatcgaagtcttcctcaaaagactatccgtgcaaaagtcgcccaaaggtgcagccggactagcacaacgagtgcgcaaaatcgaaggcacattacatccgtgcaaaagtcttcgtcgaaaaactatccgcgcaaagaccgactacaggtgcagccgcaccgacataataaacgtgctagaccaagtgcacaacgcccctatggacacggccggatcagcgaaagcacacagcctcatcatacaaattatagttacatacgtacagcgagggcatcacaccttacattggttcaaccttcgggatgatacccatctctctatagttaaacagcattatcctcagctcctcaccctcaaaaagacttcgcaactccccctcacctacactcgccccaaccggcgaggacaacaattcccgcttgccagccctgcccacacgaagccgaccaccatccacctcactcactctacgcttcgccacc

SEQ ID NO: 42121 - DNA, 358 bp, Zea Mays
catgtgaatatatgcatctttgcaaactatcatgctcattacaatgcttaatagaattttatgatgccatcatttgcatgtcaataatgcacatgagcatcatgatttatgcattttccaacgaaatttacgacacttcttgatacattttacgcttccacaacaaacgcggagcgcgcccaccccgtgtcatgacctagttggggcccaccccgcgtcacaacctagcaaaagaactgaaactgccactactgggttcctcgtgtcatgacctaggtggggcccaccccgcatcacaacctagcaaaagaactaaaactgccactggtgggttggtggattggggcttcctgcaact

SEQ ID NO: 42122 - DNA, 590 bp, Zea Mays
gtggatgcccgctctggtgtttggatctccttccaggtcggccggtgtgtgccgtttgcgctggattggctggttggttcgcacgacggcgagacgggtcgagttgttgggctgtgtgccagccatgtggttgcttagctggctactgggaatccggttgaagctttgaaattgatttcttaatttttgggtccccttttgcgacgcggtttctggttggtgagagggatctgcagcagtagaaaaaaatgtggtgggctgttcttcctgatgttaaactggaagtcgtcgagaaattactttcatggtggaaatttgaggattctgatcatagttttatttcctgattttgtttgtcagacgagctaagttgatttcggagaaaatatttatttccttggccgtggtagatttggtcacggcagaaattgaccaccatgagagcaatgttcactttgattggtggagaaaaaggttgcaatcattgacggcgaggcatgtcgagttgtcaacttggtgtctatgctgatgcaaaaaggtttgcttgcataaagtccaatggagccaagggtgcttgtttcttgtttgtg

SEQ ID NO: 42123 - DNA, 405 bp, Zea Mays
taatctcggccgtctatttcctaatgtacggacgcctggtgtcttcaaccataggccgtcctagcatggacgccgcaccctcctggcactctctctctctcgttggttaaccggaaggggggggtacgtcggcacaggtggaaagcttaccggaatctagacaagccggccgtcaacgtcgcgtgcagagctgaccacagaagatcggggcaaccaagctcctagattcgctagggttgatgcgtcggtttccaacacggcgatgtttcagccgaccaccgccgcaggggagacaccgcggaacacttttccgcctaaatccgcccaaagccgtacacaccgggaaaatacaagcgcatagcggacggcctgccgacacccacaccgcggcaacctgtgctctcg

SEQ ID NO: 42124 - DNA, 335 bp, Zea Mays
actatttgatcaatatagatctctgcatatttctctgtcttgtgggtggtatgcactggcaagaaatgagttgtcttggttaatctatccataatgacccaaatagaatcgtggtgccgggaggtgttgggcaatcccacaataaaatccatgcaaacatcctcccatttccaagagggtatgggaaggggctgtaaggtaccggctaccttcaaatgactagctttgactctctggcaagtgtcccattccgatacatacttagcaatttccctcttcattctggtccaccaatacaaggatctgagatcatgatacatcttgttactgtcggg

SEQ ID NO: 42125 - DNA, 401 bp, Zea Mays
cgagcacaaccatacactacatgtgaagcgtaatttaaggaacgcataacgcgtatagacttgactcataaacatagagaaagcgacgactactttttcatgccaccacctctctacttaagccaaaacaattttcctatccacatcaaccaaacttctaatcgagtgaaaatctacacctctttgtcacgaatacaaccatattgcagcatgcactcgagacacttcggttcaacttaacacaattaccactacaatgcacttcgatatacacgttcgacatcacagtgcttcgacaaacccacacttctaatctacttgtcacatccaaccacaccacgtgcccactgcactcttatgaccaaacttttgtgcaattatttataacaacattcatcgac

SEQ ID NO: 42126 - DNA, 388 bp, Zea Mays
tagcatttgagacatcaggtctttgaactctttctttgcctcctgcttaaaataatccgacaacacttctttgtatcgatcacgtttcttgtacaaaccttcccactatggtccgaatccttccttccatccttccttagatgagattcctcatacatggcctggatgctcagggttaccaagactagccgttaggatgtctctctccctttgtggcttaaatgatccttggctctgcttagctgccattgcatatatgtttttcacaacttctttgacatttggatcatcaaaagatacacccgcctcagtttccctgggatttctagcacggatccaattagtcgtcctttcaccaagttgctcagaaagcgtcggcaaccctgcg

SEQ ID NO: 42127 - DNA, 684 bp, Zea Mays
acctgcggctctctgggagcttgctcggtccaccccttgctccgcgtggggatttttgaatgcatttcggtttctcacctgactggttcgaggcagttactgatgtggtgctataataatgggtagccatcatgatgttgcttgcacaggcggcctgatgggacacgaaacgattcgtctgccgcgtcgtgcttgggttgcgtggtggtttggctaacctccccacccattactattgtacctctcgtggcgtatcttcttggtgctctgccccaagcggcgaggtcctacaaaacacatggtctctttgcttgatacccgaggcatcccttggttgaaggtgtggatcctccaccgtttgttcgtggctgcccctaccctttgcataaataaaggaatagtgcgctcagggtcagtttatgcttaccatacccttgcgttctgcctctcggaacctcccgtgctgttcttcctccttgcgtcgttccgacttgctccccacgtgcatggcgtcactcccatctaactcgatccgagagagtcgcctccatggcctagagaagaaagggttcaatcccctgaaggatgtttcggggtggagactggagagtgagggggaagtgcctcgtcctagggatgacgaggtggccgtgctcgtgtccttttatgagtgcgggttcagcc

SEQ ID NO: 42128 - DNA, 423 bp, Zea Mays
aacaccatgccgccaatcgtaagcatgtgtgcagccttgaccatccctagacgtggaaccttctactaggttgaggtggacaatgaccctgaaagttaaaccactgcgccccgccggcagcacgttgtgggtagtggtgttactaccaacaatggtgagccaagttaccttaggaatctttgatggatttcgcgcccatgcccagaggttaagggtcctcgtatcctccttcatcagggactaaagcctcaacgtagtcaagcacacaacacttagccactgcctgcttggcgatgacctcattccacgcgtacaggggaataccttccagatagaggcgaacatggaagccgaagtcgatgtggtcaccatggacggggagctgccacggtctgacgcaaatgtcgatgttgctataggtga

SEQ ID NO: 42129 - DNA, 447 bp, Zea Mays
tggagctacagtccagcgacaagggaaagattctctgaccccattgaagggctcaaggacgtgatctagctcgatgtggaggctagagaattgtccaaaagcttagagaatcgccactaccgcctacatgtcttgtctgaccaggtttagaaaaatggcctcatcatctgcgtatagcaaggttctccatctagtcgtctctccagcaacggggaaagtgtgccttgcccagttgctaggtcaagtaagcgttgcagagggtccatagctaggatgaaaagcataggcgagagagggtctccctggcgcaccccctggcatgggaaagctttgagcctgggcatccgtttatgagcacagaggaggtggccatgcggaagaggatggacacccattcgcgccaccgctgaccaaagcccagaacacgcaggacttccaggaggtagc

SEQ ID NO: 42130 - DNA, 418 bp, Zea Mays
gcatgtgtcaacttatctttcagcacattgaaagagtgctcttgtactttgccccaactaaaatgcactcccttcttcgtaagctcattcaaaggtgcagcaatggtactaaagtccttcacaaaacggcgatataagccagcaagtcctaggaaactccgcacatgtgtgatagtctttggcataggccatccatgtatcgcttctaccttggcttgatcaacctcaattccctgtggagtcacaacataaccaagaaatcacactcgatcggtgcaaaatgtgcacttctcaaggttaccaaataaacgtgcatctcataaagcattaaaaacagcacacatgtgatcaacatgttcatccatagatttgttgtagatcaatatgtcatcaaagtatactaccacaaattttccaa

SEQ ID NO: 42131 - DNA, 316 bp, Zea Mays
tggatgcaaatgcgatgtctcttagtggtaatgtgtcgggggaatcagattttgggttgtggtcttcggagggtggaaaattggggagccctttttcgtggacggatgatgaatcctcggaagatgatttagactattttgcagcgttggatttagctgcagcggagtctccgttgaggaccgtcccccgcgaagcgtcggtgactttgatcggtgcgctcccaggtgacttgtgagggcgaaaaagatgggggtgttgaaacaaagcgtctgtgagtcttcgcaaggtgttagaagacatcgtcgaatgggcatg

SEQ ID NO: 42132 - DNA, 383 bp, Zea Mays
aggtggtggtcgacggagaaggtgaaggtcacacagattcgtaccgatggactaggagcgacgaaggatgagcgctaagtcttgaccgagggactggagaagttgggtgactatccgtggtgattgacacctagggacatcgaaaggcgcaaggacatggggaagcggatcatgttgccgacgacgttacagaccggtgagacacatgtctaagatgtgggggacacgtatggagtacactatccgcgaggtttcggtggctgatcctcaaaaccaactatcatgaccgttcacaagattcatcgggttttggcctcaaaacctagcaatacggttccggagggaattggaggctaggggtgatgctacattgtagtttgtga

SEQ ID NO: 42133 - DNA, 378 bp, Zea Mays
ctgcgtcgtcgctgcgagttggagcgtcactttcggaggcatcaggaaggcatgggcgtcaatgcatggctgaaaagcagcacacagcaaataaagatggagagacacactgacatcattcagatatatatgcgagaggtgcattgcatggtttcaaataatatgcacggtcgctgcatgcgttggacgcgggcttgaggcgccctcgatgccgtgcggcaatgagcggttttgggggcaacgggtcgagggtgaatgagacgtggtggacgcatggatttgggaatgatcggccggccggggtggggttctctctagcatgcagccatgtgtacgaagacgcaggtcgtgtggatcgatacgatacgacgacgccat

SEQ ID NO: 42134 - DNA, 500 bp, Zea Mays
agcaggcagtgcaacaactctctctaagaaatacgagctcaaccgatgagttaaaacttttgcccttttcggattcagcgcggaggaagaggtcgtagctgtgattttcctcatcgtaccttgtttttgagcgagaaagtagtagtcaggataggcaaatccaattacatcaaaaactttgttcaaccttctctttcctcgagcactaaaggcagtattcatggcttcgtcttctcccttcgtataagcccccaacaattcatcactggtcgcttcaacagcttaaagccattcatcatttggctcgctgaactgacttctgtaatgataagtgtatttcagataaaccaggtcgccttcacaggaaccaacagcgtcttccttcggcatctcccaatcgttaacaaggggccataccttgaaagcaatatgctcctggaccaaatctttggtgccaatgtagctacacactgtgttgaaggcaatcagacatgcttgtg

SEQ ID NO: 42135 - DNA, 342 bp, Zea Mays
ccgccatatcgattctctgaattttcgtgcgtgcgcgtatgctcgtttcaggctttcaggtacctatagaaatgctacacaaacacataaataacataatggacggagactagtacaaagcttagggtagaggcagtcgcaatcccgtagttaaatgaactggcgtaagtggcgtctcaagcatgctgtgtgccttgttggttggggtggcgtcagcggatgttgatctatatacatacatacatacgcgttcaagtcaacgctgtcgattgcatcgtaatatatagtagctaggttaggttaggtgagacgggcattttgctggagactgaagcaacgctg

SEQ ID NO: 42136 - DNA, 283 bp, Zea Mays
ggcaagatcctattgtaagatttcttctcccgactaccctctgtcgtttatgtgcggagaccgaggtgtttcttgggctatgcagtgagcagtagcgtccccaagattggtctgtctgacaaccctaatccgataagaatagcatgcccaatcgtgtcaaatggatttggtttgacctcaaagttttccagggtgttctaagggtattttggcgccattttgtcaattgggccaagtggttttgagttaaggaacatggtgaacgtgtttgagtttggtgaag

SEQ ID NO: 42137 - DNA, 433 bp, Zea Mays
tcttgaatttggaatagcgtgctggtgacccgagaggggggagagttactagtacatggttatcgtgacacttcaccatggcaagaccaccagcgatgaccggacaagctagggcgagtcactgtgacgaagtactgcgtttaggcacgtggcacccgagcggcaggcggctaactccggcgaggttatctagaccggtcgtgagataagtgggtacggcggccagggtggaacagtgtctcaagttcatcctcagcgcccgaggatcgttatccgcgttcgatcgggcgtgaattcgggtgcgagatcaccgacagtgaggggggctgaacctgtgatcttattcagtcactgtaccatggtgatcaccatcagagcgtctgacagagcaagtttcagggcccagatctcaaattttatgtgctaacttgtt

SEQ ID NO: 42138 - DNA, 669 bp, Zea Mays
atgagccaaacgacgattggctgaagtgtattgaagctaccagcgatgagctgcttggagcttactccaaggccgaagataacgctttgtccgcagccttcggaggtcggggaagaaaagactgaacagagtttttgatgcgatcgacttcatataccccgattatcgctacccgctgcgagggcaagagaaaaagaggaagattgctgcttcggtcatcccagctgagcctgtgtcgaagagcaaaagggtgaaggttctgacccaccgaccgcattatattgaatcggccgttgtgcctaaattcggcgcaaggtcctcctcaacagccgaagcaatagaaactgctccgattgcacagagcactgaagaggcgaccgtaatgccgaaggtacccatagccgagtcagtcgaggctaaggttggtaaggctgaagagtcaaagattgaagaaataataaaagtgccaaaaattctgagccctccgacagagacaaaactatcgaaggtgcaaaaggcttctgctgcaactcccaagaggaggagaatggccaacgtgctggatgctatgctggaaactatgaaggtcttaagccctgctgctacaaagaaagttgctgaatctacaaaaacgtaggccgaagccaaaactaggcaagcagaaaccga

SEQ ID NO: 42139 - DNA, 345 bp, Zea Mays
ccgaagaaggatgaagttgtggttttcaagagcttctttagagcggggctgcgatttcccctgaacgagatgataggggaagtcctaaagaacttcgaaatatatcttcatcagctgactcctaacgctattgctaggctcagcgtctttatctgggcccttagaagctaagggatgagcctagatgccgaagctttctaccaagtgcatgagctgcactatcagacgaaggccagggcagatggtcttcacaaaaattttggttgttataattttgcgtatcgaaaggatacaaagacaccaatcctcagctatcgcacaaagtggccaaccggctagaaaaat

SEQ ID NO: 42140 - DNA, 286 bp, Zea Mays
ctgatatcgggctgactgaatcaccgtattcaatcgttcttcttctagtacatcgacatcttccagcctagtagcctcagcttctgctatgttttcaaagattaaccttggtgccccgaacttgagatcatcaggtagcactgcttccgaaccatagaccataaagaaaggtgtgtttccatgcagagctcgactaggttgagttatcaggctccaaacaacatacgacagctctctgatccactttcctgcgaacttttcattcttgtcgaagactttctttctg

SEQ ID NO: 42141 - DNA, 332 bp, Zea Mays
ctgccaccacaccagctagggtgttgaggcgatcttcttcagctccacctagaacaatgctagtctggctttctcaacgaatacgcagaggaagatgtctgtacttcgtgttgtgcagctgctgccagtaggtgtggctgagggaccacagagtttgcctagtagcatcgctgaccgaagcagcgtaggtggatagcggtgttagagactcatgagatgacagagtcctgaaccctctatcacctgcattcatcaccctaacatgaatgcgagtgatgtagtagcaagcctgaggaggctcgcacactcacctggtctcatatgggggtcag

SEQ ID NO: 42142 - DNA, 421 bp, Zea Mays
gcgcgaaacagcacgcggacggcacgcgaaacaacagacgaacaaactcgacttagcgcacagacaacacgcggtggtgcacgcgattcacacgtgcgacacccgcggacaacgcatgacgacgcgtgcgagatagcacgcgaacggtgcacgaatcaacacgtgaccacgtgtgaaacagcgcgacatgcgagaaaagctaaacagacgtcacatttacattaaacaaatattagttgaaaacatcttagttggcactaaccacattaatttgcatctatatcaccatttaaaaactataccttaattttaattagaatgtcattcaaataaacctcggataaacgattaactatacaattaacgaaaacatgaccaaataatattactaacacgtagtcgaggttattacgaagtcgct

SEQ ID NO: 42143 - DNA, 520 bp, Zea Mays
gaaaatatggttgaacaacttggttcgccaaacaatagcaatatccctaaggcatttccacacatctattgggataccatccgatcccattgtcttgccccctttcatcctctttaaagcttctttgacctctgactcttggatcctacatacaaagcatctatttaaatcatcaaaggagtcatccaattaggagtccatagtttcattatcaccattgaaaagattgtcaaaatagctctgccacctctatttgatgtcttgtcctttcaccaagagttgatccatctcatccttaatgcatttaacttggtcaaggtctcttgtcttcctttcctgaatcctagccatcttatagacatcgttctccccttcctttgtacttagtattcggtaaagatcatcataggctcgaccctttgtctcacacacagctcgctttgtagttttctttgtcaccttatacctctctatgttgaccgcgctcctgtcatggaacaagcttctgtaacattctttt

SEQ ID NO: 42144 - DNA, 411 bp, Zea Mays
cgttgcacacttggtctagtacgtttattatgtcggtccggcgcgcctgtagtcggtctttgcgcggacagtttggtgtagggtttagcacgggtagtattttgaggaagacttcgatttttcgcacttgttgtgctagtctggctgcacccttaggcgacttttgcacggatagtctttttgaggaagacttcgatttttcgcacttgttgtgctagtccggctgcacccttaggcgacttttgcacggatagtctttttgaggaagacttcgatttttcgcacttgttgtgctagtccggctgcacccttaggcgacttttgcacggatagtctttttttgaggaagacttcgatttttcgcacttgttgtgctagtccggctgcacccttaggcgacttttgcgcgga

SEQ ID NO: 42145 - DNA, 330 bp, Zea Mays
ctgcattatggagacttgtgaggttacattcgatgagactgcaccttgtccatcccctgtctttgagcctgtaggtccagatcagatgggatagaccatctttgtggaggaggagcacgacgacgctgattgggttgctctcgagccaactccaccggccgccccagtcgagcctgcttccactactacggctgatggacccgaccccactccttccaccacttggggtccgctcgagccagctcctgctgagactggaggagttgaagctgctgttgagggggaggccacttcctcaagggaggctccacaacatattcaacgctgtca

SEQ ID NO: 42146 - DNA, 278 bp, Zea Mays
gttgaggctttggaaagtgagcttgcaagatatgattggacaaagggtgagtcgcttcaatcactttttgatcgcttgatggtgttggtcaataaaataagagttcttgggagtgaagattggagtgactccaaggtcacaagattgttcatgagagcttataaagaaaaggataagagtcttgcaaggatgattagggatcgtgatgactatgaggatatgacacctcatcaattatttgcaaagattcaacaacatgagtccgaagaagcccccat

SEQ ID NO: 42147 - DNA, 299 bp, Zea Mays
gttgcggaattgcgtgttgagcgcgcagtgcgccactatcaggatggtggttctcccgctcctatcgggattcagcacccttaccgctcgccgccctgtggtcgctttgattacggcacccttgactgcaggacccagatagatttggagccatagatcgatagagtcggagtctgtaataatgcttaattcagtgtcttagtcttaatcagtgttaggtagtcttagtttgcttatcagatgttttgatgcttgtcatgatgaacttgtaatgaagttggatctttgtaatgattgtc

SEQ ID NO: 42148 - DNA, 438 bp, Zea Mays
aaagatctcatgcgaggatggacttggggcactgttttgccttgtcgccgtacccacttgcaccgacgacgtcgctgcgtgaccgccaccgttgtgccgccgtttatctcgggtatgacacaccctgagtcgtttcaccacatcgtcgcaatccgtgaagactcagcaataactgtcgtagaccgtgagccagtgaatgccacgttagcgaactctggtgactcttctcccttatcaccgccagcacttctccgttcaaattcgccctcctcgcggccattctctataaattgttgcctcagcctattccgcctacttgttatgaacccagtgaaccacttctcgctcccgatcgtccaccgtagcgcactaattcggattccccccaaatccgttctccgcaccgccacgagcaccccctccatcgacccaccgtcc

SEQ ID NO: 42149 - DNA, 414 bp, Zea Mays
atagttcatgccaaaagattatatagtcggacctcatgtgtgctactgaaataatctaatcagattaatcatttttggggtgtagattaaatacatatcgtgcaggatgtaaacgttatcttcctcatgaagcctttaaaagttatctacctaaaatcctacattaatcattctcatttcagataagactgcacatatacattcccatagaatgtattctaatttctaagcaatgaatttgccaataaactccctatcagcctctgaagtacctcgtgcggtctgtaaatgttatctacctatgataatcatttcgggcgagactatttggcaatctgcataacttttgacttgaggcagaactacattgaatgatatttctatgtattggacatgttcagccatgcattttaa

SEQ ID NO: 42150 - DNA, 368 bp, Zea Mays
tgctccaggtgctcaaaccacaacaaaataccatcaaagaagacaagcacgaacctgcgaaggaaggccgaaggacatcgttcaagagcgcgtcgagaatggggccagggcattgaaagaccaaaggcatggagacgaacttgaggtggccatggcggatatgaaacgtcgtctcttcttgatgtcctcaagatgcatccacacctagtcatagccagaccacaactctagcttggtgaaatatttggtactatggagctcgtcaaggagttcatcaaccacaaagtccacaaggatgggaaacttgtccatgtatgtcttgtcatttaatgtgtggtagtcaaggcagaacctctaggagccctccg

SEQ ID NO: 42151 - DNA, 642 bp, Zea Mays
gtggatgtagggtattacgctccgacggtctgaaccactctaaactcttatgttcttcagttcatctactcggtcaggcaaaactctaggccccttatcataggacaagggcaggtgcttccgccacccgggcggaggatttcccctttgatatttagtgtgccaggtagggggtcagggttccaagcttggtcccttaattggtatgacatcccactcatccacagatgacctgaaccgtggcgtatccgccgacatttgccgcatgacggagaagcaacgtctcaagaggttcacaatcaacctcagacggtgtctcaataggcacacaaccgccatcaagcggaaggcgatgggagcctcacccacaacaaagaagtctaccgctgccaccttcccaccaatctccataatgcctgaggtcacctctgtctacccccagcctgagttaacaaggcttgaggctcacactatcggccaatagccaagcaaaggcgtgaatggctccatcggtcagccactgtattccatggttagaggagttgtctcccccgaccacaggggatggcttcttctacctaccaatgggttccaggaagccatgacaacaagggctatgcctttgttaacagggcctccttc

SEQ ID NO: 42152 - DNA, 492 bp, Zea Mays
cgaaggtatgtgttttcttccttgatccttttcttgtcatgtcagcgggacgtaagggaaaactgcaaaccctcacaaagtgcacactcgcaggtgcaggggcactcactgagctagccttctcaagcaaagctaccctagcgtctctctctgctagctcggtctgcaagccaggacaaatggtacatgcacccaacaagctagacctagatctcaactagccgtgctcatctagcaaggtggcatacttgctatgcaaactggtgatatttgacatgtgtagagcgcactcatgacatttagtctcgtcggacaccacaacttaagctttagaagactcaagttccctaagtgtgctcccgtacttggatctaaactctctcctctcacgagcagcctacctaagcaacttatcctgactagccaaagcagtgttcagctcttctatctcatcggcggaaggtaatacttcagaagtagtgttgtcaccga

SEQ ID NO: 42153 - DNA, 281 bp, Zea Mays
caatagtgtctggcaacactgtaagactgttacaaccgcaaagatcaatggttgacatcatttgacagtcgccgatggagtctggtaaacgcttgaacttctcagacttggataggttcaatgttcttaacctagttagcttaccaaagctttcaggcaaatcaaggagatcactggatgccaggtgaagagcttgtagggtccagaaatttgaaatggcttccgggagtacttcacatcttagcctcgaaatctcaagatatttcaaatgtttcgcctgg

SEQ ID NO: 42154 - DNA, 327 bp, Zea Mays
gaaccaaatgatgactggttgaaatgcattgaagctaccagcgatgagctacttgggacatattccaaggccgaagatgatgccttgtccgcagccttcggaggtcggggcaagaaaagattaaacagggtttttgatgcaattggcttcatatatcctgattagtgctaccccttgaggaaaggaaaaaagaggaaaactgccgcttcagccaccaccactgtgccaaagggaaagaaaatgaaggttctgacgcaccgaccttgatatattgaaacgaccgtagtgcctgaatttggtgaggggacctcctccactgccgaagca

SEQ ID NO: 42155 - DNA, 313 bp, Zea Mays
tctgctcttcgtttcggtggacatggctggggagtttacccagcgcgtccgcttgtgacaagcgctactagggctacaaattcttttctccccatcgcacagacattcgagaacagcatccgctgactgtactcgagcagacctagatgactctccagccaatacatttagaactgcattcacctcagcatcatcagtaacagattgcatctggaagtgggtctgtgtatcctcttcaggaaaacccctgtgcacagtgatgatggcctcaatctcattcgaagaaggtcgcactctatggcctgggttcccg

SEQ ID NO: 42156 - DNA, 331 bp, Zea Mays
cgccggcgctagggccggtaggcgtcgcggtgttgcaccaaagccagaaggcgaaacgtcgagagagtgcctgcgcgtggtgggctggcggcttaccaggtacaggagagcagggggcatctagcaaaaagcaagcaccaggttgggggagataatggatgaggcgggagggtgtaaacgcaaatatagcagggaacgttggatgtgcaatggatggtttggattgattgattgcatgcgtgcaccgaagtacacgattgcacaggatatggcctcgttaagatgtttcctaaaataggagcacctgtacctgtctgaaattttgcagata

SEQ ID NO: 42157 - DNA, 316 bp, Zea Mays
cttttcttgactttaccgagtcgatcttaaatttctggaaatccaaaacttcgggtaatgttccttacaatttttgattcatcgggatttagtatatacatatgcatttgatctctcgcgccaaagagcgtagccctaggttcttaccccatggcctcgcccttttgatctagttccaaagcttccttctcactctgctcacccccaccaagatgtctcataaagaaatagagctcatctatttcttcaccagtagtttgagtaggctcagctgcatctgtctcgagcgtaagatttgtctctttcggctctcctt

SEQ ID NO: 42158 - DNA, 516 bp, Zea Mays
gcgacttagcagcaggtcaaggcgagacaggagggaggggcacaagtgtcaactggggcgagacatgccccaactcatgcatttctagcgacccagcaggctgaggtgagacgacatgagggcgggccgtctccggcggcccaggaaggtggtccaacagtaaagcatcagagggctggggcgattcccgccagctggatccagcgacccagttgccgggtattaggcatatatctatagccggctgtcttaccttgtaggcatatatctatagccgtctgtcttaccttgtataggtgacagccttcctagtttagccttaccttgtataggtgacagccttcctagtttaggagattgtatccttgtacaccaggccacttggctatatatatgagaagtcacccacctgattgggtgtgcggtgctttcccctaaaccaactctctacatggtatcggaggaccaggatcaattcgatccaggccttccttccgctgccctctgcttcctctc

SEQ ID NO: 42159 - DNA, 433 bp, Zea Mays
aaaataaatagacaacacaaaaaacaagcacaactcaaatgaaacattataccaaattataacaggtagaatcatgaaaaaaaatcattccctcccattctcatgatcacttggggaaaaaacagaaagacaaagggcaaaagtcattgttatcttcataaacattcctcatcaaacagaaaaataggcgccccatattcagtaaatgtccgtagttgaataattatttaaggataagtagatgaaacaaaagaaaaataaggtgatcgacacaatagtggttgatggtatctggttcgttttaatccttgcaaatcaggcttgcacattgttgtgcaatggcaaaggatgtctttctctctaaccaggggataatattttgatatgcgccatgacatagctccgccacaaaaccttgttgtttcgcaaagcc

SEQ ID NO: 42160 - DNA, 508 bp, Zea Mays
gggattttattagtaagcaataagaccttaccaaatgatttaaggctataaatctcagttatacattgctcaaccagatgttgacatgttgctctctttgtcgttgaacgacatgaagcgaactttgagataaatggctagtaccctagcaacacgaagttgcgagtacatcgaaaggttattctgagaattttttcactatgttggtgtgaaaaccatagtgtgttcccgtcgaaccactttactcgttctatctaggacctctatgctcgtgtcgcatacatctctcggaattgtaaatacttatagtcactgaattgactcgggatagtcctttgacaatttggtatacactgtaagctaaatggtaaaggtcggtcctgaatggacacatacctggggtttatgtagccgaactacactgaattccaccctttggcatgcttaccattatctaccttcgatctaccaaaagtgagaagagtagacaaataactatgaaatccac

SEQ ID NO: 42161 - DNA, 366 bp, Zea Mays
agcagataagcacgggcaagtaaaaatctgggcataggatcatctcgagctcggttgcggctaagcttgccataccccccagctcgtcggtcgctcggataactctcactgccgtcgagctgtcgccgttgcgcaccacatgccttagcgctggctctcgtcacggtgaatcatgcggtgcatgtccggtgatcaccggagcacctgccacggtgaaaggccacctgtgtcaagcgccagagcccttttcccctccggtcgccagtgcgattcagtcaaattgatcaccaccgcttgagcagcctataaattggagcctcagcatgttccgctagggaattgtgtatccagtaaacccactctcag

SEQ ID NO: 42162 - DNA, 454 bp, Zea Mays
tgcattgcccaaagaagatggcgcagcagcagacaaaccccaatgctccagcaaggcaaggtgtacctcaacaggcaacaggtaatcgtggccatgcgtacaaccgtggaaaggtgaaccacttggaggccgaagcgatccaggatgcaccagatgtggcagtaggtatgttctcagtcgaatctcatccatactagtgcaactcattcatttgtcactgcaacatgggtagaaatgcataacatctcagtagggtcaatgatgccacccatgagggttaattcgatcggtggtaaagtgcaaacagataagatatgctcaaatgtaagggtggaaataaggggaatagggttcccagcgacctaatagtaatagacacccctggggtagatgtcattctagggatgaattggttaatgaagtatgaagcgaatgttagctgtgacaagaggac

SEQ ID NO: 42163 - DNA, 336 bp, Zea Mays
aattttgctcatgaggtcggagtgctcttgatgcgtaggcaataactcgattgtcttgcatcaaaacacaacctagtctagtgcccgaagcatcacaatacacatcaaatgatttggtgttgtcaggctgcgctagcacgggtgctgttgtcagatgccgcctcaaggtgtgaaaggcatcttcacatttctgaccccaatcaaacttcactccctttttcaacaactcagtcattggcttagcaattctggagaagtcaggaatgaatcgtcgatagtatcttaccagtcccagaaaactccgaatctatcgaatggtggtagggggcttccaat

SEQ ID NO: 42164 - DNA, 498 bp, Zea Mays
gtgtacaagttcatacttttttccctcttccttcttcttcggcattccccatccactagaggttggaaaagttctgtttgctaagtatgcctacactaagtccctagtgccaatatgctcagccaccactctgaattccacttcggccagttggcaggggatcctagctgcatattgcacaaaggtcgagtcattccgaagctcagctttaagggactcattaccatggtcatgagcttttccctcttcttctcactagccttcacataaaaccatttattagtccacccggtcggcataaccaatcacgaagccttaatatcctttcagtatgcaaagttatagcacccgaagttcttgtgcagaccatcggctctggcctttgtctgataatgaagttcatgcacacgacagaatccttcggcattgacactttttccttggcttcagagagcccatatataaacactgagcctaacaatagcattcggggtcagc

SEQ ID NO: 42165 - DNA, 444 bp, Zea Mays
gagctgggaaatgtcgaaggagaccatcaccaagtctagtgaaggtgaactggtccggctgaagtatacattcagatatggggataaatttgatgaaccaaacggtgactagctaaaatgcattgaagttacaagtgatgagctgcttggagcttattccaaggcagaagataatgcactatctacaaccttcggaggtcggggaaaaaagagaataaatagagtttttgacgccattggcttcgtcttcctcgactaccactacccgctgcagggacaggggaagaacagaaaagctgctgctttggatgccccagctgaacctgtgccgaaggctgcgggcaaaaagatgaaggtacttacccaccggtcgcgttacattgaaccggctgtggtgcctgagtttggcggggaggcctcttcagctgctgaatcaagagaaac

SEQ ID NO: 42166 - DNA, 274 bp, Zea Mays
gctgttgtcaaatgttgccttagtgtatgaaaggcatcctcacatttctagctccattcatacttggctcctttcttcaacaattcagtcattggcttggcaatcctagagaaatccggaataaatcgtcgataataccctgccaatcccagaaaactccgaatctgtcgtaccatggtaggaggtttccaatccatcacctcttgtaccttctcaggatcaactgatatcccatcctgagaaatggtgtgacccaaaaattttatttccttca

SEQ ID NO: 42167 - DNA, 345 bp, Zea Mays
cgaaaatcagtgtgtccaactggcagctcatcagctttcaggaatggctttagcatggtgggacaccttcagtgaggccgtcagagatgctacctaggcagaattcgaaacagccttccgtgagcaccatgtaccccaggggatagttcaactcaaggaggatgaattccgggagctaactcaaggcgggagaacagtcagtgagtatgtgcacaagttcacagagttggcccgttacgcgcctgacgatgtcagcaccgagtccaggaagatgacctgttttctgaaaggactaagacccgagcttaagaccatcctcgccagccaagacttcctcaacttctc

SEQ ID NO: 42168 - DNA, 495 bp, Zea Mays
gggcaaccagtataggcgtacaaggagcttggtttttttgttaaagattcagggagcttcagggaggtggaaggtgttttctgataaaataccgaggcgggagaggcaaccgtttgattgaagattaggggctgagatattatatgtgcaccatgtgcaccaaagcttcatgtgcacagatactttgcctattacaaatcctgttcgaaacgacgtcagctattgtatccacgtcagcccacaaactttcagccgtccaatgatttattgatggtcacagaagtgtcggacttcttgtgcttttttcccttccatacggctctcgaaacttcatccccatccattgtctctcgcccaccagtccactgcgcaccaccctgccatggacgacatggacagagtccacctcgccgtggacgacatggacagcgccgcccgctctgcagcctgttcgtcccagcgtcctatgtcgccgcgacctacaggtacttctcg

SEQ ID NO: 42169 - DNA, 737 bp, Zea Mays
gttgggttgtcgatggcctcacccaataccttggtgtggattataacgagactttaaatccggtgatcaagcttgcaactgttgataccattttgtcccttgcgctctttcaaaatcgggcgattcaccatttcgatgtcaagaataccttcttgtatggcactcgcactaagacaatctactactcacaactcataggttttgttgatcctacatagtcccatgtgatttgacatctcaacaagtccttgtatagtatgaagcaggcacctctcacttggtatagttgctttgttgtgcacttgctcatttcgggattcattaaggacaagtctgacacctccttgtttatatatcgccataggaccgatagggtatacttactattatatgtggacgtcattttcctcattgcctccaaccaggatctccttcgttgcatagcaataaacttcagaaggaattctccatgaagaatctcaatatcctccatcacttcctccgtgtggctattcaacagcgttctaagggcctttttctttcacaatgataaaacactttggatgtatctgtgcgagctggcatgaccaactgcaagttgtgcaacacacccgtcggcgctcatcccaaattctcctacacagtcagtgcacctggcgatgaccccactttgtatctcacctttactcgacccgatatatcttatgttgtgggtgtctcaccatgcatgatcctcg

SEQ ID NO: 42170 - DNA, 499 bp, Zea Mays
cctggctactgacagcgccccaccaggagcagcccgtgagggggtcctagacgcctgcatcggcgtgtgatgccacacagcatacgcagcagcagcagggcggtaagagcctcgtggtgtggaagatgtcgcctctcaccccatcgagaagtcccaggaggacgagtcatggtgtttgatgatatgtaccatcatgccgagcaaggaaaacaggtaagaaatctaagccttatcccctacctgatgcgccaaatatcagagagaaaactccagtcgggtggtagaatgcacccgcttaatcctgtgaactagggggatcctagggatttacctgattagttggatgaacacgagaacacaagggttagagtggttcaggccaccgaatcataatactctgcatctagtgtgacctgtattgcatgaggaacaagagtctttgtatgtgtctgagggtctccgagggagtatgtcccttgtaacgttatgtgccatccca

SEQ ID NO: 42171 - DNA, 317 bp, Zea Mays
gtcccctacggcacgtacacgattacaaattgaagccaactcgcaataggcacaacataattacatagcgcaatcacaaataaacaacaagcgaaggccttaatggcaccatcacacaatagtgcacatcacactatttaccctcgtagctctattgcgaagagggggagggcagcgttttcactcaatatcgcaacagagcagcgagggcaacaaaaatgtcacataggctcctccttcggaataagacccgcctcccaaaaattgaacaacatcatcctcaactcttccccctcaaacaggtcctgcaagtcccc

SEQ ID NO: 42172 - DNA, 318 bp, Zea Mays
gcacggtgaggggcaggaaatgaatagaagcacaggggggattcagtttttgtgtttcaaggctctagggcaagcatccaaggaactggattttctagccttcacagggacttacataggactgaactcataaacattaacctcaacctctctgcatgtccactacgccaggaaaggtacagggaaaaaggttggagtgcctttgctgcatgttgggcagcaaggcaacagctaaacatctgagtcagctagaagatagatttttcaccttctcaagtttatccctagtgatgtggaactagaacaggtgaaaccccc

SEQ ID NO: 42173 - DNA, 456 bp, Zea Mays
atggggaggtaaaagatctcgcaggggagcagatgtggtcgcgggggaggcttatcaccgcgcctgtagccgttgcgacgtggccgcaccgccgggttgccgtggaaactccggtgacctcggttgtgccacgccgtggcttgttactgcgtggtagtaaccgtggcacacttaagagtacaacctttgagccattgcgctggtgaacgccacgcctcctatgcgctagtgctcttccccctctccggccgccgcgcgtcttctccaaattagtcgccaccgctcacgaatcctataaattgagcgggccatcagctccgctaggtagttgtgcatccagtgaaccagctctcacttccaatcatcccctatagctccccaatttgagacttcccccaaatcggtcctaaacatcgtcttgcgtgagctcgccgtggccagcacgctataggtccg

SEQ ID NO: 42174 - DNA, 401 bp, Zea Mays
agcagccttagatggatcaaactttcccttagatgcatttcgatcagcaccaaagccttagatgcatttcgatcagcaccaaagctatgtgtgtgaagcattgctctattgggataaaagatctcattgccccagttcataactcaagatcagaaggcccccatatgttcacttgatttcaagttagcaggaagaagactacagttagttggtcgaaacatttttaatagagaatgcataaatgcatctgttgatagaaaaaacacataaaaagaaaccatgtcaacataccaacatgccctcacctccaatacttgctagagttatttggttgtgtactacaatatcaaaacaactaacactgccctctggtttgtgggtcggctgatggcgaaattaga

SEQ ID NO: 42175 - DNA, 438 bp, Zea Mays
aacccctattaaagagaggagcagtatcatcaacccccttttgcagagccagcttaaaaatgttaaagttactcaccgggtatctctcagtctctaactttgttagtgttcatggacagacaaaaagtttcaattttatctcaaaacataccaatacaggtggggtgtcctttgaactacgatactctgaaggaaacaataattaacgtacgagaatctgccaagtcagataaagaggttccactgtcaatagttgtgatatctgacagagactggtttgttggaggtaccagtaaattaacgaggatgtttatctgttatcatcatcggtgatggtattttttatcatcatatgataattattataagtgaagttttatttgtaactttggttccagcagatgctgcacaggctgataaacagttggcatacaccct

SEQ ID NO: 42176 - DNA, 358 bp, Zea Mays
tctaacaacaacttcgctttaactttaaatctccacataccctggatcggtgacaccttcagatatacgtgatcaccctccttaaactccaacggccttctccgggtatctgcgttgcttttctgtcttgactgcgtagttctcaagttctcccttatcaaccatacttgttcttctgcctcttgtatgatttccgtcccaaagaactgcctctcaccagtttgatcccaatataaaggagtcctgcattttctgccatataaagcttcaaacggtgacatcttcaaactagcctggtaactattattgtaagagaacttcggatatggtaaactcttatcccaactgccaccatgtt

SEQ ID NO: 42177 - DNA, 338 bp, Zea Mays
ccgtattgcaatccattacaccattaatgaccttcgagtaggacatttgtatagtcactacataagggacccgcccagatcacttcaagagctatatcagctcttccaaaaatttgcatgttccaaggagttgcactgtagaaagatgaaaacacacgaaggccaaaagacattgtacaacctagcagttgatcctaggcacgaaactagcaacatctagaccaccaacaaccccagatcaataggatcactcatcaacaaccgcttagcaaagggctcccttgcactggcaggaggggactgggccaatagaggccatgaccatggtagagggtcta

SEQ ID NO: 42178 - DNA, 442 bp, Zea Mays
cagtcatatagatagcactgacgttgtcacagaagacgattgtcgccgaagagatgggtgcatgaagctcctggagcagctgacgaagccaacaagtctcagccacagcgtgcgcaacagcacgatactcagcctccgcactcaaacgagaaaccatagtctgccgtttggaggaccatgagactaagttgtcgccgaggaagacacagtaccctgaggtagggtgccgagagtctagacagcccgcccaatcagcgtcggagtaggcagacaaacccgtaatgctgccggtgccgatgtgaagtccagtggagagggtacccttaacataccgcaggacccgcttgagcagcgccagatgaggctcgcgcgggtcgtgcatgaagaggcacacctgctgaacggcataggcgagatccggccgagtcagcgtgagatactg

SEQ ID NO: 42179 - DNA, 334 bp, Zea Mays
acccttgttttcgggcaggaaagcagtaatcaggataaaaaatccaatcacatcaaagaccctatttagtctcctcttaccgcgagcgccgaaggcagtggtcatagcttcgtcctctaccttcgtatgagctcccaacagttcatcgctggtagcctcaatagcctcaagccaatcatcattcggctcgtcaaattgactcctatagcgataggtgtatcttaaatagaccagaccaccttcgctggagccagcagcaatctccttcggcatctcccagtcattaacaagcggccacaccttataggcaatattctcttaaactaaatccctg

SEQ ID NO: 42180 - DNA, 365 bp, Zea Mays
acagaatcaacctcccaaacgacccaatggcggcctgcagatactctgaagaacgataatccaggggaaaccccagaagcataagccaacactcatggttgaagagaagggcacggtggttccaggcatcattgtgacggaccgcagtgaaggtagcgtccaaatactgctggggaccaagcagaaccaagttatcccgctccagcacactacggaattgcaccaacacttgtcccaaatgcgagcgctgaatggcacggacaccaaccctacgatgctcaacaaggtactccctgaccacatccctaaccgcagggaacaagacctcgtgctccggtaaaggatgaatatttataatcgcccag

SEQ ID NO: 42181 - DNA, 321 bp, Zea Mays
tgaactcggaaatttgactctcgatggaggccattgggttggtgatggatctctttgttgagatcatacattttagagaatgttgctgatggttcaaatttaaagttttatttcttgtcaacaaactgagaacacatcacatgtcaaactatcatgctagcgaacagaggttgagctattgagatgaattcacctttttaccaactactatgaatgttcatttaactgttcatataaataaggcatggacatatttgtgctttgtgggcttatattctattgtgcactccacttgtcatttctggatttttctgcttgttt

SEQ ID NO: 42182 - DNA, 569 bp, Zea Mays
gttagtagggtatagtggtcaccctaagttgagtaagcgtgagcatgttgcaccgtcttaagtcactgccgacttaagccgattgctccgttagtagggtatagtggtcaccctaagtcgagtaagcgtgagcatgttgcaccgtcttaagtcactgccgacttaagctgattgctccgttagtagggtatagtggtcaccctaagtcgagtaaatgtgagcatgttgcaccgtcttaagtcactgccgacttaagacgattgctccgttagtagggtatagtggtcaccctaagtcgagtaaacgtgagcatgttgcaccgtcttaagttattgccgacttaagccgattgctccgttagtagggtatagtggtcaccctaagtcgagtaagcatgcagattgataataaatagttcgagtgcccttgagaatgaaatctttttattgatgatgtattttccgattacagaatacaatgctgccccgatagcttttgaaatctagctaggggtaaaacttcctgagatgctctatattccatgaattccctattttcgtgccattcat

SEQ ID NO: 42183 - DNA, 341 bp, Zea Mays
tttcttgtggcggagatgaagaggcgcgctaccacaggcgacggtccacttttcgggcgcgcgtggcggttcgcgtttcccacaccaggagttcagcgctcaatccgtatgacttgtgggcccaggcccccgtgtcatagagtgggtcgcctgggcttcaggtgtgcgccgactgggatttcccgtagtgtctcggggcacgagcgggagagtttgccttgtagagggattcaccccgtgagcagcagttacgctttcgcattctctcccattctctgtgccctttcgccttcgagctctctacgcccttttgcatccgcgctctcctgctttgcgtcgcc

SEQ ID NO: 42184 - DNA, 466 bp, Zea Mays
gtttcacttctgagttgcgggtccttctgactgctgagtcgagaatattcactggcttttcccggtactggagatccttttgaatctgaattgccgctgcctcgatgcgggtttctggtacttttaggcatttgcggagttgagacacatggaacacattgtgaatatctgacatggattctggtagctcaagacggtatgccgcgggtcctattcgggaaatgacggggtagggaccgacgaaacgtggtgctagttttcctttcatttggaaccttttgacaccacgcatcggggagaccttgagataaacgaaatctccttcctcaaatctgagttcccttcgcctattgtctgcgtaactcttctgtcggctctgagcttcaagtaacctcctgcggattaaagcgactttctcttcggcctctttaacaaagtcgggtccttcaagcgtcctttcccccac

SEQ ID NO: 42185 - DNA, 303 bp, Zea Mays
gatacaccgaaccataacttcctctcccaatcaggttggattctaagaagtcatgtgttgcttgagctaagtcgttataggtaactttctcaaaatgctcataataagattgctctgatctatatgctcttcttgatgtcctcttttctaggagtaaaactacacctgcaatacgagagacatgaacccaaatattgggatcaatatttttgatcaataatgttgcactccctactattcttgaagcaacatggcaaggaggcatatgcaaaaccatggctcctccacacaatcccagattcc

SEQ ID NO: 42186 - DNA, 388 bp, Zea Mays
ggttattacagaccattacagtgtgattaggtattacacggacggacacaccattaactctacccacatagtggcttacaagtgggaccatgcggcctagggcggttttacacgggcccaacgtcttaacaacgcactggtggcgacgtgaagccttcgtactccacgcgccaggtcttcggtagttggtgaggccttcaccattcctggctctaacggggaccggcaaggccttcgcttgcttcgtacgctccctctgtcttggggccttcgctccatcagtcttcgtctgcctttgcttttcctccatcatgatttgtccgtcccgaaacagtcgatcgagggggtggtacgccttcgctccaacacatttcatattacatttttc

SEQ ID NO: 42187 - DNA, 348 bp, Zea Mays
ctagttttgtgggctgaccagctaactcaagcccaaagacgtcacaagacttgaagtccaaggcatcatgacggtcgtttatgatatggcagacacaaaactctatgttgcacacaagtcagaacaaatttgtgagcatgcacgattaagtgatgatgaggaacccagtctcgtcgtctatataaggcaggtaaggtacccactacaaaatggaagatcctcgtataacctgagagagcattctcatcttccagacactttctaacctcaaattcagagcaagaatatctccacaacacacaagacgcggggtattacgcattccagtggcctgaacttgtataaccc

SEQ ID NO: 42188 - DNA, 535 bp, Zea Mays
cttgcttggagccttttcttcatttagactaagaaagagtgcaaagagaactcagtagatggatatcatacaactgtatcttcttggcaatttactttaagatgtccagtgaacaagtataaatgaataaactttagatggcttccccatggtgttttctttgagcgtgcatagagttttgcttcggtttacatagtattctttgatgagttttgcttcggtttacatagtattctttgatgctgctaatgcctatatttgtttcgaatataattatgtacaatgggtactgatggtgctaattcaataggatcaaatgagttctgagtcatcttctgatacatctgggtcatcaacttcaaaaacctctgggtccacaagtacctcatcctccactagcttgcattcagaggacattgtcgaaaaaggttcttgtacttctgccaggcatagaacgaaacgaggtcacgccaaatgcaagaagctagaaaaaggaggtccccgtcgtcttacgtttgataaaaatgggattgcc

SEQ ID NO: 42189 - DNA, 289 bp, Zea Mays
ggaacataatggatgtaatacttggagcaactaatgctagtcgccagtgcaatctccttgtaccctaatattcgtggtctacgtagcattggcgtccagtggaagcttccctggcaacgtacgagtgatgatgatcgtggcgcatgcgatagtatggacgtgccttctaccacgggaatggacaggcatgccacatgcgggatggtctggtcgccgtccgccagcagagtgacagggcacattaaatgttgaggcggcacatcgcttgccagtggagtagacagggcgc

SEQ ID NO: 42190 - DNA, 357 bp, Zea Mays
cgaggagagtagtggtgttccttctctagctttgtctgccctcgttggtctgcaagaattgtctctggcaaattttgatcagactctcaaagatatggtgccagaagatctattgtcggagccggcagatggtgggatgatggaaatttgtgttgatgtgcttgatgccgggttggagttatcccgagcggcgtctcgtgcctcatcgaccttggagcgcggtcttaagagtcaggaggctggtctggattgctctgttcccatggaagtggttgaaggtccttcagccttagaggtagctgttagagagggctcagtcctcaaggatggcgctagcgtttacccagcccccgaggg

SEQ ID NO: 42191 - DNA, 404 bp, Zea Mays
tcataagaggccatactttgaaagcaatgtgttcttttaccaaatccctggtaccgatgtaagtacatatgatgttgaaagccattaggcacgcttgcacctcattcccaattgcaattgatggtcttctaatgccaaagcgtgaccatatgggacgttgaatgatgcccctcacatcctccctatgattcatatcattctttacttagaaccattgcttcatccaagagcccgaccacttcttctgaaatgttggcacatgataatttgcctcagagcagagcacaaagctgtaacatccgaagttgttatggtattgttcctttccggttgcctttgtctggtaggataactcatgaatattgcagaaacacctagcatccagctctaccccttgactcctc

SEQ ID NO: 42192 - DNA, 304 bp, Zea Mays
gggagggtctatatccacagtgtagttcgaatggttcgtgattagattaatttaggctagagtccttgtcctttgcttaattattctaatgaacttcacgagaagctgttggaaatcacctaggaacgggtattgatcttatatatacacacactactatattaaggctacaagggtagcctaccactcctggttctgtctcccataaatctacacggtccatctatatccatcaaatctacaccgttcgtttgtgcgcctcgtccccccgcctgatctgccaacatcccacgttcgttcgtgc

SEQ ID NO: 42193 - DNA, 465 bp, Zea Mays
gcgcaatagcggtggcgctcaatttggccgagaactgctggcggccggagagggggaggattactggtgcagtggattcgtggcaacaatcgcggcagcgctcaccagcgatgatcagatggttatagtgagtcacggcgacgcgacggatgtgtcctgatacgtggcgtaaggccgcgagacgatgatcactggcgatctcatctaattccaccgcggcgagcttggtacggcgaccgaaattgtttactggccggggcttatccatggcggcgtgctacgagcgttatccgatcaacctgagcacaaatcaagacggcgacagcacgaatcacggcagagatcatcggtggtgagctgagctgtaaatctgatctgtttcaggttactgtaccatcgcgagttcctttcagtgcacctgacagtcaaagtttgggctcaaatctctctcaaatttctatggca

SEQ ID NO: 42194 - DNA, 286 bp, Zea Mays
gcacaaccagcttgcctaaaccaccccattggcggtagctcgacattccgtctcagcactagagcgggagaccacgggtgacgcttagaggaccaagagataaggttggccctaagaaatagcgcataaccgaaggttgatcgacaagtatctaggcatctagcctaatcaacatctgtgtagacgactagctcaggtgtaggaacactgaagatggagcccatagtcgatagtaccctggaggtaatgaaggatctgcttgactgctcttaggtgtgactttcgg

SEQ ID NO: 42195 - DNA, 386 bp, Zea Mays
gaaatacttcatttcaaactttaaagttaacagcttttgtacctttatactgttgtatgcaaggctatcagcaagatcatccttcgacatggccgaaaggccttcctcaagcttcggaaatcccatacttttggctatttctcggcaaaccgatatttctttgttgtccgggagacagtataggaagtcatctttgtcagtgccattgaacactaaggctcccttcggatattttagtttctgggcgtagtgtctggcttctaagatttcttctttggataattttttcccgaagcatgtcgaataatgtaatcaacatcttcggctagagcttcgggggcaggagattttgctttttctatcatgccttgccccaccgccatgcc

SEQ ID NO: 42196 - DNA, 454 bp, Zea Mays
gttgtggtctaggtcgtcagggtcgatagagctctagggaagttgcattgtagtttgttcgagcttcgatggtcctggtgacgccggtgggaagtcagggtgactctggtgtggctcaacgagcaccagggcttatgggctgcgacgacactggtggcatgaagaaggtgttcgggaagctaggagtgtgagctgagagggtgtgaaggtctgcattttatatgtgtgcaccattattagccagagacagctccaacgtgagcagcgtggctggcacatcggttgaatatcggtgagttcgtgtctttgaatggcatgatgtcggggaagtaaatggggggacgactgccatgaatgcttatcgcattcgctctcaggtgatggggcctaggctgatgatcgagctgcggatggcgagattgatggtgacatgcatgtcaaggagcagtgagag

SEQ ID NO: 42197 - DNA, 334 bp, Zea Mays
gcaatagatgcgtgattaccctatggagccacgggtgcactcaatttatagtgatcatgagtggcggccagtgaatttgggttggagatcagctcacggcgacttggatattttaccgtgctctgcgtatcgtggtgcgcgtggagaaaacggtgccggaggggtaactggctatcctccacgatccctacgacgtggagaatgctttgcggcgtggcacggttgagtgaaacggcgagttctggtgaggataaactcggtcggccgcgcggcaagtggacaggatggccggaccagctagcaatcacaatccatcccgcgcccgatcttttta

SEQ ID NO: 42198 - DNA, 374 bp, Zea Mays
gggagaccaagatagaagcaagggaaataagatatctcacagggcagcaggttttgcaccaccataatgtcatcctctgagcactgaataggataaacatttgatttattctcattattgtgtagacccgaagcttctccaaatggacgcaggatatccattgtgatcgaaatgtcagatgcagaagggggaagcaacaacaccacgtcgtccgcatacatggagatccgatggagcctggatggtcttgacagtggctgcaatagtcctgcatcttctgcttgtgaaaataagaagcccaggacatccatagcaaggataaaaagcatggcagaaagaggatctccctgcctaagccctctctgatgcttgat

SEQ ID NO: 42199 - DNA, 383 bp, Zea Mays
gtatattattcgaaccctgcaatggtgtactggtattggatggtggaatgcaatcaggaaatgggtttacttctggtggcctaagaggattcctcacaaaattcaaataatgattccagtacatagctgattgagaggccggaatcatggaagattgggaagaagtattccctgtatgcatgggtgcccacatagttgtcggaccttgagcagggtttggaaaattcagatttcccacgaggttacaatccatagcactctgctgcatgtaagccgtgggccacatagggggtggaggaacaaactgctggccaattgatgagtttgacatggactgagaagaagtcgcattgtttgatgggtcctttctagtaagggtggac

SEQ ID NO: 42200 - DNA, 548 bp, Zea Mays
gtagttctctattttgtaaaccaagtctgtttgtgtttcagagaggtgtggtgttcagatttgagcgctcagagaggtgtcttccatctcatactcgagcatcgcaagatctgggcggggctggcgcgtagaatgagaagtactcgagcatcggaagatccgggcggggctggcgcgtagaatgggaagaatgagatggcgaggtggtcctgcacttgcgatgggatgcgggccgatggccatggcagcgaggcgtggattgcgtttagggcgcggaggatatgggcggggcatccgcggtgcatgggaagaaagcgatgggtggtcctgcgcgtcgttggcactaagattcctgcgtgttggattgctgtgaggcgtggatagtagcgaagggacgggtttccttctgtggcagtaacgggatttttatttccatggctgatgcattaatcggtgaggggattgcggcgaggatcatgcggatgcaggggtagaggggagagggcgcacacgtggaagaagggagacactaacatgtgggtcgatgc

SEQ ID NO: 42201 - DNA, 567 bp, Zea Mays
tggatactacctgtatattatacgatacacaagttaaattgtaaataaattagaacgtacttatataattggtataaactgggcaaggaaccctaccaataaaactactagaaactgggcaaggacgcaaggtgccagcgccatcacccatcaccatcaatccatcatactaatactttaataaattaatagaaaaacaaagaacactcttgcggtcttgcctgcacgtcttgggtctcttgggactccggacttgggcgattgggcaaagctcgtaacctgctctcggctaatcgacttggcaatggcagctccgcccgaccgtccctgttgaatgatgaatgctgactctttctgctttccgcccgaccgtaggccgcttgcgatggaagttggaagacaagaggacgcagcggcgacccttcatcgagaaggaatatgaaagcgcatgagtgcaggagtaggctgcggcgtcgagtgtgctgggccgtaatctgtgtgggtccgccagctgtttgttagctattgggcttttgggatgatgtccttgtttacaatgggttgttg

SEQ ID NO: 42202 - DNA, 301 bp, Zea Mays
tgcaaacactaggcatgatttattaccgtctaatgatgcgctagaattcccgtccgcggtgacccatggatccgcgatggtgatggagctacgacgagtaattgctgctcctcccgtcgcccatagctccaggaatcgaaacacgcgcgtcaggtactcctcgccgacctccccggcggcggaaccttcaacccgcccggctatggcgaggaaaggtgcagcggatgagacggccgatggtggtgcacatgcttctaggatctccaattcagcgcgcacaagaccccagaattgattctgg

SEQ ID NO: 42203 - DNA, 838 bp, Zea Mays
aaaagaaataggaagaatgacgaatatgaaaatgaagatttggatgcagaacgatctggtcccaaatctcaaagaaaggtggagggtactggtgatgattcaccagggattgctgccatgtcctcattcaattgtaacgagggggacagcgatcctgagaaagagagatataatgaaaggggaaaatctgaaagagtattgaccttcaattctaaggaaggagcagctcatgaagctagtacattccctagcaaagagaagtataacttatgcaaaccaatatcagagcttgatctgtcaaattgtcagtggtgcactccaagttaccgacttttgcctaaaaacgtgagctgatctaactctttgtattttatagtaataatgtcttccatgtcatcacatatttttgcttgtcctttacagtatccagtaccttctgcaagcaaaaggactgacattgaagcttcagtgctgaatgatttctgtgtattggtgacctcaggaagtggagcgtttaagcatatgcgcaaaaatcagtatgaagaaatcttgtttatatgtgaagatgacatgtatggtgtttttgttctctgtttgactattgcctaattgttgctacattgcagcacttaatatgttcacaatcaccgtgtttgtaaggcatttttatcaaaacttgtgaattggatgatttcaggtttgagctggacgtgctgttggaatctgttagtgttacaattaagcgtgttgaggagttggtggaaagtatggaaggcaactcactgaaacctgatagctctatccacctcgatgaacatttgactagtaagcatctgca

SEQ ID NO: 42204 - DNA, 466 bp, Zea Mays
ggcggtgttgctggctcagatgcaacaggaagtattggagaagagcagaccgagaggagttcgccaaggttatgtgccaaaacaataccaacctggcaataagggggaaggaaaggtacagccagttggtggagatctatcgagagaaagagaactcagggagtaccgaagagtcaatgggctttgctatgcctgtggtgagaagttcgagcctggccatatcctcaaatgtgctaagagggggcgagttcagctgaatgtcatgagggatgaggaggaaccggaagttctgtctgatgaattgttacagaaattggaacaagaagatgaacagagagagatatgttgtcatctatcttttcaggctatatccggttctgacagtatttacagtatgagggtgaggtctattgtgggcaaacaagtgatgcttatgctggtggattcaggcagttcctccactttc

SEQ ID NO: 42205 - DNA, 643 bp, Zea Mays
tgtcatatgtgtacaactgggcaaattttggttgtgccaatcttatggtgcaccaccccattaattttgaaaacgtagggtgcagtgccgttatttatcgttctatcgatagctgcaccgaaagaggtgaatgcaaacaatgaattgtaggaccggataagcctcaagaaatgcctcgagcgagtacctccatcaaatttcaaaagattagcaagcaaaggtggtggacgctcaaacggttttaggttcactttccctcctctgcagcaaaggttgtacacaattttcctctaggtggagcaggaatcgtttttaacacgctcttggaaccagaaaacagcatggcagtatgggcatacatgttcaggtccaccgtagtatgacctctcagggtaggcatctacacaggaagaagagaaagggtagcaccaaagcaaagcaggaataatgttaccaggaatgttgggcataatacacaccttttagagcatctacgtatgacctgtccaaaggaagcgtggttgacaatggctcgtcaggtaccaggtgatgcactctactgcgccggcgtcgcctattggatgcggcaagcgctgaagggaatgacattatagatctactacctatgccgacataagcatca

SEQ ID NO: 42206 - DNA, 452 bp, Zea Mays
tgggctccaaacggtgtgcaaggtgggcgcatggtttatactgttcgggcagaatgtccctacatccagtcttcgatggctcacgctaccggcacctctgttgctcaatgctcgtagtaggggttatgagcgggttacaagcgagcgagagagggaggaaaggctcccaagtctcttatgagggagtgtccctaaagactacggaactagagtcctacgctaagccttggctatggcctccaggtcttcaagtctctccaggcgtatgtggctgcctcctattgagtgtcttctatcttcggtcttcttcagttcgtcttggtctgtctagattcatccaacccatccccttattcatgtggccgacctcctccttttataggccaaggcaggggtcagcggtcggtggccctttgagaaggagccactattccgtggtaaaaccgagttcc

SEQ ID NO: 42207 - DNA, 306 bp, Zea Mays
gagaaatgccaagaaagctttgatcaattgaaggagagattgatgtcaccgtttgaggctttgtatggcagaaagtgcaggactccacggtattgggatcagactggtgaaaggcagttattcgggcctgagattatacaagaagcagaggagcaagtccagcaaataagggagaatttgagaactgcacagtcaaggcagaaaagctatgctgacacccggaggagactgcttgagtttaaggagggagattatgtctatttgaaggtgtcaccactccggggtatgagaagatttaaagtcaag

SEQ ID NO: 42208 - DNA, 698 bp, Zea Mays
catttgacaacatcgcagatgtggagaaattttacaaaggttatgcacatgatggtgggttctcagttcgtattggacaacataagaaggttaatgatgaaattaaaggcaaatatttttattgtgcaagagaagggtatagagtacagaagcgcaaaaaagatattgatcaatctggaaaaaagagaaagaagagacataacgtgatggaaacaaggtgtgggtgtgcggcacacatctatgtgaaccttggtaccgacaagaagtacacgatttcttcaatggttgagcagcataatcatggtcttgtatcgccgctccaccgacattttcttcgatccaaccgtcatgttacagagagggcgaagagtactttgtacaattgccataaagctagtattggcacatcccttgcattcagattgatgcatgttagtgatgggggatttcaaaatgttgggtgtacactgagtgatctcaaaaactattaccgtgacctaaggacaaaaatcaaggatgcagatgcccagatatttgtgtctcagctcaagaggaagaaggaagtcaattctgcatttttttatgactttgaagtggatgatcatggaagactaatgcgagtgttttgggttgatgccataagtaggaaaaattatagtatttttggtgatgtggtttctcttgatgcaacatattct

SEQ ID NO: 42209 - DNA, 349 bp, Zea Mays
tgatagctctgttgaccatggtattgaagtaattatgagtggtgacctcaaccaaggccttgatctcagagttaagaccacctagaaaggcttcctgcttcttctcatcattgttgacatcctcaagggcataacaggacaattctataaacttgtatagatactccgtcacggacatggcaccctgatgaagcttcctgaactcttctttcttaagcttcatcacactgctaggaatgtgttgctctctaaagatcttgacaaagtcagtccaaatcatatctgcagcgtcttcattaacttccctgtaactttgccaccaagcaagggatcgtcccttcaattgttg

SEQ ID NO: 42210 - DNA, 287 bp, Zea Mays
caaccttcggctataaaggagaagactggaggtcagaagagacgaaggattgtcaatgttatgcacgctattgagcggacaccacctctagcctcggcttctagaataatgcctgttgcaagtaccagggctgagaccactaccgaagctgaaactgttgtcgaagctgctaatcttatgagcacaatgtcaggaattgacaagctgatatcagatatggtcgcagaggaggcagttgcgaccgcagaggaaattgtggccgcggtgcctggcaaagataaagaagt

SEQ ID NO: 42211 - DNA, 460 bp, Zea Mays
attcaggcctgatcagtggcatggtgtgggtggaaacctggacggcattacaacattcactaacaatacggccatgttttaattacaaacttttaagcatatcttcatgtgtcacaccgctggtcatcaggaacaacgatagtgtttccctgcatctgtaaaaaaacacgtcatataggcaatatactactcactctgtatcaaatcagaacgtcctcctcgctgctatctccttcttcaacccttcttctacctgaacatatctcttctctccgatattcccttctaggtgctaacatggagaagccgatgaagcgggtgatgaagacccccctaccagcacaaggtcctggagaagaccagatttgtgattgatcttggttctgttgatgttcgtcgtcttcatgggtaagctgaaaggttccttctctgttttgttgtgttcagtttggtgtctaaa

SEQ ID NO: 42212 - DNA, 615 bp, Zea Mays
gtgactttttgtgggagcacattgtatcaaagttatagatggattatagctctacaactttgctgcagaaagttggcataggtttcacacaaaatcaggagtgaattgtgctccaagaagctctgtcaggtcgactgactgaaggaacgccatggtacagtgctcggatatggataagactgccagcaccggatgttcaccgccggcgacctctttgccgggattggtgccgcggccgtgtggattttgctcaccctgaaaagatctcaccgtggataaacttggagcacattggccactcggtcactcctccacttaccggcgacgtggccgcacggccatcaccggcgtgccgccgttctttgctgttatgccacgccgtcggtcatcttaccacgtcgcagtggattaccatacgccgtccttctattacctaaggccttgccacgacgttcgccacctatcgcacgcaccagtgaactctctcccctccggccgccagctcgccgtgatcaaattgtgagccaccgcccccggagtctataaattgagtgcaccatcagcttcgttatgtattcgagcatctagcgcacccttctgcacctcaaatcctcc

SEQ ID NO: 42213 - DNA, 306 bp, Zea Mays
gtttgtgttggccgatttactagaaatcatcggcccttcgttattttgttgtacgatgacatctgttgttcctatttcaatgacgtccccttttatcttactgttggacgtcgtagctatataccccctgccggattagtcagcctttggggccgagtggttcggcaatcttgctgggcctgtgctcgtgaaccagattgaggggctctcaatcggtcttgtactggaggcgtcaacctggcaaagacagatgactggggtgccccccaagcggagtattgtggtgtcccgaaaggatatggtgcc

SEQ ID NO: 42214 - DNA, 320 bp, Zea Mays
gaccaaccaagtactggaggatatgctaagagcttgcgctcttaaacatggtggtagttgggataagagcttaccatatgcggagttctcatacaataatagctaccaggccagtttgaagatgtcaccatttgaggctctatatggcagaaagtgtaggactccactgtattgggatcaaactggtgaatgacagttctttgggcctgaagttatacaagaggcagaagaacaagtgtgaatgataagggagaatttgagaactgcgcagtcaaggcagaaaagctatgcggatacccggagaagactgctagagttta

SEQ ID NO: 42215 - DNA, 291 bp, Zea Mays
gttcctctttgtatacaaagatggagaccatgttgcctagttgcttctcgatgttgacgacatcatccaaaccgcatcctcaacgcatctgctacaacacttcaccgtgcgtctctacattgagttcacctcggcatctctgtcacacgctccattgacgacttcttcctctcccagcaacaatatgctattgaccttctgcagttggctggcatggccgagtgtcactttacatcatctctcgttgacacttgtgccaagctctcttccatcgatgacgcacctgctgct

SEQ ID NO: 42216 - DNA, 300 bp, Zea Mays
ctacgctatgcagaagtgagggaaaaacactgggagcgaactcaccgaagacggcgaccgagatgatgctggcaacgacgaggggcgataacgcggtggaggaggaacgccgacgagaaattgcccaagcgtgaggcgatttcacacacctgaggctctcggtttgagtacagcgaccccaggcggaggtccaagacacttcgacggaactgatttggcgagggaccgcggttggactggtgctgatgtcgccctcccacacggcgatagctgtagtttacgcgacacagcctggcgaat

SEQ ID NO: 42217 - DNA, 309 bp, Zea Mays
acttcatccagaatttgttggcggacctcttcattctttggcacaactacgcggttgttgaaccatacaacaccttgatcgtcttctttgaaacatttggcctttccagcccttatcttctcacggatgtgtttcataccctcatcatctttctgtgcgtcaattatcctttgtaagatgactgactccagcttcaaatgatttgaagtcccatgctgaatcattcccaggtttaatttctccatctcctggcataatgtaatgtcagaagtcctcactgttagacaatggcaggaagccttgcgactg

SEQ ID NO: 42218 - DNA, 413 bp, Zea Mays
ggacaatctaaggcacgggcggttgcattgggtgcgtgactacctagcggagctcactgggacagcaatttataatttcatcggcggtggcgtgctggcggccggagagaaggacaagtcaccggagccacataacgtggcatttaccggggcagtgtctcaggcgatgaacaaactatctaaagcggtctactgcgacgtggtaaggctttgaggcacgcagccgggccagataacggcaaactctggtgagaacagtggccggaggttatctatggcgcgatatttcttaccccttctttgttatccatcatagccagacacgaatcaccacggcggcacgaatccggacgcacggtcgccggcggtgaggcatctgatgcagacgttctgatccgaacaatgtaccatcg

SEQ ID NO: 42219 - DNA, 506 bp, Zea Mays
atttattcttgatagtcacttgattcaaagcgtgataatccacacatagccgctttcttttatccttcttctcaacaaacaatactggggaagcccatggagacctgctaggcctaattaaacccttagccagcaaatcatccaattgtcgcttcaattcaacctgctcctttggggccattcgatacggagccttatgaatgggctgtgtacccggaatcagcttaatctcaaaagctgcatcgcgttccagaggaatgcttggaagctctgtcggaaacacgttagcaaagtcacacaccactcggatgtcctgcacccgcaaggcagcctcaccctccaccaccatggagaaaaagattcccgacttcctggaccggtgatccggaagcaattgcgccaacaaggacaacgtaaacttaggggaacttcccaagaataccacctccctacctgacggcgcctgcaataacactgtcttccaaaaacaggatataactgtgcga

SEQ ID NO: 42220 - DNA, 401 bp, Zea Mays
agataatcaccattagtggataagaacatatgacagttagttagatggatagctgccttatcttatcataagattattagatcttgatagattagatggatagctcccttatcttatcggatggttgttaagatgtactaggcggccttggctatataatgccagggaagaaaggaataaagcaagcaatttgcaaccaatctggactcacctgcgcctcctgttccctcccgcagcctgtgatcacgacgcccaagcgccaaccacaacctgcgaccaatcgcttgccagcccctcatctcttttccctatgccatcttcccgagagggcaaggaaccctaacaagtgtagtgtttacttgtattgaatttggccatcaagtttcagaacttcctctcag

SEQ ID NO: 42221 - DNA, 385 bp, Zea Mays
tattcctgtgcaggttacggctgccactctgggccagcgaaacgactgttgggcttcggcgttctcctgctccttcgaggtcctggcctggacggcccatcatcctcagcattctccttcccgccatgcttggacgccatcaggttgctgacattttccctccgtagacagccagcttgtccccaagctggagcgaacgggaagcgacgtttgatgtcagcttcctcctcccatgtggccagtgaagtatgccagcccgtccatttgatcagcagctgggtgatgactttgccggcgcggtgtcgtagtctggtatcgaggactgtttctggtatctgcagattatgaactgagtcaggcagagaggggctcaccggggtatgtg

SEQ ID NO: 42222 - DNA, 288 bp, Zea Mays
ctgggataattgatccccatggaattttaggagctcttgactatgaaacgatgcattggatagcaccaaatttgcattggaagcaatctatgtctaattcaggaaagacataaatactgtaattaattgctaactgtttgtggggttaacgaatattgttataatgttgcattgctagtgtggtctttcatatctgctgtgtctgaatctaatttatgtaatatctggccatgcttattggcagctgaaaatgttacaggctcagcagcggcggtggcagcagatatt

SEQ ID NO: 42223 - DNA, 329 bp, Zea Mays
cagaattgaagatttatttgatcagttgagaggagccagtgtgttctcaaagatagatctaaggtcaggttaccatcagctcagaatccgaccctcaaatataccgaagacaacattcatcaccaagtatggattatatgagttcatggttatgtcattcggattaacgaatgcgccagcttacttcatgtacctgatgaacagtgtgttcatggactacctcgacaagtttgtagtggtgttcattgatgatattcttgtatattcctagaatgagcaagagcatgaggaacatttgaggaaagtacttcagaggctatgagattgcc

SEQ ID NO: 42224 - DNA, 646 bp, Zea Mays
aacgatgattatccaagtctgccatggtaaagcgatggctcctctctaagatagtcaaagaattgttggcgtcgcgatacaacctatcaaggttatcgcgagaagctgcaagggcatgtttttcttcctgcagacaagaatcagctctcaaatacccagcgggcagtaagaacacagcagagaaagtcaaagcaaacttacctcgttagccaccctttcagagtcaagctgagcactgagagaggaattcaataagttggcgtcgtctaaagaagcagaaactcgagccacgtccatctgaccttgagagtacttctcctcgagctcagagtaccgccagaccatatctagcaagaaatggttgaagaaggacactcagtaaaaagcagactaatcaagtggccaaagaggaagtagaggcactaaccagcatttgtcatctccaactcagatacccgccgctaaagtagcactggattccaatgcattagagacagagctctttctgggacagaagcaccttgtgatctcagctgatcagccatctcgtcaaccaaagcctggcattgaaaacaagtgagtgcaaagacaatatttcgcccaaagtttagccagatcaggaaaaaccaagttacctgaagattgg

SEQ ID NO: 42225 - DNA, 305 bp, Zea Mays
gcttttgatgtctactgcctaccacccccaaacagatgggcaaacggaaagagtcaaccagtgtttggagatgttcttgagatgttccgtgcatgcttcaccctctaagtggaaagcctggttgcctttagctgagtactggtataatacttcctaccatacatcattgggttgttctccttttaaggtggtgtatggttatgagcctccagtggctgctgccccagctttagacacttccagtgagactcaggtgtctgaatttctggagactcgactacgtcacatggagatgctgaaagtgc

SEQ ID NO: 42226 - DNA, 339 bp, Zea Mays
ttacatactatatctcatgcatgctagctatcttatatcttgtaactgagtaactgccattctatctgcatgtctgatatggacaaaatatcatagattaatatgtggctactcatactggtctgtttaattctagccagttggattgtattgagtaatatatctttgttaaaaaaatccatggtgtatttgttttggaaaaacaactctgtaaacgctgaccaacaattggtcacattatccccttcccttttggggctgtgtgcttgtaactcttgtagtctattgtgcataattgtttgtatttgtcaaaaatgaccatgctgtgtggaaatattc

SEQ ID NO: 42227 - DNA, 433 bp, Zea Mays
tagcgggcgaacgggagtgttccggcggagattgcgcagcccttttttccagctaatttcccatgcccgtagcggcggggaatagataggactatacagctcatctataatctattgcggggacagccagtgccaggaaatcattctcggaaggatcctgaagccaaccacgagtagaacagcatgtcgacctccttggcatggcagaggagtatcatcacatcggcttatctttcgaggaccgttccttccgatgagatgcggcaggcagaggataagcaaagggggtggggccgcaccagaaactgatctttcgaaccgtacgcacgagacggtcggcatccatccttcccaggatccggatcatgccatccccatatccgcgagacgtcaggcacagcccaaggtcgtctgccgcacgacgacaaacccg

SEQ ID NO: 42228 - DNA, 368 bp, Zea Mays
gcggagtaaagatcttggcaccagataggctcgggctcggtcgcggatgagtttcaccgtacccacttgctcgtcgatcagccgggatagacctcaccgccgttggccacttaccatggtcctcgttcgctgcaggctgggaccctgccgccctcgtctccgcatacaacaccatggcgttggctccaccaccctctgactgggtcatcgactccggtgcatcccatcacaccactcccaccacatgcatgtcatctcgctcacagccacctccccacacacatcctacctcgattgtcattggcaacggttccactctatcattcacctcagtaggttcctcggtactccttggaccgttctacctc

SEQ ID NO: 42229 - DNA, 338 bp, Zea Mays
aaaaagaccacatcgacggtctttggcattcgaccactccgaagtcactgcgagaggaagcgtagactaccctcccgtgcgacactccgcgcaaaagtcgcctaagggtgcagctggaatagcacaacaagtgcgttaattgaagtcttttatttaaaagacactccacgcaaaagtcgcctaagggtgcaaccggaatagcacaacaagtgcgttaatcgaagtcttttatttaaaagacactccgcgcaaaagtcgcccacgggtgcagccggatcagcacaggcgtgcgaacacggccaacaggccacatcaccatacaaattacagttacatac

SEQ ID NO: 42230 - DNA, 381 bp, Zea Mays
ttaggcctagcaggtcaccatgggcttccccggtattgtttgttgagaagaaggataaaagcaagaggttatgtgtggtttatcgtgctttgaatcaagtgacaattaagaataaatatctgctaccccgtattgaggtctctttgaacagttgaggggtgcccaggtgttctctaaaattgatttgaactatggttatcatcaattgaggatttgtgaggaggatattgagaagagagccttttgcaccaggtatgggcattatgagttcatagtcatgtcttttggcttcactaatgcccctgctgcttttatggaagcaatgaataagatgttacatgagttcttggacgactttgtggtcgtgttcctggatgatat

SEQ ID NO: 42231 - DNA, 287 bp, Zea Mays
agcaatttcaaatgggatgttatacagaatattggaaatccttcattgaaacgagcttcctactcatgtatctttatatatttttccagcatgctcttatcatattaatacgaggtagtggtgttcgttttaaactcttgcatcttgcaacattactcctgcagaaatgatgtcactgactcattgtataatttctcttatggatatatgattaaagaatggagctgctctggatatcactaagactacaccttttttctctactacttattacgactgcaagggtt

SEQ ID NO: 42232 - DNA, 731 bp, Zea Mays
tctttatgaggctctggtattcatgcacacaaattcttctattctctgaccaatagttattatttcacctctcttcaggaaattcctgctgcctttgtttcattcagatctcgatatagcgctgcaaatgcagtttacattagacagtcagacaacccaactgagtggcaaactgaggaagctcctgatcctcatgacgtttattggcctttcttttctacatccttcatggaaagatggattgccaagtttgtagtatttgtagcttcagttctcctgatacttgtctttctcctagttgtggcatttgttcaaggactcacctatctggaacaactagagaagtggttgccttttctgaggaacatactggaaatgttagttctctcatgagtttggtctcttgttatttataatgctttagtacactacaggtattctcactatgaatattatgttgttttgtccttgcagtgctgttgtgagtcaactggttacaggatatcttcccagtgttattcttcacgttctttcatcttgtgtgccctcaataatgaagttattttcaactatgcaaggatttgtttctgttagtgggattgagcaaagtgcttgcaataagatgcttcggtttacaatatggactgcgttctttgccaatgttctcactggttcagccttagttcaattcgagattttccttaatccaaaggagctaccttcaaaacttg

SEQ ID NO: 42233 - DNA, 516 bp, Zea Mays
cctacggtgcttcactgggtatcgaccccgacaatggctgtgttggctgccgtgggctgagtacatctacaacaccgcttaccagtcctcactccacgagacaccattccgggtggtctacggacgcaacccgccctccatccgctcctacgagcccggtgagactcgtgtggcggctatcgcccaggagatggaagatcatgcggccttcctcgacgatgtcaggtaccgactcgaacaggcacaagcagtacaaaagaaacactacgacaagcatcaccgccaggtgtcctaccaggagggcgactgggctcttcttcggctccgtcagtgcccagccgcatccccgccgcatgcgcccaagggaaaacccaagcctcattacgtcggaccataccgcatcacggaagtcatcaacgacgtaactgtgcgtctgcagcttccgctgggagcccatcttcacgatgtgttccatgtcggcgtgctcaagaagttcgtaggcaccccaccagccac

SEQ ID NO: 42234 - DNA, 310 bp, Zea Mays
cacatatcatttttatgcttacatagtttatgttttcaatgatatgctgaagttggtcttgatgtccacaagaagcatgtagtaagcagggaagatggtttgtacgtgaccaaggagcatgggatagataaccttgaacctacgtacaatatcccttcagagatttgtttggttagctccaggacaactcgaacaagccgatctcaatctcacactgaacagaaccctctttccaaagaggtttatgtcatagaagatgatggcgctgctgtgagtgctgtcagtgctctcgagaaagctgatgatgcag

SEQ ID NO: 42235 - DNA, 653 bp, Zea Mays
aggagggttcatgtgtaagatggactagtgaaagggtttgggtgattctcggctgcaggatcacacaccaacggtgtggattagatcaggcttggcccgaagcggtacacaatctcaatcgatcgatcagtatccgacggcccagatctcgttgccacaaaggggtatcctatgttctaatccaaaccgtcactggagaatccaacggcccagccaccgtctaacctccaccgtcaatccacagatcaatgctccatggttcatcttcccaaccgagacgcaccagcggcgccacgatttctagtggccggacctcgccggaggattccattttgccatgccagtggataatccgcgcccgcatctacgtagaaccaaattcgctaccacccgagccgattgggatgagtgttgtcccggattgcggtcacagtggcacggaccaccacgattcgcgaccatggtgtagcggcggcggtgcccggccattcggtctaccggaattcaaagtttaacacgtctaggaacaagggagcgcggtagaagacttgagcgagaaggaattgctcatcggttaatggtgtcgcgcaggatccgattctcgacgccgggatggataatctgctctggccacaaattcaggcccgcctaac

SEQ ID NO: 42236 - DNA, 337 bp, Zea Mays
aaagatcttcaggtgcaatgcacctcaccgccggtgatctgccgctgcaattcttgcccgcctaggagattcgtgccgcgggagaggtagataacatcggggcagggtgaaaatatccgaggaggggtgaatctggtcgctggccggaccggccgtcgtgtcccgccgcggtcagtcgcgttggcatcaccggagctcaccgttctccggccatgccacatgcttaggaatgttgccacgtcacaatgaactgtaatatggagtctgtccatcgccggaggctttgccacagtgaaagccatgatagcgctcacgccagtaacttcctcctctccgg

SEQ ID NO: 42237 - DNA, 298 bp, Zea Mays
ttaggtatattctttgcgatcatgtaagatcttagccattttttaatacaaatttatatgtgggtacatattcccatgtgagcatgggtgttctgtgatgattgccaaaagtggcggtgcatgcctgttgaactgatgtgactggagaaacaaattgcagctcgtattaaattgcctccttattattttagttgtcagtttaaattattgcaccatcgtgcttgtccaattgagatatagtatactgctatgctcttcactaggtctgcatggtctgtcttagatactctcatgttcc

SEQ ID NO: 42238 - DNA, 368 bp, Zea Mays
gatttttctggtataaaatagtaatttatatgaggatgttaaaggcgtcgagttcaccagttcagtaaaatacctctgtttggcagctcaaactgggaactttcaaccagttcagtaaactccagtcagctactccagttcagtaaaatccatgcagctcaaactacctctgtttcaccagttctatgcagtagcaggtacccccgtctcgtgctcctcccaggcagctactccaattgaagcaatggagactcccggcagcgctccgtctcggtcccaggcagctactcctggctggaggagtcgtcaaaactgaaatgagctgcagagagctgatgcaagctggagagagccgtcaaaaacagaac

SEQ ID NO: 42239 - DNA, 456 bp, Zea Mays
atcaatgattctagcgaaggtgatttggtctggctgaaatacaccttcagctttggatataaatttgatgaaccaaatgatgattggctgaagtccattgaaactactaacgacgagttacttgaggcgtactccaaaaccaaggacaatgccttgtccgcagccttcggtggccggagaaagaaaatattaaacagagttttcgacgccatcggcttcgtataccctgactaccgctacccgcttaggggacaagggaaaaagaggaaaacttctgctccagacagcccagataatcctgtgctgaagggcaaaaagttgaaggttcttacccaccggccgcgttacattgaaccgaccgtggttcctgagtttggcgcagggacatcttctgctgccgaaagaaaagaaactgcttcaactacacagagtactgaagagccggctgtaatgccg

SEQ ID NO: 42240 - DNA, 363 bp, Zea Mays
tattttttttcttttatctgggtactagtagtactccgtagtaacttcttattcatcctgttgcgcgcgtagatcaatctaaacctgaagatttgcaaggactcgtcggtgcgcaaggcgctagttcgtgaggccagcctgttcggggccgcaaaggttgtcctcggcgtcgccaagaagaggcgtgcgatttcgtaagtataaagtgccatcggcattggatgctcagtgctttccactatggaagatatatctcaagcttttctcatcctatcattacccccctctagctctgccttgctgtaaatggtgatttgcatcatccttcaggtcgtcgcactcagttgcaaagtactgcgcaaa

SEQ ID NO: 42241 - DNA, 839 bp, Zea Mays
gaccctagctcatgtgtggaggttggaaacgatggcccttattctcggtaatgagtgctcgatcgggggatcaatcctaatgttgctgacttacgtgacactctccggcttcgagcatggtgttcacgtccttagctcattttggaggtggtggaactacttgtcgtggagccatgcgtcactgtggttaaagaatcgctagtggtgcgcacactgtcctactctatcagcatcgtcacctccttgccaccatagtcgtcgtctcatcgagtcgggaaggtcctccatctccgggtggtagtggacgatgacacaggaggtggcggtgccggctcgaacatccaggcggcaactctatttaagaagacaataatggcgaccctgctttggggattggtggctcgcgtgcccctgtgcgctctcatttggggcaccaatgtcagttggccaaggaattattgcatgtgcatggccctcatcccaatcattggtgaccaatgtagatgatgctttgggtggcgtccgacaaaatcgaagcgtccggtccctcgaatcctctgatctggcgaggcacacaagtcccgagattgatcaccctgttgtgtgtgatatgggaatgtccctggacgatcccctctcacttggcggggcgacacgacaataaagatgaaaacagtttgggctcaatgacgttggatgggatcctacctcggccaattgagaggccttccctcctgggccttgaggtgaaccactggacccccaacagctgctagatggcctagcacaaggactgacttcccccctctcatcacatgaatacttgagatgcaccacgc

SEQ ID NO: 42242 - DNA, 362 bp, Zea Mays
ccatctgcagagggtagcacatatgctccagaaatacccacagaagaggaagctcccggagtgaagttaacagaagaaccccactgagtcgtcggatgaggcagacacggagctcaaaattgagatggtataggagtagtcggtgcaggagtaggcgcggccagatactaaggaaaaccctgcataggcacgaactgaggagtcccgggcacataaaactgctgcagagggggtggtactgaaaattgctgctcagcgctagacatcatgttgacagtgccctgagaatatgaagaagtcactggctcccatctaagcttcccattgcgattcctcctacacaccacatccttgtgatcttg

SEQ ID NO: 42243 - DNA, 276 bp, Zea Mays
agacactgaaaccgtgtagacttcgactcgatctccgaacagccgcagaaccacaaccggagctaatccacacaatgcgaggaagccgtactagaactcacaaggcatgaactagtggatcccggagggatctcttcacaagtccaggagaacaaggaagaacatgggtagagtaaacactcaccagctcggttgcataatcacttgaattatcaaattatcaaagcttatcaaaagttgtattacatcatagacatagtgggtatttatactagc

SEQ ID NO: 42244 - DNA, 470 bp, Zea Mays
agtcgggcaagaaataacccgaacggtttctcacactccttcgacctttaagggtggcctagttcatggggatgcgttggatcttgacgtggcagtctagggttacccgactcctatgggtacggttgagggtgcttcagccctcgagggtgccactgaaggcaacccagcccccgagggtgctaccgaggatggcccaacccctgagggtgccgagcttggctactccttggctgcttccatggacgttcatgtcggatcatctctaattccatctgaggaaccagtggtgaccagtcctccaactgctcttatcggtccggtcactttagaggtcagtgacccggatggtgggaataagctgcctgatgccagagttgaagtctctctcagtgttgccttgggcgtgagctcttatcctcctttggggcttgagtctgatctcaatattacttctgcctatactccac

SEQ ID NO: 42245 - DNA, 336 bp, Zea Mays
cacttagcctcagggtaccccagcttgtctaggaggagggcaatagtcatatcaatgccctattcagtagacaccacaggccccacctcaaacaccacgcccacaccagaacaccactacatgccactcatgcttcaaatgcggtgaagttgggcactatgccaatgtttgtcctaagaggaacacaaatactccagatagcgacagtaaccccaactagtagaatcagactccagccaacaaccacagattcagtatcttcagggttaatcagatcagtgttgaagctaccgttgatggttctgacatcgccattggtatgtaacttattaattc

SEQ ID NO: 42246 - DNA, 530 bp, Zea Mays
ctgggttattaggacatcctattgctcaggggaagaaggattccctgacctcttacggagttgcgcgctatgcatggggatccgtaagaagcctgaatatgtctggaaggaataccacgaaaatggtatagaaaagtgctctatggcagtctacctgggagaaagccgaaactacccaaaccaccctcccttccaagtcaacttcaccggacaccgcttcccagacacttgccaaagtgtagcccgaaaagcccttaaacagctatgccaaaactacatccaagagatctctgaaaccccccttcgttatttcccacccagcaacaaaaatacccccacctggaggaaaagacttcaggctctgtcagggagagatcccaccgaggatgtccccaccattgtctacatggccggatacctccacaccctcgacaaccactaccatgacctctcctcccactgcacccacctaaactcccgggtggaaagcctagagcggcaagtcagagaacttaagcaagagaaggcat

SEQ ID NO: 42247 - DNA, 399 bp, Zea Mays
cgctcctgggccgtttcctccccttctggcccatttccccctttcaacccgcgcactggcccaacttccacatctgcgccagccactggcatttgagcctaccccgtcagcctcacgtgtgtgcgcctgcgttgctccaagtcgatggcaggcgggacccgcatggcagctccatcccctctgtgcgggcagcttcatctacttccctgcattctcggacatagaagaaatcacgcccccccggccaacagacaccgtaacaaacgccacatagaatctagggccgtttcgacgctcggacccccacctcgaccatatatatttcttgccgcgcccctctagtcccccatggctgaaccatcgcgaccagaaaactgagcgccgaatccgccattgccg

SEQ ID NO: 42248 - DNA, 287 bp, Zea Mays
ccggagatcacagaagtatggcgaatgtatttcgatggctcgttgaagctacagggagcaggcgcagggatcctcttcattgcacctggaggtgaacaactcaaatatgctcttcaattattattctcggcatccaataatgcggcagaatatgaagctttgattcatggactgaacattgccatatcacaaggcattaagagactgatggtatatggagattcactggtggtcgtaagtcaaataaataaagaatgggattgctcgaatgactctatgggtaccag

SEQ ID NO: 42249 - DNA, 311 bp, Zea Mays
tggccagctgcatcttcaacagatagagacggttcttgaccctaggtgctctagctagtagacaccgatcaacatcatacaaattgcagaaatcactctctatcacaattttatagcctccctcctcaagttgaccaaggctaactatgttactttttaacttgggtatgaaataaactaatgtgagtaccttgtgacctttattcctggtctagagcagcaccgatcccatgcctttgatctcgaccaaggaaccatcaccaaaacaaactgtgcctcccactgaagtgtccagcgacttgagcactgca

SEQ ID NO: 42250 - DNA, 394 bp, Zea Mays
cagtaaggcagtttttggtctcccatgacctatagcacatgttttctggccgaatagccattttcatgactccagtccagtacccacgttatcggcctcaggagccggtaaggctttttggtctcccgtgacctataacacacattttactaaccgaaaaggcatttttcatgactccgatctaacacccacgttatcggactcgggagccggtaaggatgtatttggtctcccgtgacctataacacatgtttttctggccgaacaaccattttttatgactccggtttggcatccaagttttcgaactcaggagccggtaaggctgtttttggtctcccgtgacaattagcacacgtttttctggccgaacaaccatttttcatgactccgg

SEQ ID NO: 42251 - DNA, 532 bp, Zea Mays
gaatagtcgacccattctaattgaatgactagttgctagaaatgataacttgggcttcgacccaatagcattcaaggtccagcccatacatcaccacctaatatatgctactaacactcaggctcctctgattgtgacccaggcagcacatgaaccctagccattgcttgcaaagagcacaagcaagagagaactgtgtctttgctgactctatcagccatgtgtgtggtgtgtgcctccagctcactcccaagtgtgtgtccctccggcaagcgctgggctccatcctgtgttcatctctgccacctccctctcctttttaggccatgtttgccgatactagacctcaagtggaagaacgatgaagatgtgctagtcttccccctcttttggcagtgagtacgaataccaaatcctttagtcctctgttcttcatattgaatgttgttcattgtgcgtgttcagatctgttctttacttctttgcttgttgattgcactatacaatctacgctaggtcatatgatcaattc

SEQ ID NO: 42252 - DNA, 339 bp, Zea Mays
ccttcttcctctccggccgccagcgcatcatcgtgaaattggacgccactgctcaagcctgctataaattgccaaccccgcttgctccgctaggcagttgtgcaaccagtgaagcaaaccgtgcctcgaatcatcccctagaactccccaatttgggatttcccctaaatcactcaagaacaccgagcggtttgacctcgctgtggccagcgcatctcaggtccgtttatgtcctctgagtcctcgtttcagtatcctgggatgctcctgatactctctgacccatccaattgagctagagtccctaggatcgtcgggaacgtgttcggttacccgtgg

SEQ ID NO: 42253 - DNA, 454 bp, Zea Mays
cacaagtcctccaagtgaaggggtaaccccatcaaatcagggccgttcatcaacgatttggcagccagggtctttcttcttcccccatctggtgccgagccagcgacgcaccgcggccgacggcaaaatctccaccgacgagtggtacccagccaccatggtgatcctatcttaatgccaaaaggtgctatactatgcacatgatgttgtgaactcggttacagggtactcaccaggcacgaacataatcctcatgcgatagtcacagcgatgttctctctctctgcgctctttcttcgataatggccgagatgatcgatggccaaggggtgcaagccggtcacgaatttatacaccaatacagagccgggcggggaaaggagaatttgttgggatttatttaacagaaaaccaagatctccggctctgctacactggtttctcccgcggagtc

SEQ ID NO: 42254 - DNA, 495 bp, Zea Mays
atcgacaaatctcattttgtgtgttttacccaagatggtgcatctgattctgtttggataaaatcgcatatctaccgctcgcccaacagacccagctagtacaatgtcatcagaaaaagcaaactgcacacatggaaccttatgtgttcttctggcagatatcgtctctattgatggacatctctaaattagcttaaggcgatacatgatatgtccactagagaaaccatatcctgaggcactcgccttcgcttaggactgccttatgattatcgctgatatggacaggagttacattattctcaactcttaaaattctttcattccgaatctcgggacaagattcttttaaggggggaggattgtaacaccccaggtatttatcgtctgctcgaccacgagtgcggactttaacacgtgatagcggtgaatgtaaagatcactaaaatttaatcatcttcgttcatcacgattttgatatcgtcctcatctctg

SEQ ID NO: 42255 - DNA, 385 bp, Zea Mays
ctcgcttgcttgggcagtctttgcgaatatgaccataacccttgcattgcaagcattgaatatctcgtgtacgcctagttgatgcgacagagaacgaagtccttgctattgtggttgttgttgcttttgttgtgtcaggtagacaggtaggaatcgatgtagaagagatatgttgcttgctgtttgtaggggttattgtagtctgacctggcggtgtactagtgttgtgaggtatccaaaagctagcacgacctgcaggagtgttagctagtgtgcttgctcgacgtccatgtacctccctttcagctttacatgcaagatgaataaatagttcacagaattatattccttgtatgctaggatatcttgaatttctcggtttaac

SEQ ID NO: 42256 - DNA, 402 bp, Zea Mays
caaaaactccgtcgggcacgattgaccgttccagccactgccatctcccccgccccgaggagagcctgacgagcctagacagcctcaacaggaagggtgagaggtggagctttcccgcatgttgatagggaggtgaacgtcatattcagaggccatggagcacaagaaagcagaaggcaacaaaagcttaatgatcggcaggttctagtggccacgaacaatgctctggctccttaccgatggtcggagcacacgatatccttcagccgagctaatcagtgtcttaactttgatcaccccgacaaatatctgctactcgttgatcccatgatccgagaaagcctggtaaataaggtgctggtgtatggtggcagcaacatcaacgtcacctttccccgaaca

SEQ ID NO: 42257 - DNA, 442 bp, Zea Mays
cgccttctccgtggactgccatcctcgccgccccacctccggtaggatgtcacccaccttgtccgcaatgttctccactgcatgtaggttctttcgggtgggttgttggggctctggtgcgtgatttgcacgagcaccggcgaggttccgccgcgggagctcgcgccaccgttcccggtcggccggattgtgaggagaaccctcggtgctgtccgatcctctttggatggctaggattagaagatgtgtagccgttcgattaattagatcgagtccgttgatcgggtaacggatggacgagagcagatcaacgcatggaggattcacggccgcggatctgtgatccaatggaacacattgcataccggttcagtagagaatggagtctaatcatggtcatccactttagatcgtgcggccaggattaaaggataccccttcg

SEQ ID NO: 42258 - DNA, 303 bp, Zea Mays
ttctgcagtagccacctctaaggctgagggctcctctatcacctccatgggagttgggcgactcggaccagcatcttggcattgaagactaccctccaaagtcgacgatgcacgagacactgctcgggatacctccagtccaacgtctagaacctctgaacaaacagccatcacgtcatcggcagttggctctgacagcatatcctcagggacgacttcctcaagggcttgatcaaaatctgatattgacagtccttgaagactgacaagagccgatagagctggagaaggaatatcactccc

SEQ ID NO: 42259 - DNA, 271 bp, Zea Mays
tggctggctgatccggagagatgaggtagcagaagcatgtggcgtgccatcgagacgggcttggacgagacctgtggcataaatagatggccgtggagccgtgccggcgtacgcccaggcccgggcggcgccgtgtgttttgaccatgaggtggtgtgggtgtgggagggagaagaagatgaacgggggaggatacgttggttgggctcccggctggagttcgcagtagtttggtggtgttgggcgaacggcccatacccacgaacgtctg

SEQ ID NO: 42260 - DNA, 333 bp, Zea Mays
gggcttcagtggatggttcaacccaagacatatcaggaccatacacaatccaaatcagaacaaagacaagaacaatcacaatcagtgatagcaaagtcatcctcagtcctcaggaacctagcaaaataccttcagaccactggccccaatagggggaagaggaagaagttttggaggaagattcaactctcaaccaaggaaattgttctgcctttcctatggagaggacaatgggcatacaacaagaacatgtcaagtcacaatcaagaaatagaaagaaatagttgaagctgaagcacagcagaatcaatcaaagcaggtcctccacactac

SEQ ID NO: 42261 - DNA, 326 bp, Zea Mays
ggcgaggattgctgtgtcgaacctgcacaagaacacaaagaagtccttctcggagacgtaagtaacggctggctttggtctaatttcattcattcatttcgattgggtggtgagttggggtgtggctgttgtggatgcaggattaaggacatgtacatgcacttcaacaagagatccgggctgatggcccctcttgtcgctgaagatgtttatgaaatcatcatgaaggtgagattctggttttcccctgacacatttctgacaggggcaactgtgtagacagtgctgatctgtttctggcggttgaatccactgttccattcgtt

SEQ ID NO: 42262 - DNA, 482 bp, Zea Mays
ggagtatgtggctatctaatctcaaccgttcaagtttagatcagtggtccacggcaatcctaccccatctatccctcttcttcggttcctggacgacgacacgacactccctcacggcggagctcgccggcgacactcaaaaccaggttccaatgcaccagccataaatccacagcgtgctatacgtacaacagaaaatagcgaactcggttgaccaccacttatcagtggtgaacgcagcggtgaggctggccatgcattgatgtggtaagcggaggcgcactgcctcccatgagaaatttgtctcgatgcagaccaacttctcacgcccgcgcacgatgcaaagctccctcgcgtgatgatgactgccctacaccacccgattggctccgagtagcaacgggagcacaagacgacggaagcgggctccctctctggcgtctcagctatctcggctacaagggtggcgatggatttcctaa

SEQ ID NO: 42263 - DNA, 421 bp, Zea Mays
cttttgaatcctctgaatgagtggtaaaaagtgacatgttttaggctttgaaatacccaacggaacaccaagataggtaaagggcattgaacctatctgacagttgagagttcccgcaaggatcgccattttagcaggactgacgttgatggggtacatacttgatttgttgtagttcaccttcaaccccgtcgaggatgcaaaagagttcaggacagctctgagaaaaaagagctgtctagggcaagcttccaatatcagtagagtgtcatccgtatattggactatcggaaaatcttgaccacaattctcgggaagtggtaacttgagtaggtcttgccgccgcgctttattaatgatgctctgtaacagatccgccgcgagaacaaaaagaagaggcgagaggggatctccctgccta

SEQ ID NO: 42264 - DNA, 462 bp, Zea Mays
tttcaaagatcaccttgttgtagttctagcatagttgtcggagggccgttcgggcaacattctggcaagtatctggaaagcggtatccgataaaagtgacttggaaagaaggatggtttggatggtttcggctttctcccaggtagactgccatagagcatttctccattccactctcgggatactccttccagacgtattccggcttcttgcggattcccatgcgaagcgcacaacttcgcaacagatgtgggaacccttccacctctgagcagtaggatgtcctaatggccagagagtcttccatctggaataggaaaagaagggtctgttaaaatcgaggaagaggagagaagacttttcttggggtaagaggtattttctttttagggcaagttttagggtcagggctgcgacctacggccagtcctatgggctctgataccacctgaagcgtcccga

SEQ ID NO: 42265 - DNA, 703 bp, Zea Mays
tgaatttctaattctgcttaccctctcctctcctctatgcggcttatatagtcctgcggtcctgccacctagcaccccccctctttagccggctgttgggatatccgtgggcgcctatgctgatacgtacagcagacaaaaagcatcaataacaaggatcaaagtacagggctctggtaacattattagacatgtgttcctcctctccaatagccacagcaggttcacaagttgaagcactccagctggcaaccgagtcaaaatctcttataggttgggccgcctcgactcgtggggcagattacgggcaattagcgctcggcatcaaggctgcttccaactcaggtcgtaattcttcatgataggtcgatgtatatcctttccatgcccctttgcatccaccatgcctccaagccggcaagccagggaacccaaggtgctagccatgcaaccatgcagcgcatgcaaagggaccgaaacagctgccctgaatttcacggccacatccatgataggcaaggcacagccagctgcatgcaccaacggaccctgtggctggaatcatggggtgttacaagataccaagatgtttgtttagaatgtcgccatctacaccgcgacgccagctagggtttcaactcattggtcttgttggtggcaagctgtatttggaaacatataaatgggtgtgtttcctttttaa

SEQ ID NO: 42266 - DNA, 272 bp, Zea Mays
acaaccttctgattctcaagataaaccggcattgaacaaaaggcttatgaggtatataattgctcaacagatgagcaataatgggtgttgcaatagtactgtcaagtcggaattagataaatatcttttagaggacaatgaagaggacaaaaaaggttttgatattcttaagtattggaaggacaatgctactaggttgcctataatgtctcgcatggcccgtgatctcttagcaattcctatctcatcagttgcttctgagtcagccttta

SEQ ID NO: 42267 - DNA, 1244 bp, Zea Mays
gtggtctactgtgacaatgtgagcgctgtgtacatggcagccaacccagtccatcaccgccgcacgaagcacatcgaaatcgacatccacttcgtccgtgagaaggtagctttggggcagttccgtgttcttcatgttccgtccacacaccagttcgccgacatcatgaccaagggactgcccgtacatctcttcactgaatttcggaacagtctctgcgtccgtgatcctcccgctcagactgcgggcgggtattaggatatgtatctatcaggatcaatcagagcctgattagcaattgattgtaatcccctagattggctagctaccttgtatagactaggattaccttctatctatagcctaggtctgtttccttgtacagggaatagccttccctacatgtaccttccatgcatgcctattggctatatataacaggctccccaccctcaatgggtgtgtggtgattcaatccattcttcccctttctacactaactctaatccagggttgggtgtatattatatagaggagttaggtgggccaagcccattaaaatgggggtaatcaggtaaatacaagagaaccctaacctaaccctaaacaggagtctaacagtcaccatgttcctaggttgatgggttcagggaacaaagacatgcagacatgcgatgcggaatgtcaccttttggaaacatggtacaaggtgtaggagcatggagttacacatctttgggatgctggttgaaagatggaacatgaaccaaatatttttgtaacataggcagtaatacatctattagaaaatatagcatgcctgtgttaaaaagaagagaaaaatgtggatggcacctgaacctgcttactgtgaacgtcccctgattcagtagaagtggtgcttggtggcaaatgcgtagcacttaaactgaggttgccaataattctggttagttagaagggtgattttgaaagggcagtgttatagttgaacaattccatggacattaatgtgcaagtctctcctaccgtgcatgccataccctccacccagagtcataaccggagcacataccaagaatcaaactttattagttttgaccaacaattagtgtggctgtataaaggtctattgatacaaaaattgtagcactttgtatctcaatatatatgatactaaggtcaccatttaccattttgcatcagtatagtactgcagaaatttgtgatcaaatataactcag

SEQ ID NO: 42268 - DNA, 478 bp, Zea Mays
tgatggcgacgtggttgatgctgcggtagtggtcccacttctgtcgcttcgtgtcgaagtcggtgctggaccccccagtgatcatatgaatgactccgcgatacggctgatcggcgaagtcctcttgtttcggggcatggggtggtggatgttttgttgttgctgatgtggaagagggggtgggggaggtacgatttgtacttcctggtggtgttggtatgtgtggtgcggtggatgcaaagcgggggcatggatgtatggtggagggggctgctgatatgtgtgtgcgacaactctagggttgtcggctggttgcgcccgtgccatcctgtctctggtggccttcgtctctgggcattctctggtttggtgggcgcagtcttcaccatgaaacaggcagtaaaatcggcgcggcagttgcacacatccccggccccgtccgtgagttccgtttccgcggccctgggggatattcctg

SEQ ID NO: 42269 - DNA, 385 bp, Zea Mays
gtgatattccttctccagctctgtctactcttgttagccttcaggatttatctataacagattttgatcagacccttgaggatgttattcctgaagatatgttgttggaaacaattgttgatgatatgatgaatgtttgctctaatgttccagacgtgggattagaggtatcctgggtggtatctcgtgcatcgttgactttggaaggcagtctttggtgtcaagaggttggtcaggattgctcgactcctatggaggtgactgaggatccttcagcctcagaggtggccattgcagaaaacccagcccccgagggtgatgttggcgattacccagccctcaagggtgtcgtcggttatgacccggctctggtgggtagcgcaag

SEQ ID NO: 42270 - DNA, 973 bp, Zea Mays
  misc_feature (874)..(973): n is a, c, g, or t
atgcaggacacaatcagcaaattgacctatgaaacacttcagtcagtggcttgtgttgtcagtcatgacaaggttacttttgataagactaggtctgtaatggaaaaaattgtaaattctcaccttccaagttacttggccagcttggatcagaatgatattgcatgccagctattcaatatttttagaaatccatgcagctatcgatctggttctgtgaggcttgtcacacctgtgtcaccacaacttttgtcttctattaagcatgcgttggatgagcttgatggaatgccaatgcagggtcttgttgcaatgaataggaagattaaaggaaaatcatgtgccccaaaatttggattaactgctagcttttccaaaagaatgcatataatcaaaatgataagaaaaaggtgcaacaagattttaacagaacttgaggaaggtaattacctgccaaaggaattagcaaaggcaatgtcagtggtgaacttatatcagaagcagaagctgaaaaatgtgagtatttcacaatcagagtttttcccctttgcaaaagaaactatttctttgcagaatgatatcctgaatgccctttggtcacttccaaatctcaagcatgcgaagctgaaattgctgcacaccatactggatcatgattctaaatttgaaaggaagcacttagcaactttgaggaactacttgacagaatgtttgtttggatgtgatgatggtctaccagatgtggccctccaagccatagcctctataaatcagatttctagatgtcagcatgttgtgttaacggaagagagggaggatgctgaggtagatgctgtactgaacttgagcagtcatctcaaagctttagctcatnnnnnnnnnnnnnnnnnnnnnnnnnnnnnnnnnnnnnnnnnnnnnnnnnnnnnnnnnnnnnnnnnnnnnnnnnnnnnnnnnnnnnnnnnnnnnnnnnnnn

SEQ ID NO: 42271 - DNA, 329 bp, Zea Mays
aactccttcttcttgatcttcatcaatccagctggaatgtggtagtttatgaactgtgtacggaactctgcccaagtaatagtatcaacagcatcatgggcagcagtataagaatcccaccagtcagcagcaggacctgtcagacgaccagaggcataaagaactttctcctggtctgagcattgggcgatgttgagcatcttctcaattgacttcaaccaatcatctgcatcaagtggatctggcaaactggtgaaggtcggtggcttatggctcataaattcccggtgcttatcacgaggtggaactggtggtggtggtggtggagg

SEQ ID NO: 42272 - DNA, 848 bp, Zea Mays
taagaagaaagacaagaataaagggaaaaatgttagatgtgtcctcagacccaaccaagtgatcgagtcaagatcaacgcaccctaggcgtaaaccctctccatagttgtgccccgagtcacagtcatacaaacgaggcatagaccctaagcatcataatcatcctatcagtcttgagttcgatctctttacatgtaaacaagaggcatcctcacaagcgtgtcaaaactgtttgtcaggtatgagttccacttttctccagactagttgatcaatctgatgcccctcctgaaaagctatcaccatgcctaggctaatgaaatatgttaggctgtacacaatggtttgaagaaacaacagctcctactttcagttatcatccagtataatcagtgaaggtaactaaaacaaggagtttgcatcatcatcaccaataatccctgcacgagcaaactccattcctgaagtggtgaaatctgttcacgtccctcacaacaatctcccgatctgtgaatttggagatgaacttggtgactgaatgacagtcctcacaaagcctgagattctttgtgatcctgatagcctctccactgccagtcttgataagcccgaaagcaacagccaacttctcactgtggccaagcaaaatcctctccttctcctcttcttcaatatcatacagaactgatctcgtgtcaggaacatagccctcatttttcatctgtgtcacaaattcaccaatcaatgcttgcagctcctccacctgtgggttcttgttgtcaactgaaacaaatgagtacagcttcttcttcacctctatccagctacagccaggcaccttctccagt

SEQ ID NO: 42273 - DNA, 962 bp, Zea Mays
gattgtatttttattggaacattcagtgcctggtcttcggttggcctcttgtgctagttgataagttaaacaaaatgacagattgcatttcttgtgttgcagacaagatcaaaagagtttacggggtctatagttttctttcttcattcaaatactatttattgttgtgtttaagagaaaccgtactaccagatgtctgagtggttacaacctattgtgtgtaactcatatatagagcaccgacacattcttgttactcgaatagtgcaaaactatgaaagcttggatatctgtttataagcagtaacttgcaggacaaggggctgtagattttagatgcttattttacagctattgtataaccagttcgctgctgcatctcacaaatcaacttcagtgttataaagttgtatttattgatatcgattaatcacaattagttgtcctagtcagtatcctgaacttgactaggggctacgacctgattaggctgattagttttctggtagtctgattcattgtcgacttctgatgattagtcggatgactagtgggtggaagaatagaaaaaatggaattgctgggcagtttaggacatgggctacatctgggatggtttacggcaattggcctcatgtttttcagcccaatttgcaaccctacatgcagccaccactctggagttgtctccatgcttgatttgcactctagaacatatactatatagtgtatatttggtatactagtcctgatatatataggttgagtaggatagaccagggctgactagtcgtcctggttgatgactaatcgtgactagttgcctggtgggtcccatgttgattagaattgatcagactgcttgatatcatttaattaatgaaaattttatgtaagacaataaaacgtccttccctaggtttttatgtcattttacttgattttgtgaggtgctgagacag

SEQ ID NO: 42274 - DNA, 296 bp, Zea Mays
ttgcttaacgaggttcttggtgaaattgaacctaatgatagcgtggttgtccaacacgtaaaacagaaccaaaacaccagagctatacaaaatgagagtgacagttggttggatgataaaaacagctccgaagggaatgttcaagcccatggaggaactcaagaacagagagaagtgccatatgcgaataaaatcagtgatgccattggtcctgttaagaaatcaataaaccaactcagtcgatcccagggtaagtcaatctggttgcttgcttacattgctcttgtaacctcttg

SEQ ID NO: 42275 - DNA, 552 bp, Zea Mays
aaaaaaaataccaataaggacctacagtacactgatgtggctatgtatgcatgcaagattattacattgaaatagctgggacctaggagtggctttggaacacgaaagaattgcacaaggccattgttaatttgaaaactgtgtgggtcagactagcttttcgtcacctttctttgcccgtcctccaatggcagccgtgactcagactagcttattttgatagtgtactagacaggacctttgaaaattgtgtgtcctccgaactttttcatcacctttctttgctcctctaatccaatggcggccgcaagaaccgaaaaggtagcatatgtatgtgcccctacactacaccaacacacgaagagaactacgtagcctacccagcatgtcttcctcgtgcttttcgttccctcagtgctcgtcaaagaatcaccatgcccatgtgaaagggaaaccgatcgaaaccgcaacagatatagctgctgacctgtcacgtaaacttgggcgacggttactcctcggatgccatgccagtgttcacgttcatgccac

SEQ ID NO: 42276 - DNA, 320 bp, Zea Mays
ggattttctaattctctagactgggcgcataaatatcataaactacaggggcaagagcgcaaaagtgtctgagactcagccacctccgcgcaggacggcgggtttatatcaataaaacccagggactcttttgtaagttgggacagcgaaggggtatgggtgaatatctgtcgttcgatcagattcaacgacagagatatgaagttacccataccgaaccggtatgcaatccgagtcacccaacgagcgattgacgtcctagacttaaaacaacccagaaacgatctcaacgaatcatttttccctgctaatcacaaccg

SEQ ID NO: 42277 - DNA, 603 bp, Zea Mays
tatgctttgatatgttacagacttcaactgccctaagaagatgcagtacaaggtggaaaataccattgtgtttcaccaattgcacacaatgcagagcactccggttgcatgaatatttatgatatataaccagctgtatgagcaaaatagtttgtgtacaaaatgtgtaggaccaataatgttacatgagggcatgaggctcctctgcatcaaaagtgtactgggtttcacttggcatttgcatgatgtatatggatttgcttcactgatgattgaactttgcaataaggaattgtataagtttcatggtttggaactgaaactggatgcacatttattcctaatgctactggaactctaatgggtaagggaggttggcaggctgtgggtcagatagcatcccaacagctagcagcccggcacgaaagtggactcattatttctttgataaatcctattagttggtccataatcctaagcagctcttttaatagttttatttgaaagaatcatgtgttctagttgaagcacacttgcgaaagggcctctagctaaattggttaggttgtttaattaacactcctgaggtcctgagttggaatc

SEQ ID NO: 42278 - DNA, 380 bp, Zea Mays
cggctaccaattgaaaggtcatttattatcatagctccatgatatttaaggataagcatctagtatcaccaaatattatagagcatgagcaatctaaaaatatgcaattactcacgacttaagataccaatttcttgacttacagaggtacccaagtcctgattgctccatttcttgctcatcttctcttttccaccttgagactatacaagatcgctcaagaaacaattagtctcaaaagacacaagttatgtgtgctccccctaaacttatgcatcaagtatttgaataacttgcacttttcacattctagctttctcagaactagaggggatcacaacatatcttggtcaaggcatactcgcaatttcatcacaaag

SEQ ID NO: 42279 - DNA, 324 bp, Zea Mays
ccacgtccctaaaaccattcaggtttaaacatgctccagcgccagttcggtacatggccatacaaaaaaacttaaccaatccagaagaaactaggtagcaaatagcaatgtaaacaagaagcaacagacgacatccaagttcgagttcatgaggactcaaaaacctgggtgatagctaggctcagtacataaccttattaaccaaacaggtccagtaatccttctcagctggaccaccacacataccgagaatctgacaagtcttaacacaaccaaaagggagcagatagccagcaagtcaacagccagggagctaagtaaacc

SEQ ID NO: 42280 - DNA, 440 bp, Zea Mays
gtaaggaagattatggcaaggaaaagacttgatccgaaaagtttaagtcttgattcatctcgagattcgctttgactgttatatccttccttgttgatgttgatctttccttcctggtctcattaattcgaagttaatgtatatcatcggagttgggaaatatggttaagatagttatgggtgaggtagagtacatgatgtagatcaaaagtttgtttgacgctagatggagataggaagattatgcaatccatcatgactctatggttgggataggtcttctgctcatggttaagttgatctaatgtgttaagttaggttaacatctggctagtagggtctaatctattttatcagtattatctaacatgtttgtccattagagtagatctaatcaaattagatgagatcagaattaaattggtgtaaccagattagac

SEQ ID NO: 42281 - DNA, 327 bp, Zea Mays
accaaactcaggtatcacggccggttcaatataacgtggccggtgggtaaggactttcaactttttgctcttcggcgcaggctcatctagagtggccgaagtagcagttttggccgaagcagcagtcttcctcttctttccccgtcctcgcagtgggtagcagtagtcggggtaaacaaaaccaatggcatcaaaaactctgttcaatctcttttttccctggcccccgaaggatgtggataatgcattatcttctgccttggaatatgacccaagaagttcatcacttgtagcttcgatacattttagccagtcgtcatttggttc

SEQ ID NO: 42282 - DNA, 306 bp, Zea Mays
ccctagttcttcctctcctcggtcgtatagactgacaggtggacccccgcccgaccgttcatgtgttgcccactccccatcgcccaccaaccaacacgctttatgcctcccccgccccgatcccgccgccgcaaacgccatgcacacccatcatcgtgtgatgcttgcgaggaccgcccccacccgcgatatatacaccttccccctcaccacctcccccgtccttcctgattttgtccgcccctcctcgctccatccgtgaccctctccaatgccaccaccaactgcctcacattccttgtgctc

SEQ ID NO: 42283 - DNA, 790 bp, Zea Mays
ggccaccacctcctcgtcatgcgatgcagcacatcagtcgtgccattcatcttctctggcttgtactcgacggcaatgtcatatccgaagagcttgctcacccatgtgtgctgaggaatggtagagagacgttgatccaaaatatactttaaactatagtgatcagtacgaacagtaaaaggtcatccccaaatgtatggcctccaatgacgaaccgccttgaccaaactgatgagttcacgctcgtaggcaggcagcttctaatggggaggcaccacggtcctgctgaagaaggcgatcacactgtcgccttggtgcaggacggcgccgaaaccggcacctgagacgtcacaatcgatgtaaaaacgccactcaaagtctggcatctatagcaaaggtggcaacatgagcacctgcttgagggtcttgaaggcgtcgtcggtccagcggaacgcctcctgcttgaggagagcggtgagaggcgcggccaccgtaccatatcccgcgatgaatttgcggtagtacccgatcaatccgaggaacccgcgtagagctcgaagtgattttggcgatggccatgcctccacagcctcaatcttggcggggtccatggccacgccgttcgacgagatgacgtgaccaaggtaggcgaccgtgtgagtgccgaagagacagttagaacacttgagcgccaacttgtgtgtccacagtaactggaacaccttcttaacgtgttggagatggtcggcccatgaacgattgtagatgaggatgcgtcaaagaagaccag

SEQ ID NO: 42284 - DNA, 953 bp, Zea Mays
ggacggggatgaattttcactcgcgggatctgatggtgacccaaattaggagtcggaccttctctcgcgcgtggcctatggaggtcgaatccaacaaatcgtctaagtgtgacctcgtataaagatacaaaattctcaaatcactaaccctaaccttcatttccttcactaggttgccgctcgtctatgtgacaagcctaatttatatgtccatacaataatatttatatcaacaattgatccccacgggattgggtccccagcggggacaaggacggggatgaaatcctcctcgttaagcattttggggtcagggcagggaataggtttcggggatcggggaagggacggggaacactcggccctgacctgccctgttgccatctctcatggcgcccgtgcggataagaaaggtagctcctacggaaagttgatagcgggggtggcgtggaggaaagttgatctggtggatggaaagaggaacggacagggcagcggtggctgttgcggtgtgcatgacggtggccggtggtgcggtggtagtggggatgacgtggaggaaagttgatcttgtggagggcggcacgatggtggcagctagaaggacgggaacgtcgtcgcctcataccttggcatcccgtaggaagaaccttggtgcattgcactcataggggacacttgctagtgctctagtgacgacatgtaggtgcagagattggccagctacatagcaatgtccgccaaggccttcgtagacacttgttagtgctctagtgacgacatgtaggtgcagagattgaccagctacatagcaatgtccgccaaggccttcgcagtggtgttggcggttggtggtggtgggattagcggctgcttcatgaagttatcgtcacttgacatctatgataccagattgataggttctagaatgcgtaagttgtatggataggagt

SEQ ID NO: 42285 - DNA, 308 bp, Zea Mays
tttaaatcttgatacatcttagtgctttcgggatgaatggaatatcaactaaggtgagcttcatccaaaatttgctggcggacccccgcatccttagacacaactatgcgattattaaaccatactatgccttgatcatcctttctgaaacaattcgctttgccggcttctattttctcatgaatatatttcatacccttatcattcctttgggtgtcaataattctttgcagaagaatcgactcaagcttcaattgggtcaaggttccatgtttaatcattcccaggtttaacttctccatttcttg

SEQ ID NO: 42286 - DNA, 733 bp, Zea Mays
gttgtagctggtttattaggctataactttgatacagagagttaattcagtcattacatgaaatctggagcaaatcgatgccaaacttggtctgttaggctaactgaattagttgcgcgatggtacagtgtactgatcaagacaccaactcagagatcttaccaccggcgactgtgcgcccggattcacaccaccgcggtgattcgcgctcggcgcagatggataacgtcgtgggagtaagaaatatcgcttagggttgaacttcagccactattttaccccggccgccgtacccgagcgtgtcacgaccaccttgggtaggtttgctagagatagccacttcgtggccttgcgccacgtgccttggcacattaacctcaccgccgtgactcacgttagtccgtctagtgatcgccggagagcttgccacggtaataggccacgaatcaccacgccagtgactcatttcttctccgaccaccaccgcgcccaacccaaattcactggccacttctcaagcacgctataaattgagcactccgtgagctccgtagggtaatcacccatccacagcaccagcaattgcctccaattgttcaccagagagcacgaattgctcattcccctaaaccgtgtttccgccaccgtgaaaaagtcctcaccgtggtcagcccgtctcaggtccgctcataccctctgtcctttcgttttagtgttcttgtgtgcccctgat

SEQ ID NO: 42287 - DNA, 721 bp, Zea Mays
agtcactgcataagagacccacccaaaaacttgcaagaattatattagttattcaaaaagtacacccaatccgaagagctccaccaaagaaaaatcgagtcacagcgaaagcccaaggacactccgcagtctagcaggacatgggtcaggcctgcataatcgaactcagaccgacaacaccgtaaccaatcccaagtgcacaccatcgctaatcagcagcagactagaaacactgctcgtcgccacgaataccctgcgcaacagggatgcggcggaaacaccagaggcagaggccgagtccacaacagcgaaggttctattgtcttttccatggagaagactcggcacatcccaccaaggactgccctgaaaccaaggccacaaaggacataatggctagaaaccaatcggctgacaaccaaagagttgtcgcccacacctaccatccccaacaatataaccagcgccaattccacaatgagcattatcatccccaccaccaaaaccacaacatatactagaaacaccaagaaatactagctctaccgcctccactaccaccacatcaccaaaatcaaccgcctccaccaccagcaccgaaacaagaggacttcgccgatcaaccttttcgaggggtcattcatatgattaccggaggatcaagctccgagttcgacacaaaatggcagaagaaagaccactatcaaagggtcaatcacgt

SEQ ID NO: 42288 - DNA, 351 bp, Zea Mays
gaccgacaagaccatgacaaacaaatgcatcaaattataatcaaacatgttcacagcacgcagacataattattttgtattacaacacgatacaacataagtgacagcacaaatgtccttgatgacttatggttcgaacaataatataatggtctcacaaacatatttatgaaaacttaaacaaataatgcaaaccggtttcgtgcacaagctcaagttttgagtcaccgaataaatcgtttactcaaaactaaatatgaattgttgcaacttttttttgttctttcatcataatccatacttctggatcgacatcttcttcatttgttgactccagcctttgcaatcttt

SEQ ID NO: 42289 - DNA, 304 bp, Zea Mays
ggcggtggaatgcccaagccacggtgaacgccggtgaaatatcctggcccggctctagctaggttcgcggaaccgtgacacgactcaaggttatctccccgcggtcgatcccttccgcatatcactcgaacacatctagttctacagtgcctcagatctttatcagcgttcttcacatattttcagtgttttgatcttcagtgttttactgaaccgaccccctttcaccctccctttctcttgattcttgttaagaacagggtaatctccattaataaagtttgttcactaaacaacagtcttt

SEQ ID NO: 42290 - DNA, 401 bp, Zea Mays
gtgggttgcaagcttgcaaagcagactgtacacttaccctctttaggagcatcgggtggaattcttattgcttgtgacgaagactattttgatattgctccaattacttacacttcaatctactcaatatcagttagggtcaattccagattggaggacgtggtgtgggacttaacagctgtttatggcccccagcaggagaatgaaaaaattatctttctatctgaactgtgtaccatctctaacctgatgagacctgaatggctgattttaggagacttcaacatgataaggagagtgagggaaaaaacaagggagcaatcaacaaaagagtaatgaggaagttcaaccaaactattgacgctctacagctactagagctggacctttttggaaaaaaa

SEQ ID NO: 42291 - DNA, 310 bp, Zea Mays
gacctgttgctaggaagctggtgttgctattcttacctccattctcgctgccattgatggggaagaccaagtaggccacaaattgaaggcagtaatagatgcaaagcagactgctgaacaataggtatgtagttcttcatgattttgcatctctaccttcaaagcacttaaagcaaaaatctacatggatagccatgtgtttgctgatttaaatattatgttctcacacaggcagctcaagaagacagaagagataagcagcttcaagatgaggcctaagtatcatgatgaacggatcaaaagactggag

SEQ ID NO: 42292 - DNA, 271 bp, Zea Mays
ctgaaacagaacatccgagatttacgattctgactaagattagtttagataattttcgtgactattccggccacgatataaacggaccagatcgacacgagttcggcttcggtattttaatctgctctacatgattcgaccgaaattagccgaaaccaaatccgcgaacgtatacgcgatttcgtcgccaaaacagcgtgcggacggataaattagatcttaacctcgcgcacgagttcgcgcgacacaaattattttgccccgaacattt

SEQ ID NO: 42293 - DNA, 646 bp, Zea Mays
cacgcttgcgggagaagggacaaagcacatgcccaggattttcagtttccttacttcggaaaaccatggtattgaggcctatttcaatgaccagtttctagttgtggagagtgcggctgggaaggggaagaaggcttctctccatttcacttatgaattcaaaccccggtgctggtactttgttggtctggagcactctagcaaacaagctttgcttggtaagtctgagagtgaattgcggttgtatgtggatggggaccttcatgagagctgtccatttgagcccccacgcatcgtgaaaccactggttttttgttgcattgggaccaatccatcaccaactattgccggtcttcagcggcggcggcggcaatgtccattgtttgctgagatgggacctatctatatctttacagagcctatcgggccagagaaaatgagtcgacttgcttccaggggaggagatgcacttcccagcttcggcaacggtgctggttttccttggaaagctacaagtaaccacatcagggaaactgcagaggatggttatacactcgatattgagattggtggaagcttacatcttctttatcatcccagcctgctcaatggccggttttgttctgatgcttcaccttctggctca

SEQ ID NO: 42294 - DNA, 392 bp, Zea Mays
cgcccgattgaccataacaccccacaatcaaccttgaggtgacacgcccaggagctgatctaagccgcatgttcaccatcccacggcccaccatgcttcatccgaagcagtaccctgtcccctatcctggccgccccccttgagatcaacggtccgaaagatccttcttcaacctcccgtgcacaggcagtggtgtgggctggcaacgacggcgccatggccgcagccacccagacccgagcaggggaccatcgactatgcttctcgtcgagctatcagcgaggaagacgaaggctagacagatacgagggctctttccactttctgtcatgcaggcgacctcggaccattatgagctgcggatccagggcgagggaaaactccgatgagaa

SEQ ID NO: 42295 - DNA, 494 bp, Zea Mays
ctcactcgccacctcctggcctggcttccttcgcctccctcccttgggaccggtatatctactacctctgttccttcacctctccttcgccgccgcttccctcctcctcctcctccacctccgccctcgatccgaccgcgggccctaaaggtaaacccaactccttactatccacctgcttgcttgctactggtgtagtcggcggccgatttagaacaggcaaacactctgcggtacggtgcagaaataaatgggttcctgatttgtggcttcctaagctcttgcagcacttttcgcctttttcggaggccacgggtcaccaccgacctccattccattcatttgccgattcacctacacagacacacacaggtatgtcgtctctctactcctgtcctgcctccctctccgccccgcccgcatccagttcttcttcttttttttttcctttcttcagagccaggacacgatttgttttgtcgctcaagctctca

SEQ ID NO: 42296 - DNA, 278 bp, Zea Mays
tagaagtactactgtccacttgggctcacttcgtttgcttgcacatcgtattcccttattctttcttcactaacctgtttaaactggtgtccacgaaaaatatgccttcaattatgttgcttcatcagaacgatgtctgttggattgggacaacgctttctcggttgccttgttctgagtagtcaggctgcacagtgcacctgaagttattccgaactaattaacacgtttgtcgctggacctgtgctctaggtatgatgtgaagccgggcaatgcca

SEQ ID NO: 42297 - DNA, 381 bp, Zea Mays
gtttttacaaggcaattttggcaccatttgttgccccactggggttgggtggtatttctcctagacagaacgaggtctgtttcgcggaatggtggaggaaatcaagccggcgagtgaagaaagatagaagggaaggttttcattctttcgttatttttggtgcttggaccctttggaataagagaaatatttatgtttttgagggtgcctctccttccctttcggtagcccaaaacttcagcagagaagaagttagattgtggtgtttggctggagctgctaagctccaggttttagtgagtgggtgggtgatttttggtcatggagggatggcttaactctctcctttctagaggtccctcttgtttgtgtcaggcgcgg

SEQ ID NO: 42298 - DNA, 792 bp, Zea Mays
ccccaacctttcttccactgctcataagcttgctcctcgttctgctcaccgcgtcttcctcgggtactcacatgatcataaagggtatcgatgtcttgatctctccactcattgtctcttgatctcccatcacgtcaccttcgacgagacgggcttcccattctcgactacctcgaagccctccacctacttcctcccttggttggattttctcaatgctcctgtggtgccctatggtcagccactgtttgcttttcccctggcaggtcttcttccacgctcttctagtgacctcagtgcccctcgtggctcctgccccctgaactcatttgggctgccccgttgccatctgctcatcactcttggccccctagtggcctcaccctcagtcctggtggccccgccttcgacaccggtggcaccttcttcttcgcccttgcctctgaggctctctagtgccctctcttgtgccggttactcgatgctacacccaatctatgcatgtctatcagcaacgtgacgagtggatatgccgccctactcccacgccgagccagcgacgtatcatccccccttcttcatcgggaccctcatcacatccacctaatggtgattttccaggccgatggggtccctcaccctattgattgcctcgtcctcttcgcgaccgccttgccatcagtttctccagtacgaattctgtctgtagcgcccttgacgaacgacgatcctcattgacactatgctatggaggaagagtatcagtccctctttgccaatcacacatgggat

SEQ ID NO: 42299 - DNA, 347 bp, Zea Mays
cctagccattctaatccaagaaaaagaaaagcagttagtaactggttctactggtaatgagttctaggaagaggctgaacaattattcgctcgctaactttataatgaaacaggctcaattcgaccatttagccatagagcaaaactgatcgaagaaaccaacataagattgatgaactcttctagtgaaaacattcctccctttattccacaaaatggcagagcagtaaaatggaatacatgaccaacaaaaatgaacaagtcctcaatgaagcgcacctcaagaactcagcaatgtgcggcattagagccgtacccttcctccctgccactgctgccctccgtgg

SEQ ID NO: 42300 - DNA, 454 bp, Zea Mays
actgtttctgaggctgatatgcccattatgataaagctaggatacttcggagaagctgagaagaagctgattcgttttgccggggaagaaaccactctgacaccggaaaatgatgaggtggtggttttcaagagtttcttcagagcgggattgagatttcctttgaacgagatgattggggaagttttggaaaatttcgaaatttatcttcatcagctgactcctaacgctaccgttaggctcagcgtcttcatctgggcactccaaagccaaggaatagacccgaatgccgaagctttttgccgagtgcatgagcttcattatcagacgaaggccagagaagatgggcttcatgagaattttggttgttacaacatcgcttaccgcaaagatatgaaggctccggtggttagctatcgcaccaagtggccaaccggttggaaaaatgagtggt

SEQ ID NO: 42301 - DNA, 363 bp, Zea Mays
ttcagtatcccaaacctgaatattatatcttgtatgaattccactgccttggctaaagttagagaagcaatgggtttgtattctatctatttggtgaatttatctatggcgaccaacacgtgagtgtatcctccctaagctttcttgaagggtccaatcatgtccagtccccagcacgcaaatggccatgttacgggtatggtctgcagttgctgtgctggtaaatgctgctgctttgataagaattggcaagcttcacacctctggactaactcggttgcatcaatatttgctgtcggccagtagaaaccatacctgaagaccttcccaaccagagtcctggatggtgcgtgtatcccgcac

SEQ ID NO: 42302 - DNA, 284 bp, Zea Mays
atgtagaccgaagtgtttaggaggatgcccatataacacctcaaatggagatcgatctagcgaagaatgagagttggtgttgtaccagaattcagctaccggcaaccagtgactccatttgctggggcaagcatggacgaaacatctgaggtatgtctcaatacattgattcaccctttccgtctcaccatccgattgcgggtgatacgatgaactcatgcaaagttgtgtgccggacagtgcaaacagttgctgccagaaggcgctggtgaagacacgatcac

SEQ ID NO: 42303 - DNA, 370 bp, Zea Mays
ctagacatggcaggagagaggagacagtggaggatataatggataagctatccatggtccatgctgcacacgcacacagcacactagtactacttttttcggaaaggaaagggccaaaggctctcgcatcagagaaagggcatgctgtgctagcagcccacagaccgagatgccacggtgtcagtctctctactgcagtttgcttcactcccatcccatgcttcctccggtttccaagcaaaaactgggaacgccactctggttccaaaacggccaaaaactgctcactagctcccacgcatgcattttgcttttgagctggacgacggtgacgacgagtactcctcgcactggaagcagtagagtttgg

SEQ ID NO: 42304 - DNA, 387 bp, Zea Mays
atggaagaatggttttatgtgaagaacgatttgacagcgagggaagatattaaggaagttatcatgcaccccatatggtcccgcttcggcctccgaaagctaaaggtcgaaattgatgacgccgccaaagcgtgtcagaaggccttcggtactgtttgctccttcattggtacaagggatttaattcaagaacatatagcattcaaagtatggccgcttgtggaaaactgggaaatgccgaaagaaaccatcactaactctaacgaaggtgatttggtccggctaaaatatacattctggtttggggataagttcgatgaaccaaacgacgactggctgaaatgtatcgaagctacaagtgatgaactgcttggagcatattccaag

SEQ ID NO: 42305 - DNA, 469 bp, Zea Mays
atgtattcatatgtttgtgtgggagctcagaagactgtattccttttgaaactatatctctcttatgtaaaacttgttgcttcattcaggttcagctgataaaactgtcaaattctgggatttggagacatttgaattgattggatctacaggacctgaggtacatcggtatttggagctgatagttcacaattgtttatttcctttgcatttgtaatcctcagaatttaagcattatttccttaataagtagcttgggtggggatcccatctctaatgttacatcgaaaaagaaatggaaaatgaacataaacttagatgtccctgtttgatgcttctttatacaacaaacagtcatatgctaatgttttgcagcataattcagttcaatttgggcacctatttaattcatttggatacctcttttgtttccatcatttaattcatttgaatcacttcttggaatcac

SEQ ID NO: 42306 - DNA, 1200 bp, Zea Mays
gttagtgaggaaagctcccaccaattattggaaccaatcgccattcggcagtggcagctacaggagaagctggtgcaaccttatctaggcgggcgccctccttcttgcgggtggagaagcgggtgggagtctgttgtggagtgggcgagtgggacacgacgactgacatggcatggaggttgcagatggcgtgaagactggcgactggcgtggaggtcatggtttgctggcggaggaagttcgttgtgagagccaatcggcgcgaacgcgagaagcgagaggctggctggggcttgtcgtgcagagggtgcgggaggcgacacgggtgttggcgagcgtgcgcgggcctgggggtggagtcatggtctgcttgtgtacgatagaggtgagttggtgtgcattttggtgcgggtggagaagcgggctggagtatgttgtggagtgggcaggtgggacgtgacaactaacatgtcatggatgttgcagatggcgtgaagacatgcgactgacgtggaggtcatggtttgcaggcggaggcagttcgttgcgagagccaatcgacgtgaatgcgagaagcgagaggttggctggggcgtctcgtgcggagggtgcgggaggcgacacgggtgttggcgagcgtgcacaggcctgggggagagtggagtcatggtctgcttgtgtacggtaggggagagttggtgtgcgttttggtgtgagtgtgtgcgtacatgaacagatactacaactgtacttgtaagtgagaggcaataaaaaatccattgcactgctcgggagacttgccgccagctacacactactggggttgggttgtttttgcacttaaactcaactgccacttctacgtgtatgtcgttgttgctaattgttgtcgggctgtcgagctaccaagtgtaccgaactgaagctagttgtgttgggcttgggcctccgatgaaaggccgccatgcttgggcctcgagaccggaatggccaatagaggccgcgacgggccgcatatctgccggtggggtctgggaagggtgaagtcatgttagtgtcgtggtctacactattgacttaatagatagtagagatagagattagaaaccaaacggctctgtcccacagtacgcttgaacggaacactacctaaacaatcgatagagagctggttctgttggagatcgaccggccacgcat

SEQ ID NO: 42307 - DNA, 412 bp, Zea Mays
ttagtggataggctgaagagcagcgaagcaaaacttaatgcacaatccgaagctcatagggccgaagttgaaagcctaaagaaaaagcttgcagaaatgaatgagaattttgaagtggagaaagtgaagcaagaaataagcgaatggactagttcaagattacaaaagaatgtggatgagcttcgtgaatcgaaagaaagatattatgagaaatccttggattgcacaaagaaattgaaagatagttttgcaaaggtgggtgcatactcatcggaacaaaaatttattcgaggtgatcccaaaggagtcattgaatggatcggcgaagaacctaaggcttttgaaaaaatacttagcaaccatggggatttctgcaccttcgccggtgcccgaggggttgcagcagttttgg

SEQ ID NO: 42308 - DNA, 311 bp, Zea Mays
ctggttctcttgctcgttgtctctgcactcggcgccaaaacgaacaagttttcctttgatgctctgtgttgtgctctgcttggttacgggaaccactggctggtgaaagaatagacgaagtgggctggagtttctgtactggaccgctccatgctttgttgaaggagggcagcagatcacccttggattggagatcgacgagggcacaacagtggaaggacaagagttcattttcatctgttagttattgggtgtaatttttagaggtcgataattatgcatgtcttttgagtaggatcattcccttggcg

SEQ ID NO: 42309 - DNA, 323 bp, Zea Mays
aactagtgggcgccgggaggcttatgtatgaggaaatggctgccgagtgaggcatgtaagaagatacgcagaagtttcttccttcccaagtctacctctcttcctcctcctacctgctcctactattcctctctaaagaacttcggttgtaataatttgagaacgacaagtaaattttcctttgtataatatttaattattcacccgtaaagataccttttaattatacatgaactaaactacacgtaaattttactccgtaaattatttaattcctcattccataaaagataccttgtaattctacacgagtagaccaggag

SEQ ID NO: 42310 - DNA, 379 bp, Zea Mays
ctcggagctcaaatacatcgtgggctatcctaacgagattcctagagaacagattttctaggatgagatgagactagctcgttggtgaacctaggagtagcgaagactcgcgtctcagttcatcgccgatagactatagaaataggcctcgatcgacacgttgccgattaacgtgttgcacatgctctgaacgtaggagcagacggtgagagtagtttttgtctctgacttcctggtgcctcatattccaattcttatttctacatctattcttctgtagggctgcagcgttttgctggtgctcacgctatcttggacgacatcgctcatgctttttcttcccttggtcaccggtgatcattggatgcatatatatgca

SEQ ID NO: 42311 - DNA, 395 bp, Zea Mays
cccgtacaaaagtctacaccaagaaactgtccgcgcaaagacagactacagacacagtcagaccgacataataaatgtgctagaccaagtgcacaacgcctctatgaacatagccggatgcgcgaaggcgcacagcctcatcatacaaactatagtcacacacgtacagcgagggcattacaccttacattggttcaaccttcggaataattcccatctccctatagttaaatagcattatcctaagctcctcaccctccaaaagacttcgtaactccccctcacctacactcgccccaaccggcgaggacaacaattcccgcttgccagccctgcccacacgaagccgaccgccatccacttcactcactctacgcttcgccaccgcccttcgc

SEQ ID NO: 42312 - DNA, 293 bp, Zea Mays
ccgctgtccgtgatggccggctgggttgtacccccttgccaccgttcttcgtcggtgggttattccccctgccgccggcttaggtagaggaagagagaggattagatagtaatatctttcttaattcccaagtgtttgattacaacatatttatagcctccggctcaaccaaaaggagtaacaaactccactaattaaggaccaaccaaaatagctaaagatctccacatttatagcctttcggcacaaccaaaaggagtaacaaactccactaattaaggactaaccaaaat

SEQ ID NO: 42313 - DNA, 379 bp, Zea Mays
cgagatcaccacggatccgtccagtcgcatcgacggcctagattccatttcacgaagagttacgctaacacctaatcatatccgtccgcttcaagatcaaaggctccctgaccaaccctggataacacctccctttccccaacagctcgaggtggcgccgcctagggccatggcggaggttcgccggagagtggcgatccagcctccaaataatccctcctgaatccgaaaaggtgtagaagatagcagagacagtggggaacatgatggagacgatcttacaggcaatagagttctggggagccggcccacgacgacctgcggcttcacggtgttgaagggacttcgatgagcaattggtgtatctccggtggatctc

SEQ ID NO: 42314 - DNA, 398 bp, Zea Mays
tccttcagtgttggcactcttcccttggcttcagagagcccatatatacacactaagtctaactatgatatttggggtgagttgatgaaggtagatctcgaacttctttaaaacctcaccaatcatctcgtataggggaaattgaagtactgctctgaagaagctttttaaaactactactttgtcatctcttggttctggaatcacttcttccccagcaaaccgaactagttcgtcatcattctctccaaaatatcctaatttcttcattaaaactaaatcttccgctttaactgtggattttccaaactcaatatggttgggtttacctgggcatagaatgccatcatcatcttcgttatcactgtcagcttcagcagtagttggttcaccttcgg

SEQ ID NO: 42315 - DNA, 729 bp, Zea Mays
caaactggactcccagtttctgtcgaatgtcaacacacaggctcttaataaatcctcgagaaccttgttgacccttttcgtctgaccatctgactgggggtgataggcagtgctgaaatctaacttggtgcccatagcttgctaaaggctcttccaaaattttgaagtgaactgtgtccccctgtctgacactatcttccgagggataccatggagtctgactatctctttaagatatatccgggcaagggtggctcctccaaaggtggtttttactgggatgaagtgggctaccttgggaagacggtctattattacccagatagagtcattgcctttttgcgtccggggcagtccggttacaaaatccatgcctatttcctcccacttccattcgggcactgggaggggttgcaataggcctgcaggtttctggtgctcggcttttgttcgttggcaagtgtcacaccgggccacatactgtgctatctctttcttcatccctctccactagtatctggttttgaggtctaggtacatcttggtggttcctgggtggatggagtaggctaagttgtgagcttcattgagcaggacttcccgtgcctctccttttggtacacacagacggttcttgaaccaaaggactccttgttcatctgtcctgaggttcggaagttgttcattgagagcttttgccataagtcttgttgtctctgtgtccaggcg

SEQ ID NO: 42316 - DNA, 384 bp, Zea Mays
acatatatgacactgaacatgaggtgcaaaataggttgggcatgtttgagaatgaagctgatgtccatgatcgtccggattcagaggtggcccgtttattacttaacatgctagatgagcataacaagctggtcgcggcatttcgctttgctaaagaacgtttacacgaagagggcgaccaaaaggtgacgttgcggttgttaggctgtaacacacgtcatgacgcacaatacaacttaccagccaatggtgagctcgctgctataatagtgggtgattgcttatcttcacagtacaagtatgatgtcctcgtgcacgctagagacggtggcctcaaacatgtttcgtgcttgcacccgtcgtacatggccttgcagtacccgc

SEQ ID NO: 42317 - DNA, 458 bp, Zea Mays
gggagatgtcttgtaatctgtgatctatttttttatttcttttgttctgtaacctggtatggtatttctatgaaaccacgcacatagcatatgtgacttgagctgactatatattgtggagctatttaacaggattgaaacatagacaagtattttgcatgctagattttgatttgtgaatgacatagaatttgacgtcatgaatattctttagggtatgtagatgcgttatgaacaggagatattttattaagtggatattctttagggctcaaggaggtggtgccaaccgctaagcacgacggactgtgccatctgcctcgacccattggccgatatcgctggtcctgatcacaagaaggacgacgcggcagctacgtcgatgcttcgggccatgccctgctcccacatcttccaccagcactgcatcttccagtggctccatcgcaacgccgtct

SEQ ID NO: 42318 - DNA, 367 bp, Zea Mays
ggttggttcagctccactagcaaatatcagaattctggcatccggctcgccgacctttaaggcgattccctcgctcgaagctaaagaagtatgcattgctattacttcattagatcgtggcggagacgacccgacgtggacatccttggaggtgtgggaaggagagctcgctcggacaccctcgggggctaggttgtagctcgcactacccatcggagccggatcactaccggcaacaccctcgggggctgggttacagctcacgctacccaccagagccgggtcattaccggcgacacccttgggggctgggtaaccgccagcatcacccttgggggctggattttctgcaacagccacctctgag

SEQ ID NO: 42319 - DNA, 537 bp, Zea Mays
gacagcacaggaagaggacgatggcggaggtgggggacaatttactgacaataattgccgggaggcgagctgctgtccactgctcactcgactcctttgttgtacctagcgatggcagtaaacatatatacggtgtgcgtgcgtgatgcctggtcggggatgcatggtagggcggagggagaaggaactcggagagacagcaagcggatggaatggatggacgtgggcgtcgcaaaagattcagacagggaagggggatagaaaaggaaggccgaaggagaagcagcagctaccactctcgtcgtcggcgacgaagcagcagctagcaagaggagggagaggacggatcggctgaggcacctcttcgccttcggtggggtgctgcctttcgtttccgttgctttgcttgctccctcagcagcctaggactaggagtttcttgcagggctgggactgggttgcaactttgcaagcaagcaagtaaaggaagctcagggacgggacctttgtaggacccaagtgcagtgcagggctcct

SEQ ID NO: 42320 - DNA, 348 bp, Zea Mays
taaccattacattttttcagggtcaacatggtaatgttggcaagaacatgccgaccaacacaaacgtcactcctcaagcaacaccacatacggaatcttgctcgccgatatttgatgcgacgccgcaaataaatatatgagtacaccacctcattgtttttctatataattattagtagtttactaaacatctattccatttataccataattgttagtctctcggcggcgtccacccggcggcacaaacagatctccccgatagtggcccatgctttgatcagactccatctgaacttgtcagctcagtaatattcattttcattatagttgccaaaactgttcaca

SEQ ID NO: 42321 - DNA, 626 bp, Zea Mays
cgagtccgatgtgactcagagttggacatggaactcgaagcacagtgcacgcactatgcctgaactaaaaaggtaggttgatacatgaatggcaggtagaggaggagagacaggtggtcggctagtagcaatggacaggtggtagagagacaggcggccatggccatggacagccagctagtagcattgaagaagccgctggcaggagcgagttggaagcgacatgggtaatgctacacatctaatagaccaatgtatttttagtaggctgccaatttttccaaacagaaataggcagtccatgtatcatactattcacaacagaggtacttaaaaatacaaaacagctctgcatcatatgagttcacgcaccgtttgaataattagtgtaatttaacaagctccttctaaacccagattctaatgatcagtacacatgggattttctgacagatcaaacaatctaatccaccactgaatttagtttgttcttgtaaattactatcttgtaacgtttcaaagactgatgaatcatatgtgcaatccttaataaccatttagtttgaagtagagaactcactacgttgaagcgattgaagagaacggctctcgtcatgagcagcgaa

SEQ ID NO: 42322 - DNA, 504 bp, Zea Mays
gggtgggataagtagtcacgactcgcccgtggccatcatcaggcgggacaggtagtcaccactcgctcgaggccaacccccgtcgggatacgtagtcacgactcgctcgagaccattctcgggcgggagaggctgtcaagaatcgcccaaggccaagcccggcggtagacgcagtcacgactcgcctgaggccaccctcgagcgggagacataatcacgactcgtctgaggccaagctcgggcgggacaggtagtcacgactcatgaggccaagcccgggaagcagacgcaatcacgactcatccgaggctaagcccaggtagcagacgcagtcatgactcacctaaggccactttggcagaactgtccgcactcgacctcctccacctcttcccgcctctcgctctaaccgcgccacgttccacatgtcgtggcctccatccacctaacaccctccaatctgcctcccgacgcaattcgcggtcccacacacccgacgccctg

SEQ ID NO: 42323 - DNA, 291 bp, Zea Mays
cgtctttctccttttcttgcagccctaaatgcgtgaacaatacttgcagcactatagcgcgagtactgtagcaccttcttcctttatcacgtgtggtggccacggtatctagtcactgccctcgttccttgcgatcattgaggccacggtgtctagtctcacctccatcaacgccaactccgccaccctcacgcactctgtggcgaccattgaggccttcatggcgcgtgtggcgtttccttcccaaccaccgcccgcgtcacctccgccggctctatcgcttctgccggc

SEQ ID NO: 42324 - DNA, 495 bp, Zea Mays
aagggagctagagcaagaaattcctaaaatgcagcatgaagacacccaccaccagcagtcggtcgatgtggcttaccaaaacattcaacatttccacaggtcaaccttcacaccagctaccttccaagggctaaactatatcgatgggcgaagtcccttcgcaccacagcttcaggcctccccttagccgcaaaattacagggcgggcacatacccaaaatacaacgacaacatagatcatacttagtacatcatgagctactaggttgtagttgcaaatagatcaaggggagatgacgttaccatggcaaagtcatagcaaagtccttagacgcaacctcctcttcatttggagattttgatccctttgctttcttctctatgccaccctaatagatagcgcttttgcttttaagccgtcgctatcatcaccactttccgcgacctccttaccattcatagtaacaccagaaccctcctcttctccttcctccg

SEQ ID NO: 42325 - DNA, 317 bp, Zea Mays
cccacaatccaacggcatcatggagcgcaccaacggtaaaattttcacagccatcaagaaaatgctcctcgacgacaagaagggcaaatgggccgacctattacctgaagcggtctgggcgctgaacacgaccaagtgccgggcgactgggttcactcctttccgcctgctatatggatcggaggtcatgaccccgctagaactaaaccatgggtcaccacggacaatcacttcagccgtccccgacgtagacgagccaacttcgaaggacctcatcgacggagaccgtgtcttcgccctacaggccctcaacaaat

SEQ ID NO: 42326 - DNA, 273 bp, Zea Mays
gaagggtaagagacggcacagtgccagtttccaaggacgcgaacagacacgtcttgtcacgttaaaaaacgcggcacacgaccgaacaagagaaggaacacgggacgaccaaaaataaaacgggaagaaaatggtggttttgaaatgatcattgccaagaccagggggcatgtgttatcgccatattttagcagggcctgagatggaccacaacacaggatgggtcacgaagagtggcccagaggagcggaaggatattagagtccgactgtt

SEQ ID NO: 42327 - DNA, 431 bp, Zea Mays
taaaagtgcaaggtaacaaagaagaccacaaagcgagttgtaggtgtggcaaagggtaaggcatacgagaatctttaccaacgcttgagtacaaaggaagaagagaataacatatataagatcaatcaagttaagtgcattaaggataatacagagcagctctcaataaggaggataagatcagatatagatggcgagagtattctaacaaattgttcaatggagagaataggaacacaaccttttaattggatgactcttttggtgacaccaataggcgttttgggcgtaggatccaagaatctaaggttagagaggcattgaaaaggatggaagtggtaaggtgatgggccttggtggtatcccaattgaggcatggagatgccttggtacatagctatagacctatagtatagctaaccaagttgttc

SEQ ID NO: 42328 - DNA, 437 bp, Zea Mays
gactgatgcccagggtcgtggtaatatttctatctcgggttcgctttgccctcctgttcaagtagtgatggtcggatcgaagttcttgccttggggtcgccgatttgtttgcgccagttagggcgtcgctgcggctcaaaccgcgccgccacggtggggtcgggagatggaagcagggctggtagccgttggatagggagtggatgggcaggattataggtagtctgccatttgggaggatttgatttgaaccatatatctttgatcgtaggtttgagagtgatcgggaattcaataaatcctggtcgtcggatcttgatccgatggcagttcctgcgtgtcgctgcggtgagagtgtgatctaatctggggcgtatgtccgtaatcgggcggctcaagattcaagataccccttcggccatggtattttgaaaaag

SEQ ID NO: 42329 - DNA, 317 bp, Zea Mays
ttgatattgctctatgcatctcatcgactgtagatggcgtggcgtaggtcatttggtggatgggcaaggagaagaagatggttcgccgcctgggtgaggatctgtctatagctttccgcgtccgaggtgtgtggcaagccgttggcaatctgagccagggctccaccgacttcactcggcgtgtttaatgctcgagcaaaatcaggcagcagtttccgagggagaagtgggttcttgcgccagagcctggcatcctgcttagcttgttcccgctcgcgctcctgggcgtggcaacgatcgtggcatcgggaattgcg

SEQ ID NO: 42330 - DNA, 471 bp, Zea Mays
cacccatgcccgcgccaccgcctgccatcgtcgccatggctcgaccattgcggccagcctggtcatgtccacccccgcctaagccaaggccaccatcgtgctccctacacctcaccgcatcttgcccaccaactccctgcccttccactgtaccacagaggcacaccaccacgcaccagtgagctctcctccaccggtgatcgtgggtaggccatcctacgccttacccatccaattgaagctcgtagcaagctccaccaaggtcctattaatctcccctacccctcaatcgaagcgctatcgcccttagccggctgaattgctcgtcgttagcgatctagtccctccgcttgcgctcatggctagaacaactctggccacctccacgcacacctcgaccactgacatgatagctaggacctctcggacctcaccaacacctcgccacgaatgctaccaccaccggtaagc

SEQ ID NO: 42331 - DNA, 438 bp, Zea Mays
aagatgtagtcagcattttcgattaaagcttcgggggtaggagtctcgatctcttccgaagcaatttgctctgtcgccttttcttcaagtgcggcaggctctgtctcggtgggcactgaaggcccagcttcggtttcagcttgaacttgtgtagcttcggcttctgcttgcttagtttcaattttggcctgcgatttggcttcagttggagcgactttctttgcaggagcagggcttagtgcctttgtagtctccagtacagcatctagaacgttagccattctcctcctcttaggagttgcggcagaagttttttgcaccttcggaaaacctgccgctcccggtagactaaggatttctggcatttttgtcactctttccacctgtggctctttggccttattatcttcagccttggctggcccaactgtagttatc

SEQ ID NO: 42332 - DNA, 371 bp, Zea Mays
tcggtgtctcagggaagcttagttcgaggtacattggactgttctctatcttggcctgggttggcagcttggcttatcgcttgccattgccagaatccatggcaggggtacacatggtatttcatgtctctatgttgaggaagtatctgcgggatccagaccatcaaattgagttggaaccgatcactgtgcagcaagatctaactctggagtgtcggccggtgtgtatcttggagtcctcagagcgtgtcatgagaaggagaacaatcaagtatgtttaagggtttgtggactaatcagtctgagcgcgaggctacctgggagcttgaggagctgatgcggcagaagtaccccgaacttttcattattgg

SEQ ID NO: 42333 - DNA, 276 bp, Zea Mays
ttctcaggtgtgttccacacttcccattctagacttctcatgcaatctgcatgaaatcaaatgtttgtgtgctcccttgtatgcttttcattgcgcagaaaataattttactctgccagccacagcctgccttatgctcctgattggcacttcctcatcttgctcccagcagaaagatgaataaaaaataaaatagcagccgctaactcatgtgtttaatctaagtttaatcttcctaggtgctaggcagtggtatagggcctacctagcgcgtac

SEQ ID NO: 42334 - DNA, 388 bp, Zea Mays
gtcgcgaggagccacgctgtttgagagcagcgcctgccctgttctgcgcttttatggtggcatccggcggcgatttcgggatggaaatggcggggatgacggggaggagcttgtctggccgtgcgagcacgagtggcaccgcaagttctgctacgtgatgttcacctctggttctaccggaaaaccgaagggtgtttgcggcactgagaaaggtaagccgtgctcttgttggggcctggttgcttgagataggcagagtgtataatctcgtgcagatattgagatgccttacccctttctcattgttgtgactttggcatcgtgaattagtaggtcccactatgtttctaattgttaggtgtcaaaccttgaaaacataaatgtacta

SEQ ID NO: 42335 - DNA, 274 bp, Zea Mays
acggcctcgaccttaagtactaccctcgccgtttgaccaacagtgttggaggtgtgattgtctcgcccgttggtgacgacaatcctaggctgaacaacatggtcaacctggtcgccgtgctcaacatcgagctggaccacgcctttgacgagttgggcaaggtttgggcgaaagttgcggaattgtgtgctgagcgtgcagcgcgccactatcaggatggtggttcccccgctcctgtcgggattcagcaccctcaccactcgccgccccgtgg

SEQ ID NO: 42336 - DNA, 919 bp, Zea Mays
tcaaaggctcattgagaatggctttaagagaactaaaaaggtatgctaagatctatatgttagctttacaaacaacagtgagaatcatgatgtaggcatatttgtgaagagtgacagggagaagagatgttgtggggcactttcattttgtttcctaacttagttgctgggctgcggaacttcaggatgcgccagcaacttgtatggcgaaaagttgttggggtttattcaagaaagctttcatagttcatggttgagtcagagttttttatagtcatgaaatcagattgatcaggaggttccaaattaagttagatgacatttatcgctcaaatttataatgtgcacttctcttgttactatgttccaatgtccattttactctgtccggtagaaataagtgtcgttttggacactgatttagtccccaaaatagaactttgactatttctttaatacatttattacgaaggatagcaaaaggccaaaagtatagtgttattgaactattttgtgtgaccctacttataatatttttcaaatacccaaacttagtacataaaaagtattttgttatcagaggttggaatggttgaatgcacacaacccaaaacgacacttatttaacttgagggagaatttttttaaaacatattcagggtttttcatgtttcacttttcttttgaatgagcctattttaaaggccttaggtatggaagcacaatccattgttagtgacgggtggcgtgctagaaaaaatgatgataacaattatggtaacaaagatgacagtggtgatgattgtgatggtgatggtagcagtgatgatggtgatggcagcagtgatgatgatgttaccgatcaaatatgtgcgctatgtgatgatggaggacatttgcttaggtaggtgcacaaaat

SEQ ID NO: 42337 - DNA, 319 bp, Zea Mays
catgagctcagttgaagagtagggaaaaaaatagagtggatggaaaattcataactacctaaatgaaaagcaaaaacaaatttggttgacaaatgaagcaacaagtctaggtgtcatgcttgccgctgggagggtgtgccaactgggtagagaactcagcaacgggagagtggccagttcaggatgtgttgtatccctgcattctatatccggtgggcggaggatgaatctgttttaagagatggtactgctagagggacgtgtgctgtttactgggttcataactcagcatttatgaaactgaccaagatgaggtggg

SEQ ID NO: 42338 - DNA, 386 bp, Zea Mays
acgctgcttatgtggtccgtgacgccgtgcgggtccacgtgcagcctgtagggaaagaacgggtgggcgcgtagtcgtcgtcgtcgtcataccggttctcatctccctcgctcccatgcctcaacagtgacaaacatggctcaaacagcaccgcgctctgtgctgcacgactgtaagtactttcctcccctttaatattttcttccctctctcctcaattcatgttcgccttattaggtcctggaaccgatagcctctccagccgtctttgtcgttgttcgccactttggtttgggcacccaccgtcgtcatgggagcgtgggctctgctcctgccgcccgccgccccgtagacattgtctgtgactccgtaagtccacgtttgct

SEQ ID NO: 42339 - DNA, 303 bp, Zea Mays
cgcggtcatcagtcattccgacgctgacatggcttcgccaccactcggatgctatctcaaaagcgcaaatgttgacattaatagctcggccatcactaaaagcgtcgatgtgatgcccaagttatttaattactatcccaaaggagtcaacttcataaataaggcgggcagaggaatgattcaaaaactctaagttatgccacaaacacaacagcaagataatcggcacagaagagacgaaaccattcttcattaagggaagttggcatacttataaatcaactcattatgagttgatacttc

SEQ ID NO: 42340 - DNA, 670 bp, Zea Mays
catttctccaaggccgaagtgccaccccagtcttgtgaccaaatctgagcaaccatatctcgaaacccatccctcagtagccatccgagttcaaacttgaacatcggttggatattactcgggagactgtctccagtgttaagcaacaggggcgtatggtcagaaatatccctagagtgtgctaccaccgacgccttagggaagtgtagctcccattcagtagacactaggattcggtctagcttttcgtaggttgggttgaccctagaattggcccacgtaaattgtctattcaataactctagttccatgaggttcaatccgtctatgactgcgttaaacaagaacgaccacctcgggttaaagttgtcgttgtttttctcagatgacttcctgagaatattaaagtcaccaccaatcaaaactggcaccgttacccgacctaccatgttaaccatttctgccaaaaattcttcttttaagttatcttgcgcaggaccataaacacaaacaagcacccatttaaagccatcattcttatttcgcaaatcaaatttaacatagaagtcgccttcatctataactcctatatcgaaaaccgagagatctatgcccatcagtattcctcctgatcgccctctaggttccttacagtgccagatgaaatccc

SEQ ID NO: 42341 - DNA, 358 bp, Zea Mays
gaaaccaagctaccatggatcaaacacacacagatacagagaagtagtgaagagtggccgtcgtcatggatgtgtgctttcaccatcgtcagggtcagggagactcgccctatcccggcggatgtttccgtggcgtcgttgggcggatagggccacctgctccgactgaattgctcaccggagtatcaaacccgccgcagatcgacctgcgcgcgtggactacgtcatctgtgcctataccgtcggtgaggattttctttcctagtccgttatcgtctactcattgtgcatcatctttcggattggaacctcgtgcgtagaattgagattgggcaaaatgccagtgagggcgccgccg

SEQ ID NO: 42342 - DNA, 349 bp, Zea Mays
aagcactcggacaccaagcgcgagcctacccaagcatatgccctcacttaattggactggtccaaccctaattgatgcttgttcatggccacgacgacgctagtgcttcggtgagcgtgttccgaacaaccaaacgcgatagtgtttaaattggagctagggagagtttcactgattcaccagagggcgggtacatgtgtaaatttgaatggagcgggtatgggaaagtgggtcaacgggagcgcgctcgtagacgtgttttgcggccacgaggtaaggttctcgatgccctatcgtggtaatattcaattggctgggccgacaagctatgttaacattcaaggatgct

SEQ ID NO: 42343 - DNA, 324 bp, Zea Mays
gtctcaatgatgagggatgtggcctggatggtctcctcaaaaccatcggagttgtcgtcctcctggcggcggtgatgtcctgcgaagcagacacgtagcaagtggatgtgcaagtatgagagggagcaagtatgagcggcggcgatctcctgtgaccctctgtagctactaccttttcgatgcatcagttgagggagcatgcgggaacgagaggggggtgggaatcatgcatatgcgcgggagatcgatagaaattggagattgaaaaggactgaaccaaggcggatatctggtgtcacacccggttttaaggggcaaacccgg

SEQ ID NO: 42344 - DNA, 581 bp, Zea Mays
cccgttccagtgctgaagcagagtatcgtgcggtggcaaatacagttgctcagaccacctggctccgacagctccttcaggaaatgcatatttccctaaagcgcgccactgttgtcttctgtgataatgttagtgcagtctacctctcctcgaacccagtgaatcatcagcgtatgaagcacattgagatcgatctacattttgttcgagaacgagttgcggccggtgcagttcgagttttacatgttcctacttcctcccagtatactgatatcttcactaagggattgccttggtcggtgttcacagagttcaggtccagtctgaatgtttttccttgtggctgaccacgttactactggggtgttggattaccataattagattgattactttccttgctttaggcctgccttgtacacgcatggctatagttggagagtcctaatcacgtgatgcacttcctttaccaccgggtattacttctataaaccggttatactcgtgcatgtctaatcaggtgatgctgcctatatatagccgattctcttgatcaataatacatcaagcattcatctatc

SEQ ID NO: 42345 - DNA, 275 bp, Zea Mays
gtcaataacaaagttaataatttacctgagacagaaaaggcgtttcaggaactgaggaggcggcgttgctccctggacattaatgttcttaacgccatggtatccatatacgggaaaaataagatggttaagaaggtggaggaggtcctttcactcatgatggagaattctatcaaccacagtgctgcaacctataatagtttgatgcatatgtattctcgtttaggtgattgtgaaaagtgtgaatcaatcctcactgagatcaagtcaagtgg

SEQ ID NO: 42346 - DNA, 403 bp, Zea Mays
attaaaaagcggccacaccttctaggcaatatgctcttgaactaaatccctagtgccaatgtatgtacataccgtgttaaaggccatcaagcatgcttgcacttcattcccactcgcgatagatggcctcctgatgtcgaagcgtgaccgtatgggatgctggattatacccctcacatcttccctctcactcagatcattcttgacatagaaccattgcttgatccaagagcctggccatttctttcagaatgttggcacatgatacctcacatcagaacggtgcacaaagttgtaacatccgaagttattataatactgctccttcccaattgccttcgtctggtagaataattcatgaatgttgtagaagcactcgacatctggctccatcccttgactt

SEQ ID NO: 42347 - DNA, 1190 bp, Zea Mays
ctcggtttgatcgtcagttaaggcacagctgaaagggtcaaacacttccggcccaatttgccagcccattgattgcgcaatggccgcacggccgttccagttcctcctcccgttccacctgaccagctccggctcctcttctatttatacctcgcaaccccgaaaccctaaagcccgcactcgccgccgccatctgcatctacctcctcgtcatgtttggtttcagagatccgccactttcctctgcgttttttttcgggatccttttgtctttccatggtagggtgcgatgacgaggtacacacaaccctgatcaatcgcctccgatggcgatctgatgttcaccttttacctttggttcgtattcgctgagcatccgatcttcttcatctatcgaggccagcattttttgtttctttttttttcttgctcggtttgctttggatcgagggacctggggatccgccgcccttcttcgtgcggcgtcatccagtttttacccctcgaatacggcttgcaggcgcgtcctagccatctcgctctctgcataatcctctgcgagacccgggctcgtatgccacattcgtcgttgtcaaactaaacaaaaaaaataggcttttgtcgcgaagatcccagcagagaggtgcgctgatgcctccctaacaatcataatcttcgcagagaaacgctcatgatccgtggtttcgtggatgtgtgatttggatttttgttccattacatctgtttccacggcgacattttcatgattactgcagcgaactgaacgagggacctatggatggactgctctttgtccgtgttgtgccgtccaagtttgccttcggatagtaaaaccagcaatctggtcacgagatctcgcaagccttttcatgtttgtgggaatggtgtgccaatttgccaaattttgggtttctatcgttatcttcataggtcgtaattttgccaggatatagcgccggaaccccatactgaggtcgtcgttattgcagtcataagcgacgatgaaactttgaacagaccagaatgttcttgcagtcacaagtggttgtctaaatttggatattgaacagaattacttccagttgaacctaccgcttcaacaattggcatacttgcctgagtggctaacgatccatgcaatactgcactattattaattggagcccgag

SEQ ID NO: 42348 - DNA, 406 bp, Zea Mays
ttcctcggttgcgccacgcctttgactctcttaccacgtcgtcgtgagtcgtggtcattacccagtgactgctgtagcttattaccccgtaatcgccacaatagatcgccaccagtaactcttctcttgctccggcgccagcgcaccattccaaattcacaagccaccgcccttgggccctataaattgagcgtgccatcagctccgctaggtaatcacacacccaacgcaccagcccatgcctcagattatccaccagagcgcttcaatttgggatttcccccaaattagtcaagaacaccgtcgtgtgagtgctcaccatggctagctctctacaggtccgttcatgtcttccttgctctcgtttcaacatacctgtatgctatagatgcttagcggcccggcc

SEQ ID NO: 42349 - DNA, 540 bp, Zea Mays
catgcatcttgttcatgcattctatcctcacaatatactgctctttaaatatcactcactgttcattacaaaattccctcctacttaaatattcctaaaagcaatgacaactcatgttcatcccctcccacccaaatatttgtatctgcactgaaatactcttatataccatgacaattcatattcatcccctcccaataaaatacatgtatctacaactagttttataacttgataagatattggagacaaacaaaacataccacagttgtcttagataatcggatcaattgtccgtacataagaagagtggagatgtaattagagtggacatggcgttgctaatatgatcgtttgcagcttgcggtcactgtgggggacagatatcccccgggtccactagaaggcaagaaggcctcgcaaaaggctttgggcctattatctcgcaaagccatccctttgtgggccaggggaggactactgatggaatgggccgatgcgtgataaggaagcagtctcaggcccaagcatctcgacaac

SEQ ID NO: 42350 - DNA, 296 bp, Zea Mays
aaataaacagaaacattggacttcgaaaattctattcgaaataatagataagtactacctttgtccactagaatccattatacttgtggatggaggtactagtgttttgtctatagttctaaacttggtgtgcataatcaacatcatcaataccctaaagtagtaacagttttcacaattcacaaaagcaaaatgaaattgaaatgcagaaaaaatgcaaccatgcacctcatgctacggatatgattatccgtgggtcaggagcagtatctgacctcactattgcataatataac

SEQ ID NO: 42351 - DNA, 487 bp, Zea Mays
ggggctgggtaagcgccagcaccatccttgagggccgagttctctgcagcagccacctctaaggctgaaggtccctcagtcacttccatgggagcagtgcaatccagaccagcctcctgaccctcaagaccgcgctccaaggtcgatgaggcgcgggacgctgcccgggatgaccccaacccgacatcgggcacatcagcacaaacatccattgcgccaccatctgccggctctgacaacagatcttctagaaccatgtcttcaagagtttgatcaaagtttgccagagataattcttgcagaccaatgagttcagacaaggcaggagaaggaacaccactactttccccactagctatgtaacgccggctgttcttccaaatcagagggatttcatcctcttcttcatcatcttcatcaacaacacggacagtacacccattggggtcagcatcagacgggtcacacccattggggtcagcttcag

SEQ ID NO: 42352 - DNA, 298 bp, Zea Mays
gcactgaccaacagattgtggtctgggtcaaatatttttagacacccatcaaataacctgatgtcgcaaccagcctcctctaattgtccaaaactgacaatattactttttaacttcgggatgtaatacactctggttaaaaccttgtgttgaccctatcgaccttgtatcactacagattcaagtccacatatttctactgcagatccatccccaaatctcacagagccgtggacattattattgagatgtgtcagtactgaccttgaaccagtcatgtgattactggctcctgtgt

SEQ ID NO: 42353 - DNA, 735 bp, Zea Mays
attgtttctgagaggatggagatgaatgtggttcttggtgctgcacttgtgaacatgtatgccaggtgtgggcttgtgaacaaggctcgtgagtggttcaatatgctccaggaacgcaatgtggttacgtggacctccatgattgcaggatatggcatgcacggacatggcggcgaggcagtcaagctattcaatttgatgagacagcaagggccaccacccaatgatgtcacttttgttgcggtgctgtctgcgtgcgcacatgctggattggtaagcgagggccgggatgcttttgcttcaatgaagagtgtctacggattggtccctcgtgttgagcactattgctctatggttgatatgtatggaagggcaggacttcttgatgatgcgatgcgatttatacatgattcgatacccggagagcctggacctgaagtttggacagctatgcttggtgcatgcaagatgcacaaggatttcaatcttggagtggaggttgctgagcgattgatcgccctcgagcctgagagtccatctcaccgtgtgctgctttctaatctatatgctttgtctggtaaaatgaaccatgttgagaaggtgagggatacaatgattaagagaagattgaagaagccaataggatatagcttgattgagattgctggtgttgctcatttgtttcgcatgggtgagaagtctcaccccaaaacttcagagatttaccaatatttg

SEQ ID NO: 42354 - DNA, 381 bp, Zea Mays
gaaagaagaagggtgggggagcttgcgatgtgaaaccgacgatagggattagagctgggtttgggtatctggtgagccattggatcttggtgtacgggtgagatcgaatccagccaaataggatcgacggtcgggataggatctcagttttcccctttcactatcttgatctggaccgtgcaagatcgatccggcgcactgcgttgatttagaatagccaccgtcgatattagatcttgcggccatggccgtctaccgattcaacctgatggggatctaatcctaacggccgggtgatgatcggacggtcgtggtcttaggataccccttcgactcaggaatcttactaaagagtccctgaacttcctaggaaccaacccg

SEQ ID NO: 42355 - DNA, 442 bp, Zea Mays
gcaggcggcaaactttggcgaggtcaccaggaccggccgcagggcaagtgggtacggggctacctcatgatctcatccacggtgaagatcttttcactgtcgatcataatccgcacaccagagagcacgaatcatggcggccggcacgaatccaggcacggaggtcaccagcggcgaggtgcattgcatccctgatattttcagacactgtaccatcaggatcttcttaagagcgcctgacagagcaaaatgaaaggctttgttctctaatttttatgtgacaactcgctaatccatctgtaacaaagttgttgtccaatgtaccagctacgactttggtacaaagaccttgctcaaacatccactaaatctcccgcaattcgatcacaaagttcatccgatgtcactgttggtcaagattcaggcttcattgatgattgac

SEQ ID NO: 42356 - DNA, 348 bp, Zea Mays
tgcgacggagggcgcctaagcctcgcccattctgtacgctccctctgtcatgaagctcgtactcttcaatcttcacttgtttttgctttccctccgacacattccgcttctgttgtggaaacgattgagcgaggggatgtcgcgctttcgccccaacatagtcagccctacgtgacgaggagctaaatccgcctcctggcctcgataggaggagatcgtggagcggacctcagacggggcttagcattcccatggtcttggtgaaagcgggttgtagcacacgctaccgcccatcacctccccctggggaactgagccagaggttgtttaggatttcggtaatgtcag

SEQ ID NO: 42357 - DNA, 368 bp, Zea Mays
gtctcgcctttgcagaaggagctaggacctatacatgttcaatcgtatgtgtcgggccagcccggctgtcaacgatgctacacaggacatgacaaagatggttcgacaaccggcacgagtcaaggctgaaggacgagagcaagggaacgacggacaagagcaaagagacgggcacaacagcaacagaagagtggctgcaacgtatgaatatttgggccagtgtgggccttgtaatcggcgctgggctgagcccatgatctatgtatatcacagaaactcaggacagggagtcggcatcgaagaaccagaacattgatacagtttctatcgtcctcacagatagttccttcttcccctttagttctgtt

SEQ ID NO: 42358 - DNA, 363 bp, Zea Mays
cgtcgaaggtaattggtacatgggaccattttgtctggaccactgggccagtgagggctacgtggttaacactaaggtagtgatcctttttctgccgtttggtgtcgaagtctgcagttgaccctccagtaatcatgtggatgaccccgtggaaaggctgctcggtgaagtcctcttgtttgggtgctggtggtggacgattttgatgatgtggtggtggagggaggacttggatcacttggtgttggtggtacatatgattaggatggtgaagggttggttcattgtggaattattgttggtggtactgttggggatggtaagtatgcgcgacaactcgttgattgtcggctggctgattcc

SEQ ID NO: 42359 - DNA, 284 bp, Zea Mays
acgatccatgatctacggccagatcgcgcactagcaatcgttacgcgactatctaaatcataaccgcccattgaaccacccacgacctagatttaacccagccgaaggggtatcctatttctaatcgtagccacccacgcgatgatcaacgggcatgaccacatctccttcctccgaccaaccgagacggcggcgccgccctgaaccacggtggtccattgccggaccacacccaaaactctactctggccgccgtgaatcgatccaaggagcgtaaactactg

SEQ ID NO: 42360 - DNA, 316 bp, Zea Mays
gggaaataaggtctgttatccagatgatgacattgcaaggcctgtggcatgaacactggttataagatatggtattaacaatcatcgtacgaataaagtgggcacaagccttgcgatcccaggacgcaagttccatggaagcgacattccttatgattattgcagggtagaagtgacgacagtcatccaaggatccaaggatgacatgctagacatccctagggacaaaggtattgagacacttggacaagccatcaagaatttcatccgttggcctcaaaaggatgtcgaattggttgatccaccactgtcgtcg

SEQ ID NO: 42361 - DNA, 325 bp, Zea Mays
gcggggatggcaggttatttataataaagagtagggtttcttttgcaaatttgaatggccgaaggggtattggtggatttcggctggttgatcataaatggatggcacagattaaatctacttttaattgaactggtatgccatgagatccttcagatctaaatctaacggtgctaactcattacccggagatccaatctcggccattggccaaagatctagtggcctggattaagtgaccgaagaggtatgctccctgtctaatcacagccacacatccgcctctcaacgacaccagtctcatccccatcccactcatcttcct

SEQ ID NO: 42362 - DNA, 378 bp, Zea Mays
cacgccaggccgcgaagggggataacttctgccgatggcttgaagatttggaaagcagcagagatgacccacgacgcctacattggtagacttcgctacaagatgcgtctatgtaacagagattaccatcagcatggcccacctgtaagtgtggctcgggagtgtatcaattgcagtgtaaccgagaaatctgtacttggtcatgtaattaccctgttgtacaatgcatggcaggaatatagttggtagcccagggcattacgttacttattatactaacccacgactaccttataaatactccgggcctgtaactgtccggacacgcttggtaatacaatctcgccaacaatttgtcgcttgattgtgctactcgct

SEQ ID NO: 42363 - DNA, 297 bp, Zea Mays
gttctgcgctccgtacagtgtgctcagtggacgcaaggtttatactggttcgggcagaacgtacctacatcagtcttcgacggctcgcgctaccgacacatttgttgcttgatgctcgtagtagggttacaagcgggttacaagcatgtaagggagagaggaagtctcccaagtctactatgcgggagtggtcctaaagactacagaactgtagtcctacgctaagccttggctctggccttcatgtcttcatgtttcttcgagcatgtgtggttgccttctgtcgagtgtcttctg

SEQ ID NO: 42364 - DNA, 444 bp, Zea Mays
aaagccacccgctaaggtttccacgtcagtattgatggccctttgggtgaggtaacttagccaagactaccaccccatgttaacatgagctgacaccatcatgacacggctggaagagttttcccaacatcttggtttgctacagggtgacactgattatggtgttgacaccgagtacgacgatcagccccatcgtctccggcacggatctcatcatgtggtacgtaaccagaatgatttttcctctaagattaaactcactatacctgaattcaatgatacatataattcttttgcgtaccttgagttggaacttgctgttgtacaaaaaattccatgtcatgctttttgtgcaaaccaccaagttagagctgctactagtgagtttactgattttgcttttatttggtggagcgaacattgcaacacacatcccactaaaat

SEQ ID NO: 42365 - DNA, 301 bp, Zea Mays
ctaaattctctattctctggactacgcgtcaattcacagacaactcagggggccacagcgcaagattccctagacttagagtacagtcactctagactgcgggttgattctataatattccagggctcttacacaaaactaacggccaaaagggtatcagcccatcggagcctttcgatccaacatcgacgctacagattagatcggcaccctgcccaaatcggtaatcaacgtgatccgaccaattagagatcaacgcccctcgacagatcaccacccgccagaccacgctacccctcgg

SEQ ID NO: 42366 - DNA, 442 bp, Zea Mays
cacttccagcccagcagccccacccaagcgcgcgcactttccttccctccttctctcactgacgcctaggccgcacatgtcagccgttccttctccccttcctctgctcacctgtgcctgcattggactccgccgtgtcatgcctcccgcgtagcaccgctaccgggcgattcattgtcaaactaaggagcacgccgagactctttcccttttccccgttagcccattcgatctcctctttccctcggtgcaaatttctttcccgttcgcggtgccatgtatggaaagtcggccatatccttgattccttggatgatcggtgatttggagcctgattctccctgatttctcccttataagagccgcccgagctcccgctgtcgatcccatgctccatcactccctcccatgccctcctgccctttgtccacgctcgtcatcg

SEQ ID NO: 42367 - DNA, 339 bp, Zea Mays
ggaagtatcaactcataatgagttgatttgtaagtactgtaacttcccttaatgaagaatgacttcgtttccttctgtgtcgattattttgcttcgtagtcagttgatctctatcatgatatttattacccgtgatgttctctatctgttatgtttgtggcataacttagagctcttgaatcattcctctgtttgccttatttgtgaaattgattcctctagcatagtgactgagtaactcgggcgtcatatcgtcgcttttaggggtgatggctgagctattattgtcaacatctacgcttttgaaatagcgtccgagtgatgacgaaactacgccag

SEQ ID NO: 42368 - DNA, 437 bp, Zea Mays
gaaagatgactgaacctgctagttcttcctgatgactgaacctgcaatctttgcgatatgtctgattcagtatcccacgctcctagcaagctctagtaacggtttcttgtattctcgagcctctgcatttggtgttcttcaggatgcaattgttgatcacattaattaccttccaattttctaccacttatcgagaaattgttgtctgttctagattgtggtggctttacgaattgctctgcaagcgttaatctgcatttgatcatggtagaatgtcataaactcgtatgcgtagtcttagctgaagtaaacgctggagttctttgtcatgatgtgtactagaggggtttgagtgatctggtcttggtctcacaatggtatatttttttcctgatatttcagagaaatctgtaaagaattttgtctctgaacctttc

SEQ ID NO: 42369 - DNA, 832 bp, Zea Mays
ctacaactttgctacagatcattagttatgttgccatatgaaattgagagaaaaattgccttcaacagggactgacaggctgtctgaatgagttagtcgccatggtatagtgctccagatggattaggccgccagtagggaatcctcaccgccgatgactccctccgtcgcgattcgtgtcaccggcgactagattcgtgtctggcgttgatgaatggcctcacgaggtaaaaaccgtgccttggacgccactccggtgactcaccgtcgtagcccttctgctttacggctggagcagataagctcgccgatgaaccaccatcgtccgaccttgtgccgcgtgtcccaacctcgccaccgcatcaccgtgactccctctaagcttcccgtcgaccaccggagttactgccacgacgttgaacacgtatccactgcacccgtgttcttcttcacctccggccgccgtgtgtctcgcccaaattcgtgaccaccgctcgctcctcctataaattgagcccccgggcagctgcgctagatcatcgcgaagctaacgcacccactctccccctcaattaaccaccgtagccgggaaattccctatttcccccaattcggtttccgccaccgtgaaatccacttcaccgtggtcagccctccacaggtcagcccctgtcctctgcttcctcgtttgagcactctcacagctttgtgatgcttaccgaaccctcaatttgtactaagtagccttagatcgccgggaacaccttcatccgtccgccatgctctcggtcaccgtggccagagctcattagttggtcattcgtgcaattaa

SEQ ID NO: 42370 - DNA, 475 bp, Zea Mays
gactaggatgaacaaaagagggttgaggcaagatgcttttgttaagccagttactgaggacttagaggtgaccagagaaatcttgaggggctttggtgttgcctctagtgtccaaactaacttgcaaaaaagtttttcctacccaattcggtgtgacaatgaaagggttgagttggctgtccagaccttgggatgtgcctcaaaaaacttccctacaacttatcttggcctccctctgagcagcaaaaaacctagtgctggagaccttgttccttggattgagaaaattgctgccaagcttccaggatggaaagttgagcttctaaacctatccgggaggatcacgcttattaaatctgtcctgtctgccatcccggtttacctgtttattgctctcaatgctcctaaatgggttatcaaagccattgataaaattagaaggattttttgtgaaaaggaagaaaggaggctagag

SEQ ID NO: 42371 - DNA, 765 bp, Zea Mays
ttcggaattgccttctatttataagtccttcactcccatggtacacacccagttttctgctactattaaaatattccgttccgattctggtggtgaatttttatctgacaatttccgccagttattgacattaaaaggtactctagctcaactttcatgtcctggtgctcatgctcaaaatggtgttgctgaacggaaacaccgtcatattattgagagtgctcgtactattttgatatcttcttttgttccttcacacttttggagttaagtcgtttccactgctgtgtatctcattaatagacaaccatcatctaaactttctggcaaatccccgggtgaagatctttttgggatcccccacgatatgatcatctccgtgcgtttggatgtatctgttatgtcttgttaccaccacgtgagcggaccaaattgactgctcaatctgtagaatgtgtattccttggatacagtccagaacacaaaggctatcgttgttatgatccttcgactcgtcgtattcgaatttctagagatgtgagtttcaatgaaaatcgccccttattttacaaccagcctactcactcctcatattatcccccacagaatctacttctttcatgtgtcttccttccattcctgcatctacaccatcatcttctacatccacatctaatgttctcattccaataacaccaccttccacctccacgtcatcctcttcttactcttccaaaccacctgtcatccaaacctacattcgtc

SEQ ID NO: 42372 - DNA, 428 bp, Zea Mays
gacctataagcttaattcatagctttgccaaggttgtcaccaaactgcttgcaaaccggctagcttcaaaacattcagatttagtgtcgccaaatcaaagcgcttttgtgaagggtcatcgtattcatgacaattttatactagtatagcaaacggcgaagtccatccacaaccaaaagattccaagggttgttctaaaacttgacatcggcaaggcctttgactcaactcttggcctttcttattggaggttttaaggcatttgggcttcggtccggtctggtgtaacttgctttctaaattgctgggctcctctactagagtgctggttaatggggaacctggggatcttatttgccatcagcgcggattaaggcaaggggacgctttgtctcctatgcttttcattatggttatggatgttctga

SEQ ID NO: 42373 - DNA, 284 bp, Zea Mays
cgggtttatggcccgatcaaaggccacgaacgtgccccgaagagattgcccgtcgtgaagggatacacacacggtaaggaggcacgcggtaaggaggcacgtgggccgcggcggagcgaaggataggtgttgctggagcagttgtaggaaaggagaggatggcacccgcaggacacctgtgccccatgctgtcgaaggaaggagatgactgggagcggtatacggggccacgacggagcagggggagcccaaggatgagtgttgtgaggaggtgcaacaggagg

SEQ ID NO: 42374 - DNA, 361 bp, Zea Mays
gccgtcggaagcatggctccacgatctctgcggtcgaattgggcgctggtatgagttcttcgtgggtcaggggtggtgttgacaccctcatcgtcacctgcgataagtcgccatgcccgatcgtcgtcggttcgccagagaactatgtgccggtgtcgtggacttgcttttgtgaaagggtggaaaccgaggggcctaagtgaatctgtcagcgagggtactaaacagtggtacaggccgttatggaatagtcagggtggtaggatcctctgtgcgaaatttccagcacgtgtgcgggctcccgtccgtgggccggcttgccctgttgagcagggcgtgtgggctagttgtgggccaacac

SEQ ID NO: 42375 - DNA, 360 bp, Zea Mays
tttccagagaactcaggggcctcggggtaaaataccacagacaccgagcacagtcgctaggatggcgggttcattcctaataaactcagggttacttacgcaaaaatccaggccgaaggggtatcttctattgtgggccgaacgatccagatccaacggcctggattagatacggatcaacccgaaccggtacgcaatcgtagccttacgatccgcgatcaacggaccgcgctcaacataaccgagatcaacgcgcatccctcggatcttgaatcaacggtcgctgcgcgctccgccgaaacggtacgatcgacttctaatctaaaccgtccctgacgcatccaacggcgtcagcgtttc

SEQ ID NO: 42376 - DNA, 388 bp, Zea Mays
caatcgggaaatcctggtcaccaatatccggtaaagggagcttaagaagattccacagcctagctttattaataatgctctgaagaaggtcagctgccaagacaaacaacagaggcgaaagaggatcaccctgtctaacacctctcttgcaatgaaagggcttaccaggaacaccattgagtaacaccgaagacgtgccagaaagaaggatgctccgaacccagttgatccatctaggaccgaagcctttgtgagacaaaacctgaataatcagttcatggtcaacagtgtcaaaagccttttcgaagtccagcttgagcacaatgatctctttttttgaggagtggcataagtgaatgtattcataggcccaggccaagcagtcctg

SEQ ID NO: 42377 - DNA, 621 bp, Zea Mays
atctctcctacacccccttctggattgatccaaacaatccagcagggcgtctgaggaaagccccctccagctcttgtggacatgctgctgccggtccctcgcgtccctctcctggtcgcgaatctcccacaccacgtggtcgtggttgtggtcgaggtcgtggtcgcgggatgggagctcgactggcccatggtattgcagccttcttttccatgtgcaggaacatatcttccgatgtgcatgagctggtgaggcgtcagcgggagactgacgacaaccttcatcgtcaagcctcttccatgggtatgccatttgctccccgctcgcctgatgtgcctcttcattctcctccgccagaaatcaatgaatggcaccagtaggcctatggggtgcccttcatgacagctgaagatgatgaagaagaggaagaatattttgatgatcgtgagcagtttgccccgcctccccactagggggatctgggtcaatcttcttcatatcctccaccccaggatccatcgagtaactatcctccccagctcagcctggggaagaaaactttgcatctaacttggcgtctcaattctttgatccgactcctcctcagtggtgatttgtggt

SEQ ID NO: 42378 - DNA, 1176 bp, Zea Mays
gagttctagaaagtcagctgtagctaacagctaggtagtagcagcagtagcagctgtcaaagagctggcatgtactgcagcagctgtcctgtcttactgtagcagacgtcctattgtagctccagcatactgtagcaaccggcctattgtagcagcgcccttgcatgttctataaatagggatgtaatcctctcttgtaagctaagcttgagaataaagcttctacttcatatcagatctactcttcatcaaaaacagtgtgtgagtggtgtagctgaggggagaaggtgttggttttgctaacattcgtaagcaattgctaaatgctcccaccactccatacatcgctgatgtgttgtttgccttgattgctgaagagacacatattagttccctatcaccacatgaagggcacctcctctgagccttgtgagcgttgcaagaaaactcctcattgttcagaaaattactgtctgttatccaaagaagttggttgattatcatgcacggtgtgcagcacatggtcatggcaccgattctactcatatttgcaccgagttcatataacatggatacatcaacataatatgagttgattttggcaacaaaaaggaagaccgaggtcttggttagtctcatggattgggatcaatggaacattacgcaacctagggacattgtccaaagtcaaggggaggtcaagcagggcggacattctgattctgcctaggtcacgcttcgctgcaactgcaccccatggatcaaaaggcctaagctgaggaacagtggagaggcatgaagggggaaatggcgcaggtttccgttggtgaaacatgggagagtgtcgagtttgaagaggactaccagcaatggcggacaagaccaagcaactttgggagcagcaacagctcatgcaaaattaagcatgtgacgatgaaattgtaaacacaaaaaagagaacagcatgggcaatcaattttactactgcctggtgcaagttgttggttactagcagttgatttgtggttggcagcacttggttgcttgagaagagaaagcaaggagcaaggcacaaggaaaaaggcagttgtgtgcatgaactcgactcccgtagggttacagtgggtggatcgacagttccattggctagcatatattgccaaatttattttcttt

SEQ ID NO: 42379 - DNA, 523 bp, Zea Mays
cggagttcttgagtgatttgggggaaatctcaaattgaagctctctggtggaggatctagggtataggtgggtgcgctagatgcgtgaatacataacgaagctgatggtgcactcgatttataggctccgggggcggtggctctcaatttgatcacggcgtgctggcggccgaagatagggaagaacacggtggctgtaaccgtggcgttcaccggtgcaacggcgcaaggataatactcctaagggtgccacgattactaccgcataataacaagctacagcgtggcgcaaccgaggtcaccggcgcttccacggcgacgccggtagtccggccacgttgcaacgactatagccacggtgataaactccaatctgcgatcctatccattcccccatgagatctttaccttctcgtagaaatcttctgcgtgcaaagcacaaatcccggcgaccagcacaaatccagacgcggatcgccggcggcgagctgaccgagctggtagtctaatcgggatactgtac

SEQ ID NO: 42380 - DNA, 656 bp, Zea Mays
taacgatcggtaatcaatacacatcctcatacttccatcctttttagtgacaaaaaggactggtgctccccaaggggatgagctgggacagatgtaccctttttgttgaagttctgctatttggagctttagttctgctaactcggtaggagccatgcggtatggtctctttgcgatgggtgtcgtgccagggatcagatctatgtagaactccacttctctttctggtggcattcctggcaactcttctgggaatacatccatgaattcttctaccactgatatgctttctgctgctagattaaacaccattggatcattggcgggtggctgagcctgacaagaaactgactttccttggtggtctgtgagaaggacggtcttgtttgcgcaacttatgatgcccttgtgcttggttaaccaatccattcataaaattacatcaatcccttgggatgacaagacggttaagtctgctaagaacactaccccacttaaaagaattctgacttgggagcatttgagctggcatagaaggtctgaccctggggttcgggtgaccatgggaatttctagatgggtagaggggatgccatgcttttccacaaaaccaatggctataaaagaatgggatgctcctgaatcaaaaggtacag

SEQ ID NO: 42381 - DNA, 362 bp, Zea Mays
gaaaattcgtgaagacctattttatctgtaaacaagttaaacccaaacggatgcctggtcgtcgcttgttgacagttaacacaagatcgaacaaagtcacgcactgagggcttcattcctggccagctcaacactgccttgatgcaccggtatgtaaccagaaagcctgactgcccacacagagtgctatcgtgcaaagttttcatggtccgttgctgcacttcatggctcgaaaccagccagattttgttcttgtgtctgatcactccatgcactaaggtgaagggttccaactgtccaccggttgagaagatagccattatcttttgagccgatgcatcactttcatacctttttgtcac

SEQ ID NO: 42382 - DNA, 359 bp, Zea Mays
gtctaggtgaaaagtgtacttgttttatgcatgtgatcgatgattgggatagtcggggcgaatgaggagtatgattaatcctgttaaagtcacttgtgcggttgatgtcttgtgcgtaatatggggacacgtgtgtgcgcgtgtgccgtggtgcattatagtgatggtggcgtaaggtaattgattgaggtgtgagggtatatgccgtaatatggttatactcacaacgaagaaagatgtatgtctggtgtaacacaacgtttagattgctgtcgtgtaaccgtgtgaaggatgctcctgatggtcatgtgactaaagggtgttgtagtggcaaggcgagaagtaagtctaatattttt

SEQ ID NO: 42383 - DNA, 397 bp, Zea Mays
atgccgtctgtctagcaaattgatcatgtgcgacctcaccctcatgacgtctgtcgtctgccgcaagtttcttaaccaagcacgagggttaccgctgtgtcgcctcttcggacagcagcgtcgtcgttcgtcgtcgaccctcgtcattgcatctacattatcgtcgactctatcggtgcgcgtctcctgtgcacggtctgtgaactatgtcggcacacccgtcgatctgcattgcaccttcatgctgcgtcgacaccctctgtcactggtttgcaccacgttcgtcttcgagttctttgccgacaagtattgtcgtcgcgctccactggcgtcatcaagtctcttcttcttgtgtgccgtggctctcgccgccacgactctaggatcctcgatgcgt

SEQ ID NO: 42384 - DNA, 272 bp, Zea Mays
tcggtgtttcattgaaggtttcgccaagattgctagaccaatggcatccctgctagcgaagaaagttgagttcaagtgaaccccacagtgccaaaagtcctttgaaacattgaagaagaagttgactacaacaccaatgttgattctacctgatgttcataagtcattctcagtgtactatgatgcttcgtacactggtctgggtacctgatgtacactggtctcaggtgtgttaatgcaagaacagagagtagtggcatactcatcctggc

SEQ ID NO: 42385 - DNA, 341 bp, Zea Mays
cgcaatgtcaaaactggggtccagtcgggcccaggttccaccgggatttccgtccaagaagtgcagcaaccgagcatcaccacatggcatgctgaagaatgcaacgctgtagaccatgcagaaatagatcccaacgactggagggagccacttatcaggtacataaaaaacgaggaagaactagacgacaaggccactgcagaacgcatcgcaaggcagtaggcccactataccatcataggggggtctgctgtacaagagtggtgtgaccgggatcctcatgaagaatctcgccccttaaaagaatctcaccccaagattcaagctgagatctttcatgg

SEQ ID NO: 42386 - DNA, 309 bp, Zea Mays
gccagtcagattcgccagctctttggatttcccgagtcgtcgactcgacttcacagcttatgctacgacacctctgaccctcctcgtcgccctcacgacggtgtggctccgggtacagctcacgtcgcggctctgttccgcccgcccttctcagatgggtcgcgacgttcaccggcagattttactacagcagccaagtacttatttgagcttatcagacggactcttctgccaaggatgggatacagggaggctaccacacatatccagctctggctccttggtgccctggtctctcactctgagttt

SEQ ID NO: 42387 - DNA, 455 bp, Zea Mays
caccacctaaaatgcacaatatttgggtttgctttactaggagacgagacagttgatacattcgagtgggtcttcaatactttcaaaacatgcatgggatgtgacggaccatgagtgatgttgacaggtaaattgtaataaatggctataatttattatgacacaaactatatgatatcatattggcttacataatgttatgtaaaattatatatttcagatcaagaccctgctatgccaatcgcactaggcagagtattcccaaacacaaaacatcgattgtgtttgtggcatgtgcaaaacaggtatatgccccacttgaatgaattgtatgcaagatttgaggagatggatttcaaaacaaggttccaatctataatacatcatccattgaatgaaatggagttcgaggctgcctggcaaatgatgataaatgatttctagctacacgagaa

SEQ ID NO: 42388 - DNA, 465 bp, Zea Mays
caaaatcaaacatgactaaaaccaaaaattattctctatgcaaaataaaaatcaaacattagaaagaaaagttattaccctaattatcattaatactcttaaatgtattattttagttgatggtttttatagtgtcacagagagggaactggaagaaagggcgtcgctcacgttgacaagtgtggatgcagtcaaacagaggaggcacatggtcggatggaggagcatcgtgcccacgtgcggtcgtatgtgtcggtggacaccagacggaggagcactgtggcttcgctcacgttgatgcagccaaacagaggggcgcacaatcggatggagaagcaccgcgtatgtcacctcatgcagcgtcgcttacgcgcggacgtacgaagaagtcccgcatacaggcgcacgactggacggaggagtgcatcatctccgcgaaggagcattgcacctacccgtgtgtag

SEQ ID NO: 42389 - DNA, 403 bp, Zea Mays
caggctttcatcagatcagatgagctgatgagcatgagctctcgtcgacaaacacccggcccttggcttggctcctctcttcggcctttctttttcatctgacaagtgacaagtgacaggaagcttgcttggctgtgatgtttacttgtatttaggcctttagggttccaaggcaggagaatccggctgtttcgtttcatccccgcactggagtctccttctcatagatcgatgcagcttcattcgtagtatatagagtattattatttttcccttgccttgtatcttgcgtgtgtaggagtaggctacaagcggcatcccatgcatctcgtctttccttgcagctctatcctactactagagattagagacacatcagaggtgcattgggaaatggtgacat

SEQ ID NO: 42390 - DNA, 354 bp, Zea Mays
gtctaaagagaccaaaatttggaatctggggagtaactgttgcccatatttgattccaatatggtatgagagctagggttaagggggagcgagatcgctggccaggggcctttgcccacgggtgagcaagaagaaggatttttttgttaactcctgcttaattcaatcaataacaacataatacacctggcattacatagcctggccctcgtacatgatgaactaacaaaccaagcaggaaactagcaatcttgtctaactaacctgatctgccaacttagcagttaagaaactaaacaaactaatgcaggtagatgggttatcctggaaccctggatgccaagctagcagcac

SEQ ID NO: 42391 - DNA, 405 bp, Zea Mays
cttgacactcccattgtccaagcagcttctgataaagcagtacttgacccagatgtgcttgttgtgctcatgaaaaatagggttctttgccaatgctaaggcaaacttgttgtataccttgagctccactgcttctacatctctaccaaggagatcatccagctgagtcagccaaagagtctgagtagaggtaggagtggcggcaatgtactctgcctcgcaattggacaggtccacaagctgtcgcttgaacgattgctagctgattaagcatttgccgagaaagaacggagtctcgttcgtgctcttgcttgtatcgatgtcgccggcatggttgttgtcactatagtcgatgaagtgtgcagcaccacgacaccttgggtagtgcaagccatagtcagaggt

SEQ ID NO: 42392 - DNA, 307 bp, Zea Mays
agagctagttcgttttggtggggaagaaactactccgaagccagggaaagatgaagtagtgatctttaaaagtttctttaaagctggtttaatattccctttgaataagatgattgctgatgtgctgaagaaatttgggatctaccttcatcagctaactcctaacgctatcattaggcttagcgtttacatttagggtctccgaagccaaggggtggaaccatttgccgaaggtttctgccgagtgcaagagctgcattaccagaccaaggctagaggagatgggttacatgaaaacttcggctgc

SEQ ID NO: 42393 - DNA, 847 bp, Zea Mays
atgcatcagcatcattttgtttgatacaccttaaatgcattttactaggtccaaaatttcaattgaaaacctaaactagcccaaaaagtagaaatcaaaatcgagagagaagttgctgaaagtccatataccaaagtggtaggtcttggcaagttgaacaactttcatgagtggagatgtccaagttttatagaaaaaaatgtcaattagctaactttgggctgttgtaacttttgatttataggcatttttgtgctggtcactgtagcacagttgtagggctatcttagatgtacaaacttgtttaagttacttaaccttaaagccatatggaattaggagtaaaactagtccaaagtggggatgacaggtttggattttcagacttagtgtggcagattgaaaactgaatttcagtgcttttggttcaactttgggacttctttgtgcctaattcatgtggttttggaccgaggttgttgtagcaagtttgaagaccatataatagtgaacacattttctcaagcaagttttgtttggtgctacaccaaatttggagtaaactgttctcaaactctctctgtcaggcgaatggtgtgttaaacacagtttcagtaacagaagaagttcagattttagtgaatgtcgatgttattgtttgatctttggagctccttaactctctatttgttacgttttgatcaaagatacctgtgtagaagtaataaagctatgattaaggaacgattcttgttcatggagatcgatgcactgctacatgattttgggaataaaatcaacttgaattctcgggtgcaggtactgaatactgctcagcatgtcgttc

SEQ ID NO: 42394 - DNA, 502 bp, Zea Mays
cacgattgaatttaggccgaacgaggatagagaagtggatcgacagagagggtgcatacagcggcgttcttcggagcaacggagtgttccggtggtgggactttggtaaactttgattgattggcgtcgagagcaataggaagctaaggacatgctagaacacgaggcaattgagcgagtactaacccgaagagggctggccacggagaggtcctgcacggcggcgctcggaacagggcggaatggatttgtggactgtgtgagttttccggtgaaattgagttgattgcacaagtgctcgtgtgcgtgatgtggtgaagaagcaggacccaggctcaatttataggccgatggccagagttggatgaggctcgtggagctgtaaacgcgctggcgagctcacccgcgcgggcagagccacgatgatggcccggcgactgccgattaaccaggcagtgccacctcgggacattagcgccacgtcgcagaagatttttaccgc

SEQ ID NO: 42395 - DNA, 378 bp, Zea Mays
gggctgtaaggtgcctgccaccttcaaatgactggccttgactctttggcaagtgtcgcattcagatatatacttagcaatttccctcttcattctggtccactagtacaaggatctgagatcatgatacatcttgttactgccggggtccatggagaatttggaaaggtgagcttcatccaatattttctttctgagctcagggttcttaggaacaacaaccaatcggtctccaaaccatagaattcctttgttgtcctgacagaggcatttgtatttgtccaccttctgtccgatcatttccttaatgacttgaacacccttgtcaccaatctgtgccatgactatttgctcatgtaaagtgggctccactgaaat

SEQ ID NO: 42396 - DNA, 514 bp, Zea Mays
gtcaatttgtagctggttggttgagctactactttgttaaagatggattaataagtattcacatgaaaatttgagatctaggctctgcaaagtggtctgttaggatgactgaatgagaaactgatggtacaatatcgaaatatctcaggttcagttcatctcgccgccggcgaccacacgctcggattcgcgccagacgctacgattcgtgctcaacggagtactgatagttgctcgaggtagtaaatatcaccgtgtggatgaacttgagccactgtttcactctgccgccgtgtccgcctgacttacagccgattcggatgaactcaccggagttagccacctatcgaccatgtgccatgtgccttggtgtcttaccacgttgcagtagctcgtattacacacatccagtgatcgccaatgagctcgccacggtgaaagccaccaatctcttgcgacagtgctctcctctctctccgaccgccaccacgccatctcaaattcacgggccacc

SEQ ID NO: 42397 - DNA, 317 bp, Zea Mays
caaatgtgatttctagctgaaggagataaaatttttgggtcacaccatctctcaggatggggtatcagttgatcctgagaaggtacaagaagtgatggattggaaatctcctaccacagtacgacagatccgtaattttctgggattggcagggtattatcgacgatttattccagacttctccaggattgccaagccaatgactgaattgttgaagaaaggagtcaagtatgaatggagccagaagtgtgaggatgcctttcatacactaaggcagcatttgacaacagcacccgtgctagctcagcctgacaaca

SEQ ID NO: 42398 - DNA, 489 bp, Zea Mays
agaagccgaagctacgcaagttcaagctgaaaccaaagctgggccttcagtgcccaccgagacaaagcctgccacgcctgaagaaaaagtggcagagcagattgctcctgaaaagatcgagactcctgctcccgaagctttgatcgaaaatattgactacatcatttgacacgcttcggggaagaagctgtccgaagaagaaactctggaagccaggcactatgcgcgaaagttgaaatatccgaagggagccttggtttttaacgggagtaatgaagatgatttcttatactgtctcccgaacaacaaagaaatatccgtttgccgggagataggtagaagcatgggattcccgaagctggaagacgacctttcaattttgtcgaaggatgatcttgctgacagcctagcatacaacagtataaaggtatagaagttaactttgaatttgagaatgaggtgtttcatttgtcatactcaattctttcc

SEQ ID NO: 42399 - DNA, 395 bp, Zea Mays
atttagtacacagcatggccaaactaaccactaaggtccttgcaaataaattggctcaaaagttgcaagatatggtctcaccacggcaaagtccctacattcaaggcctattcatccaagataactttatgcttgtgcaacaaactgctagattattcattaacaatgaagggaaagtgtacttctgaaacttgacatcactaaggccttcaactccatttcttggcctttccgactggaagtactctagaaactcgactttgggaagagttggagacatctttaagtgtccttttggccacctcctccacacaaatacttttaaatggagttacaggggaaataatcaacatagaaaagggctgagacagggtgatccattttcacctatgctt

SEQ ID NO: 42400 - DNA, 288 bp, Zea Mays
taggggggctgcatggccagaggtagaaagcgagagcgacaagcttgagcatggcccaagcgatgattgatacgagcaccagctgcatagcgcccctgcgtgagaccgaactgaaccctcggatgtaagatccgaacagggagagcgacacatgaagaggttgacattgtgcttgaggtggccctgctaccggtgaagacgttgcgcacagcgtcacttgtggttttggcggcggtggagagggtgccagtcacatcacgaggaaaacgagcacgtgctagggatcgc

SEQ ID NO: 42401 - DNA, 294 bp, Zea Mays
gttgcacgaaaacttcggctgctacaattttgcttatcacaaagatgcgaagtctccagttatcagctatcgtaccaagtggccagctggctggaagactgaatggttttatgtcaaagttgatgagaagaaggagaagttggttcaaagcccattagaattaatcttcgaagagactaggccccggtgcgacatgaaatcggagagtccaagccaaattgcactgggcgaatttcgagttattgcagagcacattggtactatggatctggtgcaagaattcctggcttttag

SEQ ID NO: 42402 - DNA, 327 bp, Zea Mays
agcgtgcaatttcaattttcatcttcgtccaccagtagtgctgctttagatcatgatacatcttagtgcttcccggatgaatagaatagcgactaagatgcgcttcatctaagatttgctggcagagttcttcattctttggcactactatgcggttatcgaaccatatcacaccttgatcgtcttccttgaaacatttggctgttccagcccttattttctcccgtatgtgcttcatacccaaattatccttttgagcatcaattatcctttgcaaaatgattgactcaagcttcagctgattcagggttccttgttggaccatcc

SEQ ID NO: 42403 - DNA, 921 bp, Zea Mays
ttcaagagacgcaaggctaaggcatcgttgcttcaacatatttagcaaccaaacttccccactggacaaaattctgatatcctgcgccatttccagcctatgtaacacttctctgacaagccccagctgcatcctcacattacccacttctttatgcccccaggactgcagtatgtgagctaaccttttaagcttcaatgacacttgctccaattggcaggagctcctaactggcatgctccaagacgcacccaccacctccagaaaaccaggaattttgggccaaaaactctcaaagtgaaaccgtcttttccccatgcagccatctctgacattgagggtcaaaggacaatgatctgaagatgtggtagcattactatgaagagaagcgtccgaaaatagatcttcccaacagctagtgcaaaaaacatggtccagcttaacaagagttggagcatccctctggttggaccaagtatacctccttcccttcaaaggaatctctttcagatccaaggaattaataagcctacggaagtcccctagcatagccctattaatattggaattgctattatcttcctccctgaaaatcagattaaaatcgcccccaatgatccatggtcccacacaggtatctctgatttctcttaattcatgaagaaaggaggatttaagattgtcctggtgaggaccatacactccagtgaaccaccagcaagaaccatttttctcttgcaatttaactgaaaccgaaaattgcttgataactgaagccaaagatgaaaaaactccatcacgccaggatattaacacccctcctctggtaccaatcgttgtgctataaacaaaattactgaaaccagaccccaaaattgagagaatatcaaaatctgaaatagaacaaagtttggtttcctg

SEQ ID NO: 42404 - DNA, 807 bp, Zea Mays
ctcaattttgcaaccgaaatggtagctccaagctctgcttcttgtggatcccaaaatcatgaacagttgctagaataacgaagacgctgttcatactgcaaggtcggaaaaccggaccaaattacaaacacctggagtatgctagaagcagcacttgccctgtggcaggcataataatttattacattaatatatgactgctgcatatcggtttctatggatctgtctgtccagcagaagagcggctgtcgaaggcctttctgtgccaaattttcaaatgatctagaggatggggccttggtggtgtaagcctagctgagagcaccacaccatcagcctctcctaccaggctaccactgatatctgcttcgaagcttcaggtaagaagaaagctgctgcaacacagggcactacaaagcgggtgatgtttcagaaactgctgggcataacctgtagtggaagtgtggaactccatgccaatctaacaggtggttgatcttcccaggattgaatcaatgcaacggcaacttaatctttttatctggtttcggagtagcatgagtcaaaacacgcaaatgacagtatgatcaacactttatcctcagcaacctgcttcacaactctctgtgcttgctgaggcgcgctttgcgcactgcttcttggatattcttttcatgctccttgagcatctgctccacgtttccttttgctgtaatcattgaacctgagtgctgatatattctgctcttgcccttgttctgatcagatagaagtataccaaaaaagttgttaatggtagaccaaaaa

SEQ ID NO: 42405 - DNA, 550 bp, Zea Mays
ctcagattaacctatagatggacgacgggttgattccacaaaaccccgagggctcctatgtaaaagaggttctgcgaagggggatcggtgaagatcggccgcccgatcactgatcaagggcccagattaaatctcacatccctgcgaaccggtacggcacatgggccgatggatccgagatccacgcctgatatctatccacgccacttatcagatcagagcccccggatccacgatcgacggtccagagtgagacatcgaaccggtatgcgcagatttaatcccacgcgcccatccatcaatcaacggccacattcatctccccaaccccgatacgcgaccacggcgacgccactgttgccctcaacggagacacgccggagtcacgcaatcaggcgctgctatgcgtagtttctatgcctgaaccccaaaatcgagtgcggagcaaacaatgaactcaatagatgtatgtataccgggtattagggtgtccagctacttcgaccacgaccaatggcggcactacggcgcggttgagatccgacgagca

SEQ ID NO: 42406 - DNA, 278 bp, Zea Mays
cgtcggccaactcaacgcccggcgcaacggcaatgaggtaggcgatagctggcgtggaggagtggcacgacgcgagttgatgaagagaggagcggcacgggtgggtgggggacgtggaggagctgtgtggctcctggagtcgcctggtacccgtcgcgatggtagagacttagagataggtgcgagtggtaggcggtagctggcgcagcgtgggtggatgaggagaggagcgaagcggagcgaatggatgaggagcaacacggctcctcctggtagtg

SEQ ID NO: 42407 - DNA, 404 bp, Zea Mays
attccaagaacggctacccacatgtctctggccacggtgacatcggggaaaatcaaaggaataacgtgttcccggcgattcatgacggtctagttcaatccgaggggtcgaggagtttgaggagagcctaaggatgctagaacaaatgaccaatccgattgggggaagcgtgaaattggagctctcgggtacacgattggaggcaatactttgtggttgggtgtgtgattacactacggagctgacggcgcgctcaatttataagaagcaagagcggcagccgggaatttggatgacgacgcgcggcagttggagaaggagaggagcactggcgcaagcgcttagtggttttcaccgtggcgctccctccggcgatcaccggatcccctaacgtgactaatcgt

SEQ ID NO: 42408 - DNA, 370 bp, Zea Mays
ggaaattgacgaatggcaagattaatttggtaacgcaataatgtaaggcatataacgttttggacatgattaaagtgccacaacaatcaaacaagtggcctgcctagatacacttttcgcagcactgaggtgttccctcgccttctctcccttcacaatattaactttgcattatttgtgaagtcttgttcaacaaatgagaaaaagagagaatgcaacaccgtagtctgtagaggtgcaaaagttcagcgttacagtgacagactgaactctacttccaagtctatgtatataagcactttcggcgtctaaaatttaagtacacaattccacactatcagccaaataacactcatgaattagacacccc

SEQ ID NO: 42409 - DNA, 324 bp, Zea Mays
cacggttgtaattatttaacattgtgtgcggatggcgggttcatttgaaaagagtccgagggctcttatgcaaaagacccaggacgaaggggtatctcaaagtcttggcctctcgatccaaaaccgagggcccagattagatcctatctaaagtgaagcagtacgatactatagccatttgatcagcgatcagcgacgcgggtttaaaactttcctggtccaccctgacccgcacgattcatgatcaatgacccgatcgcttcataaatcaaaggggggtacgcggttctaatccacaccattccttcatcatccaacgtccgg

SEQ ID NO: 42410 - DNA, 548 bp, Zea Mays
gagaatatgaaattagcgctctctggtggggggtttgggatgcaggtgggtgcagtaactgctggaatacatggcgaagccgaggggggctcaatttatagatcccatcgatggtggtgtccaatttcgcaaggtcatgctggcggccggagggaacagggatactggagcaggggatgggtggctttcaccgtggcgcttcctccggtgatcatcggttgaggagctacggcggttaccgatgagctagtgtggctagggacgacgtggtggaaggcttggagcgtggcacagtcacagtaaagcacgacaactccggtgacggccatgaggccacgtcgccggtgaaaaggggcatgggacagcgaggccacaatagctcatgcacatccgcgatgagatctttacctggtgaacgaaattcatacgcctgtggcacgaatcccggcgaagaggtggccgacgataagcattttgcgctggcgttctgatccttattaggtcactgtaccatggcgaaatcggattcagtgtacctgacagtcgaa

SEQ ID NO: 42411 - DNA, 321 bp, Zea Mays
ctcggccgcatgcaagacaccactctgtcctcgtccccacacatggccagctgttcccatgtcatgctcaccctgctcatggcttgctgttgcatatctttgcctcttcctggctcttcctcccttttcacgctcttctctgttgcctacctgtcagatagcagggagagagatttcttctgctgccatgctttccagtcacccattgctgcaatattcactagtgaaggtggctgaaggtgagggtatgccggtagttgtgcctttgcttcccttaatcccttttggctccaccaactccgatacgcttttatctgcttt

SEQ ID NO: 42412 - DNA, 679 bp, Zea Mays
gtggacttccgtactatagtggagcaggcactgggcgtggagatgcaacaccagtatacaatggagtcgtagaagtctttgggtgttgatcagcctcgtggccaggacacgaggaggggcaacactggaggtccagcccacaagaggggcaagtctcagcatcagcgccaccatccctaccatggcaaatcttctgactcgggtacttcgggaggaagtactcagaggtttcgggctgttcctaagcccgagctggggctggtgtgtttccgttgtggtgatgcgcatcgccgtgcagagtgccagtggagtggcaggtgttctatctgcagttaggaccacaaggatgtggtgtgtaggaggaatcccaatgggaagctcagatgggagccagtgacttcctcctcttcttagggcactgtcaacatgatgtcaagtgctgagcagcaattttcagttccacttcctccgcagcagttttatgtgcctgggacttctcagttcgtgccgatgcagggttttccttaggatttggctgcgcctactcctgcaccgactactcctatgtcgtctcagtttggagctccgcgtttgcctcgcccgacggctcagtggggttcttctgttaatttcactccaggagcttcctcttctgcgggtatttccggagcttatgtgc

SEQ ID NO: 42413 - DNA, 360 bp, Zea Mays
gccagccatttccagagaccctcagcctcaaccgagcccttggacagcttcctcgaggagccgtgaagcttctccaagcaaaaatcgaagccctgcctcaccggaacagcaagatcatcatcgccggacttcaatcgcctgccgccgcgcatagaccgagctatccggtgagccattcttcaattcctcgcgcctatgtcttccccgacctctagtgaagctcactgaccagtttaattgaactctaccgccctggataggccggagcccttgccgccgacgagctcccccgcttgcgcacgtggaccggcctactctgaccatccctagagacgatgcgcacattggcgtgactgtcac

SEQ ID NO: 42414 - DNA, 333 bp, Zea Mays
gggggctcgactggtgtccacgccatggccagcagagaaacgagagggagatggcggccgtgcagagggaggatgcagcgagtggcctagggagggacgcgcggttggggaagacgaccgatggataagagcatcttcaatagttatgtaaacaagtctctaaatatgaatttaacaagttttcgagaaaaactcttctccaacagttatgtaaatcagttccctaaatttacaaactccctacaaaacccatttcatccctacatttaccaatcttgttgggactccctaaatcaacgttggtactaaatccatcatgaaaatcacactttt

SEQ ID NO: 42415 - DNA, 364 bp, Zea Mays
gggtgcgtttggttgcctgcatatggtttggccaggctcacgagatgcagctttcttctgtttggttgcctgatcagcctcttcagcctggctcgcggaatgcaaagattcctcttgggcctggctccctagatatgtaggaattggccgtttctccagagccaggctctgccggtgcaaccattagtctttcctaatgacagattaacatgtaattagtgtctattaaataaagttaaattatttaaaagtggattaaggctttgtatggcatattatagactattgcaacatcatcacatgaaaatataataaaactttatagtttttaagctcatgcatcaagcatttatacaagcaacca

SEQ ID NO: 42416 - DNA, 600 bp, Zea Mays
acggtgaccgtatgatcaacagacattctaacgcattcccggtgatctaaggtagcttagctcaattgagttggtcgaggagtatcaggggcacacaagaacactaaaacaaaaaaggtagagggtatgagcagacctgagacaagctgaccacagcgaggtcacaccgctcggtgttcttgagtgatttgggggaaatcccaaattggggagctctagtggttgattcgaggcactggttgcttcactggttgcacaactacttagcgaagcaggcggggtcggcaatttgtagcaggcttgagcggtggctagtgaatttgagagagacgcgcggcggccggagaagaagaaggttactggtgcgcgtgattggtggcaattaccgtggcaagctccccggcaaccaccggacgagctaacgtgagtcacggtggtaaagttaatgtgccaaggcacgtggtgcaaggctgcgaagtggctatctccggcgaacccatccaaatcgaccgtggtctgctcgggtacggtggccagagtaaaatagtggtcggagtgtatccacggcgtgatatttacttacccccggtgctatccaac

SEQ ID NO: 42417 - DNA, 492 bp, Zea Mays
ccggcgtctctcggtaacctctcatcgctcgtcgacttgtttgctgacactaacagactcagtggccaaataccagactctctaggacggctgacaaggctcaggcgctcagctcccttgatttagcctacaaccatctcagcggcacaatcccagcaagcctgttcaacatctcatcagttgccaccttcgaattgtccggcaacaaggctctttcaggcgttctcccgtctgatatcggtgccaccctcccaaacctccagaacctgatcctcaacgactgccagctgcgcggccgaatcccccgatccatagggaacgcgtcgctgctcaggtacatacagctcggcgacaaccagcttgaaggggccctgccgctggaagtaggcagcctgaaggatctcgaggtgctaacagtggagagcaaccggctggaggacgagtggtggggaagtgatgactgggacttgatcgcctccttgtccaactgca

SEQ ID NO: 42418 - DNA, 419 bp, Zea Mays
acgctgtcagggtgttcggtgaaatgaccggcgcctgggtcaagcccgacgaacacgtttatgccaccacaatcacatgtttgggcaggctacatgatgcagatcaggcacttcaggtactggaaaagatgagggaggcatgggtcgagctgtgggagttaacatacaattctatggtgggtgtgcttgtgaaggtgggaaggatggatgaggtattgcatctaaaggatcagatgatgctggctaaggggaagatggatgtggttcacgcgagaatgttgatgcacgtgtactatttgagtggagaagttgggaaaacattagaattgtttgatgtggttgccagtgatggtgtgacactgtccaatgtggcatatggggtgatgaacaaaggttgtgaagacgaggggatgacagat

SEQ ID NO: 42419 - DNA, 958 bp, Zea Mays
tccaacatttcatcatagtatgactaaaaacaaacacatttgaccattcattaaaggagcaccaatattatatcacgaagcaaaacttaaaaaatgactgaatcgatagaagttgatataatataacttaaagtctaattgtttaaaaatgaagtgaatagaagaattagtgttggagctggaacaaatttgtgaatactggatatcaagctcacagggttggcccgtgaaatttctttcatatttatcacctagacaactgaaacgaaatggaagaacccatcatcctggtaattatgtctgatctatggctccgctcatgttgataagctctccaatcacaagatgtacatgactacaaagcagaacaggaaccaatgatcctcccttgcctctgccaccacaataccccaaaggcggtgatcacccaaccccaaaggaatatgcatgtgacatgggttatgaaggctggcagaaagaaatcgccatagatcaggcaggattagacctccaattttatattagagacattgtttggttcttagtattacgaaaattctcatggagaaccatcagcctgattattgttcgcccattgattttggggaactaatcaggcagccaggagccagttgttcacattgctctacccatcaatatacaaaatgttgcaatgtcactgtcagagtaaacaattagacctccaatcacttacaatctttgactcccattttcataaactacctattcagtattcatctctaggtgtatgtcccatgtccgtactggtacttgattacttacaatatcttcagtagtacagagaagcaaagggtggaaagttagctgcaatgctgtgatcaggtaggtgacctgaactattcttcccgtagcgcgaagtctgcacggatcaaacaaggcaaattccgaaagccattgcctgtcggcccgctccaac

SEQ ID NO: 42420 - DNA, 423 bp, Zea Mays
gtcagggtctcggtaaagatgtgaaaagtgaattcctacgtgatactatcatgaaagagaaggttaactttattggtctacaagaaaccaacaagaaagattttgaagaatcatggttgaatttcattagtggtaatagaaaattcgtctgggtttggtctccccctaatggtaggtcaggaggtttgctggttggttttgattcggacatgtttgatgttagagaaaaagagttgggggaatttatgattcggttgctggtgattcaaaaagaatcaggttttatttggaattttattaatgtttacggtgctgctcaaaatgaacaaaaacagaaattcttgagtgagttatcagctttctgttcaaaatgttctcatccattgttgattggtagtgattttaacattctcagaagagaat

SEQ ID NO: 42421 - DNA, 1006 bp, Zea Mays
ctgacagctacacgatctggagagaaacctgtatggaaaaatagttcaaacctgacattttaaacctccaaatgctagagagtatatgacaagtaattttacagaatcaagcattgagatgcatagcacaaaatcatataaatcaagtgtgttgtgagtatcaagcgttgggaaaagatgaaagcagactgcttagaataagggagtagaatttagatgaacttagaataagggagtaggatttagatgaacttagaataagggagtaattcaaaaaatttatctctttacatgctgtgatgaaaaataatagagaaagttaattattcttaacctttgctccaaggaaatttaattacccatggtgctctatgctgcagtaaatagtaatacaaaataaaatagatcttccagcagtttctaactttctattgacatgcatgaacaatatgccaatcatagtaatattgatgcccattgcccataaagataaatatagctttgatggacaatttaattcatgcctgttgagtggccaggacagtacttctgtattatgaactgaactaacctctatcagagagaactagaatggtgtatccctcatgaatagcttcacgagcttgatcacagagtttatccaaagtttgttctaaaccttcccttccatactctttaggataagttatgtcaagaaccttgctgcgccaaccacgaaagttcatatttttaatagcctccatttcatctatatgcagtaaaggaccttgaagtttcagtcgatgacactgatgttctgttgtttcagataagtcaccttctggaccaatcatacactccatggatgtgacaattttttctctaattgggtcgattggtgggtttgtaacctgagcaaacatttgcttgaaataatcaaaaggcagcttctctctgtttgacataacagcgagaggggtatcgtttcccatggatcctagagcttctacaccatttttggccattg

SEQ ID NO: 42422 - DNA, 369 bp, Zea Mays
atcctttctatgaacaacaacttcagatctgaaaacgtagctagagtttgagtggttggtttcgcatagtaggagcataggagaaggggtgcacgtacacctgtgggaaaatatttagtggagcggtgtttggaattccaataggagttcgatcagttgtgtctgctccttgatcatcgattggaacagtaacttcagatatgaatacgtagctagagtttgagtgcttggttttgcatagtaggaacagaggagaaggggtgcacgtacctggtgggtgcgtatcgccagtggaagtctcaaaggcctgagtagggcggaggcagcagaggaggaggaaggcatcattccaggatttgggcccgtgcg

SEQ ID NO: 42423 - DNA, 283 bp, Zea Mays
caaaacagtgttttagatgatgactgcacggtctcagtgggatttgatcggcaaagaaatcagtgacggtactagtactggtgcacgcgcatcagggggcgtccatgtccatgtatggcgtacgagtgcgcgcctgctcactttggtcttgtacatgttttctccgtgccgtgctccggtttccctccttttatatggatggatggatgggccggccgttggggacttagcgggtgggaggtgccattcacgccagggcagtaataaatgtgcagtaattctt

SEQ ID NO: 42424 - DNA, 387 bp, Zea Mays
aaggtcgactcgtaatgagtcggcttttgagtttgtgtaaccccctctaatatgaataaataaatcagttgccccaactaatcagtgcttcgttgtttttttgtttgcttgtttgaaagtttgcccatgtgcctaatactgtcagtgttttagaggtaactgccaagtgatgcttgatgcttttgctttcccgagtagtgatctggcactttagaaatagtgcccgacccaagaaaccccatttatactcgtgccgacgtgcctttttgatttctgagccctagcttcactttctctcttcattcacccctctgattccctgaatttccgagcccgctcaccccaccggaaaaaaatcgcgatggcccccaagcgaaagaggtagag

SEQ ID NO: 42425 - DNA, 368 bp, Zea Mays
gaggctgcctcctgggggccgctgccaactcttttaggtatactggtatccagcctcgacacgtcgagcctacatcccacgggggccaggtaccagggaggagtcgacaatgccacacacaacagggacaaatagtatgcagataagtgctaataccgctcgataagtaatactcaaaagtaccttacaaaaacaaagctattacatccgccttcaagcgggaccctagccttatgtctacaggtatgacctactcgacatcagtagggtcgcactgaaagcacgcggctgccatctacgcgacatcttgtacgacctcttgggtggcgtcttcagcagccgggccagcagtcaccgttggaggcggc

SEQ ID NO: 42426 - DNA, 432 bp, Zea Mays
tgaatgccttgtgccgaaggtccgaaaaacatctccctcgagcacattattgaaaatgagatcaacaaacacgtgcttggacagctggcgtcattggccatgtgtgctcctcgactctgttcgaagaccgcgatgccgaatggcgcatggtcaactgctgcgtcgtcaactggattctcatcaccgtctccaaaggaaccagagatggctcgtctctctcttcttcgctctcctggtcgcccccctcctcaaaccccccacgccaaaattgccattggcgggaaactccccccccccatccctaaagtcgaaaagctccaagcccaggaaggcgctacaggaacgggccgctccccgcgatggtttctggcatggatggacttccggagtttcgactccgatcaggaaacagcgcggcgagtcggatggttg

SEQ ID NO: 42427 - DNA, 345 bp, Zea Mays
agggaaagctcgaccatcgccttgggaagacttccacctcgcccgagctgggctctgacctcgatatccgcagcgaaggactcccaatgtcgcctagcacagggacactgacgcctcccgtaagcagacttttacccatgccaaggccatgttacaaccactacggtatgagcatcccctcccctgagggctcgggcgtgtggccaaaccctcagcctcggcctcggctcttagcaggaaaacaccaggctcaagtcaataatgcagtacaaggtcgtgtcatccacagggcgccaagacgtctcacatggtagcgtgacgacctctggctcaacagcatacatc

SEQ ID NO: 42428 - DNA, 416 bp, Zea Mays
gttgggatatgatgtaatggctgctatggtatgtatggtggaaacgatggaagaggtgacagcgagtggggcatggggatttggtggattggtaatgggttggatgatggtggagctgtagctggtggtggcctggtggaggtcaatggtgcatgtgtctctggaatgccgccataacctgggagaccgtaaggaaaccctggatggttgccggcggcggacactatgggagtcgtgcgcccatcgatttctgtcacatgcagcgccagattggacaccctggtggcgagatctgcaagggccttcgtcatggtgtccagcttctgctccagggctgcgctggtggtgtttggcgccgcagcagatgcgacttcgctggcagtgttgtcgtcgttgcccgacatctctgataccag

SEQ ID NO: 42429 - DNA, 446 bp, Zea Mays
ttacgccgccatccgtcgtcgattgggctcggcacatcacaatttgaaatctcctgccgccggtgattcgcgcctgcggcaacgcgctaccctcgggcaggtcatggggaatcctcggggtggctctgcgtgtgctcaaggtgttgcaggggctcatacagcggctgggtcaacgcagcgcaacatccatggtaacgagcttaccttcgtattcttcgtcttctccacatcatgtggctatatcgaattggggaatactcttcagggcagacggattggaatcgccggccatggcaccaccgtggccctgaccgcgccacctgtgctgaccgggaaggaagaagggtccctcaccctcgatccagggatggacggatatcgttgatcctgggcataccgcttctagaccgttgatccagcgataaacgcttacgattagatcctga

SEQ ID NO: 42430 - DNA, 377 bp, Zea Mays
ctgtgcaaactcaggtgctctcaagtcagaattcttttaagtggggtagtgttcctggcagacttaaccatcttgccatcccaagggattgatgtgatactaggaatggattggctagctaagcacaaaggtatcatcagccgcgcaagcaaaactgttcttctcacagatcaccaaggaaaggcagtttcctgtcaagcccaaccgcccgcaaacgatccgatgatgtttaatctggcagcagaaaacacgtctgcaatcgaagagtttgaggatgtatttccggaagaattgcccgggatgccactagaaagaggagtagagttctatatagatctcattcctggcactgcgcccattgcaaagagaccataccg

SEQ ID NO: 42431 - DNA, 338 bp, Zea Mays
taaggttgtagattgatgtatagtgaataaattctattaaggaagacaactttgtccttaacaaaaatctggagataatgtggaagggaggtggtcggttcaggcaactgaagatcatcgccatggtacagtaccgggtggataagctcaccgccgatgacccatccacaccgcgattagcgccggggtcaggatgatcgggcagcgagcatctccgcgcgaagattcttttgctctgggtaagaccgccgcggtggagggcaataactccggctgccacgcgaccatccctcctcccggccatgtccgatcatcggcaccactcttctctattcgtc

SEQ ID NO: 42432 - DNA, 1385 bp, Zea Mays
attgcttctgcagatagagaacagctcaaggctggcacttgtgtgtcattttaaagataatggggatgcactaattcctgggcaacagtcaacttcagttttcttgaggtctgtttgctttgttggttactcagacaattcttgtcatcttagcaagggatatgtttaatactttgcacattgtcatagttggacaatgcattgtgacttagtccgctggatgttgattcttccctcacactttgtattctattcctgttttgtctgacactccatgtttacacatcctccagccacttaacatttgatgataatatttcacatgatcaaatggtttctatttgcttactcaaggaaggtgtattttcaactattccaatcagcatttctctccacgagtctggtatttttgcatggagaacccgtgtgtcaccagtcaaaggtatttctttcagagaatattcattcatagaaatttcagcagtttttagatatatgtttccaaagttgttccgaatctgcttgctttaaagtatcttttgggttgaactattttccattacctttgtagacctgacaaccttttctggaccatttattgtggtcaaggtgtctcatagttctgaggtaggaaagcaaatgcttttgtacttttccatgcatattgattattgtattctaattttgtcttctcatagttaatgctaactaaatgcaggaaggcttatctctttcagttcaacctttggttaggatccataataagagtgactttcctcttgaactccggtttcagaggccaaacaaagctagtgaagaggctgcatttgtcacagttagaagtggagatatggtcgatgaatctactggagtatttgacgccatggatttgtctggtggaccaaaaagagcattgatgtctctagctcttggcaagtaactatacattatcttggcatgatgttggttcccattttgcatgacacaaaatagatcttattagctgctaagttattgcatgatgatcgattgaaaactattggagaaaagggatagtaaaggttctccataggaccacactgtacataaacttagtttcctttggaaaatggtagtacttagaaatgattttaattgtagtgttaattctgcataccattctttgtatactttgcatttattcaacagactatgtagcttgtgtgagaaagaatttccatgttcaatgctttcatgggttttctagaacatgttcaatagctgtgtgtcgtttcattaagaagaaataagtaaaaaaaaggaaggttaggaattaaatcccatctctgccccaaagacacccacccacctacatcctagggtaaagctaagaacgctcgccagac

SEQ ID NO: 42433 - DNA, 329 bp, Zea Mays
acgaaggggcccttcgacatgctgcccgcctgagtagcgagagtgacttggttgaggaatttattgcctatggagtgtggcccttggcgcacggctgggtattgggcgaagtgaccccccatcggataccaaccctgggcgaccagctagtacgaagtccagccttcgtggtggatttacgcggccgcgacgcggccgcgtttgtgcgtgaagtggaggccgaggccacgaagattgtaggaaaatatgtgccgaagacggaaactctgaggagttgggatatccgcggttcaaatgttaggttgaaccgtgtttttgagttgaaccgt

SEQ ID NO: 42434 - DNA, 321 bp, Zea Mays
caacaacttgacctacaaaacaggttacacaactaattccatctagcatatagctattgaaccctctacccatcttgtcacaaacccggatgaagacaccaaagctcgaggaagaaaggatcaaccgcgttaaggaaggataagagtcaagccaaatatggtcttcagccccaactcaagccttcaaagatcaagctagatcaccaagatgagtcaagatccacaatccgggatggagtccttccttaccctactatgccctgccctgacctatccatctcttattccacataataagtagctggatacatatgctctcct

SEQ ID NO: 42435 - DNA, 554 bp, Zea Mays
gtgagcactcccatatgtctgcagagcttgataatgtaagtgtgttattttgccttccccttgtgcttcttagttgaataagaagtaaagcaaacagttgttagcccaacgaaagccttcacgtttggcgattctgaataattcagtaactcatagaactttccagtaattcatgctgtaaatagatctagagttctagataggatgccttagggtggtcttggacatgtcctgggtggttcatatacctgtaaattgtccaaatcacgcaagataaagcttttggtcattccctttagctgtaaacttgtaatatccaattgcttctggcatcatatagcaggaagcctggaagggtagaatgacatgtcattataatttccaccgctcctttattctcagctactactgttcaatgatttcacaggttgtttctgcagttctggaaaattatgagagcccatatgcaaatgctgataatgatgctgctgttgaggatattcgaactcagtgggtggatgaagtgctcaaagccgaaggtcatgaacctcctg

SEQ ID NO: 42436 - DNA, 282 bp, Zea Mays
aactctatctgcacctttgcctggagctcctctattgttatatgtgttagcttcttgtcggggaaatgatcctcgacccgtagacccaccggtcagtgaatgcgctaaggaaaggacccctgatcgcggggcccactagttagtcagaagaggcaggtgcgccaaccctagaaggacccgcccctggtcgaaccccgtggcaccaagcctcgggtcgggtgtggcggagcctgacaagggaggacatgcgcatcaaaagggaaccacttgagtggatcctgc

SEQ ID NO: 42437 - DNA, 343 bp, Zea Mays
gctggtgggtctagatggaggttctagatgtggaagagttggaggatctacatgtgtctggaagccacataggacctgttgggtctccctcctaaagaactggacgagaaagttgagataatatagattggagatgggtaagagtatatttgctttgttattatgataaattgcatttacacgattatttatgaaatttgtacttgtgttgttagagcttgggtggatacaactttcaccggcataggacataaaggacaagtaaagaaattgttggacaatatctatcgtctgagatggttttggttggtgaatgaggatgattaggaggtcccggtcacag

SEQ ID NO: 42438 - DNA, 439 bp, Zea Mays
ttgacactttgcctctaagaatcatctccagttggctcaccaaatccatagcaggaatcatcttgttggtaacccgggtagaatcagtgacaccactatacaaataagccgagtatgctctatccttcaatggctgaatattcttgaaaacaaagtctgcaactaccgcttcagcagtcagacctctctccttcaacaagccaatttcagcaagcagaaccctggcttcggttatctccaagtctgtgggggattcagtccaacttggagcacgaacatccggctgtctccccgaccgaggggggagggacttgccatgattctctacaataaaccactccaagcgccatcctttgatgctgtccttgagtgggatgtcgaggtactctgtcttcctcccacggcgcatctccaaactcgcaccacccacgagctggtg

SEQ ID NO: 42439 - DNA, 317 bp, Zea Mays
tgcatgagggtagtggcagaggtgttctcctattcaaggagaagggtggttgcctagtcacgagcgtgtgtgtttgtagcctccttgttcacaatttgagccgcgatgagcatgtcatcaatcttcttgaggacggtcgtggccttagcgtgggcaccctccttgatatttgatgaagtccccaccatgggtgctggagggagatgtgtgtgttgctacaacgacgcaacacaagggctgcaatagagggtcgacaaccaagggaggagcggaagcgatattagacctgtgataccatgttagaggatgtattgtcg

SEQ ID NO: 42440 - DNA, 334 bp, Zea Mays
tacttagggacctttccaatgcatttgaaatttgacacgttcactactttgtcccactatttctcatatgtttccacttagtttgtttcctccatctaggccattcagtgtgacaatggttgcgagttcgataatgtttccacttgattatttctcctttcagatggcactttgctctagatgttgtgctcccacacctcttcacataatgttaaagccgagcatatttttcgttctactaataatgtcattagctctctactcttctaagcttctgctctagcgcgctactaggttgaaggcctccacaccgtgacatacttgttgaatcgtc

SEQ ID NO: 42441 - DNA, 572 bp, Zea Mays
tcgtggatcaatggctctggctccacgatccacgtgaaacgttaaccgcgcatccggaccatccaatgaagaccggatggtcaggatcgacactaaggacttgtcttctctagccggccaggggtggcgccattcgcacccacgatggtgtagtcggcgacgacgaagtggactggggcttctaggggcgctaagtgcgatctgggtggccagggaggttagggaagacctggcgaacactacggtgggatcggggtagcaggaacggtggtgaggcgactggacggtggagggggagatcctcggcggaccaggacactccgacgatcaatcgcgggcgagaaagtgcacgacagaggaaaataagagcagggttaggaaggttaagtcaagtagagactcaggggctcatgaacgaaggctggggcgcgacgcggactcgggtcaacggcggcagttctccggctgcgcaagaaatgctctggtgagcgtggactagacgaaccaaagggggagaaggcgagccaaggggcgttccaggtggcgggtgatagggcggagcttatgggggc

SEQ ID NO: 42442 - DNA, 407 bp, Zea Mays
tacagaggtagtaggggggatagtgatattccttctccagctctgtctgctcttgttagccttcatgatttacccataacagattttgatcaggcccttgaggatgtcattcctgaagatatgttgttggtaccgactgttgatgatatgatggatgtttgctctgacgctccagacgtgggattagaggtattccgggcagtatctcgcgcatcgtcgactttggagggcagtcttcggtgtcaagaagctggtcaggattgtccgactcccatggaggtggctgaggatccttcagcctcagaggtggctgttgcagaaaatccagcccccaagggtgatgctcgcagttacccagcccccgagggtgtcgccggtaatgacccagctctggtgggtagcgcgag

SEQ ID NO: 42443 - DNA, 404 bp, Zea Mays
cttcgctaaagtagcccgacttcaccatcttaggaaaatcagctttggagatggtcgactttccgaagtccaggtggctaggcttgctcgacactgcgatgttgtaatcatcttcagagtcggtctcttcaatatctgcttgctctgcttcagcagcatggacgtcttccggtgttaccagcccagatcgcttcattgcttccgagataggaacagtttccgcagcttcggttttgtctccctcgcgatcgactcttgcagtagagcgaactctgaccatttgattatgacttacttgaaattttttgaattggcttttttgtttcttccgaagctcttacacttgcgccgaagcagattttgtgtgagcacaatgatcaagcttcggctatgactaaaaattt

SEQ ID NO: 42444 - DNA, 384 bp, Zea Mays
accactcgttgcaagtcgtgaagactcggaagtgaccgtcgtagatcgtaaaccagtgaacgccacattagcaaactccggtgactcctcccccttttcaccgcgcgcacttcctcgtccaaattcgccctcctcgtggccatcctctataaattgatgcctcagcttgttccgattacttgttacgaacccaatgaaccagtccttgcctccaatcattcaccatagcctctcaatttctcttttcccccaaatatgttttccgcgccgccgagagtctctcaccgtggccaaccctcctcaggttggttcatgcctctctgttggatgttctagcatctcttaggtctcttgttgcttgtaggctcgattgattgaactaga

SEQ ID NO: 42445 - DNA, 413 bp, Zea Mays
aagaagcagatgtaatgttgaaaagtcatatccagagacatagactaggtaaatctctaccacatttgaaaaaaacacaaaatactccttgatcttttattcatacaatcataacagtgctcattcggaaaatccttagcaacatcaaaagcaacccaaggtgtgattctaaaaaatggtttgaggtctcatctaggcgctcaagggagagttgaaccccatcatgaaagggcgttgtgcatgtatagtgtgagcaacaaagccatcttaaagaaggcagtagattaaattccatacctagcacaacatgagaaagtgtggcatggatgtggtcaaacgcatttcttatcacaatatcaaggtcactataagtgaatgcaagcctacactaggccatcttggctttgggacaa

SEQ ID NO: 42446 - DNA, 647 bp, Zea Mays
aaccgcgtcacggaaccctagcgtcgcctcgttcgctgcccaactctcctccagactccagtgcacaggtctccatcacggggaattctcatatagcaagtcgtcgtcctcgtcctcgtcctcgtcctctcctccggtgggtggatcggccatcgcgccgggccgggcgggcatacctacgtacacactccccggttcccgtccccgtccccgtcccgcattcgattggttccttcgtcttcgtctgccggtaaggaattcaattcccggatgggttttctacgatcgagtgcgcttcggtcttcgtctgcttgttttgttatactctgcttgctctgaggtctcagctagtccctcagctaccgcacccaaatccaaatcctgcctgctgggatggatggactgccgtccaagcaacaaaatttgttgcggatctgttccttcggaggtgggacttttttttgtcccggcttcaccgattcttctcgctgctggggcgggactgcggctttctggatctaattcggcgttcctcgatgccgaggatcacggggatggacgagattgtgtgctaatcctagcctggcgcactagataaaccagcgttaggttgtcagttatgtgaattattaatccatggtgacgac

SEQ ID NO: 42447 - DNA, 454 bp, Zea Mays
tgatgcggtggagataccagggcacatggcgcaaggtcagcaggcgaccgtcgccggtgaacttatctgcgccgaccgcaagacaagggggtacgacaaacctcatccgtgtttgaatccgagttaatccagtgcccagatctttaccttatcatcgttatccctttgccagcgaacacggaccgcggcgacggcgtgaatcacgacgtaaagatcgtcggcggcgaggggggatgaatcaggtatcttctttagttactgtaccatggcatacatttccggttgacctgacagagcaacttgaagctagattttctcctaaattcgcttggcaaccaatccgaggctctacagcaaagttgtagtctaacataccatcttcatctttgttatagtataacaaattcttactagatcatgcttagaattgagctcaaagtctgctcaaacccac

SEQ ID NO: 42448 - DNA, 287 bp, Zea Mays
gttaaaggaaaatagacggtggtgatctcatccagagataagaagtctctagaagatccagagagaacaagaagtctccagaagattagtggttacccattcccttaatcctaattagcaataatgtaaacgcataaagtaaatgtgcttttcaaccgaacggacgtgcgggcgtgaagccgtctgttcactatgtatatattatttatgttaatggaatacagagatcagagattcattctcaagcaatactttctaaacactcacgagcactgtttggtgcttcg

SEQ ID NO: 42449 - DNA, 696 bp, Zea Mays
atccagttcaatagcacgcacatgattccattcaaaacaacaacaaaccaaagaggaacgaaatcaaacaatttgaaataaattacagaatattatgccatcgtatatgtgcaaatggctaatttgatcaacaaaaataatactcgattttaaaaaaacaaaaaatacgaaattggtagcatataagtgagtcatggaataaaatgcatttctgggttgccaaaagactttagccacacaaataagtagagcacagtttgcagccgtgcgatgtagcaaaaggtttaacaacgggcagttgatatatacaaaagagtaggtttttcttctgccattacacagtacaagttgctaaggatgaacatccggggaggaaaggtaacaagcacgattttaagtgagatgcattcacgttggccgccagcatatcaaaagcgtgataggcgtagcatcctgatcaaagttaacctgaaatacagttggacaatattaccaaaagaatacacagagtaaaaaactatacaaaatactgataaaactatattaataaagatgagacatgcaaactatgaaatttgaattgattagttaccaaggcaaataaattgttcatttgttcaaccataatgttcatcattgtgatacacatttgttagaacagtaccatagatcataaactcaaaggtcaatcatcac

SEQ ID NO: 42450 - DNA, 325 bp, Zea Mays
attcaggcttgtaaggaggtttgaaatttgtttaccgtggtagttcttactcaaatcggggatgtttctaacaccctattttggaaaggtcggtttcttgaaaaggagatgtggagtcgtgctggggctagggatctttcgctcctcgcagctgtaggatcttggacaccggctagaggggatgaatagacggttttgactaaaatcacaaacactagagaaatttaatcaatacgacaagatatataaattctctagttacaacaagtaagctatctatgagaaacaactatagtaatgctagtaataagaagcaatacacaaa

SEQ ID NO: 42451 - DNA, 350 bp, Zea Mays
tgattctcctgcttatgagcagaaaaagaaaaagagacgtcttcggcgagtatctagcttggattgggatgctggtccttcggttcctgctgctgaggaagtgtctgtgcctgaatttaccgacgctgaccccaatgggtgtgatgcatctgtcgctgatcccaatgggtgtgctgtctgtgttgctgatgaaaacgagggggaggaagaagatgaggtccctttgactcggaagaacagtcggtgatacgtagccagtggggaaagtagtggagttccttctcctgctctgtcagccctcattggtctacaagaattgtctctggcgaactttgattagactcttaaag

SEQ ID NO: 42452 - DNA, 486 bp, Zea Mays
gtgcagcagggaatctcgatgtcatcacacaccaggacgatgacacaccccgtaagtagcctttggcccataccccggcgctgttacaaccactatgacatgggcggcctcccccttgggagctcggacgtacggatgacccctcggtctcggctctctatacaaagtcagtaggcacgaatctaccgcataatacgtcgtcgcgtcaggcgccaggcaactcttcttcgaatacaagacccgacttcactatggatgccccctccttggcgtataaatagggcaggggaccctccatggaagaggaatccacagattgacatcaacgccacacgtccacaacacatgtagacgaactctcgctctcgcattctgtcttatatattggcacttgcctcaatcatctctagggacttggggacttcccctctcccgatgtgcttgtaaacccctactacaggcaccacggtgcgagtaatataagcc

SEQ ID NO: 42453 - DNA, 318 bp, Zea Mays
cgttagtgcacaaacctgatgcatgcccaaacaactgaagaatatccaaaagagtgctaatgtccatagttgctggccttaggaaaattaccacatcatcgacgtagagaggaaaacgatggtgcacaatctgtgaagctaggggctgtaagaggcctttacgctctgccttggtaaccagaaatcccaacacatccataactaaaatgaacaacattggagacaatggatccccttgccgaagaccacgacgatgatgaataggctgtcctggcaaaccatttagcatcacttgagtcgaggaggtgcatagcaacc

SEQ ID NO: 42454 - DNA, 393 bp, Zea Mays
gttgcgagtttgcggcagtagtggccatgttgctgctaccagtggagctagctatagtcaatcttcaccaagcgaaaagtttagcctaattacgattatgacatggacatttagtactgacacacttttgttctttgaaatagcaaacataagagccacttctgacggacataaccaagtttaaacaatagcagcatgtctgtattagtgttcatcccacttcttttttacagaccataaatatggcatcattgcaccagtactcataatcattcgttggtagtttggcattcacaagcattggaaaaaaatgttggaacccatatatagaaataagtagttgccatggaaataaagatgtggcatgctaacagtgatactacgagcagtctg

SEQ ID NO: 42455 - DNA, 375 bp, Zea Mays
ggagtttgaggatatttttgctgtccctactggtttgcctccttccagagattatgatcatcatatttctttggtaccaggacatatacctgtgaactcaaggccctacaggtactcaccattgcacaaaacagagatagagaagcaggtctctgaactactaacctctggtctaattgtgcctagcatgagtccctttgcatctccaatcttgttggttcaaaaaaagatggaagttggagattttatgtggactacagaaaactcaatgacatgaccatcaagaacagatttcttatgcccctagtagatgaaatactggatgagttagcagggactcggtattttactagtctggatatgacagcgggttac

SEQ ID NO: 42456 - DNA, 508 bp, Zea Mays
gccgacgccaacgaccgcgtctccgtctgggactgggagcaccgccaggtaccgcttgctaatttgatctcgcaatacagaggcggcttccaggctttgtttgtggctccatttagtctcacggtgctttgtaacccgttaggtgatctatgagctgaaggcaggtggcgttgatgagcgtcgcttggttggagcgaagcttgagaaacttgctgagggagatggtatgtggtgcagtacatctttcgttattattggtggtttgggcatgtcatgtggttgttgtgcatagtggtaatgctattcacactgttgaattgtgacatatgattgttcatttgttaaaattggcctttatttactagttggcacgagttgaatttatctgagtgctgaaatgtcatttctttgtccttgtaaagctatgctacgttgcttgatttcttgtagagatatgattgcgttcaatttgtacatcttagcgtattaagtatgggtttgatatcac

SEQ ID NO: 42457 - DNA, 535 bp, Zea Mays
tcttcatccactagttgtactctaataccctctcgtccgaatacaatgcccttgaaatcagggaaacgtcatttgtggtttaaaagatgatcagttgtattgaattctttatattccaactttttatcgactaaatggtggaaaaaaggtgccttacaaccttaacccatgtttgaactgttctctcactcaatttgactaaattttccatggtctttattttattttgagaaacgatgtggcaaattgatgtgtggggttttacttgagtggacataaacaacatcttagtatgccatgaatagaggggattataagaaacctggtatcacaaaaggtcattagctagcccaataacgtcttcatccactagttgtactctaatatcctcccgtgcgaatacaatgcccttaacatgagggaaacatcatttttagtttaaaaggtgatctattgttttgaattctttatattcctacttattagcaactgtttggtggaaaaaggtgccttacaaccttaaactatgtttgga

SEQ ID NO: 42458 - DNA, 277 bp, Zea Mays
aaaaacttcatggaagcatgactcatattgtacagaatagtaaggccaatgtatgtgattgaacttgaaaaatatgtagtacatgcaaacacagatatatctgacatactgatgatgtatgttaacaggcttatattggtgaagaataccaagagaacttgtacttctcatgatgtactgatgaactatatgaaagaacaaacatatattgtaccatgaattggtaacaaaggatcagaaacctgagtaaggaatttatgaagtcgtcaagatgtca

SEQ ID NO: 42459 - DNA, 425 bp, Zea Mays
agagaaaaataggcgccaagttgggctgtcagtcggtttgctgactgaaatatggtcaccagtggtagtggtcgaacttgtgatcagatttgagctaaatcaagtaggaattcgattaggattgctataacaaagataaagaggatctataggactacaactttgctgcagagactcgggtatgttgccataggaaattgtgaggaatttggtcctaaactgtgactatcagacacactgaagaagtatcccatggtacagtaccgggatcggatcagaacgccagcgtcagaaagatctcgccgccgacgactccccgccgtgattcgtgtcactggcgtcgggattcgtgtctgcgcggatggatagcagcacggggtaaggggatcctcgccgccggtgacctggaagccactccggctagc

SEQ ID NO: 42460 - DNA, 495 bp, Zea Mays
gaggatgcccgccatagcggacgaattgtccactacagcacgctcccaatttttggagatcttgcccacctcgagtcgcaggtcatccatcatcccttccatgttcatccgccaatcttccagcacaccagtggcttgttctagagcccccacgcagcggtcttgtccagtggtgaactccgagaaggtcgcgttccaacgcgactcctgctcggccactctgcgatcccacttggagtcatgttcagagaaacgccgcgacaactcatccaggatgagttgagtgtctggattcatgagaacacgtcggaggcgagcacgggtaaagtaatgctgctggtcgccgcgatccagcgcgtcaacacccacaagccaaggatcggtaacctttgataccacttgttaacgacttgcataagttggaacacacacacaatatctggagaatgcagagacggagaacagagtagttgagatagtacttggaaaggaaga

SEQ ID NO: 42461 - DNA, 517 bp, Zea Mays
cagccgcggccgggacttcgcgccggacctcggcgccattgccgagtaaccaaccgtccgtggcagccagctaggagaacgggggaacctaattaacagcagtcgcgtcggcagcccgcggcgacatgaaaatgaaaaaaaaaaacacatccatctgtagctacgcgtaaaaactgatctactggacgctttgactaatgctagtgtagtgtaggtgtagtagccgtgtaggaaaagaaatgcagtccatcttgcatctggtgtgtacgtagaatactagtacgcgacaggctgtgcgtgtagattacgcacgcgagcatgcaccgcgatccggacgcccaggaggccaggacccgggtgtgtgtctgactctgactcccggggcccgcattgtgatgagctgagctgtaagccgctgggcctgggattcgtgtatgccaatcagccgatgtggcgagccaatgaacggcaaacgagtcaacgactcggatttgccagcctgaggagcagattttgc

SEQ ID NO: 42462 - DNA, 483 bp, Zea Mays
cccgatcccatcctcctttggactcgcgacttcggggcacaaaaccatggcaccgccctcctctctcctctcatcttcttgcgccaccgtcgcacatacagggagagaaagggagaggtcagtcgccgccggtgtcgacatcgatctaccttgtcgtttggtcctctgtgtccaggcctgggcatctcaggggtctgctattgctttccgtgcgactaattgggggtgtggttggtcggtgaccacttaattcctcgtcggagccgggcgggtacgcggatcctctgtagggctcttacacaaattccccctccgttctcggtgagttctcggtttctcaccctcgacctgttcctttccttagttaatgtcgcgtcgttgccaattgcgtgcggattggggcgaattcgacctcttgggtcgggaatttgccctggcgccacccgtatcgtgagcagtagggttaggccgtgtggtgattgg

SEQ ID NO: 42463 - DNA, 309 bp, Zea Mays
caacagaaagcatgacgacaccgatagatgctatcaactaatcatttaaaaaaatactaaacttacttctctctttgccactacaccaccctttagtcacatgaccatcatgcacatccttcacacgattatataatagcaacctaaacgtcgtgttacacaatacatacatctttcctcgtcgcgagtataaccatattacgacatatacccgcacacctcaatcaaatatcttacgccaccaccactataatacaccatggcacacacgcacatacgtgtccccatattacgcacaagacatcaacc

SEQ ID NO: 42464 - DNA, 280 bp, Zea Mays
gtctgcggtagtctacacacaaccgccactcaccatcttttttcttgacaagaagaacatgtgaagcaaatggacttgtactctgctgaataataccattgcccaacatttccttcacttgtttttaaatttcatctttctactgtggtgtataccgatacggtcagagtcgaaaaggttgagctcctgggattagtggtatagcatgatcaatccacctcttgggcggtaactcttttggctcatcgaacagatggttaaactggttaaccaaatcagc

SEQ ID NO: 42465 - DNA, 419 bp, Zea Mays
tggaggagccatggatttgcatatgcctccatgccatgttgcttcaagaagagcacgcagagcaagcttattgattgaaatattgatcccaatatttgggttcatgtcactcgtattgctggtgcacattttactcctagagaagaggcagtcaagaagactatggatcgaagcaatcatttggtgagcattttgagaaagttacttataatgacttagctcaatcaacatgtaacttctcagaatctaacttaattggtagaggaagatatggttcggtgtaccgagggaagctgaaggaaatggaagtggcagtaaaggtttttgacctggagatgagaggagcagaaagaagcttcttgtcagagtgtgaagcattgagaagcattcaacaccggaatcttatccccatcataact

SEQ ID NO: 42466 - DNA, 366 bp, Zea Mays
attttccagaaaagacaggggccctggcgcaattgctacaaagactcaggcgaaccccctatcggatggcgggttgataatcaataaggtcaggggttcatgtgcaaatgcgtatccgcgaaggggtacaggaggattcggaccgtttagatcagattcaagggccaggatcggatctcgtccattatgaacccgcgagcgctcagggccgtccgatctggatcaatggcccagatccaatccgtcgaaggggtatccctctatctaatctgaaccgttcaacgaggatcggacgaccagggtgttttccccaattctctgccagcgacggcggcgccgcccgaggtcacggcggatcctcgccgg

SEQ ID NO: 42467 - DNA, 721 bp, Zea Mays
atcggtacccattgtggtcgagtagtaatcaaggaagacgcgtcagatggagcgaagaacaagcttatgaggagcgatggcagaaaggttggggtaacacgcacacctaaaaacgcaaagatggtcataggagggagtggtgccaaaaagagcaaagcggggtgtgggggcgctaatcgtcgtagtagggagttgattaaggaggtgagtagcagtgtgaatgctcttagcccagtaacaagtaggaacaaatgcctaaaagagcaaagagcgcaatatgttgtcgctagtgcgaatcatgcactcagtcttgtccttctaagaagtataggggtatgacatctggagctagacatcatgaggggaggaaaagaactggaaggagttatcaaactcacagtccttgtcatactagacggtcttaatagtacaaccgaactgagtggaaacccaagcgaataagtgcagaagagataaaagtatcagacttggaacgcaaggaaaaagtccacgaataatgagagcaatcatcaagaaccaccagataatatttataacctgaaacactgataataggagagatctagatcacagtgtatgaggtcaaaattatgcacaacctgagagaagctagggagggggtcgaacatgatggcctaactgacaggcatggcataaatgctcagtggccctaatataagaaatgattgaactactacac

SEQ ID NO: 42468 - DNA, 473 bp, Zea Mays
gttcaggagcacatagccttcagagtgtggccgcttgtggagcaatgggaaatgccaaaggaaactatcagtaaatctaacgaaggcggactggttagattgaaatacaccttcagatacgagggtaaatttattgagccagatgatgattggctgaaatgcatcgaagctacaagcgacgaacttcttggaccatattcaaaggcggaggataacgcgctgtctgcgaccttcggaggccggaagaagaagaggttgaatagagttttcaatgctattggttttatgtatcctgattaccgctaccctctgaaagggcaaaagaggaaaagcgccacttctggaaaaggagatgtttcagttgctctaagcgaggccgcgccaaagaggaagaaggtgaaggtccttactcaccgaccgcgcttcatcgaaccggcctcagtgcccgaatttggtggtgagacctctatggc

SEQ ID NO: 42469 - DNA, 368 bp, Zea Mays
aggagatagctcagctgcgatataaaacataagtaagtccgaagtcacaaaaataaaacacaaagtcaaaagcaattaagcaatacctatcagcctttcaagttccgcagctttctcagctgccttcgcacttcttttgcatcatgagaatctttttcactcttttttattatctcgtgcgccatctctcggccgccattttcccagatgtcagtgaagaatttcccgccaactaagcttgcttcggccgaggggtcttttgtatcttcagtagataaggtagcttcggtttgggccaaagctttcacgtggtcacaacctagtttctccaaaatagccacgattcccctggcacctgagaaggcgca

SEQ ID NO: 42470 - DNA, 299 bp, Zea Mays
cgattgtgataataaggtagcttggagagatacatgagtaatccaatcacatctgttgaaaagagggtttaaaaacaattacacgatatggacagaacatggtgagttggatccatgtgaagtgcttggtaatgacgagagagttgtcggaattttagataaagtggatggtaaagtggattttgtggatgccaatcaaaattttgaagaatttgattgcgaagagatgttgcgccatatggaaccagaaatgttgagttctgtgggatcacagaaggggctatctaaaatggagggac

SEQ ID NO: 42471 - DNA, 300 bp, Zea Mays
ctcggaccctctaaaatgaagtatccccaagttcaaaaactactatacatggtacttctaaccgctcgcaagctccgtcactactttgacgaccacaaagtcatagtagtcaccggatttccaataggggatattcttcacaacaaagaagccatcggaagaacagccaagtgggcctgcgaactgggagctcatgacatagagttccggccttgcacggtagtaaagactcaagcactagttgacttcgtatcagaatggactgagcatcaggtcccagacaacccagaggctattgaa

SEQ ID NO: 42472 - DNA, 274 bp, Zea Mays
ctcggataagtggattacgcttggccgtgaaaagatctttgtcgcagatgaactttggacactgtggctgctctgtcgtccatccacttgcgctggtgatgtgaccaagcgaccatcgtcgaggtatactttgcctgccgtgatcatgacacgccctgaccctttaaccatgtcgcagtgagtcgccttagcccacccgttcatcgccggtggtcttgccacggtaaagtccacgaatcgcttgcgccaatagcttcttccctctccaaccgcc

SEQ ID NO: 42473 - DNA, 398 bp, Zea Mays
aggggaccaaatttatccgctttccacatttggagggtgtcctatacctagtttcattgttcagggctgaaaaaagaaaaaatagacttcatcctaaaaaattggtgagatgtcacttgaaaattatgttgtgagctacaaatattactcaacttttcattgcatggaaatcctggctatgtgcaggatgaagtatttactgaatgtagggcagagcatagcaagcaaatctgccgaaaaatgtaaactgtgcagcctggtaaaatgtttgtctgttagagagaagtaacgtggagcacgtagagaaggcaaagcttaatttctgataaccaaattagttgtttgtttgtggatctgagctgctgctatcgtagttgtttgtgggccacatacattca

SEQ ID NO: 42474 - DNA, 500 bp, Zea Mays
ggcgagcagtggattccttccccacgaaaggaagcgataacatgcaagctcattcccatccctcacctactaccccctttcgtctcgcttccactgtggcaactctaggacaaaaccctaagtgttcttattccaagggggtccatgcgcaaatcatcagtagaacttgaagcaacaagtgtgctgactgccacgtcaggttagtgaacatcctaatcatgcatggaagggtagtgaggagtgtggtggttgtgtaacaaattgcactgcttgagttgttgattctcaaacttctttgtcttcatcttttgctccctttggcggatcggagccatctgtttgctggtccacgcttggcaaggatacatgatccttctcacaggtgctttaggctcctgcgtagccacgagccaccatgggtcagagatgttagcgcgttgtgttatgtatcactgtattgggccttgacccatgtacatgtactgacatacattaatata

SEQ ID NO: 42475 - DNA, 514 bp, Zea Mays
ggaccgtattcgggggtccgggctgtgcgcacaggggtccggtgcttcctcgcggaggtctggtccagctgattgcatcttaggatatatcatcttttctggctatgcgacgcccctagagctatccacgtggtggggtcaggtgatgttcaccgcgcggctagagattgtcgcacgggcaccgtgccttcatactgtagtaaggggtacccctgttccagggtatcgacattctcttttgcccttcggcacccttgtttagacgttcatagtcagggtattcaaagtttaaagcatccattacccaattcaacattcgttttggtcgagtgccgaaggctgcagccatcagttgatcttcttttttagtgtaattgcccaaaattttgttgcacatagtctcaatcatttctagccactcttggcagggctctttgaattgtttctcaaacttgaagcgatagggcaatcgaacaagttcgttcttcttccttatttcctttagcttcggcat

SEQ ID NO: 42476 - DNA, 273 bp, Zea Mays
ctcagagtcgccagaaaagttacacagacaacagacgaagagaactcagatttgaggaaggagatttcgtttatctcaaggtctcccccatgcatggtgtcaagaggttccaaatgaaaggaaaactagcaccgcgtttcgtcggcccctaccccgtcattagccgagtgggacccgcagcataccgccttgagctaccagaatccatgtcagacattcacaatgtgttccatgtgtcctagctccgcaaatgcctgcaagtaccagaaaacc

SEQ ID NO: 42477 - DNA, 334 bp, Zea Mays
tataaacctattcatgaagtatcggctcaattccaagtcatttcatgcctcaattccaatttcaaacctcctatggcactattcttcgttcaaactctgttttcacgtcgtttgacctctcgatcgccacatctctcgatttatgtgccataacactctgtgtatgtatttattcacatttcatatacttatgactatgtgactaatacatgctcacctcttctgtcatttcagtgacctcgcctgtccgtgagccgtctcctgtcctgcctcgattctcttcctctcgtgtgagatttctaggtagctacccactctcttgtaatcctatcgg

SEQ ID NO: 42478 - DNA, 359 bp, Zea Mays
aggaggatattgagaagacaactttttgcaccaggtatgggcattacgagttcatagtcatgtcttttggcttaactaatgcccctgccgatttatggaagcaatgaataggatgttgcatgagttcttggacgactttgtggtcgtgtttctggacgatattctgatttattcaaagaccgaggcagagcacgagcgacatctccgtctcgttctgggtgctctcaggaattatcagttttatggcaaattgaagaagtgtgccttttggctatccgaagtggttttcctaggtcatgtgattaatcagcagggcattgcggttgatcccaagaatgtcgcggctgtgttggagtgga

SEQ ID NO: 42479 - DNA, 332 bp, Zea Mays
cgtggatctgggcagggggcgcccggtcgctgatttggcaggggcgcgcggtggaggattttgggaggtgcgtttgtgtgctggcggctcaagatttgggggaaggggaaaatggttggagtagggtttgcttttctgttttcgcgcgggcgcggcgtgcccaaattgcacactgcttttatgccgactcacggtgcaagactattggtacgaattgccgactaacgaagcgacgctattcacgtatacatatagtgactgatgctcagttggactatagatttataccgactcattatctgtggcaagatatgccgactaacagttcaaag

SEQ ID NO: 42480 - DNA, 423 bp, Zea Mays
gcggccgcttcgccggccatggcgccaccgcgggggcactagcgccaccgtgtgtgtttgctcggtggggttgtagctgaggaatggagtcgcgaccgtgggattgcaaacgaacggtggtgattagatgtggggataaccattcgcgataattgacggggaccgcagatctttgatcggacggttcggagaggatcaagcttcataaaatcagagtcgttggattccgatcctgcggatatcagcgcgtaccggttcaagcggccgtggatctaatcctcaccatcgagatctgatcgaacggctgaaaacgctcgataccccttcggccaggcgctttttcataagagaccctctgtttatttgaaaacaacccgccatcctcggtaacagtaaactgagtctcgggaatcttgcgccgaa

SEQ ID NO: 42481 - DNA, 387 bp, Zea Mays
tggttatgaatgttttcagcctaggggtgctataccaagttggtagggctatagttagacagtatctttgattaatggaggtgggtctgttgttaaggggaattgtgagatccaagggcttaaacagtgagaagtggaatggagtagtagtgctgtttcagttaacttcagagtttggtttcagaaactgaacaagatcctctctctgctgtactctagccatgtgctcgagttgggatacatccctgaagatctggggctctccatactgtaaatatctagggtttggactgttgtggggggctgtgagcagtagagtccttatccattttgttcactgtctctagtatgggacagggggagatatttgtgtatgttgaagagctg

SEQ ID NO: 42482 - DNA, 509 bp, Zea Mays
ccggtccataccgtgtacgcttctgctccccgctcaggcggagacccgatgctgccacgtggcctactgcccgtgacgtaagccagcgggtggagcctgacgtaaagcctctgggccgcgtggccgctgcatttattgcggataaggcgcgccgcctgtctatttcactggcaggtgatgtgccgcctcggcatttaatgagccatgtccatttcactggcaggcgatgtgtcgcctcagcatttaatgtgccctgtccactccactgatgggcgacgaccaggccatcctgcaggcggcgtgcctgtccattccgttggcaggcagtacgcccgtgctgcggcatacactgtgctcatcatgactcatgcgttaccgaggagacagccgcgagatattaatactatatggactacggacattatggcgctcgaagatcttctgggcgacactagcattggatacttctatatgtattccctccattttgcccctgggcccacatgtcg

SEQ ID NO: 42483 - DNA, 665 bp, Zea Mays
ctcaatctagcaaatagcggcaagtagcatctagcactaggattagattagcctccagtcctcttagaggctaaatctggctatagctatttaaaacgttgatgctgacaatgaatcaacgaaggtaaaccagtgcgtgctacttctaacaaacaaggggtaaatcaccaaaatgcgataattaaattaccaacatcatagtgattggtttcacaggtttaaacggtactaggactgagcaagctcattggcatcaaagtacgcagttacatatcttgtcaaacggccgaaactcgagtcagaatctgactggcgttaaaggatttagcaaacatatatgttgtcggacggccaaaatttgagttgaaatccgactgtggactggagcttatctgacggcgggctgagcagctaggtttcgtacaggaagatttagccacgttcgaaccaggatagcagagccaaacctcggatctaagtcatctaacacccgtgcagcacccccgccgccctcaccgctcatcacacgacacccgaagaggaaaaatggcgtcgaaaactcgtagtctctctagcggatctcacaaggaatggatgaagattgaagagaagacaacagtggcgtctagaaacttctcgtaccttcgcatcctcccgcaatttcc

SEQ ID NO: 42484 - DNA, 616 bp, Zea Mays
caccggagcaaccccaacgccgcagatccgccatgaccgtggatgggtacctgcgcctcgacgttcgccggtaagttgccctcccatgggtttgccgtccaccgctatacgagtagagcccattttacggaagtattgtgcgtaggaattaggttctggcgtggtccagccatggcgccgccgtggatccctggccgctgttctttttggtcgggggcaagaagaagcctggtggactgttgagagtgagatgggcgatccagattcggttaggcatgagagatgaggggagttgagcagccgccgttggatcttatgctagcgcgccagattagaaactgaggatacctcttcgtgcgaattgatctggaccgctgatcgcagagcgtgcggccacagatgcataccggttcgttgtagccggcttttaatctgggccgttgaatcggatcggacggccgaccttgcctgctaccccttcggcctcaacaatatgcataagagaccccagaaaatccttttatccacccgcagtcctggttctttataaaaccgttacacagaagccctagaatttatgaataaaaccctgaactactctggaatcgtgtgtgca

SEQ ID NO: 42485 - DNA, 302 bp, Zea Mays
cggcactgtacctcaacggccctggcggcactagcacgactacaacgtagtcggctggcgacctaccaaagcccacaagcaagcagcgaagaggagattaggttagggttagggatttgccgactggggagggagagccggagagggacatacctgccaagtcggagcccagagccggagacgagggtcaagtgcatgacgacgcaggagggagagccggagaagaggagattagggttagggttagggattgggattgccgactggggagggagagccagagagggacgtatctgccaagc

SEQ ID NO: 42486 - DNA, 1023 bp, Zea Mays
catcatcagatatataaagaatgaagaggaaccggatgataaagccgcagcagaacgcatcacaaggcagtcagcccactacaccctcattggggatgcactgtacagaagggcgcaacaggagtcctcataaagtgcattccttcggttactgggaagcaactgctagatgagatccacgtcggacagtgtgggatacacgcagcatccaggactctagttgggaaggtcttaaggtctggtttctactggccgacagcaaagagtgatgcagccgagttagtccagaggtgtgaagcttgccaattcttatcaaagcaacagcatttaccaacacagcaactgtagaccatacccgtaacatggccatttgcgtgctggggactggacatgattggacccttcaagaaagctcagggaggatgcactcacgtgttggtcgccattgagaaattcaccaaatggatagaatacaaacccattgcttctctaacttcagccaaggcagtggaattcatacgagatataatattcaggtttgggataccgaataacatcataaccgacctgggatccaatttcactagctctgaattctttgatttctacgaacaacagagcattcagatcaaatatctgtcagtagcacacccaagagccaacggtcaggtggaaaggactaatggaatgatactggaagcactcaggaagaaagtctttgataagaatgaaaagttcgcagggaagtggatcagagaattaccttatgtggtttggagcctaagaactcaacccagtcgaggtctgcatggaaacacccccttcttcatggtctatggttcgaaggcaatgctacctgccgacctcaggtttggggcaccaaggctggtcttcgaaaacatagctgatgcagaggctaccagactagaggatattgacgtattggaagaagagcgattgaatacagtaattcagtcagctagaaaccagcaaaccctgaggcactatcatgataaggctata

SEQ ID NO: 42487 - DNA, 380 bp, Zea Mays
acttagtgggaaaaacaagaggcccagtttcgtggtgacttgcctaagggtgtagctcaacgcggtcacgaagaacaggattcatgacgcgatcaaaggcaacgaaggtgccccagataatctgaccgtcgtgaaggttgacgcgcacatcagtcgtggcgaaactaggcggagccaagaaagaggtgatgccagtggccagggcaaaggcaggcccccgcagtaggaggagggatgccatggaccagcagcagcccaggtggaggtccaagttgatgactatgtttcaaaagtcatggacatggagatgtcaagctaataatgtgggtacatgtatgacatgaagcaggaccggcccaatgtgagatattgtaatatag

SEQ ID NO: 42488 - DNA, 299 bp, Zea Mays
accgctatccacctacgctgctttggtcagcgatgctgccaggcagcctttatggtctctcagccccacctaccggcagcagctgcatgacacgaagttcaggcatcttcctctgcgtctgagtggaggtagccagaccagtatcgttccaggtggagctggagaagatcgcctcaacaccctagctggtgtagttgcaggtcttaacacagacctagatagtgccaccctggatctctctagggtgcacttggagctggaggatgcccacgccaggattacagccctggaagctcaac

SEQ ID NO: 42489 - DNA, 661 bp, Zea Mays
ggacacttaggatagcgggtgagtggcactgacatgcacgtacctaggccatccaacgctaaagttgaaagagctactcacacatgacattaccatggaggagtgccagtggatggaggagcatggaggggatgccagttgtgcgaaattccaaagcgggaaaccatgatgaccggagttgtagcctgtcatctcgaccagttccaaagtgagtatcaccatcgtggggaggagacatcagttgtggggagagggaaagccaacgagggtagtagaaccactgtcaccatcgctagaaactccagagcgacgagcgctagtgcgggaacgtgtgtggagggggtgtagctgtggtaaaggtcatcacggggagaagggaagccataaatgaagattggagccgtggtctactgtcgtgactagatccaaagcttctacctccatttgtggggagatgcagggaggggatggctattgcagaagcgtggaaatcgatgatttagagcgaggccatagctaaccattgagatcaatgttggagcgacataggcgacacgagaccggaggagggaagagcggtggcatggggagtgctggcggagagcgctaatagggatcgacatctacttcgatttgactcaaatgaggaacatttggatgt

SEQ ID NO: 42490 - DNA, 399 bp, Zea Mays
ggagatagcacagtatgtggcccggtgcgacatttgccagcgaactaaggcagagcatcagaagcctgcaggtctactgcaacccctcccagtacccaaatggaagtgggaagaaataggcatggatttcgtaaccggactgcctcggacccaaaaagggaacgattctatctgggttataatcgaccgtcttaccaaggtagctcatttatcccagtaaaaattaccttcgaaggagccacccttgcccggatatatcttaaagaaatagtcagactccatggtattccacgaaagatagtgtcagacaggggaacacagttcacctcaaaattctggatgagccttcagcaagctatgggcaccaagctagacttcagcaccgcctatcaccctcag

SEQ ID NO: 42491 - DNA, 374 bp, Zea Mays
tgccatggtgtcgctctgcagggcctgtaggtgatacagttcgctcatgcactgaacagtgatcctcccaacctggtcgggatgcatggcccacacgtccttcacgtgactcactcagttgcaccacatggggtcatccctcttctcggtggggaagagtcacagtgggtgcatcatcatctctaggggatgatatccgcagaaggtagtcagggcttttagcgctgtggccttggtggtgtcgttcgccctgaacccgatagtctcggagtcaagggaacgccatcctggctatagagggtgagactctagggtcagccaaactctgcaacgtggcacccgatgctcctcatatagctgcaccgtatacagag

SEQ ID NO: 42492 - DNA, 603 bp, Zea Mays
cggctgcttaatgacttacttctaaatgaactgcccctttcaggtaggaagttcacctggtccaatgaacgggcctcacctactttggttcgcctggatcggattttctgtacagcagattgggaggacatgtttccgaattgtctcttgcagagctctgcatcccagatttatgatcattgtccattactgttggggctgcatgatcttgtccaaggaaaaataagatttcattttgaaagtttctggatcagattagaggggttcatggaagaggtggaaaactcttggtcacaacctctggaagtctgctgccccttgcagcggttccatgacaaactaaaaaggcttgcaaggcaccttcaagcctagagtcagaaaaagtgggcaacattaagcagcagatcctgatggcaaatgagatccttcacaggctggaaatcgctcgtgatgtaaggaatttgtctccctctgaggaatggctacgtcgatcccttaagcaccactctttagctttagcctccttggaaagaattgttgcccgagtaagaagtggactgcactggctgaaagaaggagacgccaacactgcctattttcatc

SEQ ID NO: 42493 - DNA, 507 bp, Zea Mays
tgaattttctatgaattaaaccaattctagcattttatttttacactaaaattccattttctattcatttattcgatttaaacaatctctggactgggcctcaaaatatgagaacagcagggggctcggggcaaaaatccccaaggcacagagacaagtcgtgcaggacggcgggttggtttctcagaagcctagggtttctttagcaaaatgcctggccgaagggttattgaccaatcttggccgatggattagaaacgggtggctcagattagatctaggcatcaagtgactcggtgcacgtcctagccactggatcaagatcgcgcggtcgagaataagcccaaccgaaccggtatgtggaagctaatcagagccgttcatccccaatccaagggcgccagttcatcttcttccactcgctactcccaccaggcggaccacacgccgagcggcaccatggacagagccgagttcgccgtactagcggtcccgccccaatggtca

SEQ ID NO: 42494 - DNA, 307 bp, Zea Mays
aattaatttgtttaacttatgtttaagaaccaaaaacacaagaacacaatttgcagcacaactctctctaggctactcttgtgaactgggtgctttggatctctctggagtgttgctctaatgcttagaaatgaatgtgttgctctttagtaacttgggtgctcgactaggctaatagaaggggtatttgtagtcccaaatgcccccaaagagttgttgagaaaactacaaaaaatctgctctcggcaccaccggacctccaatggttgttcaccatcaacaggatctgctcttggcttccatcctc

SEQ ID NO: 42495 - DNA, 338 bp, Zea Mays
cagtatcgcacgggcgcaaagagggcttggatgcagaaaagcaagaactagggcacggaaagcagaggcgcgcaacaatgcagtacatatggggttttcctgggccagataccgtttccagaaagcgccctgtcatcacccgacggttatttttaaaaaatgctggcctgccatgtcatcactcagctgctattcctaaaaaagctggcgtgccatgtcatcactcggctgttatttccaaaacggccgacgcggcccgttctaactcggctgttacctctaaaacgccgacatcacaataagtcactcggtcgttacctctaaaacgctgatgttgc

SEQ ID NO: 42496 - DNA, 682 bp, Zea Mays
caatagctcaccacatgaaaaatggagaatgaagcttctcaactcgctctaacaggcacactgatgaaggtggccattgtatagtaactaaagaagatctgaggtgcgttgcacctcgccaccggtgacctcgcgcctggattcgtgctggccgctgcgattcgtgcccagcgcaaagtggataactaatgggagtaaaagatcttagcgcccggattggctcggagtcggtcactgttgagttcaccgtacccaattggtctgcgaccgaccggaatgatcttcgccggcgttggccgcttaccgatcatgcgccacgtgcctgggaggtttaacacgtcgcagtgaacccttttagcaagcccgtccatcgccggaggccttgccatggtgatagccacgatcacccgcatcactacatttcccctctctccggccgccagcacacttccttcaaattggacgccaccgctaatggacactataaatcaatgccccagtgagctccgttaggttgtcacgaagccagagcacccacccttgcctctgattagccaccacagcacccaaatttccttttttccccaattcagttctccgcgccgccgtgaatgagctcaccgtggccaaccttctgcaggtcagttcaagcttccttaattggtgttctagcctccctcgt

SEQ ID NO: 42497 - DNA, 349 bp, Zea Mays
ggttctatttcttatttcttatttcttagaatggtgcgtcgaatgaacccgtcggtggtcgaatccgactcctcggatgaccaggaaatccacggagataccccacctcgctctcgatccaagcgagggcgcggaagcggcaatgtcatgccgggtgctgaggcctccgggtctcaaagtgctcgcggtcgaacatcccggaatccttccggacggtctcgacctgcgacgaatctgcaggcgtgggagcctacaagtgatgatgatggcgggaaggacgatgaagtcgatcttcccccggcccacgctcctgtgattcgcggcttggtcctccaccgggcagaggctc

SEQ ID NO: 42498 - DNA, 271 bp, Zea Mays
cgggattggagattgggatttgagctccgccatcgacgtaattaccaccgacgagagatgtgaagcgctcgggattctacgggtgatcgcggacgcttgccaggatcatcggtggcctcgcggcggtggtttggcggctggtgatttcggaattcgtcgccggagtgcaagcttctccgcctgtgcgccgtggtcggggtcaccgtaatccaccagcgaggtaagaagtacctcatcgcctctgctactgtctaccctacgtatagcaccg

SEQ ID NO: 42499 - DNA, 513 bp, Zea Mays
cgggtatttccctggatgatcgaagttgagccactgatccacccgggtgaaggtgattaggtgttcggaccatcgatacggggcgggaggactggtggccgccaccagtttctgacggtcgttgagcttctgctgtctcttgctctcttgcgatccgtgtccgccgaagatgacgttgacttctctgtcaacgcgtgggaatgctccgcctcctcctccttcctgctgctggggttgtcgaggttcttcaggtcctcctcgtggtgggggaggtggcagaggttggaagggtcgaccgttcccaacgaagtgcttgaagtctctgcagttccggagggtgtggcgcatgtccttgtggtacggacattgggcgtcgaggatatcgtccaatgttcattcgcctccatggggtgcccctcgggcatgagagacgggtggttcggcggcgtggacttcttcacgaggcctcttctcccaacgcttgtcgggttgttagttcgcgtcgcgtcgggg

SEQ ID NO: 42500 - DNA, 318 bp, Zea Mays
ggggggagggacccctcgacttcctatatcaaggcgcctaccaagtagcctaaggtgcaaccatctagagcagacgatggtcccgtcaagactatccagctcgtcggggattcctcccagaccactcgcatcacaggcaatctggaggagaaataggaaatcgtgctcgtcgccttcctccaggcaaatgccgacatattcgcatgggatgcgtcgcagatgcctgggatccccagggaggtgatcgagcaccatatgaagatccaccctgacgccaaaccggtgagtcagaagcctcggagacagtccattgagtgg

SEQ ID NO: 42501 - DNA, 364 bp, Zea Mays
tgttatatgactcttcctacatacttaaactaaaaacaacagcaacagttcagtaaatgttgttctctggggtgggcaagccagcttgttccctggagaacaaatctacaccgatggtcagtcctctccacagatcctgatgtttgttggcacgcttgtcaagaaatatgcgggtatactaactttgaacttatgcatttagtcctttttgatagttgggacctaatgccctttgttttagatggattgtgcttgtctgcaggctcaccctgtaagtggtacattaatcctgatgttcctgaagcaagtgccctcatggctaggtattgtctactatgcctgctacacgaatacgactattgtt

SEQ ID NO: 42502 - DNA, 2380 bp, Zea Mays
agctattctatagtacttagcctaacagattaggagagaaataataatagtatgctaattcagttacaatgcacgcccagacaacttttgtctctcgatcgatgataagatcatctagcccccacgtactccaagcgcattgagccataactatttcgttcatcctcagacctcagtgtggacgtccataagctacatcatccgcagtgtggtccgccttcgaactctaggttcgttttgttccaaggttgtcgtctgctcatcgcgggtgcttcatggtgcgcgaaatggcctgcgcacttctgttccttcctaagaaccttcgtatttgctatgtaccctggtgtttttggactatctgaaactcccctcttcatagcccttggctacaatgacctatgatgttgcacccaatgatacaacgatcggcacgcgcgcacgcatttctcaacagctaggaatacttatagcaacatgacattagtgggcaaaccaggcaaccatttgataacataaacccaggaaacatacagaactagcacttattgcaacacggtctttaactacgacagaacaaccaagcactgcatgtcataaggtaaaatggtactttagtgttacaagtagcacataacttgacacaacagacagctgctcaaaagaaaccagagatccttttagttacagcagctcataacttgcaccttgtagcttcataaatttgaccgttgctgcagataaattatcatgaacgtgtccgacacaaagccaatgatgacgagagaaacaacagtgtcaaacgaggcgcacttatgacaatgaaatgagaattacaatgaatggtcacaagtttgtatggccgtatgggttggagaggcaaggttggatgggatagggccatccatggatttaggatagaatcatagaatgatgctcctacatgtattagctcattaggttggacggattgcatgagccaaattcttgtttggttggttgcaagttttcaaatgggatgatccagcagatttttgtttggttggttgtatgtggatagataagcagggtatgataatcttcaaattggtgtgttcaagttttgacacatccaaggcatgatgggaaacacaatcaatagttgctaaacttgaataatgtagctcatcatcatgaattggattcctgctgagaaaattacattactaacaaataattagaggtcaaaatttcacactgccgaccacaagctgcacatacacatgaacattttactcaacttactaccattgactaaaagcaagacaagccacagcattgcattaacctttccggacaaataactaccaccaaccaaaatttccaataacaaacaccacaaacaataagcactcttgcatctagaaacaagcacaacaactacctgccaaattcaaaatcgaactaaattggcagctacagcctacaggtacaactgcagaaccaattcctagggcctccaggaattgcatgagcagtacgaattgagggagaacacaggggcagcagcaatcagccaagcactagcaccaggatccctgtgcggacaaatcagtgaaaaggcactagaactagtaaacgccagtggagcagcagcacaacaacggagcacaaagcaccagcgtctggacagagggcctgctggttcccaattgctgtgcgcatcccagtcagaaacaggttaatgagggatgagattgggaacaattggagcaaaaagaaaaggcacattaggtgaccacaaccagtcgcgcaataagtattcaacaaggccatggactactctgtccaccagatttgcatggacatcccatccaagatctcgggggaatatccccactggttgggcatcccatctaactgaacaactttaaaaaatgggttgaccgtctcccatccacccccaccccacaaatcaaacacaccatgaaatgttagggctgcaacaatgaggtttgcaagagaaccagaaaatactatatctatttcaaaacacaagtcacagcagtattcaagacttcctatttggaacgtaatcatctgcctcttcactaaccttcagtacctcagaagtcaacgaaggtttccctgcaaggccctagttattttcagtcatcaagctgagatgaaacatacaaacaattaatgttagtgagggcttccgtgaaaggtacattaaatttcaaaacaggcaagtagtgatgctgatgcagtcttctcttacgtggcaaccctggtctcgttttcgtggttctccaccaactttaaattcttcgagttcttagccaccccctccaacaactggattgtttccattgtctccatcggaatggttttaaagtcg

SEQ ID NO: 42503 - DNA, 333 bp, Zea Mays
gatcaaacatgtttgagtaggaacgcataagatattgaccatgcacttcaaccattcatatgagcggttcaactacaacgaacaatatcgaatcgctaatctctaacaatgtttgtgacaaatgaagatagtctaagtgttgcaatcacttaaactaaaatgtacccaacgaacgatacaatagataatcaagaatgcgtaggatcgagtacaaggaaataacatagggcaatacctcgatccggagattgggtcaagaactcccaacgagatggaggaagatggtggaaacacgccaggaagaacggatctccaacaactcttccaaaagtg

SEQ ID NO: 42504 - DNA, 397 bp, Zea Mays
aggattccactgcagcaaggataaaccggatcgggaataggggcatcgcaagacctcaactgggccgacacacagctcataacattctgcgaacacaagaattagcaaaggagcctatttgtcaacacaagtaaagcagggcaaaggtcagctcacctgaaggttagaaaggaaaaagggaaatcccagagccggaggcatcgacatgctatcggacggtggagtactaactgaagcaatattgagggcagactcgaaccccaaaggaggattagagctcacgcccaaggcaacactcagagagacctcagctctgacagtaggcagtggattcccagcattcgggtcattgacctctaaaatgaccggaccaacaagagcagtaggaggacttgtc

SEQ ID NO: 42505 - DNA, 378 bp, Zea Mays
ggagagtgaattgtaatgatggcttgtaatctgccaccgctcggaccttctttggcgtcgccgagttcgagtcagagtcgaggtggatcttccttttgaactgtgatctttgtgcatgggcttcctctgggtagattattgctcgatctccttagttcttggggtgttgttgttgtttattaaaggtcgatgtcttcatgtcttgatcattatcatggatcttctgcataaggttaatagatgtcacaagatctattatggttagtgtgctcccctatttggcatgccaactgtcgatgattttttgctagtgaatttgtatgtgggtatacatgagatcaaagatttgaatgtaaagacataggaaacacaatattt

SEQ ID NO: 42506 - DNA, 403 bp, Zea Mays
aaagctcaggccgaagcccagaaaacagaaattgaagatcttcggaggcaactggtcgaagctaaggaaaaatgcacagtcgctcaaactaatcaagaaatcagcgaatattggaaaaattatctagagaaaaatgttgaagaacttcacacatccaaggaaaggtgctttgagaaatctttggattgtgtgaagaaaataaaagctagcttcgccaaagtgggtgcctattctactgaagaaaacttcgtacgaggcgaccccaaaggcgttgttgaatggataagtggagaagccgaaaccttcaaagaaattttcagtgatcgcggggatgtttgcatgttttccgttgcgcgggaaatttcagctatcttggagaaggttggatgcgaccatattaaaa

SEQ ID NO: 42507 - DNA, 545 bp, Zea Mays
gcagagtacaatttttcagtgatgttaccaagctagtttggaggaacatcattagatgtgacaaccctggcttgtttttttcagtctgagcagagtacaattttttctcattcaacaattttttccctttattcagatatgttgggtccaaatcgtcatttgctgaagttaagagcatcggcattggttgttgctatatcttgttggttgtttgcatgccttaggcgtagaatctttcatcctcgtgtcacatatggtccaatgtttcaaagggacattgagaggcaggcaaatcttagatttatctatgaatctgatgatatccaatgtgtggagctacttagaatgtctaaggtccctttctttgagctttgtgatttgtttcggtctcgaccacttgctaagggatagtattcacagttctgtagaagaacaagttgtaatgtttctacatgttgttggtcataatcaaaggtttagggttctcaaattcaccttccgaagatctactgagactattagtagatattttcacgaggtgttaa

SEQ ID NO: 42508 - DNA, 444 bp, Zea Mays
caaaggttcaaataagggggatagagttccctgctgatttaatagttatgggtaaccaagatacaactatagatgtcatcctagggatgaattggctaaccaagtatcaagccagtcttagttgtgacaagagaatggtgaagttagtgtccttattaggagaagaagtgttagtggagttggtcttgtcaggaccaaggaaagggagttgtcaccaagtcaccgctcatattgaggagattaaaccatcagaggctatcagtgtagtatcagatttcccagatgtgtttcccgaggagttaccaggtatgccacctataaggaaggttgaatttgccatagagcttataccaggcaccgcccctatttccaagagagcctatcaaatgtccgacccagagttggtggaactcaagaagcagattgatgagttgtcagagaaag

SEQ ID NO: 42509 - DNA, 499 bp, Zea Mays
gtcgcggagagagtcggcgagagacttgacgtgctggcagtagtctgtgatggaggaatcgtcctgaacaatggtgtgaaactcgttgctgaggtggatggcgcgagattcttggttggtgtagagatcgttgatggaagtgttgaggtcgcaggccatctgatgattgcccatggcaagatcgagaacgatgttgtcgacggacatctagagccagctcttgatggcatagtctgtgtggtcccagattggatcatcagggcacgctagcacggacacgtcgagaaacaaaagaagaccaaacttgcccgccatggctcggaagaagatgttccaacgatggaaattagggcgtgcgatctgcaacgtcattgaggcatgagtcttcatgttgattgtacataagggattgaggatggctgcggtggtggtggacagcagctcgacggaggaggaagcactaaaagatgtcgaggaggagttggtgttggaggcggtg

SEQ ID NO: 42510 - DNA, 728 bp, Zea Mays
aagatctgggctcattcgcaattactttgcacacgccaaggatggcgggttcattctagcaaagccaggggactcttttgtaagatagctgtagcgaaggggtatcgatcacatagagccgttggatcatgcatcaagggccacgattaaataaagttatctgcgaaccggtacgcaacgacaatcgtacgatcagagatccacggtccacgaatgcccacaatccaatccaccccgaaccacacgattaaagtccgacggctcggatttaaaatgacgaaggggtaagctacacacgatcatggccgtccaacacgggatcgacgacgcacaaacgattttctctactctaatcttggccgaccacgcatggatccacggtccacaaacgttcttctaccctcagacaacacccaggcggcggcgccagataccgagcggtggcgaacccgccggagcttggctccgagccaacccgatagccccgcccaacctgaagtccctacacgcactgaggatgacatggtgagcatgcacgtagccgacttaccggccgtttaagcagtggagggagctcgcccaacgtccagcggcatagctgtccaacccagccctttcgacagcagaccacggccagggatggcggcgcaccaagctcacggtcgacaccaccacccgcgacactccccagacaaccgcccgtggccgagtggtggcgcacaatcgac

SEQ ID NO: 42511 - DNA, 426 bp, Zea Mays
cgagggtcggtgacgaattcggccgaggggtgctggcggtcggagaggggaggcaagctcagtgcgggggaaaaaggtagctttcaccgtggcagtgactccggtgatcgccggacatgcaaccagtgagtcaccgcgaggaagtcccgcgctgagacacgtggtgcgcaacggcggtagcttatcggcgacgaggctatccaaccgacgatgagctggggggtgaagtacggcggccttagccgtagctcaatccggtaccggatttttaccaggtcaagcttatatgttgtacacggtgcacgaatcacaacaagagatcgaccaccggcgacagctcaccggcgacgagcgggggttaagtcgggatctccttcagttcagggtctactgtaccatggaatttattcaacagtgcgcctgaca

SEQ ID NO: 42512 - DNA, 432 bp, Zea Mays
gaccgatgttatgggtccacgacggttaataggacacgttgccaccaaaccatgtccatgtcgtcgtgtatacaacaccaagggggtcacagcatcaaagtcttcacccacgtaccacgagggataggacaacacacgtagtgcatgttcgcacatgctgatgcgagagagttgacagaagatgaagtcatactgaacaagaacctcaaccttatcgagagcacattttgtgggacccatctagtatggtggtatgggcatagagcaagctacatgatcttgcacgacagatggacgggatagtgcgtcatgcgaggaatacggaagcacacgacctctcagaaggagccattccgtgcgcggccatgccccaagattgactgtagaggggtccactgcgcactgtagctgagggcggtagctgaagaaatc

SEQ ID NO: 42513 - DNA, 509 bp, Zea Mays
aacaaggagctggtgaggctggaggagatcgggacagccatgataagcctggaggagtgctgctgggagatgcagctgcagcagcacgaccaccagctggtggctgtccccgtcagggtcaggaaggacggatgggcaagcgatgccatgctttatgtaagcgcgatctttcaactgcattgccggccatttgcagttttagtggcactgctttggattaggataataatagacgtggatggcaaatgtttgatggaaatgacatgtgtaactgatagaattgggtgtggttaactgttcaggtggacgtggagctcgtggacgcgaacacacgcccggacgtcgatagggcagtctcgttcagggagaagccgagaacgtacatggcgcctccgccgacaatgcgaggtagccgcaagagcttggagtcagcgacgtgccatgatgtccttgacctgaagcagctgcttgatctggctgagaaggaaggccgggtggccgtgtatggc

SEQ ID NO: 42514 - DNA, 352 bp, Zea Mays
tgagggtcctgcaacggcagatgcttcggcgctggttgcaagagtgtaatagggaatagattgataatgttcgttttgtgtggtactgaagatcggttactgcacaggtttcgacgtcggggcctatgtaagcaaaccctgatgatgacacgattgatgatattttgaaggatggaaatgcggtgtttcttagtagtgacgcgtctggggaatctcatgttggttcatggtctttcgagggtggaaagttggggagccctttttcttggatagatgatgaatcctcggaggatgaattagattattttgtggcgtttgatttagctgtggtggagtctccgttgagggtcgc

SEQ ID NO: 42515 - DNA, 310 bp, Zea Mays
atcagatttacaggcggtggcgctcaagcagcggttggtggctggaactgcgaaggaagggtggtccaaggttgatggtctcttactattcaagggaaattttttatgccagatgcctcatccatgtggcccctgttgttagcttcagttcatgaagaaggccacgagggcatcgaaaagtccctcaaccgttggagggcttccttccatagtccccttgctgccagccgcataagagattttgtcaagggttgttcagtctgtcaacgtaataagtccgaacaccttcatccggcaggtttgttacagc

SEQ ID NO: 42516 - DNA, 728 bp, Zea Mays
caaacctctagcctagcatggcagcgcccgcccatctctcttccagtgctcctgcatctctagcaggtggcattcgcactagcctccttcccatgcaacatacccctcccatgccgttggttaggctagacccccacacgcacctctcttgccatatcaagtctgaggctagtgaactaggccacctatcctcaatgaccggagaaccatgcttccatgtgacactttcacccacgctagtgcaccacccatccttggctcattcatccctgtagtcggtgccactcccgcacgtccccttgcccacccctctatcatagccccatccaatgcgggcatgagattcgcaccgcccgtgctccccaccgtcgtcaacaccgcacgtgcctgcatgcccttgcccctctctatgcccgttctttcctgtattgtcggcaccacaacccctcccttgccattgccacatcgatgccacactacatcgtgacgcctctactcgctactcttggacccacgtcgacccctacctctatcacggttttcgtgcctcccaacaacatgttcttgaacttcatgatggtcagcttctctgggtgcattcgttgtcttcgatatggtcataaaccctattctccgtgactatgttgagctccacccttatgtatgccacgacgctactaggtcgcttgtattctccagtgccgtgattgccttcatgccgatcgaga

SEQ ID NO: 42517 - DNA, 458 bp, Zea Mays
cagcgatcgatggcttggattcaatttggccaaaccggtacgctcatctaatctaggccgtagcttcacatccaacgacctcaatcattctccccccccccccccccgcccacgccacacagcagtggcgccgcccgggatccacgacggtcgatcaccggagccacgcaatccaacacctgggtgcataatacttcgatttgagactcgcaacgcgacgtggagaacatctcaaactcgctaggtaaggttcttaccaacgacagaggcgtagacggagcagcccacgaaccgggaggaaccacgacggggataggcgccccaacgaggaattaccaccgcttgatcggtaatccggccctgggacgccaataagaccctgggagacaacttggggaggcctcaggtctcgacaggaagactcccacggaggcgtacgcgatagtcgacggttgtcg

SEQ ID NO: 42518 - DNA, 604 bp, Zea Mays
atcgtcttgtggatgaacttgagccactttttcactccggccgccgtgtccgcctgactcacggccgattcggatgaactcaccggagttagccacctatcgaccatgtgccacgtgccttggtatcttaccacgtcgcagtagctcgtattactcatgtccggtgatcgccgatgagctcgccacggtgaaagccatgaattccttgctccagtaacctcccctctccccggtcgctagcgcttctcctccaaattgagcaccaccgccgttgcgtgctataaattgaagcctcaggaaaatccgctaggtaattacgcgcccaacgcaccagcacttgcctccaattgtccaccagagccgcccaattgcccatttcccccaaatcgatctaaataccgccgcgtgagcacctcgccgtggccagcgtgctacaggtccgttcatgtcctctgctctcttgtttcagtacccttatgtgtccttgatgcttattgacccgaccgattaagctagaacccattagatcgcctggaacacttcgtgttatccgttgattgcgcggtcaccgtgagcagagaggttgggagcttgaaccgtgcaa

SEQ ID NO: 42519 - DNA, 307 bp, Zea Mays
ccgaactggtccggtgagtccacggaaggcagagtcaaaagcaatcccgtcgattgaggttaccgttggaggtccggtggtgcaccggactggtctgatcccccgagggaagagcagcttttgcagatttctaacaatgactatttgggggtttgggggctataaatactattgtgcaacattccaatacacttgtgcaacacatccacgccattccgagagatcgaagcacccaatctgagctaagatagtgattctgtagagtgtgcttgagcaatcttcttacttgggtgttgttgtcgtgtat

SEQ ID NO: 42520 - DNA, 387 bp, Zea Mays
cacccaccatcgtagctcgtcctccgacatttccacactgcgtccggacgaccttcattgcccaatcgtaggatagaactccaccatcgcgcatcctcgttgcgttattccggcgcagacaggacctccacccatccctttgccccgacgggtgagaactccgcccctagatccttattgcgtcccgcatcctcgtcatggcaacgaccctccctcccttcgcgtcagtgagacctccgaccctccatccttccacatcgacggggattctcgtcgtggttgcctccctatctttgcactggcgacttctctgccttgcctttgtaagtcaggcgtctgtctgcacactggtcagatctgcgggcatccatctaggccagatactca

SEQ ID NO: 42521 - DNA, 279 bp, Zea Mays
gaagcatgcaccgtcatcaccccctcagactggggcggggatgacccgatgtgaacatccatggaggtatgggagagagagtccacctgaacaccctcgggggctgggttgcagctcgcactacccaccagagccggatcactaccggcaacaccctcgggggctgggtgactaccagcaccaccctcgaaggctgggtcttccgtggtggccgtctctaaggctgagggctcctccgtaacctccataggaatcgggtaactcgaaccagcattctag

SEQ ID NO: 42522 - DNA, 531 bp, Zea Mays
gggaaattttgcatagtgacacgatggtgcgatcattggaatggtgggccaatgggcatacatatcaatgtgatatgagggtgttggggttgggagcatatgatgctattttgggctatgattggttgcgtcgccatagtcctatgcattgtgattgggatgataaggttattagctttgtggacaatggagtggaagttcagttggtgggcaatactgatcagcagcaggttgtgaaggaagtttctactatacaggtggcgaaatggctgcgagggaatgatatctgggtgtttgcattgttggaggaggtgattgaggagaacagcaatggggtccatccagaattgcaggtgttgttgggggaattcagtgacatttttgttacaccaactgaactgccgccatctcgaccgtttgaccatcatattcctttgctccctgggtccattccggtcaatgctcgaccctacaaatattctcctcatcataagacggagattgagaagcaagtggctgcgttgttgaaat

SEQ ID NO: 42523 - DNA, 1002 bp, Zea Mays
cacaaataaacacaactatgccctccaacaaacgcgtcaatcgaagtcttttactaaaaagacactctgtgcaaaagtcgcccaagggtgcagccggactaccacaacaagtacacgatacgaagtctttcgcttaaaggagaccaacagtccacattgcaatacaagttgcagttacatacactcagcgaagggtcactagacccaccgcacaaataaacacaactatgccctccgttaccgccgcgcaacgcgagggcaccatacattacattggctcgactttcggaatgatgcccgcctccctataattgaacaacattattctcaattcctcaccctcaaaaagcttccgcagatccccctcgccaatgcttgtcccaatcggtgaagacagtagctctcgtttcccaaaccgatctactcgaagacggtcccactccatccccatccgacggcgcctaccacttcgcataaactcgccaatgctatgcttcgacaccacccttcgtcgccgacactaggtcctcgcaccaggaagattagacaccttgccaacctccacctgccgcaaggactccgccgtggccgcatctaacgcaacaaaataatccaaatcttcaccagacgactctttgctccaggacaacggactcccaaactcatcatcaaacaaaaaagactcagattcagaaccaggcacattataatcagtaggcactacggtagcgaccgccacaaaatttgtaacaccagccgaggttgtctatgcaggcccacacgttggaacctacgcagcaaccgagtttcagtatcacaaaaataagatcctacacccaacacccctagcactactccgccacctacgaaggtctggctgacatcgtcgggtcttcggtagctgacacaatcaccgccaaagtatcttcaccagtcgacacggaggcctccgcgggtgcctcaccagcatcagtcggcggcgccggcgactcaacccccgcc

SEQ ID NO: 42524 - DNA, 281 bp, Zea Mays
atgcacttagccgtaaggtttcctgtcactgtcttacggtgaagacctctgacaatacattatgtcaggagatggagaagctaaacctgggaatggtccaacaaggaaccctaagtcagctaaagcttgagtcagtcctcttgcagaggataattgatgctcaaagggataatgagggtatgaaacacattcgtgagaagataagggctggaaaagccaaatgtttcaaagaagatgatcaaggcattgtatggtttaataaccgcatagtggtgccaaag

SEQ ID NO: 42525 - DNA, 560 bp, Zea Mays
ctacaaggcgcggtgggtatgccaaggtttcatttagcgtccgggcgtggactatgatgtgactttcagtcctgtggttaaactcgccacaagttgcacagttctcactttggctctctctcaggactggcctattcaccaacttgatgtgaagaatgcctttcttcatggtacactctctgagacagtatattgcagtcaaccagtaggctttgttgattcagctcatcctgattatgtttgtcgtcttaactagtctctttatggtctgaagcaagcaccacatgcttggtatagtcgatttgcatctcatgtgaagtctccggggtttgttgaagccaaagctgatacttctctgttcacatggcacagaaacagtctacttactttatgttgatgatatcatcttcaccacctccaacatggtcctcttacagcgagtgattgcagctcttcagaaagattttcctatgaaggttctggggcctcttcatcatttccttggcattgcagtagagcgcagatcgaatggtctttttcttcagcggtgtatttactct

SEQ ID NO: 42526 - DNA, 1258 bp, Zea Mays
ctttcaacggacatggcaagagaagaagttgcgctccgtcgagcattatttgtcactgttactggtaccagacccgctgttctcggctcggaggtgctggaggaagtggcccgtcgttattgcatcaatattgatgatatgtctattcaccagtccaagccagaagacttccttctgtttttgccggatgaggaagtggcgacaagagtgcttaatgaaggaaagccattcagaggccctttgttctcgctcgtgttcaagcaatggacaagatttgcacatgcctcagctacgtctttctctcacttgatggatattgagatccgggggatcccagcgcacgcgtggggtctgaacacagccaagaaacttcttcatggctcctgtcacatcttggagttgcaccccgcctctgcgtgcaagacagatctctcctcactcaagcttcaggcatggtgtctggatccgaagaagctttgcagggatatggacctccacatcattgagcgagagccatttattcaggaggcgagatgtctgacctacaagattagcattgctgctagtccggctccccttcagttaccctcggacagcagtctgcctccttcagatgagaatgagtttcatggtgaggaggatggagatgtccggggtccgtccaatccccggttccgacaaccacgccctttgcagcgtcagcctgtccaccatcgcctcagatcacatcagggcgtgggcagagaacggtctgtggctgtgcatggaaataggatggtggcgccggtcctagcactggaagatggtgctgctgtctgtgctggtgatgggctgctgacctcacctggaccttcctcgcctcagcacagatgtttggctgagccgctggagaaggctaggttgagctcgccccttcctgccactcatgtgccatgcatgacaaccttgaagaatatcttagctgggccgtctgggtctgctgttgtgggatcgctggattctgtcctccccgtttcgccccagcgacacaggactgttgctgttgctgggtcgctggaacaggctggtgcgaattcgcccctaccaggtggttcatctaatgctgtggcccccctgagagtctactcgagaagcagattccgaagcaaacacgccccaattcaggaaggacagttgatacaggtcgtggaggtcaacattacagagaggccttgtctgaatcattcggagtctgtggataattctttgtctgggtgca

SEQ ID NO: 42527 - DNA, 462 bp, Zea Mays
gtggacctggacgccgaggatttcatcaagaagttctacgaccagctgcgcacgcagcaggcccttgccaccgccacgccggactactgcggcgggtatgcgcgaccggtctctggcatcgcctagaattcaacccacgcatccacacgcgtatgcatatgtaatatatatgtacgtgtccatagagtatttgtttgaacatgcatgatgcatgcatggataaagcatgttcgtttgagagctagctactggtggtagagctagtctagagcttggtctttgtgatatgagggagagattttgtacaacatcatcatatcatgtttgcaagctagatccatgcatgtatagtactcctatatatgtgtacgctgtatgtgtatattttgttgtagtgacatgtatcaattttactgcaagtaaggtacatgttgcaaagacattagcatataagaacactgg

SEQ ID NO: 42528 - DNA, 567 bp, Zea Mays
gcggtggcatgtgaattggagatggcgcggtggcggccgaaggagggagagttcactggcgcgtgcgattggtggcaaccatcgtggcaaggccttaggtaatagaaagacggtgtgtggcgatcaactgcgacgtggtaagatggctgacagcgtggcataaccgcgaagaacggcggcacgccggtgatggacatgcggccacgtcgccggtaagtggaggagcgacagagtggttactgtgccccaagatcatccatggtgagatcttttctctagaggattatctatgtttagctgggcgggaatcacgacgccggcatgaatccgagcgcacgatcacagacggcgagaggctgagctggcgacctgatcccttcactgtaccctcgaactcttcttcagtgcgcatggcagccaaggtttagggtcaaatctctctccattttctatggcaaccagttgatcgaccagtaacaaagttgttgtttgatgatccaacaacaatcttgctatagcaatcataaccagataatgattggatcatgatcaaatttaagctcaaag

SEQ ID NO: 42529 - DNA, 396 bp, Zea Mays
cctcaatggatagtgacggccgggtcacaatcgccactaccctacccactagtacataatagagcagctgatggcctcctcctccgtttcactgctcgtcaccatcatgctgctgctgctgtcgtcatcacctgcttgctcctcgctgatttgcaggcttgacttcacgagcgtggcactgcactcctgtcaggagacggcaccacaaaaccctactgcctcatgctgcgacgccctcctctattccatcaacatctggccaattcatgaactagaaaagggtctttgttgcctatgtgtgtacatggtttcaaggaacactacctttgacctgcctacgtcttacgtctcatgcgggggtaaagactcaagtaatgtgctgcagtggaatgtcat

SEQ ID NO: 42530 - DNA, 605 bp, Zea Mays
atcgctgtaggtggggcaacccctttcaccctagggcgcgacatcttagcgtcgcgacgcgggtccaccagccgaagcagggccttccgcttctttcgctgggtctcttagtgatccttatccatcactactgacacaacagcactaatatttcttccgtaaggaaagattctcaactcacgagccatacgagacataaaatagtcatcatcggtggcccggggaatagggtccttcctatgccaccgaccccaggtcaccttcaacattcgcgaagatgtttcccggagttcgagcgaagtcataacctccccaggcccagcacatgtccccgtcaattcctcaacaaaaaacatagaggcccagcacaagtcgccgaaggccctgccgcttccctctccgtacctttcacatctattttcctcttccaagttgatgtgatcacagcctttcccttcgaggtgccctcttcaaaccgggtcttcaccagtttccctcggtcgttcctagcatcagcagagtccccctccgggtaaggatcgtaccacaagcaatttagttctaaaactcggttcaaccttatgttgcaacctcatatatcccaa

SEQ ID NO: 42531 - DNA, 559 bp, Zea Mays
aaactgctcacactttgttaatatcttcttttgtcccttcacatttctggggtgaagcagtttctactgcaggttacctcatcaatagacaaccatcatccaaactctctagcaaaacacctggtgaagtcctttttggaactcctccacgatatgaccaccttggagtttttggatgtacgtgttatgtactattatcacctcgtgaacgtactaaattgactactcaatctgttgagtgtgtttttcttggatacagccctgaacataaaggctatcggtgttatgattcatcttctcgtcgcatgcgtatttctcgagatgtgagctttaatgaaacccgacccttcttttacaactcttccactcattcttcttttaattccacagagtctacctccttcatgagccttcctcccatttctgaaatttcatcagtattaccacctactgtttctaccccagatgttcttattcccatcacaccaccttccacttccacaccatctcagtcttattcttccaaaccacctgttactcagacttacattcgtcgtcc

SEQ ID NO: 42532 - DNA, 330 bp, Zea Mays
cataaggatagaagcaatatgctaactttttaaatcattttaagcctaatctcacatcatgcaagcaagaatcgatttaaccatactatgcctgcccatatatccatccgagcacattctatacattatatcatcccatcgaagaactctctttttttaattatactatgcatatatatccatccaataactcacacaatctccatctcaacctagacttcacacgacgtaactatttcatacttacgcaatcacgccaagaccagaaaacatggcttcacaacaatacgtactggcctattcaaatgtccctcgctatctctgtgtttc

SEQ ID NO: 42533 - DNA, 295 bp, Zea Mays
cccgtatcggatggctccaaaggagcaggttgaattgaagcggcgaggggtgcccaggtgttctctaaaattgatttgaactctggttatcatcagttgaggattcacgaggaggatattgagaagacaacttttagcaccaggtatgggcattttgagtttatcgtcatgtcttttggcttaactattgcccctactagttttatggaagcaatgaataggatgttgcatgagttcttggatgactttgtggttgtgtttctggatgatattctgatttactcgaaaatggagg

SEQ ID NO: 42534 - DNA, 345 bp, Zea Mays
aagtgctgctaactccaagtcatgagtgggataattttgctcatgaggcctgactgctctcgatgcgtaagcaatgactcggttgtcttgcatcaaaacacaacctagtctagtgctagaggcatcacagtacacatcaaatggcttgccgatgtcgggttgcgctaacatcggtgctgtggtcagatgttgcctcaatgtgtggaaggcatcttcgcacttttgacccaaaaaaacttagctcctttcttcaacaattcagtcatgggcttcacaattcgagagaaatccggaatgaatcttcgataataaccagccaatcccagaaaacttcgaatctgacgg

SEQ ID NO: 42535 - DNA, 427 bp, Zea Mays
cgaggagcgcaccacgctgaggatgaggttgtggcctttcgcaagaagatcgacgacatgttcgctgcggctcaggatgcggacaaggaagctgccaatgcacacattcgtgtccaggtagccactcatctcctcgaacaggagaaggccgccgccctcgagtagaaggctagcgccgcttgacatgatttgttcctacaacaccccacgatcgcagcttacggggctgccgtcattgccaacctctacgtctaggcagctactgtttccaacgttcgagtgttggtgatggttgtccccgtgtcctcctttgacaattatgccggttggcttgattaggtgttgcttgctctcaagtgatacgcctttgtcaaccacatcttgtttgacccttcgttggacaccggtttgtgctgggatcgaatgg

SEQ ID NO: 42536 - DNA, 351 bp, Zea Mays
gctgaagatgcctcccctccaaattcaggcaccacggccggttcaatataacgcggctggtgggtaagaacctttaactttttgtccttcggcacaggctcgtctggagtggccgaagtagcagcttttctcttctttccctgacctcgcagtggatagcggtagtccggtaagcaaagccaatggcatcaaaaactctgttcaatctcttttttccccggcctccgaaggctgtggataatgcattatcttctgctttggaatatgatccaagcagttcatcacttgtagcttcgatacatttcagccagtcgtcgtttggttcatcaaatttatctcaatatctgaatg

SEQ ID NO: 42537 - DNA, 419 bp, Zea Mays
tttatcttacagagcagggggtggtatggggcttgttccaactttacaataggatatacaaatcttacaggttacatgaagctaaaaacctaggaaaatgtttctctaagaaatcttgagtttcccaggtagcttcgtcttcagtatgttggttccattgtatcttataaaacttgagggtcctttttcgagtgattctgtccttctgatccaaaactcgaatgagatgttccgaataagtcaaatctggttccaaattaacatccaccacatctatggttcgatcaggaattcgaaggcatttctttaactgagatacatggaacacgttgtgtaccgcagacaatgattcgggcaattgaagtctgtacgctactagtacgcattgttcaggaatgggaaatgggccaatatatcgg

SEQ ID NO: 42538 - DNA, 305 bp, Zea Mays
cgacttccttgaccggcgatccggaagcaattgcgccaacaaggataacgtgaactttggggaacttcccaagaataccacctatttagccgacggtacctgcaataacactgtcttccaaaaacaggatataactgtgcgatactgggataaccaatccatacccaagataacatcgaatgtccccaaggaaatcagaaccagattggccgaaaagacctcatcagcaagaatgacagaacacccctgacaaactgaacagctactaatggagccattagcagaactaacaaaaattgggtgac

SEQ ID NO: 42539 - DNA, 308 bp, Zea Mays
attgacaccattgttattcaacgctcatagtaagggttacgagctcaagtctcttctggtggaggaggtggagccaagggctacaaagtgaaatcctaaccaagtctttgcttggcagtgggtctctagcctctgagtcctcgtcggtgcgtcctgcttcctcacgtctgtccgtcgtctttacgtctgggtgtccgtctcggcgtcttctcgtatgtctgtcctttcgtgtatggagaccaacctcctccttttataggccaaggaggaggttagccggtggtggcttccttaagaaggaatcatcg

SEQ ID NO: 42540 - DNA, 272 bp, Zea Mays
gaaaagagtgcgggccggaataacattgtttggtggattacaagggtgcgtgggccctgagggttagacaaaaaatttgcggagattgtcaatgttctaggagtgctctaagtcttcgccggagggcgttgctagcctgtacgcgctgggggatgcctttgtcttgacgatgaatggaccctcccatttcggctccatcttgccccgtgattctgttcgggtggtccggacgagtacgaggtctcctttgttgaactctcttgggacgaccg

SEQ ID NO: 42541 - DNA, 311 bp, Zea Mays
gtcttcctcaccttcactgtcacttccgtcttcgaccacagtctattcagtttcggcagtagcaccttcagcagtagcttcttccggtacaaccaaacctgatcgtctcatcacctctgatatcggtgttgttccagttacttcagttttgtctccctcatgggacaccctacaatggatcttgatcttactctggccatttcaatattcagtctccttaagacgaagctgatctcgagcgacaaagcacttgttcgaaagcgtaatgtagaaagcttcggcttcgattaaaattttcaacagcgcaacag

SEQ ID NO: 42542 - DNA, 738 bp, Zea Mays
atcatgtgagcgaggaggcacgggaggcggtggcgggatcccaggccctcatcatcatctgaagaagtgtcagcaacgacaccttaggtatcgaactgtctgaaggtctcatcctctgcctagatatctgacactggatctggcactaggactaggtcctcaggggctggacgataggaaccgaactaaaggcgagaggcctcgagggtgccttggaactgaggaggatcagctgcgcaaagatgtgacagaggtaatgagcatatggtagctgacggcgagcatggagaccatccaatattgtgtcctggatctcacaaattaggaagtcaaccacgtcgaactctaaatgtgagaccaaggcaccaagtagccattgctgaatgtgagtggtggcctctctgtatcccatcctgggtagtagtgtacgtctcatcagctcatattggaacttcgttgcagtagtgaagtcagcaggagatcgtcgcgacccatctgtgaaaggaggtctgaacagggctgcgacgtgagctgtagcgggtgcaactctgccgtgagggcgacgaggaggatccgaagtgccgtagcacagactgtgaagcctagtcgacgactctggaaatccaaaaagctaacggatctgactggcatgcaaagtgacatcctctcgctcgaaacggaatcacatccactgatggtcagggtcaatccatacggtagcatagaacactctgaccc

SEQ ID NO: 42543 - DNA, 571 bp, Zea Mays
ggcgctacgattcgtgcccagtatcacgcagataacgacccctggtgaaaagatctcgctgtggatgaactcggagcactgtggccgctctgtcgcccatccacttgccggcgacgtggccgatcggtcgtcgcaggggtgtacaccattcaccgtaattgtgtcacgtcgtgaccctttcaccacttcgtaaccagccatagtagctcgccagtgaccgccgtagctccttagcctgtgactgccacgatagttcacgtcagggaccttctcctctcaccggccgccagcgcgatttcttcaaattgggcgccaccgctctcggacactataaattgaaggtgtcgctagctccgttaggttgtcacgaagccagagcacccgccccggcctccgattagccactatagcgccttaatttctttcttcccccaattcggttctcctcgccaccgtgagccaccgcgtcatggaccaccgtttccaggtctgttcataccctccttgcccttgtttcagcacccttgtatgctatggatgcttatcagcacccttgtatgctacgttagat

SEQ ID NO: 42544 - DNA, 406 bp, Zea Mays
ggactttcttcctgttcattcactgtgggggagtgtgaaactgtgaagttggttactgcagcttttactttaccggaagagctgtttgttttatgggggtaaaatggttctcattggaagtcttcgccgaccggcggacgatgccttttcgtcgcagctctggcggatttgcgtggagcactagttagtactactctagtatagtagtagtaaagccgcagtgatcgaggagacctgaccacctatgctacgtctcgacttgttccccaatgctttggcttgcacaacaatcagctggccaagctttagtgtagtgtagtttctgctgacgacccgggactaaccgtgccgtacgctgcgttcggcccctcacgaagaagatgtggcggtgactgtgaaagcaaaa

SEQ ID NO: 42545 - DNA, 328 bp, Zea Mays
atgaaagtcaccatcccaagggttaacagcaatatatgcgtacgtacgtagtgtgtatagctgaacgtacgtgcatggtaggcgtagacacacatgcaactactatacacgagcgggaggtgccaggcaaaggcagcgatcgtcatggtcggcggcggcaccagaacactcacatgtacgtacagatcaattccatcgtatcttacaggaaataacattgccgatgcatctctcagatcaaatacgaacacgtttaagttcctagctagctcttcctcctaccccacccatggcgtacctcaacctcgtccatggcaagaagaaacac

SEQ ID NO: 42546 - DNA, 328 bp, Zea Mays
ctgatgttgaagaagttggttccgaagatgagtacagctacgggatgccaagcaaacctagtcatttggactatggaaagtccaccatctctgaagctgatcttccaaaaatggtgaagttgggatactttagtgaaacaaaaaaggagctggttcgttttggcggggaggagattactccgaagccagaaaagaatgaggtggttgtgttcaaaagcttctttaaagcaggattaagatttcctttgaatgggatgattgctgatgtgttgaagaagtttggggtttaccttcatcagctgacccctaacgctattgttagattaag

SEQ ID NO: 42547 - DNA, 665 bp, Zea Mays
ctgtaaatgacactctttgtagagaaatgtttgaaataaatgatgtgatagaaaataggattgacgatatgctcgagatggttggccttagtagtttctatcatcctcatccctacaccctacccagatttaaagcttataaagctatttaagagtgctcttttagcatacaacgtaacatggttggatttaaagcctaaagctatttaagagtgctcttttagcataaaacgtaaaatggttggctgggattaaatgtctctccatattagaccgtctttagctgttcatccatggtcatcatccaaatcattgtttttgccctagatcatactctgtttctccacaacttaacagtaaaaagaatctaatgtgcttcctccacaccatcttcttgacccgtcgtctccatcccttgtgctaacttgacactttcgggctaccattgtgatgtcccgtctttaccctggccatggaggccttgcctttttttccacgctcatgactcaccaccaccaccaccaccaagcctatctgctgccgccaactttccagattatcgtgttcttcacatggacctttaaggatctgttaatggtctgtttgaaagagctttaagtctgaaaatcagattgcgctgaaaaaacatgtttgagagagtttca

SEQ ID NO: 42548 - DNA, 445 bp, Zea Mays
gaaaagaggaactagagagctatggtggctaatcagagacaggagcgggtgctttggattcgtgattacctaacgaagctagcggtatgctcaatttatagagtccaagagcggtggctcctatttttggaatggcgtgctggcggccggagagaaggaaggttactggcgcaagggatttgtggctttcaccgtggcatgtcctctggcaatggacgggcttgctacatacgttcactgcgacgtgctaagcttccaagatgcgtggcgcacgatcgttaagcagctaacgccggtgaggatcatcccggccaaccgcagtccaagtgggtacggcgagctcaccgtcgaccgggtccgagccaatccgagcgctaagatctttactcccctcagttatccacttgcactgggcacaaatcgtagcggccggcgcgaatccggg

SEQ ID NO: 42549 - DNA, 393 bp, Zea Mays
cggtgacacgctgccataagctagcaaaaaggtctgacagcttctctgattatatctgcagatctcacacataaactaacggggatctgaatattggctacatacttccgaatcttcaactatttctgttgcctctttttagctttcttgccaagttgacaattcagagacttaatgccatgccgctgaggggtcgatcacgccgccaaggtgacttcccgcagaatatgaatactattcatgctcgaccatccttccctcactcgtatgatcggaacacccaagacgtagcaaggcagagaattagatctggcgatgggcttgatcatcatccaagccagactatcagcccctctgcacaccagcgtcatgatccttccacgaataccagac

SEQ ID NO: 42550 - DNA, 318 bp, Zea Mays
ctcctacatagctacccccaacaccatatattccagcatcacccgcaccatccccatggctaccatcatcgttgttgccaccatcaccttcactagggttatttgtgctttcttcagtcccaacctcttcatcttcgcatttttatcagcaaatttgaccctttttcctttgcgttatgaaggaccaatttttgttttcctctttccaaggtgggtgtcaccaactgttgtattggcctattcctgaacatccttttgtgtctccatgttcacgagcaattgatgtaaacaacttgttaggaacatgtgtgtcactat

SEQ ID NO: 42551 - DNA, 281 bp, Zea Mays
tcacgatacagcatgtccagattgtctcgagatgtaaagagtgctcgtttctcctcctgcaagcaagaacgacactaagcactaaagcaaggagagcaaagcaggagcagccaaggaagtttacctcatgtgccatcttctcggaatcgagttgtgcattcagagaggagttcagggaacaagcaccgtctaggaaagcagaagtctagattaagtcggtctggctctgagaatacttctcttcaatgtcagagcattgccgagccaaatctgataaagca

SEQ ID NO: 42552 - DNA, 604 bp, Zea Mays
atcgctagatcccattccaaccgcccggatcaatccatcgaagcggtatgcgttgtttctaatctcagccattcccctccgatccaacggctcttgctcatctccctcatttcgaccaccaagacagcggcgcaaggccttccccacggcggaggtcccaccgaagtcggccaagccgccaccccaaagccataccccctaatccgattggtcctacacgatctacagagggaaacaaatcaattgagaagatccctaccgggttttgtgaagcagatacggttgaccacgtcgatgtgcggttctgccgccgaggattgactccggcgagcgattagaggtgaaccagccggtctacacgcccctagaatgcatgttcaagctccaagcaatctagagaaacccccatccaccatccggggcgctagcgctagcgaatcgaggtcatcccccgcggcggacccacacgacaacgacaatggtggcgcggggcggaaccttcgccagagcccatccagcatccttgctgcaccgcgaagctccctggcactacaggatctagttcgtggcggcgccatcctttccggctctctctctctcccct

SEQ ID NO: 42553 - DNA, 774 bp, Zea Mays
cggcgctggagacgactggctaccacttcgaagactaggagacaagattgtcaccaaggaacacaacgaagctggatgtggacggacgagtgtcgggacaatcagtcggcgtcggtgtagacggcgaggtcggtggtcgcagatcatcgaaggaggccgaagtcggtggtgccccagaggtaccacaggatccgcttcatagcggtgagatgtggctccagcggggcgtgcatatggaggcacacctgttggacgatgttggcgatgtcggggcgggtgaagacgaggaactgtagggccccgatgagactctgatagctggtcggatcaaccactagagggccgtcgtcggaggagaccttgccctgagtgtccactggagtcgtgcagggcttacaatcagccatgccagcgcgctcgaggatgtcgacggtgtactgtcgttggtggaggaataggtctagggtcggcgctcgacggtgatccccaggaagtggtgtagctcacctaggtctttcatcgcgaactcctgctagagggaggagatgatgtgctgtaggaggtcaggggaggaggccgtgaggacgatgtcgtcgacgtagaggaagaggtatgcaatatccagacgcggtgaaagatgaatagggaggtgtctgccttggcctcgacgaagccctatgaaatcaagaaggtggtaaagcgactgtaccaagcttagggcgtctgcttgaggccgtagagggaacagttgagcttgcagaccatgtcggtgtg

SEQ ID NO: 42554 - DNA, 306 bp, Zea Mays
atctacactccgcgcaaaagtcgcccacgggtgcagccggatcagcacagacgaacgaatacggccaacaggccacattacaatacaaattacagttacatacacacggcaagggcatcatatattacatcggttcaaccttcgggatgataccgatctccctataattaaacaacattatcctcaactcctcaccctcaacaagatttcacagatccccctcacctatgctcgtcccaatcggcgaggtcagtaattctcgtttacgaatccggactactcgaagacggccacgctccatcccca

SEQ ID NO: 42555 - DNA, 419 bp, Zea Mays
aagaggaaagaaagaaataagaaatcgaaatagatttgcaatgataaatagtttcatcatgaaaacatagtaaaatgtatttgcacctgctttgcaaggaccaaatatattaccaccttttatatcctgtaacaactcttccaatttcatatgaaatactcttacaggaatatcaggtgcatctgaagatttttggccagagtgttgaagaccatctacaatttcatgccactttgcattgcatgtaaatgttacaaaaaagtcgggtggaccatggactctgcagatggctatgctatcatggtaattttgtatcatatatcgttgtccaccaatgtgtgacgccggaagtacgattgtttttcccatttcgtcaccgtttatgcagcctttactaacagcatctgatatgccttgaa

SEQ ID NO: 42556 - DNA, 430 bp, Zea Mays
tcaagaagcatcaagagcatatgagagtgctaaaacaagagctaggagggcgtgatcggacctgtgaagagctgaccgcggcgagctcacacagtacggtgttcttgacagatttgggggaaatcccaaattaaagctctctagtggataattcgagacacgagtcggtgcgctggatgcttgactacctagcggagctgatggcacactcaatttatagggctcgagggcagtggctcttgaatttggcatggcacgctagcggccggagagagggactaagtcactggcgcgggtgaccgtggctgttaccgtggcaaggccttaggcaatagaagggctttgtattgtggtcagttgcgacgttgtaagatggctgacgacgtggcataaccatgagtaacggcggcacaacggtgatggtcgcgcg

SEQ ID NO: 42557 - DNA, 524 bp, Zea Mays
cagtgcctgatggatgaaggctaacattggagtttcacggtgagtagttttgcggagagctctggctggagatctgacatgacagatgagatgagagagtcagcttcgcttggtgttcaagttgcccgtgatggggaaggggaagaggaagacgccttgctgagatggttggatcatgataaatgtgatggctgatggttggatcatgatggatggattccaacttgaggggcttggattggattagactctaagcactttgagatatgtttggactggatggtggactttctgtagtaggattctaattaattcctttgttaggatttggattttggtccaatcccccctaacaaggtaacatgataactaaaagtttatatattgcattacaaccaccatagcagcatatcacaagatgagtaatattaattcaaatttatgcagccaaggatcagaggcacatacgaagacaacttttagagttgtaataagtcaaattatttaagtttgactgactttat

SEQ ID NO: 42558 - DNA, 625 bp, Zea Mays
attaaaagaactaaatgctcttttgctcaaccatccatagaatacttaggccatgtgatttcagcccaaggagtatctactgaaccctccaaagtggccgcagtcaagaactggcctattcccaagaatgtgaagcaactccgaggttttttaggtctcacaggatattataggaagttcatcaaagactatggaattgttagccgaccactaaccttattgcttaagaagggttcagtgttccggtggtctgaggaacagcaagtggcttttcacatgcttaaacaaaagatggttgaagctccagtgttgatggttccggatttttctaaacagtttgttctggaaacagatgcttgtgatctgggtataggtgcagttttgatgcagagtgagcatcctgtggcatacctgagtaaggcattgggaatgaagaatcaggcgttgtcagtatatgagaaagaatgcatggctatattgttggcagtggaaaaatggaggccctacttacaatatcaaccgtttgtcatcagaactgatcatcacagcttgcggttcttaactgaccaacgggtttccacccggttgcaacataaggcgttagttaaattgatggaccttcaat

SEQ ID NO: 42559 - DNA, 310 bp, Zea Mays
attcgttacctagcaccgtagcacgatcttctcactgcacacacgaccgttgcacggaaaggagaaccgtcgtaggcctctgcatgttccttcctatacgatatcctcattgcacgtaatgtgtgtgggaaagaaaactgactgccacgtactaatgctcggttggccatgtgcaatgccgttccgtgtatggccacactagatccggtcagtttttctacgtcttcaaactcgtggccatccgtgtggtgagttttaaccaatgaaaatacatagcatcacattaaatgcacaaaatattgattttttc

SEQ ID NO: 42560 - DNA, 286 bp, Zea Mays
cctgacttctccagaattgctaagccaatggctgagttgttgaagaaggtagtgaagtttgattggggtcagaaatgtgaagatgtctttcacaccttgaggcggcatctgacaacagcacccgtgctagcacagcctgacaacaccaaatcatttgatgtgtattgtgatgcttcgggcactggactaggttgtgttttgatgcaagacaaccgagttattgcctacgcatcaagagcactcagacctcatgagcaaaattatcccacacatgacctggagctgg

SEQ ID NO: 42561 - DNA, 492 bp, Zea Mays
attcatggctgtggaaactggatttccctgcaatggaaccagttcttcattcacgtggacaaccaagtcacagcagcagcagaaccacgatactgttgctgaccattcatatcaatcagcaagcagaacatcaagcattccagacaccggacatggagcataccagcaagagaacacttacgagttgtacaaaaaccaaagtttccagttcactcagtaccccaagacaacatgtgttgctgctacaaatggttacagtacacatgcctcagagaaatcgaagagaaaacatgaagaaaactacatatacaattatatttcaagtggcaagagcaatgagtatccatcagggcgtggacgacattcaaaaaggaggcagaatttcagtaatggctgtgcatctgtggaagttaatggtcagaatctggctgcaactgcaggtatgtctgggattgccgatggaggaagatttaatggtacatcaggggagaa

SEQ ID NO: 42562 - DNA, 329 bp, Zea Mays
gaacaatgttagcaggcaacgacatatgcacatgatcataattcacatcagtactactaatgtccgactgcaatttgcgcaatgtggaggaacaatcggaatgggattggacaagatgagaagctgctgagcgtgcaaaaggaaaaatattttcatcaaaaacaacatcccgagaaatatagatgcgaccagattctatgtcaaggcacttataccctttgtgaagcgaactgtatccaagaaaaacacattctttggagcgaaaagcaagtttgcgattattataagctcgaagatgcggccagcatgcacatccaaaaattttgagc

SEQ ID NO: 42563 - DNA, 576 bp, Zea Mays
cggcgatctccggtgatctccggcttgggcgagagtgagagcgtgcgaggtgatacggctaaggccgtgggggcacttataggcggggcgaggcacaggcgcgcggggaggggcgaccatgcgcgggggcgcgggctgccgcggccagttcgcgctcggctggcctgacacggcttcgagcacatggctctttgcttctgcccgagtttaaacgttcataggttgcaaatcttcgcgtatttgggcatgatcactatacaagatatgctcctccgacgtagctttgtcgtttatgtgtggaagtcgagcagtttggggttttgtacagtgagttgtcgtgtcgccaagatgttagtgtcacaaggccgcgtcccgaggtaaatttatgccaagattatgtcaaacgactgagaaatgttcacaaacttcaccaaggtgtgttcaaggaaatttggcgccactttgttatttggaccaagtggattcaagtttttgaattatgagaacacagctgatctttgcgaagaggttaaattttagaacttggatttttctgaatttcctatagaggttttg

SEQ ID NO: 42564 - DNA, 332 bp, Zea Mays
agatggataggttagggcaagaatagcctagggtaagaaagtttatggtgaggaagaactccgtgctgagtggtaatgcatctgaagatcaagtttgacttctctcctttcttgacgaggttgatcttttcttatctggtcttggtttcattgttttagggttagtgtatatcatcagggttggggaatatggttaagatagatttggatgagatagactacatgatgtaggtcaaaaacttgtttgacgataggtggggatagacatattatgctattcatcatgagtctactggttgagttagatctttttgctcttggttgagttggtt

SEQ ID NO: 42565 - DNA, 315 bp, Zea Mays
gaggagttttgttgagaagtttgcgaagacgtgcgtttgaccaggggggtcatgacttcgctcgacctccggaaatcatctttgcgaatgctaaaggcgaccagggtgagtggcatgaaaaagaccccatcccccatcattcgacgaagattactttacgtcctgtttggctcgcaactttaaaatcgttccttgcggaagaaacattggtgctgttacaacagtagtgatggaaaaggatcatgaagagtcctcgtggaagaagcgaaatgacatgcttcggttggttgatccccatcgcgacgcgatggcacc

SEQ ID NO: 42566 - DNA, 413 bp, Zea Mays
caaccctttacccctggttctgtgtaactgatatagaactcaggctagctttgtatattctgattccagtaaagtgcacatatggatatatgctgcaatatggtggtccgtgacatcactgcatgcgattaagaaggttagatttgatggtctttggaatgtaaaaaggattcaatatgatttatggaaacacacaaaaatagatgttaatttttggtcttatctacatcctacatagtcatgtaaccagtaattgtcaaggatgctggaataatatgcaacttcatttgctttcgtgccttttctgtggctggtgtatacattttgcatgggcgtcttcaactttccttccctctcgggtatataaccaatgcttcctcgtgttatgatgccaatatgtttgacaaaagaag

SEQ ID NO: 42567 - DNA, 459 bp, Zea Mays
gagaaagggggaaaatggtgtcgcggtggttctgggtgaaatttgggttggagattggggctatacggccgtaaggaactatagtttcaccgtgcacattcaatttgggaggagggggcagaggcaacgcgaattttggattgcgatcaactcactgggtggaggtgtgcataccccgccgtggttcatagcgctatttatagccacggcggtctggctagcgttctctggccatggataacttcgttagcgcatgcttaccacgtagggaagagacacagtgagggagatcgaggcatgggtgacaccgcggtgaaagttatctgagtcatggtggcggccggtgattaactccggccacgctcggctcagcacgcggaatggtgccacgtcccgagttactcccttgcgatcatatccccaccgattcatccgagctcatccaatccaacagtgccg

SEQ ID NO: 42568 - DNA, 414 bp, Zea Mays
ctcgatcgggaatcgaaagttggaacgaccgtgaccgtacaagtgtattgacgttcttgtcggctgtcaggtgcgttaatttggtcctgctcgagttgcaaaaaaaagagggcagaattgcattcaggcctctcacggctcgtgcgctcctctcgacattctctactctttttaagcccgagttcctcgtcgtgcgcgtagattgattttctcctccacatcttgcctaattaaaaaccagataattagtgttcctcctcctctttgttgttgacatctatattaaccccaacatcatatctctttccacgtcttcgtctttctcacacagattctttcctaacgtcatattctttgtaccaccatagacaatattctgttggctctgacttgccagccgcggcagtcgtgccc

SEQ ID NO: 42569 - DNA, 394 bp, Zea Mays
gtgtcacgggccggccacgatcgatcgcacgacgacgaccagccagccagtacgtagctagtgagggcagcaacaactgaaccggccggccgcacgacgtacggttagctgttgtgctacatgcaataatactgtagcagttccatgcatgttgctgcactcgctcgcatgcgtacgacacaacagtaagtatatgcagttgtgatggatgattgtgggacgtacggcatcagcttttgcatctgattactttatactgtatgcagatagatactgatcctgtactcgtacgtacgcgtatcctatgttgattataatcatcatgcatatatactagcattaacttgtaggtagccaagctaagctagcatttgcggcggtcgatcgagacacg

SEQ ID NO: 42570 - DNA, 501 bp, Zea Mays
ctgggcagcagaaatgaataataaaatcaagtggcttagattattaacacataataattgaggaagattaataaggacgaactaagagttggtggccatggaggtggggtgattagtgactggtagtggagatagtagggcaggtgacaggaaattgaggttgtgctggcacaatcaagctcataattgccaaaatcgagccccctaatgccttagtatgaagttgcactgttgggtctgtgaggtttatgcggtccagctagctattttgagtggagttgactgctggtagtgtttgatttctgtggaaacagtagtatggaaagagggaattggagaatatatatgtgtatgtggattcatttatttttctctgctgcggtcccatgaactaaacacgactatagacttctagaggcattgaacctgtaaccaaatctctactacatgaaggggccagaaaagcttcagtgaacatgttttgagtggagttacctgttg

SEQ ID NO: 42571 - DNA, 436 bp, Zea Mays
atttggcagccagaagccgattctgacgaccagttgcagaacttcttggatgggctttaaatctaagatggctttggctcagaaaaactcaaccagaaaggccctggacagattttatgttcaaggtacatcccaatgtcgaagctctcttctctgcctcggttcacactacagtaggtgatggctctagaaccctgttttggtctgatcgttggattcatggacaatcaatatctgcccttgccccttcgctggtcagccgtattacaggaagaatcaagaaaagcagatctgtgcaggaagcactggtaaacaatagatgggtaaatgacatatctggcagcctgtcagcgcagattatcatcgatttctttgtgatttgggacctagtacaaggttttcagttacatccagggactcctgatgtgcatcgatg

SEQ ID NO: 42572 - DNA, 333 bp, Zea Mays
aaccaccttgctgcacttcgttgtccaggaaatcgtgcggtcggaagatgcaaaatccgagaaagccgtagaagacgaaaccagaagcatcgtgaaagacgaaacgttccgtaagcaaggattgaaggttgtatctgggctgagcaatgagctcggcaacgtcaagaaagcagcgggcatggatttcgatgtgctgcacagctatgtatccaagctccaggccggccttagcaggatcaagtcggtcctcctgctcgaggagcagtgcgcccaaggccacggttttttcgcgaggatgcgtggttttctcgaggaagctgagatggagatcca

SEQ ID NO: 42573 - DNA, 377 bp, Zea Mays
ctcaaccgagcccttggacagcttccccgaggagccattaagcttctccaagcaagtatggaagccctgcctcaccggaacagcaagatcaccgtcgccggacttcgtccgccccccaccgcgtgtaggccgagctatccagtgagccattctccaattcctcgcgcccatgccttccctagcaactagtgaagctcactgaccagtttaattgaactataccgccctagataggccggagccctcgccgccgatgagctccccctccagcgcacgtggaccggcctactctgactatccccggagacgatccgcatatcggcgtgaccgtcacgacctcccctacgccctcgaccacctcaccggagcaatctcgc

SEQ ID NO: 42574 - DNA, 588 bp, Zea Mays
ccggaacccgtgctggattcgcgctggtacccccccaccttcttcttggcgccacatagcttgtactacattctgtaattaactgaggatttttgggtgctcgatctgttttacaattgtagccctattctctctccattattatgaagattggcccccagtgctgctagtctcacttagtcttctacaattttgcacgtacatatacatatgatccatttttatataagtgtaagcagtaagttacaagttcaaaaattagccaagtttagtgacagatagttcactctgaactctgaaggacaactcaaggaaattaaattgtagttttctttcagttcaaaggatcctcatatctgccctgattcgacaccaggttctgcgacttcccttgactggtgtggtgggctggtggcgcgcttgcgttcctctcttcacaggcccctcggtgcgcagtggtggatttgtccttctgatttgcagctctgacgacagtgggaccactgaccgagaaggcagcaattcgttgggagcaggtgagttcatcatgttctatcacttttcctcctttaatttcttcccatcctg

SEQ ID NO: 42575 - DNA, 304 bp, Zea Mays
gccaaggattgcccacggaatcaaccaaggcagatgccagcacataactaagacaaaggaccaagacaaatggaagaagcaaaaacttcaagtcaggcaaaggaagctcaacttcactgctctggaggagctacccgagggagcgcctgtcatgactggtactttttccgtttttaatcaacctgcattgattatgtttgactccggcgcatcgcatgacttcatttgcgagaggttcagtgttaaatgtcaactgcctttctaccatacccaaggggctttcatgatagcaaagcctgggggc

SEQ ID NO: 42576 - DNA, 595 bp, Zea Mays
tgctccgcccctgctcccacggcccgcagccttagtggttcgcgtcgggcgatgagcagatgtcggatctgtccgcgggctacgtgttgagtgtcatatcatttcatgagtgggggtttggagtttcggcaagccgctttatgtggctctctcacactactatggggtggagctgcacaacttcaacccaaactccatcgcttaggtggccatcttcaccaccgtctgcgaggggtacctagggattgaggcccattgggacttgtggctccatctcttccaggcggagcccttctccctccccagcaaggtgaggagggtgcgccacacccttcgggccggcgactgtgtgctccacctgtgctcagactaggagcagttgtacatccttgccaccctcacctcgtcgaacaaggggtggcagagccggtggttctacctccgcaacaacgatgagcggctacccgcgttcacgcaccacatcgtcctcgaagcgaaggagcgatggaggtgcaacctacctcgggagctccagacccacctgaatccgatgttggatgccatgcggaagctccggaaccgcagtctcaccgcg

SEQ ID NO: 42577 - DNA, 472 bp, Zea Mays
cagagtttttgatgtcattggttttgtttaccccgactaccgctatccgctgcgaggacagggaaagaagaggaaaactgctgcttcggccactccagatgagcctgcgccgaagggcaaaaagttgaaggtccttacccaccggccacgctatattgaactggccgtggtacctgagtttggcggggaggcttcttcagctgctgaaccgaaagaacctgctcctcccacgcagaagattgaagagccggctgtaatgccgaaggcaccttcggttgagctaattgaaacgtaggttgacaaagataaggctgaaaggtcaaaaactggagaagtaacaaagatgcccgggattttaagtccttcaacagaatcaacagtgctgaaggcagaaaagagttctgccataacccctagaagaaaaaggatggtaaatgtattagatattttagaaacaacggattccataagc

SEQ ID NO: 42578 - DNA, 722 bp, Zea Mays
acatgtgttggttgtatcttgacactgttgtcagatcaactatatgacatacacatgcaccacgaagtggctcgtgatttatgggagaccctggaccggatgtatactgaatcagatgctggacgtgaactttatgttaatgagtagtaccatgaatacaggatggtcgatgaccgttctgtcgtggaacaggctcatgaaatccagcttctggtgggggaacttgcacactttgattgtgtcttgcctaacaagttcattgttggtgtcatcattgccaaattacctcctacttggaggaattttgccatggctctcaaacacaagaaggaggcaatgactattgaaagtctaattgctactcttgatgttgaggagaaggcaagatctaaggatgtgcaccattctgatccaatggatagtggtacctctaatgccaacgtgactgaaggcaaatctagtgggaaaaacaaaaacaagtcgaactggaaaccaaaggccaagcagaacactgattttaaaaagaagaaaaaccttgcagacctaacttgctttgtgtgtggtgaatctggtcacatagccagaaaatgtcgtaataggaagggcaagaaaggtgatggtcagaaaaatgcaaatgtggttattgctgatgctgggaattctgggtatgtccctcaaattcttttagcatgtcaatccaccgattggtggttagacactgg

SEQ ID NO: 42579 - DNA, 711 bp, Zea Mays
tttcatcctcagtctgatgggcagtccgaggtggtcaaccgagtgattgttatgtatctccgctgtctcgccggtgaccggcctaaaagttggctcaagtggcttccttgggctgaattttgctataattcttattatcaaactgccctgcaatgctctccattcaaggtggtttatgggagagaccccctgaccatggtctcgtattttttttttgaagaatcagcagcacgggtggtggctgtggaccgacagatgcaggaccgtgaccttttcttggcagaaattcgggaaagactgcttcaagctcaagtgacaatgaaaacatatcaagacaagagccgtcgggatgtccagttcatcgtgggcgattgggtctggctccgtttacagcacaggactgctgttggtgtcactgcagcttctccgtccaaattagggcccaagttctatggtccgtatcaagtgctgcggcggcgcattggcaatgtgtcttatcagctccaacttcctgcacgtgccaagattcatgatgtgtttcatgtttcactgcttaagaagtttgaaggacccccgccagcggctgttgttcctttaccagatattcttcatggcagaattgtccctacacctaacaaggttactaaagccaggctgaatcgtggagtctggaaagtcctagtgcattgggttggtcggcctgctactgac

SEQ ID NO: 42580 - DNA, 303 bp, Zea Mays
aaaattggccttaagccttctccatgtctttccaccactaggcggcttcatctcttggtttggtctatcacataacgctgtcggatctactctggcctttacgttatcctttgacttatcaggaatgtccataattgttgcccaaagtgcctcggcaacattcttttcagtgtgcatcacgtcaatgttgtgtggaaggagcaggtcgtcatagtaggggagctgagtcaagcccgacttatgtgtccacatatgttgctcaccatatcccacaaacccaccttctggattggccacgagccc

SEQ ID NO: 42581 - DNA, 399 bp, Zea Mays
cggagatcatttccccgacggtagcccctgagaggggtcgttctcgagaaatcgagatggcatccccttggaatctggtgtcatctttgtggcgatcaatcatctctctgggcaaagtcggacgcatctttgcctctttttataaacctcgggcggtcgttcacatgctggtcattcttgacatgtccctcaagctcgcctttgatcaggttggcggtcgaaccttgagctatcgggatgtcgcgctccgttggtcatgagtcgaggtaagcttcttccctcgggcttgccaacttccttttttggtctaactttgctacatcctttcttcccgttgtagtgcggtcaccgccgacctaagggttgtgccacgaccgagctcctcgtctcttacctttc

SEQ ID NO: 42582 - DNA, 563 bp, Zea Mays
ttgtagtagtggtggcgtaagataattgattgaggtgtgcgggtatatgccgtaatgtggttatactcgcgacgaagaaaagatgtatgtattgtgtaacccgacgtgtaggttgctattgtataatcgtgtgaaggatgctcccgatggtcatgtgactaaagggtggtgtagtggcaaagcgagaagtaagtttaatatgtttaaacgggtagttgatagcatccatcggtgccgtcatgatttctgttgtatggcggattgatactttgttttgtcaatcattgcattccatgtccgttggataaataaatgtcttgatgatcgattataggtcttatatgagcgttatcgcagcccaataattattggaagcgagtagcgttcataagtcggtccttgttaaaattgaagaacaacccgctaagatatgcacataagtgctttaggaccttcattagcaaatgtaagtcttatggagttttatgccatgatttaatgtctctatgttcgacatcctaaaatatggtgttttaagtgacttgtgtgttgtctagtttaag

SEQ ID NO: 42583 - DNA, 546 bp, Zea Mays
caggaaacccagcagctttcctgtggagacgccgaagatgcatttctctgggtttagtttggtgcgggttgcctgcagcttgttgaaaaccagagccagatcttctactacagtcgaccctcttctagttttgaccacgatgtcatcgatgtaaacctccaccttgtcctggattaagtccccgaaggtcttactcatcgcccaaacaaatgttggcaaggcgtttttcagaccataaggcatcacaacataacagtacaacccatctaccgttacaaaagcggtgtgcttcctatcctccctagacatccggatttgatgaaaaccggagtaggcatccaggaaagacaaaaagtcgcaccctgagatagagtcgcaccctgagatatgggtccttgggacatgtcttattcaggctggtgtagtcgatgcacatccaaagtttcccgtttgcttttggcacgatgactgggttggccagccacacggggcgatgaacctcttcgatgaagccggtgtgcaacagcttctgaacctcctcacgga

SEQ ID NO: 42584 - DNA, 433 bp, Zea Mays
ggcggcgtgagtttggaacttcgctgggggaggaaagtggaatacctcaacattcccctcaaggacagcattaagggatggcgcctcgagtggttcaccatggagaatcacaacaaatccctcctccctcgatcaggaaggcaaccagacgttcgcacgcctagttgggtggagtctcccacttattcagaggtagccaaagtcaaagtactgcttgctaaaatatgctcattgaaggacaagggtctgactgctaaggccgtggttgccgacgttgtcttcaggaatattcaacctttgaaggacagagtttaccctgcttacttgtatacatgcatcaatggttctaccggggtcacaaacaggcagattcccaatgaggacttgctaagccgactagatatgatattgaggggcagggtctcaaatgttg

SEQ ID NO: 42585 - DNA, 328 bp, Zea Mays
tggtttcagaaactagaaggataataagatttgtgttcggtgggggacgcagattcactggaatggtaaatcgttgggactcgaacatggggattgagacagagggtttatactggtttagtcttgtgccctagtccggtatagtgttgatcgtagtattgccttggcgcgtgttacaactggtgcgcgtgtgtagaaggagggggtctagccctcaagggtagaaccttaaagagaggacttgtattctattgatgagagtgtgatgcatgttccccttgggtggcgtagtccctcttatgtcgtccgtagggtcgtgcgtagcgta

SEQ ID NO: 42586 - DNA, 345 bp, Zea Mays
cttagtttttgttatgtttgtttgtgccctgcatatgcagtctcaagcaatcaaaatattttaataatactctcctcaaaaaagagctgcctctaaaactggcaagacttctgcaacacaacatatcactgctgacaagccaacgaacatgtgctgtgtttttacagcaattcagctttcgtaggtgccagtaccacgcacatcactattgggaagagttggagtaaagaataaccaaaagggttctaagtgattgaaggtacggtaacaactagaccaaacctcaaaggcaatgccgaaacggcattaaggattgttgaaatttgcattgtacttgccctgacc

SEQ ID NO: 42587 - DNA, 394 bp, Zea Mays
aataatcaggaatgtccaatattggaaaattggatagaatattagttcctaaaaagtgggaggatgtcttccaatatgctattgttagaaggcttcctaaagagatatctgaccataaacctctcaaaaattctgctgcacctgttaaatttcactcttcatcattaggaggccactcaggggtgcatactacatatcaaaggctgaagaagctgttttactgaacatgcctcaaaagggatgtgcattcttatatcaggcagtgcaaagtgtgtcagcagtccaaacataagcacttaaataccctagtcttctacaacctctccctatacctgagaacctgtcgcaagacatatctatggatttcatagaaggtcttccaaattcaaatggc

SEQ ID NO: 42588 - DNA, 367 bp, Zea Mays
tggtgtgcacctccctcgtcgagggtcccgtgtggatctccgaggtcggtgttacaactgcctctctacttctcaccgggttgctacctgccggcgtccaacaaggtgctttcggtgtctcagctttggacatcgggtggcagtctgctcgtctctgccggtcgattctcagaaacagccagtgtggcagcgcctgggcgacgtcaaacagcgtcttccgggaagacaggaaacctcccatcgtgccttggtgaggccgaggattccggtgcggcctccggtgtggcagaggttgtctggcatggacaaggctcattctctggagggcgcgcgcaagacctcggtctggagacgtcttgcttcgtcg

SEQ ID NO: 42589 - DNA, 286 bp, Zea Mays
ctatatcaatataattagcagaaaagatcaggtgtctaacataatagcaataaaaaagacttgattctaaccaacatacagttcactggcgacgaactgcatggcttgattttgaagttgcaaatgacacttcaggataattgagggtaattggaagacctgctgtaggtccagagtcttcttcatgtgagggatattgtagtgttggctgccattttacttcattgtttccatcatgcaagctggttgagttaggaaaatacgattggctccaccggatagtttt

SEQ ID NO: 42590 - DNA, 415 bp, Zea Mays
aatatgagtagtggggacttgtgagtgcagaaaatgggaagcttttctgtgtttgtatttctaatctggatcctactacaacattattcttactcgcttcatgcatttcttgctttcagattataagcttgtctaaagcaagcccttagaaggaaagttatctgaccatgttctcagctatcatggcaaagaagaattacaaacagcattccaaatctgagaaaattcaggggggttgtatgtctgggctgattcgcatgcttgatttccgtcgcagtccaaaacttctttcagacgggagaggtgaggttttcaccaacattcagtttttatgtggataagatggaaatgttagctgcaatatagcagtataagctaattttaattgaaataatatgagattccttatttatgt

SEQ ID NO: 42591 - DNA, 491 bp, Zea Mays
cggcgatcggttgatcaggtcgacggcgtgcgagccacagcccccgaaaattaccttgatggagggaaatgatagccgcaagcagatcggccttaatgatatgccagcatgacttatagaatctcccggtaaacccacccagacctgtagctctatccgaaggtaggctggaaactacagaccgaacctcatcctctgagatggggaggtccatgtcacttagattagccttatctctgtggcatgatcccaagtttagtgtgaattatctatgtttagcgacccccaacaggatggtatagaaatcattcaaaacttcatgcttttgctcatgagaggtgaccacccgatctccgactgtcaaactagagatgaagtttcgtttcttgcggtagcaagcttgcaagtggaaaaaagaagtgtttgcatccccctccttcagatatctaacatgggatctgagacgagccattgtcctatcgaaagaagca

SEQ ID NO: 42592 - DNA, 376 bp, Zea Mays
cccagattcaacttctccatttcttgacatatagtggtgtcaggtgctcttactgtaagacaatggcaaaaagtcttacgacttaaagcatctgccaccacattggcttttccttggtgataatggatttccaaatcataatctttaattagctcaagccatcttctctgcctcatgttcagttctaattgggtaaagatatatttcaaacttttgtgatccgtatacaaatgtcaggtatttcctagcagataatgacgccaaatcttgagggcaagaacgaccgtagctagctccagatcatgagttgggtagtgctcttcatgccggcgcagctagcttgaagcatatgctatgactcacccttcttgcatta

SEQ ID NO: 42593 - DNA, 353 bp, Zea Mays
gaggataggaggcataccgcttttgtgacaatggatgggctatactgttatgttgtaatgccctacggtctgagaaatgccttgccaacatttgttcgggcgatgagtaagactttcggggacctgattcgggacaaggtggagatctacgtcgatgacatcatggtcaagactagggaggggtcgactatagtggaagacctgaccctagttttcgcaagctacgggcaacccgcaccaagctaaacccggagaaatgcatcttcggtgtctccacaaggaagttgctagggttcctggtttcataccggagcattgaagctaacccggagaaaatcaagactattgaggtg

SEQ ID NO: 42594 - DNA, 397 bp, Zea Mays
ttgatagcacaaaccatgtgtttcaagcccgttagtaaatgatgttcaaattcaaccaaagacaggctgattcccgcctcatgcgccatctgttttactttgtgcagactcctgggcgtcaatgccgtcacagtaaagttagcagggctagaagtggccttgttattttgcagaacaaaatggggcgtgcaagatttggactcagcccactttgttccgaacgtttggctcttaccactatagttcttgttcacttgtgttatactcctatagagagagattgtatgtacgagtaactaatgtgtttggttgaggactgagagagactggagtggctccatttctattttctagtgtttggttacgcagtgagagagcggagcggttcttggagcgg

SEQ ID NO: 42595 - DNA, 588 bp, Zea Mays
gcagaagtcttcgggtgttgatcagcctcgtagccaggacgcgaggaggggcaacactggaggtccagcccacaagaggggcaagtctcagcatcagcgccaccatccttaccgtggcaaatcttctgactcgggtacttcgggaggaagtactcagaggtttcgggccgttcctaagcccgggctggggctggtgtgttttcgctgtggtgatgcgcatcgccgtgcagagtgccagtggagtgggaggtgttctatctgcagtcaggaccataaggatgtggtgtgtaggaggaatcctaatgggaagctcagatgggagccggtgacttcctcctcttctcaaggcaccatcaacatgatgtcaagtgctgagcagtagttttcagttccgcttcctccgcagcagctctatgtgcctgggacttcttagttcgtgccgatgcagggttttcctcagtatcaggtcacgcctactcctgcaccgtctactcctatgccgtctcagtttggagctccgcgcctgcctcatccagtggctcagtggggttcttctattaatttcactccgggggcttcctcttccgc

SEQ ID NO: 42596 - DNA, 372 bp, Zea Mays
cgactgatctcagggggagaattgacagtgagatgcagacgccagtatgctgcattcagagtttcagtttcagagtctttaatcgttctttgtttcagtttcgtcaggtttcttcaatatctagtcagcttggttgagtcgtagttagtcagtgactaagcttgtaattagggagtctgttagcatcatggacgtggtcaaggatgatccatgcgtcacgttcgccgtgggatggcacggagctcacgaacgtggagcggtcatgcgtcgtgcgcgaggaaatctcgcagcactctttctgttcgtttagtatgaatacagagtcaaaaaaaactgtggcttaactgcaccaaaaaggatctcgtgtattcc

SEQ ID NO: 42597 - DNA, 293 bp, Zea Mays
gccggtggaatatctctagccacgctcggctaggttcgcgggattgtgccacgcctgaagttatctccccacgatcgatcccttcaccaattcatctgaacacatctgattctacagtgccccagatctttgtctttgtttcagatattttcagtgctctggatcttcaatgttcttctgaactgaccccttccaccctctctttctcttgattcttgttaagaacagggtaagctctattaataaagattgttcactaaacaatagccttcaaacttactattgacacttca

SEQ ID NO: 42598 - DNA, 486 bp, Zea Mays
ctggtactcacatgatcaatatccacttcacccttgtcaacacaatctctgatgaaatggaaccttgtgtctatatgcttgcttctgtcatggtgaactggattcttgctcagagctatggctgatttattgtccactagaagtttgactgttggagcctggatgttcagtagttctcccagaagccggctaagccagatcccttgacatgctgcattcgcacttgcaatatactcagcctcacatgatgatagtgccaccacccgttgtttctgtgatgcccatgtcactaagcttgatcccaacagaaatacacacccactggtgctcttcctgtcgtcaacatcgccggccagatcactgtcactgtaacctacaagttcagttgagccctgtctcttgtacacacacccaaactgtatggtgcctgcaagatatctcaatatttgtttgacagcagcccaatgacttgctctaggctcttcc

SEQ ID NO: 42599 - DNA, 298 bp, Zea Mays
tccgattgaagtatacctttagatttagggagaagtttgatgagtcagatgatgactggctgaagtgtattgaagctaccagcgatgagttactcggggcatactccaaggccgaagataatgctttgtccacagcttttgggggtcgaggcaagaaaagattgaacagggtatttgatgcgattggcttcatataccctgattaccactacccactacgagggcaagggaaaaagagaaagactgtcgtttcggccaccccagctgagccgaagagcaaaaaggtgaaggttctgac

SEQ ID NO: 42600 - DNA, 377 bp, Zea Mays
ggcgtattcgtcgtggctagaggagaagtgctgggagcagtggtggcgttgttgctcaggacgcctgtccggtggcaccgtctttgagcccgcagatggcagctcttgaccaatcagtgagcgcgctccgaccttgctgtgtcatcaaacattccaggaggattatccaagctgaagagaatctgcggagtgctctgttcgtcaacgtagttgggccagaggattcaggtcgcaccgctgaggtcttgaacgcactcacacagaggtttggttttgaggatgatgtgatcgacctacgtcgcgtcgcgccgaattcctttcccagtgatgatctagctaatcgagtcttcaatggaggtcagacgctctatatcccc

SEQ ID NO: 42601 - DNA, 557 bp, Zea Mays
cgaggagggcgtgaacggacctgtagagagctagccacggcgagctcacacacggcggtattcttgactgatttggggaaaactctaaattagagctctctagtgcacaatctgaggcacgggctgttgcgttgggtgtgtgattacttagcggagctcactggggcggcaatttataggttccatcggtggtggcggctaattttgagatggcgcgctggcggccagagagaggggagatcactagcgcaagagatgcgtagctttcaccgtggcatgaccaccggcgatgagcggacatgctaaggcgattcactgcgacgtggtagagcaccaaggcacatggcacccgagaggcaggcggccaactccggcgaggttatctagaccggtcgtaaggcaaggggggtacgccgcccagggcgaaacaatgtcccgagctcatccccagcgctagatctttcatctgaggatcattatctgcatttaactgggcatgaatcgcgacaccggcgcgaatccgggcgtgagatcattggcggcgagggggactgaac

SEQ ID NO: 42602 - DNA, 324 bp, Zea Mays
gccgtgaccgcggtgccgagtaccaacagaaacctcgccaccaccatcgacggcggaagggagtggagtcagtcgccgttgggcaccgtgcctgcgccatccttcgagcatcaagggaggaccggactgtgtcgtgggatcataaattttgtgctctggggagaatctgggcataggaagctttgggggcaccgaatttcctcatcggtgtgcatctcgccctgctttgccgcaccacgacgaaggctgggatctgtgcgttccaatcgccgataattatccctcacccatgttcgttgtggtctcctcatcgtatattacggg

SEQ ID NO: 42603 - DNA, 424 bp, Zea Mays
ttcgtgctccacgtgcaggatagtgtcgggtgacgctaggaggcacctcatcaaatcggtgaactctatcacctcaactacgactacgactacgccaaccaaggggatcgccatgggtactactagtgccggtataagagattatcttacccaactccacattggattaagttatcgatgtgatcttgcaatagactaagagatcctcattatgttatccataattgttatttagtactaacaacccatcttactgtcatctctagtcctaactcctaaggccttgtttggcaacaggtgtaaaagcgagtattgaggcccaatacacgtcccacgtgtaatcaggcccacgacggtagcacgttccctgtgtggcccatatttatctttggcaaatcaagtgttcaagtggattaggggccta

SEQ ID NO: 42604 - DNA, 495 bp, Zea Mays
ttatgttgccttgctcttaagccgaagcatttgagagcaagtccccaacactgacgaagtggtgatttttagaagcttcatgaaagccggactttggttccctctgaacaaaatgttggttgaagttctgaaaacttttgaaatctatcttcaccaacttacccccgaagctattgttaaagtagaggtttttatatggaccatgaggagccaaggattagagccagatgccaggtgtttctgcaatatgcacgagctattatatcagacgaaggcaactgggaaagagcaatatcacaacaattttggctgctacagcttcgtatatcgcgccgaggccagctatcctgtgctgacattttggaaaaagtggtcaggctcctggatgcaagaatggttttatgtgaaggttgatctgagtgagagggaagatataaaatgggtcattcagcgccctatatggtctcgcttcgacatcaggaggccgaccattgc

SEQ ID NO: 42605 - DNA, 394 bp, Zea Mays
attttttgcatctttgtgtacatagccttggcatcatggaggacttcgctaacgaagtatattggtcgctagatttagcgagtagcatggtgagaagggcttggctcaagaggctcagggcctggagggataacaacctctacaagaacacatattgcagtggtggcagacgtcctatcctaggcgactaagagaaccaagagtagaagtgtcttattgttaggagcatctagggcccttagattttaggtcgttcttacagacgctaatggctataagaactctgcttcgaggacgagatcatacagcctagaatggtgggcttctaccttagcttagacctgttcaaacgtcgggtcgagtttaggtcgggtcgtgggtgttcctagtgtcg

SEQ ID NO: 42606 - DNA, 344 bp, Zea Mays
cggctggagaggaggaaatgatgggcgaacagggagggcggtcgagcgctgctggggaagacgatgggaactgggcgacgaccaccggataaggaccctgtgcgcataggagataaggaggacgagggaacggcggcctgatttttctttcttcagaagcagagcggcggcgggataaggctggagaagatgagctcgagcgctagaagaagcaagcagagaagaagcaagcagggacacgctgcgcaggaaaaatcttaccaacggtgcggcatacagaggataaaggataagaaagccgtaaacggtggaagctaaagagaggacaagacatctgctaaaaa

SEQ ID NO: 42607 - DNA, 333 bp, Zea Mays
gtggtttagtctgattgaagtataccttcagatttggggagaagtttgatgagccaaatgatgactggctgaagtgtatggaagctactagcgatgagctacttggggcatactccaaggccgaggataatgctttgtccgcagctttcgggggtcggaacaagaaaagattgaacagggtatttgatgctattggcttcgtataccctgattatcgctacccgctgcgagggcaagggaaaaagagaaagattgccgcttcggtcattacagctgagccgaagggcaagaagatgaaggttctgactcaccggccgcgttatattgaaccgg

SEQ ID NO: 42608 - DNA, 415 bp, Zea Mays
gggggacaatagtcgttgtacctaggcatgcatcatcgtagttggtgaaagccgacaggactgcgatcctatcggtcatgttcgcctgcgacgttacgtggggtaggtacgcgcattgaatgctcatgtccccttggggcctttggctaaggcctggctcggggttgtcttccttgctcgagacgagctcgggcgaggcagaaatggtggttcagcggagagggacgtcggtcgggacaaggatttcccctagtatgtaccttgtccgagggcaggctcatgcgaggcagagttatgagtgaccgctgagaggggccttgggcgaatcgtggtttactatttcttgtcctcggggaatgtttctgacagtggtcttggggttaagcgcgttttaggggcgtaatctatgtacccc

SEQ ID NO: 42609 - DNA, 361 bp, Zea Mays
atctatttcttggctctagccgcctcccattcccttgcatcctgtgctctcttctcatttgtcgccttcaatcttctctgctctgcacgcatcgggctatcaaaactcgtcgatttcgcaaacctacgcatgtcttgtatgcgatcgttaacgtacaaatcgacgagctgagatccacaatgcatcttctgtcccattagtctcttggactttattgtacgcatcacctctcctttgtcgtcgtaactctcccaaccgcatttcctcgtctcctacaaaaaaaagagtaaatacgggtgcaacattgcagctgatacaaacaaaaaataaataccaacctcatcgtaatctaccatatgtc

SEQ ID NO: 42610 - DNA, 386 bp, Zea Mays
caaagaatgaactggtgggcggatatggaagcagaaacaatcatgagaacaaatttatggttctcaagcggattgggcaaagtagacaattatataccattcaaggcctgacctgatgtcattcaaactttatagtgaaacaagcaacaagcgggttaatcaaatctcaaacggtcagtgcaaccgaaccatcatagtgacaaatcaagaaccgaagtgtaggaagtcagagaagtacacaaaccagataccttctgcattcatccagttttcgtacatctaaaaggagtgaacagactcaactgcaaaataccactagcactacattaccactaccactacattgccattaccactaccactacactacactactactaaactac

SEQ ID NO: 42611 - DNA, 1049 bp, Zea Mays
tgcttgatgttacgctacccaatccaccctcgctgcggcccttatgattgccacagctgctgtggctactgctcaggagcgcaaatgcatcacttctctcgcctgagtgcacgaacacactgttgccggtatgcttgctagtcagcttgtcgagattgagcggcacctgcttggctctccctacttcgacctcgagcctcttctagagccccatggggtcgcgcctgtttcaacgtatgagaccgccgtcgtcgccaatctccacgcccaagcgccgggtgtctagaacacatgttctttggttctcgtcatcctcgacttggcttcacctatgcctgctggcataacctcatcctcacccttcagtgctacgtcgtggatgaccataccctcatcgacaccgcaccaatccacaaggtcccgttctcgtctttccacaaggtacacaacaacctcattttcgaggagctcaccaagggaccgcctcctcgcctcaaagtgactaccgctctctatagctccacctaaggggatagatctcgcgcctgtcttcttccactcttaccatggggggctcgttgccatgctcgccgaactttttgcaatttaatcctttttcggaaaaaaattcacgtttggacctctggatgacttagtgtcgtttctagaccctttgctcggcgccatagactatggcgttgagctggctgatgcgctagactctcctgctgtgctggcgcttatgtggcggagctcggcgccatgattcatggcgccgaactccatgatgtgcacttcaaacaatgcgggatggctaccagatgagctaaagcagtgtcatgtcatgcatgcgtgtggaattaccgttacaactagctagtagcaacaccctcgtgttcccgttgatgagtggatataaattatatgcactactactaatcagtaataaacacttacaattaatgtaccttccggtcggccaatcgatgatacatccggattatcatttgcatgcatgcacatgcatatatatatatcctccatgcaat

SEQ ID NO: 42612 - DNA, 684 bp, Zea Mays
aagaagaggaaagctgttgctctggccgcctcggctgaacgtgtgcaaaaggctgcgggcaaaaagatgaaggtacttacccaccggccacattatattgaaccggccgtggtgcctgagtttggtggggaagcctcttcagctgctgaatcaagagaaactgctcctccaatgtagagggctgaagaaccggctataatgccgaaggcaccttcggttgagctagttgaaacgaaggttgacaaagataaggctgaagggtcaacaactgaagaggtgacaaagatgccagggactttaagtccttcaacagaagcaacagcgctgagggcacaaaagagttctgccataactccagagaaggaggatggtaaatgtattagatgtactggaaacaaccgactccataagtctcgctcccaaagggaaggttgccgaagctgacaaaacgcaacccagagctgatactaagcaaatagatgttgaagctacaacaacccaggctaaatccgaggcagggccctcagtgcctgctgagacaaagcctatggaatttgaagaaaaggcaacagaaaaaaggccacagagcaaatttcgtttgaaaaggttgccactcctgctcccgaagctttaaaagagagcattgattacatcatctgccatgcttcgggaaagggactttct

SEQ ID NO: 42613 - DNA, 531 bp, Zea Mays
aaaaaaatgagaaggccaagtctctgcagtaaatatccatgcactgggtcagttggtgtctatccatggtgaaacgttatctgcttatccctagcagagggaatccgaccaagtgatgactagctgtgtttgtgctttggtgtggagtctgtgtgtgaagccacgtaaccaccatactcatgcagctgttgatacctcaagacccctcctcagcgtgattccggacatagtcattgcatgttcctttatccctgcgttcaagtgcgtggtcagagaaccttgctgccttcaagctctaagcctgtgttcgccgagtgcttgacaaaattgtctgtccacgctggtgtcaaaccctccacagcagcagtttggcaccgagcttcatcacacgcactcgtctcatctccccgtcagccacacgcgtgagctccccgacgctcgtccctgatccaccgttctcgacgtccagaatttcgtcggcgttctcggacctcgccctggcgtgtagtccacgccgcgaatcccctgggg

SEQ ID NO: 42614 - DNA, 395 bp, Zea Mays
atcttagtgcgctagatagtcctttcttggaggaggtaagggatactgttggaggcctcccttctgataaagctcctaggcctgatggatttacgggaaggttttacaagacatgttggaacattattaaggaggatctactcgctgccctgaattctttgcatcaaggaaatgctcaaaaacttgggttgctgaattcgacctatcttatccttctcccaaagaggttggatgctatatcggtgagtgattataggcctatcagcctaaattagttttgctaagttggtcacgaagcttcttgccaacaggttgggtcctcgtcttcatgatctacttgcagccaatcagagtgcttttttgagagggagatcgattcatgacaactttatgct

SEQ ID NO: 42615 - DNA, 478 bp, Zea Mays
attatgtgccttgtgggcatagaaacttatggcctgtggagtttgtgtacaaaatggaaaaatcatggtgaacattatgtgccttgtgggcatagaaacttgtgttgtcaatatcttttagtaaagtagatggctattataaagtatgtttgatgatgtgacacataattcattgttattgtagcatcactattctgtttggctactgtattagtcagtgaatgagtcaggggttggtagatgggccttgggacaacatatttttgtagtatttacataaacatctgcataggttcaatagtgatttgtgcatcaagctccctgaagtcttcccttgtggtgttagtgtcactttgctctgatataatatatgcatgccttctgttcaagtcgctcggttaatgaatttcacaattagtatactgatctcaaagggagcatgttagtcacatggaggtggcaaaagttgcatcccaat

SEQ ID NO: 42616 - DNA, 336 bp, Zea Mays
cgaccgtgagcacggcgaggctgctgtcgtggcacggcggaggcggtggttgctgcagcgactgcgagggagaggagagcagagcagggccgagcagacgtgggcgctgggtggttccatttttagcgttgtggatgtgtgcgtctcgaagaacagggaaggaatatggttacatgggagagctgactgacatgtggggcccacatacactgcacagcctggacagctgacaggtggggccctagccatgcacggcgcgtgcctggtcttgcccccgctcctgtgcgtgcgtgcaggatgggagtttttagtgggggcgagagggttggatgggat

SEQ ID NO: 42617 - DNA, 364 bp, Zea Mays
cagagcccggagcctacaagtcactgaagatgatgtggtctccgttttaaatttctccgttcgccatccatctgatcacgcacgccatggccattttagtccctgctgctggagggcgttgcctgtaaaccgactacgacttgcaccatgaatcttcgctgtaatgctagtagacatgcctgtcaaccttttgcgctatggttcttcttcaattcgccaaccataattgggatggtattatatatattcttcatcaacctgatgaaggagcaggtgacatcgagttggacagcaccttgaacctgaaccttaattggatggacttaaacggttgaccgcatatagatagatgcatttgccaccc

SEQ ID NO: 42618 - DNA, 753 bp, Zea Mays
cagtgacaaaagatctgagatgccgtgcatctcaccgccgatgactcgccgctgtgattagcgccaatcttcatgattcgtgcgctgggactcatggttaatcatgggcagagaaagatctcaactcggggataagagagcaagctatctccagactgttcaccgcgacacctgtcgcgcagtggacgctagtgtcctcgtcggagttcactggtgactataaccgcgccacgtgcttagaagatgtaccatgtcgccgtagctcgtggtaggtagacagttcatcgccggagtaagtacccccggggcgcgccacgattgttcgcaccaatgactcatccttcgtctcggccgccgatcttgctgcgccaaattggacaccaccacttaacctctctataaattgaaggccgggtcagctgcgctatgttatcacgaagccgaagcacccgctcccaccctcaatcgaacaccaaagctcacgaatttctgatttcccccaaaccgggtttccgccactgtgaaaacgacctcgtcgtggccagcacaattctggttagttcataccgtctgctccctcgtttcagtgtactcatgtgcctatgatgctcgtcggctaacccgattgaactagaccgccgccaatcgccgggaacgcgtggttctttggttcatccgcgcggtcaccgtggcgagaccaaattagatcatcattcttgaaattaactttgggggaacattggttaggacttg

SEQ ID NO: 42619 - DNA, 598 bp, Zea Mays
gctagatgactcggatcagcacttttgcaaggaagaccgccttctaaggtcgacgatgcacaagataccacccgggttacctcttgcccagcagaattatgtagcagaagaccaccgtctgggacctctgaacaaatggttggaatgtcagccttaggaggatctgatagaatatcttcggggacggcctcttccagtgcttgatcaaagtctgatattgacagaccttgaaggctgacgagtgatgacaaggcctgggagggtatgtcgttgcccccgtcgctgcctctgtagtgacggttgttcttgcggatcagtggaatctcttcttcttcctcttcatcctcgtcaagcacaccgacagcagcctgagcatcatcacaaccttcagcattgtcctcggggatggcgttcaccaggccatcaccaaggaataatgtagaagggccagcgtcttgttccaggcatgacaatcgccggagtcgccttttcttcttcttcttctcgacaggtgcagctgggtggttcactcgacatgaacgcttctagcgggcaccttcgggcttctagacttcctcatccttgctgaactcttgcc

SEQ ID NO: 42620 - DNA, 390 bp, Zea Mays
cggccatacgatcctagatctacggcgatgaacaagcccgggcgaaacgttaccttaatctaatccggcgcgttcatcaggagatcaacggttaccgtgcatcttcctccacacgcagagaccaggcagtgatgccgacaccatcgcggtggcgccatggccaggactaggcaatgagctcccctagtgaactccatcaaatctaaacagagctacacattactgtgactaaggcgggtaggtctagggcacacatacccgtagttaggacgccgaggtaccccgaccatgggcagggtggatctgtggcggcggaactgctccatcgagaaattcttgaccaccaggttatcatccccccaattgagctacgaacttcatcaaggctcc

SEQ ID NO: 42621 - DNA, 380 bp, Zea Mays
cactgatcagccagaatctgaaggcgagtttgaggattctgctgaacaatttctgatcttactgtctacagaagctgcctcggtcaatcgcccatctaaatcattcagacttcggggtgtcatgcaaggggttgacatgctcatgttgatcgactccggtagtactcatagcttcctgaattctgcccatactcataagttggctggcatcacttctatggatacacctttgtctgtccgagtagcaaatggtactgtgttgcagtgttctgtggaacttcctcaggcttcttggtcagtgcaggatctcaatttctgtaccacattcaaggtgctccctctacccttctatgatgcaatattgggtatggattggctgg

SEQ ID NO: 42622 - DNA, 664 bp, Zea Mays
cggttggccacttggtgcgatagccaataaccggggccttcgtatccttccgatacgcaaaattataacagccaaagttcttgtgaaggccatctgctctagccttcgtatggtagtgtagctcgtgcacccggcaaaaagtgtatggtagtgtagcttcggcattagcatccattccttggcttcggagagcccatatgaagacgctaagtctaacaatagcattgggggtcagctgatgaaggtatatttcaaagttctttagaacctcccctatcatgtcatttagggggaaccgaagccctgctctgaagaagctcttaaagacgataactttgtcctccctcggctctggaattacctcttccccagcaaatcgaacaagcttgctctcagactccccgaaatagcccagttttttcatcatagtcatgtcatcttcagttacagtagatttttcaaattcaagatgactaggctttgtcgggttcagaatgttgttatcctcttcgctttcattatcactctcaccctcaaccatagtttgtccagcttcggcattcaaagcaccttcgtcagtaacttcccctagcacaactagacctgatcgcttcattacttctgatatgggcgctgtttcggcagcttcggcctcgtccccctc

SEQ ID NO: 42623 - DNA, 489 bp, Zea Mays
atagtaaatcccttgatgaacatgttgaacatatccgatatgtacttgctgtccttcgagaacaaaaattgtatgctaaccttgagaagtgaaccttttgcaccaacaaggtagtgtttcttggatttgttgtatcaggacaaggtgtggaggtagatgaagaaaagatcaaagttgtacgcgactggatgcctccatagaatgtaagccaagtgagaagcttccttgggctcgttggttctaccggtggtttgtaaaagacttcagtattgttgctgctcccatcaacgaattgaccaaaaagaagtacctttcgaatggggagaagcacaacagaaggcatttgaagaattgaagacgaagttaacaacagcccagttcttgcactcccagacttcgataagacatttgaaattgaatgtgatgccagtggaattgggatcagaggcgtgcttatgcaagaacgaagaccaattacctacttcattg

SEQ ID NO: 42624 - DNA, 531 bp, Zea Mays
aatatagaaaagaaaagaaacttgagaaaactcggttgggctgaaacctccctggcggcccactccgttttctcccccctcggccttgttaaccaaacatcttcaccctagggccggcctgctttccccttctgtttttctttttctccactggcgcttacaagtgggccccatgtgtcagcctctctacttgcacgcgcagactctgtcgctgtcactgccggtgggcccgcttgggcagctcgaccttcttcctcaacaaaccgcgcatcgcctgcggcagcggcgcaacaaacacacgattttcacccggattccctcgccgtaaaactcgctgctggccaaatcccgctggtcggactccatcttcttctctgtgttcgcatgcgtcggcaggaatcccaacaaatccccgcttgttttcttcctagtttgttctatgtccgcgcgtgcatggttgggcaatccactgcctcggttccgatcttcgcgcgctcgatctctcgtgttgggtataaaggtaacccccag

SEQ ID NO: 42625 - DNA, 338 bp, Zea Mays
attgcacgaacgggtgcgcgactgtatgatctcgaccgttgcgcagaagatcaacggccacgagctcaaacccctccgtcgacggccaccctacggcggtgcactctaaaccgcggcggcgccatagccggtgagcgcgaaagctctaatccccggcccatgtttcaaggtaaacagagctacacacataggagaacagcgcagagagtagggaggtgaatttaccgaggattgggcacacaggcgggctgaccacgacacgaggcggcttgacggcgttccgccctctccggcgaacaactacggggcacgcggtcgatgattcggcacgcatacac

SEQ ID NO: 42626 - DNA, 365 bp, Zea Mays
ccagttctacgacgacgtctaggcacggctggaagcagacaccgtcgagatggcctttacggtgagtccctcatgctccagtgctcatgtcgtgtgatacccatgtgtgccagccacctgtttgttgtattgcctcactaaatgatcctgtttctatcgattgtaagagtgaatgtcagatgatcctgtctgcaggcatatgctccaaagacaactacacaaaactggttttttctcctacacatggcaactctgcgggacatttgattatctcttgaaggggaagtctaaaatcgaaattgaatgtactggaccattttgtatgctaactttgacaaatttgtttgctgttaaggaggctcttc

SEQ ID NO: 42627 - DNA, 430 bp, Zea Mays
gtgattcgtgtcaccggcgccaggattcgcgctcggggtggattgataacgtcgcaaggataaggatcctcgccgacggtgagctgggggtcactccggtgactcaccgtggctccccttctgctttacggctggcggcagttagctcgccggtgaaccgccgtcgctcggttgtgcgccacgtatccgagcacttctgtcgcgtcaccgtgcctctttaccgccgttaaatcaacgccggtgagctcgccacgactgtggacacgcactcacgcggccagtgccttcttcttcatttccggccaccacgcgtcctccccaaattcactgtccaccgctttacccttctataaattgagggccgggtcggttgcgccatgtaatcgtcaagctatagcacccactctcatctccactcgttcaccgtagc

SEQ ID NO: 42628 - DNA, 299 bp, Zea Mays
ggtagtatatgcatagcatggctcatcaacctgattactacctcgctcgctcgacccaagcttttagatatcctcaaccccaacatgcaacccaatcaaccaagatttcttgaattgcttttggcaactaacaaaatgtaaaattggtgacatgctattataagctcttcgctatggtgattaggaatccctgtttcctaatactcttctttagagtgctgcttctaaataattagatcactgtcccttaattcttgggcttaaaagcaagtgttctggcaagcgaaggttccattttg

SEQ ID NO: 42629 - DNA, 461 bp, Zea Mays
gagaaagtcatgagcagtgtaggagagaggaatagacacgatggatgagatggtgaggagctgcgaagtcgcgaagagttgtgactcgatggaggagattgtggaatagtttgctgatgcctttcctagctgcaggccaagggaggacatgtcgacatgcgattggctagattctctacttagattaagcatcgaatcagagaaaagagtaaacctctacttacattaagagggttcttccttcgcaatccctttgtttcgcctttgccttgatgtcctcgtgtgtctccttcctccatggcaatgccaccgcatccacctcgtgcgcaccatcaagcagatcgacgatgccttcacctctagctctatagatgatgccacgaggagaagcagacaccctcttccatcctctgccatccacattcaccacggctctgattggagacccaatgagtgggaat

SEQ ID NO: 42630 - DNA, 377 bp, Zea Mays
cttgcctatagtaataggtggtgattttaatattcttagatgtccaaaggacaagaataaagacaattttcaaagtagatggccttttatgtttaatgcagtaattgatagtttaaacctgaaagagattgagatgtctggaaggcagttcacgtgggctaacaggttacctaatccgacatatgaaaagctggatcgtgtcctagtagctactgaatgggacaataaatatcctttatctacagtagtagctctgaacagggatatttccgatcacacgcccttgttgttgaacactggagaatctactgattgtgcacatccacatcctttcaaatttgaattaggatggttacttcgtaatggtttcttagata

SEQ ID NO: 42631 - DNA, 557 bp, Zea Mays
ttacatcattgacaaacacatgtcattgtgtgtcctgtactgtacctatgttaaactttatttccttcgtcccaaactataagccactttaatatgtatttagacataatatatatctagatgcgtagcaaaagctacgaatctaaaaaagccaaaatgtcttataatttggaacagaggggtaacttcctattgcttcttcatttccttttgtgttccagtactgaacatcgttgaaacatcagtttcatgttagtttgtcagttgatgagcttactagttactgcaattggcttttaaatatgaaacttctatcatgtgcataacatctgtctactggaagcctaggaccttttattttgctcccatttaatgaatgccatcgcccctgccagttttggttaaaacacctagtttttcctggttcccttttattgagctatatacgccttagaggccaaaataataaaggaaaaacattttcctgtgctctctttgggaactccacctatgttgtttgaaatggtccataaagcccagatgaaggcggagccagt

SEQ ID NO: 42632 - DNA, 378 bp, Zea Mays
tggatggaggtcccaaatagtttgatccttatttagcaccaaagggggcccaaactaagcgacaatctagttacatgatcacaaaagaagttagaaaccatgtgggggcaagaggaaacaatatatgtaaactaaagcaggaaagggaactgagagcaaattcttccttcaaaactggatttataagagttaggcgatggatgccatagaccgggtttatgagggtggaccacactgggtggatcataggtaaatgctatcctattacaaaggaagagttcactctcatggtaccttttggatggatggtgcaggtgccctgccaactgctagagcgacgatgggcgtcagacttcttcagttaagcaatgacttggg

SEQ ID NO: 42633 - DNA, 347 bp, Zea Mays
atgtactattggtactcattgattgatgaacataaagttgaagaagattacaagctcaagaaccatttgaataccataacctcctagctctccatttccagttggttctagtgagtgtgctagccatatcgattcttaattcacctttatgtctgcctttagatgttgtgcttgagaatattatccctttatttcgaaatgacccccttccttccttactccgtccccttttatagagtaaggaatgagagagtttatatgtcagccatatcatgggtctggtcagctaagagccaacaaatccaatcctatcttggtcatgaagtcatacgcagggccatgccttt

SEQ ID NO: 42634 - DNA, 280 bp, Zea Mays
attaccagcgaagggaagctggctgttggggtcgatgggcgggatgattgtagcagcggtgctctgcctcttccgcttgggggccatcgcgattttttctccggcgaggtgagcgggctcagaaattcaggggaagcagaggagcggatgaagagagaaagtgaagctagggctcgaaaatcaaaaaaggcacgtcggcgcgagtataaatggggtttcttgggtctggcactatttctaaagtgccagatcactactcagaaaagcaaaagtatcaaac

SEQ ID NO: 42635 - DNA, 408 bp, Zea Mays
tttttggtcccctcttttcgttctcttccgcctctctctctctctctttctagcggaggttcctatgtgaaaaaaaaggaacaacaatagaatcttttgtctttagagtttactgatgaaataactaagatgttatcatccctttattaaacaatcagtatgtcactttcctggttacactttcagcttctaatttgtatgcagttgcacacaatttctcaaccttaaatctctttgtgcctaaaatattttctccaatcttatctcctgttttcgcaatataaaaatatttcgtactaaagtctgcgattactgtactttgcagggattacgctttcattcgaagccaggtccaaagagctgagtttctaactataatctttttctctgatatatttactatgctac

SEQ ID NO: 42636 - DNA, 409 bp, Zea Mays
ctctggtgaagtggtcagtgaggtcggggagactctagcgaacacactggtggtcggatgacagctagtgatagtaggagtcgttcggtctacaactcccggcggtcaaagttcgtcgacggtggcgatccggctagtcggcgatggttgggttcgattcctccggcggaaaatcttcacggggtgtcggggagacgattcctcgagggaatttgactgggttggctgaggaagcgagtccacgctcaccgacggaaaccttgctccggcgagggtgattgcgtggctctggcgaggtggagcgcaggccggggttttggagagttctagggaacctaggtgaacagggtggtggttctggttagggtggcatgtgactggagatggtggttcattgtgaccgagcttg

SEQ ID NO: 42637 - DNA, 313 bp, Zea Mays
ctcatacatttcttgcgggttggcgctgccgatttcgcccttcttcctgctactgctggaggagttcgggctttagcttcaacacctcacgccccactccatcctccaggcagcaatcttcgtccacctctgcgaaatgtttgtaggtgtggccccttcacttccctctttcgctattttttcgtgctggttaggtccgggaagactagggaccacatcggtgcctagtactttcagacgaggccagatccggccatagtctacatccccacctttggtggtgcgaggtgggaaaactggcgcagcgactggg

SEQ ID NO: 42638 - DNA, 401 bp, Zea Mays
aaggaaaagaggtgtcaacattctaaataggcaggctatgcggtcagtcaaggaagaccagaaagctttaaagaagcaaaaactgtatcggagccgaaggattcggctcccaagaaatgtaaactcgtcaggatatcttctgtggagacgaaggtgcaagatgcgccagagaagactataggtccttcttcgccttctgctgctgaggtttcagaaattttgatggtaatgactgaacccatcccattcacaatgctatgtcctctaaggttagatctgactagcctcttgcagtcaaaggaaactgctccgactgctgaggggaaagccggagggcaaaagaaatggcagatgatgaatgtgatgcaagctattgagcagacccagcccccagcttcgac

SEQ ID NO: 42639 - DNA, 316 bp, Zea Mays
gccaattggactaggaccccatagatcaacgagaacgtgcttgattgcctgtagtactcgctgtcaccgtggacagtgcgtgttagtgcaccattagtaaaattggttgaggggaaaccctcgttaggtcttgaattcggtctctgccaaagtagggtgccggtcatcgagtaaatcggccggtgtaagctcgccggagctcgacccagcgccgttcgccgtcggggactgcaagctgtgaagagatagaagtgcaagggccttttcgcaaatgtcagtgaccccgttaaatagtgcgtaggactcttccttagat

SEQ ID NO: 42640 - DNA, 666 bp, Zea Mays
acccattgggttcagcttctgcatggttacacccattggggtcagtttcaacaaggtcacacccattgaggtcagctggtgcaaggttacacccattgggtttagcttcaacaaggttacacccattggggtcagcttcaactggtacaccaccattgggatcaacctcagtaaagacctctgctggtacttcttcacaaataggagtagaagggccagtatcctggtccaagcatgacaatcgccgaagccgtcttttcttcttcttcttctcttcaacaggcgcagttgggcggctgacttggcgaggatgctttgggcgaataccctcaggctttcggatgtccactgttttgtcaagctctggtgtaactgtaacagccattgtttcaacaggggccgagtcagcagattctccagccaacatattgagcacaacatctatttctgcatcatccggactagctggcatctcaaaatgaacttgcctctcatcattgggaagatcacaaagagaagcaaccagggcctcaatatcttcaggagagggtcacactgtaagacccagaccactatcaccagcaggaggattggacacgaaattgaaaaaggacttaggaggtggcagattccaagcagagtaggcaacaggagcaccaacatttg

SEQ ID NO: 42641 - DNA, 287 bp, Zea Mays
ctatgacaagctgggagtcccctagacttcgaggcattggatgcccaactctacgacgacgcataggccattcacgagggcttcatattctaccacattgttggaggcctagaaactgagttggacggtgtaccgcaactattctcctgagggtgacgtgaagatgaggtcaccacctgccccttccttgacgtcggcgaggacttgtgatttaatcgccgtttgtggggcataggaaatctcgtatcccatcaactcgagggcccatttagcaacactccaagaag

SEQ ID NO: 42642 - DNA, 410 bp, Zea Mays
gccgtcgtgtccacttagccacggctgcttcggatataccctcgctggagttagatacctcgcggccttgtgccacgtgcctcggcactttaaccacactgttgtgactcatgttagcctatctggtgatcgccggtgagcttgccacggtaattgccaccaatcgcgtgcgccagtgcccctcctcttctccggccgccgcgcgtctccttcaaattcactggccactgctctagggacctataaattgagcacgccatgagctccgtagggtaattacccatccaaagcactagcacttgcctccaattgttcaccagagaccacgaattgctcatctcccccaaatcgggtttccgccaccgtgaaaaggtcctcgccgtggctagctcgattcaggtccaatcttg

SEQ ID NO: 42643 - DNA, 411 bp, Zea Mays
tcgggggctgggtcatagctcgcgctgcccatccgagccgggtcatccccggcaacaccctcgggggctgggtaaacgctagcgccatccttgagggtcgagctctccgtaacagccacctctaaggctgaaggaccttcacccacttccatgggggcagaacaatccagcccagcctcctgatccttaagaccgcgctctaaggtcgacgaggcacgggaccctgctcgagataactccagcccggcatcaggcacatcagcacaaatatccatcatttcaccatctgccggctctaacaacagatcttctgggaccatatcttcaagagtctgatcaaagttggccagagacaattcttgcagaccaatgagggcagataaagctagagaaggaacaccactgctttcc

SEQ ID NO: 42644 - DNA, 583 bp, Zea Mays
cgactgcatcgcggcacgccaagccacgtgtttctcggcctccgcgaaagaccgaggctcgccatcatcgcatgcaatatgcaactctcctaccaaaatgtgagacgccaggcccggcaccgacgggtcgatgagaaggccctccacctttcgataccgcaacagctcaccgtcgtagcacgcgtcgactcgctcctcgtcgtgggagagcggggtcatgagctccactgggtcatgttcgacacgagctggcgtcagagaggatgttcctggggagggtactgtcgttgctggagtacgtggtgacggagagctcgctggagccggagtcgtggctggatggcgtggtggcgaagagctcgttgtagccagagctggagagcgtggcgttgtagtcggtggagacttgggggctggagtaggcctactcgaagaaggatcgcctactcccccggctccctcaaagtagacgtactcgatggtgaagtcgtcgtacgtcggagtcgtgccgtcgtccaccgccttgtcccaggcccatcctcgcccttcgtcgaacactacgtcgcgcgtcgtgcgcacacgc

SEQ ID NO: 42645 - DNA, 431 bp, Zea Mays
caatgcactttatcacatgaagatggatgaaaaactgtaaaaggtaatatcatgtgcatatgtggtcatatcgttcatactgtttttcaaaagctaatatgtactatttaatttccagagaacatgtgtatgatagcacagggaatttattagtggagaaggtcaatacttccatggatgaaactatgagaaggaagatgtcaattgcgcacaccaaatttgaagatgtttttcaaatggccaaaacttcagaagaagacatggacatattgatacaggatctggaatctctatccttgttgtttcagccaacctctcacacaagacaacacgaacaagaaaactttattggcatgaccattccaaatgacgtacaagtttatccacctagtgacatttgttccaggggaaggtgcaagagaatatcagga

SEQ ID NO: 42646 - DNA, 524 bp, Zea Mays
cacactaatacagagaagaccggggttatcggtgtaaagtttcccaagactcaggacgctgtttcactggacggcgggtagaaacactgtaaacataagggctcaattacaaaaaggcaccgtgaagcggtatcatggatctggggccattcgatcaacaccggacgctccagattaaatcgccaggggtttaaatcggtacgcgccgtgggcagtccgatcgtgatccgacggtcacgggctgcaagcatacacccccatccgatcctgatcgcacgagtcacaattcccccaccaaaccggtacccccgccatccaatcctacccacaggatattggatcaacggtcgagggcagctcatgccctccggccagacctgggtgacggagcagtgagctcgcggtggcggacatcgccgacgacgaccgccctactccgccagtgccccaaaactcaattactatgccacacaccaagctcgcaatgcggcgaatcgttctaatgacttgattcatgtgtaagg

SEQ ID NO: 42647 - DNA, 1027 bp, Zea Mays
atttttcttattcttctggagttctcagaagctaattttgatgaattagtgtcctcattcctcttttggtctctaaattcactttctttttttaacacctagtttacaagcaaaggatgataaatttgtatcctagtatccccctgagcccacttagagcacctgcatttttctggaggctaactcttccttaaagtcataataagttatttttttctcatattttctatcatatggctagcacccagcactagcagacctcatcacttctgaattattgctcagcttacttgcggaatagctggttatgattaccagtctgttaggagatggacaacattcaagaggctgggttatggacttgtcgagtgtgagaaagtaaaattatattttgtccttttcaaattattggacttttccccgtttcatgctgatgacctatatccaacttaccatcagaatttatgacacagatctttgttccagtgcatagaaatgcacattggtgtttggcactaataaacatgaaggataaaacattgcagtatcttgaatctcttgttggttggggccgtgatgtactggacatactggtaggcttatctgaccaaactgaaagttacactattcttagactagagtgcctgaattgcatggggttgcctttgcaaattattcatgtaatacttgtatatgttttttttgaaaggtatatataattgatattcattatcaagaaagcaaaattacaaagtacgatgttcttcataaaaggacccagcacaaaattaaagggcctgcaagatttctctattgttggattgaagcactacagttaaattttctgtctggcaggctagatacatcgtggatgaattgaaggacaagagtaacatagaggtagaacctagttcgtggactgtagtgtcagagtctttgcccttgcagcagaacgggtatgccttccttctagtactaatcaccataaaatccagcatgtggcgctgattgatttgattaaggaagg

SEQ ID NO: 42648 - DNA, 716 bp, Zea Mays
cagcagcggagaggtcgtgcttgcgtgtcgtggcgagttcttggcggatctgaatgacccgcgccttggaggaggaggcatacttcttttggagggaatcccacaccgccttagcagatgtggcatccgagacatcctggagaacctcaggagtcatggacgaaagcaaaccgccgagcagctattgctcttggtcataccagcgctcgtagttgggattgggggcattcgtcgtgccgaccgacgtgataatcggcttggtcttgagaggagcggcattggatccatcgaggaacccgagaagcttcgaactgcgaaaatatggcaggagttgtgcacgccaaaggagatagtttgtttttgtgggcttgatggtgatgacttggtggatgggaattggtggagaggagaacgatggcgtggtggtcatggcagaggcagcgagagatagatggagaaggagaggaggcggtggagaaaattgtggagaatgattaggatttcgttggctctgttaccatattaagataatggaaggccctaccttctaggggcgcccaagtctctttatataggaaaggattacatgcatgagattacaaccgaaggcaacaatcgtgccgtgattccagggcgagattaacaatcctgccatccttatcttctattcctaacaataataattagactatcctatataagtggctagatatttc

SEQ ID NO: 42649 - DNA, 478 bp, Zea Mays
gacagtgtcttgacgcttggacgaccaggacaccaaactatcgcctaggaatatcacataaccgtaagtggacttgcgtgtatcaggacgtcctgtgcagtcagcatcagaacaaagcaccaagtcagactgtgtagaggggtgaatgaacaaaccaaagtgcaatgtgccactgacatagcataggatgcacttgagggcgagaaggtgaggtttctgtgggtcatgcatatgaaggcaaacctgctgaatgacgtaggcaatgtcagaccatgtaaaactgagccactgaagagcaccagccaaattgcgaaaatccgtagaagagactagaggatcatcatcagacaactttgagttgagatcaacatgtgttgagcaagacttgcagtttgtcatgccagtgcactcaagaatctcaatcatatactatcgtggagagagaaaaagactagagcctaagcgttgaaccttcttg

SEQ ID NO: 42650 - DNA, 327 bp, Zea Mays
gtaggttagtgcactgtggtgcctgggcacttcacaccagcgatgttcgccgctgcggcatatgctctggtgccaccgtccctgctcaaatcccagcacctccaacgctaaacccaccattcacatgttcgccctgacctccacaccacgtagcacgttttggatcatagtctcgtgcttggcaggggaaacttgggtgcttggatctgcgcggctgtggttggagcatggcgccgtcacccagctcgggggagggaagaagataacgctgtggccatcgatctgatattctacggtcgagattataccctagatactgattcgacc

SEQ ID NO: 42651 - DNA, 351 bp, Zea Mays
ggacagtcctccccccaggcaatatggaagccgcaacaccagatgtagctgttgcaactgtaatcttgtcctgactgcgtagtgccgcaagcagtgccttatacagataggtctttccagtcccaccaggcccatccacaaagaacactccaccgttattggtgtcaacgacagataggatcttatcataggcagacctctgctcctcatttagggtttctttcatagcaacgtcttctgctgtcggctcgatactttcctcctcgtaaatctctctatcagtaccatgtgaatcgtcatatttgtcgatgatagcagggagagggaatgtctttatgtctttacccattg

SEQ ID NO: 42652 - DNA, 284 bp, Zea Mays
cgagcatagccgatccgatccagagctccacgcgaaacacggaggtccagtggagtcacatacgcccaggccgccgccagaagcggagttgatacgaatcgcgacatcgggaaggggacgatccgccatggggcccacgcaccagcgcctagcgagagaaagagagctcgtgccctagccgccgtagcactcgccagggaatcactcggcttcgccgcatccaccgtccaccagacgccaacactgccatggttcggtggaaaggttggggatgacgaccgcgc

SEQ ID NO: 42653 - DNA, 364 bp, Zea Mays
tttggctttccctttttattttatatataggttgggcgtttggaaacaaaaactctgagaaccagtttaaattatcagccactcaaaaagttctgtatgtacactaaatctgcaaactgtgaccaactagtcttatttaaattaatctctgacttgaagctgaatattaatatcttgtggttatagagcaatacttgagtgatataactaaaatcatagtgcaattttcttagctcaacttactacatacctaaaagatcaacattttaaatttattatcttgttcaaccagcagtcatctctttataatgaaagatagctgtcatagtaatatcaatatggatctactatttatgttggaaaa

SEQ ID NO: 42654 - DNA, 454 bp, Zea Mays
tgttgatatccttgccataaatttcagataattatcgtatatgaaataacctcaattccccacagagctgcttgagatgcatattctttatccttcaataaattaagtccactgggaacatggaaatcaacaaacttgtctttgctaggtcggtgcatgcgatccttagaggctgaaaggagctccaataccataatttgatagctgaagtagatacaggaagtaaagaacatcaatacttttaatactgttgtagatataacagattacaaaccgaaaaaatggcttaaggggataagttaagactaaggatgcacgtcttgtttttttttgggtcaatgagtcgacccgaaactcatctgattcaactcattcagatttcaaagcaatgtgtctgagataatattgaactagttaaacgacccactactactaattggtgttaccaattgca

SEQ ID NO: 42655 - DNA, 441 bp, Zea Mays
gtccgcagttctgagttcgtgttctagttgagtttggttgctggattagatttgttttggttcagtttgattctgtccatccgcttccatcctataaaaccgaccctatctacaaaacagatcatatctctaaaaccgaccctatccacaaaacagatcatatctctaaaaccgaccatatccacaaaacagatcctatctctaaaaccgaccatatccacaaaacaaatcctatcactaaaaccgaccctatccacaaaatagatcatatctctacaaccgaccatatccacaaaatagatcatatctctaaaaccgaccctatccacaaaatagatcatatctctacaaccgaccatatccacaaaatgaactcccacccttccaacacctcgccagaaatcctgattcagagtccaacttaaaacagccataactttc

SEQ ID NO: 42656 - DNA, 607 bp, Zea Mays
cctggttcttctctctcgagacattcccaggtagctatttcattctaaatcagtccttaccaattgctctcgcttatcttttctcattatctttagttgtcaatagccagtttaggatggtgcggacaaagaatgtcacaccgtcagggggaggagatgactaggaccctcctcaccccttcagacaggataagggcaaggcagtataccttgagcaacaagggggcaagaagaagaggcggttggatagagccacccgtgcagcagttgccacagcagcagcggcagatcaggcagagcagggaggtcagctgaggatttcctccgatcagatcgccttcctagttcatcgcctctcgtctcgaacttactcctccactgctcggtccactccctcagacccagtcaccactccacctcccacttctccagctcctgccactcacgagaattctaccacacctgctgcgcccaccacctccaccacaccagcttccactgcccctgctcccatttccgctccacccattcctccacctcgcttccgggagcgtgatgagactgaggtgcgacctcttgctgttgatcctcgtttgctcgatcttta

SEQ ID NO: 42657 - DNA, 417 bp, Zea Mays
ttcaaacttgtcctctagcttccgtaccgctgcgcagtatctgttcattgagtcggttgagcaatcccagtctttgttcacttggcttatgaccaccagtgagtcatcgtacaccattagtctcttgatgccgagtgaaacagtgatgcttagtccataaactagggcctcgtattctacaacgtcgttggatgccggaaataggagctgaagtgcatacttgagttgttcacctctaggggcgatgaagagaatccctgcccctgctccttgcagtcgcagcgggccatcgaaatacattctctagacttcagcaacttctgggatttctaggacctggtgctcagtccactcttatacgaaatcaacgagtgcttgagtatttatcgtcatacgaggtcggaactctatatcatg

SEQ ID NO: 42658 - DNA, 409 bp, Zea Mays
cggacctggaagcagctagccgcgatgaggtggttcatggcggcgcagtcgaccaaattgggggaagaaggaaattctccggctatggtggctaattgaaggcgggaatgggtgctctggcctagtgataacatgacacaacagactaggccatcaatttataggagtgctaagcggtggtgtccaattttgaaaaggaagaccggcggccgagaggagaggtgagtcaccggtgtaaactatcgtggcgctcctcggggtaatgcctccgtcgacgaactgacctcctatggatatctaatgcgacatggtagatcttctaagcacgtggggtggctacaatcgacggcgaactccgacgaggacaccactgtccactgcgcggcaagtgtcacggtgaacagtccgg

SEQ ID NO: 42659 - DNA, 310 bp, Zea Mays
aagatgagaagtagaggatgaagttggaagaagggagtggccctggacaagaacagaaagagattgccattgtcaacagtaatggtagagtggaaaggagggaagcgggagaggaatataccttctgatggatggcatgtggaaggtggcgacaatgttgaggacctagcgactggatccttggggttgtagctgctgcagggcagccaccagatcagatggagcctagctgggggagggtgcttgccgctgccacccaggggcaggttgagaccagccccagcttgctgcggccatggatgggtggttg

SEQ ID NO: 42660 - DNA, 390 bp, Zea Mays
gggaagctttacgggttcactaggggttaggtacacactttaatttaggcaaaacaagagcagaagagcgggtcgacagagggggtgtcacggcggcgttctacggagcataggagtgttctggtgataggactctggcaaacttcaattggtcggctccgagagcaataggaagctataaacaagctagaacaggaagcaatcggggagttactgacccgaggagtgctggccacagaggagttcctcacgggagtgcgaagaacagggccgaatggaattgtggactgtgtgagttctgctggtgaaattgagtcaattgctcaagtgtttgtatgcaggatgtggtgaagcagcgggttccgggctcaatttataggctgatggccg

SEQ ID NO: 42661 - DNA, 402 bp, Zea Mays
caaggtcaagacatggaagctcgctatccaggagatccaagggggaggcccgctcgtgctcactgcgctgttgctgcaactagctcaatcaggcgtcgcagggatgagatgatcaacaaggcagtggtctgctccttcgacggcaacagccatgaggtggacagtcttcaggcaggtgacatgctcagggaaaagttcaatctacaacatggtcagtaccaaattgtcaagcatttccctgaacaattcttcatcattttctctgacccaagatcaaagcagtgggctcttgaccggaattcggtctcgtatcgtggtcgtgtctttcactttggtgattggtctgaagaaagttacgctagaaaaactttcttcgagtttagagttaaggtccgggttgaa

SEQ ID NO: 42662 - DNA, 299 bp, Zea Mays
agaacttgcatttcgggggagcccatgattgccacatctttccactatgatcaaactgaattgaaccaacgaagaggctctcataagcagccttggttgagtatttggcatcttgagcaaatctgaaaatgtgtttatcctccctttctgggtgcagctgaatggtgcttaaagtatcccaaagggtgagataatcagccaatacacctactgttaaggcacccctgatgtctgctatccatctcatgtccatgaaggcatctcacacagttctactgctaactgtgcgtttagggaca

SEQ ID NO: 42663 - DNA, 471 bp, Zea Mays
ataaagtttacgcagactcagtgaatccagtactgaacgcgggttgtttttaggaaaatccgggggctcttatgcataataggcggccgaaggggtatcgcaatatctgggccgttggatcgactacctacggatcagattagatattcataactgtgaaccggtacgcaactcaagccgttggatcaaagatctatgttctggattttattagggtgcgatcagatctagttcatccgatatctaatcaacggctcggatttaacctaacgaaaggcattcaacacttaatcagggtcgttcattctgatcggatggccatgattctacagcgctgaagggggggactccgattaaatcggagccacacattctccgatcaaaggtcagcacactctcttccctcccaagctctggtcatggcggcgctgcccaccgcggcggagaacgcgggcgtgacacccatcagcc

SEQ ID NO: 42664 - DNA, 352 bp, Zea Mays
ctcagaagtcagatggaggttcgctgccaaaccagcttttgccagaatgaagatggtttccccaagttgttgagagcatgcacagtccgcctcgaaatcaggagccagccagagtatgatggtcgtgaattcgtcgagcatggcacggagaagtgtgtcgtgactgtatacattggatccagtccgcaccatgtggaatggagtgtcactactgccgggcacagattcaaagacacctgccaagtcgtcgctcgcaaggcattgaggaccctatgtcaactttatgaagaagaagtggccgacaccccgctcagattctttccgccctttcagagagaccgtcccgtttgga

SEQ ID NO: 42665 - DNA, 630 bp, Zea Mays
atcggggttaaggtgtaaagttatgattttctgaataatttgggtgctaaacataaaacaaaatgagtgtcatttttgtaactaagttacatagtgaagtaaggttactaaccgattgacaatattattatgagtctaatgcaattggaatggatcaattccgagctagaatgaggtagatatgaattttgcaagttcttgggtttattttcctatacattaacccattttcgaatttaattcctaattttatcggactgctgtcacaaaattatgaaagcctagggtttatcttataaatatcagggcccaactgtaatttcttttcactggaataggaccacgggtttattttataaaaacgcagggactcttctgaaaagttgctgccgcgaaggggtatcttcacatgacagccgtccgatctgcatcccacgaactaggttagatccgcacaccagaactggtatccatttatgaccgcatgatacgagatctacgacccatattttcttaagtccgatccgatatcacccatccgatcaccatgcaacggtccggatcgactcacgcgaagggatacatgcattctgttcacacccgcatgataccggatcaacggcccaacac

SEQ ID NO: 42666 - DNA, 408 bp, Zea Mays
tgaagacgcgccttcgaccgtccgattcggtgggcggtcgagatttaacgaaaagctggtctgtgtacgtcgttgattttggagtgagcggtagagattataaattagcatatcctttcggtgctttatcatccgaccgtcgaagttgaatcggatggtcgcgcgaggttgtagatgtggccgaactctgaccctggatctttgatccggtggcggctactgctcagggctgcggctgctgctttaggtctaatctggaccgcttgtgctcgatccaacgaccgagggatcaaggtaccctttcgtcgtgaccattttgcataagcgcccctctgttttagggaaacaaacccgcgatccacaggagcagtgctatgggtcttaggaattcttgcgcagaagcccttg

SEQ ID NO: 42667 - DNA, 276 bp, Zea Mays
atgttccatgagttcccaatttccgtgtcgtccatctgagtgagacgatatgatcccggccgagtgacttcagctactatgaatggtccttcccatagaggtgacaatttgtgccgtccctcccccgttagaattcggcggaagacgagatctcccactgcaaaggatcgatgccgtatggcctaatcatgatagcacctcagagtttgctgataccgtgctgattgaatcaccgtgttcagtcgctcttcttcgagtacatcaacatcctccagc

SEQ ID NO: 42668 - DNA, 581 bp, Zea Mays
attcatctacttcttgaaaacatggaacaatgcatgtgccatgactaggtttgtttgaaagccttggaaacttgcaatcgattgtttcttaagttgttcccatgtggttatcgatctggacaaagggatgagtactaggtttgagctatgccttttgttgacggagggatgagtaccaggtttgagctatgccttttgcggccataatatgatttggctaacattgttgtgtttctgccgaattatgcaatggttgcttcgtaactcatgaggaattgctttgatttcgactgcccatcattcagaggaagcatggacagtttatatgcagcttgccatggggctacctgcaaatcccttgagaacgaagatgcactatcatagatgaaattacatttttacctttccctatttcatagtcaccctttgcaattaagggagtacaataatgtcattttactgcgtagacgtgtcgcacacatcttctcttcgtagaagcttcttatgtctcctctccttcgaagtcctctttatcgacgacaaagctttgctttcaatgccttcggcttcatgcacctttg

SEQ ID NO: 42669 - DNA, 329 bp, Zea Mays
gaggctatgtatgggtgggacaggggttttctctacctgtcttatatccatagttcgagtttttataatatgctgccaaaagagaaggcagttccacatactaaaaaagacctatatgatcttctaattgtattccaatccaccctaaagattctgagtcagaattaagtggcatcctttaagagtgggggccatactgccattggtctatgatgactccaattccacaagtgcatgccatcaaacaaaatgtctaacttgtgactcagtatcaatagcaaacaacatggacacatgggcctgactacaaggtcaaaacagtacctcaa

SEQ ID NO: 42670 - DNA, 273 bp, Zea Mays
aaaggccttaggcatagagggagaaataggtggctaattaattaggccccgtgggctagtacttatatttttaaggatgccctaagaagcaccctattttctttgagaggcaacgtttcttccatcatgcatgcattataaaacacaaagaggaattaaaattttgagctaacccactttctttaaaaccatccgggctctccttctctttttccttccaccataatctttacctttgattccctttcgcagatgaattcacccacccccgcc

SEQ ID NO: 42671 - DNA, 388 bp, Zea Mays
caatatcgcaagagagcagagaaggtctggatgcaggaaagcgaaactagggctcacaatgcagaggcatgcgacagtgcagtacatatggggtttccccgggccagacgccatttctaaaaaagtgcccagtcatcacccaactattatttctaaaacgctagcgtgccatgtcatcactgggtcgttatttccaaaacggccgatgtggcccaatataactcaactgctatttctaaaaacgctgacgttatcagacctcactcggccgccatttccaaagcggccgacgtggtttgttgtaactcggttattacttctaaaacaccgatattactagtagtcactcggctattatttctaaagcgtcgacgtggctccaaaggat

SEQ ID NO: 42672 - DNA, 1370 bp, Zea Mays
gcggtgtatcaagcctatcaacatacagaataatatctggagggcatctcttcatatacttcttcacagcattgagcattttcctatttgatttttcatcctcggctgaagtcccaagcccaggggtgtcgacgacatgaaacttaacaccattaacaactccattaatctccttcacagatgatgttgccggtagaaaagcatttgttttggatttatcttccccgaagatggaatttattgttgcacttttcccaactccagtcttcccaaggaccaaaacattgcaggagaattcaaggttctcagttccctctgcctcacgctgcaaagccctcttccaggcattctcgatctctgaggaatggtttgtcatccttacgcacctgaaactttcaacaagactaagccgaaacaacacttgtactggtacctgatggttagtatcataccccaatctatgaacaagacgcatgtatttgattcgtgccatgtccacctttccgtaaatcttcttttcctcatcggtcatctgtttctcagggtcagcgattgcttgtggcacaggagcagaagccacgttcatcctagcattgctggctaaagtgggaggcagatccctaggttcagaagattcaactgggaaaaccttggccttgccttgttcaggcgagctgcttgcagctcttagaagctcaattaaagctgtatgatcaaaaagctcgttctcctttccattcatctcttcttcatattcatcatcaccgttgatctctgcatcatctgaatcatccgcaacaaagcgtgcgcctatggaagtaggcacgttgttctccagttcttttgcaagttccacagcatagtcacttgaagagattggcatggatgtaagatcgtcggaaccttcatgatcaccatcagcttcatcatctacactatcaagaacttgcatggcatcagatatgacatctcctgtggcagcatattcaggactagcatcaagcttggctgcactacctactgcatcgctgcgaagctcggcagcagcctcctctccttctgtaccagtagcagtagcactgggaataggaagcgattcagcagcctcacgatcaagcatcccctccaaagcatccacaatgacgaggccatctaccccagcaacaggcatcagtaaaggcccagacgccgcgtcattgacagcctgctccccctgcttatcatcctcctcattcagcacggtgccatctgaaacgatcaccgaatcacctgacgcagcagcctccccgccgttgtgcgcgccaatgcagctcccagatttgaggaagctgccacccagcgaaccctcgacgccatccaacccattcttg

SEQ ID NO: 42673 - DNA, 403 bp, Zea Mays
gcttaatgtcgtggtcgtgggtctggtagtctggtggcatttatgaactaatcgtaggcttgttttgggagggaggtatatgcacaacagcacaagcacatcagccgaatattccgtgcaaactttctgagttgatcactgcaattcacattgtcgataagcataaaagttgctgaccatggtttgtgataatttggctttggtggtcatgagtgtgtttttacaagttgctagatacctctaaaatgatttgaaaatgcagtacttatcacacttggcatgaacactgcaaactgttttttgatttggtctcttctttgttggcctttgaatataaacgtgttctgggatcatcttgtagtatcaattgatatagtattcagttgaggtcagccattctttc

SEQ ID NO: 42674 - DNA, 683 bp, Zea Mays
gatgaatgttgtcttcggtatatccgaaggtcggattctgagctgatggtaacctgacctcagatctatcttcgagaacacactggctcctctcaactgatcgaataaatcttcaattctgggcaaggggtacttgttcttgatagtaacctcattcaaagatctgtagtcaatgcacatcctcttttttccatccttcttctccacaaatagcactggggctgtccaaggcaaggtacttggtctgatgtagcctttttctgacaactcatcaatctgattcttgagttccaccaactctggtccggacactcgataggctctcttggaaataggggcggtgcctggtataagctctatggcaaattcaaccttcctttcaggtggcatacctggtaactcctcgggaaacacatctgggaattctaatactacattgatagcctctgatggtttaatctcctcaatataggcggtgacttggtgacaacttcctttccttggtccagacaagaacaactccactaacacttcttcccttgataaggacactaacttcaccgttctcttgtcacagctaagactggcttggtacttggttaaccgattcatccctaggatgacatctatagttgtatcctggttacccataactattaaatcagtggggaactctatccccc

SEQ ID NO: 42675 - DNA, 501 bp, Zea Mays
aaagacgatgacgttgaagtacttggagaaggagaaagtagagcatcccattcaattgttcagcccagttccataacaacccaaaagagaaggctctcagctgaagcaagacaaaacaatcaacacacattgaagtcttctaagtcaattgcatccatgcttcacaaagcacctgaagatgtggttcgtgagaggcatagcaaggtcaacactcaaactacattgcagcgaaagagcaaggaggagaaggaaagaacatatatgtatgttgttgattttatttatgagtgtggcttacaacctaatgtcatcaactcaagggcctttgagatcatgcttgaggtggttgggcaatatggtcctgggtatgtgaaaccttcatatcatgatgttagggtgtcgttgcttgagaaggcaaagaagagtgtagatgagataaaaaaagactcatgagttggcttggactgaatttggttgcacacttatgtctgatggttggac

SEQ ID NO: 42676 - DNA, 272 bp, Zea Mays
ctagggtgtctcgtgagggggacgaggccaaacctgccgaaacatcgcccatatcagaagtaatgaagcgatcaggtctagttgtgccaggggaggtctgacgaaggtgcttccaatgccgaagctggacaaactgtggttgagggtgagagtgataatgaaagcaaagaggataacaacattctgaacctggcaaagcctagtcatcttgaatttgaaaaatctactttaacagaagatgacatgactatgatgaaaaaactgggctattt

SEQ ID NO: 42677 - DNA, 380 bp, Zea Mays
cggtgggtgaggcgtcgggcctcggccttccctagagggagctcccctaggaggaggtactctaggtaaggcatcctccagttcgtggctggggcagccctgtcactattatcgttgatttgcatggcctcgaacccgtcaaatgggggtgtatcatcgtgggggcgagtttggacacctccctgagcatcaccgagggcttgtagatgtccctagcaaaaacgttcggggggaccatggtccgtcccaatgcgatctttgctagttcatctgctacctcgctgtaccgacgtgcgacatggttgagatacaggccaaagaatttatcttcgaggcgccgaacttcttcgcagtaggcttccatcctcgcgttatggcag

SEQ ID NO: 42678 - DNA, 296 bp, Zea Mays
catcaatttgaagtcttttatcaaaaagacactccacgcaaaagtcgcctaagggtgcagccggaatagctcaacaagtgcatcaatcgaagtcttttatcaaaaagacactccgagcaaaagtcgcctaacggtgcagccggaatagcacaacaagtgcatcaatcgaagtcttttatcaaaaagacactccgcgcaaaagtcgcctaagggtgcagccagaatagcacaacaagtacattaatcgaagtcttttatcaaaaagacagtccaagcaaaagccgcctaaggatgca

SEQ ID NO: 42679 - DNA, 353 bp, Zea Mays
ggtccttcacggtggagctaagaacagtgaggaggagcttatggcttaactgagtccctctgcaaaattgagtggtttgcgcaagcactcgtgtgtgtgatgtagtgaggaagcagcgctcaggctcaatttatagagggatagccggaggtggacgggattcaaaagatctcccagtgcgctggtgagctcacgcgcgtgggcagggccacgacgagcgcccggtgaaaagttttagccggacgacgccacctcatggttacatgcgccatgttgtggaagatttttaccgcggccacaagtccgagcagtgcctcagccgcggtggcgttcttatccccggcgaagttcac

SEQ ID NO: 42680 - DNA, 485 bp, Zea Mays
cgaacgtagagagagagagattaagggagagagaagtcaccaaacccaaaatcgccttgtcgcagggatattggagggcgcccgagtggttgctggagcacctcaaacgtgttcccgacacattggagcatggggagggaccagagcgatcgaaattacctcgccgccaacgatccgggtaaggagtgcatcagatagttgacggttgtcttggctacattcgttaccgaacgttgtgcgtggaggtgctcggatggctagatcggggttacgccctacgagcatccaccgtggcgaggaggcgtcgtccagttttgttggtgaaaggagaagaacgaccgtgcgttgttagattagacacaagtggtttagattacaggaactttgcgaccttcaattttctcgcacgcgatccccgcgccctcgcgaactccttcgattgctttgtagcctccgaacgatggcgtgcacagggtgatgccgac

SEQ ID NO: 42681 - DNA, 396 bp, Zea Mays
cggtgagcacgccgtcgggcttggaggtgctcggggaaggaggacggtttccgaccgtcaatgcgcgatgtgcggctcagatcgactctggcgtagcgattgggctggatcaggccaaggtgaatgctgatcgttcgatcgcgatcgggcgagccgtggcgattgcaggtgtttttaaatccaagccgtagaattctaatcgggtgattcctattgattaccggttcataccccttcaccatctaatctcatccgctgtaattcgatcgtgcggctaggattgatggtcatagcttcagccgagcgcttttacaaatagaacctccagattaaagagtatcaacccgccgtcctgcgggtattgtgcactgtgtcttggagaagttaccccgaggc

SEQ ID NO: 42682 - DNA, 474 bp, Zea Mays
cgattagtatgctgaggtaaaaggatatcagataaaccctaagccccaaccctacaccaaagatgagactcatccatcacccaattgatgaccttgctagccctaggctattctccgttgaagacacatcgattgcaatgaatccaaatggcccaagcccctaacatgataagggagttcagacccttgcgcaacttcttattggaagggccaataagggtcaagcttacttcctcccaccagtcatcaaaggaagtagaattgagactaggagtgagatgctgcaaaccgacagctttcaggatattaaaccaaacttcccttgagaatacacagaatactagcaaatgattcatagtttcttcctcctggtcacataacagacaactttggctctctttagacccttgtctctctcttcttaatatatatctaaaacgcagtcctcttgcgtttttcgagaaaaaacagaca

SEQ ID NO: 42683 - DNA, 422 bp, Zea Mays
cgattttttgggacaggtgatgctggggggtagttgggaataattggtgtgattcatctcacaaccgaatccatttcctatacatgtgttttattaaggtgtgtgtacatatattgaataatagagagcctgaagtagttcaagcctttttcgtcgttgcagcctcaatgtacctagtggatgtcgtcgcagcacgcctcaaggcacatacacaagaggggcgactagcaacggtgcggctcatgcatcgccgccacctcgagctctgacatcgatcgaggctcaatcatcaagtcgccatacacgtattttcatgtgtgcctgcatagttctcacgaattgccaccgtcaacatgtcaccaccgcgggcccttctactcaccaccttgaggtgggctcttcggcttcgacgcctgcaggcg

SEQ ID NO: 42684 - DNA, 437 bp, Zea Mays
cgtgttcggcgattgccgtttcaattctacagggacagggacagttgaaaagacacaactgttcaacatgaaacggtctccacacggggctgagttaaggctacagggacagttgaaaagacacaactgttcaacatgaaacggtctccacaggtggctgagttaaggtgccgctagtggaaagaagatttccactggcggttcgtaagacaaccgccagtgctatgtttttcactgacggtttcttaagcaagtcgactgtgaaatttgtattataaatacccccacccccgacaggaatagctagctcgcagccaacttccattggaggcgattttggagttccaaattatataaaatacaagggtcgaggttttgatcttcattttttggaggaaggttgctaagaaaggttggttttatgtttcattgtcaat

SEQ ID NO: 42685 - DNA, 380 bp, Zea Mays
tcttaatgtttcaagtaaatgcactacttttaaggaagtcccatatacttaaaaggaatgctcaatcacttatacgtttttcagtttagttatacaacaaggtaaagcttaattactcgtgtcaaggaatatgttcctgccaaagctaaatggcagtcatcatatctaattagattcggtgtgggaaagacccaaagagaaataaaagatacccacatcaaaatatattttgatgccaaagaagttgcttatgcaagaaatatggacaggtcaagccgtaattatgatctagatgaaaatcagtgagtactgacttgtattttgaaaggaagctgttgcaatagtgaatgggtcaaataaatggttgagcctggtttgtg

SEQ ID NO: 42686 - DNA, 307 bp, Zea Mays
ctgttgcaatatcaatgattgagttagggttgaccatcttgcatatgttcgttggggatcagaagtacaacacaatggatgctctactatcagatatttgtatcagcacatctgctgctccaacctatcttcctgcatactctacttcaagacagaagatttccatgggaacaccaaggagttccatcctattgatggaggagtagctgccaataatctggtgcaatatttgtcagtaattatgcatcgcacttcaatcatgacgcaaggttgatacattatttgcacttctatgtgtaaaatcttg

SEQ ID NO: 42687 - DNA, 482 bp, Zea Mays
tgaagaggtggaagacctcgttggccttgagagctcggtggcttggaaggacgttgtgatggagacgggagcggaagagcaatcctcactcaaggaaggcggcgctgagggtcctgcggcggcgggtacttctgcgcaggttgaaagaatatagtaggagtggtttgtcttcactttgtacatgatacttaagatcggttgctacacaggtttcgacgtctgggcctacgcaaacaaactttgatgataacgagaatgatgaatcgttagtgtgtcaaagtgtagtattcttagtagctagtgacgcatttgcggaatctgatgttgggtcatgctctttggaggttgaggggttggtgagcccgtttgctggaatggacgacgactcttcgaaagattatttagattattttatggtgctagatttatttgtagcggagtctccatcgagggtcgcccccctacggtggcgaggacttcgg

SEQ ID NO: 42688 - DNA, 328 bp, Zea Mays
gggccgaggaagcaaataagataaggggacagaactgtcgcatcgagcaaccacaacacgagtaataagatcccgtatggtgagcccctagggaacgaactccatagaacaacggttgtcagtggtgaagcgaccgaccgagagaaggttatggatgatgttgggggcaacaaggatgttgaggtacaaaggaccaggaagaaccatgtcacctaatgtggtgacaggcagagtcaacccattaccgacagttatggaggaagggaaggtggggctaagaggatgaggtatagagacaactctggggtcgggagtggtgtggaacgag

SEQ ID NO: 42689 - DNA, 615 bp, Zea Mays
ttttgagtaagatcctgtgactatttgatggtggacattataacaaagttaaagctggtttgttaagctacaactttgatgcagagagtgggtcaggtcactacataaaatctgaagcaaatcgcgttgtgaaatgctctgtcagaacaactgacgaagcttctgatggtacaataaccagatcagatcgccagctcagtgaactcaccgccagcgaccgtgcgcccggattcgcgcccgccgtggtgattcgtgctcggtgtggttggataacgctgagggattaagaaatatcacccagtggatgaactccagccactgttcactccggtcgtcgtgtccgcttagctcacggccgcttcggatctaccatcactggagttagacacctcgcagccttgcgccacgtgcgtcggcactttaactacaccaccgtgactcatgttagcccatccggtgatcgctggtgagcttgccacggtaattgccaccaatcgcatgcgccagtgcccatccttctctccggccgtcgcgcgtctccttcaaattcactggccaccgctcaagggccttataaattgagcacaccctcgactccattaggtattcttgcat

SEQ ID NO: 42690 - DNA, 367 bp, Zea Mays
gaattttctgcaggtacactaactaaacactaggaaagtgcgagtagtgtaaaatgacggagtgagtaggtatgccaccgccatagaacgtgatagccactatatgttggcaagaatcgtgaggacgaataggacgagcatgcatcatgacatacacttttaagttaaaccccctctgtagcagtttccacgtgtgttttacctaccctattcatgctacctgtctttgcttttctatgctatcctttcctattcatgaagattggaagctaagtctccttttgtcggcagaatgaggacccgctctggaaaggatcatggtgctggtgtttcccaaaagaatgttaatgcatccaagccatctccg

SEQ ID NO: 42691 - DNA, 696 bp, Zea Mays
agaaaagcttcttcttgtcaggatgtgcatctgccgatgtcgatgatctgctcaccagcagcgggactaattcaatgagctccgtcagtgaaactgcagaaagcgtagaccgcagacgctccacattcgacaaaggaatgttaagcaaccgggcaggcaatttctgtgcctgctgttgtgtaccactagcactgtccaccccctcgccgtttccaatcacggcaccatcctcctgattgctgactggtgctgatgctgggacaggggacgcaccacccacgatgcttgctggcggtggcggtgccccaacctttgcaaagcccagattggaaaggaacccatcgaaatcggccctcttcccatcgattaccttcctgagaaccacaaattgctccaactgtcgggtagcggcagcaaattcctcgcctttgtgcttgcaggcgtcatccagcgcgtggaggttgtgggcgaaggcgtcgaacgcaatgcagagcaggaactccagttgcttttgcggggtggtgccattgctgggctcctggtggagcggcggggagtgtgtgtctgcccgtcgcttgggcctgaagcacctggcgaatgacttgaggggcttgtggaggaagttggtgacgaggacgtggaggtggagcaggcagtcgacctcgagtcccttgtgctgcttggagttgggatggg

SEQ ID NO: 42692 - DNA, 383 bp, Zea Mays
atagggggcacactgtacagaagaggtgcgacgggagtcctcatgaagtgcattcactcggctattgggaaacaactgttagatgaaatccatgccgggcagtgcgaagtacatgcagcatccagaactctggttgggaaggttttcatatctggtttatattggccaacagcgaagagtgatgctgccgagttagtccagagatgtgaagcttgccaattcttatcaaagcaacaacatttacctgcacagcagcagcagaccattcctataacatggccatttgcatgctaggggctggacatgatcggactcttcaagaaagctcagggaggctatactcacgtgttggttgccattgataaattcacaaaatggataga

SEQ ID NO: 42693 - DNA, 451 bp, Zea Mays
attgtatgaatatggatgcaagaatcaccaccctatgtgatgaattatgcaagttgaaattagaggtcgtttcctccggtgctttaagttatatttcggtggagcccacattacaagagcaaatagccatggcacagattggagacaagggtgttcaagtcattaaggaaatgatcaaacaaaaggtggacaaatacaaatgcttccgtcaggacagcaaaggaattctatggtttggagaccgactggttgtccccaagaaccctgagctccgaaagaagatattggatgaagctcacctttcaaaattttccatgcactccggtagtaacaagatttatgatgatctcagatcattatactggtggaccagaatgaagagggaagtttccaagtatatatccgaatgtgacacctgccagagagtcaaggccagtcatttgaaggtagc

SEQ ID NO: 42694 - DNA, 388 bp, Zea Mays
acgagctagcgcactggcagcaagatatatggaccattgctagaagaattgaacgtgcgtggaatcgggttttcgatggtatgcatgtctccgccatggtgactgctttcgttgagatggcacgagctgtggcggcgagtatcaggagcaccatagtccatactccatatcaacattaacgcttccacggcgtacccactgaggcctgagggcgagtcacgcctccttcttagtccctcgagctcacgtcggcctcttcacttctccatagacagtgtgaaatgcaagagtttgctatttaatatagtctctgtctttctggtttatggtctctgttaacagaagcttctagtagagttttgattcttgctcacagcctcgatcgttt

SEQ ID NO: 42695 - DNA, 276 bp, Zea Mays
ggagaggcacctggtggatggggtcccggtgccgcttgcttttgatcaggacggagaagaaggcagcaggaaagataaggataatttgggtgatcccaaagggaaggccgatcgaaacaagaatgggccagagaacagttcggaggagaaaaatgagaatggcagcaaggccgatggcggtcaggtccagaaggaggatgttaacggtggggctgatggtggtaaccacaacctggttgtcagccatgagacacacacggccagtgagctacaggc

SEQ ID NO: 42696 - DNA, 457 bp, Zea Mays
gaagaggaaccgaatgacaaagctacagcagaatgcatcgcaaggcagccagctcactacaccctcattggggaggcactatacagaaggggcgcaacaggtgtcctcatgaagtgcattctttcggctactgggaagcaactgctagatgagatccacgccggacagtgtgggatacacgcagcatccaggactctggttgggaaggtcttcaggtctggtttctactggccgacagcaaagagtgatgcaaccgagttagtccagaggtgtgaagtttgccaatacttatcaaagcagcagcatttaccagcacaacaactgcagaccatacccgtaacatggccatttgcgtgctggggactggacatgattggacctttcaagaaagctcagggaggatacactcacgtgctggttgccattgacaaattcactaaatggatagagtacaaac

SEQ ID NO: 42697 - DNA, 300 bp, Zea Mays
tcttacaagattggcaaattgagaagaaagtctcgacagtgactcttgacaactgcaccactaatgataatttgatgtgttgcatgcaagataagttacccctttcctctctcatgttagatggcaaattgttacaaatgtgttgtgctgcacacatcataaatcttatagtcaaagatggaatgagtgttatggatgagggtattgaaagggtgtgtgatagtgttggattttggtgtgccacgccaaaaagacatgagcgttttgaacgcacaacaacacaaatgaatgttaaatatg

SEQ ID NO: 42698 - DNA, 273 bp, Zea Mays
taattttacactgcagtttatttttaccacattatgtgaagtgctccacctcaactgcagatgtgtagcttttaccagtgaagattgggaaattgcagagtcaaccctgcaattttggtaatgatgcttacctttcacctttattttcatgtacgaaaagctcattcacaatatcatgtaacaattagtccatgtacttcgggagcaaatcatgggcttcttttcttggtttgtattgaggtggcatcagtgttttgtctgtgtgcactaatt

SEQ ID NO: 42699 - DNA, 415 bp, Zea Mays
aagttcatgcttcatttcttctaataaagctgcaaacatagatttccctctactttggtcattagttgggtacaactcccgaatcatatcatgaattctattatcaggctcatcttcttcattctcgtttatactgtcatcctcattgataccaatatattcatctacatgatcataattttcattaatttgagcctcaaatggttctccatgatgtacccatctagtgtatgtgctagtcatcccatgaattagtaaatgatcatacacctcccccttatgttgatgaactcgattcagacaccttcaacatggacatagtacctcctcattcttatcaaatctttgtgataccaaattcatgaactctttggccccatccaaatgtgcatcgctaaatagtctgtctttgatc

SEQ ID NO: 42700 - DNA, 341 bp, Zea Mays
gtcgcattataattgtctcttgtgcatcaacatgcttctctcacctttattccaagaataagaaattgtgaataatgtgttgtattgctatgaactgcaaaaaactgtcttacctcgtgtcagattggtaagtcttgttaggtcgcgttatgtgtttctcttgtctttgctatctaggtggcattgcaattgttcaaccctttttgccaataaaaaaattgttgtctgttttgcccataaaaagacccctccaaacaaccttgagtttagcaagtgaaacctctaaaacaaattcattcttgtgttggtgttttctaacccttgtgtgttttaccctgaag

SEQ ID NO: 42701 - DNA, 365 bp, Zea Mays
atcgagcaccagctaaaggtttacccggacgccaggccggtaagccagaagccacgaagacagtccgtggaacgacaggacttcatccgagaagaggtccggaagctattgcatgctggctttattgaagaggttcatcaccccgtgtggctggccaacccactcgttgtgccgaaggccaacgggaagcttcgaatgtgcatcgactacaccagcctgaataaggcatgccctaaggacccgtatccactaccgcgtatagatcagattgtggactctactttggggtgcgacctcttgtccttcttggacgcttactctggtttccaccaaatccggatggctaaggaggataggaggcatac

SEQ ID NO: 42702 - DNA, 453 bp, Zea Mays
gccagcttctgctccggtttttgacactcaggccgaggatgctgctcttcatcagttcgaagctcaggatgcaacagttgatgatgatgatgatgattttgggattccacctacgcctccacgctcacatgatcatgaggctgggagttctcgtgctacccctgctgcccctcctgctattgaccctgtgcttgcttcgattctacagacactcactcagcagcaggctcacttggtagccgagcagacccgccaggcagcagcccatcagcagttatccgagaggatgcactcgatgtttcagaccatacaggacagacaggattctcttcagcagcagcttctccaggatcgggctgagagcagggcattcatggctcttatgctacagcattctggtgtctcggttcccccggttcagtctgcaccacctcctctgcttcaagctcctgt

SEQ ID NO: 42703 - DNA, 341 bp, Zea Mays
atcatgagtaggatgcaacagtcatattgaggggcatgaaaccatcagtcgctaagccgataagaacatttcttgcttccctggcaaactctagatcaaaggtgtcaaggacttccatgcatcaccttatgacgtgtgcaccattaagccatcttttatgtctgaatgatctttgtgccaccccatgtccatagcaaactttctcgagagaaacaaacgctcactctaggagtgagaggcatgtaccgaagctgcttatgtgcaacctttgtcatgaacttctccccatatttgtttacaacctcgacgtaccttgacttgccacattttaagcaattcta

SEQ ID NO: 42704 - DNA, 305 bp, Zea Mays
gggacatcaaatagtaaggttctgtgtttcctcgaaggtctgaagttagctccgcgccgggctttcgtcggcgatggtcggacaccattccctccccgtccaccccgtcgtgcccctcgtctcccatgtggtcagtgggtgccgataccgttgaggtgatctccttttcccctctcccctgccctctggtcttatggctttcttctggatggatctggtgaaagggaaataggggtaaccttttcccacaattaattttggtggatgaatgcccaacataaatatgtggactaattagtttgctc

SEQ ID NO: 42705 - DNA, 427 bp, Zea Mays
tcccggctacccttccaagacagaacacaagcgtgcaacatatcttctaaggtttggatcgttcgctccgactgaccataagtctgaggatgaaaagcgacactaagagaaagcttggtgcccaatgcactgtgaagactctcccagaatttggatacaaatttggagtctcgattagaaacaatggacttaggtaccccgtgaagcctgattacttccttcatatacaaggggaccaaatctgaagctgaatttgtggtcttcatgggaataaaatgcgcagacttagtcaagcgatccactaccacccatatagcatctctgccctgaggagaacgaggtaaacccaccacaaaatccatggtgatatgctcccatttccactccggaatttccaatggcttcagtaaacctgcaggtcgcttat

SEQ ID NO: 42706 - DNA, 467 bp, Zea Mays
ttgcttctgcactactgctcgaattctcatattttgcaacccaacagtaccagataaagcatgtgttgaaacctggtagcacaacccctgttgaacatcctcctgctcaagctgttgcaacaactcatctgttaaaaccatctccacattctcagtaataacagcattgagttgggcaggcctcgtttagtgcatttagtaatgtgtcccggctcaaacttttcaccacatgcgtagcacaatccattgagtcttcgaaactccctcacctgtctttctttggacagatcactctgcttcccttctcccttaaatcctaacatggtctgtttgttaatgaatggctgacgctaccccttaacttttgcctgctccaaaatatcatactgagtctgggctaacacaatagcacgatcaacagcagtaggcaactacattctgaccacactttggatatcatatttcag

SEQ ID NO: 42707 - DNA, 456 bp, Zea Mays
actgaaaccaaaaaaaaccgatggttcggtttcagtgcggttcggttttcggttcagttcggttctcggtatgattgtgcccagtcctaaggatggagatgcaaactctaagctattccatttgtatgccagacaccgtaaaaggaagaacattgtaacctctcagagggaaggggatgtcaccttaactaggcatgatgagaaggctgcagcagtggatcatttcttcttcaacctgattggtacaaatgtgggcagagatagaatcattgatttagatgctcttgatattcccagtcatgatctctctgagttggatgcacctttttctgaaaaagaggtatgggacactattgtaagtctgccccctgaaaaggcacctggacctgatggttttactggacgattctacagagtctgttggcacataatcaaacatgatttcatgaaagtggt

SEQ ID NO: 42708 - DNA, 799 bp, Zea Mays
cgtcggccgttctgaggagacgtgtaggggcaggacatgcggaggtggacgccgcgagagaggaagaagtcacgggacacattgttatagaactcacgcccgttgtcacactggatgcttcggatggtgcgactaaactgagtggagacccaagcgaagaagtgagacagggtgggaaaagtgtcagacttctgacggagaggaaaagtccacagataacgcgagaagtcatcaagaataagtaaataatacttatagccataaatgctaattacaggggatgtccatacatcacagtgtatcagataaaaaatgcctgctgctccagaagaggagatggggaatgggagcctaacatggcgacctaactgacaagcatgacagaggtgctcaaaagatcccctacaaccggaaacagaggtgttgctggagagtttggacatcacatcacgaccggggtgaccgagacgacgatgccaagtcatagaagaggcggcgacagcaagaacacgcggggcagaggtcggtgtagcggaagcaggcaagcgaagtgtgtagagtggcccggggctgtcacaccgagctagaagggtcctggtggcaagatccttcacagaaagaccaaacaggtcaaactccatggaacaagagttgtcagtagtaaactaacggacggaaagaagattttgaataatgtggggagcaacaagaacgttggataaacggaaaggaccgggaaggaccgcgtcaccgacggaggtgacgggaagggcagagccgtttccaaccacgatggagg

SEQ ID NO: 42709 - DNA, 279 bp, Zea Mays
ccaccctaggcatgtcaggacaatccataatcctagcactagcgacgacagaggaaatcaaactcaagggcatcaacacagctcccaatcttcaaggacataacaaagctctttcgtgccaccaactccaagaggcagaggaggtagaagctttgttggaagattcagctcccaaccaagaaggttgttttgcctattctgtggggaagataagaggaaaatacaacatggacatgcgaagtcacgattcataagcaaaaggaaatagttgaagccgaa

SEQ ID NO: 42710 - DNA, 557 bp, Zea Mays
tcaggacacggaccgtccgagctcccactgcggaccgtccgtgagtagcagtcttgcataaacaaaagaattttttggaccaatatctcaacaagtggtatcatccttacaagtgatattcctatattccgtgcaaattcataattctctcacatacaagtggtattgaaggaacaaatgcatgtgaactacaacattcaaattgtgcacttgatcttaaatgggttctcaacttcatactagtgaagaatggatttcttattaataattggtcttcaccaagctattcaattggatttcacattgctattggagagctaaatcaaaagaatcctgactattctctactccaacatagcaaaggtatcattgtgatgtgcatgatcatatcatccctactagtatgcggttagtacatatagtacatacttaataagtatcatgcatattaaataaaagatttaaattcatgttctaccactattggttatttttgttgattgaaactagtggtagcatatgagtttgttcatgagcaaagtgaacccatgtactta

SEQ ID NO: 42711 - DNA, 591 bp, Zea Mays
cgcggcgaagcaaccgcgccagccagattctgcggcggaagggaggaacagaaggcgccgagacaatgaccaacgggcccatgttgtcagtgactcatggagaacgtccagcgcgcgcgtgaaggtaatgggccgcgcggaggtaaagaaatctggggccaaaagtgatgtagccggcccagtaagcgagtttgagattttcctttttcttatttctttttattttgccaatttctagttttctaatgaatttgaattagtgatttgaacttcataccttcatgtggctaattaaaccttattatgaatattactatctccttttgagataatcacttatttattggcataattattggatatcctccattctttaactctactattctcattttatttgatgccctaatttgaattcggaactagacttacctcctttataaattttgtgtttgatgcacaaacaaacaaaagaagtccagcatgatgcataggttacttacgtgtcatttattaattaattcacttttgattgtgggtgttcacatgtactaacaaatagggcaattcatacaaggcatttttttcttt

SEQ ID NO: 42712 - DNA, 284 bp, Zea Mays
atgtgttcctgacattgataaccttcgtgagactatcttgaaagaagcccatgattctgattactctatccaccttggtagcactaagatgtattaggatttgaagtagaaatactggtggtatggattgaaaagagatgttgctgcacatgtggctaagtgtgatgtgtgtcaaagagtcaaggccgaacatcaaagaccagcaggactattgcacccgcttaagatacccgagtggaaatgggaagaaataggcatggatttcattgttggactaccccgca

SEQ ID NO: 42713 - DNA, 340 bp, Zea Mays
cgaggggaggaaatcacacctgataaggtgcatagactagggttcaaaccctacccagctggctcagtaaccagagggagccttgccaccgcactactagtgcgtctgcagaagagaagttagggtagaggtaggattcagaaggggacccagactcttggtaccatgtagagaattatgggaatacctcacacccattagggaggggtggctttcatctgtatagtcaagatacaactgggagtacatggcatacatgtgttagactatgtgtatatctaatagtctgtctcctcccttctatcatccccccatcccccttcacataccatcctccctg

SEQ ID NO: 42714 - DNA, 554 bp, Zea Mays
gcaattattacatcacccacaggcctcaaatacagatatgttgcgtgtctccgtttcgcacttgaatcaggcaaatacacgaacaatatagcagaatacaaagttgccatccttggactccactaactaccagccctaggggtgacaacgtgtatagtcaaaactgattccaatatagtcgtcggccaaatcaaaaaggactgatccgccaaagaaccagtcctcatgcaatatctttcggtcatgtgaagcctggaaaaacagttaaaaggattcacattgtagcacatagagcggaacaaaaatgaagaggctaacatgttggtgaaagtagtaacgaaaggcgacccactgccatctaacgtgtttttccacacaatcagcacactagctgtaagaaaccttgaagccctacaaataacacaagaccccaacggtcatagaatcgtacatctgataatgaacgaagactggcgtgcacccatcaccttatacctccaaggtcattatcacccctctgaccaaagcgaagccaaaagattgaagcatagaag

SEQ ID NO: 42715 - DNA, 283 bp, Zea Mays
aggagaaatgttgtgtcatctgttgttggaggtcaatgatgagctacttcatgtcccctgagtcggtggtggcgttggtggcagccacagcggcggccgtaacctgaggatcgatgtcacctcctggcatctttgataccagattgttggagcttgtgttcctgagaccgtagatgtgttgcacagaaggacgggtacaaagatcccagcgcttgggcgctgtcgtcttagggttgaaggaggaaggcaggatttgggaggggcgaacagtacccacggtcca

SEQ ID NO: 42716 - DNA, 315 bp, Zea Mays
ttgccttcgtctcataagacaactcatgaatattgcaaaagcatcttgcatccggttccagtccttggctcctcatggcccagataaaaacccccactttaataagagcttcatgggtaatctgatgaaggtatatctcaaatgtcttcaaaacatcgactagcatcttatgaagcgggaagctaagcccaaccttcatgaagctcctgaagactaccacttcatcgctttctggcagcggaacagtgtcctctcccccaaccctcactatagacacatcatgaaaatatttccccttcatcgattcaatttgtc

SEQ ID NO: 42717 - DNA, 319 bp, Zea Mays
accatacaccacatcgccatcctcaggaactgattctactgtcacatgattgactcttaccctactctggttctgcggagtcttgttctatgcagatccacgagaaggtgtgttctggttagtcctctagttgctgttcttctggggtgtctgttggttgcgccttgggtagttgttagcatagtggccaagttcgccacacttgaaacaaccattaggttggactgaggtagttgtgttgttgttcttggccggtgtgttcacgacgcttccctgacaaatctattgttgcccactagacctttgaccggtctgagtg

SEQ ID NO: 42718 - DNA, 548 bp, Zea Mays
ttgttctgctcggtccgcaacagtatcttgatgcttccttcactgttcagcggcacaatgatgcttggaaccatagagccctttattttaatcgagaatgctggcttatgttgttgggatcccctctggactaccgttcttcagagcacttgcaggtggctattggctcctttggcagattgattctgtgggaagaggacagacgcaatatttataggactttgctcagggtgcgggtcacgtctctggaggaggtcccgcagttcattgttttttcagacgctgatggctttcttggggattcgtggacggtgcagtgtaagatcatccagcaaactctgttggggggtcagcctcaagatgaggacccggtgccagcggccccggcggatgggcagcagcttccttttgagttttttggtctgggtcaacctgtgccggcggtgggttgggatcttaattttccaccagatgacaacgttcaagctcagcctgcagacagcattcaaggtgactgggaccaatggattgtcaatgatcctcctgtt

SEQ ID NO: 42719 - DNA, 343 bp, Zea Mays
ggtgacataaagcaattttttagttattgcaacaaatcttgacttcatgatctattaataacagattgaagtacacagcgaccaagtcatgcgatcctaaatccaaatcgaagctactctactagatattggtaatccagaagctaacaacaatgtatttgtcttaggaggaggccaaaatgtcatgccacatcgaggtcatatatagataagatgttgttagggttcatccaaaaatgggggaacacactttcggaactcagaagggggaggcagagcactctatcaccgaacaagctgtcgatccggggcagtcgaccgatccgaggaggaggacgccgaa

SEQ ID NO: 42720 - DNA, 397 bp, Zea Mays
ccaaacatgcattttgaagtttgtcttcgtagctcggtcatacgtccataccccttcctgccaagcatgtaccaattcatcaatcaaagactccatgtacacgcccattttattcctcgggtgtccgagaattatcaatgacacgaatatgttctacctttgaaagcacacacgagagggagattgattgggataacaaacatggaccaacatgtgtacgtggcatcgctcattccatagggattgtacccatttgtggccagcgcaacacgtacattacgagcctcttcggctttctcacggtgaatggcatcaaagggtttccatgcttcaccataggatgcgtgcaccatcttgttaggattgtatcgttttccatttttgtgccatgtcttct

SEQ ID NO: 42721 - DNA, 355 bp, Zea Mays
gactctgctggctgaaacgtgacggagtgggtccagctggtctattgaagcttggtcccttgggtggaaacccgaaggatcgagctctctggtgccgatcttgctgctgagctcggagaacttggaatttcctcttgaggtgacctttttcttcttcctttgctctttccacttgtatggatttattggagaggtgcgagaagttgaggaaatcttggctggcaaggatggtcttgagttctggtcttagccccttcagaaaacgggccatcctcttggcttctgtgctgacatcgtcaggcgcgtagcgagccaattctgtgaatttgtgcacgtactcactaacagatcttcc

SEQ ID NO: 42722 - DNA, 774 bp, Zea Mays
aaaaaggaaaaggggctttattcctctccactggtcggcggcatctttcggctcaactggcccacccccgcgccccctttcctttccctccctctctctgacgtctgggtcccgctatcagtcattcctgttctccttcctccgctcgctcgcaccagcgccggacctcgccgtgttgtgcttcccgcgccaagccactgtcggtcgattccttgcccgaagtggagcatgccaagacccccttccttttctctgcaattgccctcgatcctttcctccacccgatgcgaatttctttccccattcacgagcgctgtctatggtaggtggctggatcttcaatcatcggagatatccgttgttctagagtcgattcgccccagctttgtccctataagaaccacccaatcccccatcgtcgatcacacgcattgacaccctctcccgtgctctcctgccctctgctcatgctcaccatcgccgccgcaccgccattgctcgtggccaagtgcctttgaagcttctctacccacgctaaggctactgtggtggagcccaaagattgttgctgcttctccgcatcttccccgactcggtccagccctacagcatcgcttcgacctcactggagccccaccggccgtcgttcctcattgtcagccgtccccaccgcctcagccccccttggtaaggcctcagtcgcatttgcctttaccccttgctgctacctaagccatccccagtcaatctagcctcccggagctccgtatcgac

SEQ ID NO: 42723 - DNA, 423 bp, Zea Mays
gtggaatgccgttttgtgaatgtcgtccgatcgcatccgcacctgatggtaccccgttgtaggtctagcttagtgaagaagcgcgccccgtggagctcatctagaagctggtcgacgactgggatggggaacacatctttgacggtgagggtgttcaaagcgcggtagtcgacgcagaagcgccaggagccatccgccttcttgacgaggaggactagtgacgagaacgctgagtcggtgtggtgaacgatgccctgctggatcatagcagagcactggcgctccagctcaaccttgtgtgtcgtcgggtaccggtatgggcggactgccaccggcgctgcgttcggcttgagggtgatgctatggtcgcggacacggggcggtggcagtcccgtgggctcagcaaagacatcctcgaatgtg

SEQ ID NO: 42724 - DNA, 448 bp, Zea Mays
tggtaagggaacaatcatgtcaacaacggagggacaagccaccaccggtcaaataaatgtggaccgaatgcagagagaaggcgagggagcgatcgaaggagatcgaggagaagccaaaggaggatggagaaatagggaaaagctagatcagggcagagcgatgagccaccaccagtcgaatgcaagcaggatgtaggggtagagaagaagggggaaatggggaggaggcaagaccgaatgtggcatggtggtggggcgtggcccaattaagagtggagcgacgagccatcgtcgatcaaatatagaggatgcatgggcacaaaaggagagatgaaatcaaggagacaagactgaatgtggcatggtggtggggatgtggccaaatcggaaatggagcagtgggccaccactggccaaatacgaagagaagaaaagggagcaaatgaat

SEQ ID NO: 42725 - DNA, 832 bp, Zea Mays
cggtgccacctccctggacgctttctcctggaacacgatggtgtcagggtacggcaagtgcggcgacctagaggccgcgcgggaggtattcgtcagaatgcccgagaggggcctggtttcctggagcgcaatgatcgacgcttgcatccgtgctggggagttcagtgaggcactgaggatgttcgaccagatgatgggaaatgggttcaggccagacgccgtggtgctatcgagcgtgctcaaggcttgtgcgcatctgggtgctcttgagagggggcggtgggttcataggtttctcaaagcagaggggcttgggaggagtccggataatgtcatgcttgagacggcgcttgtcgatatgtattgcaagtgcgggtgcatggatgaggcatggtgggtctttgatggagtccagagccaagatgtggtgttgtggaatgcaatgattggtgggcttgcgatgaatgggcatggaaaacgcgcacttgagttgttcagaaggatgcttgatatggggtttgtgccaaatgagtcaacgtttgttgttgttctttgtgcgtgcacccacacaggtcgtgtggacgaaggtaaggagattttcaggtccatgtgtgaccatggcatcgagccacggagggagcactacgggtgcttggctgatctccttggacgtgcaggactcctggaagaagccgaggctgtgttgctggacatgccgatggagccacatgcatcacagtggggggctctaatgtcatcatgcttgatgcacaacaatgttggtgtgggtgaacgtgtaggaaagaaacttattgagctagagccagatgat

SEQ ID NO: 42726 - DNA, 861 bp, Zea Mays
ttctggtggtgcaataggacccaaatgaactgcatgcatacgagcatcaatagctctagcatagtcatgaggaagatcacgggcatattctctaagcggttccactgctgcatgatttgaatctttgtatgcactggcaccaatgccttgtgggacattcactggaactagcggcggttgcatgctataagagaatggttgctgctggtacctgacatgatcttcagccccagccgaaggagaatgacccacaaatactccttttggagcaggtgcactagacactgggaaagcaataatggtgggttgaaccggcacaactgtatccgcatatgcagtcgcctggactgcaggttttctggcaggaagagtcgaatcaaattgtgccatcactgctgtgttcccagctcttggttctgccacatagttcgtgagtgttcctgaacttgcacctggattagatttgttggatgcggtgccttgatgtgggctgtaaaacattggagctgcctcaaggttgcccattgcacaagaacttccctgctcccggatagtattatccgaatgggcatgtggcaatgctttttggcacattgtgcaaccatcatacctcaatgatggaacagtggccgagctaaccacaacaggaattgtgcctgagctggtcaccactggcatgcttactgcgcttgtcatcgcttgttgggcaccaaatttctgcctctgcgcatcatttgtctgcagatgcacagaagacaaaggaggaagctgtgacagtggagtgtgcaccacccggtaactctgatcaacctgagcttgcactggccttgtgaactgcgtggtctctggaacaggttctac

SEQ ID NO: 42727 - DNA, 272 bp, Zea Mays
cgattcaatccatacaaccatctcctttttaacctaaccgcaattttctctttactgctaatctctagcactcacacttacccctcttacacagatggcttcgcctacccccgccgatagtggagacaccctcttaagctttgactacctttcccgagagggtttttcctctatcttgtgggaggtactaagcacagctaggtcacccacaccacctctgtacatggtgcagctatacgaggagcaccgggtgccacgctttagggtttggc

SEQ ID NO: 42728 - DNA, 330 bp, Zea Mays
gcagctttggctgctgctgtttttagcactgaggccgacgatggtgtttcttcaatagcctcaatgatagtaataatccttcgcttttttggttcagcgggcttctcggcaaccgaaggttccttcttcttcttctgtaaaagcttcatcagttccggtcccagcgggcttagcttattaggtagagattcggtcattacctttaaaatttcttctgcgtcagtggcagaaggtgttgagggaacttcttctaaatcagcttttggcttcggagctgtagcttttcttttcttcgaaacggccaccttcggctcagggctggattttttt

SEQ ID NO: 42729 - DNA, 304 bp, Zea Mays
ttggtggcgttcaggcgagacggagatgggaactatctatccacatgcccggacctatcatcgccatgttatcttgtcattgtcatcgccggctgttcttttggctcaagaaccctcatgcatattgatcgaggactagaactactaattttaaataaggttctcgtgttcgatgatcaatataattatttgatgagtattttttatatagtttcaaggatgtataattgggctttccacagtttcggtcctctagccgctagtcttcgacgtctcgttcgttgtggagtgcaacgcgttggtt

SEQ ID NO: 42730 - DNA, 1342 bp, Zea Mays
ccgccccaccagagtcgccttcgctattcaggacccccacatgagctttgtcgttaggtgggatgtaccacgctctccctctcacttcctttatcctagtgacactcacccatcctcctccttaaataccgagttcaccattgcccgccatcgccgttcgacgccatcaacgcctccctatcgtcaagctcgcctccctaacctgtgcctttaggtgaggaactcccccgactaggtcttgccctctctctctctctctctatctgatcagacgacaatcgctcgccgtagttggcgaggccgccaacgcccctacacactaatgcaccgccttttccaagccatcatcgaactttcccaacccccaagctaggttcgtggtgtcacgtcattgtcacgggctcataccttcggcccgagcctcacccaatcgcaagtatgctcgcacgtcgactatcctccgacacagagtcgaagtggggccgtcacaaccctcccctcttgattgtcgcagcccctcaacggatccccatagcttgcccacgatctgacggcctagagcaccaaatgtcgcttcacctcccaccgtctagtcttaactaatggtgccgaatccagcgctcaaagagctccacgtcactgcctcatcactaacgacaacacttttgctaaagaagccctagagttctgccaaatcaactcgcaatccaagattgtaaaatctagatccccttctctttgcactaaagctcctgaaacccttgtattcttcacaatcaagtccctgaggtcgcctttaagcaccaaatacagtagtctgatagcggagatttgaacaaagaatgttggtggagaggtacacaatctattgttgtgacccacgcgagaacgagaacaagggcagcagataatgtgcctaaacggtgacattgcccttggcggagatcagtctctccccaggggcacacgatgtggaagcagcggcaactagggttaggaactaaacctagactcgtgatactatgtataagaatagaattggtgaaatattcattgtatcgcattaggccttccgggctagttataactcatatgggtagacaatgtggtattattatttactataacacaaacctttttttggttatgctctaaaaaatcacaatttatttctttcaaaactcaagaaccaaacaccccttcaaacattaagtataataccacctaacaactgcctcatgcagaggccacattagcacaacttgacaattgcacatccctgatgtgcaaacccaaaacaagtcataacccaccttctattatatgccatgtaacaagtttc

SEQ ID NO: 42731 - DNA, 483 bp, Zea Mays
cgcacctccagcagaggaaagacaagaccggcagcaccaacccgctagggaggacaaaaggcacgaactctccagcggcaagttcactggggtggatggcgccggcacaaatccttccgccgaacgccggcccatcccatccaagcaggcagtataccatgtcgagcactcgctcagtctgggcatgctcgggatgaacttataaggccatggcaaactacggcaatgcaaagcagagaccttgaaggcaaaggggcacagagagcttggaggcgagaggacgccgtgagtgggagagaagcaaggcatggctgctactcgagggatgaacccctctttaaaggcagactcccccgctcctgcctcaaaacgtcgcgagaagtctcccccgatgcacacaggggtatccatcctatgacacgggggcccggtcccacatgtcatacaactggtgcgctggtcttcgagtgcgaagaaggcaaa

SEQ ID NO: 42732 - DNA, 351 bp, Zea Mays
gttatatataattttccaaaacaaacaaatacagtgcattcatttgatgttgtagatgtttatacacttctacaggtttgatcaaagctacaagcattttgacttatgataaaactagaatggtgtacatttttgagtggcagtggaggtatctagaatcgtccaaggttcttactaatcttcgttggtgtccctacgtaaaagaaagctcgtgcaaggaccaagcacatcaaataggttactctgtaggtagtagcgggccttatttacgtgcaagtggtgcttcacttctagcccctattggatactccccaccgtcttcactaagagcttttggctgagacatcgtgg

SEQ ID NO: 42733 - DNA, 363 bp, Zea Mays
taattctctaaggaataaaacacccctgcatctgcattgcattactctatagccatttcctttgcccttcgtatcaaaggcctcttgacactcccactcatgtattgaggatggcgtcagtaattgcttccaagagcactgtatcatcttgcccaaagttccagttccagcttcagcaccaggtatctgtttattgatatgagcctttatattacatgtcgtctctcaatgatcaacatcgcctcgttagttttatcaaccatcttgagtgccatctagcggactgtaacaaatgcggttgaaaacactatggatgctgcttcaggcagctccctgtctttccatacgctcttttcgtccctc

SEQ ID NO: 42734 - DNA, 271 bp, Zea Mays
attatttccaattctatctacatgatgacaaatcagagtggggtatcgggtacctggaatgcaagactagccttagtgcacgatgcggctaccgtgctcctgcgacatgaacttctccccctccagcgcacgaattgtgggccatcctctctcgccatcctcgtccatagaccaccgcacaaacatgtgagagcgggacgatgcagagcgtgaatagaccaacggcgagcgggggaggagatgacaggagacaagacgatagagtgggtgc

SEQ ID NO: 42735 - DNA, 351 bp, Zea Mays
aactttccttctaagcatagaagggatgccaggtttggactggaaaaggctacgtaagctccagtgtccagatggctcctacatgtcttcgcctgctcccacagcttatgctctaatgcagactggggatgccaagtgttttgagttccttgataaactgatcgacaagtttaacggaggaggtatggatcgaagagcacataaaatgctgacaagaaactatacttcccgtgttctttttacacatgacatttttaagcttgcatgaagtagttgtatgaatgaaaaaaaatgaagaatctaataagaaagataactacataccccctacatatatcatttatggttcat

SEQ ID NO: 42736 - DNA, 414 bp, Zea Mays
ataggtaaaacaacactctcgaactaggttggaaaagaggaggctttaaagggtaagttcaaagtaagcatctaggtaaagacataaatatcgtaagggtcaaaggtgataacaaacaagggtgtaagagaaaagataaaggcatagaagaaccaagggtacaagtacaacaaagaatggagttaaggcaaggcttgcacgcggtaaagaagaggatatggccaagggtgagataagtaaaacaccactctcaaattgagatggggggagggaaggtttttaaataggaggcgtacgataagcatcaaggtaagatgaagggatgacaaaagtaaaggggataacaggcaaaagcatagcaacgggcggagtcaagacgagactcacaaagtggtgaagtaaaggggacactaa

SEQ ID NO: 42737 - DNA, 381 bp, Zea Mays
ttcggtgacaggaccaaaccccatgaagtagtcctgctggacgtaggtggcctcctcgttgacttgttcctcttcatcctcgtcctcgtcgtcatcctcatcatcgtcgtccctagagtcgtctgggtcatggcctccgggtgcaggagcttgaacggttggtgcaggcgatgccgaggttgatgacctagctgcgaaggctagtgactctgccaacggggtgggtgtcggcagcagttcctccgagttgtcttccattatgactccatgctccactcgaatgcgagggagatccaccggaacttcctcaacttccactgggtagacaggaatttgccgtggtggaggggcgtagctagtgttaacccgggtggtttgaag

SEQ ID NO: 42738 - DNA, 372 bp, Zea Mays
gcacaatgcaaaacattgcagatgattttatgaacacttttaactacagatgcagcaaaggaatagaaagtatgtaggtagttaacatttgttaactggtttattaatttttctgtgcaactatttattgtcttcgttatgttgagttttacctatttcatatttaacaggtgagcttaacactttcattgtatataatgaaaggaaaagagtcacttcatcagctaaaaggaagctgaaatcagaagacagatcattgcaccaggttaatatttttaccgtgtcccaatgcatagattcacatgccaatcagtgcagaactgcagattaacaatactggccttctacctttccttagcatatgcaatgtta

SEQ ID NO: 42739 - DNA, 500 bp, Zea Mays
cccggatgaagctggccagatgttgacgatgataaatcggcctcggattttggggttttttcctctgtagtctccaccgctctcagttgcttgttcacggtggaatagagaagggaacgcagatgagtggtgagggagatgcactttttcccctcccgaaatttcctcgtgcgatcgaaggtggtgctcgtgcggttgccctctcgattttgtggtcgctgatggcggtcgcggtggtgtgcatccatggagatgggagcgggagtgatgatgggtggcacgagtctgggcggttgcattttggtagcctcgtggtcggatcgtgatttgcgctggcagtttcgtttctgattttgttcaatgtatgattttgaggagctgtggatttgggtttcgagcgattggaatttggaaacgagttgtgcttggggaaattcgacttcgggaagtggtctggaacagcatagaatcgtggtgatttgggcgtggtctggaggaga

SEQ ID NO: 42740 - DNA, 341 bp, Zea Mays
gaaaagggagtgcggggaaaggctcgccgccacagataaacgacggtgctcgtcgtcgaccttgttccataggccggtccgagtcactggtggcgcatgggcggactgcgtggtgtaatttcgtccccaaggttcgccgcacagccatcaccgacctccgcgggagcagcggaccgccctcaccgtgtaacctcacccttgcggtcaccttcaccttgggtaagtcacccaagtcatcttccacacctacgggatggattacaactcaccagattagaaattgcggggccgggtcgtgaactaattcctcgtcagagttcgatttcgctgaccaatccttc

SEQ ID NO: 42741 - DNA, 1125 bp, Zea Mays
ccctctctcctcttcccttcttagactcattctccagccgccgccgctctctcatttctctctcacaccttcacacttctctccaaactctctcgagagctcactcttttggaagagtggttggagatccgttcttcccggcgtgtttccaccatcttcctccatctcgttgggagttcttgacccaatcttcggatcgaggtattgtcctatgttatttccttgtactcgatcctacgcatttttgattatctattgtatcgttcgttgggtacactttagtttaagtgattgctacacttagactatcttcatttgtcacaaacattgttagagattagcgattcgatattgttcgttgcagttgaaccactcatattaacggttgaagtgcatggtcaatatcttatgcgttccttctcaaacatgtttgatccttgctcataataggttctatttcttatttcttagaatggtgcgtcgaaggaacccgtcggtggtcgaatccgactcatcggatgaccaggaaatccacggagatactccacctcgctctcgatccaagcgagggcgcggaagcggcaatgtcatgccgggtgctgaggcctccgggtctcaaagtgctcgcggtcggacttcccggaatccttccggtcggtctcgacctgcgacaaatccgcaggcgtgggagcctgcaagtgatgatgatggtgggaaggacgatgaagttgatcttcccccggcccacgctcctgtgattcgcggcttggtcctccaccgtgcagaggctcggcgtgctggcaatgagccagtcactgacttcactgccagtggagggtctgctcttctccaggatcttcgtttccaaaatcctgtattgcgtattcgtgatgccaggatcgatggaaatcgcttttggactcttcaccacgtggatttctataattccgtcattctacccaagaagcatcaacccatcctacatcaacggtatattaactgggaaggttgtgaagcgattggggaccctgaaatgtcacaggcactgagggcctgtgaaaggaaacaaatgaaaaatatcatgacattccaatatgattggaatgatgaagtgattgctcaatt

SEQ ID NO: 42742 - DNA, 687 bp, Zea Mays
atttcgttttccattcatcacctagtttcattctaatctgatggtaaccgctacacaaatcaaccttagataaaataacagcaccactaagctcatctagcatatcatcaaggtgtggtataggatatcgataatgaactgtgatgttattaatagcacgacaatctacgcacatacactatgatccatctttctttggaacgagtaaaacaggaaccgagcaagggataagagactcatgaatgtatcctttatcaagcagtgtctacacctggcgctgtatctccttcgtctcatctagatttgtacggtacgggacgcgattcgaaagagaagtgccgaggacgagatcgatccgatgctcgatgccacagagcggtggaagacccagtggtaagtccgtgggaaagacatcaacatactcctgcagaaggttaacaacagcagggggtatatccaaagacggtgcatcatcaagcggaacaagcatacacaagcatagaagtgcataacagggcatatgagcctcatgtaaatcatcaaaatcagcacatgtagtaagtaaaacaggagcattcaactttatttcagatttaacaggtgcggctgatggagatttgacttgttgtgcaattttagcagccctactaagatatctttcaaaatttggtcaggggtcatcggatg

SEQ ID NO: 42743 - DNA, 478 bp, Zea Mays
agatgaagtcgcatttaatcggtgtacatcctagtctttgggagattgttaatataggtatgaataagcccgcctaaggagaagatatgacatcgaaaataatacaagaagtgcatcgcaatgctcaagctgtgagcataataaaaggaagcctatgtccggaagagtaccagaaagtccaaggaaggtaagatgctcgtgacatttggaatatactaaaattgtcacatgaaggagataccaaagctaagagacacataattgaggctttggagagtgagcttgcaagatacgattggactaagggtgagtctctccaatcactctttgaccgattgatggtgttggtcaacaaaataagagtgctaggaagtgaagattggagtgactctaaggtcactaggctattcatgagagcctacaaaaagaaaaggacaagagtctagcaaggatgataagagagtgtgatgattatgag

SEQ ID NO: 42744 - DNA, 361 bp, Zea Mays
cacatacaaatgattgtagatatcgtaaaaatggtgatctttcaattgcttgtccaccatcgatccttcaattgcttaagggtaaagtggcaaagagcttctatggtgaagttgtaggtgctcgctatttggccccagaatgctgatcgcttcttaccattgccatcaatagggtcaatcgagtgcaatagtcgcatatgaacttggaaaactattgtgggcctgatatgtggacttttgggtgtttggttccctggctaaagttccgtcgaagaagcccccacccccactggcaggtgtatcaagaagttgggaagatggattattgatcaagaaaatatcgatcgaagaacggtctaac

SEQ ID NO: 42745 - DNA, 633 bp, Zea Mays
aaaagatctccatggtctatggattgattcaaacccagagagaagtgccagaacaaacctcaactcaagaactcaaaggttcttccaaaatccaaagagtgaagggatgagaggagaggaagaactcaatcaagtgcaagctcaaatcagattcgatttgaactttaaaagcaccatgcaccatgttgggttatggccacacttcctcacaaaatcacaagagcatagatgcagaggtaaaaacttctacggatctcctagcttactataatgaaaaaggtttaacctagggtaatggaaacaagagtgctctaatcactagccaaagatatggttgcacacaacatccctctcacctatttataggggttatttcactagactatactacatctatatacatagagctcatccatttaaccggggggaaaatggaccaactcctggaatatgcatctaacagccacacgcttttcacgaagttgttgcgcctcaatgcacccttcacaatacacgaagtgcctttagcaatgtctcaagagtaaagaccatcacgcatttacaaatgtacatttcacatatttgtggcattttcaaaaatgcctcaaagaaatgtggctatgccgttggcat

SEQ ID NO: 42746 - DNA, 693 bp, Zea Mays
ggaaagatgcgcatcattatattaagaagaaataagatggtccaaaatggacccacatacaagaattcccttctaaggaggtctaaagcaaagatataggaaactatccatgaacttagtaggaacaaatacatctggtgccggtatcgtaagccaccgaagattggagtagggatattcgacccgaactaatataactcttgtgtccgcctcgcataccatccaggcctaaagcgtatcacaaatttacttggcgatgcttactcgaaacaacgacacttgtctattagatccaccattaatgactgagtgtaattccacctggggacaacacgtccaattgtgtgaaaacatagggattctttagaaaatagtttgagaagacgtgggattgcacttggccatagatggtggatcttatggacaagttttaatgttagcatgttagaccctaatcgtttttacactagatatgttgctgttagagaatctgctacatatggaagggcctgagcctggcaatcctgtgccggccggccactgtaattatagatagagggaattagggagaggagtccgcatctgattgatcctgtgtattattagcttcctagacatagggctttccttttacctctcttcctcctctcctatatatgtacacagtctgtccctcattctatacaacaatca

SEQ ID NO: 42747 - DNA, 706 bp, Zea Mays
ttggggattttgaaaagttcaaaaggcaaaacttccttactatgctttgttagttaattagtgaactaaaactttgtaatttggttttctccaaaatttgtatttttctcccaagggttttctcccatttaccctttatgcttaaatggttcatttaggattaattagggtttgagagttttccttccttaggattcatgacaagattaaggagggtttaagaagactcaacataaatctttgttctcattttaaatgttttattccttcattgagattgcatgtgataataggttggggttagcctaaggaagaaccctaagtgacactggcgtgtcacatgtatctcttaaaaacaaaagattaagcatttaattattataagacctacaaagctgaacttgagaaccaacttgagaggaaaataaaacggttaaggtccgaccgaggtggagaatatttctctaatgttttcgatgagttctacatggaacatggtattattcatgagaggacaccgccattctcaccacaatacaatgggattgctgaaaggaaaaaccacactctaacagatttggtgaatgccatgttgagtacagcgggattatccaaggcatggtggggtgaggcgattttgacagcgtgtcatgtcctgaacagagttccaacaaagaacaaagaaatcacaccatttgatgaatgg

SEQ ID NO: 42748 - DNA, 1090 bp, Zea Mays
tctgggtttgcttcaatgcccggtacgaaaccaggaaccccagtaacttcccagcggagacaccaaagacgcatttgtccgggttcagcttcgtgcgggttgcccgcagcttgtcgaagacgagggttaagtcttccactagggtcgaccctctcttagtcttgaccatgatgtcatcgacgtagacttccactttgtccctaattaggtccccgaaagtcttactcatcgtccgcacgaatgttggcaaggcgtttttcagaccgtaaggcatcacaacatagcagtaaagcccgtccattgttacaaaagcggtatgcttcctatcttctctcgacatctggatttgatggaaaccagagtaagcatttaagaatgacaataggtcgcacccggaggtagaatccacgatttgatctatacgtggaagtggatacgggtccttgggacaggccttattcaggctggtgtagtcgatgcacatccgaagcttcccattcgccttggggacgatgactgggttggccagccacactgggtgatgaacctcttcgatgaagccaacgtctagcagcttccagacctcctttcggatgaagtactgctgttcaacggattgcctgtgagatttctggctcaccggcctggcgtcggggttgatcttcagatggtgctcggtcgcctccctagggatcccaggcatctgcgacggctcccatgcgaacacatcggcatttgcctggaggaaggcgacgagcgtgagttcctatttttcactcagatctcccgcaatgcgagtagtctgggtggaatccgcagtaagctggatggctttaacggggatgccgtctgccccggatggttgcaccttcggcaccttagggagtgccttggtgccgggggttgaggggttcccccctccgtcgttcgagcgagcaatctctgccgccagggcgtgcagcttctctacggccgcaagcacggcggcacggtcgccccgcacggtgaggaccccggttggagacggcatcttgaggaccaaatacccgtaatgggcaatggccatgaaccggtatagggccggcctgac

SEQ ID NO: 42749 - DNA, 642 bp, Zea Mays
gtcgaaggagcattagtcgtaaggggttttagccatttgattttaaagtgaagcgttactagggttttttcgctttttcgaagaggcgttaatagtcgtaataattttgtctcttgctgtcggaggagcatgagtaaccataaaggattttagtcatttgattttaatgtgaagcattactaggatttttcgctttttcgaagaggcgttaatagtcgttagaattttgtcgtttgctgtcggaggagcatcagtaaccataaaggtttttagtcatttgattttaatgtggagcgttactagggttttttttcgctttttcgaagaggcgttaatagccgtaaggattttgtcgcttgctatcggaggagcatttagtaaccataaagggttttagtcgtttgattttaatgtgaagcgttactagggttttttcgctttttcaaagaggcgttaatagccataagaatgttgtcgcttgttgtcggaggagcatcaataaccataaaggttttaatgtgaagcgttactagtgtttttttgcttttttgaagaggcattaatagtcgtaagagttttgtcgcttgttgtcggaggagcatcagtaaccataaatggtttgtcgtttgattttaaagtgaa

SEQ ID NO: 42750 - DNA, 963 bp, Zea Mays
atagaaagcacaattcttgtgatttgcctcccttcttcagtgttgggaaacttagttaggtgccactcatcactgacaaatatactctttagaccattcctatgcctaagcatgctcgccaatgtcagaaatgaggtagcaaatcgaatcacacctggcctaacaagatcaccacctagcttctctcaaattaggatgtgaattctaccatgcttatagatgaacctcgacactttcttagccatattgatgcagctattgaagtccttgatctttccaatgtcctctatagcaaatccaagcaatgggcagcataaggtgtccaaaacaaatggggatcctatccatcaagattctccctgcagcttcaaaattggctccattgtctgtgacaacttgcaccacatgctctcttccaatcttgtcaatttgcttctccaacaaatcagccaacatgttagcattagctacctcacttgaagcatcaacagaagctaaaaattaggtccctgccggactgtttactagaaaattgatcaagtgacggtgtgctatgtcggtccacccatcagacataagcatgcaaccatattccctccaagacgcttcatgattcacctcaactcggatgtcctcttaacagccctatcaagccaaggcaccctagcttcatggtatgatggaccacgatatctaggaccatattgcccaatagactccaacataatcttccaacttcttgacttgacaacatccaatggtatcttattttcataaagaaagttagctacatggtcgtcaactatttgtttagcttcttttcccctttttgtgcagtgctctagagtggattgagacgttttggatttgtgcctctctgcaactacctcttctggtgtcttgcagagcatggaagcaatcgactttgaaggcttctgagtaattggttttgttgctgcagaa

SEQ ID NO: 42751 - DNA, 654 bp, Zea Mays
gtagtttctgttaggaatgcaacttagatctattgttatgtgaagggctggatataaagatgtacaaagtgcagatactgccctatgctagtgactaaaagggtctgtttgcttcctaccctggaaagcacatttggctaggcagcaactcaaggcgtttgattgggtcggatctgcttgcctagctgcgactactaggcaagggtgcaaaccaaacatgccctgagagcatctctagtcattccccaatacaaatccccaataaagtggtaatgactactgtaatagtctcctatatgtacaaagtgtaggaggtcaagcacggacaacatatctggtccgctctggtttgctgagttggaacccaagtaggaggtcgagcatgaacaacgatatctggttcttgagcatgatcatgccgatgtgcacaatgtgcatggccccgcatatggtgaagatggggttgtgccatgattacccctagtcgtcgatgaagcccttccccaccatctagggtgccacagaatagctctggcatgaaggtaccatccaacacaagatactcgtacgagatactctgcttggtcattgctccccactatggtagcttgacccccgcagcatgagcgcaactgatcatccagcacacacacg

SEQ ID NO: 42752 - DNA, 462 bp, Zea Mays
ctaatctaacacgatataatctaatgtgagtactcaacaagttagtaacactggtacaattcgattagaccatatttctataaacatgtgttaacctaaatgggtgccccaaactaacttgaccatatacaactacccgactatatgcaactaccttacccatcatatggttgcataacccctctgtatcaacctaacaacaaaacagacattctaaccaacctacctcgtgaaatctatcctacccacaattagcttaaccacatgtctctaactcggatgatcacaacaagaccaaaggaaagaaggtcaaccttgacaaggaagaatgtgaatagaatcagaacttcagatgaatcaagatccaccatccaagatgaagtctttccatgccttaatccttcttaccccaaccttatctactgttgcctaataactaaacataatgtacccatgtttccc

SEQ ID NO: 42753 - DNA, 603 bp, Zea Mays
gtttcaggcgtcgtgcgaatgcacatagatttgttttttcttgtatatcatctaacaatcagataatataagtgtgcttcttttcctcgctcttaacgtcgtatattaactctcaacttctcatcttttaccccatctatgcatcccccacctagattcttctgcaccaccatagataacgagcaatctatcctactggcctccgattcgccaggtgtcatcacacctcacccacagcgcctcctttaccttcctccattgctaagcgcctcaaaccactaccacgactctccgtcgtcatacgtctttgcaggtagcgtggatggacagccgagggagaggaggaggcgcttcggatcccgagtttagttttgtattggttgatgtcaaagaacttatgagttattaaggtcgacgataataaatgtattgctcgttttcatgtaatcgttgtgccctaatgatttatggaatatttatgtgttgtgcaagtgaagcgtgtagatttattttccttctcgtctaataaccaaataagataagagcatctccaacagtgccttaaaccagtgctctatcttgaaatatagggctcaactcata

SEQ ID NO: 42754 - DNA, 597 bp, Zea Mays
gacttataaatatagaggaagtgatgactactttggcatgtcaccacctctctaattaagccaagacaatttctacctataacgaccaaacattcatgtcgagcacactctattttaccatgtctcgcatacaaccatattgtggcgtgcactcgagacacttcagttcaacttaacgcaatcactactacaacacatttcgacatacacgtttgacaacatcgtgctcagacaaacccacacttccaatctacttatcacatccaaccacaccacgtgcccactgcattctcatgaccaaattttagcacaattatttatgacaacgtttatcgactagacaagtgaaacactaaccgatcatttgcacacctcgtctttaaaacactaatcacatgtcacataatttatatttccgacccacactatcctacaccacgatgaatacataaaatatatttaacatagactaaccccttagccgactgcggaaattaccaagcatgttttacgctttattaaatttaccacaactaacacactactttacgacgaagtgttttaacaaccaattaatacttccgcgaaccaccctcg

SEQ ID NO: 42755 - DNA, 563 bp, Zea Mays
tggtcgggtcccgagggcggagaaggtctccgagcccgagggcgaattggttgtttttgaggcgtttttcatcgccagacttcacctgccggcgcatcgttttgtgtcagaagttttgcagaagttcgaagtccaggttcatcagttgacaccaaacgccgtggtggcgttggcgaagtatgtctgggcaacaacgtcatatggcagccagccttcggtggaggtcttcgccaagcaatactgtctgcactggtagaagagaaaaataggacagaagattgcacaatttggatcgtgcactttcacaccgaagtccgggaagacttcgatggaagttgtggagctggtcccctgtgcccggaacaagtggggcaactggtgggactactggttttatgtttcggaggctgaagtcgaagatcacccagggctccctgccgccattatgtgttcacattattatttggcgtacccgtcgtttgaagtggcggaggatgatgaaaatgagagtgcccttcagattgctgcccgctcgagtagtgggcgcgatctggttgaggaat

SEQ ID NO: 42756 - DNA, 493 bp, Zea Mays
ggaagagtagcttgtgaatttgaagtgtttcaatggttttttggacatgccaaagtgttggtgttttaccactacctgtcatgttgggtcatattacgatggtccgtacagggtgacctacgtctagtgtactatgatgtggttgtgttgattatgtgttctatgatgatgagcactagggttgtagagacaggtgtctggggaccaatcaatgcaagggctcccgatatttccttatatggtttgaggattatggcatgtcctaatcaatttatggattagtttcctaattgattacaacaaggaccctaattgatcgaggattgtaactaactatgtattgatctctaatcatgtctttggatcaagggatcatgtggattatgaaggattggacccaaatttggcagtgtttggtttgtggttcaattgggttggggtttgtccccatagggaatataccatgtagatgtgggttagatcaatttctcaa

SEQ ID NO: 42757 - DNA, 557 bp, Zea Mays
gactttgttttgtgtagccaattcatccctaggatgacatctaacccttgagtacccattactactaggttagtgggaagtctatccccattatttcaatccttagattcggacaaatcctatcggactgatcttttcccccaactgaattaactcttaaaggtggaatcattggttctatggggatgttatgtgcttctacccaagatgtagaaacaaaataatgtgtggcaccagtgtcaaataatacttttattagatgggattcgactggaaacatacctactatcacgtcctgagcatcctagattgcttcagcctccaggtggttcacctttccacggttgtaagcctgaccacggcctcctggtgcttgctgtggcactccttgtcttgctgagtattgacgtttggttactgctgagttgccttcttcggacagtgcttcgcccagtggttttgttccccacaatagaagcatgcgcgacctcctacttgagatggagctgcttgattgttcttgttggttgctggggcaggaaggtgagttgcctggt

SEQ ID NO: 42758 - DNA, 365 bp, Zea Mays
gagaaagtccctttcccgaagcatggcggatgatgtaatcaatgctctcttttaaagctttgggagcaggagtggcaaccttttcaaacgaaatttgctctgcggccttttcttctgttgcattttcttcaaattccgcaagcttcgactcagcaggcactgagggccccgcctcggtttcagcctgggttgttgtagcttcaacatctatttgcctagtatcaactttgggttgcgttttgtcagcttcagcaaccttccctttgggagtgagacttatggagtcggttgtttccagtacatctaatacatttaccatcctccttctcctaggagttatggcagaactcttttgtgccctcagc

SEQ ID NO: 42759 - DNA, 698 bp, Zea Mays
ggagaatctgttggaatgaaatgttatatatagagtttaatctttatgaagagacaaatactgagttaaatagagagtcaaaagtaaataatctcttggagatgctcttacgtgatctatactaccaccactagtatgcactgtgtctgtgtgtagcgcggcgccaacgatgtggcctctagataaagcaagatccaatcgagttaatgactgcatcgatctctctcattaactttctcatgtctctatcgttttgaaattcaggagcacgcattgaaggaaatgtgctctctcggatgcttgctttggatggtgtttcatgtgaagttgcttgccttgtacgtactccctcccccattcataaatagtgttggagccaaggttgaacctagattttactcatactccaatccgactacgattaaccatatattaatcttgtctacgaatccaaggctccaacgtgatatgtataattaagtctcggaggtagagaaatagcatatatataattcaccttagatttttgttgacttctagtcaactgattctgtcatgaaccggccaaacatgcgttgagcattatttatattccattctaaattgtaaatcgtttactagactttttcgatatattttatagcgcacacattagagtaatttatgatttaaaaagtaggaagtgcattccttgcata

SEQ ID NO: 42760 - DNA, 906 bp, Zea Mays
cgcttcccttattcaatcgggatgcagtgctgcagtaccatagtgaagcttcttttatacaactctccctctatgatcatgaacaacttgacgtgtcatgtgagtcgcttggccttggttttgtccaccgaaagtgtgtcacattcgaggtaatccaggtacgttatcctccaatcatctaggaggtcatgcatattggtcgggtcgttgttaacttctagaacttttgtattacgtgtgctcgagggtcaggcaactttagggcctccttcgattttagtgtcgggagaggtcgagcgtctaggagtcgggtcatcatttatcaatcaatggtttcattaggtcgctggcaaagatcccgatcaggataggatccctacatgacgccatcttctctaaagcatctattgcctcactgaagtgcattgggatatggtttaattcaagaccgtcaaatttatcctcgatcttgcacacttctttgcaatatgtctccatttttagtaaaggcaattgagttcctttatgacctgaaccactacaagttgagaatcacctcgaatatctagccgctaaatctcgagctcactggcgatttgtagtctgttaacaagcgcatacctcatacataccccgagcggggagacaaaaactagattgaccctaatgccctgcttcatcaccgacccatcaaagaacatcatccaatactcctgcttcattagcagttgtgtgatgttgcaacatcaagccatgatcaaaaaaagcgtgctgacagagaggctctaagagaattctagtcaagtgattcatggccttgtgcaaccttaggcttcagatttaatcgctagtccttcaagaaaagtttaagaagaaatcagtatagtcatgttaacttttttaatg

SEQ ID NO: 42761 - DNA, 820 bp, Zea Mays
aagttagagatggtttgttaggctacaactttgatatagtgagatgatcgagtcactgcatgaattttggaacaactctccctgccattcgctctgtcaggctgactgaacaagttcttgatggtacagtaagcaaaaagatatgttggttcagtgaacttgtcgccagcgacccccgcatctggatttgcgccgccaaggtgattcgtgctcactggtgtccggataacgcctcggggtggaaagatcttcaccgctattgagcttaaggcattgttccgccccgaccgccgtgtccgcttggcccacggccgagttcagataagttcaccgaagttagtcgtcttccgctcggatgacacgtgcctagacgcagtactttgtcgtagtgcctcgctctagcacatctggtcatcgccggtgagcccgccactgtaaatgccaccaatcgcttgcgccagagcacctcctctccggccgccgctcgtctttccccgaattagtcaccaccgcgcaaggatcctataaattgagcacaccctcgactctgctaggtattcaagcaaccagcacacccactcgtgcctccaattgttcacctaagcccccgaattgctcacttccaccaaatcgggtttccgccactgtaaaaaggtcctcgccgtggctagcttgtttcaggtccgatcttatcctctgctctcttgtttcagcacccttacatgcccctgatgctcctcgactcgtttgattaagctagactgccctagattgccggaaacacttctgctcattcgttgttcgtactgtccccgtggat

SEQ ID NO: 42762 - DNA, 611 bp, Zea Mays
gccattcggatgatgatctccgaggtacagaggcctactcagagcattattctatcactgagcgggacactgccgaggaagacatgtaggatgctgcacggcgtgcacttttgtagtattgtttgttgttctaagctcgcgtgggttcctgtcctcctaatatgtcaaactaacccgtcaactctgagtggtagaggaaacggtggatgcaagtaaagggggcactccgtagggagttgcatttggatcgggagctggctctaattccttgggatcctcctctccctcgcttcctgcctcatttgcctccatgtcatggtggtgcatctccaggtggtcattagcttcctcaagttcctcctgcacatcatggagctagatctctaggatatcgatggtgttatcccggatctccaccttctgctttagagtcatgatgcactggctcaactgttccacctgtaggtctttttccaccaattccgaagacaagtcgaccatgaagtcctcttgactgtcgagagtgatcttagtagtttgagctagatcggtaaggtgtgccatggcgttgctctacagggcctgtaggcggtacagtgcactcatacact

SEQ ID NO: 42763 - DNA, 814 bp, Zea Mays
agaagatcttgtatgtacttggattgtgacagataaaaaccttttggaatctgttgtacttcaatgcccaagaaatagctcagaggtcccaaatcagacatctgaaattccttactaaaatgcttcttgacacgagaaatatgctctgaatcatcacctgtaatcaacatatcatccacatataatacaagtaaggtacgtacttttggaggatgtgaataaataatgcaggatcatgatcactaggagaaaagctagcagccgtgatgacagaaataaatctctcaaaccaagcacgagaaacttgtttcagaccatataaggcgcggcagagccgacaaacatgccctgggggagcatcaaacctaggaggaggatgcatataaacttcttcatgtaaatcaccattaagaaaagcatttttgacatccatctgagacatagtccaagaatatgaggctgcaactgcaatcaaggtacggacaatagtcatatgtgcaactggcgcaaaggtctcatcataatcaagtccttgagtctgttgaaaaaccacgagccacaagacgagctttatatctctcaatggaaccatcagattttgtcttaactttggagacccatttacatatgatgggaacaacatgcgagggtaaaggaactatatcctaagtacctgtgtgttcaagagcagacaaatcgttgatcatagcaagctgccactcaggaatcccagaagcctcctgataagtggatggttcaacaattgccacaccagctcgcggaaaaccatagcgatctggaggttcaatggtcc

SEQ ID NO: 42764 - DNA, 722 bp, Zea Mays
caaatcctaagccactacactagagcgccaacaagctctctcactaaataagcgacctgatctgagttcttctgctgatttctgaagatcctgttgtttctttctaaccataagctccaccaaaagtagatcataagcccatcaaattttttcctagattgcctattacaaagacctcttagattcctccaccaatcatataacgactctgttgtctggtttcctcccagaaaagaacagtttccccatatcaatatttggctccacacctctctactgaaagggcaatctttgcataaatgggttaccgtctctaatgctgagttacaaagacagcaaactgggttgcattgccaatgtcttttctgaagattatcagcagtcaacactttattatgcaaaagagtccacgcaaaaaaacgacacttaggttcagtttttgctttccaaatggggtcaattttcattgtgcaataatttgctgtaaattggatcttataagcgttgcttgcactgtactcaccatcatctgtccatctccaagaaatggagtcttctaaatcgttgagctcgtgtgtactattgatggcctgccaaaggccgagcaattccttgaattcttctgcaccatcatagggagagcataattggatccaacggttgtttctcaaggcctggaaagttgaaatgttcttcctttttgctttgttgaaaagagttgc

SEQ ID NO: 42765 - DNA, 1545 bp, Zea Mays
tatgtccttttgggagtaatgaaacatcttccatgtagtaccacccaattccggaccatatggattggaatctaaaatgtgaatgcaccggaactgaatattgatgacatacaatgttcaatggcccatatgaagtatagggaccatgatctgtcaaatatcataagttagagatatgaaatgataccattagtgtgtaggtgagtgatgaatataattgcataacagaaaaaaccttgatacaaagataaagatttatactgatttgtagtcaacaaagttgtccagctggggcagtgtcttgtccaagtaagcatcaaggacagtttgataaaaaatctgaggagacttgctgtagcgttcatgctcctcaaaattgaggagagtctgcataatcataattactgtgtcatataaaactgtatgtaaattattgcaaaattaggtaggtattaattaatttacatacaccaacattgacatccagtacaagtctgttttgttgatggacgggcaatgatttagatcttcatcgcgaaaacactgaatgaaacactgcatgaaaagattatccagacacatcccgtctgcaaatgattgttgaatatcgagacaatttccaatacattcaccaaattctatgaccttcctatataataatgtaaaaacagatatgttagtcattatatatgtctgcaacatcatacatgttatttgctcttaatagttaaagactaaaacctgtttgggtcgatttttgaggagcacaaaaaatcacggagcgaccgagcacagtcaaacactgttaaacgtggcagtgagtgcacatgtgtagtgtgcaagctatgtgtttcctcaccagatgcaacctgaaacacaatgcaggtagagagtatagtaatttatgaatgagttatgtgaagcatgaaggtcataaatgtataattggagtacttacatgaccactaggtgtctgatcaaaaagggggcccgtgtaagttggagtgtcatgagatgcatcaatgtcacctccctgccccaaaaaatcaatgatactatgtttaaaccctcagtcatgtgtcaattaaatttaatcgataattgagattacaatggacaaaacaaagatgaaacatatacatgtttttgcggtgtgacgtcaaacatcggcaagtggggagacggatatgagctcataatgttgcagtctggtatatgttgatgtgggatgtttatgtccctcggcatattaatgccaacattaaaatggtaatcctgttgacattattatggttttgtctaatatttggatgcaaattggaaattaacatataatgtaaccatgatgagattgtatataatacctgcttttccgcgtttgagtttgtgtttgtctccatgggcgcagtaacgtccaaatcgtcagggcagccctcaaatgcacgacacatttgttgttgcttttcatgtatttcctcaaactgggtgcctgtcaactccgtagtcggttgcgaagatggcataatcaggtccggagtattttgg

SEQ ID NO: 42766 - DNA, 325 bp, Zea Mays
tcgacatagtcggagtctgtaataatgcttaattcagtgtcttagtcttagtcagtcttagttagagttagtttgcttatcatgtttcttctatgtctgtcgtgatgaacttgtaatgaagttgaatctttgaaatgattgtcactaaggtctgggcatccccagcaacttggtgtagttattaataaagttagttatttagttggacaacccatttatttccactttcctctttatctgagaagctgtgttgggagttagtgaagatgatcaattgttcagtattatgaagatttccatatatcttttctcacgctcaaagact

SEQ ID NO: 42767 - DNA, 517 bp, Zea Mays
ctggcgtggacaggaggagcgcatggacctgcagagggacgacacggagggggcgaggagggagcgaggagcgaggagacaacgttagagcacaaaatagtgtcgtatagatcacttactacaactttttatgcgttctatgacgaatatacaatgacactaagcaaatttgtcataaattagttctgattatgacgttttctatgagatgacctgatctagtgacaaaaaaattcttgcgtcattaaaatccattaaaatcgtcattgtttgaaatggatgcaactttgtgacgatatgttacgacaatatacgttggtcatatgagtaaatcatcataactcccttttttactgagagctctgggaccctaacaatattaggcgactttggtattttgttatagttttataaattatttaatatgaaaaatagttctccccacattctaaaatataattcattttcgatcatcataactcccttttttactttgagctccgggaccctgacaata

SEQ ID NO: 42768 - DNA, 352 bp, Zea Mays
gcacgtcggcttcagacacagtagacttctcaaaatctaggtggctgggttttgatgggatcaaaatgctataatcatcctcttcttcatcagcattttcttcctcaatatcagcctattcagcttcggcagcaggtgtatcttcgtcaatggttccctctgtcacaactaaacccgactgtctcatgacttcggaaacgggagctgtcttggtggcctcggtctcctctccttcacgagtcacccttgcagtcgagcgtactctagccatatgatggattttttgcggtttttacgaagttgatgtctttcacagttttgacaaagttctcttttttgacgaagctaactc

SEQ ID NO: 42769 - DNA, 436 bp, Zea Mays
gcctgctcttcacccctctcggtgagcagcccctttctccctcggtcttcctccctctctgttctgttgtgcagaggctcccctctccacccttttgtgcccaattacaatttctatcaaatcctatgaatccaagtgcatgattgaatccctttatgttccttgagcattcctgcaggttcttagctccttcgggagggttttcacacctcaaatggccatttctccgaaaccctaattcctcgccctccacgtgttcggtaaaatgcccaaaccagccaaaaatgctccaattgaacccaaatttttcaggcaccttcacaacacctccagtaacatattcgccaaatttcacgccaatccgagattccaggcttaaatttcaccaaattctccgtttcgagcgatcgtttccgagccgagtgcccaaatctct

SEQ ID NO: 42770 - DNA, 625 bp, Zea Mays
cacggatcttgagccacgcctaatcgcttggcgaaaaggataactccctgtgaccgcggttgtaagtgcgtttggcgactgcctgagcttgcacgagtcgtgcgcgcacattctccaggaattcttcacgctcctttactgtttggatcatggctggtacccgacatttgccaagatcgtactcctggattgctggcgggtcgcgaccatagatgacgcggaaaggagtgtccttgagggtggagtggaaggacgtgttgtagacgaactctacccaaaaggtagccaccggagccactagcgagggcgaccccctatcaaacaccgaagatacataccaattgctttgttgacggtctccttctgttcgtccgattgggggtggaacgccgagctcatactaagcttcacacccaacatcttgaagagtgtcgtctagaatgtggacatgactcatgagtatcggatctcgatctgagatgatagaggtcaacaacccgtgtagtcgtatgatgtcagagaagaaggctgctgccacggtctctgccgagtaggggtgtcgtagcacgatgaagtgtgcggacttggataatcgatctactactgagactatgatcgacttgcc

SEQ ID NO: 42771 - DNA, 723 bp, Zea Mays
tcccggcaacccatggcagtctagttcaattggacgattcggtgagcatcaagggcatgggaggatgttggaacaatagcaaagagggcgagatcggacctaagttgagctggccgcgacgagcttgatcttcgtggtggcagagaccagtttgggggaagtttgaaattccagagctcaggtgaatgattaagggtgggagcgggtgctatggcttcgggattatacagcgcaacagccccggccatcaatttataggaggcttaggcggtggcgcgtaatttggctgagcagtgctggcggccggagatagagaagaaccttggctcagtggattggtgtcctcagccgtggcgaactcaccggcgatgattagacgggtataaagagtcacggtgccgcgacggaggtgttcagatacatggcgcaaggccgtgcgacggcagtcaccggcgttcttatcggtttccaccgcggtgaacatggtacggcggccggaattgtttatcggccggagtttatccccgacgacgtacaccgggtgttatccactcaccccgagcacaaattggaccgacggtggcacgaatcgcggcggaaatcgatcgtcggcggtgaagctgctgcgctggcggtctgatccctttggtctactgtaccatcgcgagctgccattagtgcacctgacagtgcaacttcagggcaatctttctctcatatttc

SEQ ID NO: 42772 - DNA, 539 bp, Zea Mays
atttggcaccagagccttcggcgccaaagaaaaggaagttcatgccatctagccgcggagaagaagagagaccttctctgccgaagtattcagcagagaccccttcagcaacttccattggcgtgacagattgaacccctgcctttcacgatgctaagtcctctaggatcagagctaacaagcttattacatccacagaagaaaaatgttgagagaactgccgaaccagaggtaatcaaggatccttcggtgcctagcggggggaacgctcagaagaaacgtcgaatgatgaatgtgatgagagctatccttgataccccatctccggtggttcgagaaaaaattgtatccactgtggccgacgaaggtgcccaacaggctaaaaacagcggtggtcccctcgggacaaccttatcagaaatcgatagacttagtgataatgttgcacctgggagaaataccgagggggcaattgctgcggagacctcagcgtcgaaggaaaaaggaactgaaaaagcctcttcggaagacaaaagctt

SEQ ID NO: 42773 - DNA, 584 bp, Zea Mays
gccattggagcaatactactacaagaaggacatcctttagcttttgtgagtaaagccttgggtatcaagaacaagggtctctctacatatgaaaaagagtatatggtgatcatcctagcagtcactcagtggaggcaatatatgcaacactccgagttcctcatttatatggatcacaggagtttgtctcatctcacagaacaaaaactacatactccgtggcaacagaagatgtttgccaagctgttgggacttcaatactgagtggtttacaaaagaggggtggacaacagagcagctgatgcattgtcccgacgtcctactaccaatactaccttgtttggtatatcttctgtggtgccccagtggctgttgcaagttacggatagctacatacaggatcctcaagcctagcgattgttgactgagctgtcggttcattagtcggcttctggtccgtatacgcttcagtcaggtgtgcttcggtacaaaggtcgtgtgtgggtgggaactatttctactctgcagcaaactatttgtgttgtcctgcatgacagcccgatgggaggtcattcaagatttcc

SEQ ID NO: 42774 - DNA, 366 bp, Zea Mays
aaatactacatgatgtttggtttgtactggtgcagtctgatcgatccatgcctgctggcattggcacctggcagctcagttcagctggagctggtcattctctcgtgcatgcagatggatacgttgcagcttgcaggcagcgcgcgatcgtcagcttgctagctctagcgaggcacgtgagtaggatgctaggctatgacacatgggcccgtacaccatttaacggcgatatgtaactgcaatggcgttgaagggatggaaaatataaatcaatggctttaaaggaatggtataattttagatggcatttaagagattgatataagtttcgatggcattgaagggattttctcttttggaaactcc

SEQ ID NO: 42775 - DNA, 915 bp, Zea Mays
gccagtcaagcctgctcggacgccataagagcctgctgctgcgtaagagtctgaaggatagcagtcagagcaggatcaaccactggaggagcagcgggaacaacactggaacttccggcctcatgatcatttgagcggggaggtagaggcagaggtggaacctcaaagtcatcatcatcatcatcatcatcatggactgctgcgccctaagtctcgaactgatgaaaagtggtatcctcggcctgagtgtcaaacactggagcaggcgccagcacaggatcctctggagctggacggtaggactcaaagaggaggcgagaggcctcaagagtaccctagaactgtggtggccgaatcagctgagcgaagatgtgacatagatagtgagcatatggcagctgtcgccaggcacgtagaccatccagtaaggtgtcctcggtctcacaaatgaggaaatccacaacatcaaactcggagtgatagaccagggcaccaagtagccaaagctagatacgagtagcagccttcctgtaacccatccacggcagaagcgtctgtctcataagctgatataaaaacttggccgctgtggtgaagtctgccggagaacgtcgtgacccatctgagaagggtggtcggaacagagccgcgacgtgagctgtaccaggagcaactctgccgtgagggcgacgaggaggatcagaggtgccatagcacaagctgtgaagacgagtcgatgactcgttgaatccaaacaactggcgaatctggctggcatgaattgtaacatcctctcgctcaaagcggaatctcatctactggtgatcagggtctatccatactgaagcatagaaaactcggacccattcctcaacatatctgctgctggtagtcaatagagtgagaagtccaggc

SEQ ID NO: 42776 - DNA, 830 bp, Zea Mays
cctgagatataaaaaatccttattggaaccctggaaaaccctaaaactaaacccaagggggctaagtgtaaaatcagtgcacttttggactaaagtgcaaaaactagtaaagcaaggttttttaagttatgtggttcacaattatgaagatttgcaacttgaaccctgagttttggacttaattgcaaaagagccacatttgaactcttttgactaagtctgaatttcagtgtgatgtgctcatctttgtgaccttataactttcaaacaaaagggattttgccctaaggcaccacatcaactttgtagctctatgaaaggggaacaattttgcttaagagtgtaagcaaggttgttatggagaaattggagataattaagtttaaagtctagctgtcaggctgttaaagtctgaatttcagactgatagtgtaattacagagactttgggcacgaattcgagcttgatttagtaggaatttacccatagctactataacaaacttgtagctgaatccttggctataacttcgacacagagccttgggtatgttgtcacaaagaattaggagaaaatctgctctaaacttcgtctgtcaggcgctctgaagatccttcgccattgtactgtaccaggattggatcagagcaactgcgcatctcaccgccgacgacctccgccgtgattggtgccgccgccgttgcgatttacgccaccggtgacccgataaggatgccaggtaatagctattcgcctggagatgactccggtgactcaccgccgtaccccccttgctttgcgacctgagcagataagctcgccggtgaca

SEQ ID NO: 42777 - DNA, 449 bp, Zea Mays
cgcccatctgcatgaagttcctgtcccgcagcaccaacgtcaaggtcgacgctttcctccgcagctagctcctagcgagctacctctacctcctgatggagcaggagactcaagacctgctgcttgctgatctgacaccaccagcagcaagcaacacacagcacagtgctctgctgctgctctggctgctgttgcaatgttgcatgccctgccatctaccgagttgtactagaatcagatgctttcaatgtgtcacacactgctgccgcatagctgctgaagggcagcaagtacgagcagtgctgaatttggggcggtgaaacaagcagatggctaggcagctgactgcgcttctgagcagagagaagtcccttcttcaccttcctcttctgtagcctgtaactaggagaactgaattcggtgcttgcattgcactgcatgaattggat

SEQ ID NO: 42778 - DNA, 576 bp, Zea Mays
catggcactgagatccctccggggtcttgaggtttcggccgaactgctacaggctggggttagggtcatcgcccgcttgccggtgagtgtctccccatctacttttgttccgtttgggtacctcggatgtgggtccagcgctcaaggtgcgcctgacaccatggtgggcggtgggcgcgtcgtggctggtgtcaccatgccggatggcgacgggagtttgaagataggtttatagccgtcaatcccacaatgagcggtcacgattagatctagaaaacattaagccacgaccattcgatgctagttgaacgtttggaattggaactcgcataccccttcgcttaaaagatctgagccgtaggagcccgatccatcgatcaggattgtttactgattcttataaagcgtgggctaatcctggcggtccgttttggatcggacagctctgagtgaaggatacccgttcggcttggatttttgcataagagacctctggtttcctttaaaataacccgccatcccgttctgctgtgcaccgagtcttaggactttttgcaccgagcccctgcgtttctg

SEQ ID NO: 42779 - DNA, 397 bp, Zea Mays
ccaggagaaagatggttttcaggcctgatatggtgaaagaaatggaagagaaggttcaacgaattatacataatttgaaggaagcccaagctcgccaaaagagttatgcagacaaatgacgccaacccttgtactttcaagttgaagattatgtctacctgaaagtctcaccaatgaagggtgtatctcgtttcggggtaaaagggaagcttgcaccccggtacattggtccttttcctatccttgaaagatgtggattagtggcataccgactccagctacccgaaacattgtctgcagtgcacaatgtgttccatgtgtcccaattgaagaagtgtcttcgggttccagatcgaaccgttgaagtaacggatgttgccttagaaccagacttaac

SEQ ID NO: 42780 - DNA, 703 bp, Zea Mays
tggggtgccccccaagtagaatattgtggcatcccatatggatatggtggcatgccccacatttgattgggggtatacagcggtggtatgtatgcatattgatatggcacaggtgggtatggggtgttggcgtccatgtaggcacattaggtcttaattggacattatgacatgttgccctttctgattggtgagatggtccaatcggtcttacctactatcgctcctaggtaggtgagcgaggtcgctttgttgggcggtcacttgggccgaccttctttttcacatatttagataataattggtcaaagatcaggctagatttgaccagtcgactaactgcctcgaatgtgtttgttttccacgtacctatttttggtcgtcaaggcttgaaggtacgtggtcgtcggtgctcctgggcattgccggaccatccgctggaatgattcggactatccgaaggtgtctcaggtcgtccgcgtctacacgtcggaccgtccgcgatgcgccaaacaggggcccgcgcctggctactacctacgcctacccgcaacgttggaggtagttatggtaaccttcagagtttcccctccaacaggagtcctttccgccaccactttcctgcaaaagtttttggtattttcatcggcctctcgtgcatcgttgatgatgacctccttgcccttgcccttatcgatcgcgc

SEQ ID NO: 42781 - DNA, 327 bp, Zea Mays
acttggcacgccagactcattgccgccggaagcgactgcggattgtggatgtgtaccgcgtggctgagcggcggtaggacgccacccatgaagagctggacacgttgcacctcctccaatggaccggcgcgggtcagcagtgcttggaagcagttttggtactcctcaacggatcccgtgcgccggcactcgacgagctcgaagagtggcgcggagcggataggcggcccgaaacgcaggtggaggatatctttgaatcggctccatcgaggagtgccctcgtcctcctgcagctggatataccagagttgtgccacgtattcaaga

SEQ ID NO: 42782 - DNA, 339 bp, Zea Mays
ggggaagaaaccactctgacaccagaaaatgatgaggtggtacttttcaggagtttcttcagagcgggattgagatttcctttgagcgagatgattggggaagttttggaaaattacaaaatctatcttcattagctgactcctaacgctatcgttaggctcagcgtcttcatctgggcactccgaagccaaggaatagacccgaatgccgaagctttttgccgagtgcatgagcttcattatcagacgaaggccagagaagatgggcttcatgagaattttggttgctacaacttcacttaccacaaagatatgaagactcctgtggttagctatcgc

SEQ ID NO: 42783 - DNA, 561 bp, Zea Mays
tgcaatggtccttttatcttaaagaacaacaattgtaccaaacaatagtttttttttaaaaaaaatgatatcattcttctcttttgtgttctccgttacgagagaaccaagctatgacgtcgtagcagatttcatagccttctttgtttactagttacgttgtcagacaaaggtcatgagatcgacatataaaaacactgtcactactatcatatagtttaaataaaaggtgatgataaaagaagtgatgctttgccttatatatttctgtgctcctttaaaacatcagtttcgacggtcctacttatcatatgcgaagcatacatctattttctccttcctgatcgcttaacactttctcgcttctcacctacaattgcgtaacgcaccaagcatacatttgtttccttctccccgcttctcgactaacaaacctaacaaacatataacaacagtgtgattggataaaccttatttccgcttctcccctaacaaacaacacatgttaatgatgctgatatcagataagtcttatctcctcaagcaaataggtgatcgttc

SEQ ID NO: 42784 - DNA, 362 bp, Zea Mays
agttactggcgcaagcaattcgtggatgttaccgtggcaagaccaccggcgacgaatagacatgctaaggcgatgtactgcgatgtggtaaaagggtcatagcgtgtcgcgatcacagcggacaacgtatacctcaatgacagtcgcttgaccacgtcgccggcgcaagtggacgagtgacagcgcggccacagtgtcccgagctcatctgcgacgagatctttttaccgttgagcgtaatccatacatccgaggcacgaatcgcgatggctggcgtgaatccgggcgcacggcttaccggcggcaaggggagctgcacctcggatctgtgtcagttagtgtaccatcaatatgtcattcag

SEQ ID NO: 42785 - DNA, 311 bp, Zea Mays
gaagtcttggctagccagaattgtcttgagttctggcctgagtcccttcagtaaacgggccatcttcttgctctcggtactgacatcatctggcgcgtagcgggctaactccgtgaacttgtgcacatattcgctgacagatcttccgtcttgagtcaattctcggaactcatcctccttaagctgtaccagtccttagggcacatggtgctcccagaaagctgcttcaaattccgcctaggtagcatccctgatggtgacgttaaaggtgtcccaccaggctaaggccatcccagaaagttggtgggcag

SEQ ID NO: 42786 - DNA, 503 bp, Zea Mays
tcaagaccttcagacggtgcttcgggagcaggggatttggcttctttggccacacttttctccagagctacgccagtatctggagattcttcttcggccctctgctcggttgcggcgagcttcatctcagcgggcactgagggcccagcttcggtttctgtatgtgttgtagcagcttcgacaaccttcttcacaggagcaagagtcagcgctcttgttgtttccacaacggcgtctagcatgctagccattcttctcctcttgggagtggtggccggagcttttgcaaccttccgcttctactggttggctcagaatttctggcagatctgttgccttttctaattctggctttctggttgtctcatcttcggcttcgactggctcgactataggcaccttcggcactacagtcgattcttcagcactccgagcggcgggagcagccggtttcgcctcggcagcggaagatgtctcctcaccagatttcgacactgtggtcg

SEQ ID NO: 42787 - DNA, 367 bp, Zea Mays
cattttttgtggcggaaaaacgtattgtggttgagtgcatcaactttgagagtgaaatagggggaatgttcacccaatctctaagatttaaagaaagagactcctctacatgcggtagagaggagggtaaacacatagatcattgaagtagccttacatgagtgggttgtggaaatattcacaatcccaatcaatgtagatccactcttgtgtcattcgcccccctctcgttgaagacttagaagcaagcttcaccaccgcatccatcatagtttggtgtaacttgtggtagtttctacattggtagttgcttagtcagaaacgacttcacctagccctttgggcttaggtggtctctttgcaagag

SEQ ID NO: 42788 - DNA, 307 bp, Zea Mays
gcagatgcagagcctcacccggccggcccattcttctgccaccaaaccgcattgatgagcgccatgaatccgtctggtgctgcagagaacattgagaggaatagaaaaggtggtggtggaggaggagagggcactagggcagaggccttgacggagaatggctctagtgcaccgtttccgtttgggccgtgtatgagattgtacgtagaagatggcaagggatgtttcagtctcactggtagccatccatgcgtgtgcccgtttctcatgccctgcactgcacaactgtgcccgttgttctcatcat

SEQ ID NO: 42789 - DNA, 299 bp, Zea Mays
aaattctaccccgagtgactctaattccccaaccaaattcactaaccgggaccggagtacacctgctcacgacgacggtgaaaaccgagaagaaatgaaggtgttcagggcaatccagtatgatctagttcaatcaatcaagtctacaagcaataggagactctagagatgctagaccattcaacagaggggcatgaatcaacctgaggcaggctgaccatggtgagagactttcacgatggaatttcaactgatttgggggaatttcaaaatcggagcgctctggtggacaatctgag

SEQ ID NO: 42790 - DNA, 390 bp, Zea Mays
tgtctgaggcctccgccaccctagatgccttcgccaaacccatctttttagcctcaactcttctcttttttctcaccgccatagccacgaccttacctttagagaacccctcatccacaccaccatgtgtcgccatgccctttctcttgcgatcatcaatatccccagcatcaatagagccctcctcaggatacgggtcgtactgaagattgttcaactcaaagacacgattcagcctgacattcgaacctcgtatgtcccaacttttcagcatctccgtcttcgttgaatatttccttacaatttttaccacttctgcctccacctccctgacaaaatccatagcgtctcgacctcgtagctcaacggtgaaagcaggactcagcacca

SEQ ID NO: 42791 - DNA, 352 bp, Zea Mays
gtcgatcgttacatcttctctgatatggctttgtgttggtgagtctgtcgaggttggtggggtaacgtagctagggtggcttgttggcttggtgtctcatgtccttgatacggttgttgattctcctcttgtactacatgctcagctgaagctatacctgcattttctagtgtgttagctgatgcagcctattctatcacttgttcagctgaagcatcctgttctacagtctcgggctgatcagctggtgcagccttatctactgctggaggttgtggtatttgagctatatctctagcctattctaccacttgtttagctgatgcaacatgttctaatgtctcaggttgat

SEQ ID NO: 42792 - DNA, 447 bp, Zea Mays
gaacaagtcaggaagatgtatgtgctattttacatgtgagcaagtccaaattgttgagatctctaaaacaaggtattattaaaagcatgcaaatagtatcaagttgcacttaaccgaagcaaacaagcaagctaggctgcagtggtgtgttaatatgcttgagcctaaaagcataccaaatatccaagatttaaggcattatttgacactatcttcattgatgagaaatggttcttccttactagaaaatcaaagcgatactaccttcttctagatgaagatgagccactgataacatgccggaataagaataactgtcctaaatgatgttcttatgtgctcgaccaaggtttgatgggaatggggtatgcatttttgatggaaagataggatgttttcctctagttagttttgagaagtgtgtatgcgaaatttgagcaatctcta

SEQ ID NO: 42793 - DNA, 466 bp, Zea Mays
gatatttgcagcgctcgatcttcggtttttgtctgaaccgaccaccttcttccatctttaactctggatttttgttaataacagagcaatctcccttaataaagtttgttcttgatttaacagccttcaaaccttctacaggatattggggtcaaaaccgagtggattcaaatatatggcgcatcaaatttagcctcatctcactgtgaccatttctgatctagggttcagtttcagttatctaacctagttctgatagagcaactttgggcttgcttttctccaattcttgcataacaaccaaagaggatgtctgcatcaaagttgctctcctataataggtctacaaaattgatgtggtgacctagggcaaaaaccttataatttgaaagttacaaagcctcaaagatgagctcaaatactgaatttcagacttagcctttagaacaccaatagggtctttttg

SEQ ID NO: 42794 - DNA, 650 bp, Zea Mays
catcggaagtatccacctgcacatatcgagtgctacttatttgtacaggtacctgggattcaagaaaacaatcatgttggatcgaaaacttatagttgagctggtagatcagtataccagtggttctttgcggtgggatgagtttgcttcattgatcaaggctgtccattcaaaccgtatgggatcagcagccaccagggcagcgatccctgacaggcctaaggaggaggactacttctatgccaaccctcaagaatgcttgcaaggtcccaatatgttgcaaacattgtgagcttgtcacttgtcagcgctcttgccattctttttgcaacttggcatggctgaacataggattatccatcatatcttctgaacctgccaaatggaataacatgcttttgttagcagttcagagcccaatgagaaggtctgtgaacgggttctgaaacaacaaaggtggatatatgacttgaatttaggtgataggcaatgcttgagtggagaggcaatttgtttgtggattaaaccagcaaaagctgtcaagcagagctgatgctcatgtacgagactgtagtatagatggtgcagtaagtccaaaagtgatctttgtagggaaatattgtttcaaaagaaaaacttttctacacgtg

SEQ ID NO: 42795 - DNA, 571 bp, Zea Mays
taaaaaccgggtgtgacataatttcatcgagcagttgaatatgtcattttgtacaaactgtcttgtaccaaatcagcatgaagaataacacacaaaagttatcatcaatagataaatgaaagaccaagagttcactatgcgagtgccacagttacaaagagaaagaattattggaacaaaccttcttccacagtagtgggtgttgattaaacatttgaatgagccttctgcctctcctcacagagtttcccatacatcgccatctacacagcaaaaaatggaataacaatagcctaccctgtggttcatggtgcatgcagcgattagtatagttatgttctcaacgcagcgggattttctgtctccccaaaataaggatatgtaggacatatagatccgtgaagagaatcaatcatcattgattgttcttcagatttcttcatagccttttgtgccttgggcgcagcagcctcggtagtttccttgacttagtttggaagctctcctgcaaagataatactaagatgaagtatcttcacagttgaaattgataatataaccagcgattgac

SEQ ID NO: 42796 - DNA, 288 bp, Zea Mays
agaggaagaagtggcatttggagggggcccaagttccccaaatcttttcatagtgtccgaaggagacagaaccagtaaacaatccttcataggcagctttagctgaataaaccccattagcagcaatactgaaaatatgattatcctccacattgggatgcaacacaaattctgaaagcagattccaaaggtgaagataatccattaagaccccaacagatattactttcattaccttggaagtataattagtgggtgcatggattatgctcttttgaggtttaagct

SEQ ID NO: 42797 - DNA, 373 bp, Zea Mays
gcgatgtgtgtcaaagagttaaggctgaacaccagaggctagctggactacacacccactgaagatacccgagtggaagtgggaagagattggtatggattttattactggattgccttgcacccagaaaggatatgatgatatatgggtgattgtggatagattgactaaagtagctcatttcattctggtcaaaactacttataaaggctccgagctggcagagttatatatggctcggattgtgtgtttacatggagtaccaaagaagatcgtgtctgatcgaggttcacagtttacctcaagattctggagaagctttcatgagaatatgaatacaaagttgaactttagtacaacctatcaccctcag

SEQ ID NO: 42798 - DNA, 413 bp, Zea Mays
tgtaactataaccacatgtccacctttctactgccttcacaaccttatcacacaccatcttctctctatttgccatcttgacctgagctgtagggcattgctgcataggcaaaccgagtttgcttacaaggtctttactgataaaactggctgagctgccataatccaccaaaatcaacattgcctgatttctggattaacattcgctgcttcgccaacacagcctgctggatttgtgctaatacagcttcacgatccactgcagctggtcaatgagaaatcacaccactctgaatttcctgtttcaatcctctgataaactatgtcacatacaacgtttcatccaacccatgattgtgaactgcagtggcataccgcacctcctcgcattgtactagtaatactagaaagca

SEQ ID NO: 42799 - DNA, 536 bp, Zea Mays
cagaaaattattaaaatgcatgtgaagattatattgtgtatactcaaatcgctctaaatatttgtgttgcgttgagcttttgggcttacgtcgagcgattaaatgatatagtgggtactcagacacgtcgattggactacatttttaattggctgagctatggcattggctaagcattggctgcgccctggcaacacgacgcattatttgtgtcgtaataacttggctgtgtcatgtgattgctatgttgtactctcgcttaatcggaccactcctgttgagttggaccggcatcgccgagtcacgtattttccgcatgccctgtaggcactattcgtttgtcgctatcaccgagccacaattgcgtctgttgcgcacgttatgtggagttgtcgcgtaccccaattaccgagccacaactgcgcctgttgcgcttgttatagaggcttgttgcgttgtcgtagcccagatggccacacacgcgttgacgccagatacgatagagcttgtactcgcgtggattgtggtgggtcgtt

SEQ ID NO: 42800 - DNA, 504 bp, Zea Mays
cgaccacgtgattgtatatactcagttgctctcgccgttgtatgtttcgatctcagctcgtcgcgtcgacgatgcagtagtacgtcttcgttgttcaatcgtcgtcgtctctcaacgaagctagcacgtacgacctgatgtctgaggcgagaggaacaacggtcgcctcgtgtgtgtttggaacattatgagtttttttcatctacttcccggccggtgagaagtaaatcaaattataccttgctaaattaatgtgatgaaattcttaatcaaactttacatgtccaggcagttttatgatttttcgccatcccattgcttgacgcgtagcgccagaaattctcagagtttctatgcccttttttacacaactcctaaaacaacttcagagctggtcgggggtgcgttcatttgtcaaaatagttaaaaaaataaacgggttatttttagtctctctattttattttattttagtctctatctgttattatctatcgtgacagt

SEQ ID NO: 42801 - DNA, 593 bp, Zea Mays
taaaatataaaaaaaataattgtgctgggttagaccaacactatgggtcgataaggaggtctagatagtagatacaacatggttcttgggctggacccacaatatgctcactttgaattatgttgagtgtggcactattaaatatgtcgtgactcaaggtgctcgctagacacgattcatttagtcatttatagtgcagttcctccgtcatcagcatcccttatctcgcgagcataaaaaaacaagagaaaaaacttcatctcgtctcacccaaaacaacacacattgtcgtttgtggtctctgcctctctcctcagccctcgtcacatcaccgcttgtcgtctctaggaagatatcctagatgcaccacgataggtgtaccgtcatcacacgtttaaatccacgtgaggtgtatccgtcgggtccactgtactaataggaaggacaccgctacacatctaacttgacattggtttggtttgatccagaggtgtgcagactacctgtgcattggtccatgtttgtctccctttggtatgatataaagatctatgattttggatcgtgtttaaataaataatgctttaataatg

SEQ ID NO: 42802 - DNA, 704 bp, Zea Mays
gtggaattggaaatataggagtggctcggggtcgggccgttttgatttgatttggtttggtcgcggcaggcagacggggatgctggagttacctggtagcttgactccaacgacggcggcgtacatggcagggcagcgacgagccgacggacgacctggccaagttctggcatagctacggatttggtcagggctgtcatgctgaatagtaagatcctatcacacaggccgtgtcgccgttgatcggtcgtcggactcgttaaaacaaaatgactttcctgctggacaaggtcgggatgcatgacaatgacaagacgaccgtctcaaaccgtgcttttatgtagttacagatccaacttttgttcctgcgcgtcgaccagcatcgtgccaaggctcctgcgccatcgggaagtccagcgctattgacgtgcacttcggtagttgcaccaccggtggtgcggtcgtccggtctagtatgtatgcatgtcgcatgtgaaacggtcttggtctagcttgcagtgtggatggctcatacaaaagcccggtcgtcaggacaagatgatatatggtgcacatgtatggacatgctcaacacctctgcattagaggagggcaactcgctaaatatctgcaatagtttttcaagttaagtttaaactcaaacttttcatggtctctcatgggattacctagcactagttttt

SEQ ID NO: 42803 - DNA, 763 bp, Zea Mays
ggagattcagagtgtggttcaaatgcatcaacctgctacggtggataaggcggtgttgctggctcagatgcaacaggaagtattggagaagagcaaaccgagaggagttcgccaaggttatgtgccaaaacagtaccaacctggcaataagggggaaggaaaggtacagccagttggtggagatttatcgagagaaagagaactcagggagtaccgaagagtcaatgggctttgctatgcctgtggtgagaagttcgagcctggccatatcctcaaatgtgctaagagggggcgagttcagctgaatgtcatgagggatgaggaggaaccggaagtgctgtctgatgaattgttacagaaattggaacaagaagatgaacagagagagatatgttgtcatctatcttttcaggctatatccggttctgacagtatttacagtatgagggtgaggtctattgtgggcaaacaagtgatgcttatgctggtggattcaggcagttcctccactttcatcagtgagcatatggttaaacaattgaagttgacggtggaagagtgtccctctgtgcaagtgaaggtggctagtgggcacaagatgatttgcaactccatggtacgaaatgtggaatggtggactcatggccatttctactgtactgatatgagagttttgcccttggaagcttttgatgctatattaggctatgactggttaatgcaacatagtcctatggaatgtgattgggtacacaaagtgctg

SEQ ID NO: 42804 - DNA, 974 bp, Zea Mays
gttgaaccgcagcttatgtcgcttcattacccaatcatctgttttcccaagattttgctcgcgaagctcattgatgtgttgttggataaatggatccattatctctagctgatgtaggatgctgtgatgtgcctcaagtattgtattataatccagtgggatgaaggttttccgtcccatcctaccgcttccatacagtctaccctcatgtcgtgatggaggcagacctattgcaacctggtcttttagtatactattgcaaaatggttctcctgactcaatggcctcttcggtacagtacccctctatcatggatgcctcggaacgagcacgggttgatacataaccattcagtattgacaagaaacgctcgtacgtccacatttcgtgcaagtacataggacccaatgcctctatttgtggtaccaagtgcaccacaaggtgcacccataatatcaatgaacgatggagggaaacacatctcaaactgtgatattgtctccactgcgaattcctgaagagatgctaactcatctcaatcaataaccttctgtgaaattctattgaaaaagtagcacaaccgtgtgattgccatctttaaaaaaaggatttatagccctgacggtaataggtaggaatgtagttaacatgacatgacaatcatgtgagttgtagttggtgactatcaggtctttcattgacacaatactccgtatgctagaacagaatccagatgggactctcaaattcttaagccaaacacacattgcatgtctctcatctgccgggagatggtacttcccattttcttgaagaacaggatgtagttcttttttatgcctaagtttaccatgtccacgcgtgaattgagcccttcttttgttttgccctttatgtctagcaaggtgccaattatgctttcaaaaacgtttttctgaatgtgcataccatcgattacatgtcgcacatcaaac

SEQ ID NO: 42805 - DNA, 705 bp, Zea Mays
cagagatcatagtccagttcgggatgaattgccttctgcagccatatccacgactgaaaaaggaagagcgctagtgaaggaaaagctttcgtcaaggcctacaacgaatttgcgcaagaacaacctattgcacaaactgtgtaccttcagatcgtcatatttccactgggccgtgctgaagctgctgttgtcaaccaccaagctacggtcgctcttctggaaaagcatcaggatagagatagatttgtacgcgtctcaaatttcatctccaagcgaaatacgaacatgctactaccaactgctgcagtactgaatctgcacttactgccaacacgtcgttcctgtcgttgccaagcgccatgaccggatgctccaccagggccatcgagcactccttgtgtcctcctgtgtcaagaacttggatagccgagctgcaccacgcgctcgacagcaggtccgtcgagtctggaggcggcccttcatatgcgatcaggcctctttctggctccatggctacacggcagggcagaagccaagctggttcccttggaagcagctcaggaaagcgaagggtcagggattttatgctggatgagtggatgtcactcttggtagctgtgcaggtgcagaccctctcctgtctttctgatgcacagcctgcagccgcagagaatgtctcagtaggagcaccagatccttggtcga

SEQ ID NO: 42806 - DNA, 704 bp, Zea Mays
atcggtgaagaggccgaaggttttgatggaatactcagcgatcgtggtgatttatgcgctttcgccggtgcacgaggggtcacgaccattttggagaaagccggctatgaccatgttaaggccgcagttcagccagaatctattttctcagctgacgacaccaaggacccctcggtcgaagcttctttgctgggcgggaggttttactctgatgtttggatgaagggatgtcatgagatggccgatgaagccattaaaaagaatgaaaaagaatctcacgacgcccgagaagaagcaaaacaaactgaagaagctactgaacgcgccatgattataggtacttttatttaaaattttgcttcatcgttcgtttctagcttcgaagttcaccaacataatcttaattgcagctgggctttcaccaccaccagagccatacaaccccgaagccgaccaagttatgaaagaagctttggatataatgaagattgctaacgaagtcgttgacaaagtcgtcgacagattattacatgaagctgctgaaaaaaatactaaaggaagattaaaattttgtaagcttgaaaatgtaatgcttgtgtatggttgtctccttgtgtaagaaacaaacatcaagtatttgtatatacattaatgtaatatatttcattgtgttgcatcaaatttttgtacgtaccgtttttgag

SEQ ID NO: 42807 - DNA, 304 bp, Zea Mays
ggtagaactgagacaaattccttgttttgtcttgtctagacttagagtcccaatgccatcttctgggggatgttagggtagttaatttgacacgattttgtcaactgaagtcactagatttaaggtctagatcttaatgaacatggggatgttctaattagaggctgaaaaattagaatagggtgttctgaatttttcctttacttctctccttggcttagcctgtttggaaattttaaccatctcttttgtggtgtcttgcttactaatctttgtagatgatttggtatgctaccctttatgt

SEQ ID NO: 42808 - DNA, 644 bp, Zea Mays
gttcaatgcatgcatgcgacgagatcgagtgtgcctcctgcttgattgtgacgaactaataattactgcatgcatgcacgcacgcatgagcatgatgcgcgtcgcccccggccagcaggtgcgcagccgaagcgaagcgacgtcaccaaccaaggcaccaagaaaaggaccgttgtctaagcatgattaggccggcaacgttatctgcaggcgttgcctctccgcaacgtcctttcatcatgcccctaactaggcggcatcacagctatatattactactagtagtccttatgatttgagctcaggtcgctctctcctttgcttcccttctactcccatcctccattcgagacacgcatctctcacgtacagtacagtccatgcgccatatataccgccatcagctcctttagcaacaaccagcgaatatttcggtggccccagccagcaccatcccaccatgcgatcccctcccatccacgcgtgcacaactacttcctcactgacttgtcgaaggaaaaatatcaatcaccactacactagcatgcactaacttgtcaaagaaaaatatcaatcaccagtacactggcttgcattcactgaattttcaacacttaatgtgtccacttaaactgaacaaaaat

SEQ ID NO: 42809 - DNA, 481 bp, Zea Mays
tgacaccatagtttgcatcaagattaagggggcatgcaaaagaagtatagaattaaaaggagatacctatctcgactaaggcaagtgcattcggatttgttggttgttcaattaaagtagaggactcaatccttgaacatgcatataaccgtatcaccatactacttctgtatcacagttcacaaaaatgcaggacaacaataattcagtacgacagtcaaacactctagtggttgcgtggaggatagtgaatccttaaaaaatgtcgtgctagtgatagactgcttgctaaagttggctttttacttattaattttaaaaggagtgctagttaaagtgattccatcttctttttttcctcgttgtttctgccatgcttagcatattgatgcctaaattagtatagatgcaatgtttaatgtaggtctcatgatatagaacttgattcctagattaggatagacataacttctaatgcttc

SEQ ID NO: 42810 - DNA, 699 bp, Zea Mays
taagatctataatcaagacagtgtatgaaaatattttgcacacgagagagttctacaactagtgatccttttctaagtcatgttattatatatcaagtagatcacaaattgcataaatatatcatgaattctccttttaacttagtgcatatcaagagagatattgattgaaattatatgaggcactaagaaacataagtgttaattgaagttattcaatgatcaaacaaacaacagatgcgatcaaaagaacaacataggcattagatcatcaaacaagcttaaaacaggagaatccagtaaatatgctactttaacaatgaaagctacaatccttgataaaggtgacattactttaccaagatggattgatatgtagtagcatacttcatgagaaaaattgttctcatacatgagactatatgagattactaagataaagtgttagtctcaatataatcaagatatagaaataggctccccctaaagatatgcatcaagacattgaaagaattggatagatgtactcacttttaaatacaaatagggagaagcattattcatcttgatcaaggcttacaaaatttgcaataaacaatttatgcctagtattctcacaatgaaaaagatttagaatgcttacaaccacaccattgattgttttgaagatctcattatccaagtaggtgttgttgctct

SEQ ID NO: 42811 - DNA, 526 bp, Zea Mays
aaaaatattatcattggtgaccctcgtgcgccaaatctaacacatggggtggttactcggaaggctctggacaaaagaaaggctaataagaccggatgcgccatggggcatggtgcaccagatatgcccaaatataaatgttttggatgtgaaggtcgtgataaacaaaagggtaaaaggctgaaggttacttttgagcaacttctggctaaatatcatgagcaaattaaggcaaaggatgttgatcaaactggcattgctaagccatctagagcacctttaaagccatcaaaatcacctccgaagcgtgaatctagaaatcaggattagggagaagagtttcatgcatcaacaacatatcctccttttgggtcgccaataccaatgcaatatggttcagctacttcatactttcatccttatccatcttggggctggtatgattcaaatgcttattcttcttcatattttagaccacataacatagaatattcatctcatttcaattctgattttgaggaacaat

SEQ ID NO: 42812 - DNA, 826 bp, Zea Mays
agtcatgacctctttggataggctcgccggagttagccacctcgcaaccttgcaccacgtgcctcgatgctttaaccacgctgcagtgagtcaccttagcccacctgatcgtcgccggtgagcccgccacggtaaatgccaccaattacttgcgccagagcacccccttctctccggccgccgcgcgtctttccccgaattagtcgccaccgctcatggatcctataaattgagtctgccgtcggttccacaaggtagtccagcatccaatccacccgctcgtgcctccaattactcacgagagagccttaatttgggatttcccccaaatcggtctgaaacaccgcacattgtgacctcgccgtggctagctcgttccaggtccgttcatgctctctgcccttccgtttcagtacccttatgttttcctgaagctcctcgacccgttcaattaagctagaccgcgctagatcgccgggaacacttctgttaatccatagttgcactgtctccgtggataggacgatttagagctcaaatcgtgcaattgatcgaggggaaatggttattaagggttgaattcggtgtccagcaaaggggagggctagtcgttgcttgttctgaccagtgcaagttcaccggagttcctgctccgccgtccacggtcgtggacttcaccttgtgaagaattagaaagtggaggacctcggtataaatgtcagtgactgaaaccaatagtgggcagggttcttagctagttattcaaacccctgaggacctcggtgcaaactgtccaccgcgggcacgcgcacagccacgttttccc

SEQ ID NO: 42813 - DNA, 623 bp, Zea Mays
gcccgtgccgggtcagcacggctgagcccaacttgcaggactagtacaggaggttcggactcgactcttccggcgcgtcaccgtgtgcccccttcgtcgttagtgtcatgtaaacgtacatactccaagcagcagtagcgactttaggacttgggtacagtaacttcaatttggttctctaaacatcagctgtcatcttaataatgattccacacattcccagtccacgccagatcgatcttttggagcaagcaacgcaaaatcgatgctgtattatatatggaacaagtcattcctgccaagctcgatcggctaggttttagcagcccaacgaccaactcttttgagagcaccataaagctgttattttcagcaattgtttatttatctcccatgccctaactgaataatcctgaacctagctactctgagaatagcacgaaataaataaataaataaactaatccagtccaagcaaagctagctaacgacgcgtgcctctgcctccccagcatgctggcagccggaaataccatggtctcctgccatctgccaatccgctgcagccgcaccttccatcatccgctagtgccttcccacatctgtagcacagatgactaccg

SEQ ID NO: 42814 - DNA, 569 bp, Zea Mays
gtaattggaggatccgtcatcaataaagttttcattttcaaaggcattcaaactacttactatcaactggctttgatttgattggacttggaatcaacacgcttactcgacttagggtgaccactataccctactaacgaagcaatcgacttaagttggcgacgacttaagacggtgcaacatgctcgcgcttactcgacttagggtgaccactataacctaccaatggagcaatcggcttaagttggcgacgacttaagacggtgcaacatgctcgcgcttactcgacttagggtgaccactataccctactaatggagcaatcggcttaacttggcgacgacttaagacggtgcaacatgctcgtgcttactcgacttagggtgaccactataccctactaacgaagcaatcggcttaagtcagcgacgacttaagacggtgcgacatgctcacgcttacccaacttagggtgatcactacaccctaccaatggagcaatcggcttaagttggcgacgacttaagatggtgcaacatgctcgcgcttactctacttagggtgaccac

SEQ ID NO: 42815 - DNA, 794 bp, Zea Mays
gttcatagagtccaccagagttcacaacttgtgctatggcactatgaacgtagctagattccctaatggcaaagagtatatcggtatacctcatgttgtagtttgtttccacccatcgtacgatgaagactctagatggatccctagcaagttgatacctatcagtcatttactaaacaacatgaagagaagtaccttgttgccctactatggatacaaggagggtatggaaaacctctagtaatggctattcagcgtcttagcttcttagtcttagtttgatttcttggaattataattttagagatggaggacgctattggcgagggcattaggtcttgcctctagctaacatatgcacactgaatctcctatcttctgatgtgagagttggataggtagagcaccatgtctatccgagagctcaacgagtcacccgcataattccctatatatcgaatgacattgattatcgatgggcatcgtggaggtcgagtacctatagagatatgtcatgcatcaaatctagtggacatgacttatgtagatgaggaggacgaggccattaaggttgtgatgcagttagagctagatgggatgtttgcaacactatgagactaacgatagcttagacaaggactacgatccaatcccacatattccaccacctagatcacatgacttagagaccaggggctctagcttagcaccaccaccaccacaaccaaaatgctagcagaccatgtcctacttgagatactagcatatctgaaagggaattaggcttacaccta

SEQ ID NO: 42816 - DNA, 838 bp, Zea Mays
ctcgcccgtccatggcggaatcgccccatgaaaatctcaccggccatccgttgactccagcgtggaggtacggccggaatcccggtactttataagtgctaacccccgcctcggttgcatcgtctacccctagccgccacctccagttacgcagaaaacctgcacctccattgtagaacagagccgccgcggctcggtgaagtggaaccgggcgctcactgctgccgcctcatctgcgctgtgtcttggggtttcgccggtgtgcggtgagggtgctggtggcctcggcgtgcgggattagtggacggggaccccataattgctcaccagaggaacaacaccaccgtggacagcacatcgccgtggttgcgcccctgtgctccattccctaggtaagaaatccgtccctcgtgttcgtcccgccctccgcatggtaaatctcgatttaatttgatgcttagcgcccggggaacgctgattggcgacctcaccggagctcggctgggtgagaaacggcggcgccgccgtctcggttagtcgaaggaagaagatagggtcgcgcccgttgatcatcgcgtggacggctacgattagaaataggataccccttcggctggggccgatctgggccgtgaatctctaatcgggcggtccagaaccctccttacctctttaaaacctctgccgtcgatctgtgatctcacggtcactgtcccgtaccacttcggttctaatctgggccgtcaacacttgatcggacgtccgtccgcgcaccgtaccccttcaccgagccataattgcaaaagagaccctggaaaatgtttgaatcaacccgccg

SEQ ID NO: 42817 - DNA, 711 bp, Zea Mays
gcactatgcaactctatgaaagctaatgttaattttgctgctagattcgcccttgtcggtgtgtaccggatacatgacaccggacatggggttgccctgttcagaataaagagagcactagtgtgtccagtgtgcgccggatagggcaccaagagtgcatttgtagacaggtgtgaaaggctctacactcaccggccatgacacctagaagggttgtagatgattgtgagagactgaatactcacatgacttgtcccgtgaggcactggataccacaccagattgggtactcaaagaggtgtgtaactgtgcaccttgagtcgtatactcactagatgtgtccggtgaggcaccgttcatcgcactagacattagtacagtaacgactagttcctgaaaatatccgctgtagctacactggatgtgtccggtgcgagaggtaggtgtgcaccagacatggatgcatcaatgaaagacgagtggaagtgcaatggatagttccttgccttggagctatatacataggttatatatacccattcatctcatctatttgagttctcttgtccatttgttcagttgaagaaacccatttaagtgaaagataaagaacctttgcatagtgatatgattgagtttttataatctcaatattagtggcctcattagtgttgggagtaacaagtgcacatccaacgttctcattaggct

SEQ ID NO: 42818 - DNA, 627 bp, Zea Mays
ccaacatcatgtatgacaagttgggcttaatggacgaagataattaagaatcgaatgtgaggcaacaagctttccgttctagaccatgtatagtttacgacataaatgatgaccttgatgatgaaataggtgcattacccaacaaggatgctataccaggagagcgaatattagtttgtgaccgatcaaaccctattatgaaggttggtaatttatataaggatatgaaagaatttagactggctatgaggcaatacgcaattgacagtgagtttgagtcaagcgctccattcagatatcatggttactataaaggtggtgattgcccttagagaattaatgtgaaaccgaagttgctagttcccccactataagtgtgagtattttttaaatatttgttttggttgatcattgaattttgttcataccatgttgtgatgctaaaacagtgtaaatgatttatgttatgcaggtttcagtcattgttgaccaccatacttggacttctagtgatcgaaggaagaccaccacaccaaccagctcatgggttgcttccttagcgcatcccaccattaccaacaaaccgtatatggaagctaaagaattgcagactatgttacaagggcg

SEQ ID NO: 42819 - DNA, 414 bp, Zea Mays
tggtgtttggaagatacattaaagtttaattcgacaaatgtcttttgcttagggctcctagcttggtgtttcttgttatgtgatacttgtgcatgcgaagtaggtgaactgctacttaaatggtacatatttagcttaattacttactggtggcattgcagattatatgtttctgtcttaaagatacattagtaggctgtagtactcacactgcttctgttctcatatgttcacacactgcatctgttcacagcctgattcagaggcatgcatgatgttgtagtaggcgagaccacccaaaagcactcccaacgcctgaccacaagagctagcagatagcagccctactgttggcaatccaataatcacatactaagttttccttgaaattttgagtcttgaattgacttcttc

SEQ ID NO: 42820 - DNA, 788 bp, Zea Mays
cctaccgcctccgggattggagcaagatttcccctaggagctgaaggagaagccggtggagaagggagtgagacccacctccccacacctcaagagctgccattagatttagcccaagttctggccaaccaaacccgactcattgaagtcctcgccagaagtcttgagaacaagcgcccgaatggtggaagacctcaggacaggatgggagattttctaagactcaagcctcccacattcgctggatccagcaatccactcgacgctaatgactggctactcatgataaaaaggaagttagaagccatcggattccctaagaaccaacatgttcatctggctgctcatcaactttctgggatggccctatcctggtgggataccttcagcgttgccgtcagggatgctacctaggtagaatttgaagccgcttcccgagaacatcatgtgccccaagggatcattcagctcacggaagatgaatttcgggaactaacctaaggtggaagatctgtcggcgagtacgtgcacaaattcacagaactagctcgctacacgcttgacgatgttagcacagaagccaagaagatggcccatttcttgaagggaccaagaccagaactcaagactatccttgttagccaagatttcctcagcttcttgcacctctcaaacaaggccatacaagtggaaagggcaagggaataagaaaagggtcacctcaagaggaaattccaagtcctatgagctcaatagtaggacaggcaccagagaattcgatcctttgg

SEQ ID NO: 42821 - DNA, 390 bp, Zea Mays
tatacgttctagtaattatttccatattaaaaatccattttccaatttatttattcagtttcaaacagctctggactgggcctcatttacagagaagtgcaggggtctcggggcaagaaacctgagacacagcgcacagcagaacgggacggtgggttaatttattaagtccctagggtttcttttgtaattttggacggtcgaaggggtatcgtgcactgcgagccgttggattagacgcaggcgaaccagattagcccagtgctgctgtgaatcggtacgcatccaggatcgcaggatctgagatcgacggctagggttctatgagatccagatacattgttggtcgtcgatcgaccgctcgatccagatcaacggatcagaacgaat

SEQ ID NO: 42822 - DNA, 382 bp, Zea Mays
aacacccttaaattggtcagaacaaggagaacggtggttttcaggcccaatttagttaaagaaacagaagaaaaggtccaacgcataagacataacttgagagaagcacaagctctgcagaaaaattaggcgaataaaagacgtcgaccattggtttttcaagtcggcgaccatgtgtacctgaaaatatcaccaatgaagggtgttagtcgattcagggttaaaggaaaattggcaccccgatacattggcatgttccccatttttgagcgatgtgggcaagttgcgtataggcttcagttaccagaatcattgtctgcgatgcataatgtgttccatgtatctcagttaaagaagtttcttcagattcctgatcaaacta

SEQ ID NO: 42823 - DNA, 281 bp, Zea Mays
gagcaaccaaacgcggtagcgtttaaattgaagctagggtgagtttcactggttcaccaaaggtcgggtacatgcgtgaatttggacaaaatgggggtggaagagtgggtcgacgtgagtgcactctcggatgtgttctgcagcggtgagatgatgttctcgatgccctatcgtggtagcgttccatcggttgggccgatgagctacgttaacgtttaaggatgctaaaacatggcacagagggggatgaacatacctggaaatggctgatcacggcagga

SEQ ID NO: 42824 - DNA, 345 bp, Zea Mays
tttcatttgggttgttcagagtcaaggggttgaacttgatgccgaagccttctgcgaagccttcagtcagattcatgagctgcactttcagacgaaggcgactagaggcattcacaataattttggttgctataactttgcttatcgaaggggctcgatgtttatggctcttgcataccgaagcaagtggctgaatgaatgggtgaagaagtggttttacatgaagaatgacttgactacgcgggtcgatataaaaggcattattcagactcctattgttacacgctttggttctaaaagccgacgtgctatatcaactttgatgcccaggctgccatagttgct

SEQ ID NO: 42825 - DNA, 552 bp, Zea Mays
ggccaacaggccgcatcaccatacaaattacaattacatacacacggcgagggcatcacatattacatcggctcaaccttcgggatgatacccatctccatgtaattaaacagcattatcctcaattcctcaccctcaaaaagcttccgaagatccccaacgcctatgcccgccccaatcggcgaggacaacaattctcgtttaccatcccggtctactcggagacggccacgctccatccccatatgacggtgcctgccacttcgtgaaaattcacccacactatgttttcccaccaccctttgccgcctacactcagcactcgcaccatgaagatcctcagcaccctccacacgcggagaagtctccgccgcagccacatccaacgcaacaaaataatccaagccttcatccgaggactcctccgtccaaggaaacgaactctcagattcaccatcggactcaaaacactcagacatagaaccaaacaaattatcatcggcacgcactatggttgaggccgccacaaaatcagtatagtcagcagcggtt

SEQ ID NO: 42826 - DNA, 396 bp, Zea Mays
ttccattgaagagccatcatcacatgtcactgttataaagcatccattgtggcaccatgcaatgcaagaagaatttgatgccctcactaaaacaagagttggcatattgacccacctcatgtcgatctaaatatcattgactctaagtgaattttcaaactcaaatacaagttagatggatccatagatcgctataaggcttgttttgtcaccaaaggtttcaagcaacaatatgggattgattatgacgccatctttagtctagttgtgaagtcgaccaacatcttccttttattatccttagcagtttctcgggggtggtcattttgatagattgaaattcaaaatacttctcttcatggatttcttgatgaaggcatttgtatgaagcaacct

SEQ ID NO: 42827 - DNA, 406 bp, Zea Mays
caacgatgcaggagcaccaccatctccttcagggcatccgactgcatggcaggggccagtgtgctaccactcatcaccgcccctatcatcgccaatatgcggctgcaccatgtgttgattgatggcggggcaggcctcaacatcatcagccatgctgcattcaaacagttgcagatctcggggtatcgtctgggaccctctcgcccattctccggagtgggcccatagccgatgtatccccttggaagcatagcactcttggttaaattcgggaccgaggagaacttccgcacggagaacgtcgtgttcgacgtcgtggaggttaacctccccttcaacgccatcatcggcaggccgaccctgtatcgattcatggccattgcccattacaggtatttggtcctca

SEQ ID NO: 42828 - DNA, 885 bp, Zea Mays
gttcactagtgatagccacctaagacttagactaatgataggggtagtttaactagttttctaaactcaaatggtacattataaattgatatgttgttgcccatggtcctagtccaccatataacaaaaaatgattatataaacatacatacttaaaggtaatatggatttacacaaatagaagcaactcatcctagcttgcattcaggttgactaaatactaacatattctacatctcaacacaaatatgaactgcactataaaaatacgaattagagcgactaaactttaacccatacacgaacaacatgccagtaacaaagcagcatactattctaagaactaatggataacactattaaataacgtagcattccgtaaaactacattatttacgactccaatgtctaaagcacttatgtcttatgtgcacgagccactacccattttaggtttcacttgagattgacttagcgatactacttaattttaaatattcggggtagccagtaatactcatccaaaacatgtaattgttcgctaaacatataatataactactagagcaaaacattgactttatcaaacaaacatcgttcttcacaagtaacactaataacattatcggttatacatttaaaatgctaaatctaaactctgtttcactaatttatcacactccgcaaaacttgcactacaaatttaacgtgaccatacgaagcgtctaatcgcaatcatgaacacaatcacaacaccacataccactcaagtattccaacatcaacttgctaaacgttagaaatattagacctaaccttcatattactaaccatatcacacatctacatgcctacccatatccttcgcataaaacctaaactttc

SEQ ID NO: 42829 - DNA, 884 bp, Zea Mays
cgcccggcttgatcctagcttggataaagcatcaactgccttgttgtggtctctttctatatggtggaactccagcccctcgaatttatccttaattttgtggagcagtcccaatctttattgacttggcagattgctaccagtggatctccgtatatcatcaaccttttgattccgagtgacacaacaatattaagcatgtgtatcagggcttcatattctgcagccttgttggaggcaagaaatagaagttgtagtccatatttgaactgatctccccttggggcgatgaagaggatgtctacctctactccatgcaatctcagcgacccatcaaagtacattttccatacttccattgactcagggcttttagggatctgttgctcggtccactctgatatgaaatctactagagcttgggtcttgatcgtcgtgcaaggtcggaattctatgtcatgagctctgagttcacacacccacttgtttgttcttcccactgcttctctgttgtggagtatgtctcctatcaagaagcctgtaaccactacgactatgtggtcatcaaagtagtgacacaactttcacgaggtgaggagcactgcgtatagcagtttctggacttgagggtatctgatcttggagggcccaaggtcttcattgatgaagtacacggggtgctggactggatgtgtgtgtccttgttctatccactcaactactaatgcagtgcttaccatgtgagtcatgcatgaaatgtatagcaacagatcttcatccgatcggtctgtggtggctcggttgggtggtttgaggactagtggggtggccaggaatttcttgagtgcttcacatggttcttgagcctcgggatccactgaaat

SEQ ID NO: 42830 - DNA, 479 bp, Zea Mays
tcggacgacacacagccacgcgatgagagggggagaaacagttgaaacacttcccccgcaggtcagcaggaatcggtctgggggtaggcctcgaaggacggagacgctgtcggtgagaacgacgaccttccaccttcacccatccgtcgtcaccttcttcctcaacaccgtgagcaaggggcttgggagaacagggggcttgagagaccagcacctccttgtatgaagcccactgaccagagagaacaggggaaacaccggaggaaaccgggctgctatcatcacgccaacgcaggtccttgggggttccgcaggtatgggagaaggggagatccccggcgccaaggaagaaagtgaggtggctgccgggcctggagcaaacgccggcgtggggctgtgggtggttgaagcgccggggaggggaggggggtaagggacgtgaaacacataacactaggtacctatttaccgacaatgat

SEQ ID NO: 42831 - DNA, 965 bp, Zea Mays
aagtggcccaaatgccaaggtaataaataccctgatcactcgaagggcgaaaggacaaaacattgtccgatgcttcatcaacccctagggggaaatattctcccccaggggctcgggggctaatgtcgaggatacgatccttggtccttggggcccgtcagtcagcgagcacactggtggaaagcctctagcaactagggcccgctggtcagtcgaaggagataggtaacgtctaccccgagagaactttcccctggacgtgaaccccgcggcaccgagcctgggtttgggcatggcggaactggacagggggccgagcgtgccaaagggaaaccactcgaatggatcctgcgcttagcccaagactgactcgtctaagtgaccgcctcattaactacacctgacatcgagccacaacagaggcgcctgtcagctcccactcatgacctatgaacccctcaggccgtagaacacttatggcctactaggctctcggactacgatgcatttatggctcgcacatcctctgtctagtgacgcactcgtgacctatcgggactaggcctgagtgcgcaggacgttggcaacgcgcaacacgacaaaccgcaccaagccccaggctatgaaggccaggggttgtcatagcctgaatgatgacgcttgggcccccgctgcccgcgccgtccgcaataaataatatgagacaacgaggcgatcgcaagcactcgtggctttaccccatagtaaaatagccatttttactatcacccgatggctccttcctaaggaagccaccattggttgaccctctccttggcctataaaacgaggaggtcgacccccaaacacaggaggtgtggagttctctaggacacacgacggacataaggacggatttaagacgagacgacgcctagaagatcgacaaacaagaggaggaccttgaggccgaagccccgctgcca

SEQ ID NO: 42832 - DNA, 393 bp, Zea Mays
ccctacttttactgaaagattaatatacgaaagtcgtggagggtgacaaagagaattcaccttcaacaccaaaaatgcatcaaccatgaatcatttacagtactgtaaagttgtacccttttcttataccacattctaccttgccaaaatagaccaacaaaattgtacatctggtgaagaaatattataggctgtgaaaaagctgaaccataaatgcaggaacaggaagaccaattttatctccaattctctactgaaagctactgtgagtgtggtcattctgttctcctagctgaaaacacctaggaaaggagaggaagaattatgataagttcagaaccacaaatttctctacctggtcatctgaaaaaagcacaagcatgtaaaatccat

SEQ ID NO: 42833 - DNA, 391 bp, Zea Mays
gacgattgtctttgtttgacagtcggggatataggaaagtacccctgtttagattcgataggggtttggtgtgaccgtgatatcaacaaacgatggtcgattgagccctgctcgggtaacccaggatagaatgtagcgagggaacatgggcactgctagagagacaccgatgtaaagaggttcaagccgccagagtgtaatatctgttttctttgtgggtcggtttgtattgcttgggttggatgagcgactaagtgttgagcaagtatatgcctagcaagagtctagaaaaaaggatccaaaaaagccccctgcataggggccaccctctcccttttataaaccaagggaaagtgggttacatttgaaatgtggggctaggatgagagcc

SEQ ID NO: 42834 - DNA, 600 bp, Zea Mays
gtttgactcgccgctcgtacgtggcacgctgcgtgctgcgatgtgtacacactcagctgctcgtggctggcaggtggctcacctaccacgtgtcacaacaaggacatgcatgcacacccatctctttctcgatctctgccctgaaggaagatgaaaatgaccaaacagtccttgctagcaggtagcatcgcagctctacacgtcgtagacgtcggccggcgtgctgcgtggatgcatgatcgagatccatacatgcatgtgtgtgtgcctgctctttcagatagagaaaaaagatagagagagagctagaagaagaagaggaagagacatgatttgtatgcgcatatgtgttgtcaccctcggtttacgcacgtacaacgccatgcatgcgacctatccataaaggaaaaaaggctatatagctcgtgcatgtgcatgcatgcatgcatctttgtgccttttaggatcgataattggcttctcccatcgtcagagcactcagcactctcacaccatcgatctcatcccatctcttcgtccaaaaactagctaattgcaagcagctgcaggctgcagccaataaaaccgtaggcgatccac

SEQ ID NO: 42835 - DNA, 550 bp, Zea Mays
ctgggggtggtaggcggtgctgaagtctagcttggtgcccatagcttgctgaagactcatccaaaattttgaggtgaactgtgttcccctgtctaacactatctttcatggaatgccatggagtctgactatttctttgagatatatccagtcaagggtggctcctccgaaggtagtttttactggaatgaagtagctaccttggtaagacgatcgattatgacccagatagaatcgttcccttactgggtctgaggcagtccgattacgaaatccatgcctatttcttcccacttccatttgggcactgggaggggttgcagtaggcctgcaggcctctgatgctctgccttagttcgctagaaagtataacatcgggccacatactgagctatctcttttttcattcctctccaccagtatctggtcttgaggtctaggtacatcttggtggtccctgggtggatagagtaggctgagttgtgggcttcgtcaagcaggattcctcatgcctctcccttcggcacacacagccggtccctgaaccaaa

SEQ ID NO: 42836 - DNA, 501 bp, Zea Mays
aaaaacccataaagactcctctctactgtttctctgtctcactaacatctccactaaggcccctcccctttctatttcttcgcaaggtgaggtccccgaccatggatggtggagcagtggctccagcgagcctgtatcggccaagatacgcaatgaccggtgctcttgagcagttgacacctaattcgacccctaatacccatttcccctccatcaattgcgttaatccaggtcagaatctctctgtccacgataacggcggaaaccgagaacaatttgatgtgttcttggcgatccaaggcagtcgagttcaattaaacaggtctacgagtagcaggggacttaatggaggctagaacatcaagaaaggatgcttgaactaacctgtaggcgtctggccacgacgaggtgttcacgggtgcggaaaactgatttggggaaagaaagaaattggagctctctggtggctaatcggaggcagtagtggatgctttggcttcg

SEQ ID NO: 42837 - DNA, 760 bp, Zea Mays
tggccagatatgcgtggtgagctttgtgagttgcaaaggggcgcctgttcgaggcgagaatttttggaatgcttcacacgatcgggttactcagttagccgtgcatacgattgctggccaatagaaaccctgacgtatgactttagctgcaagggacctcggtgcttaatgtgatccgcatgtaccgctgtgaacttcacggagaagatctatgccttcgtccttagttatgcatttcaacatgggttggcttattcctttcttgtagagctggtcgttgattatagcgaagtctctgcttctgtgttttagccttttggcttcattgtgatcggatggatggtagtgaccttgaaggtaaagggtgattggagcctgccagtcttcggccattatcaggttgactatctaatctccgtcggcgtcctatgttatttgcagaccttcagggtttcttacggctggtgtgccgactacgtgataaaataaatcgcagggcaggggttcccccttcgctgctgctttggctaatgtgtcagcctcttcgttcttgtttctcttgatgtgttgtagggtgaaacctttgaattgtttctcgaggctgcgaatggcggcaagatactgcattagcacgagctctttcgctgagtaatatttttcaatttggctagcgacgaccttggaatcagctttgatgatgcatgtggtcacgccgagggctcgtagcttgcgaagtcctagaatgactgcttcatattcg

SEQ ID NO: 42838 - DNA, 762 bp, Zea Mays
aatgaaggtgacctggtccgactgaaatatacattcagatatggagataaatttgatgaaccaaatgatgactggctgaaatgcatcgaagctacaagcgatgaactgcttgggacatactctaaagcagaagataatgcattatccacatccttcggaagccggggaaaaaagagattgaacaaagtttttgatgctattggttttgtttaccccgactaccgctaccctctgcgaggacgaggaaagaagaggaaaactgctgctttggccaaaactgctgcttcggctactctagatgagtctgcgccgaagagcaaaaagttgaaggtccttacccaccggccacgctatattgaaccggctgtggtacctgagtttggcggggaaacttcttcagctgccgaactgaaagaacctgctcctcccacacaaaggattgaagagccggctgcaatgccgaaggtaccttcgactgagctaattgaaatgaaggtaaacgaagataaggctaaatagtcaaaaactgaggaaacaacaaagatgctcgggattataaatggaaggaacagtgctgagggcagaaaaaagttctgccataactcctagaagaaaaaggatgataaatgtattagatattttggaaataacggattccaaatgccccgctcccatgaagaagattgccgaagctgacaaagcacaaactgaagctgatactaaacggatagtagttgaagctgcaactgttgatgctgaaat

SEQ ID NO: 42839 - DNA, 956 bp, Zea Mays
actgctacgatttagaagctcatatcctggtagagaaacaaactgcacatgctgactacacgtagcttgtgttgcgatcacaatttgggtttttttcaccatcatcatgcaaagatagatccagacaaccaacgcgatacaaactgctaactgccacatctctccagtacattgaaaaactggaaatcatagcaagcttaggctctgcaaagttcttgggagaagaagctactcctagcaaggtagaaacgtaggcacggtataatgtttgaggtggtggtagctagttgaaatagcttcatgagatggtgaaaagcaaggaatgacttagcaggcaaggaccaaccagtagaccaattacgaatctgacggtgaaaggaggcgaggactcgtcagcaagtgatcaggtcaatcgcaggtgctagtttttttcaaccacctagaaattgcagaacagaatggcaacaaatgcgttaaaattggcctgtgctcatgtaagtgagaggtctcgatctctcatagacaataatattggcctatgctcgcctaatgaatcaggtgatgaacgtacgcacgcagcaaactaccaccaaaagatatagtcctatgatcaaatcggcaacccaagaacttgtgagcaatccgcatcgacccaagaaccctagcaccaagatttctagatcatggccagtagatgtaaaggagttagaggaggagtggaggacaacataagtaccagcaagaagcatccaccgaagggatagcatcgatcccgtcgttcccctcgtggacgtaggctagtcggtgtcgatgccaccgctgaatctcctgctgcacctgccaatcagcttcgtggatctcatgcagctggtcaaacaattgctgatgctatgtcgccaccgcctccatgccatagctgtcgccgcctcgcgcaccacgagcgcgctcgtggtttg

SEQ ID NO: 42840 - DNA, 291 bp, Zea Mays
ggcggtagtttcgagagaactgacagcagcgagagacgatgatggacgacaacgagaggaagagaaggaaccacactttcctttggaaccattcgctccgttgcagacggcggcagacatgcaagaacaccggcacgacgaagcagaggaaacagagttcctggcggaggagccggcagaagagcggagcggagaggttgcgcaggaggaggcagcgccacccaagaccgtcgcggccacgcacaactatcagttcctgactgagcgcgacttccgggggttcgtcaggga

SEQ ID NO: 42841 - DNA, 278 bp, Zea Mays
cgaaccggtacgcattatagatcctcggatctagatccgatggtgaggatcccaccaacctaaacgttatattgcgattaaattctgagcgcatgatggctgatcaacggtcaagagaagcccgaccgaattgattcctctcatctaatcctgaccacttatcgcgcgatcgacggcctagggcctttcttctccacgaccgtcagcgcggcggagatcttcccaccgcggtggcgacctcgccgacgcctgacccgacgccccagtgcaaggttcac

SEQ ID NO: 42842 - DNA, 1998 bp, Zea Mays
gttaagggtttagggttatgcttagagtcacagattagggttagggtttagggttatgattaagcgttatagttagggtttagggttatgattaagcgatagtgttagggattaggatttagggatatggtcagggttagagtcaaggattagggttagggtttatggtttagggttaaggctcaatgtttaggattatggttagagttagtaattagggttaggctttagggttatcgttaagggttagagttagggattagggttagggttaaagtcaggttttagggttagggtttatagtttagggttagagttatgggtttagggttatggttagagtcaaggattaggttggtgtattcatatatgtgataatgtgatacttagagttttgtacttggtgtattcatatatgtcataatataatacttacagttctatacttggtatattcatatatgtgataatgtaatacttagagtcctatacttggtgtattcatatatgtgataatttaataattagagttctatacttagtctatacttgttgtattcatataatacttgatataatcatacaatatttgttgggatgaagcttcattttactttttagcgcattcgtacaatacttgtgtctacatacatacttggagtatttacgatgtcgatatccattttatttttatctgatccaatatgtatcatatctgatctgatccgaactcaataatatctatatttgatccgaactcgataatatttgtatcaacacaactcaataatatctgtactactctccctctctatacgttcaatatgactctccctctcccactctagattttctatatgaatttccctctctatacgttctatacgagtctccctctctatatgtcatatacgaatctccctctctccctataggattaggattagggtttagggtttatggttaagggttaggtttttgggttttgggttaggattcgagttagggattagggttagggtaagggtttagggttagatttagggattcgggttaggtttatagtcagggattagggtttaggattagacttagggattagggttagggttagagttagggattagagtttattgtttaggattaagggtttagggttcagtgttgagggttatggttagagtcacggattagggttagggtttagggttatgattaagctttagagttagggtttagggttatgattaagcgatagagttagggattagggttagagtcaaggattagggttagggtttacggtttagggttaggtttagagtcaaggattagggttagggttagggttagagtcaaggattagggtttatggtttaggtttaagggttcaatgtttagggttatggttagagttagtaattagggttagggtttagggttatcgttaagggttagggttagattcaggtattagggttagggtttatgatttagggttagggttatgggtttagggttatggttagagtcaaggattaggttagtgtattcatatatgtgataatgtaatacttagagttttgtacttggtgtattcatatatgtcataatataatacttagagttctatacttggagtattcatatatgtgataatgtaataattagagtcctatacttggtgtattcatatttgtgataatgtaatacttagagttttgtacttggtgtattcatatatgtcataatataatagttagtgttctatacttggtgtattcatatatgtgataatgtaatacttagagtcctatacttggtgtattcatatatgtgataatttaatacttagagttctatacgtagtctatacttggtgtattcatataatacttgatatattcatacaatatttgctgggacgaagcgtcattttactttttagtgcattcatacaatacttgtgtctacatacatacttggagtatttaagat

SEQ ID NO: 42843 - DNA, 1127 bp, Zea Mays
ggcgcagatcgagatctcctgcacatactagaattacgagtgacccattttttcattcattctgagtgcgtgccgtcctgctgcctatctagggtctagtagcaagtgtgatttgctgaagcaaagcttgctctttttttttgtcgcgagcagagttggatgctaagacgcttagccttgcaccgattggtagctttgcttcttgtgatgccctgcaccgattgctaagaagcttgcttacgttcgcttatgaaggtcaacacagccttgcttaaatctggcgccttttccataacaggttgccgagcgttattaaactctctgaccgaaaatttctagtgcatgctgcttggaacgagggggcggggcgacggatccggcagcgactgcactcacagtcccccgtctacataggaccggtaaaagtgtgctgtgcgtggagaaagtgctcctagcagctagcagcggattgttcttggtgtgttgcgttgcgtgaagccttgttcctttgactcgtggagccgggtgccccgtctttctatctatctatccatccatccatctatctacgcgtcagcctcacgcacaggatggacatgcccagtctggcaaaaggggggaatggatgcgttgcgttgggaataggatcgcaataatttgcgtgtacgtcgctgctgtgctgcggtgcggctctggtgtcgagtcgagtctgttccgtgcggccactgcgctggcgtagacttggcacagccgtcgttctctctgcctttccgtctgctgctggtatcttcttcttgctctgagcagctgattgttttgtttgccaggacatgttcttcactcttgtgctctgctcccgcctccagcagttatgacttacgagttgcttgtaatagtccaaaaatgattagttttggagcagatttggttgttgtgtgtgctatacgacatgatgagctgattggcaatttccgaaactggcgagcgaagtcgtatagagtagcatttccccatgttggtgtcatggttattgccagcaagaatcaaacgagcctttttttttttgccatgagcatacacatatgaggctcttcaataattttcaaccgaatctccaatcagaacac

SEQ ID NO: 42844 - DNA, 746 bp, Zea Mays
caaattctggacaagccttcagaaagctatgggcaccaagctagatttcagcaccgcttatcaccctcagacagacgggcagacagaaagagttaacaaagtcctcgaagatctattaagagcatgtgtgctagcattcgatagaagttgggaatccagtctaccctacacagagttctcatacaacaacaactatcaggccagcatcaagatgtcaccattcgaagcgttgtatggacgaaaatgccagacacctctcatgtgatccaacgtaggggaaaagcactagaaggacctgcctttgtcaaagaggcagaagagaaagttgccctgatccgcaggagattacttgaagctcagagtcgacagaagagttatgcggacaataggcggagagagctcagatttgaagaaggagacttcgtctacctcaaggtctccccgatgcgtggtgtcaggaggttccgagtgaaaggaaaactagcagcgcgattcgtcggtccctatcccatcattggcagagtgggacccgcagcatagcgtcttgaactaccagagtccatgtctgacatccacaatgtgtttcacgtatcccagctccgcaaatgcctgcaagcaccaaaaagtcacatcgaagaagaggcagtgcagattcagaaagatcttcagtaccgagagaagccagttaagattcttgattcagctgtccgaaagacccgcacctcagaagtgaagctctgtagaat

SEQ ID NO: 42845 - DNA, 438 bp, Zea Mays
caccgaagctcccaggcggttcccttgatctgaagcctgcgccgagatcccgggctgcgtccaccgccccagtgccttgcccaggtgcaaataagtaggaccctgcgaccttccctattgcattggcgagcagaggcaccagagtgcggatcgcacatcaccgtcagggcccttcggcgattgtcctctctgttgtggggtgggtcgtcggtgacgggtgctcgcgctcccagtgtttgaagccgtgcgtggtgaagcgggttttgcaacgtgggccttagcgataccttgccgatgtcgagttccgccgtggatcggcctccacagcggtcaggttagagcgccgccggactcactgtatgggctactccctgtagatccaccttcgtcaagcatcgcgttgcatcatagtgcactgggtgggttgcgtcagggccg

SEQ ID NO: 42846 - DNA, 721 bp, Zea Mays
gctatataacaggtgacatacttctatgggatatgactacaaaatcctccagacaagagaagcaaagtgatgtttcatctaatattgttaatctacagctggtctcagggagtcataggcttcctgttattgtcttgcattggtctgttgggtcagaagtacattctaagaaaggagggcatctttttgtttatggcggcgatgatatgggatctaaagaagttctcacggtttgcctattttttcttactcatcattgcaatttcttttgcttgccatcttaaaggctgctgtgcatagagtatgccttcttagatttgctgctttacaaatttggtaaagtgaattcctagcttcctaaactgaaatcatggtcacctggttgtgagcctgtgacatgtgtttagtgtagagacacagtactagcttggcatggcgatagggcaacacgggtttgcatgaaacatgatcaaccatgagagtttcctgcaagtataagaattgtttccttaggcaggacccatgttgtagacccaaacaattctgaagatattttttagttcaggtctcagcatccaaataatgtatacatacctatcggaatcacttccctgaacatggaagaatataattgtttcccaaatattgcactgcagaaaactcagcctccatcaatgacaaaattgctcattctcttgcaggttcttagccaggaatcaac

SEQ ID NO: 42847 - DNA, 1075 bp, Zea Mays
tgaagtttgctctgttcttaacaagaatcaagagaataagtgggtggaagggggtcggttcaggaaaacgctgaagatcaaaactgagtaaatatctgaagaacgcgggtaaaagatctgcggcactgttgaatcggatgtgctcgagtaatctggtgaaggggatttgatcgcgtaaagataaattcggacgtggcaccattccgcgaacccaatcgtgtgtgcccagagaaatcccaccggcggtcaccgtggctcggtcacttccaccgcggtgtcacccatgcctcattttccccttactgtgcctcttctatacgtggtagccatgcgtgaacaaagccttccgcggtcgctgatcgttagccggaccgtcatggctataaatagcgccatggaccacggcgaggtattcgcatctccaccagtaagctcagttgaagctcaaattcacggaatcctatccacctctcccaaaattggttgtgcacggtgaaaccatagtcccttacagccgtgtagccctaatctcacctcctaattccacccagaactgtcacggcgtcgttttccccctttgctatcactggcaagcaaaaatcctccgtgccccatggccagctaccttcaggtctgctcctattcgttttaatcgtgtttcaacacctatatacactcgtgatactcatcggctccacccttcttgcttggccacgctcaatcgcccggaacacatgaacttgtgttcggtattttccgccaccgtggtcagactaagccagagccataaccacccgattaaagctcgttctgggtttccctcgggtcggtggtgctggccctttcattaatctgagcagccaacgtcggtcatggccagtccgagccgcgtggtgatcgacggcgagcgcgccgtggtcatgggtctgtttggagaataaacaaaagccgagagacctctgcgtaattgttagagagacgatgaatagtggctaggggctcttaacgaattatccaagcaatcgggggcctctgtgcaaatccgccaacgcgggcgcgttcccgttttctgttt

SEQ ID NO: 42848 - DNA, 865 bp, Zea Mays
ggtttgagcacttactttatttcaactgaagtgcttattttcggtgtgtggcagcaaaaaattgattaactcccattcaccccctctggtcgcctcaccggtccttcaaggtatgtcagttaagtacgtcgattaaccaacatactttacctaagtacgttggcctattagagtaagaattttggttcctgaccaacgttctttaaaccttttcctatagtgtagctcttaattttgactttgttgggctataggacttttgggacttagacaagaactctcactagaaccaaagtaaaggggtctagtcagttgtctagcttaggaagtatttgagcatgcaatctttgcctctgatttcattaatgtatccaccataaagaaaacatagggtattgcatttgcatggcctaaacctctacaaatcatttatatgcttgttgccaagtgagccctctgattaagtgaccaccatcctacacccctctctcattttctaactctatgtatttctcaagtacccttggtaccttggcgtcatactaataatggtacatactaactagataaatattgcataactactaactacatatctgactatataactaaataaataaataaccatctatatatctaaatcactaactaacaaagtaactaactgctagttgttcaattatcgctactcacgacttctggcaccgcatggtcattcaggtccaaatcgcacgagaccatgaaggcaaggccacatgccacctgccactagctccccgccttgaccccaatgtgcctttgactttgagggaggtggtaatgttggtccacacaaaaatgtaggcaggtgatgcctacacatgga

SEQ ID NO: 42849 - DNA, 384 bp, Zea Mays
tatcctgcctttggtcgtaacctcatctttgccacatgtgagtcttgccttagctccattccttattgaactcatacccttggtttttctacaccttcacctcttctcttacacccttgtctgttatcgcctttaacactcgtaatatctatatctttaccttgatgcttactttcaacatatcctttaaagcctccccttttccatctcaggtagagagtggtgcttcacctatctcgtccttgattgttttccttctttgtcgccttgcaagttgtgtcctaattccatcctttgatgtatttttgtttgttatcctcatcatctttgacatctaccaattttatcttgaaacttatctttatgcctactctttaaaaaata

SEQ ID NO: 42850 - DNA, 396 bp, Zea Mays
cgtcgtagtctcaggaaattttctgaaatgtgctagtgctctactgatggggttgaatgaacttgagatgtattacaatagctgtgtgtcgtgcaggttatccaaaaatggtgaaaggtggtgtatgttggtaattgggaaatagtcacgttattatccaattcatgttaagtaggagtcgattgcgttaagtgattgttatatacatattgtgtctcggattgcgataataatgggttagccgacttgttagatggctttagttaagctcgtaatcacgatgaattgcttattgtggtctaaatgtgtatgattatggtcacggatgaaatgtagtagtgttcatatgatgtctaagttaaaatgcgaattattgtgtgaagaacgcatcgatat

SEQ ID NO: 42851 - DNA, 940 bp, Zea Mays
ttaccccttaagcccacgtttgacatggtgacaggtacccgagaaccaggtacctgtagtagttctgtgactcttaacggtccacctggcgactaggtccctaccgagcaactcaacgagatggaggtctcgacaaagtccctatcgagcaactcaccaaggcggaggtcccaacctagtccctgccgagcaactcagcgaggtggacgtcccgacctagtcccagctaggttgaattcagcgtgcgcacgtgggccctgcctctcgggcccacctatcactcacagaatgatcactcacatacgcttgtactcgtctgttatgaaaatgaggtagatattgttgatccatgttagccacgacaggccgcgtcgtcaccgaacttcatctgggccaacagtgcggcacaccaaaggggtgttgggaagtctctgtcaacatgatagcacctcaccacatatggtctttgtctttggcacttcctgtctctaccttgtgagaccaatcaaccccagtcatggaggacctaagcatcagagtatctatagtgtgacccacatacacggcaagacggataggcctggacgttcggttcttcaggttggtttggttcctcagttttttataaaattcgatttctagaaaatgagaacctaaatgtgtatatagaaaagaagaaccaataaatggttcgatcgttttaaccgaattaaccgagactcagtcgctatgctcgttcgttcgcttttctctggcggcttggcttgggttgcctttttgctttctaggtgtagacgcactgagctcaaggcaatttcacttcactccctttggattggctagaacataaaagcacccttacgagcaccctatcagaacacaaaaaattcagaaatgttttgtaacagtgcaaacaattatccctaaaaattgtaaagac

SEQ ID NO: 42852 - DNA, 861 bp, Zea Mays
caacggacgtgttcaccgccgtcagatgcgcctccacatcggagcgaagggtggtggagaactcctttagggaacacgcaaatgtgctctctcgtgtctccagtgccgggatctgagactcccacttgttgtcgagtgtttgaagccacttatccaactcggacaacagatatcgggtctgatttttcaaagcaagggtgaggtgggaaccgatagggtgggaggacaacattggaggccgaggacggtgatctttgataccatattgctagcacaccagaaggaagaaggtgccaacaggaagaagagaagagaattcggagaggaggtaggaagatggacattgtattcttcaatttttcgataccatgtctcttgttcggtcttccatattatacttgtatgcacaccaccaaggattacatttcatggcccacaacatacgacccaacacatggctcagagtagcccactcacacccactcgagatcactaaggcggcagttagtgcgacacagtctagtgccaggttcacgccgaggagcttggtcttgtgtagagtcctgtagatcatatggcaatggcagggtagtaacatgtcgcttctaataaaatttgattactagactcagtccaaaagccaagaatcgaacatatcatctatgttaaatggcaattgaattctaagggtataaattttgaagtacgagcgctgagcgcatcatatattttgtaacagacacgttgttgataaaactacttagggcacgcataaagccaattaatagctcgtgtcttgcattgggtcgtgtttagagggctaactataaaaagaacaaagaaccgactcttgacgaagcc

SEQ ID NO: 42853 - DNA, 436 bp, Zea Mays
taagaaagggattataccaagaatggtttgtaattgagattgtggtttctaataaaaaaattaagagtctttctctttttagtactatttagaaagtaattagaaatgcatgggtatcttctatgtttagacacacagttaggtaagaggagagatggtcagagtgaggttagctgatggtaagaagaacttggtaagggaagactccatccaaggtggtaaatcttgaatcatctcgagatctgctttaactcctattctttcatgtcgaggttgatctcctccttcttgctctttggtgtctccatccgggtttgggacaagaggccaagatagatctgttatgtaggtcaagttggtcaagttgttgggtatggccgagttgatctaggtcaccaatttaggcttaagtgaatttggaatatggccttatcct

SEQ ID NO: 42854 - DNA, 378 bp, Zea Mays
caagaaagacctacgaccagatcttgaaaagcagtgatggcgcatagtacttcctcaaccccgggaagaacatggctacgacaaccatgatgcttcaattgatcctcgagctagacaagcccgaggcaaaggcgatgtaccacaacctccacaacctggtggagagagcaacggtacaacaagctgaggttaatcagcagtagcatgccagcacagagagccgtggcacacacacaacctcatcctggagtagaggagcgcaagcctccatgtccactctagcatgtgtccacataaagcatctcatcggaggcattcgcggtgcccgacacatcctcaacaataagcatcgggaacgataagaggtcgagcaaccac

SEQ ID NO: 42855 - DNA, 1688 bp, Zea Mays
gttctgatagggtgcatgtaagggcgcttttatgttctagtccaatccaaagggagtgaagtgaaattgccttgagctcagcgcgtctacacccagaaagcaaaaaggcaagccaagtcaatctgcgagagaaaagcgaacgagcgggcatagcgactgagtctcggttaatttggttcaaaatgaatcgaaccaaatttatcggttctacttttccatatacacatttcggttctcattttctaggaaccgaattttataaaaaactgaggaaccaaaccaaactgaagaaccgaatgtccagacctatccgtcctgccctgtatgtgggtcactatagataatatgatgcttaggtccttcatgactggggttgattggtcccacaaggtagagacaggaagtgccaaagacaaacaccgtatgcgatgatgtgctatcatgttgacaaagacttccagacacccctttggtgtgctgcactgttggcccggacaaagttcggtgacgacgcgacctgtcgtggctaacgtggatcaacagtatctacctcgttttcataacggacgagtacaagcgtatgtgagtgataggtgggcccgagagccagggcccacggcacacgctgaattacaacctggctgggactaggtcgggacctccacctcgttgagttgctcggcatggactaggtcgggacctccgccttgctgagttactcgatagggacttggtcgagagctccacctcgttgagttgctcagtagggacctactcgtcaggtgggccattaagagtcacaggactactacaggtacctagttctcgcgtacctgtcaccatgtcaaacgaggcttaaggggtaagctatactgaccaaaaaaatctacaaggaagggtcattggattagaatttgcgcccgaccaacagggcgcggtattcctaggatcgtattacttcagccattacagaggtgaggatgtgcaagtctgactaagcgagaggtttgattgatgaaaatgggagtatgtatgtcagagcgcgtatgtcttccaccacgacctattggtggacagtggatcaaccacttcgtagctattaagtcaacaaaggacactggataaatcgttgcaggacatgactgagtgtaacgatgggctctagggtggcctaggtgtgcctacaataccctaacggaggaagaaggcatcatccatggagtccctcgactgatgggaaccaaagaggacaacgaactagacgacaatgcctgaccttttttcgcttgacccttaggctcttgtaacagggttggtctatgaccttggcctataaaggaagggaaagggacatgattccgaggatgagcaatcacacatacacatcactagcacaagtcaaagcacatagcacttataaccgcacacatattcacacactagagacttgggagcttaatccctctctcgcccgtttgtaaccactactacaaaccagtgcaacgtaacacgagcaggtcaactggatttatggatgttatgcccaaactagaataaacccttgtgtcctctttgtacaccattcgctcaaagacacgcagagcacaataattactagacagtggtttcgaaacaccgacagttgacacgccagacatgagcatttttgcccgtctcgcaaagtgttt

SEQ ID NO: 42856 - DNA, 475 bp, Zea Mays
tcttgatggcagtaaaaaacttgccattggcacgctcaacgacaccattggattgtgggtggtacaccaaggcgaagacaggattggtgccgatggaaaagcagaaatccctgaagtcttggctgtcgaactgtttgccgttgtcgactgtgagttcggacgggactccgaagtggcagacaatgttttgccagaagaatttttgagcggtctttgatgttattgtggatacttctctagcctcgatccactttgtgaaatattcgatggcgacaaaggtgaatttgaggttcccttgagccgtaggcagtggtccaacgatgtccagcccccagcgttgaagtggccatgtatgggcgatgagcttggtgaattgcgaagggctgcctgagcgaggggagaattcttggcatgcttcgcatgacttcgtgactcgtatggcggtacaaattattgcgggctagtaaaatccttg

SEQ ID NO: 42857 - DNA, 430 bp, Zea Mays
cgacgacgcgcgcgacaacatgcgagcagtgcgatagcgcgtgaacgatgcacaacgacgtgcgcgacacagacgtcacgtttacattaaacaaatattagttaaaaacatcttagtcggcactaaccacattaatttgcatctacaaaatcgtaatttaaaactatacctttattttaattagaatgtcattcaaataaacctcagattaactatctaattaacgaaaatatgtgttgtggctaaataatattactaaccgatagtcgatgttattacgaagtcactacgattgaaacgagttgagacggactcgcaacgcaacatatatattgattaacttgcgttttctcggatctaaaatatatggcgcgattcttttggtcgaaaatgtgccacacgatggaccacatgggccacaactatagac

SEQ ID NO: 42858 - DNA, 533 bp, Zea Mays
gaacgatgtaagtgacatcgtgtgggcgaggctcactggttagtggcacaggagagagggggtgtaatggtatttggtttggcctgtcgggctgttgaccatggtgctagtgacggttcacgacgattcctcgttgtcgtcctggttctagggtacgtgagggtggtgaggtgatgaggggactatgacgactctagggcgtggatcaatttggggagaggaggtgctcatgatggttgtccattagagatgcggagctcagttggagcttgcctgcattgcctccactcggcatagttctgggctgggtggtaggcgattgagggagaaaggctttggtcgcatgtgatcatggggttgaattgttggaagaagttatggctgtgggagctctccaagggcggagattggttcttcgagctcaacgttgaagtgctcctaggagggggaagggggtaggagttgctcgatcggctggtggggatgaggggcaccagacgacccccttttgagggcatcatggcaaaagacga

SEQ ID NO: 42859 - DNA, 462 bp, Zea Mays
ggtttactaacctagccccttggggtctttagtatatatgttttatcttcgagaccatattgttgatagtatgaattttggatccctcccttatgtccctttgctgcaaatcttgccttgggaacttgggttaaccaggacgcacttgatcatagggaggtggtcctagaacgaaggaagcagatgatgaccatgcactcattactggattgcttgaggcatttgagaccaaaggtaaacttagtcttggctcctgtaactgaggttggacatactgtggtatataaggtggaaagtatgatgatgtactgaacacctctttttattggtagggttgagtggctgacgaagcaagttccttctgcttgttgattgtatgatggcatgttcttatggtgtggcctttgttctcgccacaaaacaagcataatggtttccttataggtgcattgaatctaccat

SEQ ID NO: 42860 - DNA, 666 bp, Zea Mays
aacctgacaccgatgccgacaaggcaatgggaagggcctgttttgtggcaacaccaccacggaacatgaacggtggggtggacgtggaacctcccaaccaagaagaggaatatcagcttcaacctccagtagcagcaacaggaactcaaggccttcgtccaaaaactcaactgggtttacgacgacatcgagtggaagagccttgaggtcgaaagtcctcgggcgagaaaggtctatgatcagctcgtcgagagcagcgatggcgcacaatacttcctcaaccctaggctgttcatagctacagtggccatgatgcttcggtccatccccgagccaaatgaaccggagacaagggcaatgtacggaacctctgcaacctggtagagagggtcaccataaagtaagcacccaccagcatggatacctttggtacccgctcgacctcatcctgtagcaagggggcacaaccctcccaatccacaaggtcgcgcattcctctgaagaactaccttggagatatccacaatgcctgccacatcctcaacaacaggtgacaggagcaagaagaagcagagcactcgcatgcgcccgagaggaggcgtgagcgaagtcctagcccatctgggcccataccactcgcctttggacacacaatctggaagccgc

SEQ ID NO: 42861 - DNA, 781 bp, Zea Mays
ctttttggcgactctgctggggactaagagaacagatctattaaatcaaccacgatggttggttacaagaatcgctctaaggtctccaatgataacatcttgaagctagctcttgagagcatgtcgactgatgaacaacaatgatttcaagactacatgaacaaggtgtaggaagaggcgaaggagaagtacctagtaaggggagatctagatggcatctctcgtaccttcgtcacaaaactccagtgtgagtaaatccaatgacatcacgtcccttaaacaatacgtagatttacagtggaatcaattacgacaatgcatagggggaatagaggagaaacttaagaaattcacgcagaccatagaaaatctgttgtttctagtttctcatcacatgaagtcatgattgagcctaccatgcaaaaagcatcggttacgaatgggtcctcgcaaactcacccattatatggtatgtcgtcgaacacattcacaacaccaccatagtcatcgccgctcgcacctagcacacgaccgactctaggcatgaccggactatgcgggccttatctcggaccatccggtatccttcgccgaaccattcagtcccacaccaatctatgcgcaaaccacccaggcggcgccgtatacagccggatagtctggctataaccatggactgttcgacccaaccacatatcgtctggcgacacatgacagaatgcctagagtacagatggacggtctgacgctgtatttcgaaccattcgattttgtgtacgca

SEQ ID NO: 42862 - DNA, 498 bp, Zea Mays
ccgaagcgcaactggaggatgtccttgaagcggtgccagcacggagtcccctcatccgtctgtagctggaggtaccacgactgggccacgccctcgagatggtaagaggccatccaaaccttctcctcctccatgatccgctaatgatgaaagtaggactcacagcgattgaagaagagcatggggtctgacttgccgtcgaaatgcgggaagtcgattttttggaaccttggtggccgatcgatgtggtgctggccgtcgtggccgccgctgccggacggcgaggaggagggcgtccttcttcaacgactcgacgtcattttggaggacagatatcgtgcccacgagcttcttgattattgtagccaaattgtcgatggttttggtggtcataatggaggaggtcgacggcggtgatggtggagggcttggtggtggttgggtgacgttgagggactgaccggaggtgtgggatcgagaggacgaagatcgcctgac

SEQ ID NO: 42863 - DNA, 337 bp, Zea Mays
cggggattgactccgtcggacattgccgccgccgtgtgtgggtaacattaccggtcgttgtcggggtgggggagtgtcgatcgctcggccgttggatgggaagcgtacgtttgtgattgggttgtgggataccccttcgtcccaaccattatcaaccgtagattggcgatcaggcggttaagagaaaaagtggggatcgtgcggagtggatcgtcgatctcacatccgacgatgattcaggaaacggggtttatatccatcgccgatctaatctggggcgtcaacctgggatcggacggtgggtgtcgtcccgtaccctttcgatcgagcgttttac

SEQ ID NO: 42864 - DNA, 915 bp, Zea Mays
ggccaacagggtcaccgtcgcaagcgtcatcgccgcggtgggcatcgtcgccgtgatcggcaccatggccacggtgaccagcgccgacgacaacgatggcaacatgctctccagcgtgaaggtctccacggtgtgcgccttcacgcggtacccggagaagtgcgagcagagcctcaagcatgtcgtgagcgacacctccagcccggaggacgtcttccgggacgcgctcaacgtggcgctggacgaggtctccaccgccttccagcggtccgcgcacattggcaaggacgcccaggacaaactcagcaggaacgccatggacgtgtgcaagaagctcctggacgacgccaccgaggacctcagggccctggcacgggtcaagcccgcggacgtggtgcgccacgtcaaggacctccgggtctgggtctccggtatcatgacctacgtctacacctgcgccgacgggttcgagaagcccgagctcaaggaggccatggacaaggtgctgcagaactccaccgagctcagcagcaacgcgctcgctatcctcacccgcctcggcgatctcatgccggggaaagccaaagatctgcaggccaccctggcgggtgctgtggggcacgaccgccggcttcttggctggcagataggcgatgccgaggaggtgaccagcggcggccgcgggcttctggacgagatcgtgggcgtggcaaacgcaaaccggaagctcctgtcggatacgctggacgagatcaccggcatgtcccacggcgcaaacggccggcgcttgcttagctccttggggtctcggatttccagcgcccagggagacgacgtcctcgcccgccaccagctgctgggcgtgtcgcccgacgacgagaccgataacgctgcccggcgcaaccttttgtccac

SEQ ID NO: 42865 - DNA, 511 bp, Zea Mays
gaagaaattttataccgcaaatttagggtgttacaatatgttactgaagagcaagtccaacatgtgcgatatcaacgaccaacatctgaacatctgctcaggaagtatgagtaccagtataggcagtgtcgccagcatgagcctgaggatgaggtatacgagcaccatactaggaagcgcttgaggaggcatgaggatacatgggatcactggcattgcctgttcttcaaacactattggaacactggtgtgagcctgcccactaccagcaactgcccgaaggagactgaattgcgatatcacctaggcccgatgacacaccaaggtgaacggattgaaccacaacaagaaaggagccttgatgaagaagaagataggtatcaccgaccatggtggtgtctagatggccttagtaacaccaagaagtgtagggtgcagcagttgtagaacctggaagaaactaaagccaagtaccttgaggtgctaaggaatacgcgcctagacctagtgg

SEQ ID NO: 42866 - DNA, 402 bp, Zea Mays
tgaagacttaccttctgatgaatcagtgggttagtttaacgatatcattatccttcagggggtctagttccctcaggaggaagccccagagcctgttgatgcagttctagccctgccagcattccctctagaaggcatgattttggagggaaacaacgaccagggagaagaagacatgcaaatagaagttaacatcaatgtgggcctcatgcagcatttggagcagtccacccctgaccctgcatttgaagactatatggctagaaagtgttttcttcttgggctgatttgttccctgacaatgctggctttgtctctgtcccaaaagtttgggctactttcttcacgggcctgctattgaggccggattcttttgactgggccaagaaattttgttgtcag

SEQ ID NO: 42867 - DNA, 480 bp, Zea Mays
gaattagccctcgtggcgaggtcaatcgcgcagtgcacggttgataaccagaggagaagtggtgctgcgattgcggggttctagtcatgttgattggaagccggatcgtctgtgtgacatctccaccaaatcgatagttaacttcacctgacgaaagatcgggcacccccgttcctatccagtggtattcaaatactcaggtattaccattaggcttaccctagtttagtttaggtttttcatcctataactccagataatttccatacaaaaaaatttccgctgtcctagaacccttgtttagcctttgtaatttcgttttcactttggctttgttcagttcatgttcgtggttgagtcgtgttgctggtttagggtgtatcttcgtcgtagatcaactgccctcgctagcctctatcccatccaccattacccagatcacaagtcgatccacccattaatcgacttggcctcgctagc

SEQ ID NO: 42868 - DNA, 714 bp, Zea Mays
gtggtagaattagagctgataacatttgcttgaatgtaagtgtggaaataagggagatagcttttcctgctaatctcatagtaatgggtactcagggaatagatgtcatcctagggatgaattggctagataaatatcaaacaattatcaggtgtgataagaggacagttaagttggtgtctccactaagagaagaagtggtagtcgagttaatctcacctgagccaaggaaaggaagttgtcatcagatggctattgatagcaaggagtcagattcactcgagattatcaaggttgtgttagaatttccagatgtgttccggaagacttaccaggtatgtcacctgagcggaaagttgagtttgctatagagcttcttcctggcgctgcccccatttctaaaagagcctacagagtatctgaccagagttagttgaactcaagaagcagattgatgaactgttagagaaaggttacatccggccaagcacctcaccttaggccgcccctatcctgttcgtggagaagaaagatgtcaccataaggatgtgtatcgattatcgagctctgaatgaggtcacgatcaagaacaagtacccttgcccagaatagaagatctgttcgaccagttgagaggagccagcgtgttttcaaagatagatctaaggtcaggttatcatcagctcaggattcgaccttcagacattccgaaga

SEQ ID NO: 42869 - DNA, 434 bp, Zea Mays
ctcccacagcggtgaggtcaccggtgagaccactgatcatgatggggaggcgaaagtggtgtctcgtgatcgtggagaggtggtgaagttcatgagctaacttaattgaaccttaggctactagagaggggagagggaactcaccggagtggagggagaacgcggcggcgctggctcgattgagctcgggggaggggtgagggatggccgaggctggtgtgaggagctgaggggctcggggcggtccttttataggcgaccgaggagggggaggaggaggtggcatgcaccggcgaggcgcgcttgcgatggcgatgatggcgcaaagtggtggcgacgggatggctcggtcacagggcccggggacgcaaggcgccaattcggctggtgggcgagtaatggcgaggagatgtggcggaaggtggtcggcggcg

SEQ ID NO: 42870 - DNA, 629 bp, Zea Mays
tcgttggggagatcaccaagtgaagcaaccagagcctcgacttcttcgggagagggtcgcactctaagacccaggccactgtcgctagcaggaggattggacacaaaactgaaaaaagtcttggaaggtggcagattctaggcagaatacgcaacaggagcaccaatattcgacactttgcctctaaggatcatctccagctggcttaccaaatccatagcagggatcctcctattggtaacccgggttgagtcagtgacaccactatacaaataagccgggtatgctctgtccttcagtggctgaatgttcttaaaaacagagtctgcaactacagcttcggcagtcagacctctctctttcaacaaaccaacttcggtaagcagaaccctggcctcagttatctccaagtctgtgggggattcagtccaacttggagcacgaacgtccggctctctccctgactgatagggcagtgacttgccatgattctccacaataaaccactccaaacgccatcctttgatgctgtccttaagtgggatgtcgaggtactctgtcttcctcccacggtgcatctccaaactcgtgccacccacaagctggtgctgcccccggccattccaggc

SEQ ID NO: 42871 - DNA, 489 bp, Zea Mays
aaaatcataggaacagcacaagggcttaagctttcacgaacaaaacctttatcaagaagttcttgcacttgcctttgtatttccttagtttcttcaggattggttcgatatggtggacggttaggaagtgcagcccctggaataagatcgatttgatgctcaatccctcgaattggaggtagtccatccggtgtttcttgtggaaacacgtcttcaaagtcctgcaaaagatcagccacaacactaggaagagatgttatgtcgttaggagaaatcaaaacatctttgttcacaagtacaaagagtacttgatatgggttgttcctcacttctctcagctcatattttgtggctagcataactagatgttctccctcttccttccttttatctcttgaatttgtcttgtagcactcgctcaccgaattgtggatggcactcaatttcttttgctcttctcctcctctacttgctgcactaatttcagtt

SEQ ID NO: 42872 - DNA, 668 bp, Zea Mays
tggacgatacccgcctttgtttgcaaggccgacagaattgaaggcttggatttacccaatgaaaggccaagcttcacatagcacagttgaactgtccaagtgagagcccagcctagccgcggcctactactactgctacaacaaccttaccttctatcatcattagcgcggtagtgtatgtttgcatcgatgattgccgccaaaattctgaactgatgagtgtttggcacacttttcttatgccactaggacacgcttctgtacatgacactgtaacacccaccgacacttggacgcgtgataatgtcatcaaaagtttgttttttttgttgttcacgtttatcagaagcaacttcactgaacaattggatagaaacgggacgcgattctggagactccaggccttccaggagtaggaaatgatgctagagttacttggacggcactcctaaactattcctggctgcctagcagaattctgaaacttgggagctgagagaacaggggagcagcaaaaagatgcctacgtaaagttgtactaatagtctagtactaatagagcactttgtcacagctactctttgcacaagaatccaaagcatttgaatttttccatggtagataaatcttaataccaaagaagagaaaatcaggtggtccaattgttt

SEQ ID NO: 42873 - DNA, 317 bp, Zea Mays
atgcctaccatgtcggtaagggacacagtgagggagatcgaggcatgggtgacaccgcggcaaaagtttaatcgagtcatggtggtcgccgatgactaactctggccacgcgtgactcggcccgcggaacgatgccacgtactgagttactcctaggcgatcaaatcctcaccgattcatccaagttcatccaaatcaattgtgtcgtacgtcttttggtgttcttcagattttcaacgtattggatcttcaggacttatctgaatcggcaaccttctacccaccatatctctggatttttgttaagaacagagcag

SEQ ID NO: 42874 - DNA, 551 bp, Zea Mays
agaattaaaaggacatgtgtattgtaaatagcatgggtcctttctttataacaccaatgattgtgttgtcttccatcacaaatacaatcgattataaataaaggccggctgagatttcaagaagtgaagattgacaggccacctatccctatcaccacattagtgctgacaagcaaaaaggtctccatgtgtggccaataaaggcaaaggtaaatatattgtcatcagtgatcctcacacgccaaatatgtcatgcaaagtggttactcggaaggcttcggacaaaagaaagacccgaagcatcagggggaaaccagcatcggacacccaatcacagtcacctgtcctgcatgtaccggcggtccaggcattaaggccaaacaatccaggacatgtgtggatagtccagctatgaaggctggatgatccgtagataaccaaaagcagcagcaacctcagaccatctaaccacaatgttccaaaataggtactaggaagtgaaacacttctagacgtctggccgactcaaccatgtcggccctacttttgtt

SEQ ID NO: 42875 - DNA, 612 bp, Zea Mays
caaggatgttcatcagccttgcggaggtggaaagcgagctgagctgcggctccatctttcgcgtgagcttcaccagtgcctcatggtacaccgccatgaactggtctagctccaattccatggggtgggaagtgagccgagttgcggctccatctctttggctttgatggcttcggtgccgcctccaacggtgaccgctggcccggctgctgatactgaagacgccacccaggaggtcatacaagatgtcgaggagatggcggctgcgcgcttccaacgcgaccctacttatgtcgagtaggtcatacctgtagacataaggctagggcctcgattgaaggcggatgtaataactttgtttttgtaagatatttttgggaactatcaattaaatagctcttatctgtatgacacttgttcttgttgtgtgtggttttatcaactcctttcctgatacccggccccctgggatgtaggctcgacgtgtcgaggctagataccagcatacctaagaaagtgttagtgtctcggcccccaagaggcagcctcgactgggacctggacctgcacacagctttggctaggaagtgttagtagcacacccatcaggac

SEQ ID NO: 42876 - DNA, 535 bp, Zea Mays
ctgaatttcagcctctaactcaaaatcgagcgcgttcaccttaatccctagctcaaatccttaagctcccattaacaaaaatgtgctaaactaacccctctaccacatatctgaagatggcattgggatgcatgccctggacacatcaaacccgggatattctctcagtgttcggcagtgagacaaacccaacttcacccctccatatctcttgatccagttagcaaaacccataagcctgcacacacaaacgacaaaggaatgtcaggggaagagatctctcaatgggatcatggccataatgtcaaagatttggagccaatccgcgcttgaacatgacctctctctgcgctgcctcgtggtcgacgccgtgcccagacgccagagagcgcactggcactcgcccgcgcacgccccgagcgcttatcaaagccacccctcggccgtgctcgcccacgcctttaaaaccacccccaggcacgcctctcctcactccgcgctcaccctcgctggccaacaccgctcccttagctcc

SEQ ID NO: 42877 - DNA, 1006 bp, Zea Mays
gccaatgataggataggggccgacgaaccacggagctagcttccctttcacttgaaaccttttgactccgcgcatcggggagaccttgaggtagacgaagtatctttcctcaaacctgagttctctccgcctgttgtccgcataactcttctgccgactctgagcttcaagtaatcttttgcggatcagggcaaccttctcttctgactctttaacgaaggcaggtccttctagtgtcttttcccctacgttgtaccacattagaggggtctgacacttccatccatacaacgcttcgaacgatgacatcttgatactggcctggtagttgttgttatacgagaactctgcatatggcaaactggactcccaatttctgtcaaacgttaacacataggctcttaataaatcctcgaggaccttgttgaccctttctgtctgaccatctgactgggggtgataggcggtgctgaagtctagcttggtgcccatagcttgctgaaggctcatccaaaattttgaggtgaactgtgttcccctgtctgacactatcttctgtggaataccatggagtctgactatctctttaagatatatccgggcaagggtggctcctccgaaggtaatttttactgggaagaaatgggctaccttggtaagatggtctattatcacccagatagagtcgttccccttttgggtccgaggcagtccagttacgaaatccatgcctatttcttcccacttccattcgggcactggaaggggttgcagtagacctgtaggcttctgatgctcggtcttagtttgttggcaagtgtcgcaccgggccacatactgtgctatctctttcttcattcctctccaccagtatctggttttgaggtctaagtacatcttggtggtccctgggtggatggagtaggctgagttgtgagcttcgtcaagcagaacttctcgagcctctccttttggtacacacagacggtttttgaaccaaaggact

SEQ ID NO: 42878 - DNA, 1143 bp, Zea Mays
tatctgcccgcctcacttcactcgattgagatctggtctgagttacttcgccagtctcgatgcacctgacttagcgcgcgcccatgcgtcctcgctagccgtttttctggctgcgaaccctaaccgtgctttttcagcgacaaacaatttcctaaaactcttgttctcctttgtaattgtgcttgatttcgcttgtgtgcaaggtctgatggtgcctaggaagaagaaacaggggaccaccgagcctgtcattcctccaattgaccccaatatccaacttctgttctgtggtaaccatgctttcattgtttctgagtccgatctgcttcatctagtcgatattggggttctgccaccaaaggagttatgctcctggtggctctagcaaggaatcaccatcctgacggaggatagccatgagttagtggttttcgttccctttctgatccgaggattaggtctgccagtttctcctttcttccacgaccttctcaatttctattctctcaacttgactcatttaaatcccaactcttttctccaaattgctaccttcgtccatctctgtgaggcctttttgggggttaatccgcacttcgggttgtggaaatacctgtatcactacgagcctggaatggccgggggcaccatcagttggtcaacggcaccagtctggaactccacgggtaggaaagtcaagtatctcgatgtccctttgaaggatagcatcaagggatggctttttgagtggttcactatggaaaatcacaacaagtcgttgcctactcgttccgcgaggtagcctgatgttcgtgtgcccagttggatagaggccccaactgactcagaggttgccgaagctaagattctgctgatcgaggtagctgagttgaaaaactagggtttgactgctgaggatgtgattattgattttgttttcatgaacatttagcctttgaaggatagagtttaccctgcttatctatacaatggggtgaacgactcttcctgagttacaaacagacgtatatctgaggaggatgtcttgaaatgagtttaaatgatgttgagaggtgtcgtttcaaatgttggcgctcctcgctcttactctgcctagaaccttcccccagtgataagcttcaa

SEQ ID NO: 42879 - DNA, 914 bp, Zea Mays
tggagctggcgtcgccagtcatcatcgtctctaacgatgaagatggggagattgattgaacgacacttatgcgtgacgacgagtagaaaagtagaaattagtatatatgttctaatcttagtatgatggatggtgtattatgtaagaacttagtatgatggacgacatattatgtaagaacttagtatgatattatatttgtgttctaatcttctttttcaatctttgtgttcaattttgtgtatctttattgcaatcttgtgtatatatagctcaatgagttctccgatcaaggaccaaggattagggcccgaccacatggacaatggtgtttctcatgaacaatccagtggtaaaggatatgaaatgcttagcgacccttgtcctagcatagatagtgccgctcgccgtgagttgcaacgtgaccctacttatggtccacgagagtgtgaggtaaagtaaatacctttaatttcgtgtgtgtacctaattagctgatttcacaatgtctattacacatgcatgatttcttatgcattttattacatgaataggaggtcttgtctcaatatcgtgtgatacttgatgaagttgcggtacaataccaagacgcaccggagccaacccaagatgcaccagaaccgaccgatacaaccatcgaggggtcaacaaaaaggaagcagagcgatcgaaaaagagatggcagggggctaaacaagtttcctgacaaaacatataaaatcttagatgtgagcccaaaaggtcagccctagcaccagaagaggcactccctaagttccggaatgcacttgggttcttagttgagataatcttgacatcacaatccgacagtggagagttgtgtcaactgatgtcaagaatcaaatatggaataagctattaatgaggttttt

SEQ ID NO: 42880 - DNA, 1224 bp, Zea Mays
gcggtgttgaagtctagcttggtgcccatagctttctgaaggctcgtccaaaatttggaggtgaactgggttcctctgtctgacactatcttccttgggatgccatggagtctgactatctctttaagataaatccgggtgagggtgactcctccaaaggtagttttcactggaatgaagtgggctaccttggtaagacgatctattattacccagatagagtcgttccctttttgcgtctagggtagtccggttataaaatccatgcctatctcctcccacttccattcgggcactggaaggggttgcaataggcctgcaggcttctggtgctcggctttcgttcgctggcaagtgtcacaccaggccacatactgtgctatctctttcttcatcactctccaccagtatctggttttgaggtttaggtacatcttggtggttcctaggtggatggagtaggctgagttgtgagcttcatcgagcaggacttctcgtgcctccccttttggtacacatagacggttcttgaaccaaaggactccttgttcatttgtcctgaggtccggaagttgttctttgcgagctttttccataagtcttgctgtctccgagtccaggcgttgagctttgcatatgaggtcttctagcattggtttgacttctaggctgtcgttgtttcccaaacatgcattcagctgagctgattccttcttccaatcttctaaaaagttggttccctttatcccgaaaggttttcggctgagggcgtttgctaccacgttggcctttccggggtgataatgaatctcaaggtcataatctttgatcagttctagccatcttctctgacgaaggttgagatctagctgagtgaagatatacttcagactcttgtgattggtgaagatgtgacatttgttcccaattaggtagtgcctccatatttttagggcatgcactatggctgccaattccaaatcatgggtgggataattctgctcatgtggcttgagtaggcatgatgcataagcaatgactttctcgttttgcaacagaacacaccctaagccttgccttgaggcatcacagaagacgacaaaatcctggtgtacatccggtagtgttaaaacgggcgcggtcgtgagcttctcctttatgatctggaaactttcctcacacttcggggtccacacaaatttattgtctttcttgaggagctcg

SEQ ID NO: 42881 - DNA, 934 bp, Zea Mays
ttggaatcaaaacacttactcaacctagggtgaccactataccctactaatggagcaatcggcttaagtcggcaatgacttaagacggtgcaacatgctcgcgcttactcgacttagggtgaccactataccctactaacggagcaatcagcttaagtcggcaatgacttaagacggtgcaacatgctcatgcttactcgacttagggtgaccactataccctactaattgagcaatcaacttaagtcggcaatgacttaagacggtgcaacatgctcgcgcttactcgacttagggtgaccactataccctactaatggagcaatcagcttaagtcggcaatgacttaagacggtgcaacataatcgcgcttactcgacttagggtgaccactataccctactaatggagcaatcaacttaagtcgacaatgacttaagacggtgcaatatgcttgtgcttactcgacttagggtgaccactataccctactaacggagtagtcggcttaagtcggcaatgacttaagacagtgcaacatgctcacaactactcgtcatagggcgatctctatgccttaccagctgatcaattggcataaattaggaaaagattccaaaaaccagcacgccacacttacttctgcaatcgttcatgacgactgttgaattctaacagcagaaacaaaatgttatagctttcagcgccaagaacacattctaatatcctaccgagtattcgagcgcactgatcacgcacacatatagttcacaaatgcattcagtatcttctaaacacagcaaaacatctctatttggcaatgtctttcgcaggagcaatcaaggaggaagggcgactcgaagcatcaggcatagccttgacatccgcaacaatgtcatcaggaacaattacatttgtccttctcatcaggatt

SEQ ID NO: 42882 - DNA, 322 bp, Zea Mays
gacgggtatacccgacccgttgtcacccctagctgtttcttcatctatctcattttcatcttcctcatagcaccgacaccccatcttccacccccacctgacaccttatcttctgctccctcccttttctcacataggcgacaacgtggcgctcaagcttgggttcctaggctatctgcaatagatcatgtaaaataggggatttgtactgtagattacgctatttacatagcgaaatttgaaatagtggatcagacaggaaataagataggatagatgctggagaaaaccatagcaacgaggtcagtggctttccctcccg

SEQ ID NO: 42883 - DNA, 599 bp, Zea Mays
gaagggtagcaccctctcagccagccttgaaatgaagcggctaatggcggccaatgaccccgtaagcttctagacatccttgatacggtccgtaggcctcatcgcctcaattgctttgatcttctccgggtttgcttcaatgccccggtacgaaaccaggaaccccagcaacttccctgcggagacaccaaagacacacttgttcgggttcagcttcgtgcgtgttgcccgcagcttgtcgaataccagggttaagtcttccactagggtcgaccctctcttagtcttgaccacgatgtcatcgacgtatacctctactctgtccctaatcaggtccctgaaagtcttactcatcgcccgtataaatgtcggcaaggcgtttttcagaccttaaggcattacgacatagcagtaaagcccatccactgttacaaaagcggtatgcttcctatcttccctagacatctggatttgatggaaaccagagtaagcatctaagaaggacaagaggtcgcatctggaggtagaatccatgatttgatctatacgtggaagtggatacgggtccttgggacaagctttattaaggctggtgtagt

SEQ ID NO: 42884 - DNA, 500 bp, Zea Mays
aagtgtcgcattcagatatatacttagcaatttccctcttcatcctggtccaccaatacaaggatctgagatcatgatacatcttattactgccggggtgcatggagaatctggaaaggtgagcttcatccaatattttccttctgagctcggggttcttaggaacaaccaatcggtctccaaaccataggattcctttactgtcctgacggaagcatttgtatttgtccaccttttgttcgatcatttccttaatgacttgaacacccttgtcaccgatctgtgccatgactatttgctcatgtaaggtgggctccactaagatataactcaaagtatctgagggaatgacttctaggttcaatttgcataactcgtcacacagagtggcgatcttagagtccatgatcacacagttgcattgggctttcctgcttaaggcatctgccacaacattggccttgccaggatggtaatgcacctccaaatcatagtccttg

SEQ ID NO: 42885 - DNA, 743 bp, Zea Mays
agccacgcaggagcttctcgtttgtcacgagctacacggcctggtgcagtcaagagctcaagatacacgcacgcaagaacagtttcacagaagaaataggtctaaaacgtgtgtttcgatctggagattaggtggaataggttggttctatctcaatcttttaagagcatgttcgattaattaggattggaggcaataacagttccagcttattaaggttatacaaattagtgaaccatttcaacccaaaattaatctggccaccggttttagatgaaacgaacgggctaagttggactggacttgtctcatgtttggttaggagggaaaggttgcctcgacgttgcaagagaaatagatatgggtcttggaatatacgtgtttggttgtccgcatcagaaaagccacactctctatatgcatcgattataggctgatgcgtgtttagtttgctgcattcaggaggtcaggctcgcacgcaccggtgcatcgaagcctcatttggctgcattcgcataaacacaaaaaatggtcgtatctgacagactaggctcgtacaagcacccatccaatcatatggtattaatttagtattcacctgtacttcgataggaccgacaatccatctgatccttttattttagttttttttaaaacatgtttatatctttgatagaactaccgcgtttggacattagaggtcaacgttgttatctatggcattgaggttacatagctcagcg

SEQ ID NO: 42886 - DNA, 311 bp, Zea Mays
tgggagcaaagagtttagtgcttctattgttgatagattcatttgcgctgagattcctgatatcgtcgctgaccctttagggtttgctttggtcgacgaatttatgatgcacagtccctgtggtgtcgacaacaaaagatgcccatgtatgaaaaacgacaaatgcagcaaaaaattcccaaagcctttccaagaagagaccatcttagacggatttggctttactatctataggcgtaggcctgatgacagacatgttctcaagaatggtgtgagacttgataatagaaatgttgttccatataatatgc

SEQ ID NO: 42887 - DNA, 712 bp, Zea Mays
tccaaagcagtggatgtttgctgtctggtaggagggcacacgaaaggacatagagctaacatttcgggttataaaggcccacttccatattctccctagctcatatcgtttttgcacatcaagtactcaatgtgatcatacatgcatgtatcattctgaacaacatgatcattgatgattgaaaggattgtagatgtctaagaggaggtgaattatgataactatttttatactaatctagatctctaatttttcatcttaaacaaaacctatgtgaataagcaagcgaactcgtggggagaggagaggagagaaaaatgatctaaatataatattaatcattggatttgaatgagtaaaatatagtaaaattatctagtgatctgaattttggtttcgagggtgtgatatgtgcggatgtaatttgtttcgtggatttagagaaggttattagtgtggaggtaatttggatgtgtggattttagttaaaatcgggggttatacaggagtatagactacagtgttcttttcgtcaaacagctggtcattcactgtcgtctaatagaagtggtcttttcgttctgagttctgacgttgtacgcatcgttcgaaaagaatccttgtacacttgctcattcacaccccccccaccccccaataaaatggagaaatggatgatccgatactatggctgcgtctcagcgcatggcaa

SEQ ID NO: 42888 - DNA, 371 bp, Zea Mays
tccaaactggacggtctctctgaaagggcggaaagaatctgagtggtgtgtcggccacttcttcttcataaatttgacacaggaccctcaatgccttgcgagcgacaacttggcatgtgtcttggaatctgtgcccaacagcagtgacactccattccacatggtgcggactggatccaatgtatacagtcacgacacacttctctgtgccatgctcgacgaattcacgaccatcatactctggctggctcctgattctgaggcgaactgtgcatgctctcagcaacttggggaaaccatcttcattctggcaaaagctggtttggcaacagacgtccatctgacttctgagagaaggaaaggggaaagca

SEQ ID NO: 42889 - DNA, 412 bp, Zea Mays
atggtacagtcgttgtggagccataagggctagctagcagaaattaacctctactccagagacaaaacgcctctaagctgtggcatttacgactgcgttctttctgtttgtgagaaccaacaatgacaaggagttgttgtagtcttacatgcatatagctgagcactcatcaatgttttgggattcatcatggaatatatcaccacccaagataagtgcctctctctgaagctaactgaagcaaatactcttatttacgtcggccgacaacaaccaacataaataaagccgttatttacgtcggtcaccctagccaaactaaattagtcataaacccttcgataaacctctcctttttcacttacacgccgctttctcattttttccctctctccgaccgccaccatctgtt

SEQ ID NO: 42890 - DNA, 726 bp, Zea Mays
caactgtcctttgcaaagaagccaggaccaagcaatgttgttttagctgtctcaataaccaaatttcctccctggacaaaattctgctatcttgcgccatctccaatctaatgcagtacctcacgagcacgacccaactggacattcacattgcccacttctttatgcccccaggattgcaaacacttagctaatctttttaacttcaatgatatcttctccatagggcaagaatcctgtaatggctgattccacgatgcagccaccacatccaaaaacccagggatcttaggcccaaaactctcgaaatgaaaccgtcgcttacccaagcacacctctctgactttaagagttaggggacactgggacagtgatatgaaactgaggtagcgttactgtgaagagaacaatcaggaaaagaatcttcccaacctgtagtgcagaaaacatgatccaatttcacaagggtaggctcatccctctgattcgatcaagtaaaccttctaccaatcaaaggaatctcctttagctccaaggaattaacaagacctctgaaattacccaacattgtcctgtttatgttggaaatattcttatcctcctctctgtaaatcaggttaaaatcaccacacaagatccatggccccgcacactcctccctgaccaatcttaattcatggagaaaagcttgtttaaggttgtcctgatgaggtccataaacacatg

SEQ ID NO: 42891 - DNA, 324 bp, Zea Mays
caccggggcacaaagttcatgcgggagtagtcatggcaacaagcatgcagtgtctttcgacaccctaggccggactaggtggtgcacacgtggcttagataagtgtttgcaattgttggtccccatatgcatataggtgacccaatgcacatacacactagtgatgtctgcagtctgctctagagacagtgcctttgatatgatttggcttccagttcgaatagcttttaatccatcaggacgcctaggagactgacagggagagaccggcaacgctgcctcgactacaaggcgtagtttgtcttctagcggttccataagttg

SEQ ID NO: 42892 - DNA, 422 bp, Zea Mays
tggcggaagagaagatcgtcgaggagatccagcgagcagaggtgactgagaactcggaggcgaacgcaaactctgaggaaccagaccaacaaaactgacgtcgtctccgaagaacccaaggaatagtctatggtgatgagcacaggatctgggaggtgaatggagagcacgggatctgggaggtgaaggggatcgcgggggcaatggagttgattgcgagggcggtcgcggacgtgggaatgagcggagcggaggatgtcgcgggtgggagtgggaggcagaaccgtgcaccacactggtgtggacgcctacactatctgcttaagagtagtagagattgtgtaccccgtcatgttgtgtgcctctggatgttttttaaacatgtttcagtgctatacttaggatgacaatgagctctaaat

SEQ ID NO: 42893 - DNA, 431 bp, Zea Mays
ggatctgcctctaacagctagcaccttaaatctcggtgttgtttgttacaacgaatcttacatggataagatggccttctagtcatcctgactctccctttatgcgggattctagttacaacaaaccttacatggataagctatccgagtctgaggtccttagccgagtctgagttactaaagcagtccaaatccagagtagaaccgtgtcgggttttgtgggtcttttactcaatatccaagtgtcttggtggtaccccatggtacacatccttcagcctaagccccgagttttactttgctgaatcatcttcttagataggtggaacccttgctcttatcatcataaggaataattatgagccccttgtgcatcctatggatgtagcccccgagactaactttagatgaatctctcactacagtaaaac

SEQ ID NO: 42894 - DNA, 448 bp, Zea Mays
ttcggttcaaatcttcaactgatgatagcctgatcttagatctatttttgagaatactttagctcctctcatctgatcaaatagatcttcaatccgaggtaacgagtacttgttcttaatcattacttcgttcaagcttctatagtcgacacacattctccttgaaccatctttcttgttcacaaatagtactggggctccccatggagacgaactagggcgaataaaaccttttttatagtaattcttctatttgcttcttcagttcaattaaatctttgacatccattcggtaagctctttttgaaattggtgcagttctgggtgatagttcaatagaaaactctatatcacgatcaggtggcatacctggtaattcttccgaaactatgtctcggtattcacacactattctgatgtgctccaaagatttctcctccaattgatt

SEQ ID NO: 42895 - DNA, 1056 bp, Zea Mays
tctttaaacccattattattccaaaagattcctttcattgggaaacaattaataaatattcgaacccgacctcctctttgaaagctggggaccgtgactaggtggttttgtacgtgctgaaataatcatctcatattaccatcaatcacatcttgtatactatccccgcacaagtgatttaaaatgaagctatctaactcttcctcctcttctacttccttttccaacagatcagctaaagtgtttttgtaattactttttcgttgatctttacctctattagtctctaattgttttagctgactaatagacattgaaactgaactgggatttctacccaccagaataccaatggatttaagggactcagaaataatactatctgggaaatcaacaaaagtatcattgttacctttggaaggcagatcgtccagattgtttcccgccttaagtttttccgcccgatcaagcgagcgttcgctcactgagtcggcgcgacgcttactgcgacggagatcatgcacaattcctgtcacttcctgaataccacctagagcttcaacgctgacaatgccaacatcagacctgtctcctgtggctgcgccaaatccacccgagcaaagacagtgagtggcaactggacccccatctctcccagatttagtcccaaccttgctgtttgttgtgcggatgatgccatgtcaacagcaccagtagaaccatttgactgatccagcagcaccgatcccctactccctttttcgcccaaactgccttccttattttgatcctgaaactcatcatcatcatttgcccccgagtcatccatatccatcggcaaaggctgatcgccatcgactgccaattcaaccttgaatttcagctcataaatataatatccagttacaacatcaacatattgtgggattagattcaggtcaagcacttccaccttcagtcttgccctgtcaaacttccgagtaaataccatatccacctcttttgagatgcctagcatggagccaaccacccaaattaccagatattctctcaatt

SEQ ID NO: 42896 - DNA, 469 bp, Zea Mays
gaaaagcataaccacggacagagttaagacaagactgacgaagtggagaaaacaatcaaggataagataggtaaggttccaataaaatggttgaagtaacataaattattactgagggaaattataaggaattaatgagatcaccaaggatgtgcaaaataaaatgaccgctcctggatcattaagaaacaagggtggccagggacatgttaactgaaatgtcttgaacagttattggggtatgaaaataagcatacataggaatataagggtatgcaagattccaaggatacgagcatactaagaccaagggcatagaaattgttgaaagatagcgacttaacaacagaataagagaggatctcaggagacaagaaggtcatggacacataaactgaactgtttaaatgggcaacagaggtacaagggtaagtactttagattaagggataagggtattaaaaacgca

SEQ ID NO: 42897 - DNA, 495 bp, Zea Mays
gacacacgtgatcgacacgcgagatacgcgcgggagaggaaccgaggcgatcgacgcatcggtcgagagatatcgcgtgcatgttaagctgatgttaattacaatattttaacacgacttagtcaaactaacagataattatcacatagataccattgacgcttagctttgatgggtttgctactcggttacccgtcgtttaaattacgtaaattaattaacgtgagcgattctaggcgaaacatcttattgccacgcgacaaggcacgcgacccattaaactaggtgtggtacatgtggaacaactaaagagatagggcgcgtcaatacgtgtgaacgacacgcatggcaagcgcgaacggcacgtgcgacttcaacgccctacgcgcggacaccggcgaggatagactactacgtctagcgatagacgatgggtagaagcacgctgtcgtcgagcgagggcactggtgcgaatcgacgaacgacacgcacggg

SEQ ID NO: 42898 - DNA, 482 bp, Zea Mays
aagggaacgccacctaggctacagagggtgagactctagggtcagccaaaccctacaacgtggcacccgatgctcctcgtacaaatgcaccatgtatagaggggtgtgggtatccatcggaggagagcacctcccacaagatagagggaaagccctctcaggaaaggtagtcaaagctgaagcgggtgtcctccatcgacgggggtgggtgaagacatctgtgaaagaggggtaagtgtaagtgctacgggagcggtaagaagataagtgtggttaagttaagggaggttggtcaacttatattaatctattccaactcattttcctgctactcattcttaactaatgttgttatgtcatgattcaatacattttcttcaacttttaattattcctgttctataatgcatgcatgctagaatgaacgtcctctcatcgatcataggggagctcctggggcatccattctatcctagtgtcgg

SEQ ID NO: 42899 - DNA, 478 bp, Zea Mays
gttgatgatattgttatgaagttaacgtaacgcgagtgggtcgacacggatttaataacgtgtgcgaccgcacggaacatcgtaaacgacgaacgtggacgacacgcggatcagcatgtaaccacgtgcaaaacacatgcgcgacacgagaggatcactaacaaatatcgtgtttattataaacgagtgataattcagaacctgcgagttgacattaatcacgctacgcatacacctagaaattacttaaccccacaaatagactccatctattctaccagctagaacacaaacacctagcatccttgcattttactctaattcttacgtcacacaaatgaaaagccacctaaattacactatgcgtatatcttagacaatttaatttcttttgacacctccatttaccaatcacatgacatacaagattagcaccacaaagacaagggaaaagataggggaaagttactttcctatt

SEQ ID NO: 42900 - DNA, 354 bp, Zea Mays
agttgatctctgtcgtgatatttattgcccgtgatgttctctatctgttatgtttgtggcataacttagagttcttgaatcattcctccgtttgccttatttgtgaaattgattcctctggagtagtaactgagtaactcgggcgtcatatcgtcgctcttaggggtgatggacgagctattattgtcaacatctaagcttttgaaatagcgtccgagtgatgtcgaaaccacgccagcgttggaatgattgatgaccacatcggcgctcttagaggtagcagtcgagtgacttatgacgacattggcgttttagaggtaactaccaagcgactgacaatggcgtcggtgtttt

SEQ ID NO: 42901 - DNA, 497 bp, Zea Mays
ctagaggtatgggtaatcccactatgaagtccatgcaaatgtcctcccatttccaagatgggatgggaaggggttgcaaagggcctgctgccttcaagtgactagctttaattctctggcaggtgtcacactcggatatgtacttggcaatttcccttttcattctagtccaccaatatagagatctgagatcatggtacatcttgttgctaccaggatgcatggagaatttggagaggtgagcttcatccagtatcttctttctgagctcagggtccttgggaacaaccaatcgatctccaaaccatagaattcccttgctgtcctatcggaaacactggtatttctctgccttttgcttgatcatatccttgataacctgaacacccttatcctcaacctgtgccctgactatctgttcttgcaatgtgggctccaccgagatatagcttaggttacccgaagaaacaacttccaggttcagcttgcacaactca

SEQ ID NO: 42902 - DNA, 337 bp, Zea Mays
tatagacaaatagaaggtgcattttgggtggataggcaaaagatgaaatgggtctccaaaaatggatggtattgttggagttagcctaaaggaaaataatttatgtccaatacaaatctagctagtgtgccatcatcttaatcatagtgggatgaattagtgaacgtgatttagctgtgtcagtgttaatgaggatagtaaacattgataaccatgatccagttgtcatggactcaccaacatccataaatgttggatccagtggtagacgctaccgacagttgacatggtgtgggacggtcaatatcgaccatcatagctctagcaacaaagtgat

SEQ ID NO: 42903 - DNA, 519 bp, Zea Mays
ggaactcaggtatgctgccccaaactgaaactctgttcaaagcacaggtgtgttagagtgttcactgatggatccagcctttgtaccagggagattttttgtggcttcaacttagtattggtatctgaattctcagagaataagataaacctgttgagatcaaatggaatcgtgccgctgtcagagcaaaagattcgcgcagttgtaacaaatgccaagcaaatacagaaggtgcaggagtccgtgttattacagttatttgcatctgcatcgaatttttttctgagtttatttatctcggatggacgaggatacaatgtgcatgctattcttcttagtgctcttgtgataaggctgaatgctaatattttgatgttttcccctatttgacatttaacgacaaaggggaaaccggtatcagaaatttggtaacattataaattttgagcatttgtccaatgcaatatgaaaaaatactagtgagatcacacttagcttactttttatctgctttgcaac

SEQ ID NO: 42904 - DNA, 374 bp, Zea Mays
ccctatcccatcattggtagagtgggacccgcagcataccgcctcgaattaccagaatccatgtcagatatccataatgtgtttcatgtgtcccaactccgtaagtgcctgcaagtacaagagaaccacatcgaggcagagacaatctagattcaaaaagatctccagtaccgggaaaagccaataaagattcttgactcagcagtccgaaagacccgcaactcagaagtaagactctgtaaagttcagtggagcagagaaggagaagaggaagctacctgggaaagcgaggactctttgaggagggaatacccttaccttttctcgaaccccgtctaaatcttgagggcaagattcctttaagtggggtaggt

SEQ ID NO: 42905 - DNA, 305 bp, Zea Mays
atttattgggtataaggattcgaggttggttgttgttcttggtcgattaagtcttcgtagggtataaggattcgatactgtataaattaaacacatagcagcccttagatgaagcggtattgatcaaaaactgtgtgttgtgtgggtcttgggttcgaatctttgatattctcaaatttttgttccatttttagatattcctttattttgtctttaagatacacaaacattactttcatgcaccagctaatattttgttccatttttagatattccttcatttatctttaaaatacaaaacataa

SEQ ID NO: 42906 - DNA, 829 bp, Zea Mays
ctgggacaggcgcgcctgtgtttaacgtagtgcttagaggcggcatgcaggacagacggcgccgttacgcggttgtttgaatggcaaggcggtaactcataagggaaaggcgcggaattaaagggaatagtttccacatgcaaacgtgattactatgatacgtgggcgcataatttatgaatcttgcatgggaagtaatggtggaaggtaaaaaaaatgtagcataagatattgaaagctatggcataaaaccgaaacggcatactagttgcataaatagtatataccgtttggcgtaaaacgttgagtcattgtgcgtaaatattttattatggattttagtttgacattgacatcgccatagtatcgggacggtttcggaaataatggggagaccctgtaaaagtgggtgcggttacttttatagtatccgagattaactttcattcgaaaaaaagaccactaagcctgcataactaattggagttggagatggccggctctggagagtcgccggcattggaaggagatggcgttcgtcttgatccagagacaaagggaggagttggtggtaactcactggtcacaccacctcctgctctactgggtcctgagatcgccgagatgagcataggggaagaaggagaacaaagggtccgacctcctatgtccaatattagctccagggagatggatacgccacaaatactgcattcacatgtaagtccaatcgctgtatttgattcttgattgattagattgttgtgaacatattccatggtacaaacaacaatgacaatgaaatagcaggcaaaaaacattgatccaa

SEQ ID NO: 42907 - DNA, 556 bp, Zea Mays
cataggggctcactatacagaagaggtgcggcaggagtcctcatgaaatgcattcactcggctaccgggaaacaattgttagatgaaatccatgccgggcaatgcggagtacatgcagcgtcaaggactctggtcgggaaggctttcagatccgatttctattggccaacaacgaagagcaatgctgtcgagttagtacagaagtgtgaggcatgccaattactatcaaagcaacaacacttacccgcacatcagctgcagaccattcctataacatggtcgttcgcatgctggggactggacatgatcagacctttcaagaaggcttagggaggctgtactcatatactagttgccattgacaaattcacaaaatagatagagtacaagccgatcgcttctttgacctcagccaaagcggtggattttatacaaggcataatattaaggtttgggataccaaacaacatcatcaccaacctgggatccaacttcaccagctctgaattcttcgatttctgcgagcaatggagcatccagattaagtacgcatcag

SEQ ID NO: 42908 - DNA, 1090 bp, Zea Mays
aagatgaatagtgatgggctgaaactagcccaagtcggcccacgcacaggcgaaagcacgcccgcgtgtgctcgcggtgttcactttgtgcagagaaccttgctcttttaaataactcgtaaagactcatgcgcactattcctatgtgtcactgacattttgcgtcgaggcccctcaccttctattccttcacgaaatgaggtccccgaccgtggatggcggagcagtagctccggcgagcctgtaccggccagaacacacaacgactagcgctcaggtgtggctgacacctcattccacccctaacgaccataacccccaagcaattgcaaggttctagctcctaatcgctctgcccacggtgatagcgcaaactacggatgaaccgaggcattcatggtgatcctacgtgttctagctcaattggtcgggttgagaagcatcaatagcacacaagagtgcagaaacaagagcgaggagggcgtgatcggacctatggagagctggccacggcgagctcacacacggcggaattcttgactgatttgggggaaatctcaaattggggagctgtgggggacgattgaaggtgagggctggttcactgggtgcacaactacttagcgaagcaggctggggcaccaatttatagtatccaagggtggtggctcctaatttgggcatggcgtggtggcggccggagatgaagaaggtcactggtggctcagtcgcggcgttcatcggtgcagcggttctgagatggtaagcctaggcgtgccacagttactactgtgcagtaaagagccacggcgtggcatacttgaggttgctggagcttccacgacaacaccggcggttcgaccacatcgcttggttacagacgcggttgataagcttcaccccacgaccaaatccactcccccttcgatcttttcacacgcccagtactttcctacctaagtccaacacgaatcgccacgactagcgcgaatctttgcgcagaggtcaccggtggcgagggggactgaacctgagatctttctatgggcactgtaccatcagaacgacattcagagcacctgacaaagcg

SEQ ID NO: 42909 - DNA, 450 bp, Zea Mays
gaattgcccaagccctaattcaaaccccttttagacaagtggagcactagaagtaagcatgaacaaaagggtatgaaaaccacatgatcatgacttgggccaattataaaagatgtagaacacttgataccccacaaatgatagtaagaaagtgaccccaaaaagtattcagaaaaaccccaaaagatccacccaaggggtgagcacaaaggaaaaatcagaattctcctaagtccaaaaccaccccctttccaaagatcaaacatgttcaccttgatcccaaacttaaaaccaaatggcccaattgacaaagtggcgccaaaatacctctagaacaccctggagaagtttgaaccaaacccaaagtcgtttgacacgacttggcacaagttttgtctcagtttggacagctaggatagagacaacttcccaaccccatatctctctagc

SEQ ID NO: 42910 - DNA, 1010 bp, Zea Mays
tgatgagtgattctcaacatcgatagtgctttggtgtgagtcaatggactaactatagtacaagtttgtgtcgtgcaaccatgtttctcggcttgtggtgcgcaagtgtgcagtcaggagatggtggttgacaatgaaggtgaaggtcatgcagattcatgctgatggaccgggagcagcgaaggatgagcgctgagatttgatcaagggactagagaagctatgtgactagctatggtggctaacacctagggataccagcgggcatgagttcatggcggagtggaccgtgttgccggtgtagtcatggactggtgggacacgtatccaggacgtggggatgtgtatggagtacgctactcatgcaggcccaaaaccacccgatgctatggaaggctggtttcgccagatttgggcctcaaaatctggcggtgcgattttagcgggaatcgaaggcggcatatggcatcatcgcgaaggatgcgtcgaggcgaagcaaattcatgaagagtgtgtggctattagatgcgtattccaagagttggtccattttacccctggttaagtggatgagatctatgtatctaggggaagtttagtctagtgaaataacctcctataaataggagggagaactggttgtttaagtgatctcttttggctgcatctctttggctagtgattagagcactcttagttttccattgccctaggcttagtctctttcactttcatagcgaggagatccatagatgttttgaagctttgcatttttgtactcgaatttgtgaggaagtgtggtcgtaaccacatggagccagcatgcttttgccattcatctctaatctgattttgattttgcacttattgtggttcctctcctcctttctctctttctctttggattttgggagaagtctcattcttgttgtttgtatgatgtttttggggactcgtgctattggaagatcaccgaaggatcatttttagtttctagtttgagcagatca

SEQ ID NO: 42911 - DNA, 451 bp, Zea Mays
cgcgcctcgagtccggaccgtttgtgtctcaccagaacgcctcctacgacacgccaacacatatggaggaagataacaccgaggaggacgacctactagaagagaatttggtcgactacggagcctcgctagagcacccaagtatggatgtaaatgtgattatgttctcaaccgattgcactattatcggtgatgatgaacctgtcatttcttaatttgattttggtcctaaataggccaccttcaccaagccaaaagaatcggtcaaccacttaaaatcactctttgtgcgtggtcatattgatggaataccgattgctaatatgttggtagatggtggggtggctgtaaatttagtgccttactcattatatagaaagttagggaagcatgatgacgaactagtcaagactaacatgacgctcagtgatgttgggatcgacaattcgat

SEQ ID NO: 42912 - DNA, 340 bp, Zea Mays
gaaaggtggtttttcaggcctgacatggttaaagagatggaagaaagagtccaacgaatcatacacaacttgaaagaggcacaagctcgacaaaagagttatgcagacaaacgacgctaacccttgtactttcaagtcaaagattatgtgtacctgaaagtatcgccaatgaagggtgtgacccgtttcggtgtaagaggaaagcttgcaccccgatacattggcctgtttcctattcttgaacaatgtggactagtggcataccgactccaactacccgaaacattgtctgcagtgcataatgtgttccatgtatctcaattgaagaagtgccttcggg

SEQ ID NO: 42913 - DNA, 600 bp, Zea Mays
gaaccatcgagttctgatcaacatcgccatcctcccaaaagcattgtgcggtacgcctcgtagtgcatcgtcggtaccaaacaccgacaactggcatgcccggtagggggatcgacgtcaattcatgacagctccatggttgtcatcatcaacactgtcttcaatttcgtcgtcggggaggtcttccactttagatccctaacctgcgcaccgactgaacgggcactctacaccgcgttgagaatgtggagaaagatactatgaggtctcgcatcgcaagcctcatggagaagaggccctcgtcaaaattcgggacagcccggtgacgacagcgattaaacctcggttgatggcggctcgacccacgtcgacacgtccctggaccctagggccttgactctaccatgcgctgtgtcacgctgcctccgtgccagcatcacgcacggtctcctctgcaccatcaccacggctggccgctatgatagtcccggcgtgacagacttcgttgtccacctcgctgacctaggcttggacccgtatcacttggaggaaggacgggactaaggtccccaccgctcctagagtcggcaggactcggcc

SEQ ID NO: 42914 - DNA, 470 bp, Zea Mays
ctcaagactacactagtgaacctatcatcacatgtggttaatttgagcaaaagacaccaaacttgggggtcaagatcctaagtaggtgtaacccatcttagaagtcatgctttgaccttaccatgcacctaaagaggagaaaatgactcaaaccctaattcaactcccttaggcaaatggagccctagaggggagtttagaaaaaaggctatgtaaaccacattgtcatgacttgggctaattataaaagttgtagtacacttaataccctacaaaaaaaagagtgatcccaaaaagatttcagaaaaaccccaaaaaggtcaccaaagagaagaacataaaagaaaaatcaggtttttctcaagttcaaaaccaaccctctttcaaaaatcacacatgttcatctttttcccaacctcaaaaccttatggcccaattgacaaaatggcgcctaaagacctctagaacac

SEQ ID NO: 42915 - DNA, 353 bp, Zea Mays
gattgatatacaaaatgcattcttgcatggctacctctctgaagatgtgtacatgcggcatcccccgggttttgttgactccaaataccctgattatatttgccaattggacaaagccttatatggcctcaaacaagctccacgagcctggttttcacggttgagcaacaaattacttgatttgggtttctatccgtccaaggctgatgtttcattgttcatctataacaaaaatggtactcaactatacatgcttatttatgtggacaacatcattattattggctcctccacttctgctgtttctcatcttattgcccaactacgagatgattttgctgttaaggatctcg

SEQ ID NO: 42916 - DNA, 352 bp, Zea Mays
atacataatttatatgcctttgatcatgttgtttatgatttatttcctattcttgcatattttggtgttcaagttgtagaatgtcatccctggacctcacgcgtccaagtgtaataatgcacatattttggagggaggatatgctacaacttgacccttttgagactacaatttgcttgagttgaccatgtgtagtcttaaatgtggattcaaacgaaaaaggtgaatttagacaaaggaagacgcttccacttcataaatggtatcaaggctctttgtttcaaaccccctttatttctcattgcttttggctttcattcgctattttggtgtggtaatggggttaggccac

SEQ ID NO: 42917 - DNA, 649 bp, Zea Mays
gggaaacctaacgaatgggctacgaggtacaagggtcgacggaagtagggggtacgaatgaaacttccatagcatcgacccatcctagaaacttacaggtgacactatgctacaaactctagggtgacctcttggtgaagatagggtaccctttagggtacgaagccgtgtactcacgtaagcaacacatagtatttcaatctaaaagtacgacgacaagtacaacaacaagtatgatggcaagtatgagtcacggtatcagcgcactacaagatctcatcaacgaaagaccccttctttttacctttttacacattccttgtaagagactacctccttgagctataaaaggaagggtcgacctcaaccacagaaagacacgatgagaaggaacagagagtcacatggagcctcgaggcactcaaacctagagggctctagctcacaacacacgatcccaacccacaaacactttgataagagacttgagagctctttccctctctcgcttgcttgtaacacgctactacaagcaatctgttgttggtagcgcaagccaccaaagactggagtagggtcatttggtctgaactagtataactcttgtgtccacctcgcacaccatccaggcctaaaacgcgcatcacaa

SEQ ID NO: 42918 - DNA, 731 bp, Zea Mays
gttaccgattggagttccatccatctgagatagcctgtaggaccctgacggggtgacctctatgacaatgtatggcccttcccagggtggcgataacttgtgctgcccttctcttgactatatcctctgagcaataaatccctaattgaaaaggttttgtagcataccttgctatcttggtaacatcgtagggactgctgataccgtaccaactgaatcatagtattgagccattcttcttctagtgtgtcggtatccttaagctaggttgcttctgctacaaacactaggtctgtaggcaacagtgcctctgagccatataccatgaagaaaaaggtattaccatgaagtgctcagctaggttgggttcagaggctccaaacaacatacatgagctctcttatctacttcacaacgagcttttcattcttatcaaagacccttttgctcaatgcctccacaatcatctcgtttgcttgttctacttgaccatttgcccttggatgggccactgaagcatatttgacaaggatgcacctcttctcacagaaatcaaagaactctgcccctgtgaagttggatcccaggttggtgataattctatttagcacctcaaactagaagatgatctcctagatagactctactgccttggctgccattagtgatgtaattggcttgtacttgatccactttatgaacttgtcgatggctaccagcacatgcatgta

SEQ ID NO: 42919 - DNA, 491 bp, Zea Mays
gacaattatgcctaggagcagtaactgccagacattatggtcggtatgatgtcaatggttttagattctgttctacaaggttcgaagatgatcatcctctagcagccacgacaaattccggagttgtaactagagatgtcgatgatgaagggaaggtgactaattattatggagtcattaatgacatacttgagtacaagttttttggagataaacaactcaaagtggtgttcatcgattgtgattggttttctccaaatacaacgcgagaaaaccaatatgccatggtggaagtcaaacacaacgatcaattaaaaggccatgacactataatccttgcccaccaatgcgagcaggtgtattatatgacatatccatctaagaaaaagggtttggttgattggagggtagtgtacaaagttaatcctcgtgaacgactatatgctcctggtgatgctggttatgttgaaagtcaaatcgagcaggaagtg

SEQ ID NO: 42920 - DNA, 501 bp, Zea Mays
caaccaccgattaataattgactagaaacgtatgtaatgccacacccggtgcctcctgtgtcgtttaagccgcaaagtgattcacccttctgtggttgtaatatggctgaccttgattgcatgctagatggtgtggagcattatgctttagttgtgcgttgggtttttcctactgttgtcctatcttttttgggcattgcctgaccaatggccatgttctccatagtgaagcatttgttccctccttaggttgcatttggttgtccgtcctggttgcttgttgggacagagagttgatgtgcttggttgatctggcgcctcgatagcttgttgaggggtagccaccctcttaattacaaatcctattacacacccctaacttaatcttagatgtttctaggggtaaatggcccaactcttcattggtgcatttgacgaccacaatctcttcacgactttggtttgcctcgacacaagcttcacgatgatgccacatgccac

SEQ ID NO: 42921 - DNA, 508 bp, Zea Mays
gaaaagataaaggcatagaagaaccaagggtacaagtacaacaaagaatggagttaaggcaaggcttgcacgcggtaaagaagaggatatggccaagggtgagataagtaaaacaccactctcaaattgagatggggggagggaaggtttttaaataggaggcgtacgataagcatcaaggtaagatgaagggatgacaaaagtaaaggggataacaggcaaaagcatagcaacgggcggagtcaagacgagactcacaaagtggtgaagtaaaggggacactaaaagggtaagacatgtaaggttccaacaaaatagttaaagtgaaaattcatcacggagggaagttataaggaaacaacgagaccgtgaaggatgtgtgaaataaaatgatcgctcatggattatcgagaaacaagggtggtcagggccattgtaacacccctggtgttactataactaaaacttgagcatggaatcataagcattggcattgcatatgtttgat

SEQ ID NO: 42922 - DNA, 715 bp, Zea Mays
ccgttggctcttgggtgcgccaccgaggcatatttgatctgaatgcttttttgttcacagaaatcgaagaactctgagcttgtgaaattagatcctaggtcggttatgatgctattcggtatttcgaatctgaatattatgtcttgtatgaattccactgccttagccgaagttagagaagcgatgggcttgtactctatccacttagtgaatttatcaatagcaaccaatacatgagtgtatcccccttgagctttcttgaagggtccaatcatatccagtccccagcatgcgaatggccatgtcataggtatggtttgcagttgttgtgctggtagatgttgttgttttgataagtattgacaagcttcgcatctctggactaactcgatggcgtcactttttgctattggccagtagaaaccagacctgaagaccttcccaaccagagtcctggacgctgcgtgtatcccgcattgcccagcatggatctcatctagcagttgtttcccagtggctgaaagaatgcacttcatgagaactcctgttgcgccccttctgtatagtgtttccccaatgagagtatatgagctgactgccttgcaatgcgctctgctgcatttttgtcatccggttcttcctcattctttatgtatctgatgatcgactccctccagtcatcagaatctgactctggttggctcagaatattgca

SEQ ID NO: 42923 - DNA, 2709 bp, Zea Mays
tagaaaccaaactacaacctggaggcctcgagggtggcctaaatctgaggaggctagatcagctgagcaaaaatgtgacatagatagtgagcgtaaggcagttgacaccgagcctgaagaccatccaaaattgtgtcctcaatctcacaaatcagaaaatcgaccacgtcaaactcagagtgagagatcaaggcaccgagtagctagagttggatatgcgtggtggactctctgtagcccatcctcggtagcagtgtgtgcctcataagctcatagagaaacttggcggctagagtgaaatctgctggagaacgccgtaacccatctaagaacggaggtcgaaacaaggcgacgacgtgagcagtggcaggggctactccaccgtgagggcgaagaggaggatctgaagtgccatagcacaagatgtggagcctcgtcaatgactcaggaaatccaaagagctgtttgatttgagtagcatgcaatgtcacctcctctcgctcaaatctaaacctcatccactgatgatctgggtcaatccatactgtggcataaaagactctgacccactcctcaacatatctaccaccgaaggtcagaagagagtgtaaaccttgcagatatgtgatctgaccctctgactctgcactacctactgaaagtaaggcagggagatccaaacactggtgcgctctcacggcaatatgagcagacaattgtgccctgaaggactactgggtcctggtgctaaatagtggcgcagctgatgggtccctctgagctggcaaccaagagtccatgggtacatgtctgaatcgacatacccgggcagctgtggctcgctgaagatcgagcatgcgaggatcagcagcaagtggttgcaccacggtcttgtcacgctcctagaagcgaggtggaggaataggtggagtggaagcgtgagcgggagcagtggaagcaggagtggtggaggtggtggtagcagtgggagtggtggacggctcgagagcgacaggagctggtgaagtgggaggtagagtggagactaggtcagaaggagtggaacgagcagtggaggagtgactccaagacgcgagacgacggacttggaaggcaatctgattagaagatatccgcagctgacctccccgctctgcctgatctgctgctgctgctgcaatcgctgcacgagtggctctgtcgagacgtctcttctttttgcccccttggtgctcaaggtagacagtcttcaccctgacctgtctgaaggagcgaggagggtcctggtcatctcctccccctgccggtgtgacattcttcgtccccaccatcttgaactgactactacaagataatgaggaaagataagcgagagtagtagagcagtaggtaaggcctgaatagagtgcgatatctacctgggaacttctcgagagagaggaactaggtaggacaggagacgcgcaggcgagcaggcgaaatcactgtaatgacagaagaattgagcacatattagttacatagtcataagtatatgaaatgtgaataaatacatacacagagagttataacacaaaaacggagtgatttggagaattagaggtcaaacgacacgagaacggtgtttgaacggtgaattgtgccatagaggttttgaaattcgaaatgaggcatgaaatgactgggaattgagccgatacttcatggataggtatatatgtatgaaaatgagtgaagtgagtgcttggtttgaagtttggtagaggaaaagcatttttggcactcggctcgaaatagatcaccataaaggtaaagaggttgggaaataggtgtctgaaattttagataggtgtgaaaattggcgtgtgaggtactggtagtagctggagtatgctagaaaaaattggggttcatttgagctattttgactagtttgggcatttcaccgaacacttggtgcgtggagattaggtttggtgggaaaataccatttttagggttggaaacctcccaacgagagaggataacctgcagggaagctctacggatacctaaggacattcactcacacatggattcatggatttcacagagatttgaagatttttcaaaagggtaggagtgagagatgagaaacacttgatagagagagagagaggaatcagaggggggaagagatctcaccacggagagggggagctcaagcacgggcacaggctagagcagcttgccggacagcgatcgccggcagtgaggagctgggcgacgccgagagggagccagagacagagagcagagaccacgcgctgggggaaatgagagcctgagcgctgcccaggtgcggaggggttttttaaaacgcagtatgggcacactggatagtgtacaatgcctatccagtgcacaccggacaacgcacaatcactgtccggtgaaccaccggacaaggccgcacagtggctgatccacgcgcgcccagcaatgcatcggacattgcatagtgcggtgtccggtgcacattagactgtccggtgagcccagatagagggaattttgaatttttctaggaaattttgaaccaaaccaaatcccaacttataagcacacaaaagaagacctgttgggacaggtattggtaccctcacatattctctcatatttttcaaaatattgtgccataggctagatagtttttagagaaaataggca

SEQ ID NO: 42924 - DNA, 889 bp, Zea Mays
ttattatttagattataaaatatttttcagactatataaatttatattgtaaactacagctccacgctaaagctagaacctaaaccagtcccaaacacccccaacattttggcagtttcagtcttgtgatcgaactcaaatcagttggtgacacctcaaaaggttatggttcactatatatgtgacacttgacaatactaaatccatatttttcccaagatggcaatcagagttaagttacaattttcatgcagatgtcagttccattgctctgtaatgtgtgcacagcccaagaaataatggattattcgttgttccctctaaaatgactaatgtataacatcagtcatcacaatcataatggcatactagctgtgatgaaacttagacaggtctaacatgttcctatgcaaacaaaaaaaatattgaattcatgactgtcagtgcccgagagaaggcataccctaggatgctagcaaagcgacctctaagactccaatagtagaacataggcctgtggtggacccaattgagagccaaaccagtactctcgaggccctacactcccaagggtcaagcttcgaaccagccaagccctaaggtcctccgccctcggcacaagcctcgaactggcaagttttcgggaccctgcaaaggtcccctaatattcctcaagacatcctagagaagtgtagccacaaacggtctggccccggggcccacatgctcccctgaccaaggcggcgctacgcgctaggcaaataagacaaagctctcatccattacatttattatgatgggtgatgttgtcgtcaaaagcaacattagtgtcacgggctcacggctgtgtcacggctgcgaggttgcgaccggaggtgtactcaggaac

SEQ ID NO: 42925 - DNA, 423 bp, Zea Mays
tgtcactgctgctgggcacagattcaaagacacctgccaagtcgtcgcccgcaaggcattgagggccctgtgtcagatctatgaagaagaagtggccgacacaccgctcagattctttctgccctttcagagaaactgtcccgtttggatggccaggatgcgtgcattggaagtgcagcagctgcttgaggacgaccccacagtcgcgtacctcactgcatacctgctcaccctggatgcatagtatgatttcttggctcggcaaccatcgtcagatgattgcccaagcagaagatgtagagaagagcaaccatcagctccatgtggatctcaccacagctcaagcccgtgcaactgccttggaaagtcgtgaagtcattgctgttgaagccctgaagcaagccaaggatgagcatgtccaga

SEQ ID NO: 42926 - DNA, 416 bp, Zea Mays
caacattccaatacacttgtacaacacatccacaccattatgagagatcgaaggacccagtctgagccgagatatcggttatatagagagtgtgcttaagcgatcttccttcttggtgttgttgccatgttttcttagctcttgttttggtgatctgctgttgtaaaagctggcaataggatccagatcttgtggagttccttgcggatattttgtctatattcttagtggatttgagggctcaaggttgatatgtggatcacttgagagagtcgagagacatttcatcctcaaggacacctcaacagggacgtaggttctttggaactaagcctcagtaaaacaaatcgtgtctctcttgtgttctatattttcattgtggtttgttcttttcttcccaccctctccaaatcctc

SEQ ID NO: 42927 - DNA, 663 bp, Zea Mays
ctcggccgttggattagatccgaacggtcggtgtttaatgaaatctagatcggatccccaccaccggatccaagatccacggttcccagacacgatcgcccccgatctcacccatgccgtgcgattgaaatctaacggtccgaatcctatctgatcgaaccggtatgcggcatctaatccgagccgcacacgcaggatccaacggtcctcggtcgtcttcccaaatcgccgctatcgacggcggcgccgcccaccattcacggcgaacttcgccggggaaatcccaatcaagcgttccagtgccctaaaactcaattaaagactgctacacgatgcctagggggtggcgaatacattgagacgaaccttactggtaggggcgaagcacagaagtccgaccacggcgcgagacggacggtcgcggaaagtaaaatccggtgagaaattccgaggcggccggtgccttccgtgcacgagaagacacacacttgcaatccccgcacgacgaccaacacgccgaggtcacactcaaacccagaccgccggtgatacccgatttcgggtgcggcggccgcgctcctctccttcctctctctcggtttgagttcaggttgtcaatgcgattgaattgatcacaggaacgcgacgcgggcgggtttttta

SEQ ID NO: 42928 - DNA, 1185 bp, Zea Mays
ataaaattcacaagaaaaaacattcttggtagtgcaggtaatcacagaatacacacttttttagtactcttttagaatctctaattcccacatgtacttctaaaagtgaaaatgtgcactctatttcaatggaagttgtctttcttttagtttctcatcagttgcagcacagctgatctaaccagttttcagtctgtgaaacctgttaacttttgtgtgtgtaccagtgaacatcagagaaacctgtgaacttgtgtgtgaattctatgaatctgtgtacctgtggacttgggtgtgaatatgtgaaacctgtgtgaaatctgaaacctgtgaactagtgttctgtctgtgaaacatgttaagtttttatgtgtaacctgtaaactaatgtgaaatctgaaacctgtactatattagtcactaacctgtgaacttgtgcagacactggtttcccttggccggacagatttcaaattgaatatgtggttgtctctatcagcagcaggggatgaaaccttgatggtgaatcctagaagatggtgaatcctggaagatggtgagtgctctatcttggagacttggaagatggcgaatcctggaagaacaagcaaaagtatggtaagattaatggtttgaggccaaacattaggccatgttatgttcctacacctagaaggatggatcacggatcataacagccattaggagtaacacctagggctgttttcatggtgacagatggtacttaagatctacaaaccttttgatgtttcttctcccttgtacggcaggaaacaccttgccgcggtgatagcgccaaaacagtcgtcgacggcttcaagctcctgcgtgtgtttatttgggcaacagaactagacgtggatcacaagcagccgcattgtttatttgggcaacagaactagacgtggacttatttgggcatggacgtggacgtgcaacagaactagacggcgggctacttgacgtgtatggacctggacgtccatggacctggacacgtcttgccattgggccatgttgcctgggtcgcttctaaaggcagtaaaatcattcaccaaggagtcgacgacatagctagctgatttgtctgctctgacgtgtgtgtaagcaaatgttgtatcaggtcatgtttgtaaggtgtgggaaatgaagtccaggcttatg

SEQ ID NO: 42929 - DNA, 747 bp, Zea Mays
gcaaactttggtatgcaatttaatgaagtgagatataagagagtttcattggagatgaaaaagtttcatggggatcactttggatttattgtttttctagacaaatattgacatggtagacttggaaatagtcagatgaaactacccattgagaatggccttacaatttagggctaagcttgatttacactagatcttgggaggtggagattccgagttattgaaacctagcaattaatggcaataaaattaatgtaactaatgtgtattttgtagagataaattaaagttaggtcacaataatagtgattgttggggcaattcataattttttgtgcccctgcatatggatttcgttttgtttttaaagattaaggatgcattagttttaagtattgtatgaagtttgaggtagaatagtttaagactttgtttttcatttaattgtactataaagggtatggaatagtagcttgacctaacacactacaaaggggttttgaggcattgaaccccagatcatcagatcgttggcgatggtctaatacctccacatatgcaactcaagcaagcctgatcgttggatcctgtgaacagtagagtgtcgaactaacgcgttaagtacaacaatctataaaacacactagagagttttggggcatgttggattggttcgacaatgagtgtcggaccatcgggcgcaaatgttgtagttagggtttcttctgcatggatgccaccttgtcg

SEQ ID NO: 42930 - DNA, 732 bp, Zea Mays
ctagccacggtgatcgcgggcatcgcggaagaacacgggcgttcacggcaacccagggtggtctagctcaatcaagggagtcatgaagcatgaggaggacctaaggacgctagaacaatcgaccagagcgcttgaacgaacctggaataagctggccgcggtgagggtgtctctgcggtggcggaaacttagtttgggggaaatccaaaattggagctctcgggtatacgattgaaggcacagtttgggtggcttggtgcttgactatcctacgaagctcacggtggcctcaatttatagtaggcaagagtggtggccattgaatcagacgacgacgcgcagcagtcggaggagtgggaggtcactagcgcaaggaattcgtggcatctaccgcggcagccctcaccggcgatgatcagacggccaaagtgagtcacgacgatgtggtgaatgtgcctaggtacgtggcgcaaggccgtgaatcggctgtcaccggcgagctcatccgaagcggccgtggcaacacggtacggtggccggagtaaactattggttggaagatatctacgacgacgatatttactcaaccccgagcgttatccagtcgatccgatcacgaatcacggcggcgagggcacgaatctacgcgcggctcgtcggcggcgaggttctctgaacctgttccccccgttcactgtaccatggcgcaacttcttcagttgacctgacagc

SEQ ID NO: 42931 - DNA, 539 bp, Zea Mays
gtcattattgtgtaggttcaagtgcaaacttcgctgaaggagtacaacatcgaactgcaagagcctcaccaagtcgtgagtgaggtgtgcgaccaccttgctcctccaccaccgacccaggtgcctctgcgtgctagctgcggtgctacccggtcatgtggagcatggggtctttgaaggggtgttccacataggtagcctagccttgggtcagatgatattccacttcgacgagatagacacaggcgtgatcgtggaggggtttgccgccgacctgagtgatgaatatttggacactattgaagagcaagtatgtcctcacgctcaattgctcgccagccaggttgacgtcaagatgcttctaaggggaccctcgagctcagagatgcctccaagcgcctaggagttatgttttttatcatcttgatgttttgtactaaacctattaactagatgggtgaacacttagccatggagattgcttttgtggaatgacttctttttgtgaaggcttagtttgtcgtggtcgatccttcgat

SEQ ID NO: 42932 - DNA, 788 bp, Zea Mays
gcataattgtgtatgggccaaaattgctcagcccatcacctcatcccattccgtcggccaccccctccaaaatccttttctttattcatttgccagaacctgtgtcaccatatcatcagcatgacataagcatgcaaattaaccaacggttgtatcgcagcctcatgtgcttccgcacgcgctagcgtctttgctcaaccgtgctgacacatgggcccccttgccagcttcctctcccttgttcacgagcatgaacagaatgagctgagtcatcttctccaggactcgcttctgttgcctagagccgtcatgcgcacagatattttctcgtccagaatacgaccccttcctcttcgatcgggacccatggtccagcctctcccatgcgcatagcttaagaatcatctcccacgcgatcgtattccattgcaaccacctccgtaaacattacatgctcaagctcttcgttcctagtccgttgagatcccttccgggattttcgtggtcgctgcaacaaaccaggccgtcatctaaggaccgaccaatctttcctcgtttgtttgccctgaatatataatcgtgccccctcatccatttaacctcagcccgcagccgccaagtcaaccaagccccttcccgccgtctcccacctctagcaaatccccacgctcctctcgatccaatctagccgaccgtcgatctccctagccatggcgtccggccctagctcctagccagggtggccgccatttccctcggcaattcacacgtagtccctgccccttctt

SEQ ID NO: 42933 - DNA, 473 bp, Zea Mays
cttgattcagcttattctattcaccctagaagtaccaagatgtaccaggacctaaaggaaaagtattggtggtacgatttgaaaagagatgttgctacgtatgttgcactttgtgacatatgtcaacgagttaaggccgaacatcaaagaccagcagaattgttacaaccctcaaggtaccagaatggaaatgggaagaaatcggtatggatttcatagttggattaccccgtactcgtgacggctatgattccatatgggttatagtggacaggttgactaaagtggcacactttatacctgtgaagacaacttacttgggagcccagttagcagagttatacatgtcaaggattgtttgtctgcatggagtaccaaagaagatcgtatcagatcgaggaacccaatttacctcgtgctttaggaaaagattacatgagtccatggataccaagctaaacttcagctcagcc

SEQ ID NO: 42934 - DNA, 557 bp, Zea Mays
ggagaacaacaaggaagccaacgatgagcaggaggaaaactttgttgggatatggcctctcactgaacattatacttcaattttgacatggggcacgtccctaacctactgcaagatgttctgcatgcgctagggacctacgtcccactcctgtatgacacaaggcgagtgtatgagccccctcgagcttgctactacatcactcgtgttcatatcagggtgatggatgcaggagataggggtttcagaactctatcagctcatgtgtctctgacgccgctatccacctatgctgcttcggtcagcaatgctgctaggcgagctctgtggtctctcagccacacttacaggcagcagttgcatgacatgaggtacaagcatcttcctctacgtcttcgtggagaaagccagaccagcattgttccaagtgaagctggagaagattgcctcaacgcccttgttggtgtggtggcaggtcttaacaccgacctagatagtgctaccctagacctctccggggtacatgaggagctagaagatgcacatgcaaggattgc

SEQ ID NO: 42935 - DNA, 360 bp, Zea Mays
gggatatctgccgtagtcccttggggacatggcatggcgtggcatggcatggcatgagaagtgcgcgccatgcttgtctgttcctcttcgtccatcctcctctctttgtgttcattcccaatttgcagctgctggttccatcggtatgcagcaccgtcgtaccagctgctgaaaccgatcggagtgctatgctctcgctgtctcacacgtgtgtgtcatccagcaactactggacactgctagtacgtagtagtagtattttatgcgagagcacggatcacaagcacgtgtgccatcaatcatgcacccgtaccgtaccggcgatggggctacccggcaggccacgaattttgacaagtt

SEQ ID NO: 42936 - DNA, 804 bp, Zea Mays
gcacgagcagagacggtcgggtgaccaagacacatacagacaacacgacttcaaaaggaagctaccagcggctgacccccaccttggcctataaaaggggaggttggtcatagagaccacatgcgcccgacgagacccaaagacctagaggccgaagccaaggcttagtttaggacttcggtctcgtagtctttaggttcacccacacataagagacttgggagctcttcttccctctctcgcctgcttgtaacccctactacaagcattgagtaacaaaggtgttggtagcgcgagccgccaaagactggatgtagggatattctgctcgaaccagtataaaccatgcacccatcgaccacaccgtccggagcctagaaagtgcacatacaaatttacttgtcagggcggagattcaaaacactgatggttgttgtgtcaggtatatgccttgcgtgttctcgatgaactctccaggcttcggatggccgaccacgacgtcgatcggacccctgaaatgacgatctgttttaggaacctcaactttgtcttcgatggcgaagaggaaatgtcagggccccagaagcctggtcccttctgcctaggagtctcggcactaccacgagggcccacgcacggcccctgtattgttcacacccctagagcgaccatctgctttgggggcctcgacttcatcattggcgaagagggcgagatgccctaggcaccgccaaaccgatcttctttgtccaaaaaaccaaacatcattgcggaagcacttggtggcctcagcctcaccccgta

SEQ ID NO: 42937 - DNA, 377 bp, Zea Mays
tttgacttcatttttttctgacctgctactagctagacgaagacaccgatcagacagggagtgagatctcgtcctggcccctagttcgttctcccacaaatataatgcaacaaccattgacaaaatcccactgatactagtttcacaagctaatcgatactactactgtactagttctaacctgctctacctgcaaatgatgtggcgcgctgcggttcacgggtcgaaccgcatgccctccgctcggttagccctacaaacggttcacgggtcgagccgctcgatcccttttgcacagctagctggtcaccgtcatccgtggatatccaagattcgaaccccacttatatgctggcgctgctaacgtacgcaatact

SEQ ID NO: 42938 - DNA, 272 bp, Zea Mays
cttgtactttcaagtccaagattatgtgtacctgaaagtatcaccaatgaagggtgtgacccgtttcggtgtaaaaggaaagcttgcaccccgatacattggtccgtttcttattcttgaacaatgtggaccagtggcataccgactccaactacccgaaacattgtctacggtgcacaatgtgttccatgtatcccaattgaagaagtgtcttcgggttctagatcgaaccatcgatgtgatggatgttaccttggaaccagacttaacat

SEQ ID NO: 42939 - DNA, 1254 bp, Zea Mays
ggggtgaatgggagccactaaaaaattctcagcttgagaacaccgtgactggatcctaacttcaacacaaaccacgggacacaaaaagttgtgaagcactgtgcagatcaatctagtgccgattgactacaccacaatgctagagaagaaaatgctcaactgactacagaaaatcaaatatagaaacacaaaacagagggagcgacagtgccgcgcaccaggccaacaatgctagggagcgacagtgtcgtgcaagcaaatttgctcagaatttcctcaaacttcacaaaaagtttgcgtagagggaaaggagatcgtgaagtataatcgtgaagaaataaaaactccatgtgtagatcagaaatcaagctttggtagggttttctcaaacgaactccaaatgggatgaactgggatcacgaccaaaaattgcttgagctagatctttgcagtggtctaagaagtgatcttcaccccaagacaatccccaacaacacccacaacacaagaactcgatggttgttccaaaaagcaaaggagatggaatgaaacgagcacatagacaaaatcaaataaaaaatggtagcatatacaaaagtgagcacacgattcaacaaattatgtggatggatctaaacacccttcctttgaatgatgaaatgtagaatacaaaaacacagataagggatggtaacacccttcctttggggttttaatctctagttttacacttatacccaagaataactccttttctcaaataaggaagcaataaattaggagagaaagaataagggatggtaacacatgaatttttatgggtacttagaaaagaaatttttataccccaaaatttaggatgttacaccattggaccctggcagtccgatgcacaccggattgagtcagtgtgtccaagtcttctcgtccatctacaaccctctctcgaaaagttgtccagcttcccaccagactagttccgtacactaggccactaaatcccttctacagggctcactggaaaagtggtctggtgcaccccagacagttgcacctatcttttcttctgacttttcttctccaatttatttttaccttatccaagagtgttcccatgacttagacaaatatttctagtgtcaaaccaaccagtctaagtcatgtaacttcaacttattttaattctccaacttaatttttgtttatctgacttaaattcttgcatagacacatttatcaaacatgttagtccat

SEQ ID NO: 42940 - DNA, 586 bp, Zea Mays
tgattagtcaggctggtcggtctcatggtcactagaatcgatttagatgatttgataacattggtttttactcacgattagctgggctgatcgctatcatggcgatcagctataaactatgattagtcatgattaattgtgattagtcatgattagtcttggactgactgatgtcatcagtgactaggaatgattagatgattcgataacattggtttttagtatggccaaagttcattcttagtttaaccttcccctcactttatgtgaatttgacgtgcgcttttgtcactgaattgagcttctgtttttttgcatgacactctatgggcgcatgtggcatgctggtctttcttgttcattgttgagccggcagcttgctggcatgctgtagtgttacgaaacatgtgaactttagcactgtggatatactatatataattctaacacatattgtgatactgatctcaggctttccctggtaatgatacttctgaagattgtggttgttgttatggacggtggaaatggttggttctgatggttttggtcttttgcggattgttattgtttttttacgaggggc

SEQ ID NO: 42941 - DNA, 361 bp, Zea Mays
tgaatttgtatccttacatacttccttcttgtgtaatcatgctcgattagggcagcatcatgttgtgtgttcaaagatgcagtgtactctagcaaagtctctagacatatgttgccttctgttgtgcccgaactaatttgggtgagatcatgtctagaccgacgctgtgggtagtacttgtaggcagtctagatgagagcagtgtgatttcgataacagaaggatgatattgccaacctagttgcatcattgatcccagcgttaaagttggctcaggtggcgatggcatagtgtcgtcctctcacaacatgagctccaaagtcattagggccataaacctcggttgtcccatgccactcaa

SEQ ID NO: 42942 - DNA, 976 bp, Zea Mays
gtgacacggtggaaacactcgggtacgtggcacaaggccagcagtcggccatcgccggtgaacctatctcccaaagccgtaaagcaaaggggttccacggtgagtcaccggagtggcgtccagcgcacgggtgatgatcttttctacccaaatcgttatctccaagcccggtgcacgaattaggatggcggcggcgcgaatcttcgcacagagaggttgccggcggtgaggatatgacgctggcgatctgatccacatcgggctactgtaccatcagaaatccttttcagagcatctgacagggtgatttgaggcccgattttctccacagtttctctagtaactcactcaactctctgtagcaaaggtgcagagctacaaaccagctacaaatcgactatagggattgaactcagttgagcactggatcaaggttgaatccaagtccaaagttagctctgttacactgcaattctgaatttcagagttccatcagcctgacagtccaactttgggcttaattatttccaatttcttctcaacaactatgcttatactctcaagcaaagttgttctcctttgtttggtctacaagtttgatgtggtgacctagggcaaattcttattaatttgaaagatacaagggctcaaagttgaagcaatcacactgaaattcagacttcatcacatgagtcaagtgtggctcttttgcacttaagtccaaatctcaagctttggattgcaaaccctcatgattgggaaccacatgacttaagataattatttaacatggtttttacattttagtccacaagtgcactatttttgcacataggcccctagggtttggatttagggttttccagggttccaattagggttttttgtatctcaggggtatgaatgtaatgtagatccatctttggtaacattctatgattgttttacttaaaccttagggttttctcaatttggg

SEQ ID NO: 42943 - DNA, 631 bp, Zea Mays
caaagtactttgccaaacaatcccaaattcattgaaatggataatgttatccatatcgatgagaagtggttcaatgcaacaaaaaagacaagaaacttttacatgctaccagaagaggaggacccatataggacagttcaaaacaaaaattcaatagataaattgatgttcttgggagcagttggcaaaccaaaaaaggatgacgaaggtaacctaatctttaatggaaaaataggcatatggccttttgttagaaaggtatcacaacacattttgatgttaactttgttgttattaactttaactaattgattatttgtttcatgccattaggaaccagcacaaaggagaagccgtaatagggacagaggaacactagtgactaagtgcatcaatgttgatagaaacactatgcgatcatttcttattgccaaagttctaccaactatcaaagcaagttggcctagatcagaagcacatagaactatatggattcagctagacaatacaaggactcatgttcgtcatgatgatcccgagtttgtaatcgttgcagctcaaaccagactgaatataagactcatgaatcaacctccaaactcacctgacatgaattgtcttgatttaggct

SEQ ID NO: 42944 - DNA, 577 bp, Zea Mays
gaaagtctggtgcgtgcactacctcgccggatgccgacgttgggggataaactggtgcgaagcccagccttcgacgtggacttgcacgggcgggatgcggtcgccttcgtgcgggagttggagtcagaggctgttaagattgttggaaaatatgtgccgaagactgagatgataaagagctgggatatttgtggttccaacgtgaggttgaaccatgtttttgagttgaatagcttgccatacgatccctactcggaggggggctctactgacgctggtgatgaccaaggaaagcaggtgaagaccgagtctgaagagggcatcttgaaggggaaggttgtggttgcagccgcccgaaaaaggaaattagatctacaaggtatgggggattatgagaccgggccaagggcctctgggatttttgttgaggagttaatggagatgtgtgtgggtctcgaggaggtgatgtcttcgcccaagctctgggaaacatcttcgcgcatgctgaaggttatcgggggtcgatggcataggaatgaccctataccccgggccgctggcgatgattattttacgt

SEQ ID NO: 42945 - DNA, 486 bp, Zea Mays
aaatttaatctccaaaacagatccgatctacaaaacatatcccatcattttcatctcatcatctggtgtctgctcattttaagaaggtggcaatgatgagggcatcttccactattatctgttgtcaaagacacaattggcccaataatagtcggacgccaaccgtgtgagcctctgaattatcccacatcctttaatttgggaggacaaagacacctaaaaagggagagccaccctccccttattggactagtcttatggggcaattgtcctttccctgagttgggtgtgcttaatgaactgttggagtctaggcatcctaatttgttgggcctcagctaacgccatctgggttgggtttatcactaccctttccaaaggttctctaaacaccaaaacactaatcatctttgagtttatttcaggaccaatatgatcaccttcattctggtaacatccacgaatatgagaggaagctaagagctt

SEQ ID NO: 42946 - DNA, 623 bp, Zea Mays
taggatatgggatctgctggagatagcctaaaactacacaagaaattctccagtgacaaatcctagtacagaatgtaatcacacaaatgggaaagttggaataagatgccttttgtgcccctcaaagttcaaacataatgaggtgataaaatctgggagaatgactgagaactagaatagggccaagatgctttactttgagcctcagccaaagaacaggacaaagaataattgtcataagccaatgttctcttggggcattgggccacgtggcaaaactaacagccttttgcaaaaggggtaaaagagattcatttaatgattgctccgatgattgcagttcaccacgagtcaacatcacaacttgatgataagaggaatacagcatggagatcagaaattcgaaacaaacagaaagcctatacaggaaatggatattggcagaaagaaaattctggacgggtcattgccatagccacagatgaataaacagcaaacattgtctacatgcaagctattcagtcagtgccttccccgaatggtgcttaaatattcaaaaatatcccaaggcatggtcccactgttcattccggtactgttgtctctattatccatttcaaaag

SEQ ID NO: 42947 - DNA, 550 bp, Zea Mays
gaaatttagcctagatgggatgaagaaggtcgacaagaagtttctttagaagaaaggatgtatgacacattaggattgagggaggaggatgaaagggaaggtagagaaaggcaagaagcatgtatgggaaggtcctccggtgttgatggttatgaatgcattgatgttatagttgcgtttgctgtgaagaccacctaccagatgagtgttttaatatgtgatataacaaatcctataatgaagatagggagcttgtatgaaggaatttatacttgctatgaggcatcatgaaataaacaatgaattcgagttaggcattgaatccagtgcgccttttcgatatagaggatactgtaaaggtggtgactgtccatggaaacttcatgcaaggccagaaacacatggatcaaataatatcattgtaagcttttgaccattactcgttaagttctaaatgttaattcaagtgtgactttaataagtacattttgatgcaggttacagatatggttgatcaccatagttgtacctccagcggtcggagaaagac

SEQ ID NO: 42948 - DNA, 452 bp, Zea Mays
tgtttttcgtgctatctaatgtttgtactgtgtgtgctattttaactttctttgctttctcgagctcgattgacttttgagctttggcatctgcccaaccatcgtctgaatggatgaggagaagaagatcactaaccccgcactggccgggttttactaagctatggagaagaccaacacggagaacatcaccaatgagatgttggctgggttgtttgagaactccagcgatagtgagagttttgacgtagagagtggaaatgaagatgtcgaagaccggccatggaggccgagccatgttgtttttggaagatcaattgttaagcaagggcagatcgaagcgatgaaaggcatatactttcgtgatatttctattctgagggccagaggggagaatactgttcctcttcccgaagctaatgaggtggtggtttttagaagcttcttgaaag

SEQ ID NO: 42949 - DNA, 660 bp, Zea Mays
gggagggataacccgtacgtggcgccatctcccaagcccagccggagtcttcaccggcggccaccgtgaccagtaaattttgccgcggtgtcacccatgcctcaatctccctcactgtatctctttctgacgtggtaggcatgcacttgcgatgctatccgtggccggaggtcgtctgtcgggtcgccgtggctataaatagcacggtggtccacggcgaggtgtttacctcttcaccagtgagctgatcgcaatccaaaattcgcgttgtctctgcccccttctcccaaattgagtctgcatggtgaagctatagtttcttacggccgtgtagcctcaatctccacccccaatttcacctagagccgccgcaacaccagttttcccctttcctctgtcaccggcaagcctaagtcctcctcgctccgtggccagccccctctggtaagactctgtccaattcaagcgttgttttagcagctctatatgcttgtaaagctcatcgtagtagccgtttgaccaatttgggcgtaagtgactgggaacacgggatcgacatcacggtttccgccatacacgtgggcagtacattctctaagtgttcaagccacagtaaagctcgttcctaggtcgctttaggacggttatacttcccctgtc

SEQ ID NO: 42950 - DNA, 287 bp, Zea Mays
tagaaataggctcccctagagatatgcatcaaagaattttaatgagatgaatagatgcattcattttagagacgtgtagggagaatctttatacatcttgatcaaggcttataagatttgcaataaacaccttatgcctgatattctcacaatgaaaaggatttagagtactcacaaccacaacattgattgttttgtagaagtaggtggtgttgttcttgatgtccttctctttcatgtgagtgtcctccctttgtagttgtttctttttccttccaaacttattg

SEQ ID NO: 42951 - DNA, 645 bp, Zea Mays
gaaacactagtatttatcacataaattagcaaattaaatagagcatggaatatatttttatactacttctctaggtttatatatattagtacttctttacttaaaattcattacgcttaagaaaccttgatttagagtaacttaagttggtttttcaggattgggatacgatactcagattgtgattccattatagtgtaataatctatgtccgacgttaagtgtatgtcagttctaaaagattggaaataaccttatcttcgatggctgtcgtcggagatattatatgtatgacggcccataggtactgtcggcagtatgctcggttaacaatgatagcatccacacatattatgtccgacgatttgcatgcaagtcattggacgtaacatacttatcgtcgatgacttgcatgtaggttgtcatatattaatttgtcttatgtctcacagctacatataaaccatcggacactatttactaatgtccgacgacctgtcgcaggccctcggacataatgaattctagggatgtcaaaattctccatgttttttcttcattcccacaaaatacattatcgcaagcagaaatatccatatttcacagccactacatattcacatatcacaaacacatgcatccaca

SEQ ID NO: 42952 - DNA, 503 bp, Zea Mays
gaagaacaattgaacacagtaattcagtcgggtaggtaccaatagaccttgaggcgctaccatgataaagttgtgcggcaccgatcttttgcagtgggagacttggtccttcgccgaatactaacagggaaagggcggcacaagctatcaccactatgggagggactgttcatcgtatcagaggtcacacggccgggatcataccggcttactcagatggacgacacagaagtggggaactcgtggaacatagaacaccatagaaaattctatccttagcaaaggcctcaaaattcttgaaggaacattgtactcagtaatctggggacttcatcatcaataaagttttcgttttccaaaggcattcagactcttgacttacagctgactttgattgggctggacttgaaattagcatgcctacctgacttagggtgatcactataccctgctaacggagcaatcagcttaagtcggtgacgacttaagtcggtgcgacatgc

SEQ ID NO: 42953 - DNA, 412 bp, Zea Mays
ccaaagaagtaggtcctgcaagggcaccggcagggaatgaagaatagactgatccttctctgagatgtcttcagctgaatatacctccatgactgcctcattgctctgcccccagagtgatctccataactgaacattggatactcctgggttgaagaccgacaagtttaacagtggtgcctggataggaaacagttagccatttgtcggtccagtggattagcatggggctgtgtagttgtagccaatccataccaaccatcatatcgtaggaggatagtggtaacactttcagtgtggaggtgaactgatagtcattgaggtaccaagttgcatgaggcaattatgtggagcagcttagacacgtcatgttagcaatctgcacagatagtggtgggcagatctgagaaca

SEQ ID NO: 42954 - DNA, 699 bp, Zea Mays
caaccaaatcgcgcccgctactcatgcgggcagcacaccgaagggccccttcatccctatcattctctgccacctcaaacggtgggaacgccacataacagtgggagcacatcacgaccaccgggagtcctgggaggttttcgacttcgcctcccgacacataaaaccaataatcataccagttgcaccacttgttgcgggcgcagggaactagttccacaacttccgccgaagtcttcccagtcctcggtgtaaaggtgcacgacccaaactatacaatcttgctcccaatttttctcttctgtcagtgcagacaataattcttggcgaagacctgtacggagagctgaccgccatacgaagtcactgcccagacatacttcgccagggccaccacaacattaggtgtcaattggtggatctgcacgtcatacctctgcaagacctccgccacacaacgatgcgcgggtaggcgaaggccggcggcaaagaatgccttgaacacaactatctcaccctccggctcaggaatctcttccgcccccagaactcttccaactccattcccaaaataccccaactgctgcatgtcttgcacgcgaaccgaggatatcctcgaaatgccgaactccaccgtgtggcccgggtgtagctccaccgccgccaaatcgctgaaggtatcctcggacgacgattcac

SEQ ID NO: 42955 - DNA, 457 bp, Zea Mays
gacagtttgtacagagacccttggcgttttaaacaactagtaaaggggtcgtgacactatttatatgtttcactgacgtttacaggaaatcccttctacttctatttcttcgcagtaccaagtccacgacatcgcacggcggagaaccgagctccgacgagcttataccggccagattactcgatgaccggtgctctacttcggctgagacctaattcaagccctaacaagagtttcccctcaattaatttcactagcggagctctaactcgctctgtccacggtgacagcgggcacaatggacagcatgacgtgttcccgacgatctaaggggtcctagcctaattggtggggtcggggagcatcaggggcacacaaggaattgaaacaaaagagcagagggtatgagtggacctggagtaggatgaccacgacgagattgtaaggtgcggaattt

SEQ ID NO: 42956 - DNA, 390 bp, Zea Mays
tagggctgtggcgtgatcggtggagtggatcgatcctgaccgttgaccatcgatcgggcgggtgcgggtgatcgtccaccctagatgaagatcgatctaatcggatccactagtttctaatccgacggctggcaaacgtcagtaccccttcggcctggatatttttctctaaagagccctcggcttatttagaaatcaacccgccatccaccgtggggtagatctgtgtcttgggacttttcgcgcattaacccctggactttcctgtaattgaggctcagtccagtggcgtgttaaaatgaataaatgaattataaaataggtttttatgatataaatgagtgctagaacttcaataattcatagtaaattcattttaactctaaattg

SEQ ID NO: 42957 - DNA, 633 bp, Zea Mays
ctctaccgcttgacttcggagagcctagatgtacacgctgagcctaacaatggcgttgggggtcagctgatgaagataaatcctgaatttttccatgacttctggaatcattccatgcagaggaaatctcaaccctgctttgaagaagctcttaaaaactacaacttcatcatccttcggcttcgggatagtctcctacccgccaaagcaaatcaaccccttatcggcttccttgaagtagcctagcttcgtcatcatagtcatgtcagctttagacacagttgattccccaaaatccagatggctgggcttcgatggcataataacatcataatcaatctctccttcattagcatcaccctcttcaatatctgcttgctcgatttcagcagcgggtgattcttcgccagcagcgccttcagtcacaatcaatcccgaccgcctcataacttcggaaatcggagcagtttcagcagcttcggcttcgtctccgtcacgagtaactctagctgtcgagcgtaccctggccatttgatgttgaattttttgcattttgacgaagttgaaaatttttatctttgccgaagctctttcttgtcatgaagctagagcgagatgatctttcggttcaga

SEQ ID NO: 42958 - DNA, 492 bp, Zea Mays
catgtggatcacggtaggaatgaagaggccgacgcgttggctaaggcagcggccaaaggcgaggccttgccctccgacgtgttctaccacgtcatcggcacaccagctgtccgcaacccagaagacttacaaataactaatgacgccgaaggccatcgcattgtcaacctcatcatggatgaagatggcgggccccaataactttgtatctgcaaggtcattaccatccaagtgatatcaatgaggccaaatgcctgaagcaccaaagccgggacttcgcattactcaggggccagctgtacaagaaggggatcagtgagcccatgctaaagtgcgtgactgaaagcgaaggcattcaaatccttcgcgaagtccacagcagaacttgcggctctcactcaggacccagggccctcgctgccaaggtgatccatcaaggattttactggcccgcaataatctgtactgcgaatcgagtcgcgaggtcttgcg

SEQ ID NO: 42959 - DNA, 672 bp, Zea Mays
attcgttcgttcataattcctattcatcgttcatgttcgttcaaacaaactattcgtcgttcatcgttcatttatacgactattcatcgttcattcataatccctatgaattgttcatcggatcattcataatcactattcatttttactattcatcatccgttcgatcgcctgaatattcaactcctcatccatcatgatgatcagctcacctaatacctgctagaccaatgtctcagtcatacgaactctggtggccgtgattttccttctagtaagaactttccggttggtcaccatcctagaattgctccaagttgagcacgattaactttgaggttctttcgaatcaggcttccaaaaagaaaggtgaaccatgtttgtatagatacaccgttaatcctataaaatatggcccaagataccatagcccacctagaccagaatatcgcagtattacagttgtctgggtctcaccttactattgtcccatgtgatacaataggtataaatagttgccaccaacataaacctccgcccatgaattgtccagaaatatttcgtggcattgcgctcaaataatacatttgtgtttttgaattttcaaatatccccaaatattcaaattttggaatattacgggaatattcttttttccttttctttttatat

SEQ ID NO: 42960 - DNA, 649 bp, Zea Mays
gtttagtaacatgtataccatctgcattttcatgttcatgaattgggttttggcttgttcattttcatgttcatgaattgggttttggcttgttgccaaaatcatatgtattcgaaggaacaaaggaggtcactaaggaacggatactggagcaaatgtgcttttttgtagggaagaaaatgactaccacaggcgtgatcgctggtaccagagatggcctttcatctgagagcatttctaggtttcttttgcctgcttttgaatgagagtttgtattgaacttagttaaggaccaattacattaattacaattaaaataggagatatcactgtatttcatatagcatagccttgtgttgaattttaataatttatcataaaattttattgtatgcgtgttagggaagaaatacaaaagaacctttggcatgttccagttgattagcgtgcatctaggtgcactggagttgccttatgttgcagtcagtctccttggggtttgtgttcgtggatctggtgctaggataatggcatttgttggcggtccatctatagagggccctgatcttgtaagtccaaattcattcatctgcatactatcttctttcaagctatttcttggtccaacctttgtcagacggggtgaagc

SEQ ID NO: 42961 - DNA, 378 bp, Zea Mays
gcaattaaaacacccagttgaagatgaagaactaggcaaggcagggaatcgagtgcctggggcacccggctgatttggggtagtgggggtattgttggggcgaataatgattggttgtttgaaagggaatgagggtggacgagaaaaagtgcgattttggcttgaaggcccggatcacaaaccgttgcttcttcgcctggcccctgattaggcctctcaccaccgaatcccttattcttcccagaacttgcgtattttgcttcaacagataaggctgtgctgacagcctttccatatgttaagtcaatacaagcagccattttcctctgtagccgatcacttagtcctcgcataaaacagttcttcttctttaaatca

SEQ ID NO: 42962 - DNA, 343 bp, Zea Mays
cttaccatctgatcgatcgacataaattaggaaaagatttcaaaaaccagcaagccgcacttacttctgcaatcgttcatgacaactattgaattctaacaacagaaacaaaatgttataacttccagcgccaagaacacattcaaatatcctactgagtattagagtgcactgatcacacacacatatagttcacaaacgcattgagtatcttctaaacacatccaaacatctctatttggtaatgtcttttgcaggagcaatcgaggaggaagggcgactcgaagcatcaggcgtagccttgacatccgcaacaatgtcatcaagaacaactacaccgggc

SEQ ID NO: 42963 - DNA, 643 bp, Zea Mays
cggcagctgacgtcgggcacgaagaccatccaatatcgtgtcctcgatctcacatataaggaagtcaacaacatcaaactctgaatgagagatcagggcaccaagtagccagagctggatatgagtggtagcctatctataacccatccggggcagtagcgtccgtctcatgagttgatataagtacttggtcgctggagtgaagtctgtcggagagcgttgcgacccatctgagaaaggcggtcggaacagggccgcgacatgagctgtagatggagcaactccgccgtgagggcgccgaggaggatcagaagtaccataacacaagctgtgaaggcgagtcgatgactcggtgaatccaaacagctggtgaatctggctggcatgaatagtaacatcctctcgctcaaagagaaacctcatccactagtgatcggggtcaatccatactgacgcatagaacactcggacccactcctcaacatatctgccgctagtagtcagaagagtgagaagtccaggcaaatatgagaggtgcacctcagagtccgcaccagctgctagcaagaaagcagggagatccaatagccggtgcactcgtagagccatctgggctgacatctgcgctcgaaagaacgactcc

SEQ ID NO: 42964 - DNA, 305 bp, Zea Mays
tgtatgcaagggaaaatttgagcaatttctcatgaaggaagatgaaagtgtgtccaacatgtttaattggttaaataagtttgtaaataagctcaagggacttggttttaatgtaccggatgtggaattcactcacaagtttctcatatctcttccagagaaatatgacactattgtgaccatgttagtaaggagtgatttgaccactacttctccaactgaagtattgggagagattcttactcaagacatattcaaaaagtttcaagccaaagctgtgagtttggctaagaaagtgaaaggtg

SEQ ID NO: 42965 - DNA, 407 bp, Zea Mays
gtttggaccattcctagcctccttccaggtggaaagaaataacctggattggaattcggcccggattgaaacagtcgttcgtttaaacttggatcaaaaacagaagccatctggtttggagattgtctgttgttcatggcccggtacgaaatctggtctcgtgtcctccggattggatcttggcagcgacacagtgagacgcgcaaagctggcggtggataaggcaaagaggcggcagcgcaaagtggcagtgcagtcggaacgacgaccctctacgccactccccatgtgtttctcgttctcgtcggtcaaggcggtcgggcgggttagccagtggtgaccgccgccatgtatttgaccaagctttccggacgcaggtgagagtcacgccgtcgtacatgatcccg

SEQ ID NO: 42966 - DNA, 413 bp, Zea Mays
atttgagggtagctcagaccagacaaaagagctacgctgataatagaagaccactggaatttgaggaaggtgatcatgtgtacctcaagatgtcaccacttcgtggaatgaggagattcaaagtcaaaggaaagttgtcccctcgctttattggacctttttttaatcttaaagcgagtgggagaggttgcatatcaattggagttaccggatcatcttgcggatgtttatgatgtctttcatgtatctcagctaaagaagtgtctcagggtacctaaatagcagctaccaatggaggaccttagtgttcggggtgatttgacttacacggagtatcatatcaagattcttgacgctttggctcgagttacaacaaataaggtgataaagatgtgcaaagtgcaatggagtca

SEQ ID NO: 42967 - DNA, 934 bp, Zea Mays
gtaacactcatgtgcttctttttggagctgggcatccttgtgatgtttcctttttggaatacctggcaattcatcgactgacagtgcattacgtattcgagaatatgttattagttgttcttggggagaccattatatttttatgccagaaaacaaaatctggttcttctgttttgtagtttcactttcgtttgtactgatctggcgacaaggaattccatagtactcacaacaacaacatgttctaagatcatttgtctgttggtgtgcatccttttgtgtctgttcattagttgtttcatttctagtgacgtttcgacttgccaacacttgctggtatgaggaggtgagttgagatgttttctgtattatcagagcttgtgcatgtaatagcttttctaagtcaactatccagggtgaggttgtggttggtgtcatatggttatcggtagtctgttcaggtgctataaattctgctaaatcaacttgttggagtctagctaccacttgagatgttgcttgcagaaactgagcatgcgccttcttgaactgttccatttgatccttagctggaggagttgtcaacacaatgtattctttgcacttagtgacatcacttgcagttgacattccaatgtctgacatctgtatggatatagtaaggaaagaagggacgaaaagattgagctaagacagactataaagagtagagagaacccaactatctaaggtttaacctagctaactattgtcattgtggacaaaagtcacacaatacaacaacaatcattataaagaagcaaatcaaacatagtcacaaagataactaacatgaactcaaacatatcagcacaacataactcgatgttattcattcattcaaaaggcaatcttgcctagggaaaacaatttcttatagttttttttgaaaggc

SEQ ID NO: 42968 - DNA, 572 bp, Zea Mays
caaactagctacaagtgttctttaaatggaacaaaaaaggaaaagaaagcctagagctcgaagaaatgccggagaaaataggccctttaaataatggtgcaatggacgtgtccccaaatgagtcaatgtactaactagtcatttttatatgtcaattcatcatttttctctactgactaaacatttttttgtagtcaagtgatgatcgtaggtttacaagatggaccgacacatcttgaaggtgccacatgtgcacctgtaccacctccaagtgttgaaaaagaagcaactccaagtgctctaatctcaaccccaacaagaaacaattataccaagaagaaaaagcttactccctaaaagaacagatgttgatgaaaatcatttagtttgctttttgtgtgattgtgtgtgactatggactaggtgctaaattgtgtgactgtgaattgtgtgctatcaaaattgagcactattttactatgtatggatcctatcaaaattaagacaaaatgatgtcaagattatgcattagttgacaacactgcaggttcttgtatggttgtcagtattta

SEQ ID NO: 42969 - DNA, 319 bp, Zea Mays
gagaaacccacatagcattgtgtttatggtattgtcttggaagtgtttagttttttggtttcccactaggttattgaagataacctagaaaaaaccaggatatagaacccatgcggccccaacgtgcatctagaaagtctagcgcttgaccaggtccatggtggcccttagccatttcattttcaagttaggagagtggggaataccattttcaagatccttcgtgacaccaaagtattttaatgaacatacgaagcaaagcaagctctacaaagacttaaaaagtgccttaccactcaggtgattctcgccctagaac

SEQ ID NO: 42970 - DNA, 372 bp, Zea Mays
acgagtcaaggtaccaaggatcttgataggatactccatataggtcagatcatcttgaacactaaggtcctccataggtagctgctcctcggtaccctgagacacttcttcaactaggacacgtggaaaacatcatgcacatccgcaagatgatcgggtagttcccagttggtaggcaacttctcccactcgcttcaggatcaagaagggtccaataaagcgaggggacaacttccctttaactttaaatctccgcataccccggatcggtgacaccttcaaatacacgtgatcaccctccttaaactctagtagtcgtctccgggtatcaacatagcttttctgtctcgactgcgcagttctcaagttttc

SEQ ID NO: 42971 - DNA, 649 bp, Zea Mays
gggtatattgtggtttgaaagtagattggtggttactaaaaataaggatctcaagaagaaaatcttggatgaggctcatctctccaaattctccatgcatccaggaagcaccaaaatgtaccatgatctgaagccctcatattggtggaccagaatgaagagggagatagcccagtatgtatcagaatgtgacacatgtcagaggatcaaagcaagccacttgaaatcagctggtgccttgcaacccctatcaataccttcatggaaatgggatgacatcagcatggattttattatgggtttgcccaataccaccgtggccagacattttcagagaccctcagcctcaaccaagcccctggacagcttccccgaggagccatgaagcttctccaagcaaggatcttcgtcgcggacttcggtcgtccgccaccgcgcgtaggccgagctatccggtgagccattatccaattcctcgcgcccatgccttccctagcacctagtaaagctctctgaccggtttaattaaactctaccgccctggataagccggagccctcgctgccgacgagctcccccgcctacgcacgtggaccggcctactccgaccatccccggagacgatccgcacatcggcgtgaccgtcacg

SEQ ID NO: 42972 - DNA, 456 bp, Zea Mays
cgctagtagtggcttttttacctgtctagtgtctactctactatgcccaagtcaatcgtgctgctcattcgctcgcaatggacgctgcaagtcgatcgatcccaagctacgttacatctggtgatcacctgtctgtcaatattagtagaacggtggtgccttctgcatccgcgtcagggttcaaaaaatagcacaacgacgttgctctgaatacttagctccgtgaccactgggaccgggtgtaaaaaatacttgcccggagacagtgcctgctgcacgaactgcccgttgggatgttaactaatccgtcgtcaggaataataactatctcaaagaaaacaacaccaccgtccggctccggcggccatgttttactgccacccataggccatagggcccctaaactaaactattgccggtcagatcagatgcagagacggccggtttgtatactcc

SEQ ID NO: 42973 - DNA, 650 bp, Zea Mays
ccaaacaaaggcaattaggaaagatcagtatcacaacaacttctgttgttacagctttgtgcactgttctgatgtgaggtatcctatgccaacattccgaaagaaatggttgggctcttggatgaagcaatggttctatgtcaaaaatgatctgagtgagagggaagatttgaagggtattatctagcatcccatacggtcacacttcggcattaggaggccatcaatcacgagtgggaatgcacatacattggcaccagggatttagttcaagagcatatttcctataaggtgtggcctcttgttaatgactgggagatgtcaaaggagaccgctgctgggtccagcgaaggtggtctggtctatctaagaaacacctaccactctaggagtcaatttgacgagccaaatgatgattggcttgaggctgttgaggctaccagtgacgaactgttaggagcttatatgaaggcataggacaaagttatgaccactaccttcgacgctcgcagcaagaggaggctgaatagggtctttgatgtgattggatattttatcctgattactgctttcctacccgcaaacaagggttgaaaaggaaaatggcagcttcatcttcttccatcacacctaagctgaagaaggttaag

SEQ ID NO: 42974 - DNA, 292 bp, Zea Mays
aaaaccacgtaccattttaaactaatctagatttcattaaaacctaggtgcttagagaaacaagcaaaggagtgagggaatgttaatgtattgccctgctattagggaggacgagaggaggagaaattctccactgaaatccgttgatattggtgacaaggtggcaaatggtggaggcatagaccctgtctagaggaggaagaagagatagaggaagcaaggacatagctgcgcatgactttctacaccctgtgttgcactaagcgagttggtcggtaggggtcatagttat

SEQ ID NO: 42975 - DNA, 796 bp, Zea Mays
aagtttttggccatagtggggctttctactaccactatacttgaaaaatgccaaacaacagatttcctattttttttatcttcttctttgtgcaagagcaaccattctagaatttgacaactttttgcttaggggaaagggtgtagaaattcttggaatatatggccttattcatggggtagggggtaatgtgtgttaccttacatttttaattgagttttatatttttctctggtggtttacctcataagtaattgggtaaaaatttgtttgcccactattgcacaattttaggatttctcatgatttaattaaaacattggccaaattcaagttttaattgttcaactcacttattgtgatgggttggggtgtttattatttttgtagtggtgttctatcagttaggagtctacttaatttttcttgccacttttgcaatggtccttataattttaatcatgtcttttcttgatttcttagtgcctaataaaataaataacctttgattagctctggactagggttctctgcatttttcctatgttctttatcacttggtattctaggaaaaatatgctcatcctatggttattattttctactgcctttcttatttttctaagttttgggcagaaatagtttttaatggacattcttgggttattcttgtatattggggtgcttagtatttttaaaccgtgtgtatgttgggtatgtatctctacaatttttctttagcctagtatagaagtatttctatttttctctgcattaataagttttgggtattttc

SEQ ID NO: 42976 - DNA, 884 bp, Zea Mays
caaccgagccacaaaactacataacccacatccttctactccagaaattcggggctaaccactagaacacatatattttagtgtttagaaataaacaataattatatttgcagcctaggcgccgctccccacgcctcccctctcccgcctcgtggcaacacacgtgcacatacctagtatgcataataattactgaaattatcaatatttcttgacatccataatacggcggacatgattcatcaactcatttcagtacttgagcaacacatcgataactgaattaaaaaaccagtatacagcggtggcatattgcagttgcagtactaaaaggaaccttgacaagatgcggctcggactccaattcaccggaaattgttagttatgctcttccgagattcttgcgaactgttacagttatcccaggatttcacaaatagcaatggaccaaagatgcattatctgaccgttcgtttatacgtggacgacatcgatcgtcaaggcaaccgagccacaaaactacataacccacatccttctactccagaaatttggggctaaccactagaacacacacattttagtgtttagaaataaacaataattatatttgaagcctaggcaccgctcctcaagccccctctcccgcctcgtgggaacgcacgggtacatctctagtatgcacaataattactgaattatcaatatttcttggtatccataatacgcgcggacaggattcatcaactcatttcagtacttgaggaatagattgataactgaatttaaaaaccggcatccagcgacggcatattgcagttgcagtactaaaaggaaccttgacaagatgcggctcagactccaattcaccggaaatttttagt

SEQ ID NO: 42977 - DNA, 689 bp, Zea Mays
cacgcagcgtagtattgttattgtctaaaagaactctgaacctcttacctgcccgggggcatattcacgctgcgatagcagtagcagcaggcgcatattcacgctgtacttgctgttggcggcatgacctgaacctcttacctgcccgggggcgccgcgtgaggcacttgaggttgaggtgtaagtaacagtcacacttgagtactaacgatatttaattttaatatgccagtagcatctgattatagtcgaacttaaataagacaacatgatttattactcgtcccattataaatatcattataaatatgtgaaccaatcagcagttccagccctttcctttgcttccgctgcctgcgccaacaacggcctttcagaccacatctccaaagagaatctggtatctgccgttacaacagaacacttcagttgcaacagaacacttcgcctttggtgctcactcacccgcaaatatcatcctgcccagtctacacacttcagatgaggaagctgtaggagactgagaatgcaaatgcattatgtcgcaagcagtaacgattttttttttgtttaacactcccgtaaataaatcagcttcttcttctgccggttgattcgacgatctgaccagaacatgtcggccatgacacgccttcttttcctaatacctatcactagtattaaatata

SEQ ID NO: 42978 - DNA, 870 bp, Zea Mays
aaaaaatcaaatcccataatcaactcacctaatcaaatcccttgatttatggtggttgcatggatgtgatggctgttggttgggattgaatcaacatttgcgatgtatctaacactattttatgcttaaaccttaggatttttatgatcatgaatacaatgcatcaaagttgtcaacgtttctcatgttggcttggcatttacggtcaaaactaaggagttttacgttaaacactaaagcattttatgctcgaacaggagtgcgtccaccagtgtaccacatgcatatttttcgtgaacacagtgaaaaaggaagtgtcatgatttatggtgtccgtgactaccataaaaatcaaattccctgatcaactcaactaattaaatctcctaatcaactcccttaatcaaatcccttgatttatggtggcggcatgggacgaaggggctgttgttgggagtgaatcaacatttacgctatatctaacattatttacgctaaaacgtgagatttttacgcttaaatctgggttgcgcccacacagtttctcgcatggaacctatgcacaacaattttcgaatctgccatagtttatggacatgccataaaaaccgaaaactgcatgcacacatgctgggtgataaatgtaccttccattaaaaagaggaccccccacatgcgtggtgacgtaaacaggattttatgccatgtctgccactattttacgctcaaacgtgatgattttacgctcaaaacctggcatcacatctacaagtgccataaaaacagatccctaaaatagcacgccacatgatctagacgtgaaatgtgggatggtggggccgtgggggaaggagccgaccaaagtttctg

SEQ ID NO: 42979 - DNA, 774 bp, Zea Mays
aggagctcggttggtggccttgggtagcgtggttcctctaatgttgtctgtagggtcgtgcgtagctggactttacaatgggggcttgtattctgctggagggagctcggttggtggccttgggtagcgtggttcctctgatgttgtccgttactctcatcatggcgtattgtcccgtacactcgtcgtacgggcccctttagctggtcttctactgacatcctcgtgatagagcacggggtcccacaggtcagttgtatggagcagccatgcgttgtgcggttttgtctgtcatcacgagcctgtgtcactcactggcatgcgtaggcgtacactcgatatggtgtatctattgcgcactacccgatattcgtgccactgtagaagctccgatgcttaggtactttatgaataggatcgtctggtccctcaaggctgtgggagcgtgtctagggccgtacttggggaggtgcagtcatgtcgatagcgttcacttgatgtgccctcgacttgccgctcgggcgactggccacaacctgggatgccatgtcttgtcttagtcggcgtggactttgtgacgtttgacttgagtttcctcggtggtcgtcatgactaacgaaattgctcggccgggacctggttggttgcttcgcctcgtgaactttgcttggcagggacctggtcggtcgctccacctcacagacttgctcggtagagacctggtcggtcactccacctctcgaagttgttcggcagggacctgatcgatcgctg

SEQ ID NO: 42980 - DNA, 765 bp, Zea Mays
caagttcaaaacatgaacttgttaaataggggaatacattaaccttgtgtttcttgttggctcgatgtgatccatttgcttcattaaccatagtactaggtacagggagattaagagatctcatcctcttcatattttcttttatgttggcagccctctgtagttcatattcattgacctctgtttctttacccattcctcttcctcttacaaactttactcttgaatcaagatataaagagattacaatcacacattacaatgtaaaaataaaacatttttgcatacacaaaaaacatatcttacttgctaggttggttttcgtcaatcattattccatctatatcagtcctaacacaactactaccaccaatagaaacattaacttgtgtgtttgcatccaaatctggcaagaaagaacttatttctgtactattgcctagcctttcatccatgtcatacatgtcacgttgttttgactttaaaacagtaaaccaatcagcatcaataggatcttgcacatagtaaacttgagttgcttgagatgcaaaaataaatggctcatctaattcgttgtcaccagtattgaataaatgcttgaagttgaccattgtcaccccaaaattgtctattttgacccatttgtctcgtactcggttatcaatccaatcacatttgaagaatactaattttccttggtgatggtagttcagctcaagaatgtcttttataacaccataataagttttgctcattgatattggg

SEQ ID NO: 42981 - DNA, 561 bp, Zea Mays
tatggccattgattttcctcaatgggctttggaggcaattgataaaattagaaagggttttctttggaaaggccgcaaagaagtcaggggaggacattgtctggttgcctagggaagggtgtgcagacccctccatttgggagggttaggtatttctagtttaaaggaactttgctgggcccttcgtatgagatggttatggcttcataaaactgatccagaaaaaccctgggcaaacctccctatccaagttccaaaaaaggcaggagctttcttctccactgttttggtctctgaggttggaaatggagcaaacactttgttttggacagataaatggatcttgggatagaatttgtgtagtctgacgcctagattatttgccatcattcctaaaaggattgcaaatagaagaactgtgcttgaggctctttccaatagaaaatggatatctgatataaagggtgctctgtctgtgggagttctagtggattatttgaatctttgggagcttctttcagaaatagtgttgcagcctgaagtggaagataagcatatttt

SEQ ID NO: 42982 - DNA, 716 bp, Zea Mays
ctcagatcttcgatgatgagagacagagtctccacaaggttctccacaaaccggaggctcttgttagcctttcgaatagagaatcaccaacacaagagcaaaaacacaacaacacaacaccgaaaatgcagatcacacaaacacaatctctaggatgactatctctactcaaatgggatgcttggatctctcagaatggcctgaaggtgttgcacaagtgtttggaatgaaagcacaactctagtgttgattagtgtgtcgaatggactatttggggagtatttttagtcccaaatccctcaaagagttgttgtgttgattgctgaaattctgctttttcgagtgcaccgtatcggtcgagtgcagcaccggacctcctttgactgtggaatcaatgaatcctaattgggtgcctcccatctcaagtggcaatggaccggtccaatgagccatcgaactgcgccacgccagctaccctgtcagctagccattggagtcgactgttgaacctgaagtagttgttgaactcatctggtccggtacacaccagactgggctagtgcgcgaactaccttctgccctgatctgcaacatcaccgcataagtggtccaacacaccactagactggcctggtgtgccaggccacaaaagccctttgaagagctctctacatcagtggtccagcggaccaccagactggtatgatgcactaggc

SEQ ID NO: 42983 - DNA, 825 bp, Zea Mays
ttcctagtggggattctatgagtccggcggcaatgttagccgcaatgcaggccatgcagcaggagttggccattctgaggcaagctattcatgttgcccctgtggatggtgctcagggtgctggaggtggaggagtcccggaggcgctgtccctgggggtgctgctccgggtggcggggctgaggcgccccttcccgttagtggtctttctctggtgcagtggatgggcatgaagctggacacctttgatggcagtggtactccggtcgaggcggcagattggctgacttatgtggaggataagatggacgtctttgagattgtgtatggtgatcgtgttcgctttggcacacagctgctgaagggagaggctcaaatttggtggagaggcgtgcagacagctcactcctcttcaccaggagtcctgtcctgggatgttttcatcaggcagtttgagaggaggttctacccggtcacttttctggagaaaattaagattgatttgcagtctttcaagcaagagaagaagtccgtcactgagtatgaagtgagcttcaacaagatggtctgctttgttcctcatgtggcttacaatgagatggagaaggcgagccagttctgtcagggcctgaaaccttctatcaggcatgctttgggcgcctttccgttggtggattttcgtactacagtggagcaggcatttggtgtggacatgcaacaccagtacaccatggagtcacagaattcttcgggttttgatcagcctcatggccaggacgcgaggaggggaaacattgggggtccagcccacaagaggggcaagtc

SEQ ID NO: 42984 - DNA, 562 bp, Zea Mays
cccatgttttgagttgcaatgtctaaatggttcgctaagtcttctactgtgattagccaactcatgttaaataggagtcgatttcgttaagtgtttgatatatatgtgttgtttcggattgcgatgataagaggcaagccgacgtgtaggatgtatagcgggctatgccgttgctctagttagccgacttgttagatgacttggttaagcgcgtaatcacgataaattgcttgttgtggtctaaatgcgtatgattgtggtcgcggatgaaaagtagtagtgctcatgtgatatctaaattaaaaatgtaaattgttgggtgaaaagcgtttcgatatttatgatcgtagagaatgcgttgttaattaagtatggtacttctagtgttcgaaaggacacgaataaaagtttagtaagtctacttgttagttctcccttggttatgttaactctaacaaatgacaaagtgttagaatgatttaagtatctagaacatggcaatttttgaattgtataggagctgaaatttattgattgatgttttgggctgcacgcactgttt

SEQ ID NO: 42985 - DNA, 448 bp, Zea Mays
gtactatgtgtgtttgctcatatgttggcggcagcataatcaaatgtatagtgaaatagaaaactgacgaactaaatgtagaaccacgataaaatcaacgaattaaatagaatgttggtgatttagaacttactgattaccgctgctccaatgcgattatttggtgcttccttcaaatatagttgggtgaacgaacgaagtgactcggtgacacgaatgcggcggagagaatgaaggcgacgacggtggatgactgaccggtgtaaggaggggaatgaggaccggccgattccggaatctctgcggtggagaagatgaaggcgacggcggcgcgtatgtctaggtttccgccgtcgcgtgcgttgcgggtgaggaaaccggaaacactaattgatcgaactgaatggaaccaatataatagcaactccaatagttctcaaaacaactc

SEQ ID NO: 42986 - DNA, 656 bp, Zea Mays
gataaacaaatccaattacatcaaaaactctgttcaatgttcttttccctcgagcgtcgaaggcaacaaccatggcctcgtcctctgccttcgagtaggctccgaacagctcatcactggtcgcctctatagcatctagtcaatcatcatttggcttgtcatatttgtttctataccggaaggtgtacctaagataaaccaaaccaccttggctggagccagcagcagtttccttcagcatttcccattcattcacaagaggccatactttgaaagtaatgtgttcttgtaccaaatccctggtaccgatgtaagtacatacggtgttgaaagccattaggcatgcttgcacctcattcccaattgcaatttatggtcttctaatgacgaagcgtgaccatatgggacgttgaatgatgcccctcacatcctccctctgattcagatcattctttacgtagaaccattacttcatcaagagcccgaccacttcttctgaaatgttggcacaggataattcgccttagaacggggcacgaagatgtaacatctgaaattgctatggtatcgttcctttccagttgcctttgtctagtaggataactcatcaatattgcagaaacacttagcatccaactctagcccttgactcttca

SEQ ID NO: 42987 - DNA, 1041 bp, Zea Mays
ttacccccttagagcatcccataacttcaaatattgatgtagcccaattggagagagagggttcacaatatcactaacccactgccaattgtcaagcacctgagctacagttctggtggaaatggctcttcggccaaccatacagaccacagctagtgcaatttcctggatgacatttccatttaacaatttttttctcgaacaacgcaagagatctgtgtgtcatttcattatgaagaaagagagaaagtaccacatacatcaaacgactgaaaacaaccaaaaccacaagacctttacccctacaactagggactaggcaactaaaaactttggttgttacaacggtgatacctagaccatttgaatacaaaaaccatagaggggtaggccatcaagacatacacattcgtagctcgtgcccagaccaggaagtcttgcagtttggaggccccagcccacctccaaagccgacattcctaaacaatccttgtgatcaaagtgagtttgttaggctctaaattcccaaagacacaagaattcatgtgcttccatatctcccaggctgttaaaatgataagggaattcagtccatgcctcctttcttttggtactaacttgaccaccttcctccaccacttaggaaagaaagtttcagcaatattgggtgccagctctggcatctttatagcctggaaaatataaaaccaaagttgtctggagaaaacacagctcactaacaggtgctgaatattctcatcctattgatcacaaaggggacatgcattgggatggggcagccctcttttagccagattgtctgcagtccaacatcattttttgaacaccaaccaaatgaagaatctgcagcgcaggggcgccatacttttccaaatcgtttttccatggggcataacgaattgatcccatgaagaaggccaaataggctgacttgcttctataatcccctgattgtgttagtttccacctgaacttgagcagatggtcactgaggaggaggtttggcacaccatcaggtcg

SEQ ID NO: 42988 - DNA, 1728 bp, Zea Mays
ttcaaaaaaagttgttagctttttaaatttacttttgagtacaactcaaaatggtgtactaatgtatcaatttttgctctgcccaggaaaatattaagtattattacttgatcaatacatataattttgatggtacaagttgtaacagagaagaaatacgcaccagatcgacatgacgacatgcacggcaggcagtatgctggaagttaagatgtgcccatattgatctaaaagcatatcgagctgcggagtcccaaaaccagtatggcacacaaagagacagaccaagtgccggaggctcccaaatgagtgatgtttgaggaagggataaaccaaagtaagctttcctcctgcgaatgcaaagagactgcttcgaacctgcgatcaggtgactcggtgagacaactctcaccactgcaccaggctcccttctgatatgacatacaacatatacaataaatccttttagtaaccctcgagattgactgtctgtctgacaaaattttgcaccatcattccccacgttcgctcattaggaactattcctccacttattgctttgtctagaagcatagcggcatcatcaagcaatctgactttgcagtgccaactaatgagaatgttgtatgtcacaatgtcaggatgcacattttcgttgggtagcttctctaaaagatttaaagcagcatgtgtccatcccactttgcataacccatttatgagtgtattgtaagtcacaatgtcaggtgtcagtccttgattcagcatctcctttgagagctccagtgcatcacgtacctttcccgccttgcagagttcattgatcagcatgttatacgagaaattatttggcttaattccctttgtcaccatttcctcaagcaacgccatactccgatcaacattcccctctttgcagagggctttaatcaggccattgtagctaataacatctagctggcaaccatgaagtagcatttcacttgcaagccttaggccctcctgccaccttccgttgcgcagaagtgcatgaatgagagtattataagttattccattggcaacaacaccctcttcaattaagtttctgaaaatatgttctgcctcctccatcaggtcattgttgcacagatgataaatcattgtattgtacgtgcaaatatcaggcttgcacccctgactcttcatctcttggacaagccttgtcgcttgatcaagcttgccatccttgcataaggcatatatgataccattgtatccttgggagttcatactaaagcccttggctaacatctgatccagcattgctcttgcgtcatcccacatgccattcctgcaaaatgaatgcagcaaggtagagtaggtcacgatatttggtgcacaacccttctcctccatctcatcaagcatccgcactgctgaaccaaatctcccaagcttgcaaaggccatgcatcaaaatactgtatgtgtgcacatcaggcgggcatccttttgaacccatcatctcatacaactctgttgccctggccagcttcccctccgtcagacatccacggatcaccgtgttaagcatcaccacgttcacctccggcaacctcccgagcatggcgcacgcctcgtccgcctgccttgttcggcacagcccttgcaggaggaacccatatgtcaccacacttggcatgcatccctgcgtcatcatcctgtccaccagcctggctgcctctcg

SEQ ID NO: 42989 - DNA, 390 bp, Zea Mays
tgcgtgttagagcgccattagtaaaattggttgaggggaaaccctcgttaggtcttgaattcggtctctgccaaagtagggcgctggtcatcgagtaaatcggccagtgtaagctcgtcggagcttggcccagcgccattcgccgtcggggactgcaagctgtgaagagatagaagtgcgagggccttttcgcaaatgtcagtgacccagttaaatagtgcgcaggactcttccttagttattcaaacagatggggggtttcagcaaaactggtagcgcgggcacgttttcaccagtggatgggccgacttgggccggttccggtccagcactgttcctgtctttttccttttctgtcagagctaaagaaattctagaaaattacagaaa

SEQ ID NO: 42990 - DNA, 973 bp, Zea Mays
aacacctaagggtgtgaagtcatccgagagacgcccatttctatccaagcaaaagtcgcctaagggtgcagctggatcagcacaacaagtacattttaataactaagagtgcaaagtcgtccgagagacgaccactttgagcaaaagtcgccaaaggtgcagccggactagcccaacaagtgcatcaacccacctaagggtgaaaggtcgtccgagagacacctatctctattcgaacacgaagtcacctacgggtacagtcggatcagaaaatataacacatccttaacaatctaagagcgcaaagcattcagcatgcggacaacgaagggcacaacttagttcaaaaatggaaaaacaatgagcacgaagctaccattcacatacaaggtattccgttctgcatgcaagttcacatagtcgtcctttggcgaagggggtgagggaaacgttgccacttgaattcaccaaagaatggtcatgtcaacacgggcactttacatgggctctgccttcgggattaggccagcctcccagaaatgaaacaacatcagtctaagctcctcgccatcaaatagagccagcaaatctccctcttcgaaacgctgcccaattgtcggtgcaaggattatccggcgagtcccttcccctgactgcattctttcccgtggatgaggcccctccattcccataaggcgacgccttcgagggccttcaatgccatgtgaagactcgcccaacattcccacactctgtttcggccctctaatccttctcttgcccctcgccgcagtcggggcaaccctagacaaagactacgccgctgtcgggggcaaccgtaggtgaagactccaccacatacaaatctaatgccataaaataacctaagtcatcctctgaagactcatcgtccatcctagcaaacgggctcagtaactcctcactttccaatgaccacagatcaacatgagat

SEQ ID NO: 42991 - DNA, 940 bp, Zea Mays
cttttttcgaggcatcgataggggtgaccatcaggctgatcttgtaggacaaacaacgcttttctcctgccgcaggccctggctccgagatgatgagagtcatgtcacgatgtagattccttgggtctagacaccacgccttcaacatgaaggatgataggttattcttcaatgctgttgcagggtgcagctcagaaataatgcacgaatctcgcagcagataatctgctgtagatcgagaccatgcatgggccggaatgcccctgatctccacattaatcaagggcaggagcaatgtcgcagccgcatttgcacaacgcgtccacctcttaaacacaagatcaaactatggtccactaaaaatacttccatcattgaatacccttgaagttgttctctcatccggcaagaacaagatgaaatcctcgggcatttcctggtgaatggacattgcacccacatcgatgttaaaacttcgagcaacttcattgatgatctctgcccctaggacctctggcctagtaccaactattgtgacaaacagtgccttctgcaatgttgcgtcctcatgtgccatctccaccgagaattccagcacacagaaaggagagaatagaggcctgacttgttgatcatatttctgctccaccattgtaatctcctccaaagctgtcagagcaacgacatcgtcggaagatacataagttggtgataaatgttgcattgccgccccctgacgtcgcttcacccgacgtctcttcctctttctgcgatgaactggtggagcagcctccccgaagcccaacgccaacaacacgggtgaatgatattcgtccccggtggccgactcaacggagagattcgcttccacaccgattccttgagcttggacatctggaaatcgcgtccttgagagccagagccttgcatccttgttaag

SEQ ID NO: 42992 - DNA, 1038 bp, Zea Mays
aggatccaacctagaatgagcaagagtactcctaagagagtcaaaattcttcgcagatcgagtcctgagatctcaccactcgtaatcatcatgatgggaatcgaccaacatctcggtttgcccaatatcaagctcggactccaccgcattgaagaaaccttcatgttaagttggatcgccaccgccactaatagagtcatgataattctaggcaccaagatcatgagtatggtggatacgaagtagaacacgaagtttttagctctagccgagtccatcgagataaggctctagagggcctcttggtttctataatgaagttatttacagtatgcgtgactaaagtcaactagcctaggaacttcaagccttcagtcaaaacatatgatggtcgcactaatccatcaaactggcttgggatctaccaattatccatcataatagcgggaggagactcttcagttatggctaaatatctgcacttgtatcttggctctatatattatagttagggagtggctattcattattcctacaaactttattgactcatgggaggatttgaagaggcaattaatcaacaactttatcatgacttttgattaagaaaatgctcaatacaacctcaacaagattattcagaaggaggatgagtccttgcatagttaaatcaagcagtggcgtgacatggagattaacatctccaacatgccagaagagacatccatctaagtctttcataagggccatagggatcagggattattctagatggttgtatgcaaggctccaactactcttgcctttctattccaggttgccgacaagtatgatttgagtgaaaaagttcctcatcacatgtcatcatcttagaaggataagggcaataaagagtaaaagacagagctaggcaaaggccaatatagagagtgcaaactagagcaccgagtcgaaataactatggaacatgggactcgacaacaaactttctctccaaggaagaacatgtttcagtacatcatggagggatgatgcatc

SEQ ID NO: 42993 - DNA, 529 bp, Zea Mays
gctagcttcacaacatcatcacccacccaatcaccgagaatcgctaacgatcgtgcaccagtgagctctaatttcggttttttcccaaatcaagcttccgccaccccgaaacccacctcaccgcggctagccccattcctgtcagttcatcctcccctctccctcgtttaagcttcctcttatgtctatgatgcttgccgacctacgcaattgggctaggaaccctctggtcgccgggaacacgacagtctagccgtaatgttcccggtcaccgtggccagagcaaaccacttggccatagatgaaattgggttgggggaaaagtttgggatggatccaatttcgtgtcagtcgctcagagaccctagtcgttgccccaatcagccggtccaggagctcgccggagttcggttgcgcgcgacgccgtcggggacttcacctcgcgaaggattagaacatggagggcttttctgcaaacagtcagtgtctcagcgtaacagtgaccgaactcatctccagttaaccagaa

SEQ ID NO: 42994 - DNA, 490 bp, Zea Mays
gtccatctactgtcacaaaagcggtatgcttcctatcctccttagccatccagatttggtggaaaccagagtaagcgtccaagaaggataagaggtcgcaccccgaagtagagtccacaatctgatctatacgcggcagtggatatgggtccttggggcatgccttattcaggctggtgtagtcgatgcacatccgaagcttcccgttggccttcggcacgacgactgggttggccagccacacggggtgatgaacctcttcaataaagccagcgtgcaacagcttccggacctcttctcggatgaagtcctgccgttccgcggactgccttcgtggcttctggcttaccggcctggcgtctgggtagacctttagctggtgctcaatcacctccctggggatcccaggcatctgcgacggctcccaagcgaagacgtcggcatttgctcggaggaaggcgacgagcgcgagttcctatttttctcccag

SEQ ID NO: 42995 - DNA, 1021 bp, Zea Mays
tcagatcgccaatgacccaccacgcaccccagacgcggagggctattggcaactactcacccaagcggcaaaccactttctcccctcgctcacccgccgaatgatctacaccacgccatcaacagttggcgagacgcacggagcaacatctatgctttgtgtgatcgttggcatgaggaagagatgaggcggcaagaagagtatgaccgggatcatggtgcgccggcacacagccgtgccaccaggatcgagtcagcaacagcctccaccaacagtccggctcgagtcgatcgacgcgaaacaacgcccaacatgacttgcctcccaggaccatcaacgtgatcatcaccgagaggaccgggggacatgtggagtctctgcccttacccccggcttcgagcgatccaatggtcgccaaacttcaaggtctccaacgtcgacaagtacgaacctaagaaagactcgggcggctggctagccgtctacacgacctctgcccgagccgctggggcgacgaaagaatcatgacagcgtacctgcccattgtcctggggtaggacgcactgcaatggctccgacatctacctcgacattgcatcgatgactgggacaatttagccattgatttgtagcaaactttcaatgcctttccgacaaatcgacgcaaccctaggacctcaagtccatcaagcgccaaagggacgttgccctccactcgttccttaggcatttttagacaatgaggaaccgcatccccgacatcacggatagagatggcaatatatacccgaaactcgtatacccgacgggttgtacctgatataagggcggatatggcacgacttctttacccgcaggtacgttagtgggcacaaatttgtacccattggggtagaccggtacgggtatgggtatgcaatatccatacctgcgtacccatgggtaatttaaacccaccaagtcatacacataccctaattaaataagcacatataatgatataaatatatattagctaaaa

SEQ ID NO: 42996 - DNA, 726 bp, Zea Mays
agaaggacttgatcacccactgcaaattccaagtcccgcctcctcacatcagcataactcttctgacggctctgagcggcaagaatattctgacgcatctccggaaccttctgagatgtatgttgaacccaatcaggaccgaccaaggatctctctcccaatgtctccaagcacaaagggtagatacaccacctgtcatataagggctcatatggtgcaatcttgatgctagcctgatagctgttgttataagcgaactcagccaaggcgagatgatcctcccagctacccctccatgaaagaacacaagcacgtagcatgtcctccaaagtttggatcgtacgctctaactaaccatcagtctgagggtgaaaagcaacactaagagaaagcttggtaaccaaagcactgtgaagactctcccaaaatttggatacaaatttggagtcctggtctgaaataatggacttaggcacaccgtgaagccttattacttctttcatatacaagggaaccaattctgaagctgaatttgcggtcttcatgggaatatagtgcgcagacttacttaggcgatccacaacaacccatatagcatccctgcctcgaggagaacggcgtaagccaaccacgaaatccatggtgatatgctcccacttccattctagaatttccaacggcttcaataaacctgcaggcctcttatgttcagccttcacgcgctgg

SEQ ID NO: 42997 - DNA, 326 bp, Zea Mays
ggatttatttttatattaaaattcattttatgatttaattatgaatacccctaataattttggactgggaacacaattccttaatagtacaggggcttaaccaaaagcaaaaggaccgatttaatataatctttgaatgcgtgtggatggagggttcatttcataaaagttcaaggtctctttagtaaaatgaacatggcgaaggggtatctagcatcctgaaccttccgatcttctatcaacggctcagattagatccagtttatagttaaaccggtacacaataccctggccacacgatttccatcaaacgtccatgattcgac

SEQ ID NO: 42998 - DNA, 337 bp, Zea Mays
gtccaagcacttgggaatatggtgacaggtggcaagaaggaggcacgacaaaaccataagctaggggcgcaaatgtcttgtcaagtgtgtcctagtctagcttcagaacgggggtatttatagggggtaggtggcctaagtacatttgtgcccctagttacctagtatattcccagaatatgttgtacaataggataattacagggcggatccgtttttatcctagctacaccaaatcttctgggccgtcggaggatgtttggtgggcccgacctagatagggatcgacccaccttggtgcggtcatggacatagcctccgggccttcgcccccggc

SEQ ID NO: 42999 - DNA, 469 bp, Zea Mays
cgagatgtcgcgtcgatgacgatgagtcgatgcaaaaaccgccgccaagcgttgggagaggaaccgtcaaattgttttgcgttctggtgccttgtggcctccttgatcaggagatttttgggctgctgcattacgtacgtgggcttagtgccttagtatttttgggcccctccttggagcatgtagtacgtgtactggtgtacaggtttgagtcgttggactgcatatgttgggtcatattgtcgctgtgtcgcagggctgacggggtcacaattattttttgccggggtcttggccggtgggaaatcatattgtacaagatgctacgacaaagtcattggggtcggctgaccccgtctccgcaacatagcttcgcccctgccgcggtcgagcaccagcgaaggcaaaattggacgaacacagggcacaataaaggaaattgggcatggggacaggtgtctcacctcgg

SEQ ID NO: 43000 - DNA, 385 bp, Zea Mays
agccttttgatgtgtattgtgacacatcaggcagtggtctcggatgtgtcttaatgcaagagggatgagttatagcatatgcttcaagacaatcgcaccggcatgaggaacattatccaactcatgacttagaattagctgctgtggttcatgcccttaaaatatggcgtcattatctgctgggaaatatctgccatatatatacggatcataaaagtttgaagtatatttttacccagtcagaactaaatatgaggcagaggagatggcttgagcggattaaggattatgaattagaaattcactatcacccaggcaaggccaacgtggtggcagatacactaagtcgcaaggcttcttgccactgtcttacagtaaggactct

SEQ ID NO: 43001 - DNA, 358 bp, Zea Mays
ggactactgtatgcggagggtgctccggaagattgccctgcagcaaaaccttggtattgttataaggtagcagcatccacttgttcttccagtgtatctccatggggctgaaattttcaagccaatccatacccacaatgatgtcataatattgaaggggaataactttgaagtctgtttggaaggtgacgccctgtgtggaccaaatgcagtcggccaactgagtggaacaatgtagagaattgccgttagcaacaacaaccttgagtgcattgggtagtggggatagtccctgtaatgactcggcgagggtagaactgatgaaagagtgagtactgccactgtcaaccaatattcg

SEQ ID NO: 43002 - DNA, 359 bp, Zea Mays
cggtccggccctaaggcccggacggtccgcagtacaaaattacaggactagtttgaagtgaccacacttcagaccccactggatgaatcgcggacggtccgcccacatggcccggacggtccgcctatcccaagacttagcaacttttcaaacgcgcttttgaaaagatttttaactctcaaaattggaagcgatgttagtcctcatgcaaatgcaaccactagatgctctatgaggctctaagttttacacaaactaaagtcattgacccctcttaatagtacgaccatctagcctactaatccggtcaaatatcttctctaaactcctggagaccggcaaaaacaaaaacatatatt

SEQ ID NO: 43003 - DNA, 536 bp, Zea Mays
ggtacctgcagcctgcagggtgcaggactgcaggcagcagcgctatctgcaggactgcaggcagcagcgctatcatctccaaccatctcttgcatgtgcagtactactggctatctgtacctactctctgctcctagtatctacaggaaactgtgagctgcgagagaaccgaatcgatcgccacttggtattggcctagccgagatgccgatgtcgctcgcggccaccattgcactgtggtcctgtgatagcacgaacgagaggccgagagctcggcgacccctgcaattggagtgcgttggcccttgctcgctccctcgctcacatcataattgcagttccgggcgacgtgcaagttgcgcaaacagatccactggatgctgtccctgtccgggcggctactaaaacttgccagtgaacgcagccgtcgtttccacgtgagcacattgactagcaagtgcctgtgtctctgttcctgtcccttctcggagaccttggctgtcaagccggtgaatagagccgttagttgatttttc

SEQ ID NO: 43004 - DNA, 576 bp, Zea Mays
aataaattcaattaataacttaatgtgaccaactgttttatcaatcttaggcagtgatctctgccaatccttgagcaccttccttgtatttttaaacttggatgttaaattctttgctttatcaggcagattctgttgtctaagccaagaattttggaagatgttcataaagccctcaaattccagccaatagttttcgaacctaaaaaacttgggctttgggaccctcgacttgaacgaaacaagacacgacacatggtctgaaatatcacgtggcaacgttcttacgcgagttttaggatagaccactgaccattcctgcgaaatgaagaaccaatcgagcctttgaagaaggggtgccctctgcctattcgaccaggtgaaggaaagaccatgaaggggaatttcaaccagatctaggttacttattgcctcattgaacttcatcattagattaatatcacctccaactatattcctatcctccggtcgatgaattagattaaagtcatcaacaattagccaaagcttatccgagggcatattgatcttagaaccagttgaggaactcaattt

SEQ ID NO: 43005 - DNA, 360 bp, Zea Mays
atccgcgcagaagtcgcctaagggtgcagccggactagcacaacaagtgcgaaaaaaaaccggagtccaccgcgaggactatccgcgcagaagtcgcctaagggtgcagccggactagcacaaaaagtgcgaaaaaaccgaagtctaccacgaagactgtctgtgcaaaagacacctaagggtgcaaccggactggcacaacaaaagcagaaacgacaatatcgaaccgcccgcaccaagaccgactacaatcgcaccagcacagcataacaaaacacaccagacaaaagtacacaacgcctccgcaggcacagacaagcgagggcacacaacttcatcatacaagactttacatatata

SEQ ID NO: 43006 - DNA, 475 bp, Zea Mays
ggcttaatgataggatgtagttcagtagcaggaaccatttgtatattgtcaaattttgggcacacttgacatcccttatagtacttacaatcgacaatcaatttagtccaataaaactcaacccttctaaataaccacatcatttttggagccgattgattagtaccataaataccttcatacacttcggacatagctaacatagcagcattagggcccaagcatttaagcatgatatcactaggagttcgacgataaagttcattatcaatgagaatatatttcgtcgaatacccctatttgttctaccatttggatcatgtaaatctgtcatcagaggtgtcctctaatcaacaatatcaaccatactatcaatcggatcagctaaagccatcatcttgatggttctatcaatgtcgcatggtccagtcatcagggtcggacagtccggtacatgcactctcgacatactaac

SEQ ID NO: 43007 - DNA, 709 bp, Zea Mays
gcgcggcgcagtagtcgaggagtcacactagttctattcactgccttatggaacaatgatgcaggccctcgccttgttgctagctgtccaaatacatgtttatgtgatcctgttttcaataatgtgctctaggaaggtgtttttcggaccttaggcacaagacctttgtctattctgtggcctgagcacgtaatagaaaaacaaactaatctcacgatgggctactattgagtgagccttcgtcgaaggtcctcaaacctaactaatcataatcacttcgtaatttgttttaggaagcaaccgattcatgtatgacgaagatcactaatacaagttgataaggggagaaggaggaagcttgggcactattgcgtagatgaagcacatcgctgcacctaaagccaatggtgggaaactaaggaagaacctatcaatgtatgcactaggccttcagaaaaaggacggtgtcacccctagtaggtttcatagttgtatgtatagggttcaagtttatgattgtaatttcatacaacagtgtacgtcaaactatccctataaatagatgaacagtgcccatgcagagggggctctcggcgcgaaaaaactaagagcacacccaagcaatattgaatcactccatgttcaaagcttcaaaacatctaaacattttagcatcctttgaattatttgaaggtaaaattgtaattgt

SEQ ID NO: 43008 - DNA, 514 bp, Zea Mays
ctactatagtagctcaacaactttgccataataacttatagcaaatcccttatggattaagagatgcaagagcccaaagttgtctcagtagcattgttttgcataattccaatccttgagcacttgtgagtttttgcacttcaccccaaattgctccacaaaacttgaaaatctccaagtataaaagttgcttagttttttgttactctaccactttgatatatatacttctagcaaaaagtgattagataatgattttcacttttggctctaattaaaagtctttggagctcttaatcgcccttaagcactttaccccttctaatccttaccccttaaagcatgtctacccaacttggcaagatcactcctttgtgcttaaaacataaggccacatgctactagtccttggagagattcacccctacctagattaaggaacatccttaccagatcatacactcaaacaagcatcacatcacatgttttgtttcgaaattgtagcctagtgaat

SEQ ID NO: 43009 - DNA, 296 bp, Zea Mays
ccttcctcaccctttcctcctgatatttcctcctttctctatcccttcccctggcttcacagctctccatggtgaagagggcgtccaccgcgatggctacgacgacgacgatggagcggcttggcgctcccaacaggtacgagccattctcttcctgcattatttttcttatttttttgtttctgtttatgctgcaagaatacatggtccaatcagaatcgtcaaactttatatttagtaaaaaacgcaattagaacaacaccgttccctactttattattatagagaatcatgtg

SEQ ID NO: 43010 - DNA, 309 bp, Zea Mays
agatgcatggacactagtcttttggttaagtggttgtggaggcttgagtcctcatatggtttgtggcaaagaattattaaggaaacgtaccttaaagattcccttttagttcagacaaagaaaaaacccaatgactctcaattctggaaagggttgatggaggtcaaagatttatactttaaatttagaaggagaattataggggacacatctagtatgtttgaggacctaaaatagtcttgtgatgctattattttgtcaaatactagagatagtgttagctagtctctagggacaaaatgtttttag

SEQ ID NO: 43011 - DNA, 654 bp, Zea Mays
gttttcaggaggaccactcatgtagtcctaacctgattcgcgaataaactggacttgaactccccttgagcttgggactctatgattgattgggccttggacatatagttgacgtccatgtactcatcattactttttcgagtgatcgaaactgaggcactagtcggcccgactaaaggtgatcgtggtttccgaccacctgtagcatgttggtcgtggtcaccaggacttgtcggtcagaaagcttctgctgcctcttatgtctcctaggagccatggccccccaagatgacgttgacctccctatcaacattgggtaaaggttgcgtatcgccccttacctctgaggttgtgaaccctgggcccgtcgaggaggtggtagaggaagtgcttaaaatggtcggccatggttgattggttcttcatgtctttgcagttgtgtagagtttggcacagctccttgtgataggggcacaggccatcgaggatctcgtccaatgtccgctcgttgttgccatgaggggtgccatgtgcccgagcctgtggaggccttgtggttgtaacacctttggtgttactgtcactaaaacttgagcataacatcatgtgcatgggcatatcatgtgtttgttacacctagagtgcattcactag

SEQ ID NO: 43012 - DNA, 784 bp, Zea Mays
gaccccagttccatgttgcataagggccgggtcattcgaaagctcaaactcagtggactcatgaccatggtcatcagcttctccctgtttttctcatcagccttcatataaaaccattcatttttctagccggttggccactttgtgcggtagctgaggactggtgcctttgtatcctttcgatacgcaaaattataacaaccaaaattttcgtgaagaccatctgccctggtcttcttctgatagtgcagcccatgcacttggtagaaagcttcagcatctgggctcatcccttggcttcgaaggcccagataaagacgctgagcctaacaatagtgttaggagtcagctgatgaagatatatttcgaagttctttagaactacccctatcatctcattcaggggaaatcgcagccccgctctgaagaagctcttgaaaaccacaacttcatccttcttcggctctagggtagtctcttctccagcaaatcgaataagtttgctttcggcttctccaaaatagccaagtttcatcatcataggcatgtcgtctttagacatagtaaatttttcaaaatctaaatgactaggcttcgttgggatcagaatgttgtagtcttcttcactctcaacatcttcaccctcaatcacagtctgctcagcttcgacattagaagtaccttcgtcagccacatccagacctggtcgtttcattacttttgaaattggtgccgtttcagtggcctcggtttcgtccccctcacgagacacccttgcagttga

SEQ ID NO: 43013 - DNA, 457 bp, Zea Mays
gcagcgaatcattgaagctgcacggggcgcggggcggcggaccggagaccatcggggccaccatgacatcctccagttcgagctaagccgtggcgccgtcgactccttcgcggctgccggagttaccagacttggatgctgcctcagcagtcagcaggtgcaaactgtcgtgctattgaatgtagtgttctatcttttctttttgaagtacattgttctatctttttacttatgctgtcatgttgtggagcagtttaacatatcatttctgttaagattaagactttaagaacctcaaaagtgagtgcttacacctgaagtcaatgtcaatgtcatatcatttctgttccagattgttttcatgtaaagctatgaatttgattgatctaaagatcacaacaattcatgaaagcaatcaaatggccacgctccacacctgaagtcaatgtcatgtcat

SEQ ID NO: 43014 - DNA, 506 bp, Zea Mays
gcactccttgctggccatatggcgtgctcgcgtcgcgtgcgagaatcaacactgctggccctaccgccccctgcacgtacgtacgtgcgcgcacagcaggaccggaggacaccttgcagctggcaccggaaatctgagatccctgccgggccggccatgcatttgcatgcatgcatgctcacctgcaagctttgctttgctgcgcttcactgttggtagttaacgcctttgccccagcagcctcaggccggaggcggtcctccgatcctcctccatgttggtcctgcttattaccagtaccagctgcacccaggttgatgagtacgtagctacctaatgttaggttgtcttcaacagctttcatatcttatctcccgctctacctcatgtttcagatttcactccgtaaatattactgtctacaacgggaaacagagtgttttccacggctcagggacgtccctacgcaagtgtggcacgtgcgatcgcacagggtcctataggaa

SEQ ID NO: 43015 - DNA, 463 bp, Zea Mays
gtccccaacaaggtcccttcaccaaattcaggcactacggtcatttcaatatatcgtggccggtgcgtcagaaccttgatctttttgcccttcggcacaatagagatggctgaagcgacagtattcctcttttttccctgccttcgcaaggggtagcagtaatctgggtatatgaagccaattgcatcaaaaaccctgttcaatctcttcttgccccggcccccgaaggctgaggataaagcatcatcttcggctttggtatatgccccaagtaattcgtcgctagtagcctcaatacattttaaccagtcgtcattaggatcatcaaaccagtctctgtatctgaaggtatatttcaaacgaactaatccaccttcgctggacccgacaacagtctccttcagcatctcccagttatccacaagtggccataccctagggtataggctatgtgctcttggat

SEQ ID NO: 43016 - DNA, 398 bp, Zea Mays
gtgaagttcgaagctttctaggaatggcaggatattaccgccgctttatcaaaggattctccagcatagcgagacctatgaccgagcttctcaagaaagaccataaatttgtgtggaccccaaaatgtgaaggaagtttctagatcataaaggagaaactcacaaccgcacccgttttgacactaccagatattcatcaggattttgtcgtcttctgtgatgcctcgaggcaaggcttagggtgtgtgctgatgcaaaatgagaaagtcattgcttatgcatcacgcctacttaagccacatgagcagaattaccccacccacgatttggaattggtagccatagtgcatgctttgaaaatatggaggcattacctaatcgggaacaaatgtcacatt

SEQ ID NO: 43017 - DNA, 617 bp, Zea Mays
cactgttgtggcactagacatcgccgaatggtccgactctaaagtccggacggttcgctcttaagcgtggactgaccgtgattatatcaaattaggcggattaactcatatctccatgcgtgtttatacctttaaacttataggagttattggaagatatctaggaacgggtctagaccttcaccttatatatttgaaggggtacgaccgatggaagcaccaacaatcgaatcaaatcaatatatatctttcgttccgttacttttgttacatgagtagacaataacgtggcctacttcatatcaatcttcacatttcttcgactctacgtcatctggaggcgtcttgaatagcctgccgattacaagacaaaaacataagatctctcctccctgataggtatctcccgggaggtcagatataggtgttgttggtgaatgtcgtcatctctacgcacacacggatcgtctgactttgagtcggcgcagaaaagactcagcttctgccataggtcgcggactctcgctgccgcaaaaaacaccaccatcaatacaccttgtagtgattaaggtcgagatgggaactaaccgccgcttaattgtcactgtcgcaatctg

SEQ ID NO: 43018 - DNA, 725 bp, Zea Mays
ctggatcccgagcgcgtcgacggacgagtggtgcgtgttgggtccaacctctcccaaaaataagaaagtgtgctcctcgacttcctctacatggaaaatgacatttttgcctggaaaccctcttgcatgaagggcatttcgaggtatgtcatcgagcactcttcatggatcaatcatggaaaccggtgaagcagcggctgcaccgcttctcgaagaaaagcgcaaggccatcagggaggagattagcaagcttctcacagccggttttatttgagaaattaaccaccctaagtggctggccaacctcgtgttggtctgaaagaaaagccggaaatggagaatgtgtgtcgattccactgaccgaaataaggcatgcccaaaagatccattccccctcccgcacatcgatcaggtggtcgattccaccacaggttgggaagttctgagttttctggacgcttacttgggctatcaccaatcacgatgaaggagtccaaccaattgacaacatacttcatcaccccttttggttcgtattgctatgtggcgatgtcgttcagtatgaagaacacggggccacataccagcggtgcatgatcaaatgatttggtgacctcatcgaaagaaccacgggagcatacgtcgacgatatcatggtcaagaccaggcggtacgaaggcttcatacattacctaagagaaagatgtgataggctaaaagccaat

SEQ ID NO: 43019 - DNA, 542 bp, Zea Mays
actgtgatgtttaacaaaatattgtgttgtttacatattgcaaattgatttttaattatacattaatgaatatttttaataactataaataccaaacaaattcacaaatcattctcttctccatgccatatagaagatctcattttgtttcttcctttgttttgctttttcaattactggccgacgaatggtttgctccttttctagtcgtacaacggtagtttgctggtggctgcttgctggccgccgacgccatgctagtggtcgtctgctgctgtccactagtggccgtccgctgctagcattcgcgtcaacgatagcggaccaaaaaagttcgctacacttagcgggtgttgagaacctccgctattatagaggaccatatagcgttcgttgttggagcgataaagttagtggagaaatgctaaatatagagttcagaacgctttagcgttccttgttggagacagtcttagatcctccaagagtagaacacaaaatagaagacacatacagttgtttaagtttaacattcaaaaatc

SEQ ID NO: 43020 - DNA, 1017 bp, Zea Mays
acgcataacaagatactatagtttcctacctactgtctcgttgtgtacatgagctctttcgttccctgggtgtttgggcccacccgtccacgtgtcaatctgtttcaacatttggcgtccaccgttcgtactatgtaaaaccaaactcgtgatggcccccaaaaaaagtaaccactagagacagcacctccttggacgacaccatgaagacagtcctcgtcgaaaaagaaaaagcatcctgcactgacgacacccttcctactgcagtcgagaacaatgaagcaggggcaatcaacagtaagcatccccgaactaaagacccacgtactcccgaaggcagcatccatacatgcagtttagaagaccaccctcgtgatgacattccatcgggcttttccccccgtaggggccacagacatcatagaagaaggcgaagacttgggaatctcaactgaagatcaacttaaactttgtgctcttcgcataaaaacaatcaccttaagaagcaaaaggagatactcgcagccaaaaggcaacgaaccaacatgcatgccagagtgaggcaactgatcatggatgcggaagaaaaagccagagcactggagcaagaaattggtgagatgcaacgcaaagaactcccccaccaacagtcggttgacgtggccaatcaaaacatttatcacttccaccagccatccaccgcacaagttgctttccaaggattgaactatcttgacaagcgaagccccctgtgaccacagctccaggcctcttcgtggccacaaaattacagagcagacacctatccaaaatacaacggtagcacaggcccaacatagtacattatgagctaccttgtcattgtttcatcctcaagggggcaacaccactatggccaagtcattcgtcattgccctcgaaggccccgcccccacatggtattcaatattaccacctctgtcaatcaattcttgggagatccttcgcgataaaatcctactcaactttcaaggctac

SEQ ID NO: 43021 - DNA, 793 bp, Zea Mays
cttcagcttcttcgccgatccattcgatgattccttcaggattgcctctaataattttttgtttagatgagtatgcacccaccttcgcaaactatcttttaacttcttagcgcaatcaaaggatttttcataatacctctccttcgactcccgaagctcatctacattcttttgcaatcttgcgctagtccattcgcttatttcttgttttgctttagccacttcaaaatcttcattcttctcggcaagctttttatttaagttttcaatttcggctctatgagcattggactgtgcagcaagattggcttcgctagccttaactctgtctaccaaggaaagcagaatttatccttctctgcggcttcattccttagtttgataacctctgaccgaaggttactaagggctatttggcagctttcatcctcagcattcttctgtgcccttaaagcgttgttcagaattaagccctaaaaaaggggaggaaaaggatcagcacaagggtaaaagatacaaaaataatctgctcataagtcaacaacttttgtaccttcagactattgtaagcgaggctatctgcgaggtcatccttcgacatagcagagaggccaacttcgagcttcggaaatcctatgtttcttgccatctcccggcacacaaatatttccttattgtccgggaggcagtacagaaagtcatcttcatctgtgccattgtacaccaaggatcccttcggatatttcaattcccgggcatagtgtctagcttcggcaatttcctcttctgacaa

SEQ ID NO: 43022 - DNA, 421 bp, Zea Mays
taaaattgtacgaacatagccacaagatgaagtgacaaaaatacatagtatgtacaagaccgcgaaaaggcagttccacaaaaaaaatgtaatcaggggaactaacacgtttttttcaccgcaaacatttagacatcacgaatcacgtatgttaacgcagacaatactgaagagaagcctgccgtgccagtagatcgagtgcgtagtagctagtctaacaatttacaaaacgtgggatggtcaacttcaagacaaattctggattcaggttaaaattccaaccataacaataaacagcacaaccgggatgcagataaccaattcagaaggacacaaaatacacctcagataaattccctacacaagtggagtcgctaaaactctgctttcgcctatcgtttatctcttcatggaaactgtt

SEQ ID NO: 43023 - DNA, 471 bp, Zea Mays
ctggaacaggctagccacgacgagggtgtttcttcgatggcagaaaccgatttgggggaaatcccaaattcgcgagctctaggggatgattcgaggcacggtttgctggatgaggcgcttgactgcttaacggagccgagggtatgcgcaatttatagcgggcttgagcggtgactggtgaattggatgaattgcgctggcgaccgagaggggaatgagtcacggcggcgatctaccgtggcaaccgcagggcgactgaactacggcggtcattggatggttactacggctcatactgacgcgataacttccaaagacgtggcgtccttacgatgaacggcaaacccgccggtgagtaccgcacggccacgtcgccggtgtgtactgatgaacaagcaagcccacagtacattccagcccatccttagcaagatttttcaccccgtgatcgttatccgtgtttgatttagc

SEQ ID NO: 43024 - DNA, 370 bp, Zea Mays
gtatatggatatggcataggtagacatgtgagtggaggtgtccatgcaggtatgttgggccgtagttggacattatgacctatcgttctttccgattggtgaggtggtacaatcggtcttacctgctgtcgctcttgagtgggtgagcgaggtcgtttcgctgtccggtcacttgggctgaccttcttttttacatatttggataataattgattaacggtcaggccagatttgaccagccgaccagctgccttaaatatattagttttccacgtacctatctctggtcgtcgtggcttgaaggtatgcggacgttgcgggtcttgagtattgtcggaccgtccgctgaaattctctggaccgtctggtg

SEQ ID NO: 43025 - DNA, 3879 bp, Zea Mays
cagtcctatcctatggacccacaaggccacaatcttagtgacatgaggaggaagaaaggagattttgagaggttgagaaaaaaattaggaaaggggatgtgttggagcttgttttttttgcttcaatccttttcattgctggttacagggagaggggattgttttggtaaagattctcttaggatttaggaagtttctagcattgaaccctccaaagttgttcattgtgtataatagtaggcctaaaattcttcggacataaaaatagatgttttgtgcaattttaaatgagaacttcgcctacgtaggaaggtcagatgccatgttagcttggaataaattttgagatggaagggacagatgacaagaaaggttcaattgttttcagtttgcagtagtctcctctacctttgggatactagataaggtccatttacattttgatgcactaccagttatatacaaaggactaaaggagtaacaaggtagaattcaatagtatgtgcagaatgctcatttggtagtttcttttcccatcaggaggactgttgaatttcttgctatggttccaatgtgtatgtatgtttcccaacagaatttttataatgttcagacctattatacaaacgggtccggtgttatgtacctacataagtttttcttggtcttgcgggttgttgatctagctctatgtttttttttgcttataacccactagaaatttaggtatctgtcatgtaatatattcagaaaaggagaacatacctcagaatattagcaaaaggaatttgcatcgtcactatatttgtataattccatgctagaatggttcaagcggtaaaatttaaaatgtcattgtcacaaccatgcgggggggggggggggtgcttgctgctgttatgtggggtgggagaggaggggatgggagggagcaatggctctatgcttgcttaggctaactccaacagagtacctatcgtgacacctaaatctattatagatatctaaatgacactatagcatctcgaacaggtaatttaaactcgatacccattttagatgtgatgtgggagagtacctatatattgatggccattttctcaaacgtgtatttgggcacaaaaatatttgggtctcgtctttcggctgactgcataacacgaacgtgtatttggattcccatttttgcatattattgttagagttagccttagattgaaaccgttacattacctatatatttatagcccctattggacttgtattaaaaacaaactagagcagtagtctttatagatttggacactcctttcctaacaaaccaatattctttcctaaataaactttattttatttactccaaacttatcaaaggctttctttagatttcatctattccatattctcctcaactggatggacttctggggcggcaggggttgcaacccctcactcacgcgcctcctttacgacacccaaggtgagattgcggttcacaaggggccggtgttgggcctccgttgcccgctaggcccaatgctgcagcccacatttaggcctatgacatctcccccttctccactcagcgtgtcctcgcgctctattatagtctagttgttgatgcagtttgagggaagaggttctccaaatgggattgcctagatcctgacaatgagacgatcgtggatgatgttagccaagatctagttgtcttggatcctgatgatgatgagctcaaagtagtaacgatagttgctagaggtgaggatcgatcggtgtatggctacgtcaagagtgaatatctgcatagcttaaggagatctctcaaagctatgtaccttgttgctgcgaaggatgaaggctgccatacgacgacaaattgtcaacatgatgcacatagattgtgttgttgttaggtctagcaagtcaccaaacatgaacttgccccgttgaagttgtttggcgagaggctcgagtgtctcaagtcatggatggtgttgatgtgttcttggtagcgaggaagtggcaattggcgatgtcgaagaagatgaaattgacgaaggaatgataccttgcggccactcacggatcataaggatgctgatagggaagctgcaggtgatggctgcagtcgttggtggcgtgtagaaccccaacactagtagtcgtagattcctcatttcgccaatgacgacgtgtctcgaagaggtcgagcaatagtggtaatgtcgtggggaggtagaattgtccgttgaagaagaggagatcttggtccatggactaagttgatgcagctctcccgcctatgatggtggtggtgatggcgcgtagctcgagtaccattgcctatgatggcgtcgtacaatgctgattttgtcgagggcattaggttgacacggttgaattgccttgctcatgttacatcatggctgcgatggagaccatgatcgtgggagaagtgatgggtgtcgaggcaccggtaggattggcataagacaggaagaacaagcaaattctatggtgctcaacggtcagggacattgacgaagatgatggtatgttcgtcccattagaattgcttctctagggtcacaaagttctagatgatgttgccatggtcgaccaaccatggcatgtcgaagatgacgtcgatctggaacgtcttggtgttgatgtgaagccaagtgttgaggcaggcttcctggcgagcaatctcattgccactgttgacaagctttatggtttggatgcgctgttccgcaaggttggccggcttggcaaagttgatgtcgatgatgttgtgggtggtgcctgttttgacgaggatgagcaccaagttggcaccttccaggaacatggtgtgtcgaccacacgcacactagagtcttggggctgatcatcatcatgaggccagggtcgacaccgtcgttggcatgacgagcgtgatgtctaacaagtgcttgcacttgtggccacaggcaaagggttcgtcacagttgaagcatagcccaatgcaatgacgctccatcatctcctctgttgtaaggggcttgaaggggtgaggtggtgtagccggcgtaggtgtcggatgaccccggtgttatcgaggcggatagggttgttgatggcacctttgaatcttggggaagccgatgtgtggaatgttgtagatttggtgttgtcagcgatgacaaccgcctgtcgcttgtatgctcatggtagggacatggccatctctatgtcttggggttctagagctcgacatgtcttcagtggctcgagcaggtcagcagtgtagacgttcacctgctgctgttcgtcaagtgtctcggtgcgcaccacgtgtgtcaagatgtgctccatgtagtcgtcgatggtgctagtcttctgcaaggatgcaagctctcgtagtgtttgcgtcgtcttggcggcccaaaatactcgttgacgcaactgcaaagcatgcccagttggtgacaactttatcccgcgttaggtgcatcagtgcatgtaccattgtttagtgccacctagagatgaaaagatgcataccatactcgctcgatgtcagtagtcttttgccctgtgaagaactgctcacagcggttaagttatggcagtggattttccttgctgtcatatgttgggagcgacaattgtggtagcgtggttggaggatggggaaggagctgattgctgtagactggtgagggtatggcagtgttaagggccccttggtggcgcctccctctcctagttggcgacgaacagtttgccacttcttccacaagctcgaggacggtcaatgaccttgctgtctcctccttgaggaaggcacgtcgagcttgatctatggcgtgcttggtctccacttcgagc

SEQ ID NO: 43026 - DNA, 411 bp, Zea Mays
ctccaacaaatgaagttgtcgacgttgtcaataactatatggtttcaaccctacctggtgacacaaaggaatacctaagctgtgatagcattgcaaaaggacccaatatgcatgcatcctatgatatgctatatccaatagagtttttaaactccatcaacggtaacaactttccttcacatagtctgattttgaagaaaggaacaccaattatgctgctacgcaacattaatcaatctcagggtctttgcaatggtacaagattgattataacaactttgggagatttagttatagaagcggagattatgaccggaaagcataaaggaaacagcgttgtcatacctcgaattagcttaactttgaaaaatccaagaaatatgtttgttttagagagaagacaatatccta

SEQ ID NO: 43027 - DNA, 484 bp, Zea Mays
tgatccagatcttgtgtcattttcgcgagatcgccaaaccgtctctcctcgcaaacgtcatgctgctcgtgtctaccccgtctatccgttggcgcaggcacaatcatctcgtttcgcctcactttatcgcataacttccacccttcgtggactcaactgcctcgccacacctctcctccaaatatatatttatactagttagatgcccatgcgttgcaacaggccaacagtatacaaagtattcaacaaaatattagtgttcttaaggttgtttgtctttatgttcaatggtatatcaagaggagaagcatgaaagagagagtgaaatagggacagattatagagaagagcaaattacatgagatattcttatatgaagagcaaatcttaacaagctgtctctagggtaaatcttaacatcatatcatcaccgccaacagttgtttcagtttcaatcagcacatgcacgagcactaacaatttg

SEQ ID NO: 43028 - DNA, 432 bp, Zea Mays
tctggacttttatcgtcctgttctgagtctttgtcccttccaccgtcaccatcaccccgaggctcctccctaaatattacaggggaagccgggagaaaattcttctcttccatagcaaaggtgatctcatatccctttctatcaaatacaatatcaatggtaaggggtaaatgatctctgctcatcatcccaaccagcagcctaattattccccttcttcctgtaagtgtacatatctacctctatagtggtacctatgaccgaccctagggcccaaaaacctaagtaattcctccaagcatgaggcactcctttgacatgcacccaaacctcatccaattggtagctaagttctacatcacaagcatctttccattcagatatagtgattgtgactccatgattcttaagattgaactccacatatatgcc

SEQ ID NO: 43029 - DNA, 377 bp, Zea Mays
gcgagatatcagtaaataaaatggacactaaattttaatcatcttcgtctatcacgattttgatatcgtgtctgtctccatctgtctaaattgtcctaatttattttgcaaaattcagacttgagtaatcttccaaaacatcgaatccagtatcgtttggggttaagccatcgacatcttgcccaaactttaatccttgaaattgaatctggttccttaaactttgtttgaaattctttcacgcttatgttgcacatgtctatctgtggtcagacatcgtgacgagtgtggcgggtgttataaccggtgtctggacagcgcacagcctcttgcccacctgaacgatgcatgacgtcgcttccgaaagcatcacaatt

SEQ ID NO: 43030 - DNA, 534 bp, Zea Mays
aaaccctgttaccatgagtcttaagctataagcgtaacataagtcttaagatagctaacataaatgtccattaaccaacaagggtaacagaacaatttaggacattcatgctatactagtaacagaacccatatagcgttcacatatagccatcagttatcagacatacataacacaagcatgagttattgaatagaactggtcaacatatagcaggttcaataatttggcaaagtcatcactaacacaagtagagaattataaaaatgataataaacattattaagagatcaagtccacaacttgcacgacgaagaagttctctttgacctttcagcttctccacaaagttacaggaagttctctttgacccatgatttgaaccggttttgcatgtaaagtttcacattccattagtgaatgtgataggtgacttctcatcttgctatcagctccaacgcccaggaaacaatacagtccatctgatattcactcttataatcgatagaaacaggatcatttggtgagccaata

SEQ ID NO: 43031 - DNA, 960 bp, Zea Mays
aaatatttgatagttgtttcttacaaaaatgaaagctacgcacaaagaccctaaactctcaagtatacacaactttagtcttctttcaagactttgtcggcagcttcgttcagcagcttgtcgacagcttcgtcaacggcctcgttagcaatcctaatcatatcgagcgcccccttcagagatggatcagtttcaggatcgtatggctctggagggggagaaagctcagttgcattaaaatacaaatatctgttagtactgaagctacaaaaatttacgaagctaagctataaaggatagacctataagtctggcatgttcagcagcttcttcagctcttttagcctcttctaaggcatcatgagtattttttctaatagcttcatcagctatttctcggccacccttcagccatacttctgaatagaatttcctacttagtgcagtagcgtcgaccgaagggtttttgatatcatcaattgaaagtgagaatcctgactggcttatagtcttcgcatgttcgcacccggctttctctaggattgatacaactctgcgggcaccagcaaaggcacaaaaatcccctcggtcactaaaaatctcttcaaaggcttcagcctcaccgttaatccactggataactccatccgagtgaccgcggatgaagttctactctaaaaaaatgcaccaactttggaaaagttgttcttcaaatttttagcgcattccatagccacatcgtagcatttttctttagctgcatgaagctcatcaacgtttctctgtgcccttgatcgttcgatttcagatatttcatgttttgtcagctccacattaaaattctcagttgcttcggaactttcttttctaactattgcacttcagctttgtgcgcctctgcttgagcggacaacttagcttcactggattttagcttttcgaccaaagatagcaaaatct

SEQ ID NO: 43032 - DNA, 503 bp, Zea Mays
ttgcttactaataaaatcccaatttgtgatgttttctgtgccaaaaaggctttcatgcattaatattgaatttcttcaggttacttcgggtaaaactttatgcacgagtagagagcagagatttaacttatatgtgtttcattgtatttcaatttaatttcccagatttaatatagttgttatggccacttggcgatatatataaatatacgatgccacacaacacaatcaaacaaaatatagagcgaaaacaaaattgtttacgaaggttgcacataatgtgacttcaggaccttgaacaacccaccacaatccacgcgagtacaagctctagcgtatctggcgtcaacgcgtgtgcgaccatcagagctacgacagtatagcaagcattcgtaataagcgcaacatgcacgattatggctcggtaattggggtacacgataaatccacgtaacgtgtgcaacatgcgcaattgtggctcgatgatcacgacagacatacag

SEQ ID NO: 43033 - DNA, 519 bp, Zea Mays
attattatggcaggggttgtggtcgcattattatggcggggggttgtggtgcaatggaaataagtcatttgaaacaacaagaacaaataggttttatgtggtgcatgttagttgagaaatgctacttgaaaattttataggaatccagaatcctaaatccaaattgtatatttaataattagaagcagtttctcttggttaatttgttctgctacaactattatcatgacatccttaaaaaatatgaaactattatccattgttggttgtccatatatcttgagtctgagttgttgtctttccttagtgcattttccagtgagaagctaatttaacgtagagttttctattgagaactgagtgcatcttgcattttatttcggctgttggaggagctagaactaagttcagcttgcatatatcttggagctctgacataagattagtaacactgattgctttgtttagccattggtcgatgttcaaatatatttgtaccttatgcaatgtgtacctgag

SEQ ID NO: 43034 - DNA, 942 bp, Zea Mays
ctcgaatgtggcacatgagaccatcgcgcccccacgtcatccatcatgataaatacgcaatagccaggtggccctgagccccacgagtacgcgtggcctcccccggggtaaaacactgattgtacacttgccttacagctccttctcgaggaagccaccgctgaccgacccctgtcctggcctataaaagggtaggctcgcctcaaggcaaggggagcagagggtgagagctcttggaccggacgccttcaaacggagatgaacccacaaggatgaacaggaggaggagcgcgacgaggaccaggagactggaggtctagagccccgccaagccaagacttagctaggactccaccttgcagcttctaggctctacttccaccctgataagagacttggaagcctctcctccctctctcgactggttgtaacccctaatgattttgatcatcaatgatgttggtagcgcaagccaccgatgattggaagtaggggcattctgcctgaaccagtataaatcttgcgtcctccgtgcacacccttcggagcccgaaacacgaacaataaatttaattgccggagcaaggttcgaaacaccgatacccctttatcatatgagcaacaacctccaggaccatcccaaccaacaatagttttctgcacaaaacccgctacaacatgatacaagggaataatttgaggctagaactatcaacaatgcagtcccagaatcaaaacacgtctactaaagcgcctgagggactggttccagaggacgaagccacaagaggaaaaatctaagaaatctattgtaatttaagtttctgcttttctaagtttccgttgtagaaaacattaataaggtacatccttcgatagcctgtgataaatttgtggttacaccatcgagtgtaacaaaggaattaacaaagcttcaaaatc

SEQ ID NO: 43035 - DNA, 444 bp, Zea Mays
ggacgttggtggtggcacctcccccagaaactgatataaccttggatattcagaagcctgtcagtactcgcccaagacgcccttcccgggccaatcaacttgatcctcctgctgacgagcagaaaaaaaaagagacgtctccggcgggtatctagtttggatcgggatgctggtccttcggctcctgctgctgaggaagttcccgtgcctgagcttactgacgctgaccttaatgggggtgctccacccgctgctgaccccaatgggggtgctccacctgctgctgaccccaatgggtgtgctccacctgctgctgaccccaatgggtgtgttgtctgtgttgctgatgaggacgacggggaggaagaggatgaggtccctctgactcggaagaacagtcggcagtacgtcgccagtggtgaaagtagtggagttccttctcct

SEQ ID NO: 43036 - DNA, 429 bp, Zea Mays
gcatgggtgggctttgggcgagattatacctcgccggatgccaaccctgggagataaattggtgcgaagcccagccttcgccgtggatttgcacgggcgggatgcgaccactttcgtgcgggaagtagagtcggaggttgttaatattgtcggaaaatatgtgttgaagacagaaatgtaaggagttgggacattcgcggttccaacattaggatgaactatgtcttcgaattgaataaactgctttatggtccctacccagagggggactccgctgacgtcggcgatcatcgaggcaagcaagtcaaaccccggaccgacgaaggctcctcaaaggagaaggctccggttgcagctcctcgaaagaggaaattaggtacgggggatgatgagactgggccgagggccactgggagttttgttgaggag

SEQ ID NO: 43037 - DNA, 931 bp, Zea Mays
gatgtccttcctgctgcaacacaaccccaataccgcctccactagcatcagtctcaattaaaaaagttttctgaaaattaggaatagctagaaccggagcttgagccaaagcttgctttagaatatcaaaagacttttgagttttagtggtccagacaaacactgtgtccttcctcaaaagattagtaaggggtgtactgatgatgccaaaatgctgcacaaactttctataataaccgaccataccaagaaaactccagagttctttaacacaatttggaactggccaatcttgaattatttagacattgcgtggatctgtagatacacctcgtgcactgatcacatggcccaaaaattccaaaatatcttgagccatcagacactttgatcgcttgagatgtagctgatggtcactcagtatctgaaatactgctttcaagtgctgcacatgaagttccaggctaggactgtaaacaagcacatcgtccaaaaaacaactacacacttgtgcagtaatggggccaaaatatggttcatgaactcctaaaaagtagcaggtgctcccgttaacccaaatggcataacacgatattcaaaatggctcgaatgtgtctgaaaggctgttttcggctcatccccttctttaatccgtatctggtggtaccccgctctatgatcgagcttagaaaagataacagccccactcaactcatctgttatctcattgaaaatgggcataggatacctgttcttcactgtatatgcattaagtctgcggtagtctacacacaaccgccactcaccatcttttttcttgacaagaagaacatgtgaagcaaatggacttgtactctgctgaataataccattgcccaacatttccttcacttgtttttaaatttcatctttctactgtggtgtataccga

SEQ ID NO: 43038 - DNA, 1147 bp, Zea Mays
gaaaactaggctcaaagttgtgctgtcagtcagccttgtgtccgaattttcagaaacattgaagttggatgaacttagagctcgatttagagtaagatctattgctcgattgaggatagttgccatagtcgatttgtagctggatcataggactataagtttgctgcagacggattggcatgttctagcacaaaaatccgagatctaggcgttgcaagttgctctgtcaggcgctctgttgaacgtttccgatggtacaatgacctgatcagaacgccagcgcaaagaagctcaccgccagcgaccgtgcgcctggattcgcgctcgctgcgatgattcgtgctcggctcagttagagaggggtaaggaaatatcgcgtcatggatgaactctggccactattttactccggtcgccgtacccgagcatgtcacggccgctttggatacgttcgccggagttagccacctcgcggccttgcaccacgtgcctcggcatttaccacgtcgcagtcgctcgcgttatgcatgtccggtgattgccggtgaacccgccacggtgaaagccactaatcgcttgtgccagtgcaattcttctctccggccgccaccgcgccaactccaattcacaagccaccgcccccaaaccctataaattgagcacaccgtcggctccgttaggtactcaagcatccaatccacccgctcgtgcctccaattactcaccagagagccccaatttcggatttcccccaaattggtctgaaacaccgcgcgttgtgacctcatcgtggtcagcgtgctccaggtccgctcatgccccctgctctttagtttcagtatccttgtgtgtccctgatgctccctgacccagccgattaagctagaacctattagatcgccgggaacactcggtgttgttcttgtattgcatggacaccgtgagcagagagtttgggagcctgaatggtggaattgagcgggtgaaaacggttgttaagggttgaattaggtgtcagccatgttggaacactggccagtgcaagctcgccggagttcctgctccgccgtccacggtcgtggacttccccttgtgaagaattagaacgttgggggtctctgtgtaaatgtcagtgacccatggaaat

SEQ ID NO: 43039 - DNA, 393 bp, Zea Mays
gaggggagaggtgttgttcgcgatgggttgggattgtgcgtaggtgcggcgttgattattagtgattgttatgtgaatgtgtgcactaagttttatgccaaaacatgtggtggaccccaggatcgtacttagtaccacttcaaattcacggtgaagtcaagtaaatgcaatggtggtttataccgtttggttgtgtcctatgccatgtttcttgaagtttttaaaggcgattgtgtttattattgaattccattataagaattgttgttcgaaattattcatgctttatagttttaaatatattgaggccattgattcatgaatgttataggtggttgatgcctatttttatgaagttgaagtatctatttagcgcatgttaaaagatgtgga

SEQ ID NO: 43040 - DNA, 497 bp, Zea Mays
ctagttcctgaaccgaaaagtgtacttcagataaactagaccactctggctagagccggcggcggccttcttcgacatttcccactcgctcgcaagaggccatattttgtaagcaatatgctcttgaactaagtctcttgtgccaatataagtgcacactgtgttgaaagcagcttggcacgcttgcacatcattcccaagtgcagtgggtggccttctaacgccgaagcgagaccatatagggcgttgaataatccctctcacatcttccctctgactcaggtcactctttacataaaaccattcctgcatccaagagcctggccacctcttctgaaatgtgggcacagggtaactcgcctcagatcgaggcacgaagctgtaacaaccaaaattgttgtgatagtgttcctttccggtcgccttcgtttgataagacagttcatgaatattgcaaaagcaccttgcatctggttctagtccttggctcctcatgg

SEQ ID NO: 43041 - DNA, 488 bp, Zea Mays
ggttttgatttctcttgtcttgctatctaggaggttttgtagctgttcaacccttttaccccctccaaacaactttgtggttagcaagtaaaacctttaaaaaatcgttggtgtccggttgtgcaaaccatgtccaagccatgtttctttccataaatccttgcccctaaaacttcatagcatctctgttgatcatcctagctgatcttgtttgcctacctctccttccacctggatctggtaatcttttttccttgtgaatcatgttgtggctttatcattcgaatctctggatccttcattgattctgccccgttatctggttatctgatataacttgttctcaagtatcggatgttgatctgccaaaatctctcatttctggccattctcatactcccttctccgaggatcatgacgttgttttactaactttatctataaacagtgtatccatttggttcaatggattttgctgttgtctttag

SEQ ID NO: 43042 - DNA, 1181 bp, Zea Mays
gaggaagttgagggagccgaacaagatgtggcttcctagtgcgaaggtctcgccaccggtgagcgctgaagtctgagccatcggagtggattgtgtcacttggcacactaaaggtcccctaccgggtgcgccaactgtcatggtttcgtaaactcggggacgatagaatttgtattcggtggggatgctagcgtggactcactatgaatggtgaatcacctcggactcaagcagagggttatactagttcagactttcgccctagtccagtgtagtgctgatcgtagattcatagtactgtttgaggattgtgttaccgctgctgcatgcgtgggaaggaggggccctgcccttttatagctcaagggtaggaccttacagaggagacttgtttcctactggtaagagcgtgatctgttgcccctagttgacgtatcttctttaacgtatttcatagggtcatgtgtcgccatactctcggtctggcataccatcacgcttgtccggacgtctttcatagggtcatgcatcaccgtactctcgatatggtgtactgtcacgctcgtctggcttacgggtccctgtagcgagtctgatgttgatgtcctcatagtggcgcatggcggctcccatagtgtagtctcatggtgcaatcgtgcgcggcgcgacctcgcctttcgtcatggactctgcgtcatcctccaacgtgcatatgtgtacactaagtatggtgtatcatcctatcctttatggtataaaactcactgtagggactctggtgcttaggtcccccattactggagatgactggccccacaagacagctgggatacgtcagagactgtatgcggtggcatgtcataatgttgatagggacttctcgacgccccttcggtatgtcgcacacatgtctaggcgtggtttcctgatgatgcgtctcatcgtggccgatgtgggttaatagtattggattcagggggcctccgccttactaagttgctcggtgaggacttggtcagccactctgccttgtgaagttgctcggcagggagttgaccggccgctccacctcataggatttcctggcagagagctagttggctgctccgcctcatagggttgcttggtagagagctggtccaccgctccgcctcacagggttgctcgatagagagttggtc

SEQ ID NO: 43043 - DNA, 551 bp, Zea Mays
gtttgctttgtgaggtggcggagcagccgagacgaaggtaggttaggttacatatacaacaacatggtgagttgttgagtgatgaatgatgatgatatggagagctcgtgtccttgtctcgaactctgcgtctccacctctcctcggcgtcctgtttgcatgcaccacggaaacatggaaaggcatctagaaggattccgaagtgcgcgcgctcctacataccctttggagagctcgacagacggacggcatcgggtcgcagttgtcgataaataaaaaaaaacacgcatggtatcaggatggcatcgtgctgtttggctggcctggattggacagcacagcctccccctacctacctacctccctgcaagtgcaactgcatctgcgtacctaccgctttgtccggctctggcctccagcaagcagcgtgtggtgtgctgttgtgtgtctagaagctagcgctagggggtacactcctaggggctatggagcagcagcagcatgtttcagggcattatttatggccagccggatcggtggataggaatggg

SEQ ID NO: 43044 - DNA, 423 bp, Zea Mays
ggaaggggcacgtcgggggcaaagggcgtgtcacaccaggggtaaaaggcgcacacaggcaagagtgagaggggctgcagtagggagggctcagccatagccaccatagaactgagctcgacgaagaacaagggtggagagagaaaacagaagggaaggacgaatgtggaaatttctggatggagtggaatttgaacccaacgactgtgattagaacattctttaatgattccataaaggggatggagcagaattgggtcactagctacaaacagaggctatcgcaagacaatggttatgatcgatcgactaacgatgaaacagggaagggaccgaggatttctcaccgagcgaaaaagaagatggccgacgaagcgtcgtcgcagcgagggagtcgatgctccggcgaggcaagcatgcacc

SEQ ID NO: 43045 - DNA, 379 bp, Zea Mays
ggacgacttagccgtgcgcaactatatgtgaagcggcgagagtaagagtgacgccagggagagagagaaaatgagatggccgccgcggctagattctatccttgtcgtcggtctgtaccaattgggggtatggggagctccatcgggcggcactgaatatgatcatggcttagctatgcgggttggattctctgggagtcgatgatttctcgtcgtgtttcctccgccgccgcagctccacagacaaccgtggttgaccccctacgcaacacaatcgaccggtaaaattctccccaccctgtttgcattaacaccccctctgcgtagcactcttcagatctgggttttgggaaccagagagggaaactgtgcatctccg

SEQ ID NO: 43046 - DNA, 424 bp, Zea Mays
ataggcttgaatacaaactttctccctttcagatctagtgtgtactgatttgttcttccacaatgttgagaatatcggtcatattgccaaggtcttcccaacagcaagtgacacacaaacataggtgcaacattgcactccactgtgtcaacaaactctccaaacttgtacggaactttcaccttataaccaatcttgatatctcctgattcattcaaccattggacatgatatggatgagggtgttgctgcaacttcagatcaagcctttcaaccatctcacgacttgcaagattatggcaacttcctccatcaatgatcacctttactactttgtcttgcacttttgctctcatttgaaaaagattatgtcgctgtccaatttcagcttctttcatttgaacgctcaatatttgtgtaacca

SEQ ID NO: 43047 - DNA, 647 bp, Zea Mays
gggcctgttaagattgaagaggctaagaaggctattgaagatgacacaacgtttggagaagggccttttgaccaagacttggttggtcgaaggtatagggttcatcatgctgcggggaacgttatgggcgcaaagcagctggccgaagctattgcttttgctaaaagttgggtgcaatcatgtgaaggtttgcactgatcctgattttagagtttctactgaccacgtccgaagatcgactatccaagcttcagagtggtctaaaaaattcttttctaaaatatgaaagaagggtggaaaagaaataagtatcgaagaatctataaaaatagggagaaagtttgtacttttctaccttcgtcttcaccttcgtagggcatacacattctaattttccaatacatctataggcgcgacttgtagttgaaagagctgtatatattagaaagaagctgcaaagcaagaaagtcgaaggtttttgacttttcacttctgttaaatttttgtgtactcatgctttagcaattgttttactaacccttactgaaaagtatccacttcataggtaataattgaagtgaaatatactgaagccaaagcaaaagatggtactatcgaagccgaagcaatcgctgccatagccgcga

SEQ ID NO: 43048 - DNA, 654 bp, Zea Mays
ctagaatttatttggctctggaagaaaaagaaaaagaataacctgcaacagtattggacccaatctaatccaggacggcccagtaacggcagaaacgcgtgcgcgcccgcggtgaagattttgcataaaggcccttgcctttctgaacaaccagaaacagaaccgaagcactattcaatgagtcactgacgtattacagaaaacccctccacgttctaattcttcacaaggtgaggtccccgacgacgacgagcgcagccgagctccgggaccggccgaatggggcaacgactaaggttcccgagcggctaacaccgaattggaccctccccgaaccattcccctaacttaattgcacgaatggtgacctattctactctgcccacgagaacagcgaaggttatgggcatttgctcgtgttcccggtgattggtgagctctcagtccaaattggtggttcggcaagcatcacagagttatgagaatgctcaaacaagggagaggggaggatgaactgaccagagttgtactggccgcggtgaggttggtttcacggtgtcggaaacccgaattggggagactccaaaattcgtgagctctggcgaacgattgctagcattttcggcggctgggtgggtgatgaccttgcggggc

SEQ ID NO: 43049 - DNA, 885 bp, Zea Mays
aaaaaacttccatgtgattagttcagtatgatatggtatcctaaaattgacttcttgtttgtttgatgcacagttagggctacgatgcttcatgatacaaagtgatatctttcttaagggaaaaagatggatttaacttttaagctactaattagtaaaaaagatggatttaacttttaagctactaatcagtgtacaattgctatggactaaacatgttttgagtgaatagctgtctgcaaagcaacatctatcgcgtctctgacgaaggcgttgtgttggcctctcatcgttgtgtgtttagttatctgttattagtctgttttgtgctagtagcaagcatccccacttttgggtatgactaaacatgcaaacttagtgcacaattattttagtttgagctcttgatgatggtgatgaatagattcaatttctgctaggtgtcctgcttagttgtaatcaaatgtgttgattttgtctaagacttgggggttaggaaaattgagctccaaagtcatacaatgtaaacttttcacatatgaattggatcatctaattcggaggctatcttctgtgccaatttgattcattgatgctgaaagtattaggattgatgcaaaaactaaaggtgtactcagtaggttgacatccaagtagcactcacattcttgatttctctcttagggcacccgtatcccgtagtgcttgtttgaaccaaaccaaactgcgctgaagggccccttcatgtagtagagatttggttacaggttcaatgcctctagaagtctatagtcgtgtgtagttcatgaaaatatatgttgactgctggtagtgtaagatggaattggagaataaagaatgtgtatgtggattcatttatttttc

SEQ ID NO: 43050 - DNA, 1120 bp, Zea Mays
gatctacgagatagaagacacattgttggatagcctccgtgctcggcgtcagctgccctatgcgcactacctctgccacatcttcgcgcagctgatccggccacctcagttccaggccgaacttgactccaccagactgaagtttggtttctaccgcccggcacccgaggatacgattcccgtgaatgctcctttggatcctttggcccctgagcatcgaaatgaggacaaggtgatccgccagcttgaggaccaggccacggttgttgatacttctttggactctgatgacgaggacctaggaattccaccacctcctttgccacctcgcacccatgatcacgaggccggtggttccagtgctgctcctccctctacacctcctgccatatatccagccctaacagctataatacagtccttgacccagcagcaagctcacttggcagttgagcagacacgtcaggaagccattcagcagcagatgtccgagcggatgctctcaatgtttcagacgattcaagaccgccaggacactctttagcagtagctcttgttagaaagggcggagcactaggccttcatgactcacatccttcagcacaacggtgttctcgtgcctctagtgtagcctgctccgcctccagctctccagacttcaatggtaccagcgattcagttcggaccacatctccaaacttttggttcgacgttctctccaatccgacatgtcactctggacttctcgactcaggtcgtcggagctataagtgctcaaccaccagggccaccggtatcagctattgttacccttgcagcgaccgtcacaattctagctccaacgccagtagctcaggcatcgtagccagcgttagagtcagcaccagctctagcctctaccgtagatcctagatccgagactttactccaaccccttctagcctttgctctgactgctcgccctcgagctgatgcgcctgtccctccttcgtcttatggtctctaggttaggacgtcccttttggtgcttgttgccaaagagggagagatgagaattgtgagagctagggggagtaagttgggagagtcatggccttttgttgtaatatatgcataatac

SEQ ID NO: 43051 - DNA, 601 bp, Zea Mays
gaaacgtttgactctagcacatttgacgaaggcaacaaagacagctcgggcctagtttgctctccagccatttctaatgaaaggccacttgctttgcgactggctaaggttggtttgaaggtagcaaaggcgttcaaagcaagctttgaaggcaaagaaggctctaacaacaatggatgcaaaacaacaaatgtcgtgccaaatgctagcgggcgttgtcccttttatatgcacaacttttgagattcaaacgttgcgctctctgagtgctggacccagttagcgagatggtcccaaactgacgtttcataacaaactttgggaaggtgtttttcgaaccttcaacacaaggtatcccaattgtgtttttttgtaatctaagctcgttataaagaaactaactcattccgcaaggggctacttttggggacctgccttgccgaacatcctcaaaatgtattcacttcggtataaacaaatgtgtttcaggcatatagcaaaaagcggttgaaggtagcccccggccgaagcggcatgagaaagaagattcgatcatatgtgcatgcaatgaagatgctaagccgaggtcaccagcctcggc

SEQ ID NO: 43052 - DNA, 576 bp, Zea Mays
ggaagctgtccaagggttggttgaggctgagggtctctggaaatggctggccacggtggtaggcgctcaggtggctcgggcgggtggcgcagagctcaccggagataagggtggtgtctggctagcgagggtgagtgcggagtgaggtgaggcacgtctatgggtggtcttaaaggcgtgggtgagcacgatcaaggggtggctctaacacgctctcggggtgtgcacgggcgagcgccagtgcgcgctctggcgcctaggcacgacgtcgagcacaaggcagcgcagagagaggtcatgttctagcgcagattggatccaaatctttgtgattatggccatgatcccgttgagagatctcttcacctgacattcctttgtcgtttgtctgtggaggcttatgggtttcgctgactggatcaagagatatggagggatgaagttgggtttgtctcactactgaactctgagaggaaaccccgggtttgacgtgtctagggcacgaatctcgatgccatcttcacacacgttgcagaggggttagtttagaacaaatttgtcaatggggacttaagg

SEQ ID NO: 43053 - DNA, 999 bp, Zea Mays
tagatggcgggtttgttttttataaaacaaagggtcttattcgcaaggtggcgcgaccgatggggtatgcaagcgcgccagccgttggatctcaacctgatggttgtgattagatcggtccatataatgaaccggtatgcgatcgcggccacaggattctaaatctacggtcaacatttaatgggacgcgattcaataaggaccatccgatccgcccaacggctcggatcaaatcaccgaaagggtacactctgctcttaatcggagccactacttccccgatcaacggctcaaaatccaccatggaaccatctactcttagccctccgataatgatcctatggcacagaagccatcttctacttccagcgcgaggacatggcggcggccattgttcccgcgacggaccctcgccgtcgctcaaccagtgttccccgaacacgcgccacagattccccaatctgaatcccataatcgatggcacactacgaatctgttgaaggattcataccgagggtgcggatgacggcaaggctggccacgcagatggcggactggcgacggagaacccgcttcgatgagcaattcccggcaccacagcgactttcctcttgattaatcctttctacacctccgtcagggtctggactaccaccgaatagctttgttggcgatcgattgatattgtcagcgcacttccgcagtggcggcccttcctagcccgcgcacccacactctggttcgtcccccccgacggctggggtggtttgggatgatttacgatgcatcggctcggcgcgccacaacttttatgggggaaggggagatccgagttggtcgtgacggcaacggtggtgcgagaatgccgccgcggcaatttcggccaggttgttgaggtgcccgcgtactggaccccaccggtcatggtcacgaacgcgcagatggcggagtcccgggctcccggccggtcgcccaggttgttacaggtccggggaaaac

SEQ ID NO: 43054 - DNA, 396 bp, Zea Mays
atgattgggactatgtatacttatttgttgctgatgcatctagcgaggtcatctgaaaaccgaaaatagtaggttttttcaagtgcacgtgtgagttttttagtgtttcttttgttctttcatatgttgttctaactgatccgttataattccacaaaatgcttaataaattgatcgtcatcagaattatgtcatggagcgaaggtatgagggagtcaagcttgatccccttgcttgataatcttctggtccctatatatcgtgaagtgtgagacaaaaaattttcttcgcttcttcgcgcacttggcgtgttgtcgcagcgcatcataccattgcttcatgagatctttcaacagtcgttgctgaaagcatctaggcccctagttggttttagta

SEQ ID NO: 43055 - DNA, 837 bp, Zea Mays
actatgaaaagttttgagaaaattgaacccaaagatgggctgtcagactgtcttaggtctgaaatcagattgacagtgtgattgagccatctttggactggaattcaaccatgatctagtgagagtttggctatggctgctatagcaaggttgtagctagatcattagacaacaactttgctactggccgatccacaagttgccatgaaaaatcaggagaaaatcgatgccaaacttggtctgtcaggctaactgaagaacaatccgatggtacagtaaccggatagaatcccaagttcagccccctcgccaccgatgagccgcgcgcggattcgtgctatcgccaccgtgattcatgcacagatcagttggatagcgccgggggtcagtaaatatcacgccgtggaaacactccggccaccgtacccgagcagaccacgactgattcggatgagttcgccagagacagccacttcacggccttgtgccacgtgccttggcacattcaccgcatcgtcgtgactcgcattagccgttcattcattgccggggagcttgccacagtgaaagccactaagcttgcgcgctagtaaacttcttccccttcggccgccagcacatcttcgtgaaattggacgccaccgcccccagatcctataaattaccgctctcgtccactccactatgtagttgtgcaaccactgaagcaacccgtgcctcgaatcatccactagaactccccaatttgggatttcccccaaatcactcaagaacaccgagcagtttgacctcgccgtggccagcgcgtctcaggtccgctcataccctctgccctcc

SEQ ID NO: 43056 - DNA, 428 bp, Zea Mays
caaatggattcactgggtttctatgattcttgattccggcacttcagaagttcttttgaatggagttcctgggaaaagatttcactgcaaacgcggagtcagacaaggagatcctttgtccccacttctttttgttcttgtagctgatcttctgcagtcaattgtcaacaaggcttgtgaatgtggcattttacggctccccctaccgagcaattgtggtccggatttccctattattcaatatgcagatgatactattctcataatggaagcttgccctagacaacttttctttttaaaagcgatgcttaattcttttgctgaatccatagggctacatgttaactaccacaaatctaatatttatcccatcaatgtcacggaccagaaaatggaaatccttgcaaatacatttcactgcaaaattg

SEQ ID NO: 43057 - DNA, 690 bp, Zea Mays
gtagaaccagatcgacagtccagatcaacgggaggcagaaccagggatggcaggctacccccttgcagccttaatatagtagtatagatatagattacaaagaagctagttttgtgagtgaaagcatgtacaatgccgaacaaacacacatgcaggcgcgtgtgggcatcggatgcagcccattccatcgccactcctggtattaagtttgattgggccgtgctacacagccgtccgttgcattttctgcagcgaccattaatgcgctttcgactatcgagtgcaaaagcatgaaaaaaataaataaagaggagcgaaagcggcactgcgtagcatactgaggtcatagtttaagtgaatgataccttcagcaagtctcgtaaaccatatatatatggaggacgatatttcctgaatgcggatgctttgagataggataagaagattgcaactgagttactcggcccaggcagacacacgagctttttttccttgaggaagccaattcttacccggcaccggttcacatctagtggagttccattagctcggaagcattgttcgatcggtttgagctttacgacgtagcgccacggttgagggtcttcttctttgccgaggacgaagaaattggttataagcaacgagaataaatgtcgaagctacaacaaatatacgtgaagcgccgaa

SEQ ID NO: 43058 - DNA, 904 bp, Zea Mays
tgaacaaggagagatgcacgtacggaaaagcgatgaaacggtgattgcagttcttcctacaaaggctgcccaacagactgcacatacaacagtgcaaaatattgttttgtaccttttacactatagatagattgtattgtttacatagcggagtttgaaatagcagatttaatgagtaagactgctcgagatagcttaatgagggttggatcaccaactcacttagagcaactccaagagattgctaaaatattgattctaaaaaccttattttgggggctggtgaaaaaaggtaaaaaattcttgacgccacagcagtatgctaaaacgtgcaccctcaaaaatttgaaacgttctacgtgggccagcttgttgtaaatgggcctagggctgccaaatcttaaacttcaacaactactcttacgctcaggttctgttcgattgtcaattttgtttgtccctgcgtcgttggagacaagagccaggcgtccagcacatgcgttgttgcatggtacatacttggacatgaagctttgctcagtgtttgtgcaccaagcatgcattggatttcactttcttcatttttgagattccaccagtgctgatagatattactcctctgctggtaggtttatttttaactttaccaattctttgaaagcattgttagacgaagcctgtcaatgcgcctggtgctggatttgtcatcagatgatgataacaacgaattctttatctctgttactcatatggccatgaatgcggatgactcagataatgaaacaatacatcgtggtaatttcaaatgcaagggacagagagacaactgaacaaaataagcataaattgttaccgaccacaatatggtactgaaaacaatatgcttcatatatgtaggttccac

SEQ ID NO: 43059 - DNA, 642 bp, Zea Mays
cttaccatgaccttctagtctcttgggattctttcctcttccatcattaagttgctaccatttggcaatcattattcctttggtattgtcatgctgcatcttttggattcttccatacccttatcccttaattcaaacacttaaccctgaagactctgttgcctatttttacattttagttttattttcatgaccttcctgtcttttgagatcccttcctattccgttgttaagtcattacctttcaacaatttctatttcccttggtcttagtatgctcgtgtccttggagtcttgcatactcccatatttttatgtatgcttatctttcataccacaatgactgttcaagacattttagttaacatatccttgaccacccttgtttcctaatgatccatgagcggtcattttattttgcacatccttggtgatctcgttaattccttgtaattttcttcggtaatgaatttttacttcaactcttctgtcggaacctcacttatcttgtccctgattgttttctccatttcgtcactttacgagtcttgccttaactctgtccatggattacacatttcatcattatcacctttatccttatcacatctatattttaccttgatgtttatcttataccag

SEQ ID NO: 43060 - DNA, 574 bp, Zea Mays
gccgaagagggcaaaggggtgggccaatgggggtggagggctggggtggagcggttgcatcgtcgtgttgttgtggggagtccgcgagtctgtctcaacatggcaacggtaaggaaacaacttggcaagggtagcgagggtagacaacggcaagtgacaactattgtcgtattgggacgatgaggtgggactcatagcaagggcatgtggcatcatggtatcaaggcaagatctcaacgagagtctgtctgttcatcagtgcggactaggaggcaaaatagcgatgttacatgctggatcccgatgacacaatgagttaacgagtgacgaggaggcaaggtgggactggctacggacagccggacaggttaggtaacccactaaccgatcagtcaatgaccgaaggagtgagtaatccacgagtgggctagctgctagagagggaatcaaacgactcggatggaaagtgggctgagcaatggagtgccaagaaaaagttcaatcaaaattatatttttattagattaggccacacttactatttaaaggttttttattttaatgtatatttaaa

SEQ ID NO: 43061 - DNA, 958 bp, Zea Mays
cagaagcccaccagaacacctatataatgaggggtaggggcacagttaagtaaaccctaatttgcctctagtaaacaagcagccacccgcctctcaccctcaactagccaccatcgcaaacctagcaattcagtacgtggtgcttcctccctgtacgtgtggatacctcggaggtgctgcatctggaacactaggatgaaccacatgaggacatgaaggacattagcgattgcacgacgcttctcgacgcgttcgtctacatcgagacgtctaccgctgccctgtgtgtctagtggtaattccatgacctataactgcagtagttcttggtttatggggtcaaaaattttattttgcgctagtgtagcctacccataatccttcagtggtatcagagccaagttctgcgtagttttaggtctggatctaggttcatgagatggatctacttgttgcacggtttgattagatcaattggttataaaggggttgaagtagattgtctccgatatgaccgaagagatcagttcgtccttctctgttatgtgcacgacctgcccctaccgactggaatcaccatcggggctaactccatacacaactagcagattgacgtaacagatcaacgtcatgagtgcaatcttcttcgggtcaaaagtctcggatttgggttgatttgatcaatcgcataagatttttagtggaatttccatacatgcaatgcatggaattctatgaggttttcagggcgcttacctgagaccttcgggggcggctcccccctcgaccaccgtggctatttgttgtagtggcgaacatatagaaacgtgtttgtctaacttgttttttgtaggacatcttgtgatcggtatggctgttgtgtgtatatgatgcatattaatgaattattcatgacctgcgtgtcatgaccagggcaatacgattggagccatagtat

SEQ ID NO: 43062 - DNA, 394 bp, Zea Mays
acccagagacgaggggaccatcatgtccaggaccaagcaactcgcatgtggtgttggtaccagctaccaaagggacttcctcaccagttagtagcacaaacaagtagagagcgcgaagacctctaactatccccatgcatgctcccaacgcattttgtttgctgcgatataaataagcttggcgccgtgttagttgtctatctgcattcttattcatataggacgaagccatctttccgtattcttacaggactgagagaatgtaagcatttggtgtgccaacaatgggctgtcccattgaggggcacgtggcccggcatgcgttggcacggtctaaatccggcccgacacgacgacggccatgtctatgtcgtgcttgggcctccaggccggc

SEQ ID NO: 43063 - DNA, 663 bp, Zea Mays
gtgcccgtggcttttggcacgtacactacacgtcttcacccgctggatagtgtgaaatgtgatccgccagggttgactgacagacagacatgtcggacaattgtttttttaaacaatgtcggacaactgttggaggcagccgcggtcatggaacagaatgccaccggtttttgtcctacggctggccctgtcatcctgatcttgtgtgtttgatcttgttgtgtccttgcctgccaaattgctgtgctaaacctgcggcagagacaaccagtgtgccgcccctggccctggctatgcggattcttgggagccacggtatttgcacgattccctctgccctctttgcataccaaaaaatctagtactccagtagtagtacattgtgtgtcctgcacttgaccaatctcgctgcagcacttttaacgtgtactactactgattaacttttgatgagcgttacaacaaccatggcacaacctggtttgcgcacactactaccatggcccctctcgcccccagtccataccaaccagcccaatccaattcggcctgcaatggtggtgacacacaggggataggagaccaagacgatttgccttctggcccaacagcccaaaagttcacggcccgttagttcaacggtctccctcgcaacaaatctac

SEQ ID NO: 43064 - DNA, 465 bp, Zea Mays
aaatttaattataaatttgcagcttgcagtctgtcaaatgataatgcacaaagtcattacctgtagccgtattttgcattaaaaccataagtttgcccttgcttgatgtgaccttgaatgcagatgccattaacttgttggtagaggtactagttggcttcttcacttttggtgctagtttacgttgtttcacaacacgttgttcattcacatccatggatttctttttctttcctagactaacttgctgggcaatgtcaagctcatgctcatcactagcaacagaggcatgaacaacacaatcctctgccatctgttcattgctaccaacatcaccacccacaaatggagcttccaccatgtcatcatcatttgaaccatcctcaatctcagcgatccgattcccatccatggtgctaccaagtgccaatttcatttaaaaaattacacacaactatataaata

SEQ ID NO: 43065 - DNA, 575 bp, Zea Mays
atcaactagctatcatgttaggccaatagaagccagatcttagcaataaccatttcatctttggagccgattgatgagtaccacaaatcccctcatgtacttcggccatgcctaatatagcatcatttgggcccaagcatttaagcaggacatcgttgatagatcggcggtagaattcatcatccattaaaacatacttgaaagttgtacgtcgaacgttcctgtccgccttaacacatagatttcgtaggtagttaattatagacgtcctccaatcaattgcatcggttgcattatcaaccgaatcgatcaggagaaccttcctggcaacgtcggacggtccgaaccccatacccggacggtccgaacctgctgcggacggtccgacttggttgcccagatggtccgcgacctagggatctagcgtgacaccagttatcagattttcggcattgtgaaatttccctcgctttattcgatatcctgatgcgtcttgtgataaattgttagctctgcaaatctcaaccctggatatgtgtcgaatgttgaattcgtcaaaagaatggattatgtcc

SEQ ID NO: 43066 - DNA, 770 bp, Zea Mays
catgccggtatgatttggtccctcgcagtctgctaggcacggcagatcttaggggatcctcctcctcctcctcctcgtctcccaccccggcctgtgttaattaagtactgctaactccgtactacgcttcacgatcgaactaacttgagttgtataatcccagcgtagcagtgcgcgttgtgggcaagtggctacaaaagcagcagaaccttctgcaccaaaatcagctaggtcgccacgcaagcaaacacactaggcgatgctccgaacaagcttgcgctgcgctgtcccagtcccggcagctgtctcgcttgcatgcagagcgctgcaataattcggcaaggaacgacaaggctctgcgtgagacgcgagcgtgttattttaatccagtctcggtggcctggccatgtagtagctagctcctagctaggggagtgaggaagcaacttgcgaggcatcgcccatgccgatcgtcaggcaggcaaagggcaactcgctcctgcaactgctgtgtaccagttcatcctcagacatcgcccatgctgatcgtcaggcaggctgcacccaggggtaggaatgagtgcgatgatcactgcaaatgatgcggcgtgactgaaatcgaagcacatgaggccacacgccggggacggagcaagcgttgtttacggggacgacgacggctggtttgataattgcaggcactgattctgttctgctgcccactagtactaatcagctgtatatctatagtctgtgaatgcggctgtttg

SEQ ID NO: 43067 - DNA, 686 bp, Zea Mays
gtcttaagtcattgccgacttaagccgattgctctgttagtagggtatagtggtcaccctaagtcgagtaagcgcgagcatgttgcaccgtcttaagtcattgccgacttaagccgattgctccgttagtagggtatagtggtcaccctaagtcgagtaagcgcgagcatgttgcaccgtcttaagtcattaccgacttaagccgattgctccgttaatagggtatagtggtcaccctcaatcgagtaagcgcgagcatgttgcaccgtcttaagtcattgccgacttaagccgattgctccgttagtagggtatagtggtcaccctcggttgagtaagtgttctgatttcaagtttaatcaagtcaaagtcgatggataaccaatagtttgaatgctttcgagaatgaaatcttttattgatgatgtattttccaattacagaatacaacattgctccgatagttcttgctaagggtaaaacttcctgaggtgttctatattccacaaattccctacttccgtgccatccatttgagtaagccgatatgatcctggccgagtgacctccgacactatgaatggcccctcccatatcggtgataatttgtgccgtccttctcccgttagaattccgcgaaggaccaaatctcccactatgaaggatcgatgttgtatagtcttatc

SEQ ID NO: 43068 - DNA, 501 bp, Zea Mays
caagatggtatgggaaggggttgcaaagtgcctgctaccttcagatggctggccttgactctctggcaggtgtcgcattcagatatatacttagtaatttcccttttcattctggtccaccagtataaagatctgagatcatgatacatcttgttactaccggggtgcatggagaattttgaaaggtgaacttcatccaatatcttctttctgagctcagggttcttgggaacaaccaatctgtctccaaaccataggattcctttactgtcctgacggaagcatttgtatttgtccaccttttgtttgatcatttccttaatgacttgaacacccttgtctccaatctgtgccatgactatttgctcttgtaatgtgggctccactaaaatataacttaaagcaccggaggaaacgacctctattttcagcttgcacaactcatcacatagggtggtgacccttgcatccatattcatacaattgcactgggctttcctg

SEQ ID NO: 43069 - DNA, 1384 bp, Zea Mays
caagcgatccactaccacccatatagcatctctgccctgaggagaacgaggtaaacccaccacaaaatccatggtgatatgctcccatttccactccggaatttccaatggcttcagtaaacctgcaggtcgcttatgctcggccttcacgtgctgacatacttcacaggcggccacatacttagaaacgtcaaccttcatccgcttccaccagaagttttgcttcagatcttggtacatcttggtttcgacagggtgaatggtgtaaggcattttatgagcttctctcaatatatccatcttcacctctgatttctaaggcacacaaaggtgacccctgaaatgaaccaaatcattctcatcgatggagaactctcggggtttaccatcgccaaccctctttcgagcttcctgcaataaacgatcctgctgctgagccgcacacactctctccatgagggaagattgaataagcatacgggtctcctcactagcggtgccgacatagcacaaggcgatccccaaacggtccagatcagcaatcaactgcaaggccacttttgaaaccccggacctgctaagggcatcagccaccacatttgccttccctgggtgataatgaatagacaaatcataatctttaatcaattcgagccaccgatgctgcctcaaattcagctccttctgagtaaaaatatacttgagacttttatgatcggtgtaaatgtcacaagcctcgccataaagataatgcctccacgactttagagcaaaaaccactgcggccaattcaagatcatgagttgggtaattcccctcatgcttgctcaactgccttgagccataagcaatcactctgccttcctgcatcaacacacagccaagaccaatacgcgaagcatccgtataaactatgaaacgcttaccgctcttaggcaaagctaggataggggcgtccaccaacttgctctttaatgtctgataactgaccttgcaatcgctggaccagatgaagagaacacccttctccaagagtctagtcaagggcttagcaatgctggaaaaatttggtacgaaacgccgataatatccagcgagccccaagaaacttcgaatttcaaagacactagagggtctcttccactccaccacagccgcaacattcttgggatcaaccgcaatgccctgctgattaatcacatgccccatgaaagccacttcggacagccaaaatgcatatttcttcaacttgccatagaactgattctcccttagggcacccagaatgagacggagatgctgctcatgctcagcctcggtcttagaataaatcagaatgtcatccaagaacacgaccacaaagtcgtccaagaactcatgcaac

SEQ ID NO: 43070 - DNA, 337 bp, Zea Mays
acgtgatgcattaaacagatcatagtatcctcagttaaattatctggtacaacactctgttgtaaagatgaggaacataaatcacagtactgagaagtacattctggagaaaaagtatatacgtagtagctccattaatttctacccatatacagagcatccccatgctatataggtaaaaccacaacaagattgtccaaagttccaaaagcttattattatcatgtataaatggttgtttaagggtctttttagtttagtctcgagtctccaccagcttcgagcactggccttgggaggcattaggaaatttaacagttcacgaaacaggtgtccg

SEQ ID NO: 43071 - DNA, 768 bp, Zea Mays
gaaaatagtgggggagaaagaagaggagtgggggagaaagaagaggagtgggggagatagaggatgagcggcgtctgttttagtgacgacggcgaaacatgttttttggcgcccaatgtgtttggcaatgcggatgctaatgcgtttaaatatattagcactgggtatatattgaaaacacgtgaatagctcaatggtttgacctcgattcaagcgcccgcaaggagacattttttgtgttttgcctatcattttatattgattctttgtttttttatttttctctatgttttttgcaattatctattcatgcacacattagtttggtttatgatcatgttataatattttgaaataattttgacatagtggtactatacatctctcacttgcaatagcatctctcacttagtaattagccttatatgagagatgtatgtctttcttaggatgtgtgtcaccactttatccgaatgaattgaaactattttgtcaacattgtacaccaaaatgaatggtccatgcaagtttttagattcttctagctaggttatggtattgtaagaaatatctttataaaatgcatcaaataattacagtaattggtaaactaggtctgaaaaatgcataaatgcacacaacatcataggttggttcaataaacaccccattaaaatttaaaatgatttggagaaagtgtagtatagatccatcacaagcatgaacatctctcactcagtaactaggctctatgtgagagatgtatgc

SEQ ID NO: 43072 - DNA, 276 bp, Zea Mays
ttgggtttgtgtaccctgattatcgttactcgccgcgggggcaaaaaagaaagggtgcaattctgggaaggctactgcttcggctactccaagcgagtccgcaccgaagaggaaaaaattgaaggtccttactcaccgaccgcgctacattgaaccggccatagtgcctgaatttggtggtgagacttcttcagctattgaagccaaaggacttgctcttacgcagaggattgaagagccggctgcaatgccgaagattgacaaaattgaagaatc

SEQ ID NO: 43073 - DNA, 426 bp, Zea Mays
ccaaatcccactaaactacccactaaaatccattaaaacttggagggattgatcctttagagatcctcctccatttccaccatttcatttgcagtttcatcgcccagattctcagattgaggtaactctccatttttcattcttttgccccgatctatgtttttaggtattattttgtgaattcttttgaggagaaggctagttggtgcatacggaacacttgcttaaagaattttagccttttttaaacattttgttaagatagattgtgtggtgtgttcatgtccaggtgaactgttcatatgaacggttgaactgctcatgtcactcacaccttcttctttgcatatgttgtttcataccttgaacaaaccaatctcataccttgtttattcatctttttcaagatggttcatcgttgaaacc

SEQ ID NO: 43074 - DNA, 534 bp, Zea Mays
cctctgggtccgggagaatgatacaatgcaacagaaatagtgatgcgggtttagttgtttactgctgtgtttcatggtcgtggagatcacgtacgacggcgctgacaagccccatttctgtcgtcatcattaaataaaatgaccgtgctagctgtgcctggaaggtgcctctgagttttgttgtattattgatccggctggaattcaggctcatggttttttatttggccgcacaccttgatgttaattgactcagtatatgtggtgcatagatcctgcaatagtgggcttgcactaacccactcatcacacgaacagcggaacaggccatggatgccgaccatcgttgtgcagcattactactcttcagagccgttttctcaacactttatttattgtgcattcgttcatcatcctaataatcgaaaaaaaggtgttctacttgtgcattgaaaagtcttgaacacagcaactgggaatataatatgaagttgatgagcaatagtttgcagtttggtcaaaactcaagacttt

SEQ ID NO: 43075 - DNA, 1071 bp, Zea Mays
cgacgaattcgctgaaatgaattttagtgcacacattggactgtccgatatgcaccagacattcattgttcactgtccggtgtgtcgtcaataccttctcacccttataaatctaaacaagatccaatctactttaacacaattagtgaggggaaggcttatgttttttaccctcagcgtcgccgtcgcggcacaccgactcaagtagctgacctagaattttggcatgccataatattgcttcatccgacaacccgcagcagaggcacaaggctatgcaacgcagagtgcagttagaatgtcactgtaaacagctgataatagactctggtcaccgctgtgcatgaagttactgcaatctgaagctagaaaaaaaacacagagtctgcatacactggtactggtactgttatgtcagcgtagttcctcgcgccccttaatttccattgcagggttagcaagcaaagcgccatgtgttagtgtgtggtttgggaacatgtccttttgcaagctcttgttcttgtctcttgtctggactccctcgccatgtctgtcttggacatcaaggaaacgactttaagtaaaactacactaatctgctctcattgtacaacctggaacacacacgcacgcacagcggcacaaggaagagggtttctggttggcgacaggcgacaggacatgtatctgatgatctgatgtgcatggcttttaggttgctgccgggaaagtgacgcgccatcctactcggacgatcgaccggtcctactaggcttagcattactaactatagtcaatgaaccgggtactcctacacgaactaataaagtcctataggaggcataggtcgtcttagttattcattttctgacacaatatatgtatatgtaggtattttgtagtctctatcaaaccgcgacaaactcattaattcagttcatatgttttttcatttatgttcagttttcagtgcatggtatctccacatatgaatattgttgaatttaaattataatggctgaagtcactattacaaaaacttagaaagacgatatagtacgatctgatctt

SEQ ID NO: 43076 - DNA, 381 bp, Zea Mays
ctccaaacccccaaactttagaaaatcgccattaaataaccactaggtttcctggagtaaaacttggcatagaggcataatattgcacataaacagcagctgaaatgagccttagggaagaagccacttctacacaagggttgtagttcaaagtgccctctctgccccagaccttgtcatttttgtacaagttaaaccgcttctgctctacgtcccaaatttttagagaaacataattgggatagtaagaagccactataattttcgtagaatttttgggaacatctagagcagacgcatagttcaacccgcccttaaaaccttttaaattgagggaagcaaggattaagttaagtagcccacggttaaggaaaagagatc

SEQ ID NO: 43077 - DNA, 801 bp, Zea Mays
tcatttttaactaaactgtgataaataaaaaacggagagaataaaaaatagtgttttacatgaatatatgagtaaactgctggacctagtatgaggcagcaaaccaaacagccaaatctctcgtgtgttatcccctaccaaatgaatgaatgatatccttgggcacggtgaagtgtgaacgaccatttggccggggcgccgagcagctgtccaaagtgctggaggtggtgtccaacgacgtgaggagatgttagactgtctgcagcgggtgacccttcccctcccctcccctaccactgtacaccgtttaggggctacaatatcccccttctccccgcaacggcgcaccctacgggctcctctctgatgtgctccccttctctctcacgccagatgaaggggttcactgttcactccccctcgcctgcttatcgcggaagacgacgcccgcgccacactgaggaaagttcgtggtccacttctctccgtctcgaagcgtatgtggaagagggtgagatccgacgacgcggcggcggatctgccggtggaagggcgaatcggagcctgttctactcggccacgagcaggaccaagtcgagtttgtgagcaggcaatcccattcgcgtccgaagaagaagcacccacaaatccgactccgccaaagttcttcgtcaccgcaaccatcgttttcctctccgagcgtggacgccatcctcatatccagacttgctcccttcgatttgtcttggtgcggccaacatcttccgttcttgtggtgcgaccatgctcttctatctgctc

SEQ ID NO: 43078 - DNA, 616 bp, Zea Mays
ccagagataattaagcctaaagtcaggctgtcaggctgactaggtctgaaaatcagactgactggtggatgccctgaacttcaagcccaatttcaaaccagatgcagtggctttttggggcaacatcatatggaaatattgtagatggcatattgctctacaactttgctgcaaagcttggtatgagttatcatcagaaatcgagagaaaacttggcttcaaatttggctgtcaggttcatttaactgaactcctccatggtacagtgctatcgggaggatcagaccgtcagcgccaaaaagatctcgttgccggtggcccgtcgccgttgatcgatttcttgccgtgattcgtgcgctgtggccatggataagcacaacccagtaaagatctcggcatctgatccactcgagctcggttgcggctaggcatgccgtacttccccccagctcgtcggtcgctcggataaccctcaccgccgtcgtgctgtcgccgttgcgcaccacgtgccttagcgctggctttcgtcacggtgaatcatgcggtgcatgtccggtgatcaccggagcacctgccacggtaaaaggccactgtgtcatgcgccagagcccttttc

SEQ ID NO: 43079 - DNA, 393 bp, Zea Mays
gcaaacaagaacaacactaagcattgaagcgggaagagcaaagcaggagcagccaaggaagtttacctcgtgtgccatcttctcggaatcgagctgtgcatttggagaggagttcagggaacgagcaccgtccaggaaagcagaagtttgatttaagtcggcacggctctgtgaatacttttcttcaatgtcagagcaccgccaagccaaatctaataaagcagcagaaggagagcacaagattgagaataagctgagcaatgaaagcaaataaggaaactgtgggctcactaaccaatatttgacactttcaggtcatctatttgtttttggagcagcagagggttccactgcatcagagacgaagcttgatccgggacaggagcaccgcat

SEQ ID NO: 43080 - DNA, 605 bp, Zea Mays
atttttataaatgagtttgtccattagaatctaattcatgcctttgctatatttgttatcatattgatttgcttccaagtaatgattaactaaattcaatatgataaagtaaaatctccaatgattattaaaatgcttaaaaggtgctcactcatatttcttaaatgaaatgcactaatgttaaggattttacttcatgtctgtgtgacctatggatgatgaattgtgcttatttcctatctaaaagaaatcatccttcattatatactcccttgtgttactaacatctttcttgagtattttcaattactttgaaaggaaaaagaaacaactacaaagggaggactctcaaatgaaagaggaggacatcaagaacaacaccacctacttggatagtaagatctacaaagcaatcaatggtgtggttgtgagtattctaaatcctttcataatgagaatgctaggcttaagttgtttattgcaaattttatgagccttaatcaagatgtataatgcttctccatatttgtctttaaagtaaatgcatccattcaattcaaatacttgatgcatatctctagggggagcctctatctacatcttga

SEQ ID NO: 43081 - DNA, 1708 bp, Zea Mays
tcttcaacaactagtattactgctctcatatgaagaaatcatcacgggtagagaggatacaacaggtctctacaagatcttcatatttctatcacaaattatcatcactagtagtctagtggtcaagacatatgactcttctggcttcgaggaccaaggacatgttaatgtctaatttagcttcaagctctgtggtgatgtgggatttcatagttatttgtctactcttctcacttctggtagatcgtaggtagataatggtaagcatgccaaagggtagaattcagtgtagttcggttacataaaccccaggtatgtgtccattcaggaccgacctttaccatttagcttacagtgtataccaaacttgtgaaaggactatcccgagtcaattcagtgactataagtatttacaattccgagagatgtatgcgacatcacataagcatagaggtcttagatagaacgagtaaagtggttcgactggaacacactatggttttcacaccaacatagtgaaaattttctcagaataacctctcggtatactcgcaacttcgtgttgctggcgattacatgtccttttatctcatagtttgcttcatgtcatttagcgacaaagagagcaatgtgctaacatctagttgagcaatgtatggctgagatttatagtcttaaatcatttggtaaggccttttgcttactaatagaatcccaatttgtgatgttttctgtgccaaaaaggctttcatgcattgatattgaatttcttcaggctacttcgggtaaaactttatgcacgagaagagagcagagatttaacttatctatgtttcattgtatttcgatttaatttcccggatttccaagcactatagagcttgatatagttgttatggccacttgacgatatatataaatatttgatgccacacaacacaatcaaataaaatatagagctaaacaaaattatttacgaaggttgcattatgatgtgacttcaggggcttgaacaaaccaccacattctacgcgagtacaagctccagcgtatctggtgtcaattcgtgcgcggccatcagggctacgacaacacaatgagccctcgcaaaaagcgcaagaagcacaattttggctcggtagtcggggtacacgataagtccacgcaatgtgcgcaacaggcgcaattgtggctcgatgatcacggcagacggacagtgcctacagggcatgcgaaaaatatgtgactcggcaatggcggtttgactcaacgagagcgatctgattaagcgagagcgcgacatagcaatcacatgacgcagccaagttcgtacgacacaaataatgcgtcgtgttgccagggcgcagccagtgctcagccaatgacataactcagtcgattaataatgtagtctgatcgacgtgtctgagtacccactatacaatttaatcgctccatgtgagtccgaaggatcaacacataacaaatatttagagcgatatgaaaaaacgtcgcatgaccttcacatgcattttaataattatctactaaatatttgctacgagaaataaaagcagaaaaataaacaccaaaattattgcatgagcataacacgtcaggtgtaaaaaaacatttccatatttaaacatgtacttttctactaattatttactgctggaaataattaattaaagtggaatctgaaaca

SEQ ID NO: 43082 - DNA, 652 bp, Zea Mays
tggtctctttagcaattgttacaccacgaaggggtatccttgattatcagccatttgatcacaatctgaccgaccagattagatcggcctgatatgaaccggtacgcagtactagtcgcaggatccactatggacggacaagacttaaaacagggtgatcgattctcccacgtccgatccgcatcggatggctcaccacgcacacacaccgaagcggtgcgcgcaaacagatcttggccgccgagattcgatccgaaggccggaacgcatgactcatctagatctaattgtggcggttgattcctatccccacggctcagacctattcaagccgcaaaactaactgtggtcacaggttccaaatccaacggccaagctctattcttcttcctcagtccgagctgggtgacgccttgccccaaccgaggcggcccctgaccgagcacctgaccacagatgccccgatgaccactggtgcacggaacccaattgttgtgatggcccgagcactagcctaaccacagtcgtagacccaggaaacggagacagtgccaacacaggcggaaaagcactcaccgatgacaagccggcaaagacgccgaccacagctcgccgcgacccagcgatgaatctcggaaccaaggggaaaatc

SEQ ID NO: 43083 - DNA, 364 bp, Zea Mays
agaaaatgatgagtctcttgaagatgctctgataacagcttcgttgagcaatccgcacgtaactgctgtctggaccaaacccagctggcgagtggcgactgccgtcgattttcccgagaaccaaaccgtcttctttctcgtgtttggttcgcatcctcgacaaaatcaggtgcaattggtagtacgggaaagctatgaatatatggggccaacaagtcgtgaaatctgcaccggtcgtcgtcgtgttggaaagaaatcgcgagtctggcctccagcggccggtacctacatcgtccaaaaaaggaatctatttctaaatcttgtccaaatcaaactatattatctccaattcggaccataaaaa

SEQ ID NO: 43084 - DNA, 847 bp, Zea Mays
aaaattcacaatacatctatccttcaaaatgatactaacctaatacaaaaagtattttcacaggacatcaccatgtcaaagcatcttttcaaacagtatccttcgcaggtgcaacagaagaagagggacgacttgctgcatcaggcgcggccttaacatcagcaacaatatcgttaggcaccacaacgccgggtctcctcatcaggattcgtccagcacggatggctttatccatagctttgtcgtgctgggccttcagaacggtgcagttgtccttaagagttttaacagcaagctgggtcgcctctagctcctgcgcgacagtcttcttggaagcacgtagatccttgatggtagaatccttagtcgatagcaatcatccaagtcgcagaacttcatcttgagacgtctgcagctcaatgcggtgatgatctaggttagacatagtgaagcggtggctcctctccaggatggtcaaggagttgctggcatcacggtacaacctgtttagattgtcatgagaggcaacaagcgctcgtttctcctcctgcaaacagaaaacaacactcagcactaaggcaataataacatagcagggtcagccagggaagcttacctcaagtgccatcctttcagaatcaagttgggcattcagagaagagtttagagagcatgcactatccagaaaggcaaaagtctgagctaagtcggtctgactctgagaatacttttcctcaaagtcagaacatcattgagccatatctaacaatgcagctgaaaggaaatgtgtgattaaagataagttgatcaatcagagcggctaaagaaactataagctcactaacca

SEQ ID NO: 43085 - DNA, 730 bp, Zea Mays
taaaaatagagccctctatttattttgttcatcgatcacttggcataatcatgcattgacttcccaaatgatttttaaggagggttttggagacgttctgagtgtatgcatatatagagatagattcggtggaatttagcttttaaactgctacgtggtgcttgcaaaaaaaacaaaagaaaacaaaaatggcatgtcctggagctcaggtacatgaacttttacattcttctttgaaaaaacaaacacaacgtgaataagtgtctgatgtgaaaccagacgtactctaatacatgcaggattgtacgtaggacgtggtagaagtttggtcaataatatgctactagaacgagcagcagcaacccagattaaaggaaatacatatacgtgggtggtgcttgttcgtcactttagtaaaacagggtattttcgacggttaaagccatcagacataagttattttcgacggacggtcgtaggcttatgttcgacggtacccgtccctctgtcataaagggtcaaaaatactcttatttccgacggtggccattggacataagctatgtctgacgacacctttcggccatcggcgtttatcctcggtaacggcagttaacggtcgtccatcgcttatgtctggtggcctatattagccgacagcctatgttagccttcggacataatgaagtattatgtccgacggcttgtgttaagccatcagacataatga

SEQ ID NO: 43086 - DNA, 875 bp, Zea Mays
atggccaccagtgaaactaggaaaacttggagatcaaattgtgaggaattgagtgggtagctgagtaagatctttataacaaacttgtagctggttctttggatgaaaatattgatgcagacaagtgaccgagtttgttacatgaaaaatagagaatgaagctctccaaatcgcgctgtcagagtgtctgatgaagatcgccatggtacagtgaccataaagatctccggtgtcgtgagctcaacgccggtgatctgccaccacaattcgcgcccgcctgagagattcgtgtcgcgagaagagtagataacgtcagggcggggtgaaaatatctagtgtggggtgaatccggtcgctggcccggaccggccgtcgtgtcccgccgcggtcaatcgcgttggcatcaccggatttcaccattatctggccaggttacatgcctcaaagccttaccacgtcgcagtagaccaccttaggtagcttgttcatcgcctgagacactgccccggtaaaagccacgatagcgcttgcgcaaatgatttccctctctcggatcgccaacacacttccttcaaattgggcgccaccgctgatgaactctataaattgatgccccagtgagctccgctaagttattatgcacccagtgaaccaggccttgcctccaatcgttcaccatagcctctcaatttctcttttcccccaaatctgttttccgcgccgccgagagtctctcactgtggccagcccttctcaggttggttcatgcctctctgttagatgttctagcatctcttaggtctcctgttgcttgtagggtcggttgattgaactagaccgcgctgaattgccctgaacaccatagtttctcctta

SEQ ID NO: 43087 - DNA, 534 bp, Zea Mays
tttttacttccgttgcaacgcacggacacgaacctagtcaaaatttaagttaatagaaagatatggacaatttacttatattgtattttaatagaactagctcacgatcgatgttttgtgacgaacacgaccgatgtcatgagagaatccttcgatgacaccatcagctctaaagttggcaccgatttaggaatcaaggacgaatcaacatcatcttcaaaccaacacaacgtcacattcgggttttcgttaaatacaagcgttgcgacagtgcccacggctatatccctttctatctaatcttttctctatcattatgtctatctctatttgtatctctatctctatctaatattaaagggtgaagtgtttcttcccacttgttttccccattttacatcctaaattgccctcacgtccaacacatatactaccgtgctcatacaagttagaataactcatgttcattaaggaaacagtctaacttatggtgtagagagaaaataaagtgaattgtaagtttacatgaggtgc

SEQ ID NO: 43088 - DNA, 284 bp, Zea Mays
ttaatgagattgatctcttccttcttgagcttgggtgtcacccttcgggtttgggacaagaggtcaagatagatctgtaggcattagatgggtagagggtttagtgggtaactatatgctagatgggattagttatgtaacctgcttttgtaggtcaagttattgggtagggtcaggttgatctaagatctcaaacttgtttataggagcagggtctaatgtatttcctcagcattagctattcatgtttgagtgacttcacattaggtttgatcataatagat

SEQ ID NO: 43089 - DNA, 589 bp, Zea Mays
gctggtcctgctgcttaactggccgagttgctgttgttgggctgctgcatgctggccgaatggcctatgtcttgaactcttgatgtctgtcattctgtcaagtctaaatgtctagtgtagtgtggcgtgaactgtgggtctgtgcctctgtggcgtggttgcctggtgccttctgtctgtgttctgcgaatctgcctttgtggcctttgtgagtttgtgacctcagttgcttttgagtcatgctatatttgttcatgtcaaattggtgccttattggcttgctaattgctatgtttatgcactgccactgagcagacaacagtagagaatgtgttatatgagtatgtgccttatcccttatgcccttgttgcatattggcttgttatgtttgtgttcacggtttatgagtatgggctgctggttattattcggttagaacccgaaaaccgactcctaagttcgggtaaccgaattttcggttatcagatacccgaactgtatttcggttccgccttcttaaaacccgaatttttaataacccgaaaaaaccgacccgaattgtcgggtaaaaccgaatgcccagccctg

SEQ ID NO: 43090 - DNA, 314 bp, Zea Mays
gccgggtggaaatatcttctcaagcttacacagtaacacgggggccaatctttccaaggctgcaacaaatggtccgagataactcttttgcacaaagctgacggaagaaatagctcaactctgaaagcgctagccagacatgctcagggacatagcctcgaaccatcgcaggaagaatccattcaatccatatgtggaagtcatgactcttcatccctaagactcgcatagtagataagttcaccccctactcaggttagatgcatacccattagggaacatcaacatcttgatccactgaagtacttccttcc

SEQ ID NO: 43091 - DNA, 330 bp, Zea Mays
acgaccaaaaatacgtattctcacgcgtctcctctaagtaatgggatagttccagaaaactttcgtgtcatctttgcagctccaccccttactccgccgctactcccactccccattggcgtcatcccttctccacaccgcctccatgtggacagtctgatcgaacgaaccaacgccatcctcctcgccgtgtccttctcacccatcttctctatcgtttgcctagtctccggcgcacgcatatcagctgttgtggagcttttcgccccctccgctgacgaatctttcggttcgccgatccgcccctcactccgccgccgctcccactcc

SEQ ID NO: 43092 - DNA, 458 bp, Zea Mays
gtatgattgaactgccggacacagtttaagggtctggattggataatgttaattgacctgttgctagaaatatgttcttgttgtcacgtgtactggcagtctgaaagggtttagttgcaatgcgttggtatcatggtattattagtttgacaactgaagtagcaaattaggttttttttggaaggcagaagcatcaagcaccactgaaccaaccaaacaaaatgtgtatgaccaagatttgaggtttattgcttaaggattacaagcaccaacttctggcgagttctattaggaactatactatgtttgtttatgtatttgactaatcatcatggtacaattttaactgatgtttcagatacgttcatcagctccttgaatctgcctacccatgtagagctggtcacttactcgtgcccagtatattgttcatttttcacacgcttcttgcaagtcag

SEQ ID NO: 43093 - DNA, 289 bp, Zea Mays
cgagacgagacgaggttcagcaggctggtccatggtaccgtgggcggtgggccaaaccatacgcgtcttcactgcagccgggcattagcagcgccggatctggatggtttccgggtagaagctggtgaaatgtaaagatgaaattaagctggttaattctaccctgccggccccctggcgcgtggaaactgcagttctattgctgtggtgtggagtactggagttggtagatttttagctgtgcttgtgcacctacctcttggtcttgggtgaaatttttcagtccggg

SEQ ID NO: 43094 - DNA, 346 bp, Zea Mays
aatggatatagggtattacgctccagtgacctgaacctctctagaccctcgcgtgttcttgcgtgattgtgtgttcttccatctcagcaggcaaccttctcatcttaggtttagaacagatgcaatccatcatccgaccggagattttttctctcctacattatcgttgaacgcctcccatgcacgatccgacctttttgctcgatgccctgtaaacctcatttttgctttgtttcttcattatatttatgtttggattggtcctatcttgtgtctcggacttttgtacgttgttatagatctttaataagtattttaatatcttgcttgagttgttaatcatttt

SEQ ID NO: 43095 - DNA, 273 bp, Zea Mays
aggtgatgatgtagtctcgccaggtgactggactgacctagcaccgagcgacgaagtggacgctccgccaggcgagaaggcaaaaaggggatcacagacttatgtgcagtgcacctaatacgagccatctacaaaacatcataagcacaagagtgagagtagaactataagaccaaaaagtaaacagaaagaaaagtgagacaaaacttttgagataagtaaataacatagagttggtcaagatgaccaacttttgaaatgactctaaagatc

SEQ ID NO: 43096 - DNA, 870 bp, Zea Mays
ctctcgtttatttggacagctcccgttgagtcgaaccgccatcattgagtctgtctgccgtgatcattgagccacaattgcgcctgttgtgcacgttgcgctgacttatcgtgaaccccgattaccgagccataattgtgtctgttgcgcttattactaaggctcgttgtgttgtcgtagccctgatggccgcacacacgttgacgccagaacaatagagcttgtactcgcgtagattgtggtgggttgttcaagcccctaaagttacatcataacacaaccttcgtaaacaattttatttggctctatattttatttgattgtgttgtgtggcatcatatatttatatatatcgccaagtggccttaacaattatatcaagctctatagtgcttggaaatctgggaaattaaattgaaatacaatgaaacacagataagttaattctttgctctctcctcatgcataaagttttacccgaagtaacccgaagatatataatataatgcatgaaagccattttggcatagaagacatcacaaattgggattctattagtaagcaaaaggccttaccaaatgatttaaaactaaatctcagccatacattgctcaaccagatgttagcacattgctctctttgtcgctaaatgacatgaagcaaactatgagataaaaggacatgtaatggccagcaacacgaagttgcgagtataccgagaggttattctgagaattttttcactatgttggtgtgaaaaccatagtgtgttcctgtcgaaccactttactcgttctatctaggacctatatgcttgtgtcgcatacatctctcggaattgtaaatacttatagtcactgaattgactcg

SEQ ID NO: 43097 - DNA, 612 bp, Zea Mays
ttcagtaaaaagcagattaatcaaatagccaaggaggaaacagaggcactaaccagcatttgtcatctccaaatcagatactcgccgctgaagtagcatcagattccaatgcgtcagagacagcactctttctgggacagaggcaccctatgatctcagctgactagccatctcgccaaccaaagcctgatatcgaaaacaaatgagtgcaaagacaatattttgcctggagtatagccagatcgggaaaagccaaattacctgaagattggagaagaacgaaggaagccccaaatcatgagaagccagttggtgactcgacgaaggaatatcaaccgaggcaatctgaagagcatcatcagggatcaactcaacatcactagcaggaatcataactctagcatcaggtgcgccggtctctaagttgacttcttgatttgaagcacgtgctgctgccataccatcagaatgtggaggagaagacccaacatggacatccatggaggtatgagaaggggagcccgttcggacaccctcgggggctgggtcgcaacccgcactgcccattggagccggatcaccatcgacaacaccctcgggggctaggttgca

SEQ ID NO: 43098 - DNA, 351 bp, Zea Mays
gtacgattgaagagagatgtggctgcacatgtggctatgtgcgatgtgtgtcaaagagttaaggctaaacacgagaggccaactggactactgcacccactaaagatacctgagtgggagtgggaagagattggtaaggatttcattactggattgcctcgcacctcgaaaggatacgattctatatgggttattgtggatagactgaccaaagtggctcatttcattccggtcaagacaacttataaggtatctcaattggtagagtatatgtggtttggattatgtctctacacaatgtacctaagaagatcgtttcggatagaggatcacaatttacctccagatctt

SEQ ID NO: 43099 - DNA, 894 bp, Zea Mays
gttacatgtggctagtcagttcacacgatttcacaacaatcgctagaaccagcggcatggcaggttgaatgatgtatgcttaaactgtggcaaccccaaccacttcatcgctagtttcccaaagaagggcaagcaggaggttggccagcgcgaccaccactctggtcagagcaagggcaagtgggagtacacctttgtcaagtacaagtccaagggatgattcaactaggaggctctcaagatggagtacctctaataggaaaagatcaaggagtgtgccttcctcgctcgctcagcgacctcgaccatgactgcgacgatgcaacttcttccttaagcgatgagtagactaagaagcaggtcaacgacaagctgaatatgctatgcttcatcacaaacactgtagggggcctttgcaccatggcccttggtgatgatgtggtggttggcgatggccaggacatcgacaacaactttgagtatgaggtatcacatttcgctgatgatctccccactgagatagaagagctgacgactgttttggctagtcaggataagttgattaagcttgctgcttgaaagaggaaagattttaaatccaagtatgaaagtacacttagggaacttgagtcttctagagcttcagttgtggtgtcctatgagactcaatgtgataggtgtgcccttcacatgtcgaacattgccactttgcagaccaagtatgccaccttgctagaggagcacgatgggcttcaatctaggtctagcttgttgggtgtgtgtcagatttgtcctggcttgcagactaagctagtggagagaaatgctaggatagcctcacttgagaaggcgagcttagtgagtgcatctgcacctgtgtagtgtgcactttgt

SEQ ID NO: 43100 - DNA, 852 bp, Zea Mays
cgactatacattttaatatccaaaatcagcggtggtagtccaacatggagtactgatggatgagggttgttgttcttgactttgtgcctaggaggaaaagtaaatagatagtgtcaaacaatgcttgaggaattgccatgccaattttaatgcagatttaagtgttcaaattttatggattttactttgtccaacggtacacgaaataagaggattattgtgctgcatagctcatagtctctgaactatggcttcatagggcatttatgacataagctattgaagttatttataaaaacggtaaactaatatgcaatatttcaatagacttagatatattttttaatcgcagatccaacaaataagtataaagagaaagatgggcaagaggaagcacttggaagcgggcaccgtgatggtcgagttgcagaaacagtcgacgctcgctggtgtagttctcattcgcttggatgttaagaagtaggtgctcgtcgagaatggaggaggttgtatacaggaaaagcacaagcaactattcgtttccaaggacgaaagataagcgattcttttttacgagccaagaacgtttctagcgggtggatggacagtggacacgcggtaggttatagatttctgtaggagctgcttctgtagccagctagcacatatacttctttatcttttttgtaagttaccgttcggttactatcgtataactctttttccccaagctacatggacatcttcacaggccaagtttagacccgaagttcatatagcaaatattagttctagcctctggagctataccaaacacccaaaaaatttcttctataagatacaactttagag

SEQ ID NO: 43101 - DNA, 415 bp, Zea Mays
tggatatgtctactcaatgaaacataagtatgaatctttagaaaagttcaaagagtttaggaatgaagtggaaaatcggcgtggcaagaaaattaaagcactacgatctgatcgtggaggtgaatatttgagccatgagtttagcaatcatctaaagagttgtggaattgttccgcggcttactctgcctggaacgcctcagaggaatggagtgtctgaaggacgtaatcgaactttattggatatggttggatgaatgatgagtaagtcggacctacctttgtcgttttggggatacgctctagaaatagcaactttcacactaaattgggtatcatctaagttcgtagttaagacaccatatgagatgtggactgggaaaacccccagtttgtcttttttgaagatttggggt

SEQ ID NO: 43102 - DNA, 379 bp, Zea Mays
ttcctgcaggtgtacgttaccgtcatcacggcagcaggtggaaacaccgctatgatggcaacatactttcatgtggccttgtctagacctgcccggacctggctcatgaacctcaccccggggtcagtctactcctgggaagagctctgcgcacggttcgttgcgaacttcgtcaatgcttaccagcagcacgatgtggaggccgacctccatgcggtgaggcaggagcccggggagactctccggaagttcatctcccgcttcaccaaggtgcgaagtactatacctcgtatttctgatgcttccatcatcatagccttccgacagggagtacgtgatgagaagatgctggaaaaattggctacacatgacgtggaaa

SEQ ID NO: 43103 - DNA, 519 bp, Zea Mays
gccctcggattatcagctaaaccgaagtaggttcatttactattgtactaagtcgctgacacattgcagaaatgccctcaaaattctatttcttccccacgagtacccctggccacggcgtgcttgccgccgagcaccatgcgacttgttccagccatgattggcggtggctgtctaaaatggctacggaatggacattcccaacctaaggcgatccgagaacaaccttcaatttcgactggcacaccaagaaagtgttctatccacgctcatggaggaagcagggacgtcgagctcacgttcccagtcaatcatatcctaattgaccaattggctgctacgatgagcaccaagggtactcagagttactaaaacaatgcttgaatcaggcagtgccttaccagagcgggctagccacggtggagctgttcttcgcggtggcggcgacaaatttgggggaagtttgaaattccagagctcgggtgaacgattaagggtgggagcgggtgctaaggcttc

SEQ ID NO: 43104 - DNA, 576 bp, Zea Mays
tgctaaaagcacatttgtgcgctgaacctcgaaagtttcgaacaggggccaacagttctaacaaagtagcaaatcacatttaggagccatgcttcaaaagtaatgattagggatcgaaacattcgacaaaggtggcaaggccgccattacaacccgacttggacaagtttgggaccaaagttggctagattggcttcacacctcgtctaggctaggtttgagttagtgtgttgtgctttgtttttttatatgttgatatttatgaaaacaatgtagtgcatattcaccaccttataagcattgaagttgtccttttactatttgaaatgaaggaagtatagcaatgatggacttttcctcctggctcctgcgaaggttaggtgttaaagcgagaccctcgtaaaagtgtacaaccaagtcctctagctctaccgattgttgacattcccagattgaatttggaccatcacaagcattttcgaaagcctgcacaacctccaatgaatcatcttccaaaacaaataactatttcctaaactttaacatcgttgaaggcatcttcactggagtcttaag

SEQ ID NO: 43105 - DNA, 445 bp, Zea Mays
ttcagaaattacgaggcacaattgagacttcagtgagtttgcactaagagcagtttatgcttcagcgtagtaaaggactggaagatggctatgatacacaatacacatacataagttatattacaaataaactcaactaatttacaggtaggaccgtagaagctcatgcaaactgcctagggtctggacaacgacacaacaccaaggaactttatagaagtctttacaggctagcatcggcaggcaatttcaatattaatcactgataactcaaaagaatcagtgttttcctaacaattttagccgaccgtttaaaccaccagtctaaacaattttatcccgcttattaggccgttttttatttggccaaaatgtggcgggttgagccgtaactagggcaatgtatgccccgaaccctgttgtagccgcccttctccaaactcca

SEQ ID NO: 43106 - DNA, 482 bp, Zea Mays
ggaactttctgtccaggttcacaccagtgctttatgctagaatctagattcagattcgatgtttcgctgctggggctgtcccaaatggaacgcattaccaatgggttacattcggatctcgggactggagtctcaaataggtcaacatatatgtatgttcagaaactgtaagtatctgaacatctataggtaggtcctgctaaagtccaagaactgcctgtagctttcattattgtactccatgctttctatttatcttaatgcaaatctggtatactctattgttaacagccagctgaccatgatgccctcagcctaaggtacttgtagctgtttcaactctgttcttctaatctaaaaaaactagaccaacctaggaggaacaataggtacttgcgtttgtactgcaatatgcaaatcatacatgttattgtgtctccctaaaaaatataaacgacactgaatgcaataatccattgaat

SEQ ID NO: 43107 - DNA, 376 bp, Zea Mays
gccggcccctggtaaagccaagggagaacgagaaccctgcagctgcagccggccgatctgctggagtggcacacgtacggacgctaaaaaatggcgtagagctagatttcggccgcgcgctacgtgcaatgctgatctttttagagtcagcatttggagcctagattccaggctactaactatactataaatataaatagtgaattttatgtggcctatgaatggtcctctgaaaccagtctagcccatgctgcctgagcctgacggtggtatgggcttgaagaagagtgggtggcacaagtagtcctgcttttttgactcttcattttcagtgccgcaacatgatgcctgcgtctgcctacgcagaagaatggaa

SEQ ID NO: 43108 - DNA, 1299 bp, Zea Mays
tacccttatacataattgaacttcaaaactcaccctttctaagaaaatggtcataataaaatatcattagtaaaacaaaccttaataaaagtttggcaattggaaaaatattttctaacaaaaccaaagaatatgaactcgtgaatatacctttaaattaattacacactcgaactaatatgttatggaaataaatgtggtaagtaatccatgttgaaagcatttcctaaaataaaataatgataataaataaggcaactaaataggttaataaaactatcccacattatgttggggttccattagacttgaactcacatttggaataggtttgaattcaaagttgaatggaaaagagaataaaaaaataaaagaaaagaaaaactcacatgttgccttttgggccgaaatacggcctggtcggcccaatcagccacgctggtcacattcgctgacacgtatggcccactagccagtttcccccacctcacccgcacgcgctggcacacttgtgtgtttagtaactgccgtgtgggaccacgtgtcggtcgtcttcttcccaatccgaatcaacgcctacaaccgattgccaacaaatcccgccgatactcactccgtcgcatcggccgattcggcctcaacccgagcttctcggcaacagattttctcgctcactcggatatataaacaggcatcgtatgccctcgtcccataggctcggcgctcggccacggcaagaaatcaaagaacggggaggaagggaggacacagagagccatcgccgctgagaacgttgacgaccgcgccacctgagccatcgctctgcacctcggtcggcaccgatcgggcttcttcatcaagggatcttcaagctattggcatcgcgaccggttcgtacagggtgccagcatcggtgagaccctcttctaaagactcgatctctccatcaccaacaccgcgtttccctgactccctctcccggaaccataaatagccggccctggcgcctcctattgaatccagccattagcagccccaagttagccacgcaagaagaaagagagagagggaaagaaaaccatcactggtgttgcctcgatcgtgtggttctctgcggtgcggtctgggaggtcggccaaacaccgtgaataaatcgaagtgtgggctggggggttgaccttgaagccgctgccatcgttgttcgcctcgccttgctgtggtgcgttcggtggggatgctaccgtcgctgggttctggggggcatcgcgggggggggggggggattgccggacttcatga

SEQ ID NO: 43109 - DNA, 819 bp, Zea Mays
caggaaaaaagtcttcgataaaaatgaaaagttcgcaggaaagtggataagggagttgccctacatcgtttggagcctaagaactcaacctggtcgagctctgcatggaaatactcctttcttcatggtctatgggtcagaggcagtactacctgctgacctcaagtttggggcgccaaggttggtctttgaaagcatagcataagccgaggctactaggctggaggatgttgatgtactcgaagaagaacggttgaacacggtaattcaatcagcacggtaccagcaaactttgagacgttatcacgataagaccatgcgatgtcgatccttcgcagtgggagacctcgtcctccgccgaattctaacgggggagggacggcacaagttgtcacctctatgggaaggaccattcatagtagcagaggtcactcggccgggatcatatcgtctcactcaaatggacggcacggaaattgggaactcatggaacatagaacacctcaggaagttttacccctagctgtatttcaaaagttatcgggacgacaatgtactctgtaaactggaaatatatcatcaataaagagacctcaagaatactcaaattgttcatggtcgacctgcattcttacttgactcggggtgaccattatgccttgctaacggagcaatcggcttaagtcggcaatgacttaagacggtgcaacatgcttgcgcttacttaactcggggtgaccactatgccctgctaacggagcaatcggcttaagtcggcaacgacttaagacggtgcaacatgcttgcgcttacttaact

SEQ ID NO: 43110 - DNA, 694 bp, Zea Mays
aatcatttagcatcatttgccaggcagcctcgaactccatttcattcaatggatgatgtattatagattggaaccttgctttgaaatccatctcctcaaatcttgcatacaattcattcaagtggggcatatacctgttttgcacatgccacaaacacaatcgatgtattgtgtttgggaatactctgtctagtgcgattggcatagcagggtcttgatctgaaatagataaatttacataacattaggccagccaatatgatatcatatagtacgtgtcataataaatacgagccatttattatggcatacctgtcaacatcactcgtggtccgtcacatcccatgcatgttttgaacgtattgaagacccactcgaatgtatcaactgtctcgtctcctagtaaagcaaacccaaatattgtgcattgtaggtggtggttcgagccaacaaacatgcctaatggcttatcatacatattagtcttatgtgtagtatcaaaggtaactgcatcaccaaaatcaatgtactcggcttgctggctagcatgggaccaaaatatgcttaaaatcttcccttctttgtccagtagaaagtctgaaaaaattgtggattatctttcttgcataatgaaaaaaaagataatagcttcgacacatcatttgcatttctttccctttgccatgtttttttc

SEQ ID NO: 43111 - DNA, 314 bp, Zea Mays
cgaaggccgagtcattagatccccggtagaaatcttcgatcactgctgcttccgcaacctcggggatacgatttctcatggtctaaaaccttttgaggtatgaccggagagtctcatcccatcggcgcctaatggatttgaggtcccatggctgcaccggcttgtcggagagggattggaagttgacaataaaatgccgactgaagtcgctccaatcgtcgatacagtgttggggcaggtgtcgtagccattgcagcgcatcttgcccaaggacgatgggcaagtacacagtcatcacatcttcagttgcccca

SEQ ID NO: 43112 - DNA, 627 bp, Zea Mays
gtgatatagtgactcagtctctgattcaatgcctgaatgtttgtatctacccggcgatactctaaaatttcgatgctttgatgacttagcatattaggtttgtcactcagtttgtctcactatctcagtttcctatgtgtttcagtttcctatctgttttagtagcagtctcactcaattttatccttagattcctatgtgttttagtctcagttttacttatattcattctgcatgttcggtgacaaagtgacaattttaatatatgatgagcatacttcagttttcgattacaattctgtttcagttttaatttcctatgttggtagaagtgttcttgaatctgttggtagcagtgtttgacctctgcatggattttatttgtgaaggatacaataactaggaaagcatcctactgcaagcacagcagcaggtgtatatgctgttacaagctagcacttttaaaatgattttagaagaataaagcgatatattttatgtaatggcaatgcttgtattttggtttatattctgacttcaatccttttggcaaagcactgtatgagatgctacattccatacaaacaacaacgtccaatctaacgtgcaaatcctagatggtttcag

SEQ ID NO: 43113 - DNA, 848 bp, Zea Mays
cacgaaggtagcggtctgaaaaagcgcattgttagcccaaaccataaccaaaacgtgggaattccataccatagcagccctcaccgagcgaagacgcacaacagtctcctttatgaccccttcgctgatctcagaaacatcaaccttatcacgatgcagctgccagcataggggcacccgaaggcccagcgacatcgaatgccattcctacaaatcacacatctatactacttattaaggctgcaatagtagtctacctctgacatgttctgccatcagctgtgttctgccactgaaccgtggtacacgtcttcttctaagacatgtgggtcccaccgaccgtacgctgaacccagtcccaccaaccgtacgtcgaacccagtcccgcgcaacaaaataaacagtacttacataggttcataagccacgtttcatctctcagtgagcaacatatgatacacagctgcgcttataagccatgttccgtcactctcaatggccggtgtggcactaatcagacaaatggcatactagcgtgcctgtgtcagcggttcatgcgacctagtgttttacatgtggaccagaggcccattgtgtggcctagcgacgcctagcatgtggcccaacgtgtggcctcttcaacaagagcatatgacctaaccaccgccaccccactgctcgcgcagcctcctccaccgcgctccaactccggcggcctcccctctctctcctccactccaccatcggactccacctcctcccccaccgcaccgtcggagtccacctccccaatggcggcctccactaacccactgccatcctccaactcctcccccaccggctgcctt

SEQ ID NO: 43114 - DNA, 408 bp, Zea Mays
gtcgcctccacggacatcccgcggaggtaggcgacgatggctgcctgaaggatgaagcaggacaccacaggtagaggctgggggctaagcccctccagcagctgcacgaagaaagatgggatcggcagagccaacccgctggggagtttggaaacaaagaacacaaactctttgacagcaaggtcgccgagaggagagacaccagcacaagtcctcccggcaaatgccagcacaccccatccgagcgggttgcgcgccaagttgagtgccacctcgggctggaagcgctcgcaagggtctagcaaggccatggtgactacggcaacgcgaagcagagaccttgaaggaaaaggggcacggagagctcggaggcgaagggacgccgtgagagggagagaagcaaggcat

SEQ ID NO: 43115 - DNA, 835 bp, Zea Mays
caacccagatgcgtcctttgtacttcaggagtccatctaccagagtgaaatgaggcacaacactaggagcctcggtgtcttgactataactgctctggacatccgacaaccactgaggaaccaccactgaaacagcgtgacattcaggatccatacggcgagacagagcattagcaacacgatttttggtacctgggcggtattgaatccggtattgtaatcccagcaatttggtgaacaccttatgctgtcaaggtgtatgaagacgttgttcattcaactgtgtgaggcttttatggttggtcaggataacaaattcatggtgctgtaaataggatctccattgctagacaaccaagataacaataaggtattctttttcataggttgacactccacacgatttaggggccaaggctttactaagaaatgcgaggggatggcctttctgcaagagtacgacgcccacaccaaaaacactagcatcagtttcaatgaaaaaggtgggagtaaaatctggcagcgctaacactggtgcctgagaaagtgcattttgcaacgtacggaatgcgataacatggtcactggtccaaacaaatagagccgctttttcaggagcgctttgagtggctggcagattactccaaaatgcatgataatttgcgataataacctgctaggcccaaaaaactacgtaactctttgagaaaggagggctctggccaagttgcaatacctagattttctttgggtcggtgcatactccttgagcactaaccacatgccccaaataagacacttgctgttgggcaaacttgcacttggagagtttgac

SEQ ID NO: 43116 - DNA, 835 bp, Zea Mays
gcgagacggggttatgtgcgtgatgagtttagtaaaaatccatcagtgtcactggtgttaagttaaggtttatttgcgcgtataaagtaataatgtgtttaatacttagaactcttagtcgatagtagaaattgttttggtttatatagaaaggtggtgacatgccaagtagtcatcgtttttctctatatttataagtcgagtcgtgacgatgcgtattatgcgttcgttaaattatgcttgtgcatatagtgtatggttgtgctcacgatttcgagtagatacttcaagtaagtcaagtaggtttgtgatacaagtgtgtaatggagttagttgttttaggataattattgaaatactcggctcatatgataaacatgtatgcgttcatgattggggaagtaaatgcatggtgtttacgaattgtagactggtggtttacgattcgtatgatttggtcggtgtgcgaagatacttgtatatatgtatgtttatgaaaatgttgtagtgtatgttgtgtctcggattgcgacgataataggcaagccaacgtgtatgttaattagcggctatgtcattgctctagttagcaaattgtttgatggtttggttaagctcgtaatcacgatgaattgcttgttgtggtctaaatgtgtatggttatggtcgcgggtaaaaatttgtagtgttcatgtgatgtctaagtgaaaatgcaaattagtgtctgaagggcgcaatcgatatacacatttataccgggtttgattattgtggtgaatacgttgttgatggtgtatggtaattctagcgcacaaaataacttgtataaaattag

SEQ ID NO: 43117 - DNA, 1015 bp, Zea Mays
cctacataggcaccttttacaccaacttcgtcgaggatgtcggcgcgtgcatcatcctgcttatctacgatgagccccaagaccgcctcctcgaggtgcacgtccttcgcacgctcacatccactggtttctatcttctcctcttttcccgggtcacatcttggactcctggataggcaatgcgtcatcgagttcttgcaggagggacattagcttcttcaatgtgttcgcaggtacgacgtacatattcatacgtatttcatgcttccatatgcattcacgattttgtgaattgggttctgggcagacagctcttgtccaccatagtgttggtccattctcactgttatcgcagccctgatggtgctcttggcccacaatataggatctgggaaagtttgttttcattcctgagaagctcattattatgtaatcttttcacggtgggcacaactataacaggtagatagaaatatagagtgctatcttttcagataaaaggcaattgtattcatcatgtaaactgttagttgagcttttggtttatgttttaactgaaccaattctatttttaggaatggactgaagatttactgcccatcggggttgcctcccttttctggagaccaggatgaacagatagagacattcagtaatttcagaaattgaagtgcagagtggcaacgactaaaggtgatgcaagcaaagcaagcaacaagtccaggcaacatgaagataagacaaacccccacgtagatgtgttgtgagagagcgttaggtggaggtaattggatgtacatgtgcccctgttgcaagattcattctattcataggtatacactgttttttggaaccatactgatacttttttgttgtcctatgggaaatggtcagaagaagctatagttcatgaactatatttttatagaccattaggaaaatgctacattttttattttgtgttttcagtaggaaggtgaatgaaaaaatagggtttgattctgttagatatcag

SEQ ID NO: 43118 - DNA, 292 bp, Zea Mays
ccccttctgtagtccattgttacctctttaactgcctggtaggctggtaccactagcttgagaatctatgggttgatggttgggctgcaatggagacaaaagcaattttctgcaacctgcaaaatggtgaactagattttccaggcgaaaacacatgaaatcaataggtgctgtgtggtcttctcttcttcatcagaaggggcaagcagctgggtgggaagtcctcttttagtgatccggtccgcatttcaagaacggttctttactgcaagccaaatggagagcttgcagc

SEQ ID NO: 43119 - DNA, 477 bp, Zea Mays
ctctgcaatatttaaaagaaaagtaaattcgaaatggaaaagaaatacagatttgcgctgaagtccctgggttttctcccccttttctctcacaaaacaaccctcggtctactatttgcatgagtcactgaccttgcacaaaaccccctggacttaacctaaatcaatcccacgatccctggctggctaaaacagtaactggggcaaagatcacggtggcgaggcttatcggcggcagtagagcttcggtggggtggtcagcgacgttggggacgtcacggcggtcacgtcggtgtgcgggtcgacgtctgaggtggctggagaagctctggccacgagcgcaggcggcggaggtcgtcagcggctcctgctccggccaaaccacggcgggtggggttcaattaaagtgcacgaggagctccactgggtgatgtagaggccatgtgcgcaaggaattgagaaatggtgcagtgggtt

SEQ ID NO: 43120 - DNA, 669 bp, Zea Mays
aaaaatctaatttctaattcatttaatcactttaaaacagcactggactgggccttcatttctgagaacagcaggggcccaagcgcaaaagatcctaagactcagaacactatgcagtaggacggcgggtttatttcaatgaaaccgaggggctcttaagtaaaatggacccgcgaaggggtatggttgtatctgggccgttagatctaaagagtgcggtccagattatatcgatcgacgatgattcccctataaccccgagccgtccgattgagtttcgatgatccggattcaaaatctcctaacacggatctgaatcggatactgttaatccaatggttctgattttcccctagacttggtgcgatcagggccgtagatccgtgcatctaccgtccacgagtcctctcccctatgcgcccacctcgaatcaccccgagacggcgctccgccacggcggaggacatctccggtgactctgcccaaacggcgacacactgccctgtactggaatcggctggagctatactaccaaggggagacgacaaatacgcagaggttagccataccagcgataatggcgcgcagacgtggggccgtggaggtgtgttgccgcgtgatgcgccccagctccggcgagcaatcggcggttgcacgataatcgactcc

SEQ ID NO: 43121 - DNA, 538 bp, Zea Mays
cggactcgctaaatttcttgattttggggacgtgtttgatcgaaatgagcgcctgcaaccgccagtgattccgtgccatttctctcttttatcgatccaggtcataattccagaccgctggcgtcgtcgggtacttaggttccgacatgttcattcatgaagcgtgttttggctttctgattttttggtgttattcaattgcaaatacgtgggcttcggatctcgtataatttcttatcaaacatgttggattactcgtggagtgtttctcacttgtgtgaaaccgtgtgagctatttgaacaattcgatccggtcagcaaagggaaaacttttttttaaaaaaatatctgtgtggggggatcgatttgttcctagcatcctgtggacttaaatcagttgaactttggagtccttgtttagcttgtcaccgtcaattaattctacttcatttctggccgcatgcaaaatctgcctaactaatcgtaaacatttctggtggcatgcaaaatccgcactgatcccaatcactggattgta

SEQ ID NO: 43122 - DNA, 929 bp, Zea Mays
cacggagttcatccaataattcatcgaccactgggattggaaatttgtcttttactgttttgtcattaagggcgcgataatccacacaaaacctccaggaaccatcagactttttcacaagaagcaccggggatgaaaaagaggaggtgcattctctaatgataccttgttgtaacatagcgtcacactgctgctctatttcttccttcaacaattgagggtaccgatatggtcatactgccacaggtggagtaccgggcagtaatctgatcttgtggtcatggcggcgagatggagggaggccgtgaggttccctgaaaatatcctcaaaggaatggagcaaagcctccatgagatcacctcctgatgctaaagctgcacactgtggtggcagagcaccaattccagtccactgaatgttactgcctcgatataagaatgacatggagagggcctcaaaattccacaaaattggtccgagagtgcgaagccaatggacacctaatacaatgtcaaatccatcccatggtagggtatagaaggatgtcgagaaatcagcttctccaataaccagaggcaattgagtgcacacacccgcagtagttacccgatctccgttggccaccttcaccgtcaaacctggacgaggttcaacttgaagctgcagctggctggccacagaatcattgatgaaggaatttgtcgaaccagtgtccacgagggccactaactgacggccatacaaacaaacagaaagtttcatggtagtgccaatatcaataccggtgagagcatggagagagatgccaacatcatccaatgtttcaccaccctcatcgtcttctgttaattccagcaagaaaacccctttgtttgcacatatgtgatcggaagtatacttttcagtacaatggtagcactcaccgcta

SEQ ID NO: 43123 - DNA, 587 bp, Zea Mays
tgcttatctaacttttataaactttgattacctagaattattcctaacctcaatcctgaagaaacgaacacacccttgttctactctccagatttcaacttgttgcaatagttagcacggtctgcgagactggttttactaacggttagcgcgcagtgtggacaaaagcgtactccaagaaggatgtggggtttctgatcgatcgacgatattctgttagcgacggaggtggtgggtagcgcatgcaacaggcaggaccagcggcaacagcaagggaaaggtatgtgtgcagcgaagatcctcgaagaggaaaagaggcaagcaggtgagtccaaggcggccccggcgagacaacgagaacaacatctatactatatccccctggactatatgtacgtgcgtacatttaattaccatccatatgagtgtggtcacacgcacaccactgatgcgttggctgctgccccaggcacacatgcgtgtcatgtagcctgacgcgcctgccatgtttgaataatgcagcagcggcatgccgatgtatatgtaataactttctgacgtcccctagttaatatattagctcatcg

SEQ ID NO: 43124 - DNA, 1894 bp, Zea Mays
gtgatttatggttggccttatcctctttcaccaacaatgaatccatcatcatattgatgcatttaacttgattggggtctctcacattcctttcatcaaccctatccatcatataggtatttctcttctttgtttgtacttaggtgttggtaaatattctcataggcatgaccctctcactcacaacatgttttgcagccttctttaccatcttaaacttctctacatagttcatattatgtcatggcacaaccacctatattgttctttcttcttcatcctagttcctataacaagtatctttaggtttgcatcctcttgttttagtcacttcaaacacctttgaagataccttcaaatatatgttgccatattcacatgcatgttatttgcatcttctcccaaaatccttctttgataacattattattgaagtcctctaaggcctcctatttgagtttccactactttgtcctcgcaactgtggtttgtccgtccatataagcatgtaactaaaagctctctagacatcaccttattacaatataggcacgctcgtgtgtcatctctttttggaaggatgaaatcaacctaacaatagtattttacactactaaaggtcatcagatgggcatatatttgtttaaagtaaatgttagttatcatcatatcataaactattaaaaagttcaagactctccctccgtcctaatttctaccaccatacccaaacaccccatgtgccacctcaaaccctatatttgtagcaccacatgaccattaagatctactcatatgaaaagtttcttgctaataggtacaccactactcatatcgtcatctaattcttcgtagaaatgccactttgcactctcatgtgtcctagataaggggcatattccttaattgcgttcaagactgaatcaccaacgcagtaggattacttatgtactaacaataaatacaatggggagaattatctcaattgaatgctaacaggatagtgtgtgaaaaataaaaggtcccattctcgtgagaaagaaaataacgagtttctatcgatcttacttatgctttaatcgattgaaaacacaattaatttcttcttttcattcatcatgtaatgtggagaattacatctatatctaaaacttttggatatagataatttctatttttattttttaagacaagacacttcaatgcacacattttgctagaaaattggtacaaagtacaaattttagtgaaataaaggttttccttgcaaaacgctatatgatgccaaaaacctatgaataggtttatgtatccaatgcatgaaaatcatgatgcaaataaagtttcaagttctgaaaacaaaaggtacaagaataatacctagtgaacaatgaacaagaattgatcattaagtatttgcattacatagtattctagatagtgtttatggcggtgtagaaacatggtgaagaaaaaattgcaacaactatatctagctataatgacaattgagaactatttgttttcattttaatattaataaatagtataaaatgacatatgtataacaaataagtaacaacaaaaaatgtacgtttaggttagggcatttacgtgcatttgcatagttgcatggctgccaagatatttcttaggaaacaaaagattggttccgaatcagtggcggaactctcattatggttcagtatagcataagccatacctaaaaaacatgtatggtgtagtggtcattgcatatcacttaaatttaagataagattatgataagataaggtttaagatttattaagaggtctcaagttcaagtcttgcatgtgtagtaattttcttttttttttctttttcagccatacctcatttatacgttgtcctc

SEQ ID NO: 43125 - DNA, 511 bp, Zea Mays
tactatattggctcatgatccgaagagagataaaatatgcaggataaatataaagattatgtgaagaagatggtttcctggctcaccactagcatcaggaaagcctgacagggaggtcggcatgtcgcgcggctaggttgtctccatcaattggcgtcttgttgataatgccattgacagcggtggtggctccatcaaacgacgtcggtttgctgacggcgacgacagggatgaatcttccaacaaccggcgacgagttgttggcgccatggatgtcgatcgtctggtggattccaaacaaaactgaggtggtggattccaaacagaacttaggtggtggacttatgactaatggggtggcggcggcgtggctgaggccaaaggggatgtgcggcagtacgactgtggatagggattggggagtgcgaccgaccgtgggctgttcaccttgctaggaccgcataagacgttgaacaatttgggccaagctgggccggagcacgcatggctg

SEQ ID NO: 43126 - DNA, 1511 bp, Zea Mays
aatgttcccaaaaatgaacttgaatcacctttatacccctaaggtaccacaaaccctaattggaaccctggaaaaccctaaaactaaaacctaggggcttatgtgcaaaattgatgcacatttggactaaagtgcaaaaaccaagttaataaagtatcttaagtcacttggttcactaaggtgtgaatttggaagccaaaccctaagttttggactcgtttgcaaaaaggaccccaattgtgattcctatgctaagtctgaaatcagggttataggctcaactttagagctgtgtagctttcaaaatagtgaaaattcacattaggtcaccacatcaaaattatagcccaatcataggagaacaactttgcttaagaatgtaagcctagttgttaagaagaatttagagataattaagctcaaagtcgggctgtcagtcaatccctggactgaattttcagtaacagtgtgatgggatgaactttgagctcgattttgaatgggattcagtgactatttgatggtaagcattgtggcaaagttgaagattaactatagctctacaactttggtacagaggtttgatgaagttcacatgcaaattttagagaaaatgtgacctaaacatgatctgttaggtgctctgatgaggtctcgccttggtacagtagaccaaagtggatcaggttgccagcgcggcttgctcgtcgacggcgacctccctgcgcgaaggttcacgccgccgccgtgattcgtgttcactggcggttggatagctacggcaaagaaaagatctcatggcgaggaagggataggatcgcgtcgtggatattttcgggttgtcgtggcctcgcggtatcccgaccacgtgcatcgacaacgtggccgtgcggccgtcgccgtagtttgcatcctccatcgtgattgtgccacgcttccggtcagtgaccacgtcgccgtgaactatgatcattacccagtgactgtcgtggcttctcatcccgtgaactgccacgaatcatcccgccggtgactcgcttcttctctgaccgccaccgcattcaaccccaaattcccggccaccgctcacttgatctataaattgagcgcgtcctcaactccgtcaagtattcacacagctactgcacccgcctgcatcccaaaccccccaccagagaactcgaattttggatttcccccaatctgctcatgaacactgcgcagtttagcctccccgcggccagcgcgattcaggtcagttcaagtctctccgtcgcttgttctagcgtccctaagctctcctcaagctcctcgacctctttaattgaactggaccgccatgaatcaccggaaacgcgagaaaatgtcctcgcagctcgctgtcaccgtggccagaaacatttggttagccgttcctgaaattaacttaggggaaacattcactaggtcctgaatctggtttaggccgaagaaggacgccgttcctcgcgtgaatcggccggtacgcgggc

SEQ ID NO: 43127 - DNA, 589 bp, Zea Mays
gcatcgtacgccgcctcgtggtcgccactatggtcgtgtacagcaacgccgatcacagagcgctgcacgtgtgcgtcgccaatgaggcctaagaatgccccgtcgccctagtccatttatcctcgtcccactccctcgccctgtaggtcgatgttgttgtgtgcacggcaaacgaacgcaatgggaaggctggccggggcatgcaaatcacgaggcacaggctaggcggattcgttgtccattgtccccaccaccgattcattgtctccttttcccctccctcctcctcacgcctccctcttgcctagacaccgccacctcagtccacactcgaccaccatcattgctccgtgctaggacgctccgtcggaggacaagaacaacctgctggtagtgaggttgtcacccccacctagagcatcaacaggtcgctcgccctctcctccctgcaccactgccgagcccgccctgtgacatgttgcgtcgacatctctaaggaggtatgcatgtcatgccgcgttgaccctccgcactgctgactgctcgctcgcccgtgtaggcgtggggttcgacggtttgtctgaccgac

SEQ ID NO: 43128 - DNA, 485 bp, Zea Mays
ggctgaagggcaaaagaaatgaagaatagtcaacgtgatgcaagccattgagcgaacaccgccttcagcctcagcgggcaaaatggtgactgctgcaagtgccgaagccgaagttgccgccgaagctacaaaactcgcaaccacaatgtcaggaattgacaagcttatatcagatatggttgcagaagagacagctgtggctatggagaagcatggccgcggtacctgctaaagggaaaacaagttgttgatacttgttcgggagagaaggattttgaccttcggcacctgggtggccagtaactgtccgaggcagacaaggaggagctgaaagaatatggaatatcttgcggctatcagccgggatctatgctcttcggcggggttgacgaagaaattttgtgatgtattcacgaccacgccagggtgaaaataatcggcactttgtctaagagtgttggtttctcgaagctggagtctgacat

SEQ ID NO: 43129 - DNA, 729 bp, Zea Mays
gatgctttcagcaacattgcgctcttggtgcatcaaatctatgttgtgtggtaaaatcaataccttcgcatacggaagttcccagataaaagaaatatgagtccagttgtgatcttgaccatagccttcaaacttatgaccttctacagccctttgaagggcacgatgttgtatcaggatatcttcacccattaaacgttttggtggacccatctttaacttttatgcctcttctaaatgacttcgtatcatttcgaaacgggtgattggatggaagaaaccgtcaatgacaatcaaagaatgagacctttttaccatgctccagtcgatatgcttgtgtgtcccccatgcatatgggacaacacagtcgaccgtggacacaccagccagaccaaataccatatgcaggcaaatcatgaatcgaccacaaatatacaacacgtaaggtaaattcacgttttagatgaccatcataagcctttacccctacccatagctctttgaactcttcaatcaacggttgcatgaatacattgatcttctttccaggatgtttaggccctggaataataagggcaagaaatatgaacccttctttcatgcatttgttgggagggggttgtagggcatgatgaaaaccggccaacaagagtatgaagttgaactgttgttgtaaggagtgaaaccatcagtggacaagcctagacgaacactcctagcatctcttgc

SEQ ID NO: 43130 - DNA, 548 bp, Zea Mays
tgaaataaaccttaaatagttgaatatttgttccattgtacgtcattgatgggtgacgacagattagtcccattaagcgtgtgcggacctgtttcaacttctggtttgctagtgtggttagttctcttgtctagttgattccctaatgtggttgattcctgagtgaactaattcttttggaccttttggtccaggtgatggaatgtaggtccacgtccatcaccctatgtgatatgtagcatataggtatatacgtgggcgttattcatcaaccaagaccgagccaatccaccgaaccaccatgtacgccagcccacccaactgatcccagcgcaccactcgctccccgctcatgtgcctcgctcgaggcccctcccatcagcaattcctctaatcggctgtcgttgaagccaccaccgcgagctgtctacaatttaacaactatgctccgatttggcctaacccatcgctacaccatctacaatttaacaattcctcattattgcacctccactcatttgtcatagcagttgcctctagtcctcgac

SEQ ID NO: 43131 - DNA, 542 bp, Zea Mays
gcttcctccactcagacgcagaggaagatgtctgaacctcgtgtcatgcagctgctaccagtaggtgtggctgagagaccacagggtccgtctggaagcatcactgaccgaagtagtgtaggtggatagcgatgtcagggactcatgagctgacagagtcatgaatcccctatcctctatcccctgcatccatcaccctaacgtggatgcgagtgatgtagtagcaagcccggggaggctcactcactcgccttgtttcgtacagggggcggacgtaggttcctaatgcgtgcagcacatcttgcaacaggttggggaagtgccccgtctcgaacattgatgtgtaatgtttggtgacatgaccaaaccccatgaagtagtcctgctgggcatagttggcctcctcattgacttgttcctcttcgtcctcctcgtcgtcgtcatcctcatcatagtcatccctagagtcgtctgggtcatcgcctccgggtgcaggagcttgaacagctggtgcaggcggtgccgaggttgatgacctagat

SEQ ID NO: 43132 - DNA, 509 bp, Zea Mays
aggggaagtccccaagtccctagagatgattgaggcaagtgccaatatctaagacagagtgggggagcgcgtattcgtctacgtgcatcgatgagtggacgatgatgtctttgatcttgatccttcatccatggagggacccttgctctatttatacaccaagggtagcgcccttagtgaagccaggtcttgtattcgtctatgtggtgcctgctgacttcccgtagagagccaaggccgagaccgagggttcgtccgtacatccgagccctcgagggggaggctgcccatgccgtagtggttgtaatagcgtcagggtatgggtcaaaggctgcttatggggtgcgtcatcgccgtggcgtgtgatgacgtcgagattccctgcagcactcatcgagatcaaagcccctgcttggttgatatacattagtcaagccacagagtagacgagtagcactcatcgagatcaacagttaaatcgctaagtactgaggacgattccataaggg

SEQ ID NO: 43133 - DNA, 439 bp, Zea Mays
tagggtgcacttggagctggaggatgcccatgccaggattgcagccctggaagccctacttcaaggacgggatctgcctgaagcccaggtcctcgccatggcgttgttccctccccgcaagaggattcgctatggggaacctggatccatcaccaggctactctaaaaattttaagttatgttgtaataagatagtcttcgcgtcagaccatgtgatggtgttggttgctatgtttgagttggatttttgtttgaatgcaatggtcttatggaatgctggccataagagcatataaaaaacataaacttaagctattcccctctagaatctttattactcctcactcctctaaagaagttcactttctaaccaatcagatggtgaacgctcgttcaggacccaacaacaacaggaaccagtgtggtcaacatataccac

SEQ ID NO: 43134 - DNA, 406 bp, Zea Mays
cgggcggcgtggagctccggtgccatcattaatttctttacgccacatcgacccctggtctccgtagcctaggtcttggtgtggctcgtcgttttgcgggtcctatagatggcttgcgcactcaagcttttgctcgtaggtcatgagtacgtcgcaggccgagggcctcgtaggtcatgagtgggaggtggactgactctcctactatggctcagtgccagacgtagttaatacagccagtcattatgacgcgtcagtcttgggccatacgaggaatccactcaagtggcttcctctcggttcgcccgaccccctctctctagctccgcttagccgacccctattcggtgcctcagggtgaaagggaaatagagtcaaaccttttccaattgaattttggtggttg

SEQ ID NO: 43135 - DNA, 1010 bp, Zea Mays
tttcaacttagacatcacatgagcactactacttttcatccgcgataataaccatacgcatttagactacaacaagcaaatcgccgggattacgagcttaactaaggccatctaacgacttgattaaccagagcaacaacttaggacactatacaacatactcgtcggctagcctattattatcgaaatccgagacacaacatatatttaacaatcacttaacgaaatcgactcctacttaacatgagttggttaatcgtagtattggacttagcgaaccattttagacatcacaactcaaaaacataggttcgagcagattaatcaacttttccaaatcattgctcaacttaaagttgttaatacacaggtcactcaaaatggcacatttttgggatctaacatagaggcaattacacatggcgtaaaactccataaaactacatttgctactgaaggacctaaagcacttatgtgcatatcttagcgggttgttcttcaattttaacaaggaccgactgatgaacgctactcgcctccaataattatcgggctgcgttaacgctcatagaagatttctaattgatcaacaagacatgtaattatcccatgggcatggaatgtgatgattgacaaagtgaagcatcacattgccatacaacaaaaatcatgacaacaccgatggatactatccactaaccgtttgaaaaactgaacttactcctcacttgtcactacatcactcctcaatcacacgaccatcatgtgcatacttcacacgactatataatagcgacctaagcgtcgtgttacacaagacatacatcttccttcgttgcgagtataaccatattacggcatatacccgcatacctcaatcaattatcttacgccaccactattataatacaccacggcacacacatgcatacgtgtccccactgcattctcttgaccaattttagcacaattatttatgacaatgtttattgactacataagtgaaacat

SEQ ID NO: 43136 - DNA, 612 bp, Zea Mays
ctctcgcggttctctcactctccgccatggttagcggtggggtgcatatggcgcgatgcaccggctatggaatgagggaggagagaggtcacgatcgtcctatatagccccgcaaggaaccaaagcgccatgggtcacggcagcggatccccccaatcctggaatccacgaggtttgttgagctcgcatcaggaggaaattgagcgtgcatcaggacccatctgcagacccatggtcgcgcctggaataaggaggtggagcgaggttggtcaggctccatgtggcaggagcgaggcacgcgatttttccggtcctcacgcggctagattcggggacccgattcaacggatgagaggaagacagaactgactatttgtccccacatggaggtgagtcgttcgagtccgagcgtgcggggtgggcacatggattccgcgtggcgtgggggctgacgagcggggttcttttgtcggtggagcgtgggtgcgagcgacgtgggccgatgtggagtagagaaggggagaaatgggccaggagcatggaattcggcccaggcagcacataaatccctttttattttctaattctttccaatttcaaattagatttgaa

SEQ ID NO: 43137 - DNA, 392 bp, Zea Mays
tgagattcctaggtattttatcatagacctttttccaagtcgataaaaatcatgtgcaagtccttcttctgctccttatatcgctccatgacctgccttattaagaaaattgccatacatgtcattgaaaatattgtcaaaatacctctgtcgtctctgtttgatgtcttgtcctttcaccaagagttgatacatctcatccttaatgcatttaacttggttgaggtccatcgtcttcctttcctgaatcctagctatcttatagatatctttctccccttcctttgtacttagtcttcggtaaaaatcatcataggctcgaccctttgcctcgctcacagctcgctttgcaatcttctttgccaccttatacctctctatgttaattgcac

SEQ ID NO: 43138 - DNA, 552 bp, Zea Mays
cttacaattccaagagagagaccatgtgtatcttaaggtctcacccattagaggtgtgcaaagatttggaattaaaggcaagttagcccctcgctatattgaaccttatgagatcataaaagcatgtggaccagtggctcataagttaaatctaccactaaatatgtctgttatacatgatgtgttccacgtgtctaaactaaagaagtgtgtttaagtatcgacagaagttctgatcaagccagagatggaaatagagcctaacctatcatacaaggaacaccctgtcaaaatattggattcaaaggaaagatccactcgcaaaaaggcaatcaagatgtgtaagattcagtggaataatcacactgaagaagaagccacttgggaaactgaggattatctaaacaagaactaccccaagtttctacataaaagtgttggtacgtaacccatgcccctacttactctgttccattcttggggacaagattccttttaagggggtaggctgtaacacctcacgcgttaactgtggagtgcaactcaacacct

SEQ ID NO: 43139 - DNA, 277 bp, Zea Mays
aactgactttattaataactataccaagttgcaggggatacccacaccttggtgacaatcattacaaagatccaacttcattacatgaccatcataacaagcatccaacataagataagcaaactaactctaactagactgactggactaagaaactgaactaagcattattacagacttcgactctatcgatatagggatccaaatctatccgggtcctgcagtttggggtaccatagtcgaagcgaccacgggacggtgaacggtaagggtgctg

SEQ ID NO: 43140 - DNA, 536 bp, Zea Mays
gcttcaaaccctcttttgagtgacaatgcttcgaggttttttaagtgttcttgtagcttggaggtgatgacaggaaagaaagtagctttggatctcatgatagtaaaagcttcagatgttgctaaaaacgttgtgctaagtgagagaatgtttttgactaagattgctaagggcatgatagattggttgattgatgatagtgagtacatggatatttaagaagatagcgaagaaatcaggccaacaaaatcaagtcatattgtctttgggaaatcaacgatttgaactagccatgtcaaggtgttgaagaacatgtattgcataaatgatgtcgacttggttcaccatggaggtgaggaaaccacacctgagttgaaggataatgaggtggtcatattctgaagcttcttaaatcctgggctttggttcccactatataagatggtgctcggggtattaaaaagatttgatatcttcttgcaccaatttactccaaatgccattttgaggattggagtttttatctgggacatacg

SEQ ID NO: 43141 - DNA, 358 bp, Zea Mays
ccctcgagaacctcaagaagctcctctccaacgcgcccatgctagtgcctcctgccgaaggggagcccctcttactctacgtggtcgcaaccacccaggtggtcagcgccaagatcgtagtagagagaaaggaggaaagacatgccttacaggttcataggcctgtatacttcattagcgaggtactctctgagacaaagatacgctacccataagtctagaagctgttgtacacggtagtcctagctcggcggaggttgcgtcactatttcgaatctcatcctgtgacagtggtgtcgtccttccctctagtggaaatcgtccagagtagggaagcctcgggcagggtagccaagtg

SEQ ID NO: 43142 - DNA, 411 bp, Zea Mays
agcgacaagcgccgccttaagatggcccactgcgaggtgcatgaggtggaactcaccgcctcatgatatctctggtggttggagttcccgatagtcttcgaccaatgcgaccacatagacaagatccacatcctaggacctaccttctcatagttgagccaatagtaagctcgaagcacctatccaatgtgctaatggatggggagtagcctcaacatcatgtaggttgatattctcgatggcttagggattgcacgctctgcgctatgtcccatctcagtgccattccacgacatcctactaggccaccaggcctacccacttaggtggatcactttgcccgtcacacttggtgaccccttcatcttctgcaccgagtgacttcaattcgaggtggtggacttcctgggg

SEQ ID NO: 43143 - DNA, 618 bp, Zea Mays
acgaaataacaaaagtgctatatttatccagcgatccggtgttgctgcgagcccggtctccgcggccggtagttcggatcggaatttaccgcgcgctctcctcccatccaccattgcccctctccccctacccctgcacgcgcgcgtcccaaacaaaccacaattgggtgagagacggagacggccatggcggagtcgcagacgtgatcgccgagcttgcaccttgcagtgggttggtttcgcttgaaagagagcggataggatagctgggtaagaggaggaggaggaggaggaggctcagttcagttcgtgggccggtcgatccaatccggcattacttatcgatcgatcgatcatcatggcgtaccttcggaacaagtcgatggagttcctcaagcggttcgaggtgccagccaagaacccctcggaggacgcgcagcgccggtggcgggaggccgtcggcactctcgtcaagaaccgccgccgccgcttccgcatggttcccgacctcgacaagcgctcgcaggtcgagacggagcgccgcaacatccaggtccgtccgtcccgcccttccggcgaacctgcattgcagcacgcactatttaaatttgtttcctt

SEQ ID NO: 43144 - DNA, 392 bp, Zea Mays
cgactgttgatgtggtgacccatgttgccatcggggtgagccagagggaggtggtggttcaccgcttgagtaagtatccactagtagcactcattttcaggtgtgtggggtagatcatttgccatctttgccagcacacctccaacctggctcagggtttgcatggcctgtgcgatctcaggttgcaagtcatggaaaagaatttgatgcttgtgagaagtctcggagttgtgccaggctacttcacgttatgctcatggatgaggtagcaggagctcctttttaggcaaaaacctcgcttgtcgggagtgtccccaacatcggatgcttcatcccaggaaataggttgggtcgagtcctgttccttggtagtgtggtgatgcaggacattg

SEQ ID NO: 43145 - DNA, 426 bp, Zea Mays
gagctccacaccctgactcaagttgcgttgattcagacgactccccgaccagcatactaagaatcgatctcagaatcattggcaggtggttgtatcaagaaatgagtctgcttttcctcttcatccaggtctcaatgtgcatcgattatagcttctattttgtcttgagaaggtcgcactttatggccggagccacaatcctcctcacggatgggagggttggacacaaactcagaaaaaggactctacatcaataaaacaatacaatgagcacaagacatacaacaattcagcaaacgttgaataataagactgaggagcaccaacatttacaacagcacccctcaacatcatctcaatccagctcaagatattttcctctgatatttgtgttggggacttgttctcaaatgcttcgaattaaga

SEQ ID NO: 43146 - DNA, 4705 bp, Zea Mays
ttgtcattacttgtgatcaggatacttggagcaagtggggtggaaatttctgctggctttcattggtacttgaaacactattgtgcagcacatatatcttgggataaaaccggtggtgcacaactatcaaccattccgcgtcctgggtcactacctcgtgttcctgatggtggtgtactgattcaaagacccattgactggagctactaccagaatgcagttacatccagctgtaagctgatagctaattttgaaattttggctgttgattccagaatcgatgcatcaaaattttctcatgtaaactgaacttaaaacatatttctctacttaaaattattttgttcaccctttagattcttttgcttggtgggattgggaccgttgggagaaggaaattgactggatggctcttcaaggaataaatttgcctcttgctttcactgggcaagagtctatatggcagaggatttttgaggtatgtatatttattcttttttaagcattattcacagtcgataaattactagtatgttttttgtgacattagcgtgaaataatgcacaaaagcaacctgtaatattaggaagacattgaagcagatgggttgatgcataacagtaaatgcagtaaagtaggaaggcagtatggataagcaggcaaatacgcacatcacaaaatttcgacatgttatgtcatgttttgatgttttttcttggcaaaattattttggcacagttcttaaaattgacattttgtggaggaataaatggacccttctagggtagatgtaacctcaccggttcttcctgctgacactatctattattgtattttatgagaatattagcactcttttatctaatacaaaaacgattcaggttattgcaccttatcaaaaaaaaaatctcaggttatttctttaaatttactcaacctgttttgctgcaaatggtttgtgaatgactttgtttcatttcattaaattcttaaagaggtacaacattagcaaatcagatctggatgatttctttggtgggccagcctttcttgcatggtctcgaatggctaatatgcatgggtaagttacacatctgatttgtcattggtctctcacatctgaacttttaaatttatatgaatctgtattgattccagtattcttttgcagtaataatttgacatgttgtgtcttctaaaattattttaatttattcctcagctctgcagcacaagataattaccttgctataaattattccttccaacccaaactataaattgttatggctttgacatagtatatattttggtgcatagataaagccaaaacaatttataatttggaacggagagagagtatataactgcaaattgggatgctcacatctagaactgtcggactaagacagccaaggagaactgtttatatgtggaatgtcaggaaaataagatgtgactaagaaagctcaagaaattttgttttgagctttgattcccttttcctgagtcctatgtgctgatttttttccaagcatgttatgtctgattgttttagctgcctacaatatttcggtatcatttttggtacttacaaggaatagatagttactagttacccatattatttagttttatcttggatacggttttttttggaactttttatttcaatcgtatgccatatattacttattttcagctcttttatctaaaaacgaagatactggcttcacatgttagatgttttttggtcattgtcttttaagtaattaccctttaatggcacttcctgatttatcagatggggtggacctctccctcagacttggcttgatgaccaactagttcttcaaaagaaaatcctttctaggatgtactcttttggcatgttcccaggtggcacttctaccattgtagcatttttggattttgtgcagttacttgagcaacttttctacgttaaggttacagtatgggatataaatatatctttattggtttgcacatatgtgcgttttcagaactccagttctgcctaatataaccaatataaatgtttaatttctcagtctgtgtttttttagtacatcaggaccccttcacttcttgttacgtgtctaatagactaaaatctacatttgttgcagttcttccagccttctctggcaacatcccagctgcgttaaagtcaaagttcccttcagctaaagtcactcaccttggaaactggtaacagcgattttctatcttctaaataacattgggatatatgattttccatgatcattgcttaaatataaaatacggaatcttggctgcagctcctgtaacattggataatttcatgctgttttgtgtctccacttttgttgtatttcagttatgtaactttgattgcaattttgaactgctaccactgatcaaattgggacagtcacactacgcattcataacaagcttatgcccatttgtaattttaatgttcatttcaccttaagtgcttcatcatattatattcataaatgaagttaaatattaatatcctgtttttagcccactgaacactaacactgcttttcttgctggcatccttttttcatcagtgttaagtcacttgtgcttatttgactatactctgtgatattaaggtttacagttgacagcaatccaaggtggtgctgcacatatcttcttgatgcatctgatcctttatttgtagaaattgggaagatgtttatagaagagcaaatcagaggtaggatctgttattttgtgcaagttgatgtctaacttcatgtgcaagatattttaatgtcagacccgtaatcttgtgccattccctaccataagagtgatggctagccattcttttaaaacaaatgatggctagcttttactttattagttaatctgttttgtaagagtactttttacactttttcataagaagacaacaaaccttgatgcatcggagttttcttgtacttttgtgcagaatatggtaggacaagtcacatctacaactggtatgattattaaccatccttctcactggaagttcccaatcaattattttttctcatttataaacattttttacctgtctagcgatacttttgatgagaacactcctccattaagtgacccgaattatatatcttcgttgggtgctgcaacgttcaggggtatgcagagcggtgacaacgatgctatttggttgatgcaagtatgttctctgtgtgttagtattttgcttattattggatttttctgtaaaagcagttattagagatatgaatatagatcatggatgtcttggttgttgcactttacattttcacttctggaactactttcagatgtgtgattcttttctccagttgagagaaatgccgtgctctattgtcacgttcttggatatatggatatgcaaggttctgtaacatttattactctgcagggttggctgtttacctatgatcctttctgggaacctccacaaatgaaggtgaaactttattgtatggtttgataagatatgtatgctagtaattttattggccctttttatttgggcttcttgtttcttcaaaaaacattgttggagtagtaaggattgaaattcatgtgactttcattttttttccatttaactgtttgtcctaaatgtcatgtatttaaaaatggagggagtttgttggatatgatatgactgcaattcatgttccagtggtgtgagttgatcacattcatttagtcagggtaagcattgtgttttccaataacatattaggatttttgaaataacaccaaggaggtacagcaatttgcagtggtgtcatctgttatttttatttggttcatacagtaaaaactaaaaaaaaaacatgcctgtagtgactaatttatgttgatagcaataatttcagattattcttggagaaaaaggtgatgttacattgccaaatgattgacaaccactgtatttctaataatctaataattatttatgcactcagtttcttcaccttttctgctgaaaacttgaataagccttgtcagcttaacgtggctactgtctaatacatcagttgtctgttttgagcatgcaccttcgttattgttagtgttgttgtgtttggggattcagctttaacgtaaccaattttttacttatctgattgaactcaattcctgttatttttaggcactactgcattctgttcctgttggcaaaatgattgttcttgatctttacgccgaagttaaaccagtgtggataaattctgatcagttatatggtgttccctacatctggaaagttctcttttctctttctgccaactccatgcactattaccctccttttattttccttcataaaaaaactcgtgtgaccccttttcaggtgcatgctccacaatttcgctgcagattttgaaatgtatggtgttttagatgctttggcttctgggcctattgatgctcgattaagtgataactccacaatggtatacattgccaaacttaatcagttgcttatgctacttacctagcttaagtgataaatacaaatgatgatgttttacttattaacaaattatatttcaggttggagttggtatgtctatggaaggtattgagcaaaatcctattgtttatgaccttatgtcagaaatggccttccatcacagacaagttg

SEQ ID NO: 43147 - DNA, 490 bp, Zea Mays
ggaatttgcgcatgatatttgaatcttggtacctagtgtcgaggacctccagttgatttactacgtcagtgatgcgcatgctgaagtcgttggcatcttaccgttgttgaacctatgcgagtcgaacttgcgttgtagcgtgttcgccttcacttggcgcattcggtccatggtgaggtgcattttttgagtgcgactagcaatcttagcggttgccttgctcgcgatcaccccttgcatcttcggaggtacaccaactagtcaccaagggtgatggcttctagagcattgcgattgtcagtgtagttgacggtgctgatgttcactgccatccacatgccatgaatagtagttggtcttggtcaacaacgagtactgcctactgtcgccactctctcatgacccggtagatcaccgggttgtagtcgtcattgctagagccactcctcatctcctgtcggcaatgcggtgccgaggcagttcgttccgc

SEQ ID NO: 43148 - DNA, 415 bp, Zea Mays
gacgagcactagaaaggttacgaagattcaggataggatctatggaaagaaacatggccttgatagggtttgcgcaactagacaccaaacgatttttctgacacaacaagtgcacaaggagacttgggttggtctagcggtcaagctgtgggggtctataagatgtgtaggtgcatcaccaatagtgcaacacacaagggctagaaaacaccaacacaataatgaaatttttttaagaggtttcacttgctaaattcaaggttgtttggaggggtcttctcatgagcaggatggacaacattttttttcttgcaaaaagggttgaacaattacaataccacctagctagcaagacaagagaaacacatagcacgacctaacaagacttaccaatctgacacgaggtaaggcattt

SEQ ID NO: 43149 - DNA, 1883 bp, Zea Mays
ggcaaaaggaaatcctctccctaattccctctatccatgtatactatagccggccagcacaagattgccaggctcaggccctcccatatataacagattctctaacaccccccgcagtggcagcggacgttgacactggaccgaaattcacagaacaccgatgacggaagtcctttggtgaagatgtcagcaaactggtatgtcgttggaacatggagaactcggacatcaccaagagcaacatgctcgcggacaaagtgaaggtcaatctcaatgtgcttggtacgctggtgctggattggattagaagacatgtagactgcgctaatgttgtcgcaatacaccagggtggtcttgggcaggggggagtgcaactcagtcaagagctaacgaatgcaggcagcctcagcgactgcattggcgaaatcgcgatattcagcttctgcactcgagcgggaaataatgttttgccgcttagaggaccaggagactagattgtccccaaggaagactgcatatccagacgtagatctatgagtaactggacagccagcccaatctgcatctgagtagaccaccagttcaaactgagaagggcgcacaagaagaaccaagtccaatgtgccacgaatgtagcgcagaatacgcttgagggcagtaaggtgagcctctcttggatcgtgcatgtgaaggcaaatctgctgaactacatataaaatatcaggacgtgtgaatgtcagatactgaagagcacctgcaaagactgtgaaaatctgtagcgtctgaaactagatcaccatcggctgaaagcttgggatttatatcaacaggagtagtgcatggtttgcattcactcatgccaacttgctcaaggatctcaatcatgtattgccgttgttacaggtagagaccggaactggtgtgttgaacatgcattccaaggaagtgatgtaattgcccaaggtccttcaaagagaattcctggtgaagagcactaatggtgcgccgaagaagtgccatggaggatgcagtgagtacaatatcatcaacatagagcaggaggtaaatcatgtcttcgcctttgcgatacacgaacaataatgtatcagatttggtttatgcaaaaccaagctgaaatagatgagaggcaaggcgactatgccaggcacgagaagcttgcttaagaccgtacagtgagcggttgagacagcagacataatctggatggacagaatccttgaaccctgaaggttgtgcacaataaattgtttctgacagagtgccctgaaggaatgcattattgacatctagctaatgaatgggccaaccatgagatagagccagtgacaggactgtccgtacggtagcaggtttaacaactggactgaaagtctcaaagaaatcaatgcctgaacgctaggtgaagcctcgaagaatccaacgcgctttgtagcgctcaagagaaccgtcaacaatgaaattgtgcttgaaaccccatttgccaattacaatattggagtgtgaaggacgggagatgaggtcccaagtcttgttatcaaggagcgctgagtactccaattccatggttgtccgccaattgggatcggggagagcaacacgataactctgaggcactggtgagagcacagaagcttcaaacagagccaggaaccgcagtccgcgcttgccacgagtggtcatgtcgtgctgattggtgaccgggggaacaagtaccgcaccggcagggactgagggtggaggcgaggtcgtagaagccaggacgcagggactgggtggcggtgaagttggcgccacggtgttgttctaccatcgagagtagacctggccaaggaagtgaccagggaagggtaaggaggcccagc

SEQ ID NO: 43150 - DNA, 546 bp, Zea Mays
cggggtacttagcataagtcagatctccttgaacagtaaggtcttccattggtaactgttcttcagacactctgagacatttcttcagctgagatacatgaaagacatcatgtacatccgcaagatgatccggtaactccaattggtatgcaacctctcccactcgctttaagattaagaagggtccaataaagcgaggggacaactttcctttgactttgaatcttctcataccccggagtggtgacaccttcaaatagacataatcaccctctttaaactctagctgtcttcttcgggtatcagcataactcttctgccttgactgtgcagttctcaaattctccctgatctgctgaacttgttcttctgcttcttgtataatctcaggcccaaacaactgcctttcaccagtttgatcccaacacaatggggtcctgcacttcctgccatataaagtttcaaatggtgacatcttcaaattggcctgatagctattattataagagaactccgcataaggcaaactcttatcccaacttccac

SEQ ID NO: 43151 - DNA, 948 bp, Zea Mays
gtcagaggtcatcacactgaggaatgaagcccttgaaaaaggtaagattctgctctccttagtggataggctaaaaatcagcgaagccgggcttaatgcacaagccaaaactcacaaagccgaagttgataatctaaagaaaaaacttgccgaaatgaatgaaaattgtaaagttatgaaggcaaagcaagagataagcgaatgtacaagttcaaggctacaaaagaatgttgaagagcttcgtgattctagggagaggtgctatgaaaaatccttggattgcatgaggaagctaaaagatagctttgtgaaggtggggcgttttcttcagaacaaaaatttattcgcgacgaccccgaaagagttatccaatggataggttcaggagccgaagctttcaatgagatccttagcgattgcggagatttttgtgatttttccaatgcctgaggggttgctgcaattctagaataggctgggtgtgaacatgttaaggccgcggcccaaccagaatctattctctcggttgagaatactaaggacccctcagctgaggcttctacattgggcgacaaattctacttcgatgtgtggatgaaggatggtcgtgagatggctgatgaagccattaaaaagactgggaaagaatctcacgacgcccatggggaagctaagcatgctgaagaatctgctgaacgtgccatggttataggtacttttatttgaaactttttgccttgttgctcgtttttaccttcgaaattcaccatcatatattttttacagccgtcctctctccgccaccggagccatacaactccgaaactgattcggttatgaaagaagctttagatgttatgcaaattgctaacgaagttgttgacgaagtcgtcgacaaacttttacatgaagctgctgaaagaattttgaaggaagactggattcttg

SEQ ID NO: 43152 - DNA, 1328 bp, Zea Mays
gaaccagtgccccattggaggaagacctcgagatagaatgggagagttcctaaggctcaagcctcccacatttgccggatctagcaacccactcgatgctgatgactggctgcgcatagtaaagaggaagttaaaggccattggatgccctgaaaaccagtgtgttcacctagctgctcatcagatctccaggatggctctttcctggtgggatagtttcagcgctaccgtaagagatgctacctgggcagaatttgaagtcgctttccgagagcaccatgtgcctttgggaatcgtccaactcaaggaagaggaattttaggagttaactcaaagagggcgatccgtcagtgaatacatccacaaattcatagaactggctcgctatgcacctgatgatgtcagcacggaagccaagaagatggcccgtttcttgaaggggttaagaccagaactcaagaccatcctcgcctgccaagacttcctcagtttctcgcacctctcgaacaaggccatccaggtggaaagagcatgagaagaggaaaaaggtcagctcaagagagagtttcaagttctctgagctcagcagcaggacaggcaccaaagggttcgatcttttgggttcccttccaaagggtcaaacttcagcaaaccagcaggattcgctccatcacgtctcaacaagcctagtcaaagttccttccacactcggtttgttgcaagcagccaacctccaaccaatgcttgttggcactatggagaccctagtcatttcaagaataattgtccgcagttgaagacatttgtatctgcctactccaactcggtgaatggccgcaagaatgtttcagcacccgcctccaaggcaccctccaccaacagccagctaagcaagacccagtttcacggcaaggctcgagtgaaccacgtcgacacccaagaagctcagcaagcccctggtgtagtgcttggtgagttcctagtcgaatttatccatgctcctgtacttttttgattctggagcatcccattctttcatcgccactagttttgtggaaaagcatggcatccccactacatctttagaaatccctttggtcactcgaaccccagggttagacctactatgccacctcaaatgctcccaagtcagaattcttttaagtggggtagtattcttggcggacttagccatactaccatcccatggaattgatgtgatcctaggaatggattggttgacccagcacaatggcatcataagcatcatagataagactattcttctcaccgaccaccaaggaaaatcagtttcgtgtaaagctcag

SEQ ID NO: 43153 - DNA, 771 bp, Zea Mays
ggggtttgaaagacacaccacgctagaaaccagaaagcaagtttttttcatatattattgttattgccactgggacagtgtcgaggcatagcacgccgcagttagcatgcaatgcggacaaagtcatgagtagacaccctaagaatgatgtgtctagctacatcgtcgtagccttccagcaggtgctccaaccttcctccgagagggatgaagggggaccaatgagatcctgaaggttgaagcccaagcagacctccgtcgtaagcaacgccaccgtagccccacgatgaacgctgaagtcaacaatgtctcgaacgtgacaaagtgtgttatccaggtgctcgatcaaagagggaccacgtgcccccaatgtaatcaagaagttggcccaagcgatggcacaacatctcgagctctgcttccaaggctgccatgagaaataggcaagataagaaaagggaacaaaggaagaagaaaccacaagaatcaaatgacttatcggtgacacaactatcgtcctcggcaagatgcacccatagcagctcggcttcaacctcgtcgatctcccacgccacgtgaaggcattgcagcccccccccccccccccccgtgagcacccgaggtggcgaaggaagagatgtgcagctcgatcgagatgcagtctccaggtcgactgtgactacactgctacgaggagaggatagagcaaaatcaaaggaagagaggaggttggcaagcctaaggagggaagcctgcctcggcttgtgaccg

SEQ ID NO: 43154 - DNA, 480 bp, Zea Mays
cggcagaatgatgaaactcttcattcgttcctcaaaagatttcaaccgatgaggaaccgtattcttgaagtcgttgaggcggctatgattgaagacttttatcgggggtccaacgacccagcctttgtctaggccatacttcaaaaagcatctgccacctccgaacaactatttagggaggcggatgtctacatcaccgcggatgagcgggcttaggacctcattggaggcacaaagcccgtactgcccgcaccacgaagggacacgaactagcaaccaaacaaatgatgggagaagagaccctgcgaggaggtgcacactattgggccacctgtcgctcgagcccgcggcgcacccagcggaggggtgcgaacactggacgagatcctcgactcctagtgtacatatcacaaggacatgtggcacaccctgtagaactatagggacttcaaaaactccatcgggcatggccaaccgttc

SEQ ID NO: 43155 - DNA, 376 bp, Zea Mays
tctgccgcaaccatcatctgaatggctgaggacaagaagatcacagaccccataatgtttgggttttacgaagctatgcagaagaccaatatagaaaagaccaccaatgagatgctagctgggttgtctgaagattcctgcgatagcgatagttttgatgtggagagtgggaatgaagattttgaagattgaccgtggaggccgagccatgttgtttttgggaagtcaattgtcaaacaagggcaagtcgaagtgatgaagggcaaatattttcatgatgtttctatagtgaggatcgggggagaaagcattgttccccttcccaaagctgatgaggtggtggtctttaagagcttcatgaaagctaggcttcgct

SEQ ID NO: 43156 - DNA, 387 bp, Zea Mays
agcttcgtgccccgctctgatgcaagatatctcgtgccaacatttcgaaagaactggccgggctcttggatgaaacaatggttttatgtgaagaatgatctgagtgagagggaagatgtgaggggcattattcaacgtcccatatggtcacgcttcggcattagaaggctgtcaattgcaattgggaacgaagtgcaagcatgtttgatggcttttaacactgtgtgcacctacattggtaccaaggatttggtacaagagcatattgcttataaagtgtggccactggtgaatgactgggaaatgccgaaggaaaccgctgccgactctagcgaaggtggtctagtttacttaagatacacctatcggtataggagtcaatttgac

SEQ ID NO: 43157 - DNA, 396 bp, Zea Mays
tttaatttcttcttttcacattcctcaaatggtgtgatttctttgttctttggaagaattttattcaggacatgacacagagtcaagatcgcctcaccccaccattccttagatagtcttgaagtctctaacatggcgttaaccaaaacagttagagtaaggttctttctttcaataaccccattggattgtggtgagtatggtggtgtcctctcaaaaataataccatgttccacacaaaaaacacaaaaatcagaccttaaccgtttaattttcctctcgagttgattttcagcttcagctttgtaggtcttaaaataatgcaaagctttgacttttgattttaaattatacgcataacaaaatctagtggaatcattgataaaagtaataaat

SEQ ID NO: 43158 - DNA, 734 bp, Zea Mays
ttttgtgtgtggcggtggtggtggtgaaggagggtgctctctagcgctgctgctgccaagttgatgtgaattttgtgggttgtgttgcgtagatcggaatgtgctgctgcctgctgctgtcattgtacggggtcggtggccagtgtttctgtgtcgatgtttcccaatcgtgtatcgtccaccttgttccgttgtattttattttctctgtcttgtttgattgatcgaaaatggtgtgtcgtgtggcggttgtggtattggattatcggtacattttttttagggtgtgcaacgaggccaccaaactggatagaatactggagccctcagattttgctgctcctaccggcttctctggttcgtggtagttatgtttcggataatggctaatgaatgtggacaagaatgtgacagcgctgtagttcaatattcggttattaccacaaaacatatattttcctatgaaaaagctaccttgtgattctggtgccatgcccttaaagtgcctgttggattctatacttctctgagagcactgcactcatttacagttttgtttttttcgagagggtcactgaacaaacagctctcaggttggtacggtggatgctctgtagtcaatctattgatggacataagagagctgtagagaattgatgttgaaacgtcacccttggtgggcctgcttttgagctagtttcattagttcacaaccagaatagatgtggagtcag

SEQ ID NO: 43159 - DNA, 1024 bp, Zea Mays
tcaggctcaacgtgcacgcgcgggagttcgtcccggtggccagccctttggcggcggccgccgccggcggcggctactattctccgttcgtgcagctttccggcgatggcgggctgggcacggactggatgaacttctttgccgagccggaccccacgtcgccgtcgtccttcctgccggactttggacactgcgacatcctcagagctaccggcggcatcaatggctaccctaaccccaaaggcggcgcaagtgtggccgacatcgcagataagattgtcaagcaggttcggaacctcctcgcttaattattctgctgtttccggtgcacattactcgcgtcgcttgacgccgagtcaccgtcgcgtagaactgtagatctctgggaaaaaaaaaccggaaacgccgagagcgcatgctgctgcaggtgatcttctctgctctaatctaacagatcagggagccgcatgatctttggttccctcatcctgaacttcttcaatgatgcagacatttatttatcacaacttaactagtgacgtttttatttcagtgataattctcgtgattctcggatctacgttgtagatcatgcgctgttggacgtttttgatttgttttgtttttgcttttgggttttacagtggttgttgcccttatagtttcattgttctcacctttgtgcatgcaggtcgagtaccaattcagtgacacgaacttggttgcgaacgattttctgacaaagatcatgaacaaggatcccgagggctatggtacttaaaaaatgcagcaactttttatcgtacacaacaataaagaaaagagcctagagatctagaactgatgatgaaattttctatcttccattaaaacttgcggtggaaactaaatggtgtccaaccgttacgttttgtgggcagtccctttgtctgtcatatcatcctggaagaagatcaaggccatgggggtaacaagccagctgctggtcatggctctccggacctcggacaagctcgtaagccgg

SEQ ID NO: 43160 - DNA, 740 bp, Zea Mays
acaatccaaaagaaatcctagaaaaggaaagaaagaaaattttatgtgagtaaaaaaaataataaataaataaaatattatttctatattagagttttaatgttactcctaactcaagggtggagctcatgggctgattcaaattcaaatttgattcaaaacaattatgaaggaaaaacagaaaataaaacataaaagaaaaaggaaaaggaagcttacctggccggctattccctttttggcccaccgggaaggcccctagccgtagcccaatcccttcactcgcacagcctgtgcaaactcggcgccgccgttcactcaacagggaggtaggggaagaacatggcccgttgatgcgaagatgtacggctgcgattagatatgggcgtgtgaggttttcaaccgttggatcggttgcagaggattaaatctggcaaagtgtagaccctcgaccgtcgatcgtacagtggatggcgtagatttgatcgagccccttttaaaatcagaaccgtcgctttcggatctgatggccaccatttcttaccgattcgtttataggcgcgatttaatcctggccatccgcgcttgatcggacggccgatgtcgcgtgcagtgtcatgtgagtcgtaggtctaattggatccgctggtttctaatccgacggtggggaaacatcagtaccccttcggccgcgacagttttgcacataagaccctctgttttaggaaaactaacccgcc

SEQ ID NO: 43161 - DNA, 646 bp, Zea Mays
ggatattcaaacgcgttcccggtgatctaggacgcctagctaaattgaatgggtcagtgagtatcaggagcaagtaagggtgctgaaacaagaaagcagagggcaagatcagacctgaatcgagctggccacgacgaggcctctttcacagtggcgaaaagcaggtttggaggaaatgagaaattagcgagctctgatgacaattgagggcacggcttggtggcttggtgcttgactaccctatggagctcatgggcgtgatcaatttatagagtcagtgagcggtgttgtttaatttgggcgaatcgtgctggcggccgagaggggaatgagtcacagcggcgatctaccgtggcaaccgcagagcgacggaactacggcagtcattggatagtcacttcggctcatactgacgcgataaacctcctaaggcgtggcgtccaccctgtgaacggcgaacacgcccgtgattgccacacggccatgtcgtcggtgtgcactgatgaaccatcacgcacacagtacattccagcccatccgcggcgagatctttcaccctgtgatcgttatccgtgtttaattcagcgtgactcacagcgatagcacgaattcgcgcgcgtggtcgccggcggcgaggtctctgagc

SEQ ID NO: 43162 - DNA, 821 bp, Zea Mays
caagactcataatagtgacacgacaaacataatagtgaacatgagcctgtgttgtcggaccaacagcagctaagtggactttttaagttccatctcgaaagcacggcgcagccaagcgttcctcccttcttttgtcttcagtgatgcaaatacatctctatactttttctcaatcaacagatgagtggcaaaaaatgtaagtcgctgccttctggtgaaccatcatcgatgacttgttgcaattgggcaataaccttgacacgaacagggtcggtctcagcagaggtgatggacttgttagtgttcattgaacgggactcaaaagccgccactaggcgtttcatgtactcttctctggtatcttttatcttctttggtttaggagaatcatgacgaatcttacgcttcccagtcgcatttgagcatgggtcaggtgtgctgttttcacctccacctaaagtggcttcgacatgatcatcagatgatgaatttgcatcctcgacgccaggaacaagtgttctttcatttgtgcagaaaatgggtccaaacataatctttagctcgtcctcattctctaggggggctgttttgaacattatacaccctggcattgcctgcaccaacatggtatttcctactttcagatggctaatactaatgtaaaacaaaaaaataaaaaaagtctacttacttcattttgcttagcccaccactcatctggagcactgattgaaccagtatgagggtctcgaccaagacctgtagccctttcattaagagttttccactgggtgaacattctctttaaggagtcccaccta

SEQ ID NO: 43163 - DNA, 360 bp, Zea Mays
gtaaaattcacatcgttcagctggtgtgtcttcgtatgcatgattctcgtgaacctcacttcgcgttgatcaaacttatactttggtacatcaacgtactctacctcacggtctccatcttcatgcctcgttaacgaacaccttgacaatctatttgtgaagctgcccagactcatggcattctacttaaagtttctacatttacttcggtgacagcctcgtcttgtagtattccaagagaccaacgattatttctcgttccagtgtggaggtagaataccatgcaattgccacactctcgaggaatgcccctggctatgctatcttctttaagagacatgtcaaccattttgctctgcg

SEQ ID NO: 43164 - DNA, 567 bp, Zea Mays
ccggtaagtcacactgatgctgttcactagggtgtccatgtcgtgtagctattatttgtgggtgatttgggtgctagggtgccgtttggccatgtcactggcgataccccgccgtagtgcatgtacgcagtggtggtcggagtagcttggggcgagagagtgaggtgatgggcggctggtgaccgttgatctggtatcggatgtgtgagattagagctacaataacccttcgccctttttaaacgatggtcatggatccatacatcaatggttggtgtggatatcaaatcgggtcattgatcttagatctgacgggccacatggcatgcctattatactgcgtcatcatataatccgagccactatgttgtgatcggacggctcaaaacccacggtaccccttcgaccgagaaattagcatcatagccctcctagaatttcaaaaagaaaccgccatccctggttagtgtaagacctttacacttaggtctcgagaatttacagattagccctagaatcttttaaatgcaaaataaatgttaaaaaatactttaaaacttacttagc

SEQ ID NO: 43165 - DNA, 537 bp, Zea Mays
gcacggttggtctcgtgcggctggctaccgaagctagctagtaggtccgtgggttgggttccagtcggacatgccgacatgggagccgggagggcttcgtcgtcttttgcgttgcattgcatgcatgtcccgcgtgtgttggctcgtgtacgaggagcgtgtacgtatcggccttacgcgtgtccgtcaatattgtactcgtaccacatataccagcaggccggaagcagcgtgtgtgtactacatcatcatccatccagagtccaggcagtcgacctagaaggggtgactagctaactgtgtgtgtccggtttttctacgccaataataatacgtatcatggtacagtagtactgggttatttctgtacattgggtaggttgtacgcccacagtaaatacttgtgtttgagctcgacaagaggacggaacggaagacgccatccattggattggatcacgtacgacgtacgtaacgtacgcaacgcaacgcaacgcaagcgtcccacccaccccttccaagtctggcaatgtcctg

SEQ ID NO: 43166 - DNA, 522 bp, Zea Mays
ggaaaacgggcccgcatgtcggttggacgccttcaggtgcatatgttgagcgtatctgaaccgtcggttttgtcgggcgatcggacgcgtgtacggctgcagaggaaggcatcttctcgcgtttgaatcacgctatcgacggctgaaaagcatctttcctcctcccttggctcgccttccttttttttttctttgcttgcgaccttgcgttccttttcttatcgaagacttttcattttcttttcagcgtcacctttgctgatcagcgataagaaaacaatcgtgcgggaacgttttcgaacctcttattccgatgatccgatcagattgagagattcgtcgtgagaacgcactattcttggattgcaacacccccacctgaagttttccttatagcatcgtagtatgtggttgtaagtttagtatcaattttaaaggtcagaaaggcgaaggctagtttataatacttgttttaaatatattagcatatctcgttcaatacacaaccaagactcactatca

SEQ ID NO: 43167 - DNA, 447 bp, Zea Mays
atgacgtggaaaatgaacaagttacaagatctatgtgatctttccaatatttcacaattaatctgctctagtccatgtaaacatacgccctatatatgctggacggcaccataaaaatatttggtgaggttgtggcgattggggctttgcaaaagcaactcctggcctgtgaagtttaagtcttgctgcgtttcttcacgacaagcaaatgcagtagatggtgagttgaggaacaaagatcgatgaaattggtaaaggcctattatgtggtttcagactccatacttgtttctatatggttagttcgttacatattgggagcactgtttccagtagagaccctgtgaaaattacctcataaggtggggcttcttagggcctatgaacttatttgtcaggtgccaaattcttaaattatcataagtacttgctctctgctatacgttg

SEQ ID NO: 43168 - DNA, 442 bp, Zea Mays
gccctgtaggctcgtcgaagatagcgccgtgctgccgaaggaggacgtccatgaggggctgctaagcggcgtcggagacggccaccacaagctgctgagggccaggcgtccgcgaggtacgcacgccctgccagcatatacgtcggccctggtgcaggaacgacagggtcaactcccggaagttccactgaatggttcccaacgtctccaagaagtccacgcctaggatgaagtcgaagcagccgaggtgcatcccgacacatgtgatggagaaggcctcggagccgatgacgatgggaacgtcacgggctattcctgcgcatggtaggcggccaccatttgctaccgtaacccggaggtgttcactaccctccataggtagctcgaggcgacgcatcgtgtccccgttgaggaaattgtgggttgatcccgtgtccaggag

SEQ ID NO: 43169 - DNA, 599 bp, Zea Mays
agtttggtttccaaataaaacatatatctttgttgaggtgtcacaaatgattagggtctctttcaaccctttgaagccccaacaaccaaaatagtcattggtattgaatgccaaaatctgcattttctgcgtctacactagaccttgaatagtaccggtccgatataccaccagacctctctcagactgctgttgcaggtgaccattctgatacagagaaatcttgtcagggccactatagaccggttcggatagccaccgaacccctccacatcagccaccacgtcagctagccgttggatctagaatttcgactgttgaactctgacagatctggtgcgctactagactagtccagtgcactagctcgttcaaacctccaaaatagcttctctatgtaagtggtctagaaagccaccagattggtctagtgcagcagccgaccaatgcccatttttagtactctctacgtactcggtccggatagccaacagaccggtccagtgcgccatagatcagcacatttaactacattttgggcaattattcttcattttgatttagctttgtttgagggggtttctatgacttagaaaaac

SEQ ID NO: 43170 - DNA, 508 bp, Zea Mays
gcaagttttccactgtgcaaaatgtgtgccataaaaactatgtggttgacaagtaacctctagccctttagtcgccttccagcttactcttgggtcggttaagaccaccaaataagagaaccagacttcgataccacttctagggtcgagatggcggactagaggggggtgaatagtcctttctaaaactaattatgttggctaacacaaataaatgtggaattaatactatgttagtctagccaagactacacccctctaactataacaaacacttgacaaaagatcctaattgaagcaactaaggtcccaagttagagaaagagctctcccacacaaatctagttagcaaggtcatacaaacttatgtaactataattctaaacacaccgagagctcctaaacatactagtaagcaagtcgcacaaagcacaagcatactagcaaaattcactagttgcactacacaagcacaatgagagagaaacaactacttagctacacaagc

SEQ ID NO: 43171 - DNA, 647 bp, Zea Mays
gagagaatgacgtgctattttataatttcgcttcatctcatagttttagcgtcggtctgcctgatacaaagctgttgccactacacgtacggcgcgcaaagctcgcccactgctcggattggtatacagacagactcacccccaattcagcattcaggtctcctgcgttttcgcctaccattgacctcagcgttgagaatctaatctaccgacgtgtgccagaaagagaaaggagagatgtgtagtacagcaagagctagctgcgtggggtggcctctgaaatctccgaataaaaatacacggtccgcgcaagtgcaagttgacggttctcgccatttggttgtgccttgccttgctcctcgtcgttggaacatgcaaacggggtggtttcaccgattggcgtcgtgttgacgctggaaccgagtccggaaattgaaccgttcatcggcacgcccgtgagggcagtccaggccaggcgtgtgcgatttgaagtggtcacggctgtcgaactggcgtccaagtctcaacaagtagcttttagaagcgaggacggatattttggcatagcggctgctcagcttatctgagatggtgagagcagttttatgtttattgtctgcttttagttcgtcgttagaaagctggtg

SEQ ID NO: 43172 - DNA, 755 bp, Zea Mays
cgaggtgacgctgggaagaagaacggtggtgtcgaggaccggcaaactttgacggcgcagcacatgagcatgagcgcggcgtcgacaaacgacacactccgatgatcagggactgacgacatccgcggcgagcagtaagcaggacgaggctgtgccagcaagttcatggccggtgaaagggacttggctacgacgacatgggagcagctggcagtggagaactccgagaagaccaaatcaagcactgcgcagaggagtgtggcggtggaggtgagacgagtagctgggacagggtggggagtgtggccagcatcagcttatatagccacaggagagggaggggagaagacgtcgatggggagagggacggacaccattgatggtgtggaatagaaactgccgacgtcgttaatggtgggagctgaaacggacagagttagggaatggaagaaattgtcgtcgcagtaccacagcgagggagaggaagggtcggttcgagccttccatgagtggccgtggagagctctggtgctgagcgtggcgtgcggctggacatggagcggcggcggctgcgcttccgttcgtagagtcaacaggagaaggagccacaaggaagaaacatcgagtggggcccatcggtcaatggcacaaacgagaaaaaaatgagaaggctgggcgtcgggcattgagctggaatggccaagcggctgagcgtacagagtagttaggttttcaaatttattattattattttt

SEQ ID NO: 43173 - DNA, 686 bp, Zea Mays
gcctggctcgtgagctagctcattagataaccaagctagaatgttggatcatctttctataaaagtaaaatgagccgagtcgagtgagttatggagccacgagtattttatctagccctattgacagctgacacaccaaaggcagggaggtgcacttgctgctgtggtcgatcgtggctctaggtatggagttttagggcatgtgacttgtctttaccattaactagaaagggggtgttgacattagtgtaccactttgcatatgcacaacaatgagttaaatgttaaattccaatctagtcgtggggatcagcctgtgcggtttgcctcggttgacttagtcatctcttttatgggttgattatgaaaggaacataaacgcctaataggaggtgaattaagacttctcaaaatttgataatctaggccacaaataaattaagaacaaactgatgcaaatgagcaaactagattttatctaagtgttgctatgtctaccgcaaaaggacttttgcaacctaagttccaatcctaataaatctaaactaggaataaagagaatggaacgtaagtacttgaatttaaatgaggaagctagagagcaaagttagatatgaaaactcccgtggacgacaccgatacacgcaaggtgtaggatctaggacaccggctagaggggggggggg

SEQ ID NO: 43174 - DNA, 816 bp, Zea Mays
taaggttgttcttatatagcttggtccctccacagtgggacgacgatagtgatcggaatggtcgatcattgccgactgagttcttgaagtccctgcaattacgtagggtgtgacacatctcctttgtggtatgggcactgggcatcgaagatctcgtccagcgttcaagcatttcctcagggcatgccatggggttgggtcactaggggccctgcaacatgcacttcgtttgttggcctctcgtcccagcgcctatcccattgcttgtttccctccttcggcgcttagggtggaggcttcatgtggccgatgaggttttaggccttctcgtcagtggtgatgtagatgtttgcttctcaaaaaagttgttctgaggtggcttgagctttctggaggatggcccagacaaaggccgagtcattagacccgtggtagaagtcctcgatcacggtggcctccgtgacgttggggatgtgattcctcatagtttgaaaacgcttcaagaacgagtggaggggctcgtcgcttcggcgtttcatggatttgaggtcctagggttacgctggcttgttggaaagggattggaagttcgagacaaaccggtggcagcagtcggcctagccgtcgatgcaatggcggcgaaggtgttagagccactgtagcgcatcctacccaaggacgatgggtaggtacgttgtcatgatgtcctctgtttccccggtgacttgggcgacgaacgtatagacgactaactagctgccccgatcttgcttgggcttgtacttatcgacgttcgagatcttgaagttaggcggc

SEQ ID NO: 43175 - DNA, 603 bp, Zea Mays
cgaagatatataatataatgcatgaaagcctttttggcacagaagacatcacaaattgggattttattagtaagcaataagaccttaccaaatgatttaaggctataaatcacagttatacattgctcaaccaaatgttgacatattgctctctttgtcgttgaaagacatgaagcgaactttgagataaatagctagtaccctagcaacatgaagttgcgagtacatcgaaaagttactctgagaaaaatttcactatgttggtgtgaaaaaatattgtgtgttcccgtcgaaccactttacttgtcctgtctaggacctctatgcttgtgttgtatacatctctcggaattgtaaatacttatagtcgctgcattgactcaggatagtcttttgacaagtctggtatacactgtaagctaaatggtaaaggtcggtcctaaatggacaaataccttgggtttatgtagctgaactgcactgaattccaccctttggcatgcttaccattatctacctccgatctaccagaagtgagaagagtagacaaataactatgaaatcccacatcaccacagagcttgaagctaaattagacattaa

SEQ ID NO: 43176 - DNA, 1031 bp, Zea Mays
gtcgttaggtacatcacctgttgctaagctatcaagcacgggtgatggatgcatcacatgaaccagacaaaccaaaaatgcatgctagatccaaaggttgtgagatgtcattgcttctaggattagtgtgtttttttgaaatatccacgataactcatgcgccaagctgttgggcatcgttcccactcctagtgcatgcaatttatgctccctaacatgcatgagaaccctcttcgctaagcaacctatagcagagatgtgataccatggttgtttggttggccaaggaactcagatacaaacacgtgaactattgagcgtgtgaattggccaactgtttctagaaccgtactctcgcgccgtgcataagtacttgtcgaggctatcaactggcccaccttacgctaacatacgaatgacaacagttagcttttgaatggggtaaaatcctggtttgtggggtgcattatacgattgcgtaaaatatgggttggacccttgatgagcttaagaaatgtgtctggacatcgtcttcatcatattgaaactacacaaacgacggtgcatttgcaatcctatttgagggcacacatgcatatcattgttaaacaatattacattcttcaattaggcatttccgtcatatgaaaatatcgtcgttgtacacgggattatttgataaataatcttgcatgagtctgacataacctgatcccctcccctatccctgttgattactcgtcgccagacgacaaagcctttatggacatgtgtctcatcatcctcttcggcaaccagagaaacatggagcatatgtagcagttgttcgttctcgtacatgcgttgcaaatgttggtgggacagaccagaattagaagacatttttgttatggtcatactatacctccacctcgcaaatagagtacagttacttaacaaagagctaaacattgtgatgttggcatccaacaaagacctggctgaggtagcaataacgaaacaaaaaaaattaagcaaggtattacctattt

SEQ ID NO: 43177 - DNA, 762 bp, Zea Mays
cgcgtctcgtcatagttgacgtgggtcaatagtactagatcaggatctccacctcgttgagttgctcgatagggacttggtcatacgctctacctcgcaagactactcggcagaggattggtcgaccgctccacctcgtagggttgctcattagagggttggtcggccactttgcatgatagagttgctcggtagagggttggtcggtcgctccgccttgcaggattgctcgatagagggttgatcggttgctccgccttgcatgattgctcaacagagggttggtctgtcgctctgcctcgcagggttgctcattagagggttgatcaactggtgggcctttcaaaggcttgggtctgctttgaccactcggttcctaggtacacaacaaatattgcctcaaaagcattcaaggtccctcttacaatgattgcattataaggatactccatgtcaactatgccaaatgtgatatctttggttttggtgttatgaacaaaaccgaaggttactggcattgttattttccctaatgctgctatttgctttcctctgaagccacacaatgggtgtatagcctcttgcaatctatgctctagctcttgcatttgctgaaagcctttgcaaagatgatatccgctacactacctatatcctaaactttgtgtaccacaaagcccttaatgacataagatacaaccatgacatcattatgtagacaatcctttagttggaggtcatcttgagagaaggtgattggga

SEQ ID NO: 43178 - DNA, 283 bp, Zea Mays
tttgtcttgtcacttgagggtcaaaccaataacatttgaatatcactagagtaagaggtttggaaccatgaaaattgagttcatatatttcttcgattcgtccaaaatactcgacctcgtcaaggccgggcgtaaagactccagagcatgttgtttttcgattagggccgacttcggtcgtagcttattgtacgaaaacggtatccattggcgtcatacccagaaaatttcctgaccctataagcatagccattggccacttgtctcaacccgacactcatag

SEQ ID NO: 43179 - DNA, 337 bp, Zea Mays
catttggtgtagggaaggtgccagtgccctctaagagctcctggcacgtcagttcaaccttggaaattggttgtggtgttagtggttgggtgtggggtctgttgttttggtggccttgaggacatcatataggcgttcaggtcatagccaaccattgtaccggggctcacctttcggtagtcttttatctttttttcttaatgactcacacatctcctgcttttgttctaaaaaaccacttcctttcttttctacttaataaagtttttgacttttcattgtctatgagatgcaactttatccattggtacaacttaatggaggcattcgaatgata

SEQ ID NO: 43180 - DNA, 334 bp, Zea Mays
caaaaagctctatccaccttctcactatattcaatccaattgtactcatcaaaccatgctgggttaaatcgacgtggcttgcccactatgattttttgtggatacttaaaactaggttgtggtctgtgaggacctttaactaggtaccttcttttaatctgatcttgcagcttaagcccaggataatttgtgattctcctcctatcagccggatcatatggaagttcgtctaaattgaaatcttttggtgacagcaccaaataatgttgggcaggctgagaatggctactgacatttatgtttggtgcatcttgatttcctctgaagtcccttc

SEQ ID NO: 43181 - DNA, 931 bp, Zea Mays
ccgctcgggcccctcttgtttttctgccaccgccactccacgccagctcttgcgccgccgctacccacacggacaactcgccgccgccggtgaatcttatcaccgttggttgtctgccctcgaggttgggttgtggaggagcgtctacacccgtagtggccgtccgtggcatctgtgagtggaatcgatcaccaggcaaccgagaattgctcgccgcacttcatcctccatcgcggaaccgtaccaccgcgtgggcagagaagtctccgccccaatccgaggtaaaattacccccatcctccttggttccctctctgctacgtgtagcaccgtggggttcagagtttgtggcgctagtgtgcgggtttggagctccccaggcatggcgccgctgtgcgtgatggcgcaccgccgttctgccgctccggcaacgtcgctgagataggggtaggatgaccaccgtcggatcttgatccagcgcgcgggtttagatcaagtataccggttcggcactggggctatcacgtccgtccatcaactgaggaacgactgagattaggtcataggattttaaatcagggccgccagtggggaatccaacgtctgggagcacttgccgccttgcgagccaccggatctaatctgggcgctcgatctcagatccaacggcccatatcacaccataccgcttcggccgtgtaattttgctaaagattccctgggcaatttaataataaacccgccgtcctggtggcattgttcactgagtctaggataagttaccagtgagcccctgcagttttcagtatttgatgccccgtcccgagagttataaaatcaagaaaatgaattagaaaatgagtttttaatataaaaacaattcatataatttgtataattcatggaaaatgcatatgaactccaaattgac

SEQ ID NO: 43182 - DNA, 492 bp, Zea Mays
actgcggataatacgcgcttcttgcgcgagttggcgggtaataagttccaacagcacggaggcagggctcctccacaaggaccacgtgaaactacatataaggaattctcagaaactcgacccccgctctttattaaagcagaagaacctctagaagctgatgagtgggtaagagtgatggagcagaagttcggattgattcgttgtacgaagacatagaagccattatttgctgctcaacaactgagagggcctgctagtacttggtgggcgaattttgtagcagttcaactgtctagacattagatcacctgggaagaattcaagttagcattccgtgagcactatgttcatgaaggagtgcctcatatgaaacaagaagaattcatccgattaaaacaagggggagatactgtaatgcagtatctcaacaaattcaatcatttatctcagtatgccatcgaccaagtaaatacagatctgaagaaaaat

SEQ ID NO: 43183 - DNA, 413 bp, Zea Mays
gtctattgaaggagtattcagattgctttgcttggaattacactgagatgcctggattaagccgagagatcgtggagcatcggctgcctattaaatcaggtttcagacctttcaagcagagagctagaacatttcgtccagatcttctcccacgcatcaaggacgaaatccaccggctgctagaagctgattttatcagaccttgcagatacgcaaagtgggtctccaatattgtgccagtggagaagaaggagtcaggtaagcttagagtatgcattgattttcgcaatttaaatagagcgactcataaagatgaatatcccatgcccatagccgacgcattaatcaataatgcatcaggaaatagaattattagcttccttgatggtaatgccggatataatcagattttc

SEQ ID NO: 43184 - DNA, 376 bp, Zea Mays
tggaaatacccctttcttcatggtctatgggtcggaggcagtgttacccgctgatctcaaattcggagcaccaaggttgatcttcaaaaacatagcagaagtcgaagccactaggctggaggacattgatgtacttgaagaagaacggctgaacgcagtaattcaatcagcatggtaccagcagactctgagacgttatcacgacaaagccgtgcaacaacaatccttctcagtaggagatctcgtcctccgccgaattctaacgggggagggacgacacaagttatcgcccttatgggaaggacccttcgtggtagcagaagtcactcgaccaggatcatatcgtctcactcagatggatggcacagaagtcggg

SEQ ID NO: 43185 - DNA, 458 bp, Zea Mays
acaaaaaaataccaaataggacatctcacaacaataattaaataatataacataaacgctactgaatagtggttaactaggtacatcataaaagatggcaacaaaatcatgatgaaaaggaaagaacattacaacggctcagcaatattgatttatcaacgaaatatagaatgctctgatgcagaaacattggatttcctagcacccggacctatctatctagctagctccagtgagggtgaggtagaattgtagttatccaaaaagtcaagtgggttaccgcgatacagtgtcatgttctgaagtgcctccattttgggctcacgccaaagtccaatttacctctcaggagaaagctaagcacatagctctcacaccgaacacaatttagtttccaaaaattatgccaccagggcaaaaatctctattccatatgagtcccctgtgcaaggacaacc

SEQ ID NO: 43186 - DNA, 705 bp, Zea Mays
gggggaaagcctgattcataatgggtcagtctttgagtttgtgaagacccctttcactatgtaatgaagaagtttcagttgctccgagcaaactttcgctttttcgttgttccttctttataatcgcttgatagttcgtccttgcgcctaacgctgccggcgtttttagaaataattgccgagcgataactgatgacactggcattttagaggtaaccaccgagtcgtgcttgacactgttggtgttttagaggtaatagccgagcggtgcttgacactatcggcgttttagaggtaacggtcgagttatgtttgacactgtcggcattttagaggtaaacaccgagtcgtgcttggcactgtcagcgttttagaggtaacggtcgagttatgtttgacactgtcggcatttttagaggtaacagccgagttatgtctgaagtttcactatcccgagtgatgacttgacactttttggaaatggcgcccaacccgggaaacccccatttgtactcatgtcgacgtgtgcttttgatttctgagccctaacttcacatttccgccttgaaccatccctctatttccctgagatttcgctccagtttgttccgccggcaagattgcgatggcgccgaaacggaagaagcagagctccaccgtggcaatcatcccgccaatcgaccccaacaatcagttatcgttcgc

SEQ ID NO: 43187 - DNA, 539 bp, Zea Mays
gcaaattttagagaaaatgtgacctaaacatgggctgtcaggcaactgaatggggggatcgccatggtacagtagctcgagtggatcagaatgccagctcagacgctcgtcgccggcgataagaacgccaccacggcttgggatgggtcatcggcggccacagtaaaagaatctcgcgacgtggcgttaaagcagagaggtggcgttttccggttaatcggcggccactgtgcttttagccgtggcagcgtggacggtctaccgacgtcgccgtggaagcgccggtgacctcggttgcgccacgccccagcttgttaccatgcggcggtaaccgtggcacccttaggagtgttatccttgcaccgttgcaccggtgaacgccacggttacagccaccgtgttcttccctatctccggccgccgcgtatcttcattcaaattcccggccaccgctcgctccttctataaattgagcacccaggtagttgcgctaggtaattgcgaagccaacgcacccactcccactcgtaatcgttcat

SEQ ID NO: 43188 - DNA, 432 bp, Zea Mays
cttcaactgatctctaaatgaccatagaaccataataaaaaacttattcatagtgatagaggtatctctttacgagtccaagaaggaaaagaaagaacaaaggtttaaggcgtttggtagtttggctgcaataccatatatacggtctatcaattcataaaaatcctttatatagtgagaaaatagttcgatggatataagaagctcaaagatcttcccaaatgaagttgatttattctttaaaggagagagtatatattttatgggaattgatttagtttattcggaggccgagggattattatatatctcgaagagaagaagtcaccgatcgatctatcgagctcccgctctccttgctactagctagctagtataaataccccagccaggacagtgtagcttggagtactggatcacacagatcacccc

SEQ ID NO: 43189 - DNA, 347 bp, Zea Mays
catgagccagacccgcttgcaggacacatggtgaccttcacatccttccacgagcgagggttcagggtgcccacgagccatttcatgcgggcgctcccacactactactaggtggagctccacaatttcaatcccaactccatcgcccatgtggccttcttcgacgcggtctatgaggggtacctggggattgagccccattgggacttgtggcttcacctattccgggtggagccattctccctctccatggacgtgaagaaggtgcgccaagaggtgagggccggtggttgcacgctcctgctgcgctcggatcgagtgtagctctacatccctgccactctcac

SEQ ID NO: 43190 - DNA, 445 bp, Zea Mays
gtggagagctggaggtagtctgaaactctaaagaagaaaggtgacgactgaatgagggagagtgggccgttttgggctattttgtgttggcgtatttgttgggccaagttcagctatatagagatgactccgaaaggatgtaaaggaacagaatagaaaatactagaaggattacctctctcgcgtgcgtgcgtcttcttcgttggaggcggcgtctatcgagctcacgtcctggcgatcacgccggtggccaggggcatgacaagtggtatcaaagcttccgatcctcggcgtctcggggagcgggtcgtgtcttcctcatcagcgtctttgctgcggtgactagggtcttcgacgcgggttcccaactccatcgacgcgggttcccaactccatcgacgactctcggcatcggcatcgcgtcatcgacgctcgtcgatctccg

SEQ ID NO: 43191 - DNA, 509 bp, Zea Mays
aaagactatcagaggagtagattgccgaagctaggcaatatgccaaggatctgaagtatcccctagggtccttggtatacaacggcactgacaaagatgactttatatattgcctaccagacgataagaaaatatctgtttgtcgagaaatggcaaagaatatgggattcccaaagctagagcttggcttatctgcgatgtcgaaggatgaccttgcagacagtcttgcttataatagcttgaaggtatatacacttttgctcaagaaataagttatgtttattagttttcttactgtttttatgttctcacacatatatttttgctattagggcttaattcttagtaaagctttaagggctcaaaaagaagccgatgatgaaagctgataaattgcacttgggaaccttcggacagaggtcatcacactgaggaatgaagccctcaaaaaagataagattttgctctccttagtagataaactaaaagtcagtgaagccaggcttaac

SEQ ID NO: 43192 - DNA, 455 bp, Zea Mays
ctccggtagttagctatcgcaccaaatggccaactagttggaaaaatgagtggttttatgtgaaggccgatgagaagaagagggagaagctcaagacgctagtactgagccctctaagcttaagcttcgggttgactaggcctctttgcgacatgctgcctgggtcaccatgccgacaagctgtgggagaattcagagtagtagctgagcagatcagcaccagagatctggttcaagaatatctggcctataaagtgttccctacgctaagcgaatggaacatgccgaagctaaaggggacaagggagaagaatgaacttgtacgacttccttgtaggttcaaattcgagaaacagttcaaaaaaccataccaagaatggctagagatgatagataccatgtgcaatgaaattttggggaatttcactaaaaaggaagatcagttgatgactgcg

SEQ ID NO: 43193 - DNA, 817 bp, Zea Mays
ttacctcgagtgaagatgagcacccatgatggttgagaaagccaaggcgatttgctcactgtagatgggctcagatgggtcccgtccttcttgacctgatagctgtcttccaaccttggtcaccatggccaatgcagcataaatggaaggttgggcgaacactagcctgtagaatcaaccgacattcggagatgctgattgctcaacaaccaagataacccatcatcttaatacagataacagaactgctacattagggcctaacagagtttgttatataatgctaatggacggacaaatcgataacgatgcataagcaaagtctggaagctaccgccggatgcccccacatcatcatacactgtactgttgtactgtgaaagcctaaaaaaataaatgaccatcacccttgtcagctggactgctggagagccctgggaaaggtaagcataccataaggaccatcgaaattcatcattgtcaacctgcaggcatgagaagcatgggggggggggggggggggtgatcatcatgaaaagcatacagtagttccctccagaaaatatgccattagcagcagatatacataacatagactaacatttcgggaacaattaagctggaagaaagcagcaacacaaagaaccatggtgcaaagggtaaagcaaacagctgaaaagttaaaaaaaagaatctcaatcactggatctgggtgactactcaggggaaacaataaaagcaggaaagtcaaataactaattagaatccgttgtcatttaacagccactgtacagagatctttcgcaacatataatga

SEQ ID NO: 43194 - DNA, 658 bp, Zea Mays
ctcagatctatctttgaaaacacactggctcctctcagctggtcgaacagatcttttattctgggcaaggggtacttgttcttgattgtgacctcattcagagctcgataatcgatacacatcctcctagtgccatctttcttctccacgaataggataggggcagcccaaggcgaggtgcttggcctgatataacctttctctaatagttcatcaatctgcttcctgagttcaaccaactctggtccagatactatgtaggctcttttaaagatgggggcggttccaggaagaagctctatggcaaactcaactttccgctcaggtggcatacctggtaagtctttcgggaacacgtccagaaattctgacaccaccttgataatctcgagtggatctgcttcactgctatcaatagccatctgatgacaactccctttccttggctcgggcgggactaactcggtcaccacctactttcctagtgggaacatcaacttaattgtcctcttatcacagctgataattgcccggtacttatctagccagtttatccctaggatacatctattccctgagtacccattactatgaggttagctggaaactctatcccccttatttccacacttatattcaagcaaacactatcagctcg

SEQ ID NO: 43195 - DNA, 796 bp, Zea Mays
cacacatcttatgagcataaaaatagaaagcggcggatttaaaattctacatcaaatggcgtgctccaagtgcttaaaaacatcgacagtgatcaatttataattcttgagttataggaatcgtcgtgcaattaagagggatccgcaatggttaagtaagttattcaatgagctaagttcaaaatcctttgaaaacatcttcgagaacatttttccagatcatgaatgcccttgagcaaaaccatttttactgcccacaaagtctccacctttgttctcttcaaaatattcaaaacttggttttcagccctgaaaccggttcaaccggttttgtgactgctcctctgccatccctgctctaacctgtctgacagtcagagctgtcagaaaagtcgttgcagatcttttgggaaaactggttcaaccggattttttccctactcaaccggtattgaatccagtcgagtctccggctgagtaggttagtgaaccgggatcttcctggtggaaaccggttcaaccggtatgaaaactggttcaaccggtttttaccccttttctcccaacggctgccaacttttgggggatcctttatatacccccccacactctctctcttatttacttctgcctctcccacgatatcttggctgaccaaactctcaacaagtgcattcatttcacctctcacacccgcaatcgcatctccttcaatcatttgaaggacccttggtgtgaggtgaactcgatctaacacgctgttaatttcatctcgattctcctattctctttgttc

SEQ ID NO: 43196 - DNA, 298 bp, Zea Mays
taaagatgacagcaagaagactgcaagggtggagtgacaagcaggttgggcatgtaaggttgcagttggctttggcaaaggagttgctgcatagactggagatggcacatgatgaaagaccacttaccccagcagagatctggcttataaacaggctcaaaaaacaatccttgatgctgtcctctttcaagcgaacaatggcaagattaaggtcaagaatttcatggctcaaagagggcgatgcgaatacaagatttttccatattcatgcaaggcatcgtaagaggaagaattttgt

SEQ ID NO: 43197 - DNA, 626 bp, Zea Mays
gtaagtgtcatttcttagagtggttgtatggtcctatgtcccattggctagagccagaggcaaaggaaaagaaaaaaaagagtgggcggaagaattgaagtctgatccagtactatgcaaatgtggtattgaagccaagtatggattagttccttccgagcttggtgtttgctatttttgtggacatatggtagattacgatgaggttggtatttattttttgtttgcatcagctgcaatgttgcacccgtacttactgtcttttgtgtaggagatgaggaaatgcagttgggagagatacgacgagaaagaagaggtgatgcacacaataaagtcctaagagactaatgggacaaaagatgcattgtggatctcagctcgtcgattcgtacattaaagattgcagacaggacatgcgtaggttcgcgaaatcaatgtggtgagacgaccctgtggtgctcgtcgtagtgagggtctagcaagtggaactgcgccatcctgcaaattaagaaaataaggttagtaaaaatattaaaatgtaacaacaacaatggcatagtagaataacaaatgtgtactctgcgtgtgaggtaaacattgtatcacacctgactaagtgtccaaat

SEQ ID NO: 43198 - DNA, 505 bp, Zea Mays
gcgcacgctgtggagctccggcgagcaccaagaccggccaaacggaacaagggctggttccaagctttggccgaaaccgaattcatgccccaaccattgattcccctaagttaattgcacaaatggctaccaaatgtccctggccacggacgcagcggaagtaatcaatagaaccgtgcgttcccagtgatctacggcggtttagttaaaactaaagggccgaggagtttgaggagagcttagggatgttagaacaagactagagacaacatgatcggacctgatttgcactgaccacggcaaagtgttcttgcggcttgtttgaaccgatttgggggaattgtaagattcgcgctcgttggggatcaactgagggtaattcttggtggcggggttcttgactaccctacggagctagtggcgcactcaatttataggcgcatcgagcgacggggaagaatttggccgaggggtgctggcggccggagaggggaggcgagctcag

SEQ ID NO: 43199 - DNA, 314 bp, Zea Mays
tcaaactttggtgttcaacacagactttgtttcttttggataggttccatctgggaatgatagtctcaactatgagatatcccccctacataggagagtgatcattcatcaggaatgtattattcggtatgagatttatatgttgcatatttataattcaaagatatgagtcctcctaggatctcatgacggatctttagaatcctattaattgcataatttaattcatgccatttgccagatatattacatagcagaacagtgtttattcaacacatatgtgggatgggtctctcacaagaccacttgaacca

SEQ ID NO: 43200 - DNA, 334 bp, Zea Mays
cgagtgaggaaggagaaatggtagcacatggcacagatgagagagggagatagagagataaagaatgagtgctacctttcagaaggaataagttggaatagaaaacactcgatccacagctgggagcaatggccagaggcttccggaggcttcggggattgtataactggtgcaatagctagacggtaggatctcgtcatggagaaacaatccgacggcttccaaattttggacgacgtgtccaccttggtttgggacgaacgggtcctggtttaatatatagaaataaaacattatttttttaaaaaatatacataacgcgcaaacattaaaa

SEQ ID NO: 43201 - DNA, 289 bp, Zea Mays
tatttgaagtattgtctttgcattgttgtatttctagtattattctcttattgctagttgtcggggtgaagttgggttcttgcttaggttttaattagtgttgatttttagaaaagcccaattcaccccctcttgggcatcgtgatcctttcaattggtatcagaaccttgttgctcttagattagcttaaccgctagagtaacgatgtccggtggggatggacctcctcccgtttttgatggtgacaattttccatattggaaaattcgtatggaagcttatttagag

SEQ ID NO: 43202 - DNA, 338 bp, Zea Mays
acggctcgtcggcggcgaggttcagtggattgggacatttcagtggatagagcgcctaacaaccagagttgcaacgcctagagcttggatttctatgcaagaacatgccaatccatctataacaaacttgtagccctacatacaaactacaattctgctatagagatcttgctcaattgcttactcctttgagcatgaatcaagcctaaagttcttcaaaactcattgatagtcaatattcagtctctgtattatctgacagccagactttagggccaattatctccactttttgtataacaacaatgcttaatcccttaagcaaatttgtactccta

SEQ ID NO: 43203 - DNA, 681 bp, Zea Mays
ctctcagacaaggattcacattttctttcatacaatctttgaagggatacatatatgaactttagactagcatggggtgtcccctcccctcatcacaaataacacgtttcacactaattggtgggcagccagccctattgtatataaatataggtgtgctagaaaatacagctttgctcaaaattaagtgaaaggcaaccttccgcaaatagaaattctttcaccccacggacagaacggctagctacacatggtcacatgctacgtatacagtgcatgttctgttttctatcgtcgccctttttacaaaaaagttcttatacttctttctaattaatctaacttgcaattcaccttatccctcatcgaaccaaatatatgatatacgtatatcatcatggtgctaatggctcgacataatttggcatatcaatcataattggtatcattcttagggcagctaacttttggcgagattggttttggtacaaattaaatagttaatctataaggtggctatctactcaatatttcagtcaaaaaaagtatatataatctgtagtgctcaccgtgcagaataaatcaacaataagatggtgtgtcgtcgcaacgcacgagtataaagtgagaggagaaaggcattaggatatttatttaagcctaatgatatttaaatatttt

SEQ ID NO: 43204 - DNA, 523 bp, Zea Mays
ctaaagtttattcaaaaacattattttacactatatattatactatttacaaaataaagtttaaatataggtattatgatagataagctgctcaaaatagtcttgctactagtattgctacttttgtgctcataagcgctcactggccgttgggccacagctctggggccccagtcgacagaaaacagacacacaccctgctctggtaccggtgagattgtcgcatcgcatgtctcgccgttgaggagctgccacgtatatggccccacacgtcagtcacaggccataacacagtaacactcaacctcgctcctcactcagctcacatcacacacctcaaggatctaaagtgtgagagagagaagcttcacttgcaaaaaagcccccaggaagaatccaaacgttaggaaagggacacatgcggaaaagcggcgaagtggacggcagccacagcccacagccggcgcgaccggggcaaatcgcttcccctactttctattaatttttaaataccctctctttc

SEQ ID NO: 43205 - DNA, 823 bp, Zea Mays
aaccatatggctaagtctgattttcagaaattaggttcaactttgggaccttgtaactttcaaacaaaagggattttgctctgggtcaccacatcaatattgtagatctatcatcggggaataactttgcttaagagagtaaatatggttgttatgcaaagttaagagaaaaataggcgccaagttgggctgtcagtcggtttgctgactgaaatatggtcaccagtggtattggtcgaacttgggatcagatttgagctaaatccagtaggaattcgactaggattgctataacaaagataaagaggatctataggactacaactttgctgcagagcctcggataggttgccatggaaatttgagagataattgtgcccaaacattgactgtcaggtgcactcatggcagctcgcgatggtacagtagaccaaaggggatcagatcgccagcacggcaatctcaccaccggcgacctctctgcgcgtagattcgtgccgccgctgtcctgatccgtgctcaccaatgcttggactatgcttggggtcacgaaaatatcgccgccgttgataagtgcggtcactaaacaactccgaccaccgtaccaagttgccacggccactacggataacttcgctggtgaccgccgtcttccggccttgtgccacgtgcctgagtacctccaccgcatcgccgtgaacccttgtgactctctgtggctcgtcggagtgactgccacggtagatgccacggattcacgcgcgccagtgaactcttactcctccgaccgccgcacgtcaccgctaaaattcccggccaccgc

SEQ ID NO: 43206 - DNA, 1172 bp, Zea Mays
gatttccaagtcaaaaggtgtgaattgggcttatttgcaaaaagccactcaattcctctcatatgactaagtctgaaaactgatgaaccaggctgactttggagctctgtagatctaaaaatacaaagattttgcctagagtcaacatatcaaaagtctagagctactataggagtacaacttttcttaagggattaagcattgttgttatacaaaaagtggagataactggccctaaagtctggctgtcatactaaggctccctgatattcagagaaagcaatagattggatcaactttgggaccatgtggagctcgaattgatggatatttaaccaaaacctctgtggcaaaggtagagctggtttgttaggctacaaatttgatatagtgaaatgatcaagtcactgcataaattttggaacaaatctccctgccattcgctctgtcaggctgactgaagaagttcttgatggtacagtaagcaaaaagatctgctggttcagtgaacttgccgtaggtgacccccgcgcgtggattcacgccgccgaggtgattcgtgctcactggtgcccggataacgcctcggggtggaaagatcttcactgctattgagcttaaggcactgttccgccccagccgccgtgtccgcttcgctcacggccgaattcagataagttcaccggagttagccacctgccgctcagatgacacgttcctagacgcagtactttgtcgtagtgactcgctctagcacatccggtcatcgctggtgagcttgccacgataattgccaccaatcgcttgcgccagtgcacctccttctctccgaccgccaccgcgcgagcacaaattcactggccaccgctcaagagccctataaattgagcacaccctcggctccgttaggtattcaagcatccaatccacccgctcgtgcctccaattactcaccaaatagccccaatttgggatttcccccaaatcggtctgaaacaccgcgcatagtgacctcgtcgtggctagctcgtttcaggtctattcatgctctctgctcttccgtttctgtgtccttaggttctcctgatgctcctcgaccaattcaattgagctaaaccacgctagatcgccgggaacacttttgttcatccgtagttcacactgtctccgtg

SEQ ID NO: 43207 - DNA, 1726 bp, Zea Mays
atcgggcactaaattaaatattgccctgtcacaagggataccaaggagataatgtcaaggtcgatcccagatcaactagcaaaggctatagcacatacctatcaaccacaaggcccacctactaccaaaatgttcaaccccctacccgcattatcccttaactaacacccaaagctacaccatgaagaaagactgcaaccccctccaccaccacaaaacatacccccacccactagctccctccaccaccacctaagggcgacgacaatttcctccaaccacttgtccacgacatcataaatatgacatctggtggctccagtgttgacttcgagaagaaaaggaaaagaaaataatactattgaagggtaaaccacgttgcagtaccggacccgttgtacaaatgaagtggtcacatgtcccgctgacatttgattctagggatgtagattctcaaagtgcttcacacgatgacgccatggtaataaaccacaacatattcggctaagagttgcataaagccctcatcgacaacagaagtataacatacaccatatttctgcatgtcttcgatcgcactggcataaatcaaagccgattgttgccagttgctaacccgctttacgggttcagggggaaggccactcttcccataggaaaaataacattaccatagtcctttggcgtcaccccaatgcgaggacataatacataaccttcgacatcatggacatgacatacccctactatgccatcctcgatagaggctcaataaataagctagaggccaccatccatggacttcacttatgcatgaaagtcctcgacccccttagcgccattacagtttacggggaccaaaaaggaaaaaagtggcccataatatcgagaagaagcctccgcactgtttggccaaggagggcgaggacatatttagataaggagaagaagcctccacagagcagcacagaagggaaaagggtacccctagaccccgcagtaccaaacatgatagtaataataggtgaatacctcaacaatcaggacaaagataagctactagcttatctagaaagaaaaaaagatgccttcatgttgtcctcattggacctagtcggcgtgagaagtaatgttattgagaatagcctcaatattagcacttcagttaggccaaaaaagcagaagcttcgcaagatgtcagatgacaatgctaaggcaatgaaggctaaagtgcagagactgctagaagcaagatttatcgagccaatttactacccaacttggctcgccaatgtagtactggtcaaaaacataaatggcaagtggaggatgtgtatagacttcacaagccttaataaggcctacccaaaagacgacatccaactaccaaggatagacaaaataattgattctgtcgttggctacgaatttatgttcctccttgaccaccttttcggttattaccagatatacttatacatgaagaagcataacaatgccaaaaacaagtttcataacgccttttggtatgtactgctttgtttgtatgcccgaaggcctcaagaatgcaggctcaacatttttagattgacgaagaccatcctagaaaatcagattggtcacaacattttcatgtatgtcaacgatatagtcatagctaacaaacataaagaagactacttgtcagaccttgtagaaacatttgcaagcatgcaagaggctaagc

SEQ ID NO: 43208 - DNA, 314 bp, Zea Mays
gctagaatcacaaccgttctggaataaaatttatatcctgtagcatcaactattttaggaccaagtaactgaagtaagaaagtatgcaacaaataaatttgtcatggcaaatatgccatctcattacatgtctccgtaaggcaataatagcaggacgtaattgcctcagaatctcaatgcaattactcatttgctacagctgcacagttgctattgtaggactatctttcacggcttgtccgttcaaatcttatattttaaatttcactctgctaggttatcttcagcaaaaacgtataaaataaaggatttac

SEQ ID NO: 43209 - DNA, 525 bp, Zea Mays
atgaatctaatgtttgctacctagctaagccttaggcgtcgtggcggtgtgctcttcggctttgccttcattgtcctctgtccgccctcgtctcagccggccctccctcttttatataccaagaaggggtcggttatagatagcttcttgtggaaggatttactgcaccgtggcagaacgaagtgttctaccttggtaaaattgtgcttgtcattacgcgcctcggtcatctgagctcctctagctaatatctttatgtctggctacacgtggacagtgacgagctctggcatcattattactctctctgtgccacgttgacccctagccttcgtagcctgagtcttggtgtgactcatcgtgttgtcagccctacagattgccaaggcactcatgcctaggctcggtaggtcatgagtgggcggcatgcctatgggtccgtaggtcatgagtggaaggaggaccgactcccttaccgtggctcgacatcaggtgcagttaatgcggtcagtcatttatggcagg

SEQ ID NO: 43210 - DNA, 980 bp, Zea Mays
cccatttctcctcatctgcagtcagtgcaccaagagcgtttcagtgtcccgttcgatccgggatagtcatgagcattgggggatcatcatcgtcgttagtggcttccttgtgactgatgacgactagtgaatggtttaggtgccttggaccggttccaccgaggcagaggcagtggtgtaggagtaggacacaagataagatcacggtcatagtttactgtcaaccaaccttgttagtccgacagcgacgcctttgtcagcgaccgcgaccgtagctgctcatcgtctctcttgcgactttgccagtcactcgacccacttcagcaacgtctccgaatttcatagaaatggtccatgaatttcatgggaaccagtttattttcaaagaaaaaaacacaggaaacaggcggtagttcaagcttcagcaccgcccgcctcgtagagcaagagtatctatctgcagcttgggatagcctgtgactgtgaatggcacgcacgctgatttggtggataggtaacacaagaaaacatatatggtagaaattgtcttgctactgatttggtggatagggaacacgaggggagaggatctatgcggaatccctttgctatttaaaattaaatgacaagggaattcctctctcatgaaatcactcgtgatctatatccaccaaatcagtctccaggatgtagcctctcaggttcctttgcaacacacaggaaacaggataaattcccgcgttccaaaataggcctccttttttttgtgtgtggtccatgaaccgtgacatgacactgatacacacaggttgtggccatggatccggggtccccgatctttgttgccagccctgaatttgtctccgtttttttcttttctttccacggggtccctggtgagattgagatggaccgtagatattgtctgttcagtttcctggacgaaatgggctcggtaatttacgttcctcattccagca

SEQ ID NO: 43211 - DNA, 825 bp, Zea Mays
agaagattatgtaatctgttatatgataacctcaattttgatcatctttggtcttgatcttcaacttggagtaccaagataagtgccaaaatatttctcaacaaatatccttgtaccccttcactttccatgattatagtcaattcaaaaccaaactatggtctctcaaataacttatgtgatttatcctatatgagagccttccaatcaaagtgactttcaatatttcaaatacttgtcacttatgacagattctgtatactccaaagaaacatccataaattttgatgtacatatcctatgaccacgaaaattggtggagatgtgctttaataagtctgataacaactgtaaaaagttgagactcatttgacttcatatgtgctgccacccacaacatctcccacaataggtacatgctgaaaactgctgtgtttgtgttgacaagattgacttaatcaagaagtttcacttatccaatgattatgaaatttgcacagactttgctatcatatgcatagagcaagtaaactgaatttcaagccaatccaaatagatttgatcactcaaacatggctatgagcacagccttgtcacattttcaatattggccagatttcagtatattgagttattcttcttcaagttgaatcaaatttgaaatgaactacttttaaaagacaaatatccattcaaaccacttactaaatgaagtctcttgaatttattcaacataaatcaatccaaacttgattatttagcaaattgtccattcaatcatcttatagcaagcaacatatgcatatatatccaattcaatcaact

SEQ ID NO: 43212 - DNA, 627 bp, Zea Mays
ggcggcggtggagttgcacccgggccacacggtggagtttggcgtttcgaggatctcctcggttcgcgtgcaagacatgcaacagttggggtattttgggaccggagttggacgagttccgggggcggaggagattccgaagccggagggtgagattgttgtgttcgaggaattttttactgccggccttcggttacttgcgcaacgttttgtggcggaggtgttgcagaggtttgacgtgcagattcatcaattgacacctaatgccgtggtggccctggcgaagtatgtctgggcagtgacttcgtatggcggtcagccctccgtagaggtcttcaccaaaaaatattgtttgcactggcaggagaggaaagttggaagcaagattgcacagtttgggtcttgcacctttacgccgaggactggcaagacttcggctgaggctgtggagctagttccttgcgcccgcaacaagtggggcaattggtatgattattggttttatgtggcggggggcgacgttgaagacctcccaggactccctgcggtcgtgatgtgctcgcactgctatgtggcgttcccgccgtttgaggtggcggaggatgatagtgacgaaggggccctttg

SEQ ID NO: 43213 - DNA, 584 bp, Zea Mays
cggggggatcaggttcagaacctcgccgccgacgatctctacgttgtgattcccgctgccgccacgatccgcgttcgctggtaaggggataaccatgataaggtaaagatcttggcactggattaactcgggctcgagcgtggatgaggtttgccgtacccccttgccttgcggccggcgcagataagttcaccggtgatggtcgcctgctggtcttgtgccacatgctctggtacctccactgcatctccgtgaccagtcataactctccgttgatcgctggagtgattgccactatagtaggacaccaatccactgcgccagtaaccttcctctccgaccgccgcgcgtcatcactcgaattcctggccatcgctcttgcctagtataaattaaggccaccatgagctccgtaggatcatcacgcacctagccaccaagtattgtcctcagtcgatcactagagagcttcaatttaggatttcccccaatctgctcaagaacaccgcacagtttcaacctcaccgcggccagctcaattcaggtctgctcataccttctgctccctcgtttgagtgttctta

SEQ ID NO: 43214 - DNA, 1416 bp, Zea Mays
atacgcaacaccaatgtagcaaagagtgtctaccacaagggcttgtcgcttctagaatgaaggtcgtatagaagaccaccacaccttcgcaccagtcatgccaacgaaaacatgcaaagacataggatttttaggccgacgatcgcgaagctgatctggagacgaaggcaccggtacctcgacctataggtcagagtcctcaaagcaacatcaaggggggtgaagcccacaagacgaagatggcccacctgctgggcccatgcccatagtccaggatctcaagcgggtagatgtattagtgtaaataagtgcgggacagtactatactataattaccctattgcacaacatatttcgggaatgtaatacataactaggggtacaattgtatttagacctgcgtccccctgcttaccctataaatacccccgctcgaatcccaacacgggcgcaattgacaagacattggaactttgagccatctgttttgtcatgccacatgtctctcctgttcttgagtgcttgggcccacatctccaatcctaacattaggtgcccatcatgttgtgctatgaatacaaaccccacgatggctcccaagaaagtgaacgttagggccaacttctcccctaagacgaggtcgtgaaggcaaccatcatcgccaatgctaaaaaagccaaggtcactttccccgacaaaattccacccccacggtaaagaccccccctcatcattaatgggaagtaaggccaaactagccaatatcctcaacacaaagacccacctaccccgaagggtagcgtccatacatgcaactcagagacctcgagccatgtccccttcaatccacaatccatgcctaccaagccaaaatctatcctagcctaacaagaaacatgcacccagcgcaaaaggagggtcaaccgaagaagatgaagacatactccaagacagcgacaacctagacatcaacaccgaagatcaactcatactcaagagattgggcatgcataacaacaatctacaaaagcaaaaagaaactcttacaactaagagagtaagagacatcacactgaagtccaagcaagaatccactgcctcttcaacaggaaagggaacgcccaaggccctcaagcgggaaattgtgaacctacaaagttagctgtctaaccctccatagtacacatccagacatcatgtcatcgacaataacatcgaacggatcccgcatcaaagcacgttccagggtttcaacgtcactgatgacaaatgtcctctatcaacaaggttgcatgccactccctagccttgtaactatagggcacctagctggccaaaatacaatggcaaggtagaccattcatagttcatcatgagctaccaaattgtagtagcctcctctatggtgacgataac

SEQ ID NO: 43215 - DNA, 490 bp, Zea Mays
ggggaatgaaaacaaaaggaaatatagacttgctaaatggaacattctgtgtcaacctcaggatcaagggggccttggtattttggatctgaatatgatgaatatggcccttcttagtaaatggctgtacaagctactcacctcagatggaatgtggcaacaattactacgtaataaatatgttggctcaaaacctttggctcatgtgcagtggaaaattggtgactcccatttctggtcaggcttaatgaaagtaaagctagccttcctccgttttggctcattcctcataaaggatggctctcaagtgaggttctgggaggatgcctggttggatgggtcctctttaaaagaccaatatccagccctgtataacattgcgaggaaaaaaattcatttcaatatcagaagccttgagcgtttcgcctccgaacttttcctggcggagacagttatttggagccaatttgatcgattggctttccctttt

SEQ ID NO: 43216 - DNA, 519 bp, Zea Mays
cttaatgttggtacaagggattaggccatactcctaactcacttaagcttaaattggtgacttagatcaactcggccatacacaacaacttgacctacataacaggttacataacttatccaaccaatctagaagcaaacaaccaaactaaattctgactaatctcatttaacttatagctacctactaaaactcttgtccctaactcgaatgaagacaccaaggtctgaaaagaagagcccaacctcgacaaggacggagatgagtcaaatccaacttcaagaggaaccaagatccacagttcaggatgaagtctttccttattatactcttccttgccacaacctatacttgccataaccgtacctcatctgacataataggtggctaaacatattatgtccatattttcctaatcatcttctaactagtatttaagagcttggaataaaacttttagctcctaaaccatatgcaaaactaaattttaaaacaaacttgttgcaaccctttccttac

SEQ ID NO: 43217 - DNA, 784 bp, Zea Mays
aagagtgtgctgcccgagctgagtaggcatggatgggagtttcaaccttcaaggtagagtgactgggtgaggtgagtatgatggaaatccataaaaattaaaaagatgctcggagagctatggagattggacaacaatgttcttggaagatttagagaagaggataggcgaggtaaagagggagctagaaaattgtaggaggagaagaagcatatgtcaggaacaggtgaacccagagaacatgtcaggaacaggtgagtccgtacctcatggctgaccaaaagagggctggaacacgttcttccatgcgtatgcttcagacaggaaaaggaaggaatcatgtgaggaaattgattgatgataacagatggtgaatctcttgaagctggggacagggaactttgcaccgggtttcaggtgctccgcaagctggaaaccttggctgtccaaatgagtctggaatgggaggtgcaacttggcatgccaagaacaagtttggagacagatgcaatgcaacaaccctgggactggctgctcgatggagatgtggaccgaagcccaaatggttgctcgtttatgttactatctaattctatgcattgttcagtctatctgcaatagattgtgtaatagggtagcttagcaggcagcttagctgcccatggggcttgtaacttgcagtctgattcacatgtctacttaagccagcccccagacttttgtaatgtctcgatggtaatgcattgacttgtcggtcctcgagtcattcatccacttatcaacg

SEQ ID NO: 43218 - DNA, 790 bp, Zea Mays
ttgtctgcataactcttttgccgactctgggcttcgagtagcctcttgcggatcagggcaactttctcttctgcctctttgatgaaggcaggcccttctagggtcttttctcctacatttgaccacatcagaggggtttggcattttcttccgtacaaggcttcaaaaggtgacatcttgatgctggcctagtaactgttgttataagagacctctgcatacagcaaactggactcctaatctctatcgaaggtcagcacacaggctctcaacaaatcttcaaggactttattcactctttctgtatgtccatctgactgggggtggtaggcggtgttgaagtctagcttggtgcccatggcttgctgaagactcaaccaaaactttgaggtgaactgcgttcctctgtctgatactattcttcgtggaatgccatgtagtctgactatctccttgaggtacaaccgggcgagggtggctcctccgtaggtagtctttactagtatgaagtgagctaccttggtaagacggtcaattatgacctagatagaatcgttccccttttgggtccagggctgtccgatcacgaaatccatgcctacctcttcccacttccatctgggcactagaaggggttgcagtaaccctgcgggcctttgatgttctgccttagtccgttgacaagtgtcacaccaagctacatgctgagttatctcctttttcattcctctccaccagtatctggtcttgaggtctaggtacatcttagtagaccctggatggatagaat

SEQ ID NO: 43219 - DNA, 405 bp, Zea Mays
gaagaatcggagtctcagctggcgtctgaaaccggtagcaggaaaacccgagaacaaggaaggcatccttacctcttcttctggtgatggcggccagttaggtattctcaaaacccctcctccaattctgaaaaaagagaatgaaatggtgcgtcgttttttctgccaaaaatatggtacggaggggcatcatgttagggattgcttcaaatctttatggtgtgagatctgtcgcaaagaaactcacaacacagcgaggtgcgttctccccaaacaaaacaagccttgtatgcctattgtaggtatggttgcggatggtttagggttttactcgtcccacttttccaaacctctgtcgaaaaaacctaagagaagtttcattggtttggttaaagtggttgaggg

SEQ ID NO: 43220 - DNA, 663 bp, Zea Mays
gtaatttcaaaatttccaaaaattctgtaaaaattacagtgggtgaatactggtccctgaagtctgtcctataaatttgaggtcaaaaataaacagaacatgccctggacaaaaataacaaaagttggggcagaggggtcactttgcactacaactctgatctaggtgtgggttctgtactaagagttatttttgctggtatatatgggtaataacatgcttctgtgcaaaaaatcataaagagttacttagtgattattcagttatgattttctaaagtttaatgccaaaagacacttataactaacttcctatttgaataatatcaaacaacagaacttgtatttttcttaggttcttcttagcacaagaatagtaattcctaaggtaggggtgttttttccttaggattattttcttatgacttttccaagttttctctgtttttcatgaataattgtgagtgcaatttcctttcactggactatggttcaatagatttttcttgtgaactacataacttaggcatgctagaaaaactatggttgccccttggttttcctttttaatccccctttttagttttcctaagtttgagcataaacaagtttcagtgaataaaccttccttaaccttgtatactggggtgtttattaattttaa

SEQ ID NO: 43221 - DNA, 524 bp, Zea Mays
aaaaggagccttcggtagcgaagaagccagatgagccgaaaaacgaagaattattcatgtagttgaagttatcgagcagacaccgccgctggcatcagcgtcaaagactccagctattgagagcactactgctaccgaagctgcacccaccgaagccgaaagtgccgaagcagaaaccgctgaagatgtaaatctagatgccacactctctgaaattgataccatgcttatggatgcggccgcggaagaagctgctgcagccgctgaagagatcccgggcacagtggctggaaaaggaaaggagaaaaccaaggatacttcggaagaagaggacttcaatttccaagatatacttgggcaagaattatcaaaggctgaaaaagaagaactgaaagagtatgctatatcttgcgggtacaaaccaggtgcgttactcttcgggggagtcaacgaagaaagcttaggatgccttcgggaccacactggggcgaaggttgtcggcactctatcgaagagtgttggcc

SEQ ID NO: 43222 - DNA, 512 bp, Zea Mays
gcctttgtacctttttctgtgattgcggcgcttccattctcatgatggcctcgattttttctgggttggcttcaattactcggtggctgacgatgaatccgagtaacttccctgttggtactctgaaggcacatttctctggattgagcttccaccggtatcacctcaggctgttgaagaccaactgtagatcttcaatgaagttttctgttttgatcactacgtcatcgacataagcttccactcgcttgccctagtgatcggctaagcatgtttgaatagctctttggtaagtcgctcccgcgttcttgaggccgaacagcatggaggtatagcagaaaggtccaaacggggtgatgaatgcagttttttcctcgtcttcttttgccaagctgatctgatggtatccagaatagcagtctaggaaggacaacatagaacatccagcggttgaatcaaccacctggtctattctagggagtccgaagggatccttcagacaatgtttgttg

SEQ ID NO: 43223 - DNA, 616 bp, Zea Mays
cgcgtgcccactcctgcctcctgttgggtgggacttggcgtcagctcctcctccactgtaccgaacggagagaaacccgggcacgactgtccttggtgcagcccccacctagatcgccgggttgttgctataactctaggaaaaaaactctcctatataaactagtcgcggccctccctttatctactttacatcgccgggacgatcactagtcgataagcgtgccaagtgatggagggttgcggccaccactgtgatccgacttcgcaccgccgatgagcaaccagggagcatccggggagaatcacaggggagctctgcacccaggcgaattcacggttggtccatgggtgacaatgtgtcggcctaatttgccgccgaagctactgagcgccatggatagcatcgttgtcgcccagatgttggtgagcttttaccgccctaactagatttattctttgttacacatagaacttgtccgtgtttagttttcgtcatcggggcacttgtgtcgtattcgccgcgtggcaccgccgctgccggtgatgaacacgatcgtctgagtatagacgagagggagagagagagagagtgctaggtaggcatgaggttgaag

SEQ ID NO: 43224 - DNA, 641 bp, Zea Mays
gtctggggtacccaaagaattagcgacatgggaagatcgtgaagtgttgcagtagttctttccattcatgcctgcttggggtcaagcaggttctcaaggcaattgttagctacagctagggaatggagaagaggagagatctgggggggggggaagatagcagcggagaagaagacaagtagagaatttcatattgtttttcttctctccccctcttcttccccaggaaaggtatatatatcagggtcatcacgcacacatatgccacaccagttcgcgcacgcaggcgctacgccacacacacgtttaggcccacttcggccttgcacacggacattgtaccgacgcatccacttgggcttggttgcttctcccacattgctgacagcttgggaggggttgtcgcggcatggtagctagtcctcaacgccgtccaatcgagaaagcacgacacactgcctttttacccctttctagccaccgcaccttcagctgccttctcgaaaagtctacggccgctgctggaggatatgacgtccaaccttatcttgaggacgctgctttgatcgatcttcttatgccttcggaacaaaacgatgacatggacacagtccgagagctcatgtttgctccttcgttta

SEQ ID NO: 43225 - DNA, 328 bp, Zea Mays
gcctccgtcacgacacgagggtagactgtatggaagcggtaggatgggacaaaaacccttcatcccaccggattataatacagtacttgaggcacatcacagcatcctacattagctagaaataatggagccatttatccaacaacacatcaatgagcttctcgagcaaaatcctgggcaaatagatgattgggtaatgaagcgacataagctgcggttcaacacatggctaattgtgaaggacattccacacggagatacaatagaagaacaaaccattaaggggttggcatctggaccatcacgccaggtcacaacatggcaacat

SEQ ID NO: 43226 - DNA, 537 bp, Zea Mays
ttcgagatcaaaatctaacccccacatccaatccaacgaaattgcagcacaattaccaaaaggaaaacaatatcaccttggactctttttctttctttcttattcctcccaccagtccaccaatggagaatgcagcacaccaaaggaggaaccagggggcggctagggtttagagggaggtgggtgcaccttggggaggagaggagcggctgcaatggggaagaaggggtggcggctgctgcaaaaatgagggaaggagggggcggctgctgctatgagggaaggggaggggcggctagggtttttgagaagaggagggagcgatgcccttgatgcgaaaccgacggctcacaaccaaatcccccatccatgccccgattcatacaaatgaatactgaaatgatatcgtttaaatgagatcttcacatctgcggactccgaacttccaacggcccacaaccattttcccacgtctatgcaccgaagatcaacttttggtcaacattttttttgggatattacaccgactctgctcaa

SEQ ID NO: 43227 - DNA, 1470 bp, Zea Mays
gactttcttggcctcttcgttgctctgaatctaagcttttattgtttttgcttttgttgagtgagggttgttgggtcctttctcttagtgatgtgacaatgcacattatgctgccttgggacaaagtccctttctatattgcagtcagtttgttgatctctgtatacagatattgagccttgtgggcctataattttcatgcacaaatagaggccatgaatggctgccttgagtttgtttattggccctcttcctatgatgccattgtaggggtagaccatgtcgactatgtcgaaggtcacttgctcggtcctcgcattggggctttgctaagggacaacattaattatatcttgcctaatgggaacgctcccttgcctctagaaccatacaatgggttgtcagctggctggagcaggctctggttgatgcccatatgatcgaaggcatgtaggaatatattgtcagcctggctgtcattgtccacgaagaccttgtgtaggtcccatcctgctacattatagtttataaccagtgtgtctgcatggggcgcactgtgaaggtcaatgtctcttgcatcaaaggtgagtgggacatggggccacttcgctggactactaggccagtgatagagacgtggttcacccttcggtaatgattctttttccgttgcttgttttttgaaatctaaactggaccctccagtaatcatgtggatgaccccctgaatggtgggttggcgaagtgctctttgtgatttggtcgtggggggtacttgatagggttgttggtttggttgttgtagaggtggtgggggtcggtggaagggctaatctctcattgcttgggagttggggtgttgatgggggtagttggagggatgttggttgtagtttttgtggtaatgcgggaagggttggtgattgtcttcgtatcgttggaggtattgtggatggtacctgtgggctatagccctctcattgtttgcaggggccattccagccatatggtcattagcttcctttgttactaggcaatctctggtcgaatgccctacgtcttcgccatggaaaatgtagtagagctttctttgctgcagagggcctctcccacagcctctccccccttgctgcactaccaccgtgggcttggtgtgaggggtagtcttgacgttgatgggggccttcgcctggttgctgttgattggctacgttgtgaacttgaagttgttgttggccttgctcttggagagggtgctcttgttgtgaacctctagtccatgacttgctagactgcatgatatcctttgacttgtgttgtgactccacttttctgtagtggagctctttggatcggacatactttttgaagagctggtacaacccttggagggtggatggtgggtctctagtgcaatggttgtatagctgactagtgtagaggccgatgatcgcataatggattacaatg

SEQ ID NO: 43228 - DNA, 709 bp, Zea Mays
cgcgcgtcttctcaaaattagccgccaccgccgatggcacctataaattgtcgccccagtgagctccgctaagtaatcacacacccaacgcacccgcccgtgcctcagattgtccaccagagcgctctaattttgaagttcccccaaatcagttagaactctgtcgtgtgtgagctcgtcgtggccagctctccacaggtccgatcacgcgctcccagctcttgttttagcactcttgtgtgctcttgatgcttctcgacctggccaattgaactagaccacgctagatcatcgggaacgcctcgattcatccgtagttcgtgctatcaccgtggacagagagattaggagctagaactttgcaattgattgaggggtaatgatcattaagggttgaattaggtgttagccacaccaaagcgtcggtcgttgcgttttccggccagtactggctcgctggagccactgctccgccgtcctcagtcagggacctcaattcgcgaaggaatataaagtgaggggcctcaacgcaaattgtcagtgacctgtgtgaatagtgcgcgggattccttactagttatttgaaaggctaaggtcctctgcgcaaagtgaacaccgcggtcgcgcgcgggcgcgctttcgcctgtgcgtgggccggcttgggctagtttcagcccagtactattcacctttttcctttttctttttc

SEQ ID NO: 43229 - DNA, 559 bp, Zea Mays
cgtgaacacctcgccgtggccagccctccgcaggtcagttcaagcttctttgcttgatgttctagcctcccttgagcccctgctactcgtaggcctgtttaattgaactagactgccctggatcaccaagaacacgtcggattgttctcggttttcgccgtcgtcgtggacaaagagattctgacccggattagtgcaattagttgagggattaaggtcgtcgggggtggaattaggtgtcagccaagctagagcgccgacaattgcgtatcttggccggtacaggctcgtcggaggtatgctcgtcgcagtccaccgtcgtggaccgagcgctgcgaaggaatagaaatccgggggcctccgagtaaatgtcagtgagacattggaatagtgttcaggggctctttaccggttattcaaatggccaagggcctctgcgcaaatccaccagcgcgggcatgggcgcgcgcgtggttctcccgtctgcgggccgtcttggactcaattgagcccattactattcattgtttctctttttctttttgctgacagattaagg

SEQ ID NO: 43230 - DNA, 434 bp, Zea Mays
tagcacaacaagtgcgaaaaaacccgaagtctatcgcgaagactatccgtgcagaagtcgcctaagggtgcagccggactagcacaacaagtgcgaaaaaacccgatgtctatcgcgaagactatccgcgcagaagtcgcctaagggtgcagccggactagcacaacaagtgcgaaaaaatccgatgtctatcgcgaagactatccgcgcagaagtcgcctaagggtgcagccggactagcacaacaagtgcgaaaaaagtgcgaaaaaaccgaagtttaccgcgaaggctatccacgcagaagccgcctcagggcacagccgaactagtacaacaaaagcagaaacgacagcataaccaaccataccagacaaagtacacaacgccctcgcaggcacaggcacgcgagggcaaccaacttcatcttacaagcc

SEQ ID NO: 43231 - DNA, 486 bp, Zea Mays
tgagtttgtggagttgtattgcctagtgtctttggttatagagggttctggcggtggaagatgactatgcctactgagatctatatctccttttcgtaggggctcccccactgccttattcctgaccgaggagaagttgcacgtatgactcagtgaacgtccttagtatacccaccttgacaagagtcgtgtcgacttgcccaaaggtcaatgagtctttagggaatttgcacatcccctgcatgtgcggaatgcgacctagaagccttcatgcccacacaactgccttcctcgtaaccgcattcctcataacctccttcctcgttatgcttctggttacgcccgactgatgtcctctaaaggctatgcccctgtcccattggggcctctctggtggtccacagaacgtatccaagtcatggtaacctaggggatatctatcctttagggttagtaggctagatacccatactattaagaggggtc

SEQ ID NO: 43232 - DNA, 545 bp, Zea Mays
aatcctgtgtgctacctatccctcgtcgtcgatctgctgcaccacatggccggatggatcgtctattcgccgtctggccggccagtggccattaattcgcatgccgcagctggagtagtttccttgcttccttcttgtcgtcgctacagcggcgacgtgtacctgacctgacgagtgacgaccagtgccaccacggatcgacgacgacctcatctccgtctgctggtgctggccgagcggagacgttgtacagcatttactcctccgatcgatccgtctttttcctccatctatcatgcatatccgtcgtccgtccctagctgcttccggcccggccctgcgctgcatgcggctgcgcagtgccctccctgtgctccctcgacttctcctcctcccttcttctttcctgatagctagctgcggcctgcggcagctactggactgccactgttccactacacccacacagcacgtacgcgcgctgtgcactactgctaccaccctctttgccgagacgtacgggcatttactccacctcatctgcc

SEQ ID NO: 43233 - DNA, 815 bp, Zea Mays
ttgtattttaggccttaccgggctatctctaaaaactggttgagtaaaccggctgagtaggccactcaaccggattttctctggtgagaaccggttgaaccggtataaaaacctgttgaaccggtttttcgtcgcctcagcgtccgcgctgtctgtcagccccgcagtctgcgccgtcagtttcgcagactgtgctgtcagtgtggcaggttttctgcgcagtcaacgtcgttttctgcgtgttttactgttcacgctgtagcaaaactggttgaaccggtttcagaaccggttgaaccgattttggtcagcctgaccagccgccgcctcctcttttctctcctccccttccctctttcactctttaccctttcatttgttactgccgccgtcgccttcactttttctctctccctctctcactcacaccacactccaaatccctttcgagccatcaaatccttgaggagtttgttggagacttgttcctcttggcctcctccatcaactccttcctctttgttgggatttctgtggttgaatcgccacatcgaggtattgtgttatttcctcatttttttactcgatccaacaccgttcttgattatcttgtgtatcttttcaaggatactatgtagtttaggtgcttggcacacttaaactgttttcaattgtctcgaacattgtttgagtttagtagtttggtattgttcgttgtagttgaaccgctcacatgaacggttgaagtgcatgctcaatatcatacgtgtctttactcaaacgtgttcaataaaatctttgaacatcgatttcct

SEQ ID NO: 43234 - DNA, 297 bp, Zea Mays
ttcttcaagaaggaggagaagagggagaggaaggctgccgccgccctggtgccgtcggacgaccttggcatcaaggaagatgaagtcacaatcaacgtacgtaaccaacccgctttgcccgtccatcccccaactagtttgtcggatcggcggttccctacttctttccctgacgcgcgcgctcgccgtcgcggctcggtttccagatgggtctgcaccacgtcgacaggaggaagagcagtagcgaggagtccatcgtcatcgacgacggcgtatcctccaacgatgtcgatcaca

SEQ ID NO: 43235 - DNA, 298 bp, Zea Mays
ctaaagacgagttcaatgtgacattgctacaggatcgtttaaggaaaggggaggatgatgaccttaccatcagatgtttcttccttatcttattgaaccgtctgttatttccaactgctagctggggcataacaaacaacgaagtgcttctgacagaagaaatgcaccgtttccacgagaccgattggtgccagcttatatttaatgacctttgtgaagcgacgaagaagtggcataaccgaagcaccacaaacgtctccacgacgatatacggatgctcaattgttgtccttgtaag

SEQ ID NO: 43236 - DNA, 469 bp, Zea Mays
tacaagatacagtggaaccagcattcggaagacgaggctacatgggaaacccaagatttcttgaaaaagaatttcccaggcttcctagcctcatgtaaattgtaaagcttgtatagctgttgtaataaagaagtaacccccacatcactcctgtcttgtatcaaaattaaagaaataagaatgtgatgtgtttcctttaccattccctaccctaggatttttaatctcgggacgagattcttttatggggggaaggatgtaacacccctggtgttactataactaaaacttgagcatgacatcatagcattggcattgcatatgtttgacacacctagagtgcattcactaggcaaaaattttcaaacaagttgtattgttttaaagttttacaaataggaccctggtttaaggacttaaccctaaatggggattataggggtaaaactttacccaagttaagaaaacc

SEQ ID NO: 43237 - DNA, 356 bp, Zea Mays
aagtacatcttcactcaaccaaagctgaacatgaggcagtggagatggttaaaattgattaaggactacaatttgcaagtgcactaccatccgggcaaggcaaatgtagtggcgggtgccttgagtcggaagtcgcattgcaatgtccttcagccgctattagaagatgggttcgacctgatgcatcctgaggaactgtacaatattcagatcagttgctctcttgaaggcaagatcatcgaaggccagaaaactgacaaaggcatctctcatatcggggaaaagatggaaaaggaaccaactaaacattttaggatagacgaacagggtgtgctatggtttaatgaccgtcttgt

SEQ ID NO: 43238 - DNA, 1172 bp, Zea Mays
cgcgctcgtattttcacaccacagaccacaaacacgttgcctttggacttttaatatttaactccttcaataaggcttgaacccgtatgatctctgttgttgcatttgccaaagccttatactcggctttagtacttgatcttggcacaatattatgttttcttgcactctaagagataagattgggacctaaaaatacaacaaagcctcctatagatcttctaccattgcatctgaatatgcacttactgtcaaagaggacttgagtagcttcaacccaacttttgaacttgatttgagatacgtagaatcctcttgagtgcagaacactgaatagtagtaagagcaggtaaaaaatgatatatcttgttgtccgggaagactatcggagcttgtcaacgtgaggtattgcaaggttcccactgcactgccgtaacttgttgtatcattcggccctaacaactgccattcataaacaataaacctttcacttgtcaatagtggggtgccgattggtttgcaatcaagcatcctaacccttgaagatcaggcacacatttttattgtttaagcataatgcctttggaaatccttttcaccttagtacaaaggaaatagtgtagctcttctacatccttctacgcaaaatccctctataagtcatgtaggagagcgtacacaactgtgtttggaactcaccacaatgatatcatcgacataaattagcatgaacacgctaaagtctccacttttgtagaagaacaccaatgtatcaacttttgagctttcgaaaccgagagaacagagtttcttacttaagcgtgagtatcaagctcttagcgcatggttgagaccatagagtgccttctccagcttgcatataatcagtgatttttgagtccttaacctggtggctgcttcatacctcctcttcaagtatgccatgtagaaaaacattttgcacgtttagttatcgcaatatccaatccgtggagacaacaattgacaatacaactcggatagtggctggtttaattaccagactaaaggtgtcttcataatttatgctaccattatttaaaacctttagcaactatttgagctttgtatctgtcaagactgtcatcttgctttcttttaattttgtatacccatttgtagtgaatagcatt

SEQ ID NO: 43239 - DNA, 493 bp, Zea Mays
ttttaccacgacgaagtgtcatcgggtggtcttagtggttcgatctaaattggatggtcccgattagatccgagttattctgaaccagtacatagccgaagccttcagatcatagatcaacgctcaatattcaaagaacccacgatctaccccaggccagaggatttgggatctacggtggagattcaagacgcgaaggggtaagttgtgaatctaatcccacacgcgcataccgaattcgacggtcacgattggaccacgccgaacgggtatctaagtcctaatctaggatgttggtaacagatcccacggtgaatccctaactcgcctggtttccaccgaagagtggtggcgcgcccctttcatgcggcggagccatggctgaggttctccaacccgcgccccgctgtgcacccgcctaatcgccgagatgatacatcaagcaaaggacttcacgaacccgagaagagtgacgcacctgcggaatagcggc

SEQ ID NO: 43240 - DNA, 863 bp, Zea Mays
atacaacaaagataaaaattaaatagaacagattagataaaaatgttagatcgagagaggtagagtggtagtggtagatgaataactggaggctcacttgcatagtcagagtaccagattgaagataaggggacaccagagctaccttaacatggatcttgaccagatcgaggattagggttatggttagagtgacaaagcaaagaggaagagggtccatgataaaagggaaaggagattgttggtaccaactgacacgtggtcaagtgggcccaatcactcgggaaagggggaactctggtgctaaacagaacagtaagcggggaactgtaatgtcttgttaatcgtgtcccatcagtgtacaatgtgggagtatttataggtatccgggtaggtgggtaagccctcctaagtacagttatgcccccggtcacctgctacagctccagaatattcccccttacgaggtcattatagcgatgttcagtacaacccgatcaaatgtaatacaaactctaccccaaggagggcttacaaatgggcccgaatgatagcagaacgtggccttcgcccacgtatggtacccttcgccctatgatgacaggtcttcgaccttgctaggactatcgttgttcggaaccatccaagccggcagggtcgactttgttaagctacaaggggaccccttttaagtggtggagcccttcgcttcgatgccttcggcagttctggacgaagtcctcgattccgataccgatcgaggtacccttcgcttcatgtatctacaataaagcatgttcagttggtgttaaagaagattgattgagggtttagacgacctttgctccaacactacccccccc

SEQ ID NO: 43241 - DNA, 364 bp, Zea Mays
ccaacaaggccatgcaagttgaaagggcaaaggaggaagaaaaagggcatctcaaaaggaaattccaagtcctccgggctcagcagcaagaccggcactagaagactcgatcctttggatttccacccaagggagcaagcttcagtagaccagctggacccaccccgtcacggttcagtcagcagagtcagagctctttccatgccccctcagttgcaagtaaccaacccctggcgaatgcatgttggcactgtggagatcccagtcatttcaagaacaactgtccgtagctgaagccaccaggacccacctactccaactcggtgaatggccctaagaatacctcggcatccgcccccaaggc

SEQ ID NO: 43242 - DNA, 589 bp, Zea Mays
gtccactgagtacttctctgtgcagtgatagcattccccttttgcatgcttcgctgctagttcttccggtgatagccgtttgaatcgaggccggggtgcagcagctaccttagatggtgcgctgttgctggcttccttgaataccaaactcttcccagcaactttgtatcctcccctttttcctgcttccagttcccttctctcataggcccttgccaggttcatggcgcgctgcaaatttccaggagcttgtagttcaacatctgtgcgcaggggttccccaagaccggctgtgaacatgttgacctgctgcatggcagtaaggtcgttgcatcggcagagaagaagtgagaactgccgctggtattcctcaacagtgccggtgcggtagaggtcctttaattcggccatagggttggagcgaattggcgggccgaatctcaggttggtgaagtcgacgaattgcgcccatgaaatgacgctgttgtcgcgttccagtgcgtagaaccattccgccgccactccctctaagtgcaaggaggccatcctcaccctttcttccgtcggcgtgcgcatgccacggaagtac

SEQ ID NO: 43243 - DNA, 329 bp, Zea Mays
gctgagcaggctgatattgaagaagagaatgctgatgaagaagaggaagattttagcattctgattccgtcaaaacccagccacttggattttgagaaatctactgtgtccgaagctgacgtgcccatgatgatgaaactgggctactttggagaggctgaaaagaagcttattcgctttgccggagaagaaaccactccaacaccgaagaatgacgaagtagtagttttcaaaagcttttacagagcgggattacggtttcccctgaatgagatgataggagaagttatgaataattttgaaatttatcttcatcagctgacccctaa

SEQ ID NO: 43244 - DNA, 353 bp, Zea Mays
tatactgttgtacgctaggctgtcagcaagatcatccttcgacaaaattgaaaggtcgtcttccagcttcgggaatcccatgcttctacctatctcccggcaaacggatatttctttgttatccgagagacagtataagaaatcatcttcattactcccgttaaaaaccaaggctcccttcggatatttcaactttcgcgcatagtgcctggcttccagaatttcttcttcggacaacttcttccccgaagcgtgtcgaatgatgtagtcaacattttcgatcaaagcttcgggagcaggagtctcgatcttttcaggagcaatttgctctgccgctttttcttcaggcgcgg

SEQ ID NO: 43245 - DNA, 1007 bp, Zea Mays
attttgttgcgttggatgtggccgcggcggagtccttaccacaacctgaagtgcgcgaagggtctgctccctcggctggggcgatagccgaagagcaccaccagcgaagggtggtgtcgaagcacaatgttagtgagatgtcacgaagtgggaggcatcgacgaatggggatggaacgatcccgtcttcgactggatcggggcggccaatgagatttgctatcgtcgacgtctgagacgtgtattggggaggggatctgtggaatcttttttagggcgacgagttgaagatgatgttgtttaactttcgagaggcaggccttattccaaaggctgagctgatgtagcatgtccattgccctcgctctcgtgttgcggtagtaagtgaaaacgctgccctcccctggctcgcaatagagagggagggcaacaagtgatttctattatttatgtaatgtggtcggtgggcccctgattctgtgtatgtaaactatgatgatatcgcatgctgcgcttgttgtgaggttgtcccgacctgtaattgtgttggcgtggtccgtaaatggaatggggaccttgctttccgcggcaatgatggcgctgatgacgcgtacctggctgtgcctgtaggtggttttttgttcgaccgtgtcaaatagtagagactttgcgcctttaaggtggtcgtaatagactttgcatcattagggtgacgtcgcgcatttatgcatgtctggctgcacccttgggcgacttttgctcggttttgtcttattgtaaagacttcgcacccttagggtgatgttgtgcacttgttgtgcatatcaggctgcacccttaggcggcttttgctcggatgtcttattgtaaagacttcgcacccttagggtgatgtcgcgcacttgttgtgcatatccggctacacccttaggcggctttagctcggatgtcttatagtaaagacttcgcacccttagggtgatgtcgcgcacttgttgtgcatatccg

SEQ ID NO: 43246 - DNA, 507 bp, Zea Mays
gaaagaagtagccgggctcttggatgaaacaatggttctatgtgaagaatgatctgagtgagagggaaggtgtggagggcattatccaacatcccatatggtcacgcttcgacatcagaaggccatccattgcaattggtaacaaagtgcaagcgtgtttgatggctttcaacactgtgtgcacttacattggtacaagggatttggtacaagagcatattgcttacaaggtgtggctgctcgtgaatgtctgggaaatgccgaaggagactgctgccggctctagcgaaggtggcctagtttacttaaggtacacctaccgtttcaaaagcgagtttgatgagccgaatgatgattggcttgaggttgtggaggctaccagtgatgagctgctgggagcctacatgaaggcagaagatgaagctatgaccattgcctttggtgctcgcggaaagtggtggttgaatagagtttttgatgttattggaatttttatcctgattacta

SEQ ID NO: 43247 - DNA, 374 bp, Zea Mays
ctggaacaatttggcggttctgccacatatagtggttcgggcagaacgttcctacatctagtctttgatgactcgcactaccggcacctttgttgctcactgctcatatagggttacaagcggacgagagaggcaggagctcccaaatctattatatgcggctggacctaaagactatgggcttggtgccttctactaagctttgggcatcgtggtggttcgctcctcagctccggcctccgggtcttgtcgtccttctgccatgtgtctcttcgtccttggtcctccttcgtctcctggccaaccccctccttttataggccaaggtggggtcagccatcggtagcttcatgttgggggccttttccgtctga

SEQ ID NO: 43248 - DNA, 887 bp, Zea Mays
atgtagtagacaaccttcttcattcttttctttttaccatccttcttgtggttcgagctagaggatttctcagtattgtcttgtggctcctctatttccttttatttgttgttgttgtccaactcctcccccttcaacttttgggattcgtctcctaacatcgcttcttgttgttagactcttaaataaagtgccaggctccgataccaatggtgattttctagaggggtgaataggcaacacctgaaatttcacaacttaaaacaaacttgaaacccaaattggatgttagatcaaaatctagatccaaaagaataagggaagaggggagttctggcactcgatgctcttcttgattgagaattatacaagagcagtatctcaagtgaaaattatagcaagaacttaggcagagagaggaagaacaaattacagaaagtaaagaacacaagacacaacaatttgtttcctggagtttggctctgaataacctacgtccccttgaggagtaccaccggacttggtctctctcaaccttttcaagtgatccatcgatcaatttgagccctcgattcctttagtttgattctctttctcataatgtactccacagagattggataatcttgctagccgtacacaatgaatgggagtcagaactgcaatgtaagcaagagggagaaagaatgcacacaagagcacaacaccaccaccaagaatgaagaacacaagcgcacaactgcagcacagatctctctagactattctcacgaatatgagcgcttggatcactttggcgtgttgctctaatgcttaggaatgaatctttagctcttgagtgacttgggtgctttacatggttgatgggagaggtatttatagccccg

SEQ ID NO: 43249 - DNA, 383 bp, Zea Mays
ggccgatcttcagcaccttcattcccactctctatgtcaaaatcttcactgttgctagaactttcagatattccagcaagtgtctcacgagcaatcttttctgtattagtctcttccatggctttgtaaaacctggagagagctgggtcatcagtcttcttctcgtcagccatcaagtcttgttggaatgtcgaagctcacaattcaatcaaaactcggaagagcaagaaaatttagaacgatgaacacagtatacgtagctaaaatggtgcagcaaaatgctatcaatgcgagtccctatttatatgcccagcgcctcacaacttggtgggtcctacatgtcagtgtctttcgctattctagagaagggaaggtgttttttc

SEQ ID NO: 43250 - DNA, 440 bp, Zea Mays
agtggggtgtgggagcactaattgccatggtaggaaggcaattaaggaggtaggtaaccttgttgaggctttcagcccattagcaagcaagaattgaggtctggaataacaaaaagcatattatgttgttagtagtgtgaatcatatgcttagccttgccattctaggaagaagtataagggcaaagcttctagagaagaagaatgatcgggaagagttatcgaactcccgactattgttgtagtggatgaccttaaaaatgtgactaaacaaagtggaaacccaaacaaagaagtgcataagagtcgtttgtaaatgtatcatacttcaagtgcaagggaaaaggtcataaataatggtaacaatcatcaagaaccaccaagtaatacttatagctcaaaacactgatatctagagatgttaacaaatcataatgtatg

SEQ ID NO: 43251 - DNA, 689 bp, Zea Mays
gtgagcgagttactcaccgggggcggaggaatttctcgtcgatggtgtagcttcgccgcgacggcacctggcgtcgtggtccgacctcgtcgtcgctcgaaacacaggtcagatcaccatgtcaatttcgccatctcctttcatgcgagttgtactctccggttagtgtgatggtcaatctagagcgcgggtaggggcctttccggtggggtgccgccgtgagcagtgggcagcgccgccgtccagtctgcccgggaggatcgaggtccgtgaaccgttggatcaagtgggacggtcatgattagagacaacttaccggttgggcccgattggatcgtgagcattggatcggatctagcagtcaggatcgggtgctggcaagggtggttttggttcgttgatccaggatcgtagggcggctatcgcatgcggtttcatttggaggccacctaatcggggtgctcggttgccgatgggatggcccacatcatcggataccctttcggcttgcgcatattacaaatgaacccctgcacatttcatgactcaacccgccgtccagcttatcatcgctctgagtcataggaatttttgtaactaggcccctgttgttccgtattttggcgcccagtccagagcccatttaaattgaataaataaattagaaaatgaatatttagtatgaaaat

SEQ ID NO: 43252 - DNA, 348 bp, Zea Mays
tgagattctgcttcatcaatgttgtgtattgccttcgaatccacctagcttcctttgtctcttcttgtggcttcctaacttccatgaatcgaaattgggaattgagcttagggtatcttcatgaacaatgattgcttcaaaggcattcagagttcctctgccaatgattgcattggatgagtgttccatatcaactatatcaaatgtgatattatctgttgtggtgttgtttacataatcgaaggttactagcatacatgtttttccgagtgccactatctgctttcctccaaagccacaaaggggattcatggcctcttgcaacctatcatcaggctcttgcatcta

SEQ ID NO: 43253 - DNA, 419 bp, Zea Mays
tcgggtctccactcaaattacccgctaatagctcacaagatatgtcatgttcgttgcccactgagtgtagcttggcactcccccctcttcctccttgcggaaaggcgacgaagaggtgtatcattaaaaagtcatggcattctctgatcgtcttcttgccctgtgtagaggctcgggggctgcccttgcacctatgttgtgacataattgttggaagcaccaacaacccaacacagagacttggggggctgcctttacacccaggctacggccaagtgatgtacaatggataggtcaacgatatctacagaaggaaacataaagaccttgaaggagtaaccactcctctgaggccttaggggctacacccgacgggtgcactcgcgcgcacccctcggaaatgagtctaccacctttca

SEQ ID NO: 43254 - DNA, 551 bp, Zea Mays
caaaatgccattttatcccttcagcacattataaccttcggccatttaacgccgttaactgtacaaataagaggagcgttcgaaaactggcacataggctgttccaacccaggttcaaaaaaaaacgtccagaccaggttcaaaaactactccacccttggttcaaataagagtagcgttcagaccaataaattgctccaacccaggttcagataaagcgtccagaccaagctgactagtgctgttctgatggaagttggcgcaaaaaaaattctgtgctttctagcgcacagtacagagaagcacaccaatctgcaacaaaatccaatacagtacagttttcagcacggtgcaattttcagcacagaaatttcagcacaccaatcgataaagttcaaataaaatttcagagatgttcacaattcaaatgaccacataggtgttcatagtttagactcactggtttcatagatgttcagacagaaagatattaaaatttacacacattggactcataaaaagagtcacacaattcatatacattgatttca

SEQ ID NO: 43255 - DNA, 669 bp, Zea Mays
cgcgttcccatgctctacagattcttggacattttcacgccatcttaggagaactgaatacgagttacgcgtagactgtagagcgtagattagccaggcccacagcaatactcaggacccaactctcaggagtctcggttgctgctggccagaagaagaaaaacagtaaccgcaagtggtgacgcttgttctgaaatctgaactgctgagtgatgcaaaaactccagcgcagtggtgctgccatggaatggaagaaaccttcaaggccaagtcgttcagcttgaacagaaaaaaaaaacgaactcgtcagaagtgcgtgtgctgcttcatcgcctccgcaccagctttcatggttggtcagcagatgttctcctgtcctgtgtcctgtctgcagcaaccagcatgacgctgacgcaccaggcgcgcaatattagttgcaacctcaacctcgagccttagtagcagcaaagctgggaagcggcagctaacagcagaaagagacctacgacagcaaatgaacccttgctatgttcacgtggcaacagacaatcttaaaattactagcctacaaaaactctgggatcaaacacagcaaagcagaagcaccaaaggcaaaagagctagacagaaaggtgcttgtactctaactaagacatcatcgagcaaaag

SEQ ID NO: 43256 - DNA, 509 bp, Zea Mays
tttctttttcctaaatagtgaagaattattttgttttatatcaatgtgtaagactagtaaaataaaaccctagagaaactttgattgttgtatagtgtttctaagtgtaaggtatgtttgagacatgttattatatcctgtagaagtccgcggtaagttttgttgtattcttttccaggattttccttttttacaaaaaaaaagaaattccacgcggttctaaaatactggcaggaattttgcccaaatttctttaaggctcctagggcattttttgaactgtaccataaatctaaattttctagaattaatatgaaattataaaattctagatatagataaatctaatcttaatctagctactgcaaagcccatgtcgccctcaaaaatacttctgcgacaacagagcctccacgatcgccactggttcttcatctacgtcattgaccccgccaccgtcgtgccgtcgcgttgctccacgacgcctgcgagtccttctccgaccagcc

SEQ ID NO: 43257 - DNA, 345 bp, Zea Mays
agttgttgctggatcgtgccaaggtcgacgtggcgtgacaactggacaaggatcgttggagtcaggacatgaacatcctcgcctcatccaataagcaatatacagcagcatgggaagtccgcaaagttcgcaacaaaaagattcaacaaacagatacacacatgatgacacgacgattgatcaaagcagacatttgagttcccgactaagctacgacatgcatgaaggttgttatggctaaaaaacaagtcaattgaaaagcatccccataactaaatgatttaggttacgagagttctcgaactataggatcaggtattggaccgagttcatggacgcaatgcg

SEQ ID NO: 43258 - DNA, 340 bp, Zea Mays
gccgacatagcccctgtctgtaagttcgactacttctcctaaccctaaacctaaactggtgagtgttgatcgcctggtccttgtcgagtcgccggtgactttccggtgctcttgctcttgcgatttgttcttagatctcttgtttcccccgcatctgtgcgtgcctctccgtctcgcttcttcgtttagggtttagggtttgtgcctccccgcatctgtgtgtgcctctccatctcgcttctttgttctaatctgctctgcctacactcgtccaatcctccctgacctcaagcaacatcacctctgcccctctggttgcccctcgtcgacgactccggtg

SEQ ID NO: 43259 - DNA, 383 bp, Zea Mays
attgaatcggtcgtgatacctgaattcgacaaagggacccgttcagctgccaaagtaaaagaaactgtctcgactgtgcagagcactaaagagccgactatagtgccgaaggtacttacaatcgagccagttgagaggaagattgaagagccaaaaattgaagaattaatgaaaatgccagaaattttgaatccttcaacagagataaaactgccgaaggtgcaaaaggcttctgccgcaactcacaagaggagaaggatggcaaacgtgctggatgttgtgatggaaacgacgaaggccttgagtcctgctctcgcaaagaaagttgttccaactgagaccaaatcgcaggctggaaccgaaactaggcaagctgaagctgc

SEQ ID NO: 43260 - DNA, 948 bp, Zea Mays
cccggtcaccttcctggagaaaatgaagattgacttgcagtcctacaagcaggagaagaagtctgtcacagagtatgaggtgggcttcaacaagatggtccgctttgtccctcatgtggcttataatgagatggagaaggcaagtcagttccatcagggtctgaaaccttctatcaggcatgcactgggagcctttccgttggtggacttccgtactacggtggagcaggcactgggtgtggagatgcaacaccagtataccatggagtcgcagaagtcttcgggtgttgatcagcctcgtggccaggacgtgaggaggggcaacacgggaggtccagcccacaagagggtcaagtctcagcatcagcgccaccatccttaccgtggcaaatcttctgactcgggtacttcgggaggaagtactcagaggtttcgggctgttcctaagcccgggctagggctggtttgtttccgctgtggtgatgcgcatcgccgtgtagagtgccagtggagtggcaggtgttctatctgcagtaaggaccacaaggatgtggtgtgtaggaggaatcctaatgggaagctcagatgggagccggtgacttcctcctcttctcagggcactatcaacatgatgtcaagtgctgagcagcagttttcagttcctcttcctccgcagcagctttatgtgcctaggacttctcagttcgtgccaatgcagggttttcctcagtatctggctgcgcctactcctgcaccgtctgctcctatgctgtctcagtttggagctccgcgtctgcctcacccgacggctcagtggggttcttctgttaatttcactccaggagcttcctcttctgcgggcatttctggagcttatgtgctacccgctgcggatgacagagagcaaggagacatggtgacaggtatgatttcaattgattcgtttgc

SEQ ID NO: 43261 - DNA, 465 bp, Zea Mays
gagcaatccgtgcgaccagtggatggtgtcagtcgttgttgatggctatgcagtggtttgcgtggtgactgctgcaattcagaatggaagtgcgccgcttctctggagaaaacatcgtgcacagaaatttatctagtatgatctgaatgcctcattctcgtccgagcagttttaccagtataaaggcaagtgagcaagactttgttcgctacactgtaccagagcctgatgaaagctgaaagagcagaggccagagataaccttgggataagttagcagagcaaaggacaggatgttacgtggtacatgtccatctttatttggaacctttaccttgctttcggaaggagcatctaccacaagatcgcatcaactgttcagatatctcccaatcatggtggtttagaatagcacatcgagctgtgaattggatccttgaagatctgtgataatgtcaggatttgg

SEQ ID NO: 43262 - DNA, 476 bp, Zea Mays
ggaacaaggaagaacaacacggtgtgctgtgctgtgacgctgctatgacgtagccgtgactgtgcatgcatgcgcggcgcaagcaggaagggaaacaggtgagaaactgagaatggtcgggttctgttctgtgagcggaaaccttagctagcttcagatggacactgatgaaccttactcggttactccacaatactattatgtgtggtgtgtcctcttttgtcggttctcagccacacacgtttagtcttgtactatacagatcgaatcgatgggcaggaaggactttcgacctctggtgtctggacggtctttggtcgtctccagcgtaacatccatctttaggtttttcagctgcatcactgtcttgccttggctaggaagcttgacggacttactcccattttatcatgagtctgcccttgggacttgggagctgcaacaaattgccttgagtagcaaaacaaccaaccgag

SEQ ID NO: 43263 - DNA, 276 bp, Zea Mays
ggcggtgaagacgtcggcggtgctgactacgtcgcgggtggatccgggatgcatcttgagctccggtgaggaatccagcagcatccgaccattcatcatgcccgacgacaaatcgcacacaaccaggacatcccgacggccctccaaggcgactcgtagctcacttcataatcccgacgacaacagggattggctctggcggctctcggttcctctctgctctctctgcggcgtgcgtgaggtatggaaggatatgatggccgtaggggtggtgct

SEQ ID NO: 43264 - DNA, 316 bp, Zea Mays
gtggaacacaagttatgaaagtgtcttacccctctcttacaagtttcttaccagtactgcaggtggcaaatggtgcccgtgtgactgcccaaagagcgtgggtgtgattgcaaaggagtacctgttctgttcgacagaaaggtggatctttgggaaggctcactaaatatatatttatggcacacaagtcagtaacagatagcaatgctgaataagtgttccaagtactcatcctagttgctggcctagagaatatattagaacagttggaccaaggcacaaaggaggtgacaaagatctaggaatagcaagtgaa

SEQ ID NO: 43265 - DNA, 597 bp, Zea Mays
ctgtttaggacctctgctttctaataacaaactaatcctgttttttcgttttcccgctctcgcgcatgtgtttccctcttcacatatgtctcctattccccccccccccccccccccccgcacattgttttggcgttttgccaatgccatttcattgcaaggtgccaccggcatcggagggacgctttcctggaagtctgatggggcttgggcgccaggtgcgactgaggatgaaatgatggttttccatctatcacatggtgcatgaaaagcacataagacaggtaaacctcactaaacaaaagtcctaagcgatggtctaactaacctaagcacttgcaaaacacctacacaattaattatcaagtattctactaagcacttttgtggctagaactactagagatgagcctgaactcacacaagtcttccttgaactccacacacaatcttggctagttggggtcatatttgtgggccccaaggttagatataggggtgttgggtatggctccaaagcaaaactccaagggggagctcgctagagtcagccaaacactccaactctagagtcgcaaaactccgctaagttttgag

SEQ ID NO: 43266 - DNA, 478 bp, Zea Mays
ctaacattatacactagaataagtcattcacaactatggggatcttgtctgatagatgaaggttagtcacaagccaagttatatcgttcaagaccctttggtgctattatgatagtaaataatctggttttaagatttgccaaacaagaaaccatgagataagattggagtagaatcaagccctagtttccacaaaatgggatatgcacatgcaatggaaatatttggacatctacgcatccaaaaccatcagtgttttgtgagtttccttagttcaagatctagaccactaacacacatacatatgatcaacactactcccaacctattttatacaagctaaaaactaaagttacggtattactccacctcaaaagggccaaactagtataaactcatatgttctcaaggagtatgatgtacccatatgctcgatgtcacccatgtatacctcgatttatagtacatagtcaacttc

SEQ ID NO: 43267 - DNA, 1389 bp, Zea Mays
tgggtctggcccagttaactgcccaaccctaatccagggttagggtttcccacagagaagagtcccaaccctaggggactccagtcttgatctcatgtatagggggttgccgccaatgaggccaacctgccacgcctaacattgggcctattaggacgactaagtacaagggctttagcccacacaattaaatctattaaattgttgtaactcacctaacaagcattgcactgatatggaaaggttatattgcaataaataatctaaatatgtgcaattttgtatgaaatcacagttttgatgacaagtgcatccacattcaagcaatgtatgacaatttcatctcgtttaactttgtatgcaagatttctttcaaaaatctatcaagcaaactcatcaatacactccttcaaaaaaaataaggtcaatgaagtaaactcactttgccaagggaataagtttcttccacagagatgcatcctttggggaaacatatgcagctagcatcaagaagtttatggctttatctagttcaccaatctcactataaatgctaccaagtagataatatgaatctgacaaatttggtgcaattcgcacaatctcatgtagtataggtattgcctagaacaaaggacatcagcacaatgttaatgctagagaaacatcacaaagaaaccatttatattatcctaaaaatcaatgacactgcagtaggcacaatcagtttctcaagtccaccaaacaatctatactaggcatacaagtgatgcagactcataccagagaatgtcacgtgccaaatggaaatgaagatcagagcaccacaacagttctagtcctatcttagatggcattttatttaaccttgatgaggtgagcacacttgctagagaagaattaaaaggttaaggtattaaaaggcattttattaatgaattaaaaggcattttattaatggatttttgtacaaggccaatcccctttctttttcttcttaaatcttaatataatgatatgcaactcaaaagcttgagtttcatgggacctaaaccaaatagacactactattaataatcctgaaatcataaaacaagctgagtattcaacaatccaaagctctacagaaaccatttcttacatctctagtcaattgacatgctagtgaggtgatgcaaaagagttcacctacagagcaacatacaggtcactaatttgaagacttcagtgaatttatggctacctgccttatagtttgctatttagccctcttagcttgcgtcctgcttgtggttttccctgccctcttcttcctcatctttcttctctcctttggttatggctagtctaggtttttgaggtttggttttttgatccccttcccttttt

SEQ ID NO: 43268 - DNA, 590 bp, Zea Mays
cccccctgggttttactaaacctaacccaaggtccttctcccaattaaacagtacccgcggtggaggaaagggcggaggggcttaccggcggcgagattgctctggtgagatggtcgagggcgtaggggaggtcgtgacggtcacaccgatgtgaggatcgtctccgtggatagtcgaagtaggccggtccacgtgcacaggcggggaagctcgtcagcggcgagggctctggcctatccagggcggtagagtttaattaaaccggtcggtgagcttcactaggtatcagggaaggcatggacgcgaggaattgaagaatggctcacctgatagctcggtctacacgtagtggcgggcggccgaagttcggcgacggtgatctcgttgttccggtgaggcagggcctcaatccttgcttagagaagcttcacggcttcccggggaagttgtccagaggctcgggtgaggctagggttctctggaaatggctggtcgtggtggccggcactcgggtggctcaagcgggtggcacagagctcgccagagctaaggacagggtctggttagcgggggtgagcgtggagtgagg

SEQ ID NO: 43269 - DNA, 711 bp, Zea Mays
ggaaaagtacatatcacacttcacggtggatcgtcaccagaagatcatccgtcaaggagagatcatatggaatctctcctaccttcgcctcaggctgtaagtatttttaatcaatattttaagattttcataaaatagggatcaattaaaacaatatataaatgaacctattaaaggatgggtgtgtttgtatgaaaaatctactgtccctagttttcccttgcatgaacctaatacagagccacccacaccttacacatcgactacaaatgggtcatctcatacctagccattgtatggtatgccgatgaatacgttcataacaccaccacaaccgtcgtcgcttggcatgcaaccagttgtctagctctgaacatgattggaccatccgagaaccatctcggaccgtctagttaccttgcggatcgtccgaccctacaagcccacacgtagaccacccatgaagcatcgtatatgatcggaccgtttaggccggtcgcgagacgtccgaccccttacgctggaccatccgggtacgcatacgcaggagacggagctgcacaatatgcaccatgtttgtacccatcacaacaacactacgccaccctaccggcagcatattataactatgtcatgccacctcatacacaccggaccgaatattctttgaccacccgagagcccgaaagatatagggcatgagtggtagca

SEQ ID NO: 43270 - DNA, 675 bp, Zea Mays
ccggcatggcgcgcctactccacgccgtcgctatctcgagagtggctggagctgcttgccccggccggcgcgggccctactggccgcgacttcccctaggcccgcctcgcaatcccaatcctcatcccatgtcgtgtgtgagtttgaagcttgaagaagatggaaaattgctgtgcgattcccgtggagaagaaagaggagaggagaaactgtccccactcggcatgcatgtcccacctgtgcgtgattgctgctaggaaactgactgggggccccacctgcatggctattttctctcccactattcccttgctgtgtgtttgaccgtgaccccgttgcatgcaccacgcaaattcagagctgctacatgcaacacacgattccaccaaatgcaaaaccgcctccacacattcctccacggatcttctacgcctgcggtatttgtgggcatcctctaaccaatcatattatgccatgtcaaccgattcgctaataactcattatcatcgcattataaatatgtttcagcctattctcgttgtgttaactttataataatgtttcctacgtattagtaacattatttggtcgagatacatattttaattaattagttgattatttatttacccaagctattaaagtagtaatttacttaaactaatttatagtttt

SEQ ID NO: 43271 - DNA, 306 bp, Zea Mays
aacctcaaagggtttggtgttgtcaggctgagctagcacgggtgttgttgtcaaatgttgcattagtgtatgaaaggcatcctcgcatttttggctccattcatacatgactcctttcttcaacaattcagtcattggctttgcaatctggagaaattcggaataaatcgccgataataccctaccaatcccagaaaactccgaatctgccgcacagtggtacgaggtttccaatccatcacttcttgtactttctcaggatcaactgataccccatcctgagaaatggtgtgacccagaaattta

SEQ ID NO: 43272 - DNA, 662 bp, Zea Mays
cgatgatacaacacctatccttcagtcattggcagttcagtcaccgactgggaattataaattgaaggaaggactcatattatacaaggatcgtatactattagcagcagcatctgaatggccattgaaaatatttcaaagcctgcacaacacaccaattggagggcattcaggattcttggtaacttaccaaaagataaagaagttgttcaggtggattggtatgaaaaagatgattcagcagtggtgtcaaaactgtccaatctgtcaacaagcgaaatcggaacgggttccgtacccaggattacttcaaccgttaccagtccctgaaggtgcttggcagttggtctcaatggattttatagaaggtcttccgctctcggatcattcaaactgcataatggttgtagttgataaattttcaaaatatgctcacttcattcctctccaccatccattcacagcgttagctgtcgcgcatcaatttatggataatgtcttcaaactgcatggatttcctcaagcactaatcacggaccgtgatcgcatctttacaagtgctttgtggcaagaattgttcaaactggccggagtggaattgcgattcactactgcttaccaccctcaatccgatggtcaaacggagagggtaaatcaatgtt

SEQ ID NO: 43273 - DNA, 287 bp, Zea Mays
taaaagaggcacaagctcgccaaaagagttatgcagaccaacgacgccgacccttgtactttcaagtccaagattatgtgtatttgaaagtatcaccaatgaagggtgtgacccgttttggtgtaaaaggaaaacttgcaccccgatacattggtccgtttccaattcttgaacaatgtggaccagtggcatatcgactccaactacctgaaacattgtctgcagtgcacaatgtgttccatgtatcccaattgaaaaagtgtcttcgggttccagatcgaccattg

SEQ ID NO: 43274 - DNA, 717 bp, Zea Mays
cggtgcaaatccgtgtctggacagctcgcagcctctcgcccacgtgaacgttgtgcgacgtcgcttcagaaaggatcacaatttcgatgccacattgatctctcgtatttatttcccgaaatgtcgaattttgtgtctgattaaaatttatcgattaagcggataagaatttggaacctcgacccactcctgtaatttttgacccgagtaaagtttattagaagctcgacgacaagtgtgttgatgcgagattaaactagaccgagaaaattggagccgagagcgtgcattcgcaattaatcagtttccccattcattaaggcgaagaaattaaatatgttccttagcagatacatttttgtccaatttcaaacttaagcaaaagttgtctaaatacaatcacccatataattttggtccgactaaattagaccacgtctaaatcctaatactagaactcggatttctaaaatttgcttttgccaatataaatgagattcagataaattcaatttggtttcgattaaattaaaccctgtcacaagtactgtcgacctgtatcattgtgatctgatccacttataccctgttcaaactctaattttagagctcgggtttatattcttttattgaagaaaatgggagaaagatctaatttctcttttactaatcatcagctctatctccagccgcttggggcttctaggcttttctgta

SEQ ID NO: 43275 - DNA, 554 bp, Zea Mays
ctaagatcctccctaggtaactgctgttctgataccttgaggcacttctttagttgagacacatagaacacatcatgtacatccgcaagatgatcgggtaattccagttgataggcaacctctcctactcgctttaggatcaagaagggtccaataaagcgaggggacaacttccctttaactttaaatcttctcataccccggattggtgacaccttcagatacacgtgatcaccctccttaaactctagcagtcttctccgggtatccgcataacttttatgtcttgactgcgtagttctcaaattctcccttatcattcgcacttgttcttctgcctcttgtataatttcaggcccaaagaactgcctttcaccagtttgatcccaatacagtggagtcctgcactttctgtcatataaagcctcaaacggggacatcttcaaactggcctggtagctattattgtaagagaacttcgcatagggcaaactcttatcccaactaccaccatgtttaagagcacaagctcttaacatatcctccagtacttg

SEQ ID NO: 43276 - DNA, 404 bp, Zea Mays
gaacttagggtttccggagtcggtaaaggagttcaaagggcaggggtaggggttttgggttctaattatcaaacaatgttcaaatcaaaccaaactctatccatgtcttctaaatattgtgaaaagctcacataaaaagtttgggcaattttgggattattatctattttctaaaaatccagaactacttctttaagctattttaaatactctaaaattccctatttgatctaaaaatcatgagtttatttttattaaatactacaggaaattagggttctaggaaaattggtctcatatttttaggattttcctaccattttctacagtttttcaaagttctgctgaaaaagaaaaaggaaaaataggaacagtgctgggccgattctggttcaaacggccca

SEQ ID NO: 43277 - DNA, 1040 bp, Zea Mays
ggaagcactaattaaataaaagcttgttcaacaccgattaagaaggtttagacatgtccaccagaaaactctaaagacacccatacgtagtgggatcctaaagtgtgatagcaatagaaagagagacaaagaaagaccaggttgacatgagaaggggcaataaaatgagacttcaaataatgtaatatacccaatgatttagtcttcaatagaagtgtatgtagaacagctattcatatgtctcaaacttgactggtctatgttgggtttctactctatcctaactcaacttgcttcggactttttttaacgaacgcgcaggagaacttcacatctttatataatatagggaaagaacaaagggcttacaaagcagggaacctgctaaaactaagccaaaaccgaagcctaatcagagggagtgctagatagcaattgaaccggctacattcaaggtcctagctaagcctagggaccccagactcttagcaccagccataacccaacacactaattcatctaggaaactcctttgaagtcttcacaaggaacttgcttcagactaaaagtctttgtcattgttgttgaataaatcaccacgcagtgttattgattatgaatgaaaatacatagaaccctcaacggaatactcaatctataacagtccatgtatgcttaactgaacaacttaacgaggcacaataaatgcagtgacctaaaaggcaagtcactatgtgcaaaaatcagttcaaaggactttagaaaactacaagggctaatgcataaataaagtagttacaggaaacagaatggctagaaatggcgattgaacaacaatccacttttgtgaaaactggttggcacttaaaatccttatggaatctgtatggactagaagatgtcaattgataacactacaagggaatgaagcaccagtgcatgtcccagtaaggtcttaatgttgtcagaacgttttggttattatcatgtttcagtcactgtttgtaattgtcctatttcacagggcaaacaagaatttc

SEQ ID NO: 43278 - DNA, 535 bp, Zea Mays
ttttaatggtatggatccaaatttccctaggaaaaatgtgtgtgtagataatggtagtaaagtgcgcggcatcaagccaatgcaggcaagcaaatatttttttgtatgcagagatgtatagtacaactcattttaccattgcccatggtttacccaattactcatactggtatgaaattgggtttcaagttatgcaacatttttaggtattataattttgagagagaatttataacaatagttaataatttgtgatgctgccagcagggcaaacatttctcctcatattatataccaatttgttctataaagcattattttaatctcttcattgttcagcaaaaagagaagctttggaatagaacagacaaggccaagaattccttatatatgggaaaaatcacatgattgctaagcttttgacaaagcaaatggagataaccgcttggcaagagcgaaagaaataccgatattcgtttgagactagtcttcaacaacagataatactgctcttatacgaaggagtcatcaggac

SEQ ID NO: 43279 - DNA, 935 bp, Zea Mays
cttactttgctcgaccaaaaacacaaccacctagtttttatccaaggatgctttgggtttccacttatatttttttaataaaggatgtgtttccattagtttcttagaattatagatagacaatgtcaatcttcccgctagatgcctagatccagtagttattcagaccttgatcatttgaagaacaagggtctgagaggttgaggggaaataaatttcctataaaatcaaaatctaggtcaattctctcgaattctttttgattctgggacgattagtttcttagaattatagatagacaatgtcaatcttcccgctagatgcctagatccagtagttattcagaccttgatcatttgaagaacaagggtctgagaggttgaggggaaataaatttcctataaaatcaaaatctaggtcaattctctcgaattctttttgattctgggacgattagtttcttagaattatagatagacaatgtcaatcttcccgctagatgcctagatccagtagttattcagaccttgatcatttgaagaacaagggtctgagaggttgaggggaaataaatttcctataaaatcaaaatctaggtcaattctctcgaattctttttgattctgggacgaaacgaacaagctagtgtagcaaggctagggctcactggtcatacacaccatagaatcgatggatctcgtttgcccgttgtagacgaatcgaaggagcagggctttcccccgatcaacgaagcagattactagcaaagggtgcacagcctgctgctgtctcggcccgccatgtatgccgcgctgggccgccggcgaccaggtaaagctgatgggaattggaatgggctagctactgtttcttatgctttgttggtttctacgctaccagcctaccacccagaatactgtttggtttgtaacata

SEQ ID NO: 43280 - DNA, 290 bp, Zea Mays
ccgtgatgtaggcagcctagctagagttgtacacatctactactggtgtacttgcatttctcttataacaaagccggttcaaaacggcgcatgcggggctatccatgtcatcgttaaattgtgcaccgttggattacaaagcaagggctcctgttgcttctgctgtagcagctcgttgattggtcaaaaaagggggcggccaaaaggaatggtggctgctttctagagaaatccaccggccacttctctagttctccttagtccttcccttgcttctcgcttcttctccc

SEQ ID NO: 43281 - DNA, 918 bp, Zea Mays
atcacccccatgaatgctttgcataggtatgtgaaggtcgagagggcaataatagtgttgggcatgagatgcccaacctagaggccatatccgtcaaggattcagagaagaaagcatgaagaaggtagtttatgcccaccatcatgtgagaataaaacatgatatactctccaaattcttcccaagggctttgtagtggagcttacaccaaagagacattgttggaagcaggaggcactacccacctaggagctctcgcgtcttatctaacccctcctaattcatcaatttgccttaagacagttaatcgataacggagattgcaaccacaatggtcaatgggaaggacaatgaaggcaaccattttgggaggaggatagccagaggaagaagattactagagaaaggagaagataggagaaaaaggctacaaactacatgaaagaggaaggtaaataccacataacctacttaaaatccttgcttgcctcttcctctctattcctaggtgaagaacctgaagcatctcatgtcctgcatgataagtgactcgtgcgatatagcaaatgcacagaagataaccaaccaactactttgattaatatgcatgaaattcatgtcacacatgatgggatagtttcatcatacgcacttggaaagctagccccactcgaggaccacacaagattaccaattaatctctcctaaaaatatcaacaattaatcctttttccatttaatgattgggatttgggttcaagacatgacacgcctcattaaaaagggtgcagacatgaaatgtcattgcaaccaacactttggcttctgggccaaagtaacaacgaccggccctacatgagcatattagcaagatttggagatgaaacactaggtataactaaatcatgatataaatct

SEQ ID NO: 43282 - DNA, 421 bp, Zea Mays
caggggaaggatccaccctaggcaggttcgaagcattcacaactcgatgcagtgtgaggaaaagatggcccagtcttagggtcagtcgatccagcagcaagcaagctcccagtagcaagcaagctcccagcagcaaccttcgcataacacatttcgtccacctgctccaagaggcggaagaggaggccaaagttttggtggtagattcaatgcacctccaaggaagccattctgcttgttttgtggtgaagacaaaggccacaccacaagaacatgccatcatactatcaacaagaagaaggaacttgcttcgttggccactcaaccctcccggtcaaaagaggtatttagtacatcgtcgtattgttcaccttatatcccacattatgtctaacctcagctacaggagccaaggctaagt

SEQ ID NO: 43283 - DNA, 922 bp, Zea Mays
gaaactcctggtaggtagatgctgccggtgggcgctgttgttcccctccaccaaattgctgggggtggagttgatgttgcaccacttgtcgcaaaattttgttctattggaccatcaactcctgcattgttggagcttggggcagtggtgggggaaacttctcattttgcccacggcggggtcttgctgccatctgaaaaataggaatttgtcgctgttatacttaagcccaaattctaagcagtgacttaacattgtgaggagatagcgacacaagatcgtatttaaccaaaagggagataatcattcaccttgcattagtcatagaggttttccgggttacaacatattaggagatccaactctacagcctagtacaatagtttgtgcccaaaagctaagcttatgtagttttccccatcttcctaacatgctttttcccgacccatcttgccctgagtagcagaggcatcgctggctgcaggtgaaggggtactccagagtaagacgtgtcaagactggaagctctctcaatctcctcgggatcctcctcctcctcgcgattctcgtctgcctccattgcttggttcatatcctgatggtgcatatccagatgagagttagcctcatccagctcctcttgcacgtcatggagttgatttcacaggacttcaatggtgttctcctagatttcaacttgctgctccaactctcaggtgcggttgcccatttgctcgatatggagattcttttccaccaactaagaggacagatcgaccatgaagacctccctatcatcaagggtagtctttgcaatctaagcaagcctagtcagatgcaccatagcatccccttgtagggaatgtagtcgatacaatgcactcatgcactggatccttctaacctggtcgagatgcatagc

SEQ ID NO: 43284 - DNA, 388 bp, Zea Mays
gcacgggtcatggtgcacccggctatcgtcgcaacgtcaggcccagcctccactacagcaatgtcggtgcatccacaacagttatcgtctgctgacgtcaccatcgcggcgacactcactatctaaatgggctagatttgcgaggatggttcagacgcgacaataaaaaacaaagtaaacattagcagttcttgaatttgatatgttatgtcactgagatacctactctcaaaactagaaaaaatgggtgttcgagtccatcccaaaccgtccaaaattagatttgctcaaaccggatgcagatatgacgtgtcatattagagtcacttgggtttttgaacttttcataccatgtcacatgggctcacgtatatgataatgatgtgtc

SEQ ID NO: 43285 - DNA, 850 bp, Zea Mays
acgaattatggatgtgcacaaaggtcagaacgcttcaccttgaagcctgtagataagattagcaacacaaaaacatctcagcaggaaataaaaagatgttgctcgtccccacaactataaaacgtgacccctgctggctgaagacaaggcagagaagcaagcatagctgagagcacacttgcagtgtgagggctctgcctgctttctctgcggctagcagggttgccttatgttgttgcgagaaggaagaacacccctttatttcctactgaaatatttctacgtgctgctgatcttatctactggcttccagatttatacacatccaaaattattgtcagccaatgcagctactcgagcccataccttgtattacatcagtcacttgattgcacaaacattatttgtgtaactctatttggtttcatgctttaggtgtataaggttagcatccattattcatacacacaaacatctttgtgcctttttaactcttaccttatcatttttattttcttgcattaatatatattagttacaattggagtagaacacatgggcatttctgatactatcctgcattgtttcaatgcttcgaagagaagaaaaaagaaataagaaaccgcaagatctatatgatgatttacctgttctagcatctcaattctcaaatacaacagataaaactaatattgcaccccctttgttacttgcagcttttatgtggaggttttgctgggtcaactgctgctctctgtacaacaccgtttgatgttatcaagacacgagtgcaattacaggtactgtgacacgtagggatggaaaatggcaatggatatccgaattatcc

SEQ ID NO: 43286 - DNA, 655 bp, Zea Mays
aaaaaaacgggttctatttaaacaaaaaggtttcataagaacatgacaaaacttaatacatatcagtatatcactgcgctgacccctgatccaacccctcccccacaaggttctacgtttagaaagatcttttgaacgtcaacacacttccatctatataagatcaaaaatgattatcaggaaccaaaattaccagttcacaccaatctataaatctataatctatccaacacaagttagccttactgcactagtttaatctaagatttaataggccctcaatgttgtcatcgcttgtacaccaacttgcttgcatgattcttaaccaaacactgtatgtgaaattcaaattaatgatcgcatagtgagaacctaccagaaggaaagtcgcccagccatgaatttttaacttgttacactttgtgttcgcctgatactagagactagacttacaaagcaaaaggaaatgtattggaaaggaagaaaggagaatagtggacaaagccattgaaaacagaaattggcaagagaatacctgaacatttaggtaatgcagaccagcaactaagataggaaagatgggagctaaagtaccatgtggaaactcagtcaagttatggaaccacagaatcccaccctgtttggtagtacagaa

SEQ ID NO: 43287 - DNA, 653 bp, Zea Mays
gcaagggcatcatatattacatcggctcaaccttcgggatgatacccatctccctgtaattgaacaacattatcctcaattcctcacccacaaaaagatttcgcagatccccttcacctatgctcgccctaatcggcgaggacaacaattcttgtttaccaatccggtccactcgaagacggccacgctccatccccatacgacggcgcctaccacttcgcgaaaattcacccacactgtgtttcgccaccacccttcgtcgcctatacccagtactcgcactaggaagatccccagaaccctccacacgcggcgaagtctccgctgtagctacatctaacgcagcaaaataatccaagccttcatccgaggactcctccgtccaagaaaacgaactcccagattcaccatcagactcaaaacactcagacacagagacaaacaaattatcatcggcaggcactacggttgaggccgccacaaaatcagtattcccagcagcggttgcttgcgcaggcccaaacatcggaacttgcacagcaaccgaggttcagtatcatagaaacaaaagtttacacttaaatccctaacccctattccgccacctgctaaggccctaggtcttcggcagctggttcggccaccaccttcga

SEQ ID NO: 43288 - DNA, 364 bp, Zea Mays
gtcataacatatggcgtcaccatgaggccggggaacgagatcctgcacaactcgtctcccaagatgaagcctctgaagcaggggaacccctgaaacagagcactccacgagcgccacaactcccgtcaccacgatcgtcgccacgcctaggaacacgaacgagaacaagccgagcaggacgccaggctccaatgcaagaacccacttctccctcagaacatgttgtctgacttcactcatgcattgaatacaccgagtgaagttaggggagtcctggctcaaatcaccaacggcttgccatgcaccctagacacggaaggctaccattagatcctcacccaggaggcaaaccatcttcttcccc

SEQ ID NO: 43289 - DNA, 376 bp, Zea Mays
gggaaggccaaggaccacctcggtgcctactatttccagacgaggtcagatccaactgtggcctatatcgccatccttggcggcgcgaagtgggagaactggcgcaatgactaggtgatcgtcagtgctgaggccaacgaccgccttaccctgccgaacgacagaccaagactcaaccggaagcaatggagggccaaaccgtctctcgcgccggagttcgagcccgtactggacaggatcaaggaactcgcggccggtggtctgacctcgatgcacgtggtcggagatttcctgaagcgccgggtcatgccgttgcaggggaggccacgtctatgttgctggttcaccggccccagtgacattggcaggatccagc

SEQ ID NO: 43290 - DNA, 379 bp, Zea Mays
tgaaaaaatgagtgctcggttccttgattcgtgggcccgatagacgtaagctgcctagattgcggggacacgatcttttcgtgggcccggatgccgcgaaacatgcgcacaccaaaagtgtgtaaaacgtaacaagattgagcataacgcgtagttataattgacgtaactagatggtacagtcagccaaaaaagcgtgcgcgcctggtcggtacggtgcggtcagcgcacctggtcggggcttccattagttagagagagcctagggctctaaatactatatatatatatatatatattgaaaaccaaacgcaaaagtaacagattatatatatgtaactgcatatgtataaataatacgtaccgaaatactgatgag

SEQ ID NO: 43291 - DNA, 497 bp, Zea Mays
aacgaattgggttctaccagaagacaagtcggtggtgaacgtcagaagccacgagaggctatataacacgagcccccaccacttcattcaccacttccaccatcgctaagcagccagaaaaatggacccatttctcgagtacaatcgtctcatgcgcatggctcaacacatggatgttgacgacgaggagcttgaggtagccaccattcactacttaaagagacgtcaggtacgcaacaaccgtcaacatggtggttccgttgctttggctgagttcggatcccgcgagaccatttaggtgttcgctcgaggattctagcgggctactttggagctcatccggtgtaaaaccatttagggcctcttcgttttggctaagaacggcgaggaacaggaacaaaaccacgtggatcgacctggtttggaattcttccccacccatggtagaagatgtgttcgattaacccactcgaggattcatccccggtcgattcccg

SEQ ID NO: 43292 - DNA, 557 bp, Zea Mays
ggggcatacataaagacttacatacacttgaggttgaagcttgcaataatcctaatgaccaaaaggctctcaagaggcccaatatataggcttgtcaacctcaaactactccaaatgaagtgcgaccaatacgagttcatcgacaccattaacactcaaaagctatccaagggacgactggactctacaaggccaaccaacccatcaactgccttatacaacatgcatctaacctcttgagcttgaccttaagtgttgattataagatcttcaaatctgatagttgaatagctacatgaagcctgagcgactgggacttaacaatcactccaagccatctttagttataagtaccactcaccatctagggctataaatagggtacttgcctcagttgtatttacggagaagtgaccttaagtgttctcttccttttactttggcaatattttagtttatttatttgctcatgagtaccttatttgcaacagatagcttgttctattgattgtttttaaactttgcttggactagttggtaaatgtagcagttaagca

SEQ ID NO: 43293 - DNA, 325 bp, Zea Mays
tgcaatcaatcaaatttctgtcaggtgcgggaggaaccaagtgccatgttttattccgcataagggcagaaaattctaggtccatggcagcttttccagtttgggtcaaacaatgcaacagacaagctggagggttcttcacaaattgccaaatttccatacctgatcgtgccatctgtaaactttctgggcttcacaataccactctgtagccgagtgcgcctagcaggaagcggaataggacacgaggctgatggcgagggcagatggctgtcagtgagagagggaccagccgcgccagagtcggcacgaggcaatcccgaag

SEQ ID NO: 43294 - DNA, 609 bp, Zea Mays
gggaagagctttgcttcatactgggaagtgaaaggtcgagcaaaatgtgagaacagtagcagaaaaaatcaacaaggtaattgagagaattatgttaaaaagaatgaggaatgcaacttacccttaaatcaattcacaattaaaataaagagaggtcaggaatttgtgtagcagcctgatagatgaattgggaaaaacagtgatacccttaaatcaattcacaaaagtgtgaagatagacatagttgactcacaattaaaataaagggagatcacgaatttgtgtagcagactgacagatgaattgggaaaaaacagtgacacccttaaatcaattcataaaagtgtgaaggtagacaactgtgtcgcaacacattttctttctaatttaacaatttaccgcgactaagaatggtattagatcggagtactttaccacatacacagaagttcaggatagagacaccgaactgaaaaaacacaatgtatagaagtatggactaataagacaaaggatagggctaaggggattggatcaccttgaacaggttaatcttcgtgatctgtcaggaacgacaacacgttgaacggattaacctggcatatagga

SEQ ID NO: 43295 - DNA, 536 bp, Zea Mays
ggagtatcaagacctaagcatatatataagggacccaaaacgttgaggttaatctgacgatcatccgtatctccttttccatctgtagatcataacaacatggtgcagagccaaaaggcactgttgagaggtccacgatgcttgaatattgatcatcactttgtgatttccatgatttttctttctctctcgcccacaaactaatagaactagcggtgtgctacaagcctaggatcataatggcgcttcttattatgaacaatcattctgtttagtatagcatgatgaaagaaaagtgcacttgtgtcactgtccacttcattctcagtttccggcattcgatcggtgcaaatcaatcactccagcaacacctccaccgtggcaggctacgtatatacgaagaagcaatccgatcagtaccgcccgggccggagcgtagctttgctgtagttctgtttctgtttctgaagagcggtacagtaacacgttcagatgtcccttgccttttcgctgatcccttccgtgttgtggttgtg

SEQ ID NO: 43296 - DNA, 649 bp, Zea Mays
cgagaccgagccagagcctcttttcttcctctgagctctctgttctctgcgtttgctccctctctctggcgatccaccctctcaccggcgatctccctcaccggcgtccactgctctccggcgacctcgaccagtgctcctcggtgagcagcctcctttcttcctctgtcttctctctctctctgttctctaggctgtgcactcccccatttccaccctttgtgtaaaattccaaatcctgtgaatcccagtgaatccatgttgtgcaatgtgttcctttgtggccattgagtgtccttgcaggttcctagctccttcgggagggttttcccaccccaaataggccatttccccgaaaacctaattcaccgcacgtcacgtgttcgatgaaatgcccaaaccagccaaaaatgctccaattgaacccaaatttttcaggcaccttcacaacacttccagtaacatatttgccaactttcacgccaatccgagattccaggctttattttcaccaaattccccgtttcgagcgatcgtttccgagccgagtgcccaaatctttttttcttcgcctaaattcaaaccaagcacacacttcactcatattcacctatataaacctattcgtgaagtatcagctcaattccat

SEQ ID NO: 43297 - DNA, 317 bp, Zea Mays
cagaaactcgttgttcactgtattagaattattcttttatgcttggttgacatgccacatctttttagacttggctgtagtaagctactaatgcaattttatcgctattcagaattatgccttttgttctcccacttgatcatatgttgctgttattattgctgtatgccccaaattggagttactggcatacagttataatctttgcagtgtgcaactcccttgaaaacctgaaactatgttgaaaaaaggtgtaatagtttatagtttgataaccattatccttgcaatccatcatatttcttgctgttattgag

SEQ ID NO: 43298 - DNA, 523 bp, Zea Mays
ttggcggctcttataaatctgggcgtcggtataacggacgaagagaagatgagagagctgcgtacttggtacctgctgctcacgagatccggatccaggggagaagttcgtatctgtgtagagggaagaagccctatataaatagaggtggggtgtggcgaggtggggaggaggttgcacgcacgagtgttgcctgatgagatgaagcgggggtgagattgatggaaggaatagactttgacggagggtagacagggagaatagacgaagggtcgatgaggtagttagggatggcagatgcaagtgacttgctgttcgcgaggagaagtggttcggtggtctcgcgaaaaagaacacgagatccggaacaggctcgacgagaggaaaatatatataaatatattatcgagtttccagaattttatagcttttgcaaatgctaaattttgagattaaaaataatatcagaaaaatcttaaattcatagttaatataaaaaaacattccgaaggttcccgaaaat

SEQ ID NO: 43299 - DNA, 523 bp, Zea Mays
aagaaactatggtgttccaggcaatttagtgtggtctaattcaatccaccgagtctacaagcaacaggggacctaagagatgctagaacaggcaacctgaggagggctggccacggggagaggctccacggcggagttcttgaccgatttgggggaaatgggaaatttggaggctctggtggacgatcggagacgagagcttgtgctttggatgtgtaattaccctacgaagctcatggcatgctcaatttatagagtccgtgagcggtggtgtccaattcgaagagattgcgctggtggccgggaagaagagatgagtcaccgcggcaatctaccgtggctatcattggttgcgaagctacgacggttaccgggcagtcactacggcgcgcgacgatgtggtaaatggcctaaggcgtggcgtaaccagagacaacggcgacagccccggtgatgatcgcacggccacgtcgccgggcaagtgggcatagcaacagggtggccacagtgccccaaactcatc

SEQ ID NO: 43300 - DNA, 762 bp, Zea Mays
ataaaaggaggaactcaggttgggtaaaacaatagaatacaacaatccctatgcttgtttggaaacaagagtattggaggagattgagggggctataatcatttgttatttaattttgaatagcaagggattataacccctcaatcctctacaatactctttcttccaaagaagcccctagggggttagttatccccttgggattcttgtttgggcaatctatatggatacaatttaaataagacatttagtttttaatgagaggtttttactccttggttttgtctgattgtctcctctgcttccaaattagttctaaaagtgtcggacaaccacaatatcaacaagctagagagcgacatcggttggttgaactgggagctcaactcacaccgcctcactgcaacaccaaactgctgcaccattcaccagtctataactgaaatctaaacgaacgtaagactgttgccatgttgcaacaacatcacctgaaaatagagttgtagccaacacaacgtcaccctcacttgcggcatcaccgcccatgatgattcccacatcgatccgacctttgcatcatgaagtgctggccatcgtggtacactgcaagtcaagtagctatcacgcatcatcaaatcatcgtggtaaacatgttgtgcaaacatgatgatgtgcaggtagtggggaacatcgcggccgtatcatcgtcgctgcacgtcggcaaggcggggccgatggtccacaccggcgcgtgcatcgctg

SEQ ID NO: 43301 - DNA, 692 bp, Zea Mays
tagcacaggagtatttctatttttctctggattaataaggtttggtcagtttccttatttaattcaaaactctaaaatctattgcaaaaaccatggggtttactattttagccttagttcatattattttgaatccagcaaaattggtttgacaacttttggttaaatatttctcaagttatgaattttctatgttttctgttcattaaaaagaattaatcagaaatggttaaatggaaactaactttgcatcgaggtccctggcgtatgtttttaagttttcttacacactagtcctcgggtcactattcacatgtgccactgacatttcagaaaaccccctgggttttactaaacctaatccgaggtccttctcccaactaaatagtacccgcggcggaggaaagggcggaggggcttatcggtggcgagattgctccggtgaggtggtcaagggcataggggaggtcgtgatggtcacgccgatgtgcggatcgtctcaggggatagttggagtaggccgatccacgtgcgcaggcggggtagctcgtcggcggcgagggctccgtcctatcctgggcgatagagttcaattaaaccggtcggtgagtttcactaggtatcagggaaggcatggacgcgaggaattgaagaatggctcacctaatagctcggtctatgcgtggtggcgg

SEQ ID NO: 43302 - DNA, 284 bp, Zea Mays
cttcgcctcgtgcctcgggtccgccaatctggcgtacgcccggcgtttccgcgacgcgtcttggcaatcctttccatcactgccgatacaacagcaccaacattccatccgtaagggaaaatcttcatctcacgagctaatcgagacgtaaacatgtcctcgtcggccgcccgggatatcggaacattcctaggccatcgacccctggtaaccttcagcattcgcgcagaaaatccccgagagccaagcatgtctccaacaaatccgcaacaaaacgatcggaa

SEQ ID NO: 43303 - DNA, 438 bp, Zea Mays
taggctattcaagcaaaaagtcctcaggaaaggtgtcctcaagcacaccatcaacagccgacatagttaatccttggatattcatcatctctgtggtagcaaggttcaaggtattactgcaagccttagatcgtcgttaaagccgaaccaggagaagcacttcttctttctcctcatcatctccttcctccaccacatacctagctatcctcacaccactcccaccttccaaaacatcctccaaaccaaaactcactagattatcttcggggttcggcgcgactggggtagtcaccagctgcagattcgacgaacgtcaaagtcttttcttcttcttcacttctgtggactcgacctgagtgtctgattgacacgatcgcttgcgtcatggaccctcagggttgcttaccttcttccatactccactcgaatgctcag

SEQ ID NO: 43304 - DNA, 745 bp, Zea Mays
ttggggtcccggactagtatgtataggggtccagtgtctttctgtgggggtccggtcctagcaacgaacaccggcatgtactccctttccttgccacgcggtgctcctggacctacccgttgggcgccattctccacgtggtcttgaggcattacacgggtgcagcgcctttatgcagtagcagaaggtacccctaattgagggtactcacaggcatgattgggagccagcacacataagctatagaggctcatgtcgtagtgtgcacaatattgtacatcctctagctaatcgtcgattggtgatataaagtagaaaaatattatgagctcaaaactagtgaacatcaagacttttagcttcccctcaccttatggttacaatgggagttatagcctaataatgctaatatccctttatgcttgccttctagacgaagagtgtccatggtaagcttggttgtttctaacttgaactacttttgttagattgaattgaataccctaaaccctaaaccaataaggaatagtttgcatgactttagatgtggggcctctttcctaagactgtaccatcattagtgggccctgatcacatctttgttttgtgatagggttacacttaactatcctacgtccttagctcctttggggcacttcggtcctagagggacaggttctggactcccttggagcacgaggccaatgactctttaggaatcccgagtccaacaaagggaggtaac

SEQ ID NO: 43305 - DNA, 352 bp, Zea Mays
cctgatactactcagaaatggcttgtgagttgtgcagattccataactggtcttctttgactaattttacatcgataccggacatcacatcactgtacatgttcatagttgtaaagttctttttaagtttctgaccacatcgctaaaaaggtgtttctgatcactgtcacccccaggacctatccaagtcgctttccaatgcagttagacgacagagaaggcatgactatgatgtcataatgctgaaggaccccaagaagagactatggcctgtcgtttaccacgacagcctgttatttgtgggattcaccgcgggctggaaacatttcgtggcatcaaacgaccttcgggc

SEQ ID NO: 43306 - DNA, 888 bp, Zea Mays
ggtccagcaaacaacctgcttccttcattcttagaatcaaccaagaattatactgaaactggacatatcaaaggcttttgactcggtatcttggcccttcttgttggaagtcttgcagagtctggggtttgggactggatggtgtgagattgtgagtgggctgcttgccacatcctcctctcagattctccttaatggtactccaggggacttcattccgcacagaagagggctaaggcagcgagaccccctctcccctatgttattcattctggtgatggacgttctaaacctcatggtggggcgggctgttgaagctgggctgctgcaacccctatcaactcgttccattcagcatagagtctctctttacgcggatgatgttgcacttttcatcaaacctacaacagttgaccttgttctagtgagaaatatactcaggctgtttggtgaagcttccggtctccaaacaaatattcagaaaagtagtattatccctattaggtgctcatagtcggaggtagccactgttcaagatcatctgccttgcaagcttgaggaattcccgttcaaatatttggggctgccactttccttaaaaaagctcagtaaagagcagttacaacccttcattgaccgcttggcggactctctctcgggttggaaggctgatcttatgactaaggcaggaagagcggtccaggttcagtttgtgttaacggctactgtcatctatcatgctatggctttagatctccctccttgggccctcaaggccatggataaaatcagaaggaattttctttggtgtggcagaagcgagactaatggaggtcattgtctgattgcttggcctaaagtcactagacctaaagagctggatgttct

SEQ ID NO: 43307 - DNA, 561 bp, Zea Mays
cacataatcttccaataactaccatgtcaacacccattcaaattgattcagccggtggtagaattcgagctgatagtgttttcttgaatgtaagtgtggaaataagggggatagcttttcccgctaacctcatagtaatgagtactcatggaatagatgttatcctagggatagactggctagataagtaccgggcagttatcagttgtgataagaggacgattaagttgatgtccccattaggagaggtggtgaccgagttagtcccgcctgagccaaggaaaggaagttgttatcagatggctatggatagcagtgaagcagatccacttgagattatcaaggttgtgttcaagttcccagatgtgttcccaaaggacttaccaggcatgccacctgagcgaaaagttgagtttgccatagagcttcttcctggaaccgcccccatctttaagagagcttacagagtatatggaccggagttggttgaactcaagaagcagatcattgagctctcagagaaaggttacatccggctaagtacctcaccttgggccgccc

SEQ ID NO: 43308 - DNA, 483 bp, Zea Mays
ggcctacacaagggccaaagatgatgcaatgaccttggccttcgaaggccgaggcaagaaaagattgaatagagtttttgatgtcattggtttcgtacaccctgattatagctatccctcgtgaaagcaaggaaagaaaaggaaaactgccgcttcagccatctctgttgtgccgaagggcaaaaagatcaaggtcttaacgcaccggccaagatacattgagacggccacagtgccgaagcttggtgaagggacatcttccactgccgaagtagaacaacctactcttgccatccctagggaagagctgactgaattgccgaaggttcctgcagctgggccagccgaaatgccaaaacacggtgccgaagccaaagaaaaggcggccaaagagccagagctaggggaaacggtagagctgtcaaaaatcttgagcccaccagcagagctaggattaccgaagataacaagagctcctgcaat

SEQ ID NO: 43309 - DNA, 1532 bp, Zea Mays
gtcttagtcacgatcctcaaatccacctggtggattgaagcttggcccatcacaaattttcattagaacgacacacaattcactggaagcatattcctagaattcgctttggggtaccaaactcaatcatcacagataacaacacacaattcactggaagcatattcttagaattcaacgacaaataccccatttatgtcaactggaccaccgtggcccatccctgcgcaaacggacaggtggagcgagccaacgacatgatactacaaggccttaagcatcgggttttcacctgccttaagcgacttggctgacaatggccccaagagctaactgttgtcctctagagcctgagaactatctcaaaccattcgactgggtacacgccttacttcatgacctatggagttgaggcgatcctccccaccgatctcaagtatggcgtcctaatactgaaggcgtacatggacgaaagaaacgaacaagcctctaaaacacactagatcaacttaacgaagcccgcgacatggttctcctatggtcgacaaggtaccaacagacgctatgaatgtatcacaaccgtcgcatatgagaaaggccactggaggtgggagaccttgtgctgcgatgggtacaaagcaacaaagatcggcataggttgtctccaccctaggagggtccattcataattggagaagtactatggttgggcacctacaagttgaaggatgaggaaggaagtatgctcaccgacgtgtggaacatcgagcaactttgatgattctacccttagtgaagcctatgcattcatgaccgaccctaagaactattcctgaccctgagacgatagtcgcaggggttggggatagcgagggctatggagaaatcaatagaccctccttggaaaaacatcaggtagctcgtctcctgtcaaaacatatgcgtcctcccagtaggcattatcgtgcactaacatctctcctcttttgcttgctcaatcaacgcagggccaccctcccatgctcgaaaaaaattgaagggaacgagagtcgtccaaaaccgacgcaccggaccgggccactcttcgagccacccctgcttaggaaatggagtgagcaagggccactgtctagtaacaccccaaaactcgattgtttcctttggcaaggaccaaaaaatccgtgatgagccaattgtgaattctggagttcaaaggctggccgcggagggctcgtggccactccagcgaaaaacaaagcgaggggcagccagtaacgggcacactagcggctaggaccctaatgcgcgaagcgttaagggcgtcaccagctcgtgtttgagttctaggaagctctggctcatggtttatcgtgaagagtagcgagccatcgatttcggtcgaatggaattggaaaatatatgagttagtgtctaggattatgaggacagtcctcggcggccccacgcttggatcctacggaaggtaccagggcctcactcgaattacctgcttgtagctcacttagagccat

SEQ ID NO: 43310 - DNA, 429 bp, Zea Mays
aaggaatagaagaagagatcaacactctctttgtttcagtggcatgagagagatggaaacactgtaatgtctatgttttaaagagggtcaaatgttatggtgacacttcacaacatagcaaatgaaggattgttgtggtgttcggttggagcttaggatctccaagtgattttagtagggaccatgagtggactaggatagtctgttctgcacctaggttctttttggtctagttttgtttcctatagtaagttcttttttgtctggggcttagatcccctttatactttttcttcttaataaaatgatacacgattcttctgtgcattcaagaaaaataacactaagctaataggtcatcatgcgtctctaaaacatatattctttagaacaaagttacatacatcaacatagatttgaacatatggg

SEQ ID NO: 43311 - DNA, 518 bp, Zea Mays
caagtttgccctaaaatcggaataaatgtttggaaaatgagaagtcctatttccaagccgaatttgggaattttaaaaacagcgaatccggcaaagccggaaagaatcagatgcgaaatttaattctgtgcgatttgaaaaaaatgggcccgattcgagttccgaggcaaaagttacggctgttttaagtttggactccgaatcagggtttctagcgaggtgttggaagggtgggggttcggttttgtggatagggtcggttttagagataggatatattttgtagatatggtcgattgtagagataggatctattttgtgaatagggtcggttttaaagataggatttgttttgtggatatggtcggttttagagataggatctgttttgtggatagggtcggttttagagataggatttgttttgtagatagggtcggttgtagagataggatatgttttgtatatagggtcggttttgtaggatggaagcggatggacacaatcaaactgaacca

SEQ ID NO: 43312 - DNA, 284 bp, Zea Mays
atgatgatgcaagcgcgggtccaagctttgggccattcctaatgccccttggatgtgtcaatgactaattttgtttcaacttttcctggcatggtggggggtgtctttcctgtcgtggaggaggctgacttcccggaactcttcgccttgttcctcggggtgatggctttggtggcactcaccctccatccaccaagcccccagccagatggccgctgggggctacttgtgtgggaagctcttctacctcgggctcattagggatcccggatagcataccttcg

SEQ ID NO: 43313 - DNA, 1106 bp, Zea Mays
tgccgacttaagctgattgctcctttagtagggtatagtggtcaccctaagtcaagtaagcgtgagcatattgcaccgtcttaagtcattgccgacttaagccgattgctccgttagtagggtatagtggtcaccctaagtcgtgtaagcgtgagcatgttgcactgtcttaagtcattgctgacttaagccgattgctccgttagtagggtatagtggtcaccctaagtcgagtaagcgtgagcatgttgcaccgtcttaagtcattgtcgacttaagccgattgctccgttagtagggtatagtggtcaccctaagtcgagtaagtgcgagcatgttgcaccgtcttaagtcattgccgacttaagccgattgctccgttagtagggtatagtggccaccctaagtcgagtaagtgtgttgattccaagtctagtcgaagtcaattgataaccaatagtgtgaatgcctttgagaaggaaatcttttattgatgacgtattttccaattacagagtacaacattgctctgatagctttttgagtcttgctaaggataaaacttcctgaggtgctccatgttccatgagttccccacttccgtgccatccatttgagtaagccgatatgatcctggccgagtgacctccgacaccacgaatggcccctcccatagcagcaacaatttgtgccgaccttctctcgttagaattcggcgaaggaccaagtctcccattacgaaggatcgatgtcctatagccttatcatgatagcgcctcagggtctgctggtatctagctgactaaaatactgtattcagtcgctcttcctccagtacgtcaatatcttctagcctagtagcttctgcttcggctatgctttcaaagaccagccttggtgccccgaacctgaggttggcaggtagcactgcctccgaaccatagaccatgaagaagggggtgtttccatgcagagctcaactcagttgagttcttaggctccaggccacataaggtaactctccgatccatttccctgcgaacttttcattcttgtcgaagaccttcttcctgagtgcttccagtatcattccattagccctttcc

SEQ ID NO: 43314 - DNA, 348 bp, Zea Mays
tccaccaccatggagaaaaagattcccgacttccttgaccggcgatccggaagcaattgcgccaacaaggataacatgaactttggggaacttcccaagaataccacctccctacccgacgacgcttgcaataacactgtcttccaaaaacaggatataactgcgcgatactgagataaccaatccatacccaagataacatcgaaatcccctaatgaaatcacaacaagaatggccgaaaagacctcatcaacaaggatgacggaacacccctgacaaactgaacagctactaatggagccattagcagaactaaccaaaattgggtgacccaacctctgcaccgaa

SEQ ID NO: 43315 - DNA, 898 bp, Zea Mays
gtgccagcataaacacaaaggaggcttgaatgaacaggagctcggaatacatcgccatgcactaacttccatccggtttcttcctgagcctcatcctggtcgtcaagctgattgtagtttgttatgtccttgtaaagggttatcatcatgatcatggctaccataccagaaaggaataggacgatcatcaatgagttaacaattgaaaactagtgtatttggctatcactagaaagaaggtatacatcccatcgagatgcccatatgatatcactggactgaaataggtcaattcaaaactaatcaaacttgggggaaataatcttagtgatagagaagcttatgaaacaaattgtaccttaaaagtagaaacataagagaatacaacatctgcatcaggggccacctcttgaggagtgtgactaccgggtgtaaccttaatgttagcattgcaagtttgcactgtgggattgttgtcatcccaagcaccatattcatgtttgatgttgtaacaaatcagcacaaaggagttatagatatagatgactccatatttcataggcagatggaagtaggaaaccaaatgtaagtagtaagagaacaaaatcttagaaacagatgagagaagttgatcatgaaatatggcatacctgctaggaatcacatggaagccaacaatgcgagcatcgggagaagtttggtcttcgtggtacaagactttaaaactcaagtgattgttgatataatacttgtcatccttgagctgacaatattgcattcaaatcaaacaaggtaaccaatattaaccaattcatgtctaacttatgagataagaatttgttatgctcaccttgtaaccaactcggtaaccatgcttggtgtttggcttccttcccgg

SEQ ID NO: 43316 - DNA, 416 bp, Zea Mays
gtcgaggaacaggtcagggcaggggtcggggatgaggtttgtttgtgcgtctggccaagggaatcgccatggtttttgtcaggtgccgcaactgtgctgttgatgaggctatgcaccgacgtgagacccgggcgcttcatgatgatatgcgaagctttgtagcctccatgggacatcccatgccacaacaacctcctcttgttccaattcctgcatatctagaaatctcaatgaatggcacgagcgagaataaggtgtgtcgtttattactccgaaagctgaggcaaaggactacgatgactcatcttactttcagtctactcctgctgccgcaataggacccattctaggtgatcccaaaccctctggctctgctcatcctccaccttatcagggtccttcttcatcggcctatc

SEQ ID NO: 43317 - DNA, 665 bp, Zea Mays
caaagttgaatttaaatctgaatataacttgagattcaaatacaaggaaaatggaataaaataaagaagaaatcgcgcctgggctgaaaccttatctcttggcccagcttgcttcttcccccgcgcggcccagcaactccacatttacccgcaccggcccaccttcttccctgtagctgcgcctgcatgtttgggcactggggaaccaggcccactcgccagtacctagtcctccggtctgtcctcgcagtgtcactgcatcgtgggaccatcctgtcggatcggtcttcttcaatccacgcgggtcgctcgggatcgtgcgggtagatcgagtccatggctgagctccagtcccacgcacccgaagtcgattatcccggggagaatctctgccgtgtggggcccacggtcagggtggtcttcgacccggtctgctgcgacatccgtgtcgtctcctcggggttagtttcaacagaaatagcgaaaagctcgcccagatcctcatcctttctgtcgtgtgcttgggggaaggtggactccgcctacggggggcataaaacccgccgcgacctcttacctcacctctctggttccctagtcgagccatcatcctcccccatcatgcacggcaacgcgccgcgcagaccatctcgccaacagccgcc

SEQ ID NO: 43318 - DNA, 551 bp, Zea Mays
gggctttacatcccatccgtcggatcgagatcaatgacccaaacccgctctcacgtctgtgctcccgaccccagcgtacaagtcaaaaaaaagttctactgtttcactgaggtatgcctcctaaaactccaaaccccaatagcacaggacacggagaaaagagaaaaaaataaactttaacttcttttcagaaaattgggtatcacacgctaccccccacctttaaaaaagaattcgacctcgaatttcgtcgcttctatcagaacaactaaacgaaagattagcgaagacagagaaactcacccataacgaaaagttcggggtacttctgccgcatcagctcctcaagttcccaagtagcctcgcgctcagactgattagtccacaagaccttaacatacttaattgatctccttctcatgatacgctccgaggactccaagatacgcaccggacgacactccagagttagatcctgctgcacagcaatcagttccaactcgatttgatggtccagatcccgcaaaaacttcctcaacatagagacatga

SEQ ID NO: 43319 - DNA, 942 bp, Zea Mays
cgactttggttgtagcttgttgtgcgaaaatggtatccattgacgtcatacctagaaaattttctgattctataggcaaagccattggctacttgtgtcaactcggcactcatagacatgtctctttggcccttgcaagttcgaacacgctagattgctatattattctcacacaagagcaacttcaaatgacaaactaagcatgataccttctgtttgaaccaggaaatgaaatcaggcaatccatttcctgcactctttctaagaagggtatcatatccttgtggagttaggtcccttgatcgatgccagaattcatgaagaaattgatccatgtatggtgtcacctcttcaaggttggtcaatatatatagtatgatatggagactctcttcatgtctaagggtcttggtggtctaaccacttgcgcttccgagttgccctcgaaaaatgctaagattcgattcatttttgccatcattgtaagagggggtggattatgcacgctcgacagtttgtcaccatagtaagttgttgtgaagtttgacacctcctccagtatgtatgcctctacaatgaaagccacgattttgcatttatttctacatttcttttgaatagtctttagatgtctctcgattggatagcaccaacgtccctacatggcacccccatccgtgtctcatacgggagatgaagaatcaaatgctgcatcagattgacgaagtcgagtggaaagatcttctcaaccttacatagtaacacgagtgccattctttccaagtctgtaatcatggtctgagataactattttgcacaaagctagtggaagaaatagctcaactctgcaagcgctagccagacatgctcagggacataacctcgaaccatcgtcggaagaattcgttcaatccatatgttgaagtcatgactcttcatccc

SEQ ID NO: 43320 - DNA, 361 bp, Zea Mays
cagcgtttgagggcattaggtgcaagaaggacggatggctccctcaagactacgcctaattcgcaaacgatccgggcgcgagcccattgccttcttgggtcaacccatctcaattgtagtctttgcccggcccacgatgagatgaccttgtggggcgactggtttgtggccccatgcaagggttttcaccttctagtggacccgggggatatctgtcccccacagccaccaccaagcaaagcctaaccgtcgatttcgcctcacccgaggtgaatttccccgtcggacttctccttctctctccctcattttctctgttccgtcaattagccaccgatgatcaccggtatcgataccgcga

SEQ ID NO: 43321 - DNA, 566 bp, Zea Mays
accgattgttctattagcagggtactgagatcaccctcgaatatgtaagcatgttgtattgctttgaggcattcctgatttgaactgactattttgttagtagggtatagtaatcacccctagtcatgtaagcatgggcgtgtcgaaccgacttaaggtgtatttgacttaagccgattgctctgttagtagggtatagtgatcaccctaagtcgtgtaagtgttagcatgtcgcaccgacttaaggcgtttccgacttaagctgattgctccgttagtaggttatagtgatcaccctaagtcatgtaagtgtgagcatgtcgcaccgacttaaggcatttctgacttaagctgattactccgttagtagggtatagtgatcaccctaagttgtgtaagcgtgagcatatcgcaacgacttaaggcgtttccgacttaagccgattgctccgttaatagggtatagtgatcaccctaagtcatgtaagcgtgagcatgtcgcaccgacttaaggcatttccgacttaagctgattgctccgttagtagggtatagtgatcacccta

SEQ ID NO: 43322 - DNA, 625 bp, Zea Mays
aaggcagattgaaacagagatgaaaaaaggcaactcaaacagagatgtcaaggaacaatggagcacttaataagagaaactggagtgtggccaatatttataggatgagagacaactaatgcatagtctgccagttacttttagcatattaaaaccacattgaaataaatcggcagcattcgtacaatttattatgttttgcttgagaatgttaggacaactatctgatactcctaatgctgaaatccagcttgtaataatgtcaaaatatgatgcgagatagctaatggatagtctgtaagttactttcagcatattaaaaccacatttaaaatgcaacccttagcatgtcatgtcgaatgaaacacacacatatgacaacttggatagtacttctttcatatgtgatacatggtgacatctcatcttctgagaagtaaattatacatgaaattattttgaataaataaagcacatattccggtatacttgagaacttccggattcatgtgtaacaaacttgtattagaagacccatgttgttctatcacacaacttaatcctattcagcttatcagtggaaagcatcactaaacttcaagtgtcacgacattatttatgaggc

SEQ ID NO: 43323 - DNA, 393 bp, Zea Mays
tgaatattaagtgacaaatatgtgaccaccgatcatgaaggtagctccatactgaaaagtggggatttttcttctctggaagttgtagaattaaacgtcttaaaattgttttggccaaacacaaatgggcagttctacatctcacacatatgtttggtgtgtgcaatcctcctggcggcagaagagtgctgctggagccggacgggtgactggacgagtagcaggtgctgcagatccgctacctgtacctgcaggtcgtccgtgtgtgcgttcaggtgacaagtgcggctccttcccaaatctcccaatctgtagcggatggacgagagtcccccgtacaagttattcccaaatatcccgatctacttcaagaaaaacgaaaatagattgctc

SEQ ID NO: 43324 - DNA, 309 bp, Zea Mays
cctggatccatgttctgcttcggaaccatctctttcgtggcagacgaagaagggattctgcatcgaatagcagatccaccgaagaaaaagccttccttgaaaatctccgagaaagctagaacgaagcaggaaatagtgtgacctccagcgctccaggcaaagactacctcctgcaagccaggagcagagaattcgttcacccggagaaccccgttgtccacctcatccatggaaagatggacatagattacaaggaaaaaagaaacaaacgagataaaggcccgtcaagctgcccttctggtacctccg

SEQ ID NO: 43325 - DNA, 552 bp, Zea Mays
ggtgaatctggtgaggatattgagattgatgaaacccaagatgcctttactgtcaaccctgacgtacctgacttgtacgacaaggtgtatagtaacatacctgaagaaacacatttgctgagcactgttgctgactgcaattactgcaaagcgaagaagtttcagtatgaaccacctggattttgttgtcataatggacagattaatctagccgcattggagaccccgccccagcttaggaggctgtgggagtgtgcagatgcttatgcgaggcatttccgtgataacattcgattttttaacggccatttctcgttcacttctctatattgttgccttgacagtatgactacaaacatggattgtggtatctacacgtttcgtgcacatggcatgattgtgacaccccagtgtcacttagggttcttccttaagctaaccccaacccatgatcacatgcaatctcaaaaaaagggtgaacatcgaaaatgagaacacagaattatgttgaagtctacttaaaccctccttaaagttttcatgaattctaaa

SEQ ID NO: 43326 - DNA, 546 bp, Zea Mays
atgggatccggacctatccacatacactcctgctgcccgctcaggcggagacccaatgctgccacgaggcctactgcgcgcggtgtaagccaacgggcggagcgtgacataaagcctttgggctacacgcgtcttggcatttattacagataagacgtgtgtctgtctattccagtgacaggcggcgtgcccaatccatgttgcatggaccgtgccattactcctgcattaccaggaaaaagggtaactacctatcaatgctgcatggactgcggtcatcatgacccccactaattactcaggcttactaaggcaggcaacacaacgtccaataaagatcttggtgtgctgtcagcattaattatccacataatgtatttcttccattatgctcctgggcccacatgtcggggctcagcattcttgtatgtgcctcccttaaactataaaagggaaggcacacaacgttacaagggataggttttacacacaagttcacatgcttacatacactctcaatacaacttacatatagtggaggtaggg

SEQ ID NO: 43327 - DNA, 337 bp, Zea Mays
ataagtagtaagtgggcttaccaggaccggacagagaagatttgggcttttcttgtcttggtccaggaaggtcccctactacctgctacggtctttgggcggagaggcttcggctactacgaccatgccatgcacttgttgtctctgcaaagtgcaaacaaacgacattttctggcccgctgggcatggtgcgtagtgtagaacatccgtcggcgtttggccccgtgttgatttccctgcaatcagcctgaacatggaaatcaagtcccaaatgtcttggaaacagtaggaatagtaccttggcacgttccgatttcactgctcccaagattatgat

SEQ ID NO: 43328 - DNA, 319 bp, Zea Mays
tgcccgctcacacatcgatctacggtcgagatcaggctgagtcgaatcggtacgagcctcaaatccagtccactcatcgcggatctaacgatcgacacgatctctaatcccacgcctaatcaccaccgcccatacccagatccatggccaccccatacctccccaacaccgacaccgacgaccgcggcgacacgcgtatgcctggcggcgccatggtcggcaacaggtaattcgcccccctggtgatcgaacacgacgggaataggtgctacatatcgcggacaacaagacaaactagatgagggcatccatacctccg

SEQ ID NO: 43329 - DNA, 472 bp, Zea Mays
atttgaagtaagtggtctttctcttaaattattagcaattggtatgggtctactttctttttcatgggtttgcatttttctctggtagtttatctcatcatggacttagcaaatttttggttgcccattatcacattaataggggttgttcatgatttatttggaaaatgccttattctcactttgcatttattttccttacttaacaagttgggctggggtgctctgtatttttgtagtggggctctggtggttgtaagtccactggatttttattaatcattttggttatagttttgcctctttaataattgattttcagtctatataaggctaaataaatcatcttaattttaaaactggtccaactaatggtctctgtatttttcctaggttctctgttacataagtaaactaggaaaaataatcttaatcattgttcattaatttctaatgcctttctgattttctc

SEQ ID NO: 43330 - DNA, 522 bp, Zea Mays
gcatcgctcaattaaggatgatgttggcttccaaagggaagcaaacaccaaaaagagccatgaggcccccaaattcatcaaggaaaaggggtaggcatgtatggctagtagtgttcattcttcacatgcttgcaagaatcatgatgatacttatgcttgtgttaagaatgttcataatgttcatgatgattgtgttgatcatgttgtccatgttgtgtgtcatgatgtttattcacctcatgccatgattacttcttctagttcatcttttgttcatggtagacctaggcgcaatatttctcatgctagatctatttatgtgcctaaggctaggaatgcatcttttggtccttctatttcatatcgcacttatgatgcttcctatgttctgtaaccatcgttaactatcgatgaagttcgtaggaaatagtcgaactatttcgtgataattaggtgtcagtgtatccgacctaggacagtcctacctaaggccaaatgggacaccattccgtaccctctagg

SEQ ID NO: 43331 - DNA, 619 bp, Zea Mays
ctactatgatgggtgcaaagattatgcatattgtgcagctccgtgttttgcgtatgcatacccggagggtctagagtaaggggttggacggtccgcgactgggccgagcggtttggggttatacctaaatagtctggtcatatatgacacttcttgggtggtctgcgcgtggcttatgtagggtcggatggtccgataaaggatgtcgaacaatccgtgaggtagccagacggttcgattatgttcagagctgattgcatgctaggcagcgactgctgcggtgatgctatgaacatattcatcggcataccatacaatgcctgggtctaggatgacccatttgtagctgatgtgttaggtgtgggtggctccgtattaggttcatgccagggaaaactaggggcaatagatttttcatacgaacatgatcaccctttaacagattcatttatatattgttttaattgacccctcgttgttctatgaaagccttaaaagattgatttgatttacatatagtgggagcccgatgcgaagttaggagagatgctacgatcttgccttgaccgatgatcttctaatggcgatccactatggagtgtgataggtacttttcctt

SEQ ID NO: 43332 - DNA, 654 bp, Zea Mays
aaccttttttacggccccaattttagggtctacggtgtttactaatattttctaaaaatcttgttcctctctagtcccaactcttccatctaatccctggttattctgctccgtctaggatgcgaatttttgttgcatttcatttgtccaacaaaatagttttttgtggtcatacattgttgcagtacctttttgggcacaatgacgatagcagctttcacggctacttcttgtagaaagagaagtaatccaattagttttctccaatctagtttcaatttcataccttctcgagttttgttacctatttctaatgtttgagttttaccaaattgcttctgatttataaagttataacatcatgtgcactcctatgtcatacatgacatattttcttatacacagtccacatattatctttcactcttccttgaaccaagtacacaacaacaaaaatgtttgacaaacacttttaccataactgatattttcctcccatgtatacaggtagatatttggtttttacccacacttcaagagcaacaccacttctggacagaagtcgtttatgtgtaaatgcagcgcctagaaacacattgttaccagctcttggtgcatgctactttaatgctactttggtctaatacttatgta

SEQ ID NO: 43333 - DNA, 456 bp, Zea Mays
tacaatctctctatacacgtgtgtatgtataataaatataactatagtatactatactatgtgaggcagctgtcagtatcgttgtcgttcaccgtaaagctaggtagtaataattaacgacgagcatgatcatgatggatgcatgcacgtaattgtagacgacggacggacggaggacatgtgaatggatgtgatggagcccgtcgggcgacggagaccacacccgtgacgctgaagcacccacaccgtacgtaccccaccggcggcgaatcgatgcttccatatgcaatagcagagcagcctgtggctgcagctcacagcctatctctgctctagctaggtgctggggatggggtattctccatgatgatgcgtggatagagatatcgaggattggattccatggacgccacactgttcttctccgcactgtgcgtgcatgcatggcagtatatg

SEQ ID NO: 43334 - DNA, 392 bp, Zea Mays
ttattgccatatcaatcaatgtgtgattctttctttctacaactccattttgttgaggggtatatgttgatgagaattcatgctttattccctcgctatcaagatattcttgaatttagtcccattatcgcttctaattttcttgataggtagatcaaattccttttgagctcttgtgataaaggtcttgatttttccttgaacttcacatttgtcatgcacaaagaacacccaagtgaatctagaaaaaatcatcaacaactactaaatcatgtcttttaccaccattgcttaagtaggagaccggtccaaagatatccatgtcaataagttctagtgaatgtcttgttgtcatgatgctttttggtgggtgaggaactcctatttgtttt

SEQ ID NO: 43335 - DNA, 1300 bp, Zea Mays
gcttgaccccaagcggctgcacgtggaaaacgtcggcgaatgtcgaactcatcttcccaagtgtcaagagcagcatcacatccagaccatcgaaccagcacttgaggtacttgagtccctccacgagtaatgacacggtgttggataatctgcactggaacacgcagtgtgtccggaataactggaagagacttactcaccaaacagctgggatgtagagatggctttaactgggatacgtgaaatacaggatgaactgaagctgattcaggaagctttagcttgtaggcaaccttcccaactcgctgcaggatttcaaatggcccaaagtatttataagcaagcttatggttagcacgaacagccactgacgactggacataaggttgcagcctcagatagaccatgtctccaacttgatattcacaatctgatcgacgcttgtcagcctgattcttcattctctgttgtgctcgaaggagatgatgccggacagaccttatcatgagttcacgttgagaaagccagagattaaggtaggcatgattcactgagtcatcaacagacaaaccaaaatggcgaggagagtgaccatacaacacctcaaaaggagaccgacccaaagaagtgtggaaacaacaattataccaatactcaaccgttggaagccaagaagaccacttggatgggcacgactgtacaaaacagcgcaagtacgtctccacacattggtttacacgttccgtttgtccattggtttgtgggtggtaggaggagctcatatgaagttgagtccctgacaacctgaacaactccttccataatgaacttgtgaagatgcggtctcggtcagatacaatagaatcaggcatgccatggagacgataaactgctgtcatgaaaaccttagcaactgtcagtgctgtaaagggatgacgcatggccacaaaatgagcatatttggacagcctgtccacaatcaccaagatggtattatagttccctgaccttggcaatccctcaataaagtctaaggaaattgcctgccaagcttgttgtggcacaggaaggggctgcagaagtccaggataccgagaacggtcgggcttagcctgatgacaaacaatacatgcagctacaaaatccttaatggttttcttcatacgaggccaactgaaaagttgcttgatgcgtcgatatgtcacaggaaactcggaatgaccacccaaggcacttgaatgtaaagcactgatcaccttggtctgcaactgagaattgttccctagccagacacgattct

SEQ ID NO: 43336 - DNA, 1012 bp, Zea Mays
aaaaaagcgaaaaaaaggcacaaactgttcgtatttatcgtggcgctcgtcaacagaggacaatccgttgacaacgacgcgggggaagattttgcggttgtttccacggcaagttggttaaagtaaagccgccgtgaaaacggagaggaaaggagctcaaagaagtcacatggaacaagttaccagtgttgagaaggaagagggaaaaaagaacagattttgacagcgccgactaataaagacacgtcacttttgctgcgaataatacgctccgcgtacaaaggaagccatgtattcgtcaccaaatccccgcgaacaattccaagctccaaccaatctatctgtcgctgccagatgacacgagctagctagctagctgagcttacagacggcatgcggccccacatgccagcctatggtccaacggcgattgtttgtgtgtgcagcgacgaagtgcgtgtgtacttggattgtgcgtgtaggatttctgattttggtgtcgtaatgatgcatgcgattgccgttctaatccagaacgtcacggcgacaaaacacacgagacggccttgttggaattttactccgagattagtattaacctgtcacgttaatggcgacgtctagtctctggaccaatgtgaccattttgcttgtttgcataattccttccctttgtgacatgtggttggtgcaaaattgttctgtgtatgtataccaagggcctgtgcgtgtgaccgccggttttccggtgtccacacgtttcgttttggtgatatgcatggaataatgatgtttagggagaagatgagcaaatttaattgcgccactatatttgttgaccttgtttttgtgagtgggatcgtgtggattgtcgtacccatgcatgtatgtatgcacgtggtttattctgttgttgtgtttctcacttggggtgatgttgtcctacccaattagagtttcttctatattaatataattaatcagcaactcttttatccaggggcgtcccaac

SEQ ID NO: 43337 - DNA, 583 bp, Zea Mays
cacgataggcatggtggcgctggtgttgtgactttcctctcttgtgggctggacccacagtgttgcccctcctcgcgtcctggccatgaggctgatcaacacctgaagacttctaagattccatggtgtactgatgctgcatctccacacccaattcctgctccaccgtagtacaaaaatccaccagcggaaaggcacccagagcatgcctgatagagggtttcaggccctgacggaactggctcaccttttccatttcattgtaagccacatgaggaacaaagcggacaatcttgttaaagcccacttcatattctgtgactgacttcttctcctgcttgaaagactacaaatctatcttcatcttctctaggaaggtgactgggtagaatctcctttcgaactgcctgataaaaacatcccaggtcaggactcccggtgaagaggagtgagctgcatgcacgcctctccaccaaatttgagcctcccccttcagcagctgtgtgccaaaacgaacacgatcctcatacacaatctcaaaaacatccatcttatcttccacataagtcagccaatccaccgc

SEQ ID NO: 43338 - DNA, 641 bp, Zea Mays
cccaaaggcgttattgaatggataagtggggaggctgaagccttcgaagaaattttaagtgatcgcggggatgtctgcgcgttcttcggtgtgtggggaatttcagccatcctggagaaggcgggatgcgaccatatcaagactatggcccagggcgaagctgccttctccgtggatgatacaaaggatcgttcagctgaagcaagtttaataggcggaaaattttacaatgacatttgggtaaatggtggtcgagagatggctcacgaaattatgaagaaaagtgaaaaagacatccatgacgcccgagtagaagcaaagcgagctgaagaagctacagagtgtgaaaaacgtataggtaatatcttttgatgttcggcttcggaatttgtttttgtggcttcggactaattaatttttttccgttgtagctgaattatcttcgccaccggaaccgttcgatcccctggccgatccagaaatgaaggaagcactggaaatcactactatggctgaatctattgctgacgaagtcgtcaataaattgctaaatgaagttgcagagaagattctgaaagatgactagcacttgttgtaaaaacttttttaaatggtccatgtagcgttgttgtaacaagact

SEQ ID NO: 43339 - DNA, 391 bp, Zea Mays
gcttcggcgctagcctggctcattacaccttcggcttcggtcagttttgttttcgcttcaatttgcactttcgaagccttggcaattttccctggagtagatcttgaagattttaccgtctccagcacatctaatacacttgccatcctttttctcttgggggtcgccgcaagacctttttgtgccttcggcattgtcacttctgccaaagggcttaaaacttctaatgtttttgttccttcgattcttggctcctcagttttatcagtcttcggctcaattaacttggctgaggatgccttcggcaaggtggccggttctttagccttctgtgtagaaggaattggctcctttggagcagcagctaaagaagtttccacgccaaactcgg

SEQ ID NO: 43340 - DNA, 739 bp, Zea Mays
aaacttgccgcacccggattcgtgctcatgccgccgtgattcgtgctcggatcatgtggatagcgcctgggatcgagtaagaattctcgctgtggataaactccggccattaaactactccggccaccgtaccgagcttgccccggtcacttcggataacctcaccggtgactgccgcctcccggccttgtgccacatgcctgggcacctccaccgcattgccgttacccgtcataactctctgttgatcgccagagtgattgccacggtaataggacaccaatccactgtgccagtaactttccactcctccgaccgccgctcgtcgtcgctcgaattcccggccactgctcttgcctattataaattgaagccaccgtgagctccgtaggatcatcacgcacccagccaccaagtattttcctcagtcgatcaccagggagctttaattttggatttcccccaatctgctcaggtccaactcaggtccgatctcgccctctgtgttagtgtttcagcacccttgcatgctcttgatgctcaccgacccgcccaattgaattagaccgtcgtggatcgtaggaacacgctgttcccttgattgtctccgctgtcaccgtggccagagcgaattgggtaaccattagtaaaattacttgaggggaaactctggttatggtctgaattaggtttaaaccaaagtagaacaccggtcattgcctgaatcgcccggtacaag

SEQ ID NO: 43341 - DNA, 421 bp, Zea Mays
cgccgctctcgtggatcatctccgcgcggcatcatggccatcaaagtttcggccacacctgccggaaaagtacgatggtacgtcaaacccgtcggaattcctgcaggtgtacgtcaccgctatcacagcagcaggtggaaacaccgcaatgatggcgacatattttcatgtcgccttatctggacctgctcggacttggctcatgaacctctccccagggtcaatctactcctgggaagaactctacgctcggttcgttgcgaacttcgccagcgcttaccagcaacacggtgtggaggcccacctccacgcagtgaggcaggagcccagggagactctccggatgttcatctcccgcttcaccaaggtgcaaggtactatacctcgcatttccgatgcttccatcatcacggccttccgc

SEQ ID NO: 43342 - DNA, 472 bp, Zea Mays
gtggtcccaataactcagggagtaggtgggagctcagatgcacaatgaaacaaactagagggaactgtcgcttcttgttatgtgtgcctcatcctacaataggatgggagtatttatatgcccgtccgagggtaggtgatccaaaatacggccctacccttggctaccaactacatccagggaatatcccctgctatggggtaattacaacactgttcgtacaacaattcacgtacattagactacacatctacatgttacactaacaggtgggcgctctcgatgtcttctagtgctctggtggtgtgtagggttgacttgtggccttcgtatcgagggcctccgcgtcattgctcccattggtcatgactggcttgagcgcatcctttagtcgatgaggaaacaaaggcctcgactatcaacgacttgttgatgtccgctagatcgaagacctcttcgcttgtgatcctgc

SEQ ID NO: 43343 - DNA, 361 bp, Zea Mays
attcagactttgcagctgatccgaggaatgttcgcatcggcctcgtgactgatggcttcacaccttttggtcaaatggcatcatcatactcatgttggcccatctttgttattccatacaaccttccaccttctctttgtatgaaatatgaatttatatttctttgcttaatcattcctggcccagactatcctggaaagaaactcaatgtcatgttaaaacccttgattgaagagttgaaggagctttggaaaggagttaaagcatacgatgtttttaaaaaacagatattcaaacttcaagttgcgtatttgtggtcggtgcatgactttatggcatatgctatttttaccggttggag

SEQ ID NO: 43344 - DNA, 523 bp, Zea Mays
cttcatcagctatctcacgaccgcccttcattcacacctcgagtaaaatctcccgcctagcgcagaagcttcagccgaatggtctttgatgtcatccaccgagaaaacaaatcctggctgaactacagccttagcatgttcgcagccagctttctctaagatcgacgtggcccctcgtgcgttagcgaatgcgtagaagtctcctcggtcacgtaaaatttcgtcaaaggcttcgacttctccgctgatccactggacgactccattagggtcgccacagatgaatttttgctcagaagaatatgcgccaactctagcaaagttgtccttcaatttcttggcgcattccaaggatatttcataacatttctcttttgaagcacgaagctcatcacaattcttttgagctctagacctttcgatctcgcaaatttcatgtttcactacttcgacttcaaatttttcatcagcttcaacaacttttctttttcagctcctccacttcggctttatgagcctcagc

SEQ ID NO: 43345 - DNA, 374 bp, Zea Mays
gccataacataaccagggattaggctgattaggtctatagtgcacatgatatttcaaaaattcatgcaaagttactctatctcttttggagtcatctctgttttgactaatgttttgtccatggtatttaatacctagttttaagcctcgttcgccatatggaaataggagcgagtattgtagaggcatatatgctggatggaaaatagatattctttgaaggctattttggtgtgtgctaacaatgatgtctcgtttgtagttctcaagtgataaatcacctacaatcagcatagctaattcttcctgatgtggcatctcatattgaattctatcagttttgttagcgcctactattctaatgcttatatcta

SEQ ID NO: 43346 - DNA, 479 bp, Zea Mays
attttgtcaatcggaatgcgccagctataaaaagattggaagtgcatccaagtcgaaacctggtttagtctcttcaattctaacactacttaagaggggaatatactcttgatcacacggtcgtcacgcagtcaatccactcgtttttttacccgtgtttacaccctagctaggactccgctactgcgtactactgcgtccgtaagagcgatggatggccgtgcaacaaaatgtcatagaacgtacgacacgctcaaccagccggccactacttagtaccaccacaccgtaggcgcgtaggcccgtaaacacattctgtcgcttttgttgacataataaccatcgagaatattagaacctctccattcgtttttgaaacttgccgatatctagaaactttccttcagcatagtctgtgtagtgtgtaccataatcactagtagaaaaaggctcaaagcctgcggggacgatatattttt

SEQ ID NO: 43347 - DNA, 640 bp, Zea Mays
gcgaatgatgcaacaaatggctgatacaatggcagagatgcatgcgcagatgcggcagaaacgccaagaaatgcacctataaaggcaagatatgtgggaggagatgcgttaggagagaatggagaaacagcagcaagccccattgccaccacctacaccaccacttccaccccgggacaagcaccaggaatttatgagccacaagccgcctaccttcgccagctctccagattctctacacgtcgacgactagttgaagttagtagagaagatgctaaacattgcccaatgctccgaccgggagaaggttctctatgcttctggtcgtctgactggtcctgctgctgattggtgggattcttatgttgctgcccatgacgctactgatactattacttgggtggaattcaccacactgttcagaaactaccacattcctgctgggctgatgaaaattaaaaagaaggaatttttgtgattgacgcaagacaacatgtcattcagcgagtaccatgatagattcattcagctatcaagatatgctcctaatgaggtggctgatgataagagaaagcaagagcacttcacagaaggactcaatgggccactacagtatgcattggttgctcgtaccttccca

SEQ ID NO: 43348 - DNA, 506 bp, Zea Mays
gacagatattccttccatgcatgaaggaaagtgttggacggactcaattcttttggctatccaaatctctatctaaacatgaatgtcgggcgaggctgacgaggaaagaagaagcgtaccccaaatcgaaagcaaggaatagatagatcctgagattgcaatcccttgcttcccgggaaaaaaatgtcatctatctatcctaattaagttgcagatgaacactacacatatcctgttgtaaccatcaggaaagtgaacattaagggctttttgttaaattagggggtgaattaacagggattagaggagattaaatccctctctatttaattttgaatatgaagggatttaatcatcatcaatcccctccaattcactcgcaaatcgcaatgcaaccgaacagggactaaggtggacagcaaaagccagcgtgggatcatgatatgggagccactacactatgtagtgatgttgtcagaatcaaaactttattagttgctccaagc

SEQ ID NO: 43349 - DNA, 581 bp, Zea Mays
tatacaggccacggcgaaagacgaacatgcagatgtccgccttggcctcaacgaaaacctatgaaatgaagaaggtggcaaagcaattgtaccaagcttggggcgccttcttgaggtcgtagagggattagttgagcttgcagaacatggcgaggtgcgctgggtctacaaagccaactagttgagtgcaatatattgtctccgtcagagtggcattgaagaaggcattcttgacatcgagccgatgtattggcaaggcccgtgagagtgacagagtcggaacagtctggatgataccaggcttgaccacagggctgaaggtctcctcatagtcctccctagtgcgctgggtgaagccccacaggacccaacaagccttgtaccgatccaaggagccatccgccgtcagcttgtgcttgaagatatattccctggtgaccacattggcaccagaggggtgtggcaccgggtcctagatgtggttttcatgtaaggccccatactcctcctccatagcacaccgctaattggggtcggcgagcgcactacggacagaggactgctcggggggagtgtcgaag

SEQ ID NO: 43350 - DNA, 552 bp, Zea Mays
gtcgcgattaccaccgtagcgtgaggtcgggagcgaagctgagcgaaagtgagtaccaccgagcggccgtcgtcggtagaatctctgctgcgcttgagctctgtcgccgaattgcggttgtgtggcgtcgccggagtcaaccgcacctgtccgtggccttctcgaaccaagattggatcgggtccgtcgtgaatttctcaccggcgtagtgctcctccatggaaaaatcggtgtgccgtggacaacccaagtgcgtcatcttcttcggtgagtttcacatcctagtagttcgtttcgtcgtcctttgcgcagaacacccctttgattcgaggattaggcccgtggctcgccgaatttaacaccccggccatggcctccgtcgtggtgaggcacggaggcatcacctgcgggcgggagttaggggacgaaccgtgcgccgtcagatcttgctggacggctaggattaggtgatcgcataacccttctcgattttcggtctagcccgttgatctggatcagatgggtagaaacaaatctaggataataaaatcc

SEQ ID NO: 43351 - DNA, 598 bp, Zea Mays
cggagggtccggttgcgcccttgggcgacttttgcatgggtagtcttttggagaagactttgattttgtgcacttattgtgctatttcggttgtcacccgtaggcgacttttgcacggagggtccggctgcacccttgggcgtcttttgcacgggtagtcttttggagaagacttcgattttacgcacgtattgtgctattccggttgcacccttaggcgacttttgcacggagtgtcgcacacgagggtagtcagcgctgtcactcgcggtgactttggtgtggtcgaatgccgaagaccgtcgatgcggtctttttcgacattggcttagttttttgcgagggatttttgcttgtatattacatggcgccgcctcattaaaaacctcaccccctgggaggaaaagagtgcaggccggaataataatgtttggtgaattacaagggcgtgctggccctgaggattcaaacaaaaaatttgcgaagattatctatattccatgaatgttccgggtcttcgccagattgtgttgtcagtctgtacgcgctgggagacgacttcgtcttgacgataaatggtccttcccactttggttcc

SEQ ID NO: 43352 - DNA, 831 bp, Zea Mays
aggaggggcagcactggaactcccggcctcatgatcatgtgagcgtggaggcacaggaggcggtggcaggatcccaaaatcatcatcatcaccatcatcagctgtgccctgggtctcaaactgtctgaaatgcctcatcctcaacctgagtgtctggcactggatctggtactggcactgggtcctcaggagctggacgataggatccaaactggaggcatgaggcctcgagggtgccctggaactgaggcagcctgatcagctgcgcgaagatgtagcagaggtagtgcgcatatggcagctatcgacgagcacgaagaccatccaacactgtgtcctcaatctcacagataacaaaatcaacctcatcaaactctgattgtgagatcacggcaccaagtagccaaagctgaatgtgtgtgttggcctctctgtaacccatcctgggcagcaatgtccatctcatcacctgatataagtactttgttgtagaggtgaaatcagctggtgagcgtcgcgacccatctatgaaaggtgggttgaacagggccgcgacatgagcagtggctggagcgactccactgtgagggcgtcggggaggatctgatgtaccatagcacagactgtgaaggcgagtcaacgactcgggaaatccatacagctgatgtatctggctggcatgtatagtaacatcctctcgctcgaaacggaacctcatccactgatggtccaggtctatccacactatagcataaaagactttgacccactcctcaacgtatctaccactcgtagtcagtagagaaagaagtcccgacagataggagagat

SEQ ID NO: 43353 - DNA, 439 bp, Zea Mays
ataaagttatgatttttcaaaggtttaagtgtctattataaaacaaatgaggtacaagattttaaccataggtttcatggtaatacaaggttactagatgataaacaatattaatatgagattaatgcaactgaaatggatcaaaaaggattaaaatgaattacttataaattaaacaagattctggaattatttttatactagaaagcatttttagatttaattctggattttcctaatgattctggactgcgggcacaattaccagatattacagggtctattatataaaagtatggggctctttcataattacttcacaaaggctaaggacgacgggttaattccaaggttttcgagggactcatatgctaaagtgttcggtcgaaagggtatgggccatccagagtcgtcagatctacccccgatggcctggatt

SEQ ID NO: 43354 - DNA, 630 bp, Zea Mays
gcgtgagaactgagaacgagggccgacgaagcttcccacgacgtgctgctgtttgccggcaaggtctccgccctccccatttcttctactcctctgttgctagcagccgtcgggctatccaggggagggggcggcgattttttttctctgctgctcgtgttgttcgtgttgctggcgatcggcgggctgtccggtaggagatgagagaaggcgatttctgtgacgcatagtggcggagtcggctccccggtggcgatttcctgatctcgcgctggtccatgatgagttgctgtggagggggaggtggctctgacgggatccatgtttgctgtcagcggaggagctgtggtgaagtgggtggctctactgctccagcccacggcgatggggctccagcgtgtgttgacatggttgatccggtgagggagtatcagtttttttgtttttgctcctcgtttttgttcttgtgcataagttttttttgacatgtgtgcttgcttttttcctttgaggccattggcgtggaagcgttgtagacttatgtttagttgtgtggccttgcttccagttaggttagttggaccaaatgaagttgtgtagaaaactagttggattgtgcagctaattttg

SEQ ID NO: 43355 - DNA, 358 bp, Zea Mays
gccattcatatgatttacaatcaactcgtgttggagaagtcagtaaagttcaataattcctctgctacaaaaccatgctacatcaagtggcttggagaatatatcaacaagtcttcggtacccatatctcagttgtgataaccccttttgtgtgatgatctcttatgaagatagaacaaatatcaatatgattcattcttgagtgttgaaccgggttggtgactatcttgattgcactttcaatgtcacatagcaaagacacttgtatgaacttgattcaataatatagcaatgtagcttttatccatagtagttatgcacaaattcctaccaaaatatactcgactttggatgttat

SEQ ID NO: 43356 - DNA, 546 bp, Zea Mays
gagcgacatgtactctagactcccaaaccatatcaccatgccgagcctcaaagggtgttggaggttggccatttggaaccttgatgggaacaaatgttttacacgtagtgagcccctacccggcgcgccaactgttggtgtcttgacctgagggtcttaccaactagtgaaatgatgttgtgtgctctgtcccatatgggtgatgcaagttgatgcaagtcgtttatcctggttcgggcgagagaaatccctacttttggcagggggaggttgagacttatattacttccacctaagtgcttgcagtagggagtacaagctgatcgggagaagggaggatcccaagtccctagggatgattgaggcaagtgccaatatcgtggtagaggtgaaaaccatgaagtgttagcccaccctgcctaaagccatggactcccctatttatagcctcatggagggctaccaggagttccggggttggccgcgtacggtgaggaggcgaggccgagcccctatagacggtatggcatgtggtatggggcttgt

SEQ ID NO: 43357 - DNA, 370 bp, Zea Mays
gcagaaggtctcatttgttttggaaatccttcaactcccatgatcttgtttctcgaaatatccgtggagaaatatcaagagtcgagagggatgagttcgaccctccaatgcgagacttttggagccaatgctagagtctgtctctgatgtgttgaacgaagacggtcatcttcaccttcattcctattgttttatggctaggagcctagtagtagcgccacccatagttagaatggaaacacacagaaaagaagtgaacttgtctatctaatctaatgtttgtggacggtaatgttcttgtgcttaatttgttttacactcagcacctggagcgctgaattagacttatatattttagcctgaatatttt

SEQ ID NO: 43358 - DNA, 1076 bp, Zea Mays
ggactattggatgatagatgtgcagtctagattaaaataagagttgtgtgggtggtgagatcacggtggtgatgagcttcgtgacgggagatccccggcattggctacattaaatgctatagggtttgtctagtgctcaagtgtgtcgccaagacattagaggtcatggcaaactctctaggcatgaattgggagcaaaggtgtgactagtagggcatgaacaatggcgataggtgcttgtggtagtcgtcgatactttggtgagcaattgtggtctatactatgcgtaattgggcgtgggcatgggtcctggatgttggttaccttcatgcaaacctcctggcgctgaacagtgtgtcaacatgtgcctaggaacctcgatcgacgacggtaggtcatgacaaagtcagaagctccatggcccgggatgtggaagacaatagagttccatctagggatgttgtagacgtccctacctccgatgaaacttgtggtatcgacagtgaggtcaaaggtactctggtgcgggtagaacgcatttcagaagctcgatgatggcgacactagcactggtggtgaagtagaagggttctggtggctgagagctcatgctataaggagataggggcgcagggggtctggttttagaggtcgatgccattgattgcagggagaggaagaaaacgagggtagcacgaccgggggaatgaaggcgaatgtcgtgagctcctcgatgttaatgaacgctttctagtgaggaacaaacaaggataagagatgaatatgcttagcgagatccccaccttcgattgacggcgatggaaagtccggtagggtcacacaggggcatgaatgtcgacgatgtgtccaacgcaaataggagaaatgagcgcaggaggatagggatgacttgcgattcttgtgtgtttaaagagagtgtgtgtgcgtggacgtggctgaccatgagggacggagcggggcgtgggccgagagccactggggtgctggatttgcactatactcttttccattttcataatttgaatttaagtttaatttttaaatttaaataaaat

SEQ ID NO: 43359 - DNA, 415 bp, Zea Mays
ctttcgtccataaagtgctacaaacggtgccatttttagacttgcctggtaactattgttgtacgagaattctgcataaggcaaactcttatcccatgttctaccatgctctagagcgcaagctcttaacatatcttccaacacttggtttgttctttctatttgcccatccgtttgcgaatgataagccaagctaaagttaagcttggtatccatggactcatgtagtcttttccaaaagcgcgaggtaaactgggttccttgatatgatacgatcttctttggtactccatgcagacaaacaattcttgacatgtataactctgctaactgggctcctgagtaagttgtcttcacaggtataaagtgtgccactttagtcaacctgtccactataactcatattgaatcatag

SEQ ID NO: 43360 - DNA, 475 bp, Zea Mays
tttgggatagaggaagtaataaataatatacaatattatagtaccccttctgttctaaattaatattcgctttaactgttagtttttaattatgtttatattcaaatgaatgatgatgaatctagagacatacagaagacatacatcgattattgtatgaatccacaaaaaaggttaaaacaaactttaatttgggacaaggagagtacatgagtacaacaacatcgtctggtcgatggtgaaggcatggtgctcttagtcactgtttgctcaggtattagtattttacggtgccctaagcttagcgttcaaatccaatgccggtatactatgctgcgtacgagtgccaagttacttactctcttcaaaggttaaccctaaatttcgccctctacattccacttttgcaccatgtcacccagatttcacccctacttttcttcctcccgcaacgttttctcctaacttatttccc

SEQ ID NO: 43361 - DNA, 1810 bp, Zea Mays
cacagctcggccggcgtcttcctcctcctccatcgacaggtacgaaaaacaccatgaccgtgaagcactgctggcactcaaagaggctctgataggcagctcgggactactaagctcatggaacagcagcagctccgacgtgtgccgttgggccggcgtgacatgcagccgccggcacgcgggcagggtggttgctctgagcctgcgccagagaaacctgggaggcagcatctcccctgccatcggcaacctcaccttcctcaggtcgctcgatctcttcgacaacatgctgtcaggggagataccgcgcactatgacacggctgcgtcgcctgagcttccttgagctggcgtacaactatcttgctggcgagatccctgaaggcttggccaactgctccaacctcgcgtacctgagcgtagaggtcaatcagcttcatggcgggatccctagcggtctgggcttgctgtctcggctacaagtcctgtatgtcggcgagaacagtctgacagggcatgtaccgccatcgctcggcaatctctcggcgctgcagaggctggcactgtatcagaacaagctggaaggagccatcccagagggcctttcccgtctgaggtatctccggtacatccaggcggcgaggaacagcctctccggcacgattccgcctcgcttcttcaacatatcctctctccagtacttcggtttcagctcaaacaggctgcatggtagactgccaccagacgcaggcaggcacctgccggacctccaagtgctccttcttggtggcatcgggaacaacttttctggaacactcccggcttccctctccaatgccactaaactacaagagcttggtcttgctcacaacagcttcgaaggaaaggtgccgcctgagatagggaagctctgcccagagagcgttcaattggggggtaacaagctgcaagctgaggacgatgcggactgggagttccttagacatttcaccaactgcacccgtctagcggttctagatgtcggtggcaacgcccttggaggagtgcttccacgcttcgtagctaacttctctgggccggtgaatactctgatcatggagaagaaccggatgtctggatcaatccctctgggtgtcggaagcctcgttcaccttgaagacctggaattcgggggaaacaacctgcgtggtgttatacctgaggatattggaaggcttcggaacctcaagtttttcacgctggaggagaatctcctgtcaggaggtatacctacctccttcggcaacctcacgcagctgctcagccttttcctgtcgaacaataggctcaatggctccatccctgagaaccttgggagcttgcgcaggttaacgtccatggcattgtccttcaacaggctcaccggtgcgatccccggagcattattcagcctcccgtcgctagctgattcattgctgctttctcataactacctttctggcgtacttcctccacaaatcggtagcctcaagcatgcgacaacattggatctgtcaacaaacaacttatctggagaagtaccaggagcgcttggagactgtgcaagtctagtatacttgtatctggatggcaatagcttcactgggagcatccctccatcgattggtaatctgaagggcttgagcacgctgaatttcacaaggaacggtctgtccggtagcatccctcaggagttgagccagattcatgggctgcaaaggctttgcctagctcacaacaacctgtctggagccattccacagctcctccagaactcgagcgctcttgtagag

SEQ ID NO: 43362 - DNA, 384 bp, Zea Mays
ctgacttggactttagagaatttttatttaatctggctggccctatggaatactaggaaactgtagacctctcgttgcgttgccattacacaacgaattctggaactgtacctccctgcctaactgcctgtcgctacctgctcttgtgctatgcccctatatgatatgatacgatgatttgctaaaacatggctatcgcctaacaaacatgctgtcatctgggttccatactacgtagtatatactgtactaggaccccaagctaggtaagctattatatgcatgttgctgtattaagagaataagagctatgtatcactttacatagtagctttggcttggattcctttttgttctgactatagcaccgttggcacccaaatg

SEQ ID NO: 43363 - DNA, 594 bp, Zea Mays
tgctccgatgagtatgcacccacctttgcaaaactatctttcagtttctttgcgcaatccaaggatttctcataacatctctcttttgattcacgaagctcatccacattcttttgcaatcttgaactagtacattcgcttattttttgcttcgctttcgctacttcaaaatcctcattcatttcggcaagctttttctttaggccttcaacttcggctttatgagcttcggattgtgcattaagttttgcttcgctgctcttcagcctatccactaaggaaagtagtattttatctttttcaagggcttcgttccttagcgtgataacttctgaccgaaggttcccaagggctatttggcagttttcgtcttccgcattcttttgtgcccttaaggccttgtttaggattaatccctacaaaaaacgaaggatgagcacacaataataagaaaagatacaaaaagtaatctgcttacaagctaaaacatcctaaccttcagactgttataggcaaggttgtctgcaaggtcatccttcgacattgcagacaggccaagctctagcttcgggaatcctttattttctgccatct

SEQ ID NO: 43364 - DNA, 623 bp, Zea Mays
gtttgggacgtagtctgggtggtcgtctcggtcaaaggtgatagcatggtcgaaccggtctaggtagaccgacactgttgctttgacggagaatacctcccgctgttcttgctttcgctgttgcgcagagaggttctctgtttgtccgccaaatatcatgcagcagttgtggacatccgggaactcgtcgccctggtcgtcttccttgtcattggcacctttcttcttgccgtcatcgatagaggggctgggcttgttgcagaaacgccgaagcatgttgcattccctgagagtgtgcttgacggggcccttatggtaagggcaagattccttaagcatcttgtcgaaaacattgggacccccttgagggcctcaggggttccgtcgttctgctgtggtgacaagatcttcttcaatggcctcatatttgccctacggcaccttcttctttttgtttttcttgggattgctttgggtggtcaccttacgggtgtcctccttctgcttcccgctatccttgtccttgtggaagatggcctcgaccacctcctgtcccgaagcaaactttgtggcgatgtccatcagttcacttgctttggtgggaatcttgagatccagtttgc

SEQ ID NO: 43365 - DNA, 743 bp, Zea Mays
cccggaaacatgacccggccgtcggcgccaatatgatatgacgggtcgcctgctccaatcacgttccactccagagatgagacctctccattcccattcggcgatgtctttgggggactttgataccttgcgaagactcacctaccattcccacactttgttttgacaccccaatatttttccgaccccacggttcgctaggggcaaccccgaccgaagtccttgcagccgcaggggggcgaccctcgacagagactccacgacagacaaatctagcaccacaaaataatctagatcatctttcgaagactcatcacccatcctagcgaatgggctcaccaacccctcaccctccgaagactatgactcaacatctatccattgagacattaacgagttatcattctcgttatcatcaaagtttgcttgcgcaggcccagacaccgaaacctgcacagcagccgatcttaagtatcatatacaaaacaaacaccgtcaaaccattcctactatattctttaaacctgcgtaaaagtcctcgacgccgtagggccctcagcgccgccttccttgagcgaggattgctcttccgctcctgtctccaccgcagcgtcctttcgggccaccgatctctcaaggccagcaaggtcctccacctcttcatccctcatcacctgcgaagacagcacaacaatgttttagacaacaagcgcacacacacaccaccatcgacaaagacaaac

SEQ ID NO: 43366 - DNA, 502 bp, Zea Mays
gtgcgccaccaacatcggtaagaactcccccgacgaactcgcgctaccttcttctgcgttttaaagtcgttagacaagcctgtgatggccagggcgccaaattaaccatcgtcggcgagtcactgtcacggctgtgttgcgcgggggcgctcggccatcagggggagaagacgaccccacggtcgtccatccgagattggacggtatggcttcgattgtggggagcggttgggttgaatcaccggtgaccgtccgttgtgaaatcgatggtcccgattagatcgcgagcgcattgatcataaaccctagatctttgatctaatagccttgccagcataccgattcgttatcgcgtctacctaatcaaatcggagggttgtggtcaatccataccgatttggcctggaaaaattgttagagcccctatagtttcctaacatcaacccgcagtcccggttcgttagaaagtaattgcgtagaggcccagaattttacagtttac

SEQ ID NO: 43367 - DNA, 886 bp, Zea Mays
ctatgtttctcgagaaacccaggcataactgctctgaggaaatcacctcaagcccgtcaacggtttgcgctgggcctgaggagcccaggtgtgattgtctcctgtcctctaggcacagtcaactggaatgattgggcctcccgatctggcgaacgttttgatgaggggcggtggtttggtgacaaatgaactcaacaacactctatatgagtacactgatgatcatggtcttaatctgcttgattatcatagtattgaacgaagcctagaacaacatgttgaagatcaggggttttatttaaatgacgatcagagtactaaacagaacccagaacaacacattgaagatcaggggctcaatttacatgctgatcagagtactgaccagaattcagaacagaacattgaacaacagacatccttgatccctagtggacttaatcgcttaaattcacaacctggtaatactcaactcaatgtgcaggatgaccggaggctcatacaggcctacccattggtttattctagaaggcaacgacactctagaagctcactgccaacgtccagaactccacaagagacccctgaagctgcagccgttaggaaactcatgaaagtttccaagtctattgaagcactgctgcctcatccagtcatccttaagcgaaaaaccaaagctccaccccctggaagctcccttaggcgaagccgaagagttgccgaagtgcagccatgcccccctggacttataataagcatagcacaaaagaaagttatgaaatctctagggtttggcaaccaagagaagttcagtattgaagatcaagaccgttactgtaaactctttggtgccatgctttcagacccacatgtttcagcccttgca

SEQ ID NO: 43368 - DNA, 648 bp, Zea Mays
atcttcccagcgcattaagcctcggtatgctctgtctcctcgctgcgagcgctatagtgatcgtcgtgttttcttttccagccagtagtggcggggtaggtcgtgtgcgcgaggtctgggcatttcggcgtggttgcagtgggtggcgccaggcgtggggcgcgttcgccgtggctcgctgatgtgccatggcaagacgtctggaggaagaagataatggtgcggcccttgattggggaatcaacggctagggctgtctggcgtattggtaggatagaggttaggctggggcatctgccgtcactgccaggatgaacgaccgaagttggtaggcggagccagagccgttggatcctgtggcggcagtgaggattagatggagcctacctacttgactcgtgcatatcctgaccatccaatcttgattaggcagatgtggtgtgatcgggcatattttagaatcgtaacccttgatcgctgatccaatggctcacattccataccgcttcaatataaactgtgatctaatcctggcctctggatctaatctgaacggcccacatcagcagacaccccttcgttgtgacgatttagcatatgagtcccttggtttaatacaaatgaacccgcagtccaattcggaattaa

SEQ ID NO: 43369 - DNA, 656 bp, Zea Mays
ctccgaacttccaacggcccacaaccattttcccacatccacacaccgaagatcaacttttggtcaacaattttttttgggatattacacatcagttgaagattcgaactgaagatgtacctaagacaaccttcactacaagatatggactatatgagtttttggttatgtcatttggattaaccaatgcatcggcttactttataaacttgatgaataaagtattcatggaatatcttgaccagtttgtggtggtattcatcgacgatatactagtatactctcagaatgaagaaacacatgaagatcatttgagactagttctacagaagctttgagacaatcagttgtatgcaaaaattttgaagtgtgatttttggctgaaggaagtcgctttactaggacatattatcacagatggaggaatcaaggtagaccccggtaaaatcagtgaaatactaaattggaaacaacccacatatgtgtaaaaaatctggagttttcttggattagcaggatactatatatagaagattcattgaaggcttctccaaaatagtgaaacctcttacttcactgcaggagaaaggtaaagagtttaagtgggatgaagcatgtcagaaatgttttgaggaattaaaggaaaagctaaccac

SEQ ID NO: 43370 - DNA, 727 bp, Zea Mays
gaatttggtcctaaactgtgactatcagacacactgaagaagtatcccatggtacagtaccgggatcggatcagaacgccagcgtcagaaagatctcgccgccgacgactccccgccgtgattcgtgtcactggcgtcgggattcgtgtctgcgcggatggatagcagcacggggtaaggggatcctcgccgccggtgacctggaagccactccggctagccgtaatcccttccccttgctcaccgcccgtggataaagcttttcaccgccgtcaagccttcgccattgcccgtcgcgtggctctgcctttacaccacgtcgtcgtgactctctggggccgtcccatcgtcgccggtgaggtcgccacgacgttagccacgggttcatgcacactagaacctccctgcccctttccgaccaccgcgcatcgtcatccaaattcctggccaccgtctaagccgcctataaattgagccctctcctagctccgcagcatcatcacccaccccgtcaccaagaatcgttagcaaccgtgcatccgagagcttgaattttggtttctccccaattcgggtttccgctaccgcgaactaacctcaccgcggccagtcccctttccggtcagctcatcctcctctcttccttgtttgagctttctcataactccacgatgcttgtcgacccacgtaattgcgctaggagctctctggtcgccgggaacacgac

SEQ ID NO: 43371 - DNA, 482 bp, Zea Mays
taaagatcgggatgtctcccctggccattgctatctaaactcgacccccgctgtgaggaaccgggcttgcaggaaggtgcgggcggatccatcaccgggatgtcgtctgcgttcggattcgggagggctcaatgggatctggggcttcacgagttcgccgtggattcgtccaggaccgcgacaagagaattcggagccgagggtcaccgcgtccttgcctctcgttgccaaatcaatggccactgttccaatcagggtgcacgcggtcatcggggcatgaagactgtgcgctgggaggaaacagccgccacaggggacacgtacgtaaaccagctttggggtcccggcatcgggtctaggagattcaactagccaccaggatgatgctcgtggcctcgccggactcgattggcatgtgctgcactgggcttcctcgccgcgggtagaaaaccgaacagggcgccgccattgttgaatcttgc

SEQ ID NO: 43372 - DNA, 305 bp, Zea Mays
cactttgctcatttcattgtcgtgaatttattcttgtatatcggtgcatgttgcaggagagacccctgctcttgtggttgattctatgaccgtggcacgtgtctgcttcggagatggatttattgcctccaatagtcctaaatttaggaatgaagaggagccttatgtctttgctatggccctgactcagatgatgaccgtccggttggtgaactcacagagagtgatattgagatgttgcaccatgttattccagaccaccgggatccaagagtgcatgagttcagcgatcttagtctttctca

SEQ ID NO: 43373 - DNA, 563 bp, Zea Mays
atcgcattctgattaaggtatgcttatcaagaaacaagaatattactatcgtgacactatccagattaattggctactgtactgctctgttcatgttattttaagcaagccttttccgacgccacaatttgtctagaaatttcacacacaagttgcatattccatatacggaaggcttcatctctagtgacaacttatatcaagtttagaaaattgtgtttggagcagaataaaccatataatacgacatattcatccactagaacagaataggaaagccacacatcggacaggagtcaaaaagttttattatgtctttggcagatgttctgtttattcatgatatgtctaaatgtcttctgtcaagtctggatactagagcaaagcatgtccaggaagctccaatttctgcgttccttagccgatgtgaactgtttgacttggctcagctcaccactgacccattctgagtgaaatcttgtttggcacttgtcttacatttgcaccagatcgattaccccagcctaaggttatccatctcgtatgcatgcactgtgatagtg

SEQ ID NO: 43374 - DNA, 598 bp, Zea Mays
cgggctcgagcgacgggtggtccgtcggcgtgtacctcctcacgaggcctcttctcccagcgtctatcaggttgctggtttgcgtcgcgccgtggcgcgggtggagcaggtttcgtacctccgatgaggtcttgggccttctcatctacggtgggtctgcctctcgaaatagttgttcggaggtggcaggcactttttgcagtatggctcggatgaaggccgagtcattggatccccagtataaatattcaatcaccgctgccattgcaacttcggggatgtgtttcctcatggcctgaaacctcttgaggtatgagcggagcgtttcatccctctggcgcctgatggatttgaggtctcatggctgcgcctacttgtaagagagagactagaagttggcgatgaaccaccgactgaagtcgctccaatcgtcgatgcagagtcgtggcagatgtcgtagccactgcagtgcatcttgccccaggatgatgggcaaatacgctgtcatcacgtcttctgtcgccctggcagcccgagcggcagtcgtgtagacggccaaccagcccctcgggtcctgcttaggctcgtacttgtcgac

SEQ ID NO: 43375 - DNA, 712 bp, Zea Mays
catggattcacctgcgcctggaatactgctgggagaggatgccgccggcgctacaacatcactgcgcttgtggtccgttcttggatgtggggtcgggggggtgtcgctggggccttaggaagtcgtccatgccctcggtggtgatggggtgccagtggggcacaatgaaccactcaccggtcacttagcgcatgcgaggtggtgatgtgcgcggtggacaacacttctgcgcgctcgattcatggtgagtacctaatccacctcttcgcaatgtatcccgcaccgcgtatcatgtctcggattggaaaataatgcgcgttcgggcacttattgtgtggctccggcaatggctcgttgtgaccactgggcggcgccgccgtgctctattggccaaggtaggagaagcataggtcgccatcgatcgtgagttggacggcgcatattagatcccagttgccggttcggccagaagaaatccaagccgtagatcgatggatggaggggcgtgaggtgatcctagcattttaaaatccaggacattgatctcagatcctaaggctctagatgcgtaccccttcttcacctaatcaggactcttgatctttgattgagcggccagggcgcatccgagttacaccaccttgacatttttccaatggagccccttgtcttttgcgtaatcaacccgccatccaccgtagttcgattaata

SEQ ID NO: 43376 - DNA, 873 bp, Zea Mays
tcgggccggtaaaccagcaggacaggcgtggcctcctctgcagcggcgcgatccggcgcttcaggagattgccaaccacgtgcattgatgtcaggccgcccgtggccaagaccttgatcctgtccaatacgggcaggaactctggcgagagggatggcttggtcctccattgcttgcggtcgagtgctggcccattgctcggcaggatgaggcggtcattagcctcggtgctggcaatcacccaatcgccacgccagttttcccacctcgcatgtagactatggcaggatctggcctcgtctgaaagtagtaagctctgatgtggtccctagtcttcccggacctgaccaacacgaaaaagtagcggaagagggaagtgcagggggccacacctacaaacatctcacagaggtggacgaagataactgcctagaggatggagtgaggcgtgaggtgttgaagctgaagccggaactcctccagtagtagcggtaagaaggaaaaaatcggcagcgccaacccgcaagagatgtaggaggtgaacaacacaaactccccagcggcaagatcgccaagggggacaacgccgacatggattcttccggcgagccctcgcgcgctccacccaagcaggccgcgcactagattgagctcttcctcagcctgaaagcgatcaggatgaccgagcaaagccatggcgtgtgcggcagcgcgggcgtggaacagaggagcacgaagggaaatgggcacaaccgattgggacagaatgcgaaagggtaactgctgcacgtggggtgaatcctttttcagggaaacctgaatcctttttcagggaaactctcccgtgcgcccctgaaacgccgcaagaaatcc

SEQ ID NO: 43377 - DNA, 644 bp, Zea Mays
attttccggaacaacactgagatgatcagtttaacatgtagaagaacaaagtttttttagttgctgacaaggtgattactgattgtggattgtcactgaaaatgttgtggccacacaattgcatgttcagaatctatcgattgtttctttggttcaaccaaaagtattatgttatcaactgatacaaattgtagttcagttatgttcataaaaatcattaggtaatttaggtcttcacgattgggttgatcagtgattcactgggattggatgttgatctacctggggcgagccattaactgtgcactgctcggactggtgttcattgcattgctctgcgaattgcaagattgatagcaggatagcttagcctctgcatagctcttgcaatgctttcagtgagagaatctgcattacttgctccattcatgggaatgcactttgtgtcactaagaccgttttcagcagttcacctatatggtaacccaaaaaacactgctttgcaccatagactgcactgttcgcagagcggagtatggatatggggatgggtaagttgctggagataacctaagggattggtgatggcgactttgctttaggttatccttctgctgattaattgccttgctcactaatggtca

SEQ ID NO: 43378 - DNA, 654 bp, Zea Mays
aatttgtgagatattgaagtcgataaatatatatatgttggttgttgtcttgtaatcgttgtgcataaacattatgtaaaatattccatggtgatttctcaccggaacaaagtttgtgtcgcggagccgtagtccattgtggacaggggaatctacactgcaaaactaagtgagatcttatcccatggatttgttagggcctccgtgttgttgtgtggctgttggtatgtgagtcggggcacctgtgtgcctttgggcgttactccggcaacgttgccaccatctttggcttgggcggcgccgccctgggtgcatggtggggaaggcgagtgtctggccattgattggctagccaacggtgaggattagcgcactaggtatcgattcagtagatttaatccgcatcatcgttttagtcgtgtgtggttgagatgtgatcgacgacatgggcgagtgggggctatggaacttcgatccaacggtcagtgtaaggtgtcgttttagaggggctacattttaattaggaccattggtggcgatctgacgcccagagtacgctggtaccccttcggtcgcatctcttttacaaagggggcctgcacttttgataaataagcccgcgctccatctttgtgctaaaagacttactaactg

SEQ ID NO: 43379 - DNA, 497 bp, Zea Mays
gcgattgaatgggaataggtggggagagcaaccaaggcgagtgagctatttaaaggggccagtaggtgactgttcacttcctacccgctcaccgaacagtcacaggaattcaatagcatttcaagcctccagcaaatgagtcaggcacctgctaccgtttctcataacacgacaccatatggaatcaaagtcaaccgctcagacggagtattacacctccccgtcatatcaagttactattttaggactacacgatggacatcttttactgggcagacacccattgggcacaccctttgggtgtaccgcccggattctccgagattttctgaagcggtgagacatgcaacatatacacaatgaatataccacgacaagagagaagatcgactgaaatgggaggaagtccagattccaccaagcacaagtctaatctgcagaggcattgaagtccacgaccgagtggcctccagccaggacctctttgttctgactgg

SEQ ID NO: 43380 - DNA, 323 bp, Zea Mays
gtaaactctccggcattatccatcctgcttgactgaatgcggttctccgggaagctcgcacgcaaacggataatttgggcaataaattttgcaaatgtgtggttccgcgtggacaacaggcacacgtggctccacttagtagaagcatctataagaaccataaaatatctgaagggccccgatagggggttgattggaccacagatgtcaccctgaagtctctacaggaaactcagggactcagcctttactttcaggtaggagggtttagttatcagttttcctttaacacaagagacgcataggaagtctttaggaatttg

SEQ ID NO: 43381 - DNA, 527 bp, Zea Mays
aaaaggaccattttgttctggccaggggtcattttctccgcggctgagatgcagatgcctaggagggtccttccgcgtacactgtcttcgtgtgtgtcgtagtcaccaggctagagaatttacccatgtggtctacagtctactccgacagtttctcgtttgtgaaagttatttctagtggtacattaaacggatgtacgacatccttgaaggctgaagcgcaaatgtgatgttacaatccgatcaacaggtaggctagtcagaaactgcacgcgcgttagttctggtcctggccctaatgcaaacgaagactgctggtgtcatttaagctgtggtcgtgcaaattcatgcgcaaccagtcatcccagatgatagcactagcaccggcccggccgctacgcgtgcctataaattacgaagtcaaagtcgttacctcgttgtccatatcgacatgccgcgcttcgttttatccggtgcgaccacttcaagcatgatacgcgtggttggtctccgttgagacctgggag

SEQ ID NO: 43382 - DNA, 421 bp, Zea Mays
tcgagaccttcctagtgggcaggtatacgtatattatatacggcattattgtcgtctattgtgatatatacatatcgtcacaagtacagaccgaacgtcgtatttgcaatttattacagagagagccacgtcccgtgtccactatacactattagtctcgatgaagctacaggagcaccgttacgcgtccgagatcgatcgaaacggagaacaccgccatgaaacgttggaactattattgttgtcgtctgagtgtcaatcattactgttaccgtttatattacacttgaacagcaccacaccagtaccatatcggtctcctcttgacccacacctcgtggtccaggatcgatgccggccattcgccgagctgcagcctttgccgttgcaggcaccgtaccaacagcatcaccaccgccgc

SEQ ID NO: 43383 - DNA, 961 bp, Zea Mays
gtggttttggacttagaagaattctgatttttcttttgtgcttaaccctttggtgaaccttttggggtttttctgaattcttttttggggtcactttctcactatcgtttgtagggtattaagtgtactacatctttataattggcccaagtcatgatcatgtggttttcatacccttttgttcatgcttacttctagtgctccacttgtccaaaggggtttgaattagggtttgggcaattctccccattatatgtgcatgataagttaaggcatgacatctaagatgggttgcacttactcagggtcctgagttccaagtttggtgtactttgctccagttgagccacatgtgatgatgggcttggcttgtgtagtcttgagtgaaaaccctaagtaacacctggggtgttacagggaagaattgtcccccgcgagcgttcgtggggatccccgccaggaaattttttctttgcggggatggggagctattccccgatggggatttccccgttgccatctctactcatcgcgaaactccgctagactctgacaaggcaatgatgtaacacactcaacagccccaacaaattcttcccccttgtccaagaagccaaaatttgcttatgtaggcccagtcagtgaaaactgcacaacagctgactttaagtattaacaaacatgaaacgtattgtcacaataggcctaatcctattttacacctactcggcagcagacggctgcgaagtccccgtcgctctagggtcggtatcctcgaaccttgcgtgacgactgttcttctgtatccgcttccaatccggcttgcgtagccattgagctttccaagctagcgaggtcctcaatatcttcatcctcagtgcctatgaaagatacacaacaaagcatcagaaattagacaaaaacatcctccctcaacaagagaacaatcgttcacctgcac

SEQ ID NO: 43384 - DNA, 425 bp, Zea Mays
ccgaaaggtattgtggtatcctctgttatattttcgtacgtggccagcattgtatccatggaactttaaccaacaacagacctccgatcggccacattaacaaatacgaatactctcaatacgattagaacagtcaatattggtttaaaatgaatctttaaatagggaatgtttgtaattgagaactctatatatgttgctttgatggatggaccctagttaatcacttagtatgtcacaactcacaaatgctatacactccattttgttttaaaatggttatcattctcacttcgtaatacatctctctctttgcatcatatttttttttgtttctcccaaattctgtgtttaaaactaaaacattaactattttgggatgaagtgcgtaagattcgagaagtagcgtttaatttggtggtcat

SEQ ID NO: 43385 - DNA, 294 bp, Zea Mays
ggtggctctcccttttaaagtggcttcctcctcccaagttaagcaaggtgggataattctaaggctcacacagtcaccgtccgactacaattgggccaactaggccaattgcgtctttgccaacgggtaatagtggaggatgtcctcatcattcccaccttcttaaaatgggccctagctctgataccagatgatacacccagcctaggtggggttggccgaggcccaacaagttagggtttctcggagcccaacagttcgttaagcacacccaactcaggaaaggcccaaacg

SEQ ID NO: 43386 - DNA, 632 bp, Zea Mays
gttgtcttctcgtgttgaaacggacggaccagataatgcagcactctaggctttttttcttttttttactcctgttctcggcattccgggccggggtacgcaaagggcgttcttttcctggccacaaggacatgctaaaatcactcggttcacggcgacaatgcaaacgctggaggcaggagattgtagaatgaggcagaccaagccaaaagactgcaattaaacaagtagtagtgtacgtactaagctggcatctccccgaaaacagcaacagcagcccatgccccgccctactgtcatagccacccattaaatgctgctcaatctcccaagaaccgcagataagaccaaaaacgggtggggtttaacgcagccccaaaccaagggtttaacgcgatcaatttgtactagtatactcgcactactacctcatccatccatcgtcttctctcctcgctggccaagctcaggcgtaagcgtactaaaactgaagtgaggaagacggagctggagagaaacggcagtcacgccctccatatgcttgttgggtgcggctgcggcacacacaagcaacgacagctgctgaaagcgagcgagcccgcggccaccactgccactcacgcacacacacc

SEQ ID NO: 43387 - DNA, 514 bp, Zea Mays
atttgtcctagtttttaccacaatggatcacaaaggctctcaatatatcttcaagaaactagtttactctttcggtttggccatcagtttgcggatggtatgtcgaacttcttatcagcttggttcccaatgattcttgcagctgttcccaaaatcttgctacgaattgggttcctcggtcagagacaattgtccggggtagtccgtgtaaacatactattcagtcaatatataattctacatacttttgtgccttataagttgtgtgtactgggagaaaatgagccacttttgtcaatctatccacaataacccaaatcgaatcatgatgctgagaagtattgggcagtcccacaataaaattcatactaatatcatcccatttccaaggaggtattgggaagggttacaaagcaccggctgtttttaggtgaattgccttgatcctctgacaggtgtcgcactcagacacatacttagctatttccatcttcatctttgtccaccaatacaa

SEQ ID NO: 43388 - DNA, 858 bp, Zea Mays
ccaacatggtactcgccaaattgttgcaactgccgctgtcgataatgatgcgaattgaccgctcctgcacaacaccctttgtatggaacagagtgtgtcgctgattcttctcgggcaaagcaacctgtgtactaagaacacgctgcacaacaagactttcatacctatcagcgtcgcccgggtcaacatgtacctccacctgagctgcatggttagtggcaagtagtgcatgttcaatttcttcagaatcactagcggaagagtactcaccatcgtcacgaatgagcaaagtgcgcttgtttgggcagtctcgaatcacatggccgaatcctctacagcgatgacactgaatatcccatgtacgacctgtgggtggggcaatgctggctggtttggtcgtcttctcgcgtggagtagtggtggacgtggatggcgcagggggaactggtgctgaggtggatgtcgagcttcgtcctgcaaaagggttagaatatggcttcgagcggcgtccctgcacttcacgttcagctttgcaagcatattcaaataaagtagtcctatcaaaatattccttataatcaagtatatcctagatttcacggtttaaaccaccacgaaaacgtgccatagcagcgtcgttgtcctccaatatcccacaacgaatcatacctttttgtaactcctgattgagaaccttgctaaaaacgctgcattttattaagaaaatcacgagcataatacgaaggcacaaatcgatgtcggatcgcagctttcaactgatcccaagtggttggaatggcagtgggatgtttcattttatactcacgccaccaaattaaagcaaaatcagtaaattca

SEQ ID NO: 43389 - DNA, 621 bp, Zea Mays
ttgtaacccctactgccagccgatgatagtaccggtctccaactagttaatcaattaattgccaccccctccttggaataaaaaggggacaagagagccccatgcgagcaaaaaaacacttatcctaatagatcaaaagataccaccacacattaaaagctagaacatgtataaacccttgcgcatcatatgtctctaccttcatcttttgttccatgacatatcttgtataaacactgtcgaacaatcttcaacgactgacgcatcgggtagggaaattgcgcaatgtcaaggattgtcgtcttcgatagttggcgtgccatgtatggaaaagtcgtacagtgtcgaagattattcgatagtatttatatgggataggtcacgagaatgaaagttgaaggcaaaggcacgagtgacaacatgaattaaacatgtttgagctttcaatatgaaacgataccctatgtcatgtatgttatgaatctattgttgtatgtttggatctgatgatctgatgccctcttggggtaccctgacccaccttttatattataaggagggagggaggttatatggtaggcaccaagttggtgacataaccaaatcgatattgagttgtat

SEQ ID NO: 43390 - DNA, 969 bp, Zea Mays
gcgagagcaggcgggggcacgcgaatcacgggagcggagccacggtgaagctggtggtggacgccctcgttagtgtcttatagagtagtatatatatatatagggaagaggtaatggaagccctgggcttcccctactaatggaagccccagccaggacgtgatcgacctagcaccccgcgtgcttgcgtcagccatgtagtcgacagccatggatgcgtaaggcaatatacgaatgcatatatatatggataaaaatgtgtaaaccatgcataaaggaatcttttgacgcccgaatcacatggaacgaatatgacactgtggacagcgtttatgactgcataatgacatgtacttgatagcataaatcatgcagtatgtggttctggttctggctcgggcggattctagcgtaaaccgtgagctaaaatagcgtaaatgtgtacaaaatttagcgtaaatcctatatctgttttgtaacagcaaacgggcccaaaattacggcgtgaaaatcgcgtgcagccgatcgtgcgagggttctggctcgggcgcattccagcataaaacctgagctaaaacagcgtaaatgagtacgaaatttagcataaatcatatatctgttttataacaacaaacaaagcccaaaattacggcgtgaaaatcacgtgcaaccgatcgtgcgcgggttctggctcaggcagattccagcgtaaaacgtgagctaaaacaacgtaaatgagtatgaaatttagcgtaaatcctatatctgttttgtaacagaaaacgggcccaaaattacggcgtgaaaatcgcgtgcagccgatcgtgcgcgggttctggctcgaatggttttagcgtaaaatgtgagcaaaaacagcgtaaatgagtatgaaatttagtgtaaaacacgcgcacaatctcacttcgcaagagattgctgtaaaacacatcaaaaagtgtcataaatttg

SEQ ID NO: 43391 - DNA, 624 bp, Zea Mays
cctatagagggggtgggagatgaataggcatgcttaacgaaattaaattaaaagcaagtggttagtagaatttgtggaggttttgtacaaatccattaaggctccacacattcaagaaaccaaagcacaatgaaattgagagctagtaatatagattgaataaaaagcggaacaaagttgagagctagtaattttgattgaacccaatatcaactttcttgggaggtgtagaaacatgtactaacaaagggttgcacctagagtttgaaggatgagtgatcgattgcaaatcctagaatatcacctcaagcacaagtgagaccaacccaaggacaatacaagagataagacacgagagttaccttgtggctcagctcaccaccaaagcttacctatacccatgttgttaagaaaatcacaaaagctttgggtctcatcgaaccctattatcatctcaagtcaaacaccaaggttgagctaagggttccacagatgttccatgcaatacaaagttcccagagcactccacaaaacttggatgcgttatggatgacctctagccatttaggagcacttgctctaagagtaacaaacaccaaccttgtcaaggacggtgtacccttg

SEQ ID NO: 43392 - DNA, 1409 bp, Zea Mays
ctaacccatatggttaatactaggaggggaggaggtgtcgatctacctgcacgtattcatggaaggagggcagtagttaatccagaaccggaaatgaatcctcctccgaatcccctgcttgttgggactgatgtcgtggttgcctcaaatgcaactgctacaacaaatggccaacactatggtagaaatgcaagctaagctccgccaagacaggcagcagccaccaccaccagcaacacccatggataagcatcgcgaattcatgagccacaaaccccccactttttctagctctcccaacccactataagctgacgactggctaaagtttatataaaagatgctcaacatttcccaatgcaccgatagggagaaagtactatatgcatcgggtcgcctcactggccccgcagcggattggtgggatgcataccgcgcagcacatgctgccgttgacaccatttcctaggcagaattctccaccaacttcaggaactttcacattcctggtggtcttatgaagattaagaagaaggagtttctatcctcaaacagggaggcatgtcagtaagtgaatacagagacaaattcatctagctatcctggtatgctccccgggaagttgaagatgacaagaaaaagcatgaactatttctagagggattgatcgggccactctaataccaactgatgtctaactcattcctgtccttctagaaacttctggacaaggccataactctggaacacaagtgagtggagctaggtgagatgaaaaggaaggctactaaccaaggacatgctgaaagtagtactcatcctcgttatgcttcatcacaaggtaccccagctcgtggcagtcctggacaacagtctttaacagatcccaagctactcctcaagaaagcacccccagtgggaacaattgctcctaatgcatccacaaataggtcatgttttaaatgtgggcagtctggatattatgctaactactgcccaataagcctgcttacactactccagctccgatgaagcaaggtcaagcctcaggaggtagaagccaggccttacccggcaatcgcaggcaagttaaccaagtgcaagtggaagttgaacccgaagagcccaaagagcaggaagaggtgccggttgaaagtgaagaagcccatgaagaagataatgaacaaccaaattagaatcttctatcattgcactaatcccaaagtcaagattctcttctaagggggaatagtatttgtaaaacctaaatagtaccttaagaagtagctagttctttattattttaggaatagtaataaggtctatttgaacctgtgttttaatcttaagttatgcattatgcggatattttttatgtgcatatattttgagacaatatttgaatttta

SEQ ID NO: 43393 - DNA, 679 bp, Zea Mays
gttaacactttttttttgtaaatttttaagtttgccccctggacgacatattatcgtttttggacccttagctcggcgccacaagccacgacgtcaatgtaacacgtctcggcgacgtgagttatggcatcgaggtaccgttccagcagtgctgatctgtgctgcactggcgcccgtcgtgacacctagctcggcaccataaatcttgacgctgagatctatggcgttaagctcggcaatattgccctgtgtgtgcttcctcttcccccgtgctagcttcttccactgcgtcgccgtgctaaccgccattgtcgcaacaccgtcgcagcacctcgcccctacgccgttctcctcgcccacccccgttctcagctgtcgtcgcaccttgacctggtcgccgcgcccccggtcctttgccgcacccacgccctaagcctagagctcgcctacaccgtctcggccctaagcttgcccgttgcctcaacctcaagctcgcccacaccgtcccgaccctaagcttgctcgccgcctcgccccctaacctcacccttggcccttgcgcatagtcgcctcgttcgccgctccccgccttgagttcgtcgcagtgccactttacttctcgccccaagtacgtctgaattgttgttataattatttacatttttacaatgtactaacg

SEQ ID NO: 43394 - DNA, 539 bp, Zea Mays
ggcgtgttcattgcacgagcaaagtcagggttcaggttttgagcgaagagagggttctctcggcgtaaccttgcaccctgttcagcttgttctcgatctcggtcttgagcttgccggcggtcacgtcggcgagaattcctcctttctctaaatactcgctcgtcaggagtttctcccacttccgagacttcatcccgagatacgggctgcgctgggtcccgctccccagcctcgtgatgtcgccgaatattctggtgtatgttcctttatcgccgagcttctcgctggggaggctcttcccctggcatggttggctcatcgtcggagatgggagacaactccgatctcccccaatgtagaggatgtcagggtagaaaggagttactgtggtggcgagttcctttctgtccttctttgagggcgaaggtgccggaaagatagctcggcggagccccgttccttttctaggaacatttgcttctctcttccttgtaatctgcgtccactcctttgtgggcgaagtgggcagcagagttctt

SEQ ID NO: 43395 - DNA, 562 bp, Zea Mays
gtcgtgaacaaggagtcgacgacgacgatgttgtggctacacgcgtgggtaggggtattacagcgcatcgagtcactagcgtggaagaaggctaggaactcgacgaccacgggaattccggtgagacagcgagcacggtgagcagatgcagcaggcagggtgcgagctgaggcgtgtaggaaaagaacggagaaagcagcaggacgtcgtgggttctagaggtgaagcacagagaggacagaaaggatcaggtgcacgtgagctcggcaccagcggacggagctccggtggtggggattgggaaatcgctagtgctgaggatcgaacgacggtgtagaggtgatgcggggaaaaagggcgagctggttgtgttttatagacaaggaataggggacgacgtgcgactttgattgctattgctgcgcccagagaaacggctcctattactacaccattaatggaggtttaaagaaggggagacgaacgacgtgagtggagggaagaagagaaagggacaaccgacggtgtccacatggaggcaatgtggctgctagaagcaagg

SEQ ID NO: 43396 - DNA, 549 bp, Zea Mays
acaaggtgcacgccttggcatgttgcacagcaaagcctacattgcagctgcatcatccatcacgcacagcgtatggcaagatggcatggcgtgaggcctgcccttgcatttggacgctccaacccccccgcagcctagtgcccacagtctgtcccatgcgcaagcaaatcacatgccccccaacttccactagaatctagtgatcttccatgatacatataactccaaccttttgcagctgccatttctactctcacgtcactgctccaaaatgaccaaagagggcatgttggcccccctagctattgggcggtgtgtgtgaggttcctgccctcccatttgagattttgcttgtagatgtggcaatgcctagcctcttctttcctgctttctggaactaggggcttgactgtttgaacaagggcatgctacttttcaacaaactattgattattgaatcacaccacaacactccctccaaggacaggtttttctttaccatgccatcttctctgaaatctcaactcgcattttttccaaaggaacatg

SEQ ID NO: 43397 - DNA, 927 bp, Zea Mays
tcatggggcaaattaagaatgcgggtaccgacattcttatttgagttaagtttgtgggttttgttaagaacgtgggtgcccatgttcttaacttaagtttgtgcactcggattaaccatcaatcttaatggtattaagaacgtgagtacccacgaactttatttaagttcgacggtacccacaaacttaaccttaggtttgtcgggaccgatgaacttagtttgcgaagttcgtcgaaaaatcactgttggctatattcgtcgataaaccaacgaacttaatgtaagtttgacagtttctttagtatgttcgatgactttgcacaattgcacccacattctttacacagattcctgtagtgatgtctgatagtgcactagatataagttgaagtttactaaagtaagggccactaagaaagagtacaccaggcacatagatgtgcacttgacgttacactgtacgaggcatcggatatgccattcagagaagtctgcatcatgtttagagagatgcacaaggcactagacatatcgggtgtgccactagatacccaacgggactaggtactcagagaagttgcacaacatccagaatagggctataacacattagatgtgtctagtgcaacactagctagagcattagatgtccttacacgaatggttggcaatgactagtttcaacatctagctgatggacaagcacccagatgtttggtgcttgcagcaaagtgtccagagagtacacggaaactttgcatgacttccaagggctaatttggacttggggcctatatatacccgcccaaatggcaatttgagatgtgtggtagctaagaaacattggtagagactttagattcaattcctatagctctagacacccaaatgctcaaagatcactcaaagattagcacatgtattc

SEQ ID NO: 43398 - DNA, 453 bp, Zea Mays
ccaccggcagcaccctcgggggctgggtcgtagctcgcactacccacccaagccggatcattgccggcaacaccctcgggggctgggtaatcgctggcgccatacttggggaccgggttctctgcaacagccacctctaaggctgaaggattctcagttacctccatgggaatggagcaacctagaccaacttcttgactctaaagaccgcactccaaggtcgatgaggctcgagacgctgcttgggataactctaaccccacattcggaatgccagtgcaaacgtccatcataccaccatctgttggctcggacagcagatcttcaggaaccatatcctcgagagcctgatcacaatttgctatggacaactcttgcagaccaacgagcgcagacaaggctagagaaggaatatcactactcccccactgaccaggtagcgccgactgtttt

SEQ ID NO: 43399 - DNA, 388 bp, Zea Mays
ccattctgctggggagtacctggaacagtcttgtgtctagcaataccatgatcagcacaaagagaattaaactcactattgcaaaattctaattcattgtcggttctcaatttcttgatttttctgtcagtttgaatttccactaaagctttccattgtttgaatgcagtaagagcatcatttttatgcttcagaaaataaacccaaactttgcgagagaaatcatcaataaaagtgatcatataatcacaacctccaatagaagaatgaggagcccgaccccaaatatcagaatgaatataatcaagaatacctttagtgcagtgagtagataaagagaaactgactctcttctgtttgccaaatacacaatgttcataaaattcca

SEQ ID NO: 43400 - DNA, 590 bp, Zea Mays
ttactattctcctcatttttaatttccatttttttggtttgaatgtctatttcaacatttatttatttctactatcattaccttagtagacaaatgcacaaacaaataaacaccagcatgatgaatttttttatttaagtgtcatttgttttaattactcattcttatttatagttattctctttttataacgattagatggcacacaaaataaggaaatccgatatagtattactgtatccattttgggtattacagcgggtaagggcaagacacgatggccggaccggccagtgactgggttcacccctccccggatcttttcacccctacccatcgttatctatttctcacgcggcaagaatctcccatgcgagcatgaatttcggcggaagatcactggcgtcaggttcacaacactggagatctttccagctactgtaccatggcgatcttcttcagtccatctatacgagcaacttgcagggcctcattctctaattttcgtgtgacaacccactaacctgcctgtatcaaagttgttgtccaatgtaccagctataactttgttacaaagaccttgatcaaac

SEQ ID NO: 43401 - DNA, 348 bp, Zea Mays
tatagctgatttgcgcaaagcctttgataaaatgcgtcggtatggtctgaaaatgaacccacataaatgtgcttttggagtgtcggctggtaagttcttaggattcatcattcatgaacatggtatatagatagaccttgaccgaatcaaatctatttggaatgtgggacctccaacctgtaaggtcgaagtgcagaagtttctcggcaagataaattatttgcggaggtttatttctaacctagccgggaagattgatgccttcacccctatccttcggcttaagaatgatgccaaattcacttggggggcagaacagcaggaagcgcttgatctcatcagaaagta

SEQ ID NO: 43402 - DNA, 621 bp, Zea Mays
tgttcagactttcaggtacaaaactatgattaagtagctcttaccacccacaataagacgggcaaaccgagcgagtaaatcaatgcttggagacctatctacgctgttttgtgcagtcctgtccatgtcagtggcccagttggttaccgctcgctgaattctggtacaacacatgttaccatacagccttgggaaaatctccattcgaggttttatatggtcattcaccagcacaggcaggcattggatcagctgaacattgcaccgttctagatttacaacaaatcctgcagagtagacagaacatgctgcaacaagtgcgtatgcatctgcaccgcgcccaacagcgaatgaagaagcaagcagataaaaataggactgaacgggtgttcttagtgggtgatcgtgtcttcctcaagctccaaccatactgtcaatcttcgcttgttgagcgccagaatcataaattatcatttcgaattttcggaccctacaccattgtgaaacagattaatccagtggcctatgaactcgacctgccagttgggagctccatccacccagtatttcacgtctcgcaactaaaagcggtaatcagtcctcaaactcctgtcaacccta

SEQ ID NO: 43403 - DNA, 405 bp, Zea Mays
caaataatgtttgcgtacgtaaggggtgagtgattcaaatgcaatatagttgccatcgttcgaaatacttaatttgtcacaaaactgagtctcacaaatacaagcttatagttggacgaagccagctataaatgtttgcaatgcatgaattcaaaacaaagtatgtaagaacataaataacgctcacaaagtatgtaaacacattgcaaaatacgacattgttgagcctcatagtaggccctttgcggaccacttagggtgtttcgatcaagattcatgattctatcttcttcgagagttgccttctcagctgcttcgacctcccatttcctttttcaattcaaccacctgcttgacaatctcctgtttttgggtgaaagatttctcttgaactgtaataagttg

SEQ ID NO: 43404 - DNA, 592 bp, Zea Mays
gtttgtatgaaaaacttacctgttccgatactttattatcatctgtacgaacatgggttggctgatcgtgatgctgaagatcaggggttcgaacaggaggagtggatacagggtcatttgtcgggggcgatgaggtagtgggtgggttatctacatttggacaataaaatgataaaatagttgatgctgatatgaaccagaaataaaaatgttccataataaaataatggttatacatacatattggaacaaactacatccacataatatcatggtgcgtaaaacaaaatgagagggtgcatctaaaatcaaatgaaaggtattggtgatgtagtaatgcaaatgaatgcataagtaatatataatatgttgcataaataatgtatttaaaatcgtatacctaaatacaactttagtttgaattatccgtgagctgaatatttttttaaaaaaataaacataactattaataccttctggctgagtatcacgctgcgtggcagcccttagaacttcgtcgatcatttcaccaaatgtctcagatagttcaatctgcttagcaacaagcatctgatggctctgctgaagagaa

SEQ ID NO: 43405 - DNA, 984 bp, Zea Mays
taagcattggtgctgtacaaaatttggagaaaaatgaacctgaagttggactgtcagtcaccactgaagactgaaacttagctgatagttagttcttatgaactttggagtcgattcaagcttgatcgagtgagcaaatgaccaaggttcctatggtcgaattggagctgatatataggagattaactttgttacagtcgaattagggagttgccacatacaaatttgtgaaaaacacccctaaagatgctctgtttgataggctgatgaaggtcctgatggtacaatagtctgacaaagatcatcagatacatcgcacctcgccgccggtgatccccgcgcctggattcgcgccggccatcacgattcttgctcggcgcaaagtagataaccgcgggggagtaaaagatatggcggggagatggattgggtcgcgggtagtagcttatcggagaggcttgggggctgtgcgacgtgggaaaacggccgtggttgtcagaggtcgccgatgaactcgactgtgccacgccgtggtccttcaccacgtagtcgtaatcctggcatgctcagaattactctccctgtgtttgtaggccgtcgagcaccacgacgtgctcgccagtgcaatgtcttgtcaccgccgccctccaaatccattccaaattcggagtaaccatggacaacctctataaattgagcacctcccttgcttcaccccctcataacgaacctagtgcaactctaatctcggtcggtcatccaccatagctcgagcaattccgttttcccccaaatcggttctacgcgtcgccgttagcatctcgccgtggccagtaatccacaggttggttcatgcttctcttcttggtgttttcgcatcccttgagtttcctgttgcttgtaggcccgattgattgaactagactacgctgaatcatcgggaacatctcagttttccctcaggtctcgtcgtcgtcgtgggca

SEQ ID NO: 43406 - DNA, 1941 bp, Zea Mays
gcggcgttcctcgtgggcagtggagtggagatccacacgggcgttggttggttttctgtccatttttgttggtaagaaatcctaagctcacttggataggaatactcttgtcataagaattgggttgtctcttattcaaaccaagtagtgatttctatccaccccattcttagttgtggatttgtgtgctgcgcaagtggttgggttagcttatttggttaagttcctattcagcgtatgaggtcgtcattggtttactccataggacttcttggtacatggcagttaaatcgcaggtgcgtttatagtttattttccaacaccaacaccttttggggttcagctgaatccccattccccaaccaagtgcccctgcactggaacaaggtagtatacacagtgacatagagagttctcaacaggaacacatctggaacttccattagtttattttatcctctaaatagcttgtctgcagcaactatatgtccataacaatttggttggggttggtaaggggtgcatgaatgggagagaaggtacaatgttaggatagcttaacatacattcgaagtttcctgttctgtagttggctgatacctaaatgttttatgctgttgtcataatgaaaacaaaccctattgagctggcatggctccatccttgcttagcgctgtgatgacatcctagtggaaaaagtgttggccttgtgacaagcaaggccagttgctatagttgtatccacaatccacttatctcccaagtattctttcactaatctgacctctgctagcaattataatattaaattgataaagtgactaactaaccagacatactgcactccgattttcagtaattataatcacatccttacatgtgacagttaaaatgaccaaccagaatactgcattccaattttcagatatgattgtcacacccttacaccttatagttggttattttgaaatcaatctatttttgcagtgcttttgagatagcacctagaaatcctgtgcagtttgcccaccaacacaaaaaaaatcctgagcagttatatcgacatttcttcattcacatgaaatgtcacttcttagtagattcttctacaagaggcctcctgatggactactggagtttcttgacaggatctatggtatgcatggagaattttactatattgattgccttcttagatcaatgtaacttattttatgacagctcaactaatcacatcttttggcattgtacagtttttgattcatgcttcagcactgaagttttgcctcagggaatgtacccagtgtatttaattgggattcttacagagttgcatgaagagcatgtagaatcctcatttctggcaattaacttcagagatggagataagagaagccagcttgctgatatactacgtgaatacaacattccagtcattgattacccccgtcattttgagggttgtcctgtgcttcctttatctcttattcagcatttccttcgtgtatgtgagcactggttatccagtgggaccaatcagaacattatattactccattgtgaaagaggggcgtggcctttgttggcttttcttttatcttgtcttctcatctacaagaaactgaacagtgctgagcataaaactctggacattatttaccgtgaggcacctaaagggttcctacagcttttttctgcccttaatccaatgccatctcaactccgttacatgcagtatgtagccagaagaaatatatctccacagtggcctccaatggaaagatcactctctttggattgcctgattcttcgagctattccaagttttgattctgataacggatgcaggccattagtccgcatttttggtcgaaatcttcttggcaagttttctagcatgactaacatgactttttccatgccaaagaagaaatctcttac

SEQ ID NO: 43407 - DNA, 497 bp, Zea Mays
tgaagaaggctgaagagaggcaattaaaagatgtgaagcgcattgctgacttggagtatgcgctgtccactcaagtggaattgcaaaaccgaagtgcaagaattagaaaagaaacttgacgaagtaactggaaatttcaatgtggaacaaacaaagtgtgagatatctgacatggaatggttaagagcacagaagaatattgaggagcttcgtcaagctaaagaggaatgctacaatattgctacagaatgtgctaataatttgaaaaattgtttcactaaggttggcacattctcctcagagcaaaactttatccgcggtgatcctgacggggttatccggtggattaacggcaaagacgaagcttttgaggagatcctcagtgataggggggacttctgtgcttttgctggcgcccgtggggtcgtgtcggtccttgaaaaggtcagctgcgaacatggcaaggctgtggttcagccaggattctcacttacagt

SEQ ID NO: 43408 - DNA, 595 bp, Zea Mays
cgcatcacaggtggggcaccgcttaactctatccattttgcattaacttttgcccagttttgttatctacgccgagtccttctctcacccaagttggctcactgtcacacgccatccaaccacagttacaaagccccagctaaacttagagagtgaggagcttaaaacaccacgaactccagctctccaaactaaattcgagcagaatgacccatggtttcagacactggactgaactcgacgcccaactgaaaccccacctcaatcccgttaaacctcgtgattccaagtggtgacagagagatcagctataatacaacttgctgaccagaccacactcttactctttgctttagggatcaacctcaaaagggcacaaatcaagaaataaagatggatcaaggaggagaaaaacacactacttaacgcatgaacctgaaactttcagtacaactttctctcaaattcatgtgatgaccccacatgcttccttactaagcgttattccaatacattcactctccattttgcttgagtggctactaactaaagctcaacaaacttcaagttatggaactctaaagttgtagcaaca

SEQ ID NO: 43409 - DNA, 461 bp, Zea Mays
ttcttgaccacacggatttcatctaggttctcaccagatgtacgcagatctgccgctagcgcgttgatacgcattgcgaaatcatccaccgcctcgctttccttaaactcgatattctcgaattcacggagcaggcgctgagcattggcttccttcacgcgttcagcaccaacgcgcatgctcttcaccgctgtccacgcatccttgacggtgttcttcgcgcccagcatctgccacatttccgggggcacagaccggagcagagcgctcatggcctgccggtcttgccaccgcttcactccttcgccaccgggctcgatcgtctcccagatctccagagcctcgaaattgcattgcatgagcatcgcccactccgtataattggagcgggttagcatcggccacatgagagaaccctcccgtacgccatgccctgaactgctcggctgttcggcgtcacc

SEQ ID NO: 43410 - DNA, 333 bp, Zea Mays
ttcatgctcaccaatagtacgcatagtattaaggtgttgtcctccttgatttactgtcatcctcgatgcctcaaatatggtctgatcatcaacccccggggccctcaaagctgctggtggagtaattgcctctacagcagtagctgtttgcatatgcgcacttgcatctgaggtaaactggttccctccttgttgttcttcctgcaccattgttacgatatccaagcattgatttgttcaatgaactgacgtcggcgtcgtatactcactgattgactcgttaccccatggcgccgccatcttccagagcagattacgcccttcacccagccg

SEQ ID NO: 43411 - DNA, 517 bp, Zea Mays
ttggaagcgctgttagtcctcatgcaaatgcaaccactagatgctctatgaggcactaagtttgacacagacaaacgtcattgacccctctttatagtacgaccatctagcctactaatccggtcaaataacttctctaaactcctgtagtccggcaaaaacaaaacctatgttatacatttgccttcacttgatccacaaccaatgcttataaatctccaagattctgttctatgtgttccaaccctgcattcttatttctccaagaactgttagtccacaaatagttgtcattaattaccaaaaacatcactaaggggcctagatgattcacaatctccccctttttggtaattgatgacaacactacacattgtattcaagagaagttttgtttttcaaatctccctcataccttaggtataagaaggattttagagatgagtttcataagacatatcttgatttgaagttctgtccgagagatagataaatcccaataaaactcagaatgtag

SEQ ID NO: 43412 - DNA, 511 bp, Zea Mays
cacaactcctaaacgatcaggtttatggctgtcaaattttagtacaagcaagataaccatgttacctacaactcttatatatgacttttctacagaaaatatgatttagttcctcaaacatacagcatgacaaaaacagcgcgtgcagcccaaaacagcaatcaataaattcagcttctatttactttttaaaaattgccgcgttctagagactcgacttattctaaattatatcaaggcacacttaaacatagtcacacaatagatgacgtgacggctacgtagtcatgccagcacttcaccccacaatcccaactaacaaaataactctaaccgaacttggcatttagccgatcgattcctaacccatttttcataccaccactacacgacatgcctaaaacgttaaatgactcgttcacaattcacatacatctttaccaaaatattcccacatcgcttgcaacttaacctaagcttcactgcacaatttcgggacatctacttaatt

SEQ ID NO: 43413 - DNA, 301 bp, Zea Mays
cccacaaaagatacttttaaaattaaagcggacatatgacccacagactagatattaaactacagatactataatttattttggtcaaaaggtcgagaaatatatcagttgaaaaggagacttgcccttttttatagctaactcggccactcgacctccttcagctagcgtggtggtactatctgggagcactgcatgtgtctttgtgtcgtgttgagcttgggtgttttgtcatgacccatctataaggcaagtccatagtgcctgatatttagctgatcttaagaatgggaaatgttta

SEQ ID NO: 43414 - DNA, 516 bp, Zea Mays
ccctagaataaccttaattaggtcatttaagtgaaaagggggaaattggtaaaaagaccatgaaaaacttggaatcatggcttaggccaattataaaagttgaaatacactaattaagctacaataaccactagaaaagtttggccaaaataagtgcttaaaatccccaaaaaggccatgcaagtggaagctctctagggaaatatgaaaattccgatttgtgaatttcagccctcacctagaactcgagcgcgttcaccttaatccctaactcaaaaccttaagccctcattgacaaagttgtgctaaattaacccctctgcaatgtgtgtgaagatggcatcgagatttgtgccctagacatgtcaagtcaagggttttagcttggattcacgcagtgagacaaacccgatttgatcaccccatatctttggctccagtcaacaaaatctataagccgccacacataaacgataaaggaagttccggagaagagatctctcaaagggatcatgg

SEQ ID NO: 43415 - DNA, 484 bp, Zea Mays
ccgggccctcgacagggaggggaccaaggacaacataacatggtgtccctacaaacaaactctaagggcgggagacatgtagatcgaccctaccctcatcattgttagaacggacctaaggggcgggtgatgtaaatggagggggccactgaggaagttagtcgagactgtgaacgcttacgccttgaaggctatgatgaaggtcgccagtggatcttgggccctgaagtcgcaaataccttccctgattggacaaacactaacaagaatgaagcaggaaaaggagtgtgaaactctaacaacaaacattaatcctcgttatttcttattagcaaacgtgaaatatgactctctgctaagcgtcgggtgaggggttcagccgatgctcccaggtcttcttgtctcgtcgtctcaccatctgttagtatggctaaggcatgcccaatctcgcttgatcgagtcgtcggtacaagacccgatcgcg

SEQ ID NO: 43416 - DNA, 314 bp, Zea Mays
gcctgtcattaagtcctctcataaaacaattctttttcttcagatttgtattcatttggtcaatggcatactgggagaggtggctgaatttattgagatattgcattacagtatctcccccttactttaaccggatgaactcttcttgtttcatatggagcactccgtctggaacataatgctctcggaatgctagcttgaattcctcccaggtgatctgatgtccagccggttgaattgctacaaaatttgcccaccatgtactggcaggccctctcagctgttgtgcagcaaactgtggcttctgcgtctcc

SEQ ID NO: 43417 - DNA, 1122 bp, Zea Mays
ccttcctaaagaagaatttggtggaacccagctcgtagatccaagcttgagaaccaactagcaccttggagttcatcgaggaattcatcaatgattggcacaggatatttctgtttgatagtgagtgcggtgaggtgccaaaaatccacacaaaaccaccatgatttgtcctttttatgaaccatcaacactggactagagaaagggctggtgctgtgctttataattccagactgaagcatgtccttgacttgtgcttcgatctcaactttgatcgctggagcataacgatacggccgaatgaaaataggttgggctccagggactagcggtatagagtgatcacatgatctggatggtggtaacccctttggttcctcaaaggtagacaagtgttgctgcaggactgaagtgatgcgaggatccaaatcagttagcatggttgttgtgcctttagcttgcaagaggtagacaacatgaagcatgtcatatggatcagaatggtgaaacctgccttgtaaacatataaggttgccctggtaaggtagtgagatccacttgtctttccaattgattttcataggactaaatttttccagccagtccatgccaataacaacatcataagttgacaatgggaacactaggaaatctgtataaaatgtgtatgcttggactgtccattcagctgctttcaagatatgtgagaactgaatatgtccaccatcagacactttaactatcattggagaaggcatgagggaaactcccaaaagttgagcagccagagaggtattgacaaatgaaagagagctacctaaatcaaccaaaattgatatgggatggccttgacaagtaccctgtagctaaaccgtgtttggggagctcaaacctgaaacttctgatactgaaacagaaagcagctcctgagaaacagatttgttgtctggctcgatacaatcatgggcttcaaccggttcatgcatcagctcccacatctcttccaaaacttgtagctgaacagttggagcacaatgatgtccatggaaccatttctcagcgcacttgtcacacaggccgcgtgcacgcctgtatgccttcatggaggataacttgtcatca

SEQ ID NO: 43418 - DNA, 388 bp, Zea Mays
gaagctggaagggcaagccctcggatgaggaaaggcacgaagatgatagcttcgtgagtgtcctctgtcggaacggttaccccgtgccagattcgccaggaacacacctccttcggcggcagaacgccgacaaggtgcaagagatcagactctgaaacaatggacatatggttaccggcaaacggaagctggctattaggatctttgggcggaatgattgcagcagcatcactctgtctcttcctcttagggggcatcgcagtctctcaagcgaagtaggcaggctcaggaactcagaaaacagagaagcgacggaggaaaaagcaagagttagggtttggaactcaaggggatatgtcagcataaatatgagttggctcgatatgtc

SEQ ID NO: 43419 - DNA, 492 bp, Zea Mays
caataattgttcatcttgttctaactgcaatcgagtgatcaagtttcgggtttaagttataaaattcaggtttcgcctattcaccccccccccctctaggcaactttcaagctcaccatggtggcatcctcgtcccccacttccccatcaccatgacaacatccctacctctcgctccaatgtgggcatgagcatcatcgattgaacaacctatcaaccaccaaccatgttgtgctctgcatcaggattctcacgttcacatgcatcaggatttctttcatggacgtgctagtcaagtttgtaggttcttccttcgtttcaatcggttcaccacttcatttttagaccatgaaaccaaagcttttagattacctttcacctatgttgtcaagatgaaggtcccaaaagaaggtggtccacattattccttcgaaacatctgaaatagacaacttaatgttttgagaaccttcggtgggaggatgcccccaac

SEQ ID NO: 43420 - DNA, 521 bp, Zea Mays
aaaagacgatggcaccactcaattcatcaagcatatcatctaaacgtggaatagggtgtcgatactgtatcatgatattattaatagccctacaatcaaaacacatacgccatgttccatcttttttaggcactaaaataaccggaacagcacacggactaagagactcacgcacgtaacctttgtcgagtagttcttttcacttgtcgctgaatttcttttgtttcctccggatttgtcctatatggcgcacgatttggcaaagatgcaccaggaataagatcaatttggtgctcaatccctcgtataggtggcagcccctctggtatttcacttggaaatacatcagaatactcctgcaaaatgttagcaacaacaggaggcaaagaatgctgcatatcttgaattgaaatcaaagcatccttgcataccaaggcgtaggcaacaaaagtggaagcaaataattcattaacatcagatttcatcgcaagcaagcaatgtcctttcaattttatcccatc

SEQ ID NO: 43421 - DNA, 704 bp, Zea Mays
gtcggtggatgcccttagtatcaacatatggtgtagtagagaattagtgggagagcctgtaatattttaattaaataaataagtgtatattggtatattacaatgtatgaacccaatctttgatctctctcactgatttcttcattctaaaacaaagtagaagcatttcccttttgaacataacttggaaactgtgggttgtgggagggacattttcaaaaatccagccacttctacacttaccgatgaaccataacataattatcactacttctattttccagtcgagagcattacactgtcgtcggccctatttcaacctcgatagtattctttttggttatctctatctctacttctataaaacatctatttttctggtttccatcattattgcttttgcaaaacaacttacacacctttcttatctaactcaaggttcactatcgttatgtgtcgtcaagtgacataggtcattaccttctagcagatggatcgtaaaagaaacttattaagtccaacacgccatgaagtcgcacatagtgtaactctcctggataatatcacctcgctcagtacatggagaccaccataggaacggtcaactcctaaaatgcagacttaacccggtaaacccctaagcaattctcaaaaattcctcaggggttgcatctagcagatgcgcttgctcgcaccaaagaaat

SEQ ID NO: 43422 - DNA, 439 bp, Zea Mays
atgatttaaaggcaagggaagacatcaaagaaatcatccagtgccccatttggtctcgctttggctccgaaggccgaaggtggaagttgatgatgctgttgaagcatgtcagagcgcttttagcaccatttgtgccttcattgccataagggatttgattcaagagcatatatccttcagggtatggccacttgtggaaagctaggatatgccgaaggagaccaccactgattctagtgatggtggtctggtccgactgaagtataccttcagatttagggagaagtttgatgagccaaacgacgactggctgaagtgtattgaagctaccagtgatgacctacttggagcttactccaaggccgaagataatgctttgtctgcagccttcggaggctgggggaagaaaagactaaacagggtctttgatgcgattggc

SEQ ID NO: 43423 - DNA, 317 bp, Zea Mays
gaccatttcagtgggagtcataggaagcaacacaattttctttcccttatgcatgaaagtatatttattagatctaccatggtgaatagcatcagtatcaaactcccaaggatgtcccagtaaaagagagcaagcatccatactcaccatatcgaaatcagcaaagtcatggtaagagccaatagaaaatgcacccttgctgtttttgttaccttgaacttaccgttgttgttaaaccattgaatgtgataagggtggggatgctgtcgtgtggtcaagccaagcttcttgaccacctcaacgttcaccaagttgtt

SEQ ID NO: 43424 - DNA, 375 bp, Zea Mays
ctactggggacgttgttactgttgaatccccccgttccccaggccaggccacatggtgatgtgactgatctaggggttgtaggagggccaggcgggagcgggtgcctgttcggcttgggtgcgctgcgtctagagggaagcatcgccaaggttgaccatggagcagattagagctgctagggggcctggcggctatgctaggaaggaaaacgaaaacgatagggaaaatctaggtctctagatacataccatgacagaatgagctgccagatattggattaatggtagaggtacaagggggtataatatataggcatggattgtctaaggtttatagaaagcatgcaatcaatagaaatccttgcataatctaaa

SEQ ID NO: 43425 - DNA, 608 bp, Zea Mays
gaggcgtgatccagcccctgtagccgatatggcctttggtatatcccttgtacttcgatgttgacttgtgccgggaggagatgtccggttcctgtatttgcatctttgattaagcagagccgaggccagggctaatggctcggttatgtacccgagtctgtctgatggagaagttgttcaagtcgtagtggttggagcaatggtgagtagagatgacaatgggaactcgatctccgattcaccgcgagaaattcctctattaggaaacgagtatgagactaatttagccccgcggacatgagactaattttaacaagtaagctgatgacaaacatgttttactgatgctgtttcatgaaaaattttagacacttccatggacgagccatgatcttattcaatgtctagctttttttccttctattctagcaccacaaaagtacttaaatgtattccagtacaaaatgatgcatcggactcaatcgtcattgagcaactttagcagcaagccacactggccaatggaggaaggggagctcgccgaagatggacttgatgcagacgaggagaggaaggactgcgccatcgaagttgttgcccgaaccctg

SEQ ID NO: 43426 - DNA, 1335 bp, Zea Mays
tgcaaacatgtctctcgacttgtggtgtgtaggttgtagtcaggagacgatggtcaacaaagaaggtgaatgtcatgtggtttgtgccgatggaccgaaagcagcaaaggacgagcatagagccttgatcgatggcctggagaagctaggtgacaagccatggtggctaacacctagggacactgatgggtgcaatacgtgaaggagcatatcatgttgccaacgcggttgcggaccgatgggacacatgtccagtacgtgggggacacatatggagtacgctgcccgcggaggtttcagtggttcagcctcaaaaccacctagcgctacagtatgctagttttgccgagtttgggcctcaaaatccagtggtatggttctgacaggaatcaggggtggcacatgacatcatcacgaagggtgcattgagacaaagcaacttcgtgaagagtgtgtgaccgttaggctcgaaaatccaggagttggtccattttacccttggataagtggataagctctatgtatctaggggtaatttacgaaagtataataactctctataaatagaggagagggttggttgtttagggatctctaggtgctatcttcgggagttatctcttttggctatctcttttagttacctctctagcacttagtttgtaattgttgtctactttttagcaggagatccttaggtgcctttgaactatggcatctaatattgtgagatattgatgaagtgcggtcgtaaccacacaaggctagcatgccttttcctttttttgtctcgaataaaatttggattttgcgcttgatgtgtttttcctcttcgtctcaacccttccactttggattttgagataatctttgttcttgatgattgtatgaagtgtttgggggttacttggtgtttgaggactgtcttgggatcactacaaggctctagttcgagcaaaccatgtttatgtgtagctctctagcagttttgttcaaggttgcaaaaccccaacaaaaccctattcaaaactgagtttttaaatctggtttggttgcactgatgttttcatgctcatacttcatgaatcacttcttcctcggcgcttgttgtctacaaaatttgggatcattatgaacatttttcatcgcacgacactccaaacctacgcatggcactaccgcttgcttctgcaggtgttttttgaaaactgtttgatgtagccaatcgacactggattaggttgttcctatcgaagtgtgttttggtgtcccttggggtttggattgaatttgggaatcgaatctcgtgtgctcaagtttgagaattttagaggc

SEQ ID NO: 43427 - DNA, 605 bp, Zea Mays
aaaccctgatgacgctgctgcatgggcccttaatgtcagcccttcttctcctttgtaacaaacggagtgaatctccatagaacacgtgcaccgtgaaccaagcttggggtgcttgtgtgcgaatccaccgctggcctctaggtataaagctttgtagccacgccccccctttagccataattgcgatagagcaccgtgtgcttccccacaggaccgagagaaagcgggagggccatcatgggggattcatgtatgatggcgtcgggtccccagtgggctggcagggagaaccataggtgctatctacgtgccatagtggtctttctagatgagaatatttgccaggggcacaccaattgctcactggagtggatgctcctccgccttggatccacggtatgctgtgggcagacaacatcatggcttggatagctggtgagttcctcttcatttggtttgcactcgttgtcgcaccggttggggcttgtttcggtccatttggttcaccatgggcgaggggaaagcttcactccggtgagacttccaccgatggggagctctactccgtcgtcgtgcatcggctgggaaggggggaagtctttgtc

SEQ ID NO: 43428 - DNA, 801 bp, Zea Mays
gaacacatttggacaggcgtgtgatgtgttcgatcttcgttcagacacgcgtggctaacttgattggatacgttcggtcgggtttgatgagtggactatttgttgtcaccaaggtttaaaatagcgggctatgtaaagtagcgacatcatttttaggctacatggctatagcgtggggtgatcgtactgactaaataacagatttaaaaaaacatagagttcgaataacagaaggtgtgcgtatttgatttgtatagtaggcgctgagtggtgcggctgtaataaacagcatcagccctacacaagcacttccaatcacagccgtagaatttgcacagtaaaatatttgttactgagccattagatcttagcaaatatgggagagacaaataatagttctctccaaatagcggaatttactcgatctagcgcagaaagttacacagaaaatagacaataatttcgtatggataccaacgatttccaaaagggccctattaccaagttgtacaaggccatgtgcatgcactaccttttgctctctctctctctctctctctcttacatgattataataaattacatataagaactttagcgaactgcactgcaggtcctcgataattaaaaaaggttaaaatgagaagaaagaaacgtaacttccctgccttatctagacatctagtacggaggttttctcaatatatatgaaaaagttttttaatataacgtccggaactgttttaccaccatgggtcgagttttgttattattgtcttgacttaatagacaagtagatgc

SEQ ID NO: 43429 - DNA, 482 bp, Zea Mays
atgatatcctggtatattcaaaaagtgaagacaagcatacaaagcacttgcacaccgtacttcagcgactgcgcgatcatcccttgtacgccaaattctccaaatgtgatttctggctaagagagatcaagtttttaggtcacaccatttcgcaggacaggatagcagttgatcctgagaaagtacaagaagtgatggattggaagcctcctaccaccgtgcgacatattcgaagttttctaggattggcaggatactatcgacgattcattccggatttctccagaattgctaaaccaatgactcagttgttgaagaaaggagtgaaatttgattggagtcagaaatgtgatgatgcctttcacgccttgaggcgacatctgacaacagcacccgtgctagcacagcctgacaacaccaaatcatttgatgtgtattgtgatgcttcgagcactggactaggtggtgttttgatgcaagac

SEQ ID NO: 43430 - DNA, 783 bp, Zea Mays
ttgaaatactctaccttctagctttgagcgaagttggatgttggccgagccgacgtatagctgaccaccaatggcccagagtcacccgcgcgctgaaggggtactgccacagtttctagtaggggttgatgcccatgaaagcctcacatagcgaaatgaagcacactatgaaatggactcacgctcattgtgtggtgaccatcgcaggaagggtctatccctaaaccgtgcacttgccgaataaacccccaagcaatccacatggattactcggagggcttaggtatacatctagtagatgtgcttgcgcgcaactaggaaatacggtctttaacccaaaaactagtaaccatggactcacgcttagtgtggacgaccattggtggaagagtctgtccctaaaccacgcacgcgccgaataaaccccaagcaatccacacggattactcggaggctcggggggctacatctagcagatgtgcttgcatgcaccagaaaaacataagacctcgagcaaaaacctctgcccaactccaaggagtcgcacgaaggctcgggggctgccgtcgagtacctaggaacatggtacccaaagtaggcccataacctcgctaccagcccatttctcgagcaaacccactccatagagcagataaccaagtccaagccgagcaagcctacgaggcaaagcggtaaccaagtcctctcaaagcaagcctgcgaggcagagcagatgaccaagtctccaccaagcaagcctacaaggcggagcagacgatcaag

SEQ ID NO: 43431 - DNA, 631 bp, Zea Mays
tggctgcgtcatttgattgctatgtcgcactctcgcttaatcggatcactctcgttgagtcggaccaccatcatcgagtcacacatttttcgcacgccctgtaggcattgtttgtctgttgtgatcatcgagccacaattgtgcctgttgcgcatgtttcatggacttgtcatgtaccccgactattgagccacaactgcgcctgttgcgcttattacgaaggcttgctatgctgttgtagctctgatggtcgcacacgcgttgacaccaaatacactagatcttgtactcgcgtggattgtggtgtgtcgttcaagctcccagaaatcacgttatgtgcaaccttcgtaaacaattttatttggctatatgttttatttgattgtgttgtgtggcatcatatatttatatatatcgccaagtggccttaacaattataccaagcctatagtgcttagaaaatctgggaaattaaattgaaatacaatgaaacacagataagttaattcttttctctctcctcatgcataatgttttacccgaagtaacctgaagatatataatataatgcatgaaatcctttttggcatataagacatcacaaattgggattctattagtaagcaaaaag

SEQ ID NO: 43432 - DNA, 383 bp, Zea Mays
cattttggctagagccagcagcagtctcctttggcatttcccatccatgagcaagcggccacactctgtaagcaatatgctcctgcaccatgtctcttgtgccaatgtaagtacacactgtattaaaagttgtttggcacgcttgcacgtcgtttccaaccgcaatggtcgacctcctgatgccgaagcgagaccatataggtcgctgaatcaccccttttacatcttcctgctcactcaaatcaaccttcacataaaaccattcttgcatctaggagcctggccactttttccgaaatgttggcacaggatagctggcatcgacgcgatgtacgaagctatagcaaccaaaaatattgtgatattgctcttttcccgttgcc

SEQ ID NO: 43433 - DNA, 4377 bp, Zea Mays
acatatatcaacagaatatagagatgattatgatcaatttactttttattacaccaaaacaatatcttaaaaaatgcagcatgacatactttacaagtatcgctagaatatagagatgaataatcacaatcacacatgacacatccatctaagtgtcattctcctttccagtattacatacatgcgaactgtgcagatattgatcccttgtgacctaggataagtttcgcaaaatgcttatagttctatagaatttgccaagtggaacctgcatgacaagaatagcaacagcaaatccaagtccaaatcctaatccaatgaacatatatagagttatatcgacatgatcttgcgacattttttgtttcaggtcatttggctgaggtgaactggcacattgtctgcttaagggtgctccacagaggcctatgttaccttcaaatgaactgttctcaaatgttccaaattggcgtgattgtggaatcatccctgccaaattgttgttagacaaatctagggtctcaagaaatgtgagatttgttagttcttgtggtatctccccggaaaggtagttccatgacaggtccagtgattccagctggctcatcctgcctaattggagtggaatatttcctgtgaaggcgttgtgtgacatattcaataaatgtagtataacaaggtttccgaccaaatctggaatagtaccattgagtttattatttgataagtccattgcagttaaggctgtcaaaatcctatcaattgagacgtaattccccttaactgttattgcaacagtatcttggtaatattggttggatgcagaatgacccaggatctgtccagtgttattattcttctccctcatagatttaaacatcttgaaccattgtggtttcacatagccagagaaattgttcaaggcaatatcaattatttgtatccccaagaagtacccctggaaatttccacttgtgaaagggtcatctagtgtgccatagaattgattggaccttaatacaaggacacgaagattggaaaggttgccaagccaagatgggaaaacatctacaatgttattgtatccaacgtcaagaacctccaaatcagtgcattgagaaagagctttaggcagctgtccttgaatgttatttccatttatatctattgtccgcagatcacattggctactataatttttataagtcaactctccttcgaagcgattccccctcaaattcaatatatttaagttgccatcttctatcaggcaagatggaaccttccctctgaagtcgttatttgccaggtcaaggactttaagataagttaaattgcaaagtgtgggtggtatgtagcctgctatgttattgtcggatagcttgagatacacagtttggctaagatacaaagtgaagtttaacataacagatgtgaaactgttatttgaataatccaagacttgttcataattgctttccattgtcaacatgttcggaatcgggatttgaccctggattctgttggaactcaaatcaagaaattccaaatgactattagggagaatatatgaagtgagctgcaaatttgtgaatgcgttgtttgaaagattcaaattcctaaggctatggtcccatgtgtgccatatccaatttggaatagtcccaagtatcttgttgcaagaaaggtccaatatagtgatatgatcaaggtgtaccaagaaactaggaatttcagttaagccacatgatttcagatctaattcagtgagctttggtaataaccggaatgtggagttacttctttttccctccttgatatacagcttgttgttggataaactcatttgagcgagcttccgtagtttccaaaaatcatcaaggtctacaaaacctgttatgttatttgagctaagatccaaaataaccaaatttatgaggtggaagagtgctgaaggaatatttccgctgattttattatcatttaaagtaacaacttcgatgcacgaagatagtgtatggaactcttgtataggtccagagagttgattcgatgaaagatccaattgtaataatgatggtaaagtgaatagaaatgtcggtacgccccctacaacgaaatcatgggtaggctatgttaagttcgtgtttagagagcaaagtgcatattctgtgaaaaaaggtagtaaataagaaaatgagacgatcttttgggatgtcaagaacataaaaataaactacaataacaattaatttgcacacaactttttatctatgtttgccttctctattgagtaaaatttacccaaagtcccagacgttatcctcaagtgtcatatagttaggttttaaaacttagcgcttacgttgatgtgagagatgggacgatctacacgtcagcgataaagcttaatcttagaaaaaatatatttttcatacatggatgaataacacctagtagtgaatatagagataacgacgacagaaatatttaagacagaatttgccatgagttcatgtatgttaatggttcgtgtaacgtatcgtatcatttgatgaacaattcacaaatcacaaggtacaatgtgagaattggattttgaatcttaccgacgaggtcattctgtgaaaggtccacaaaaatcagtttagtcatgttggcgattgtatttggtattctcccagagaagctgcaacctcgaagtattaatactgtcaacttgttgagatgtccaattgtcggtgttatagggccagataaaccttgatggttataggatatttgcaggaatcttaagttttctagattgccaactgaagagagtaattgaccagtaaaagcacaatcagagattgtcaaatattccaatgtcgtaaggttgccaattaactgtggaattggccctatggaaccacaatacctgatatccaagcttctcaaactggttaggtttccaatccaggagggcattgtcttggtagagtagcaatcagaaattttcaatgttttcaagctctggagatcaccaatccatgagaaatttgacctagcctcccttgaaaaatttaccgaagagagtcgcaaggtactaacatggtccatcttgtctacgaaaaaatagggaggttccatagaaattgatcttccatctattcccaggtctgtcaaagatgtgagattgcccaagtagctcagagtgacaccagagaaatgtgtatcctgtagattcaaagtttccagcgagctcccatggagaaattttggaataagccccgagagttgatcgttatttgacacatccaatactgccagattcttcagttgaaagattttcggtggaaaggtgcctctcaagttattaaagctgagttgaagaactcttaaattgagaaaatctgcaaagaattctggaaccacgccggaaattccattcatttttagattaatcacttcgatagagcggagacgtagaaaatgtcgatggataggaccaacaagcctgcattcctccatgctaagaacctgaagatgaggaacgtattttccaagagttctgccccaatcttctctgccactactacttatgtccacgccatcaaggtagagctctctcagatttgtgaggtttgacaatagtgtctcgaaacttggttcttgtaggaccaaaaggttatagctgtcaaaaagattatacaatgtgtctatttcagcaccatcaatgttatggattgaagaaatatccagcgatatgagactcgggagtttgcctattacaaccggaatgtgtccatagaaacctgcgtaagaaaggttgaggtgtgtgagtaccgaaagcctctcaaagccagccgccggaataggggatccaccgaagtcattcttgctcaggtcgagtcgctggagtgaggtgaggttgaagagcgcgccgtcaagactgtagctgtacaagccacggccaccgaggtcaagaacagtgacatggccggagacactgtcgcatccaacaccctcccagaggcagcagtccgtgcctgcttcccatgaagcaagggtggtggtggagtagtcgaagagaaaggatcgcttgagctggaggagtgctgcagcatggtctggatggcaccaaggagctgtgaggttaccataccaagtggatgaagctagtgatgagcggaggtggtgtatcagtatcaggaagaggggaaggagataactagcacgagccatgcatcattgtctttgcactccagaaggaaagcaaaagaagatagttctatatagtagtactagagatggacacatcccattgacgatgccacccagtccaccgtaatgactttgaagttttcaatgtcaagccgccgaaataattaaggg

SEQ ID NO: 43434 - DNA, 392 bp, Zea Mays
ttgtacgacgacatctgtgttcctattttgatgacgtctccttttgttgtcctattgaaggttgtagctatatgcccccctatcggattggtcagcctttgcggccgagtggttcggaaatcttgctggacctgttcctgatgactggattgagtggctcccaattggtcttgtaccggaggtgccaccctgttgaatacagatgttcggggtgccccccaagcggggtactggggcatcccaaatgggtatggtggcatgccccacatttgattcggggcatatggcggtggcatgtatgtatattgatatggcacatgtggatatgggggtggaggtgtccatgcaggtatgttgggtcgtaattggacattatgacccgtcattctttc

SEQ ID NO: 43435 - DNA, 361 bp, Zea Mays
gagaatgtcagcagttaggatgacaaagtcgtggaagctggcgggaaggaggtcgttgcggctggtttgaccaacaaaacagagttggggcgtcgaatgtctaggcccaatagtcgttacccgtcgcacatgtggtccaagtgattgtatgacacgttaaatagaggcgaaggggagtctgtaaaggatatgaaaggtgaatacaataattcccacttcctcctacgcccagttcttcctcttcttcctattctctccgcgtcggtgaagcacctgacaaccagaccatctgatgcaccctattataccaaaagccatgctcgatgcccctgctttaggtgacgtggtagcctgccattta

SEQ ID NO: 43436 - DNA, 879 bp, Zea Mays
gagaacaagtccccaacagtggatgatcggagacgagggcgggtgctctggcttcgtgacaaccttaaggagttagcggcacatgcaatttatactgtccgagagcggtggctccgaattttgaaggagaaggctggcggccggagagaggggtgagtcaccggagtcgtataatgtggcagttattggggtagagacctgagatgatgactaatcaattcacacgacaccttgcgacgaggtaacagggtcagtagcgtggcagatttcagtaaatggtcatcacaccggtggtggccgtgcggccacattgtgccacaagtgggtatggcgacaaggcggccacagtgccctgacctcatcccaatttctttgtagcaactcacctggcacgagatcttttaccctaagtcgttatccgcgcaccatagggcatgaatcacagcaccggcgaggatcgcgatgcggagtcatcggtggcgagatacactgaacctgcaatcttattcaggttactgtaccatcgcgaacactctttagtgcgcctgatagagagaattacagggctttgttctccaatttctatgtagcaattcaccaatccatgtgtagtaaagttgttgcacaatgtaccagctacatctttgttacaaaggtcttgtgcaaacatgcactaaattcccctcaattcgatctccaagatcatctgatgccactgttggccaaggttcaggcttcactaatgactgatagcccaacattggacccaattatctcccatttccatacaacttcagtgtttagtcttttaataaaaattgtacccctaacttagctctacaaattttctatattgacctagggcaaaatccccatgaa

SEQ ID NO: 43437 - DNA, 400 bp, Zea Mays
gagaagaagagagtgaccagataagagaagacgatgttggaggcagtgaggagggaacgagggacatcgtcgctggcttgtcgtgtcgaagggagacagggaggagaggagggggttaggatttgctaggagcatgaggggcgaccgtgcgatggggcgccaaggcggattttatgagatgactggcgaagcgggcgacgacgccgcgtcagaggcggtgaggtggagggagcgagggatggtgtcatcgactcgttgctcaccacgtcggaggaaggagaggtggggttagagattactaggtgcaagaggaggcgacctccacgagggatggattttatgcgacgacgggagagcgggcatcgagagatgacaaatttatccatgtcgtgcggcctag

SEQ ID NO: 43438 - DNA, 1691 bp, Zea Mays
ctggagctacctcatcgaagtactgcgtgctttgggctttggtcagcggtggcacgaatgggtgtccattctcttccgcacgaccacctcctctgtgctcattaatggccgactgggcccaaagctttttccatgccagggggtgcgtcagggagacactctcttgcctttgctattcatcctagctatggaccctctgcaacgcatacttgaccttgcaaccaaccatggcacactttccccgttgcccgaagagatagctagacggagaaccttgttataagcagatgatgctgccattctcctaaacccggttagataagacatgcaggcggtcgtggagattctccaggcttttgggcatttctctggtctccgcataaagctagaaaaagctccattcatccaatacgttgtgaagacatcgagctagaccacgtccttgagcccttcaatgggatcagagaatctttcccatgccgctaccttggcctgtagctccatacacgccctctaaagaaagtgcacgtttagccgctcatcgaaagtattgctcacagactccctggttggaaagggaagtagctgaatagagccggtcgtctcactcttgtctcatcggtcctctcttccataccaacctatcatctgaggtgtcaccgcttgcagtttgggcccataagagaatcgatagaatcagaagatccttcctctggaaaggagaagaaaacgccaacgggggccactgcctagtgaattgggcaacattcataagaccgaaggacttggccggtttagggataccagaccttgataaattcggcagggctttacgcctacgttggttatggcaggaatgggtggacgataccaagcattgggctggcatggataccccgacggacgacactgatcgagcacttttcactacctcaacaagggtcgtcgttggagatggccatagatgtcgtttctggcatgacgcttggcttgatggagaagcgtcatgccacttagctcctagcatatttcgatatccaggacgaaaaacggatcggtgttcatggagctccgggataaccactggatcaacacgttgcgaggacgaatcatcactgcaacctagatgcaggagttcatctccctttggatcagaacccaggacacccaccttatgcctggcttgagggactccattctatggagatggacggtagacggaacatactccgctcgctcagcttaccgtgtccagtttagaggctcctttaggcctttccggtccagcctaatctggagagcacatgctgaaaacaagtgcaaggttttcacatggataatggcagtggaaaaagctctcaccgcggacaatttacaaaaaaggggctggcctcaccaagatcactgcactctttgtaatgggccgttggagacttgtatccatttcgcattgctttgcccctttgccaaatcagtttggtcactcaccctggcttgggggcatttcgacgaaaatctaatcactccatcagaggagccgagcaagatgatccggtggtgggaggaatcccaggccagaattcaaaaaagtgagaagacgattcaatgggatagtgatttacactatttggaacatctggaaagaacgaaacagaagaatcttcaacagcgttttcgaaatggcagtgcaa

SEQ ID NO: 43439 - DNA, 593 bp, Zea Mays
agcgcggctgtcctcaccgccgacggatccctccgccgcgattcgtgtcgccggcgtttggattcgtgcaccggacttgtggataacctctcggggtaaaagatcctcaccgccgtcaagctggaagccaccccggtcagccgcggtactcctcccctggctcaccgctcgcgggtaaagtgctcaccgtcgtcgtgccatcgccgttggccaccacgtgtcctaaccgcgccatcgcatcgccatgactccctctaaactccccgtcgaccactggagttactgccacggcggtgaacacgtgttcactgcaccagcattcttcctcacttccgatcgccgtgtgtctcgtccaaaattcgcggccaccgctcgctccgcctataaattgagccctcccctagctgcgtaacatcatcacccacccagccaccaacaatcgttagcaaccgtgcctccgagagcttgaattttggtttctccccaaattcagtttccaccacccgaaaccgacctcatcgcggccagctcccttcccggtcagtccaaccctccctctcccttgtttaagctttctcacatgtctacgatgc

SEQ ID NO: 43440 - DNA, 553 bp, Zea Mays
ctcagtgccagatgaaggaaaagaaattgataatactccttcagacgagagggattttgatcttcggcacttgggtagtcaagaactgtccaaggaagacaagttggagttgaaagaatttgcaatatttggcggttaccagctggggtctttgctcttcggcggggttgatgaggaaattttaggatgtatttgcgaccgcgtcggggccaagataatcggcactctgtctaagagtgttggattcccgaagctggaggacgacatcagcagttatcgtcggcaacacattgtcggtagcctattttattccaatttcaaggtgagatctttgtctaaatttttgttaccttcatgataggttgagtgctctaactttaatttgttttgcagagcatgctgttaagcaaggcgctgaaaatgcagcaggatagtgaggacagaaaacacgaaatcatagttaaaggcttagaagataaaataaaggaattcgaagcttctttaaaagaaaaggacatcttgctgcaaacagccgaaggttcccttgcagaag

SEQ ID NO: 43441 - DNA, 1116 bp, Zea Mays
taatttttgaagacaaatatcaatgatgtagtgcttaaaaatacatatcatgggacaccgatgtcagagatgcagctccaagcaggagatttctccatgttcattacttccatggagcttctaatgtcctccacttcagcccatctatcacctcctgcttggatattactcagcaacacatgatagccaacattacttggttccaactccacaagtttctgagctgcaaaatatgcaagcttagagtttgagtgaattctacatgatccaagaagggcaccccaaattctgccatctgccttaactttcatgttgctgatcacttggagagcttcctctagattacctgaacgaccaagaacgtccaccatacaagtatagtgtcctagctcaggtgcgaatctgaacttttttgtcatgcaatcaaacaactcgcgagcttcactgacgagacctgaatgactacatgctgaaagtagacttaagaaggtcacttcatttggctttactccttctttcagcatctgattaaacaatgttagagcttgcttaccatgaccatgaattgtgaatgcttcaatcattgaactccatgagactatatctttctgaagagttctgctaaagcatctttctgcaagatgaatgtccccacatctagcataaagcttaacaagggctgtgtccaaggcacaactctcagattctgcagcatagttgtttcttatgatgtatccatgagttgctttaccacaccttaaagcatctatttcagtgtaactgactaggagacctcgtagaatgtcagcatttggaaagtaaaaggagcccatcattctctcaaatagatggattgcatccaagaacattccatgatagataaaagcccatatcatggctgaccataagtacttgcttcccccattgaattcctcaaacaactgaatcgatgacactaactcaccgcatttcgcatagaggtcaacaaatgatgctaccaagattgtgtccatgagcccactcctaatagcaaaggagtgcagcttcttgccatggggaagaaatttgtgcctggcgaatacagaaacaacagcagttaaggtttcgctgcttgga

SEQ ID NO: 43442 - DNA, 725 bp, Zea Mays
gtgccgggtcgtgcaaaaaaggggggaagacaaaagaggagtgacgatctcgtccaagagaacagtagtacatgtcacttgtcaggcatgtctacaagtgaccgcctcctgcctgcatcagcgtcactcaggcctgcatcactcaccgagggatcgaactgcctgtgtacttggattaggccagttaccatgggcctcggtaccgtgcatctcgaatagaccaagagtgagcccggatgaaaatgaagcccatacccctgcacagaagcagcccaggctaggaagctgcacgccaaggtacttacaacagtggcctaatagcccgggacgttgtacggtggcagatggccggacgtgcatttttggtcgtgtttagttgaagctgcaaaatggttgggtattttttttaaatgattttattcaaataaaaaattacgtcagtttagactttaaactaatataaaaaggaggtcaactcatgaaccaaacaattgtattgctcggtttctagcgcatgacagacttgaaagacactatggccatgtttggcgatgctccttccatcccataatataatataagtcgtacccatctagattctctatcatcatcatagagaatatcgaactttccccactgagaagcgcagtgagacaagaacaaccaaaggagacgaagaggaggcgtcgccactagtgatgtgtggctaaacagtccgcgaaggg

SEQ ID NO: 43443 - DNA, 1261 bp, Zea Mays
ctttagggcttggggttgttgtcgggtacttaggaacggggttcccgaagtgaatcctataaaccttctagctgaacgacatctcagtagagcaagtcaatgaggcgagagggccgaccatgtcctcgccaagcaagccagcgaggcggagcgcccgaccaagttttcgccgagcaagccagcgagacggagaggccgaccaagttcacacagtgcaagccaacgaggtggaatgaccgaccaagtccccgccgagtaagatagcgagacgaagctaccaaccaagtctttgtgctcacgagatgaaacctgaacccaatgatatgggcccacacccgtagtgacaagacgcatcatcaccatgccacgactgaacgtgcacacactgcacaagacaagcctcgaggacaccttagcataggagtcccaacaatagcgcgcacgtcagaaaggacggaataacacgccataccgagtgtgtgtaccgtaaaggatggaaggagacacaaggcgtgtggcgggcggagccacgccgcgtacaaccgcgtctagggacagaatcgtgggacccgccacgcactaccactaggacgtcagcgagggactcgctacacgagccaacgcagagaacgaagccatgtcaagagtacaaccacacacaagaaaggggcccagtttgttgacccgggtggataaggccccctcccctcctctctctctctctctactctctttctcttcagcaaggaggggctcccacggtaaggcttctctcctgagatataaaagggagaagcccactcttcgaaggacacacaagcacacttgttgtgacacgctcgatagtaatactacaactagcactgcactggactatggcgcaagcttgaccagtataacctatcatctctaatctaccgctcgggtcctagtgagtcaccattcgaagtgagtccacgctagcatccccgccgatcacaaatattacttacctggtttccaaaaccatggcacctttagctttcgatcatgtagcctaccccatataatttgctatcgaatacgagtccctacgcagttatatcaagcggtggtgcgaagtgaaggctgacattgctagacgaaattgttatctatatatgttttcataatggcatcagggattcgaaaaatatctcagaagctcgtacacaagactccaaccactctggcctctctattctatattgttagcaagtatgccataagtgaagaagttctc

SEQ ID NO: 43444 - DNA, 1280 bp, Zea Mays
ctcatgcagtcatgcttacaagacaaggtaacaaatgatctatttcatatatgtgtaatgttctgttgtaacaggcgaaatatgtatacttgccagtaccactcttaacatatattcactgccctttttccagatgcttttggttcaacatccatgcatgtatctcatgacactgtacaaagctcaccccacacaaacttaggttcttctgtacaaaatccacactagatctttctttttccccccttctgtttatactagcaccaggagtagctcattgtttgtaaactagaaataggagtgtaggcagtgatcagtagtaggtcagaagcaatagaaaaggattagtgctaccacaggcaggttctaaccaggtaaaggtgagtatatagccatgtgcccatgatctttgaattcttgactagagcaaagtgtttgtgcgtgacgtcctgccacaagtatctcgagatcaattaaatcttggtcaaaatgtgagcttcagtgtttcgctccatgatttgtcaagggaaaaatggtcacctgttgcttttgcattctcattttctgcacctcctataatcgatgttatggttttgatgacactaatttctgttgtagaaaaatagaaagcagttcctacaggagttgagagaaattcacgatgcttgtcagggaccttgggatgttcttgggaattttaaccttatatacaaagatgaagacaagaatgatgggcagatttcgaaagtttattaatgatttagccttgagggacattcctttacagggtcggagtttcacttggtcaaatctgcaagctgatccggtgttggtaaggcttgacagttgagtgggagcagctgtttccaaactgccttctgcagagtgcagcctcggaggactctgaccactgtcttctgttgctcgggctggatgatattaagcctggaaaacctcgatttcacttcgaatccttttggccaaaaatcgaaggcttcatgcatactgttgaggaagcttggaactcggttctaggatcctcctgcccttttgatgttttgtccaggaaactcaaatccactgcaagaaagcttcagaattggagccacagagtttcttcatctactggaaattgctcaagactctcggactttgtccaacgaggaagcatggctgcacaataatatcaagaaacattgccttgccctctcctctcaagcgtattgcgaggagccgctctaggatcagctggctgggtgagggcgatgccaacacagctc

SEQ ID NO: 43445 - DNA, 548 bp, Zea Mays
ttcgaatctcagaacgggtttggttgcgacctcgggtggacttttgcctcgcctgagtctggctctaacctcgatatccacaacgaaggacgtccgacatcatcagacagtgcagggctgatgcactacttagagaagtttttcccatacttagcattgtgtcaaccactacagtatggcaacctcccgccagggggggctcggatatgtgaccaagccatcgggcttagcctcggctctcagcagaaaccaagcggacgcaagtcaacaagtacaagaccattcctcaagccataccatctacaggggtacggtgacatctcctcacagtgcgcggccaactctcgtcctccaggcagctccccttggggctataaataggatagcctacggctcctgaaggacaacagacaaacactccacaagctttctcctccacatggtattggcacttgtctcaatcaacctcagggtcttgggatccttccctcttccactctgcttgtattccctacttgaagcacttaggtgcgagtaatataagtctc

SEQ ID NO: 43446 - DNA, 546 bp, Zea Mays
taaagatggaatcattcgttctacggggatgttatgtgcttctatccatgatgtagaaacaaaagaatgtgtggcaccagtatcaaatagtacttttgttggataggatttgactggaaacatacctactgccacatctggtgcatcctggattgcttcagcctccaagtggttcacctttcaacggtggtaggcctggccacggcctcctggtgcttgctatgatgttccttgtcttgctgaggtgttggaagctggctgttgctgagctgctttcttcgggcaatgattcatcctggatgactttgttctccacaatggaaacatccacaacctcctccttgcgctggcgctccctggttgttctggttggttgctgggacaggaaggcgaggtgcctggttgttctggcgatactgctgctgctgagggaactgcctctgatattgttgccagtgctgacgctggtgctgatgtccttgagggtgaccttgcttgaaatgctggggtgaattgcctaagaaacggggatgaaagggaaatgtg

SEQ ID NO: 43447 - DNA, 561 bp, Zea Mays
accagtcgctcgtttagggttcacgctaaaaaatctaggatggttttgcccatgctctcttcagtgtacatcactgtcgccgcctccttggagcccgacgcctcctctctccagtgagaactgtacaacgccgccgcttcgacgatctcctttccgccagtgaccaagtagcccaggtatgcaaattgatctgcagagttcattgcagtcaacttggctcttggctcaggatcctttgtgttcattcctgtccccacggatagagaggcgcttggctcaggatccctagacgacgaacatggcaccgccggcgacccatccacctccgtccggctcctcccaagacaaggtaacctaccttatcaacaacattacctcactagtatttttgttagcttagttcgttttggacctcgatgtggtggccagtccttgattcagctaccagatgtgttgaagaaactaatataaatgaaatttgtcacatacatgtatggagtgttcggttgtatctcttataggtgttgtttgtgaggatataacatacttctaatatttttt

SEQ ID NO: 43448 - DNA, 646 bp, Zea Mays
aaaatattttttacacgggcccgcagaactagcaactcaagcatcagggtggggagaagcagcatcctcagggtcagcattatctgccacgaccgaggtagcttcgatgtcgctggagggcatggccgctgaataagacccgacatcgagcagaaggccaacatcgcacccggcccctcgacagcaaggtacgcggatcttgcactgccacctagcagccccttacttcaacctctcttgttgctcccgctccgatttcaatctttggtcgcggccaaaaaaagcagaggaagctgaggctgagaatgcgagtgcggggtgaaagccacgggtagccccctcccaaatatacagacaaggtgcactagccaatccactgagattgaaactgaacccccacctttaaaagtcaaatccaaaagcgaattttgtttctcgaatctcgtgcgcacgcgtgcgacaacggatcacccgtgggcatcacgtcccatggcattgactcccgctcgcaggccatatgtctcatactggctaatgaaacccgcagacaccgctttgcctccctagtccccaaagtgggcatctctctctcccactcaataggtgatggaaaagaaagatttgttcgggtttccttcccagcgta

SEQ ID NO: 43449 - DNA, 427 bp, Zea Mays
aaactaagggtgaaactgaagaaagcagcagaaaagcgccatcactatacagtcattgcactttgcagtcaattccattccattccttccttgaagagtaaagagaagaaactaaaccctcggacggacggacgaccgggtcgccatcgctattgactgccagccattctgccatcgacgtcaacacacgagacagcagtacaggagatggaacgacgagtaaggctagacgtgctggaagaagcaacaagacggaccagcagagactagtaagagatcgatccagtagtctcgactactactactgctgtatatggttggttgacggtgcatgcatgaagcactgttatgtatgcaagagtatcttcagtgatagcgcgatggagggctcaaaaagtctcactgttgcatgcatgcactgaaccca

SEQ ID NO: 43450 - DNA, 449 bp, Zea Mays
tgagagagcatcgaggacaccccaacaagcgccggaggaaccaccgggcccagcgcgatgaagaggaagtcaccaccacggaccgaccacccaggccactagccaagaatagtgatgaccatttccataagctgatggactccccatgccaaaaccacggcttcgtgtccgccacaagcttcgggtgtgcgaacgtctgaatcgcttcatctcaaagtcgcccaccaaaaaagcgaagccaaaagagccggtgaaacccgcagagcaggagacactcaccgaggaattccttgagacgacaggatgcctcatgatcttcggtggggttgaagcatacggcaacaaatgctgcctcaaggcggcacaccggaaggtccacgtggtggaacccaccatcccgcgatatctccggtggttggagttcccaatcatcttcgaccgtagtgatc

SEQ ID NO: 43451 - DNA, 552 bp, Zea Mays
atgatgaagtagtagttttcaaaagctttttcagagcaggattacggtttcccctgaacgagatgattggagaagttttggataattgcgaaatttatcttcatcagctaacccctaatgctatcgttaggctcagcatcttcatctgggcccttcggagccaggggatggacccaaatgttgaagcattctgccgagtgcatgaattgcactatcaaataaaggctagagcagacgggctgcacgaaaattttgtcagctataacttcgcgtatcgcaaagatacgaaggctccggtcctcagctatcgtaccaagtggccaaccggctggaagagcgaatggttttatatcaaggccgatgaaaagaaaagggggaaactgatgatgatggccatgtgcccgctggctttaagcttcagaatgactagacctttgtgcaacatgaagccagggtcaccatgccagctggccatagcagaattcagagtggtggctgaacaaatcagcaccagggatctagtgcaagaatacctggccaacaggatatctc

SEQ ID NO: 43452 - DNA, 494 bp, Zea Mays
cttttgggtgctccatttgcttaattgtgggaaaattagggtttggttactttctcccctttgatgagaatgaggtggctaaggtaggcctcctaagatgattcatacttaattagtattttggctctcaaatttggtgttttcctcaaactaacccatatgagataatggggttctggtgaaagtgctgagtagaaacccctagtaacacatggggtgttataggcacagaaaattttgacatcaagtggctatgggcagtaaatgtggctcgctcttgtccgccctgacacttttataacaaacattaggcacgaagcggtgtgaagcacaaaataaaattcccacgtaaaaaccatagcaccctcaccttctccatgtgtgatgtgtcacaggcccaactcgttttacaaaattgttttaccttctccataacgagcttcgagaaggcgtttttcgcaccttcggcacaaggcctggtttttgtggtctaa

SEQ ID NO: 43453 - DNA, 505 bp, Zea Mays
ctttcaatctccccctttttggtgattgatgtgttgagagcggggggggggggggtgattttggtggtggatgtttggttgatgctgggcggggccatggttgtatggttgtgggtgccgagatcttcctagtgcgggtggagggcgtaggtggcgaagggtggtggggaaacatagtgtgggtgagttttcgtggagtggcaggcgccgtcgtatggggatggagcgtggtcgtctccgtgtaaaccgggttgataaacgagaattgttgtccttgccggatggggcgagcataggcgagggggatcttcggaagctttttgagggtgaggaattgaggataatgttgtttaatcacagggagatgggtatcattccgaaggttgagccgatgtaataggcgatgccctcactgtgtgtatgtaataggcgatgccctcgccgtgtgtatgtaattgtaatttgtatggtgatgtggcttgttggccgtattcgtatgcttgta

SEQ ID NO: 43454 - DNA, 739 bp, Zea Mays
ctttgtcgaagcagaggcgtcaaagggaggcacaagctgatcgaaacggccgtgtttgcagaggcgtcaaagggaggcacaagctgatcgaaacggccgtgtcaaacacaacggcacaaaagacctacaagaacatgacgacaacaagttaaccgatgcatcctccatgacgacacctgtaggagtaggggaaggggctcccaaacgactcgacgtcgccttcgtcttcccaaactacatttagcgtagctttcgcctgggatccccaaatcccgatcttctagggacgagggaggaggcccaggtcgtgttcctctcaggtgcaagatctctggcaatgaacgggtcggggggtccggttgagtttgaaaaggtctggcccctaaggtacgcacaccagataatagagatagcagttcactttccgaactgaatactttaaacttcagtcaggcatgcatgctttccgtacctcagagaattccaaactagttttgaacttggacactttagcatggaacgatcaaatagtcgtcagtccagtctcttgaaacgttgaaacgtttaaacgtggatacgttacaggaatcccatgcatgcatgcaagcttgcattgcatattccaggttgcgtcatcatcagatgaatatatccgtcaaaaacgttttcttcgtcggtccgcgcgcgcggcaatgtcctggaagttagcatcagctctgtcaggcttgacggtggatcg

SEQ ID NO: 43455 - DNA, 367 bp, Zea Mays
gactagttttgatttcccaaatgattaccttaattacccctacgacatagtatataaaaggccactatagttgcatgcatgcatgcatgcaatggtccaccgccttttggtacgtaccaatacaaatttggcccacatgtacaacagtgtatgcatgctaaaagggcttcatcatggtttttgctcactcatcttgtagcacgctcccggttagctagcttgacagcggcctcccaacactctcgagagcattccaccccgaggtgtcactgtgctagctaattaatggcccgagagctagggcgaccaaaatctggcacacacagttggcgctgaaagaaacctggcctcaataatgggcatcagt

SEQ ID NO: 43456 - DNA, 655 bp, Zea Mays
catggagcaaaattttggatttattcgctgcacggagatacaaaagccactatttgctgcacaacagttgagaggacctgctagtacatggtgggcaaattttgcagcaatccaaccagctagacaccaaatcacctgggaggaatttaagatagcatttcgcgagcactatgttccagaaggagtgctacttatgaaacaagaagaattcatccggttaaagtaaggggagatactgccgtgcagtatttcaacaaattcaaccatctatcccagtatgccatcgatcaggtgaatacagatccgaagaaaaggaattgttttatgaggggacttaatgacaggcttcaacggaaaatggcaatatgtctggatctcacctacagtagggctgttagtacagcactggcagtggaagccaaaaatgccgggcatggaaaatcaaaggggtttggaggtgaaaggtcaaatcaagggcctgagaagagaaccaggttgttgatccgaccttttaattagaatcgttcttcgcctcttccaccttcctatcccttcaagcagcttgttttcattcatcccaatacttcccctgctcctaccaatcagccgaatgcccctggtactcgtttccctactctccctagtcttatactgg

SEQ ID NO: 43457 - DNA, 1044 bp, Zea Mays
ccccttcaacgagcaagaaaagggcgatgtacaacgcagcgtgtggacttcacggaagaatgaggagcgtttgctatccgtacaagaatgaggagcacaacccaacccagatccttggatcggagtcaacaaggaaggcccgaacagaagtgcatggagaagacgacgcctaattaaaactggagcttaaaactaaaagcgtggatcccgagatcatttcttcctctgtttcaggtacaaccatgaggtctcagcgctcgatgcataataagattagtctgaagaattcgagacgttgagtgagcgacgaccacagctagccaatcaacgatgcacttgacggagtgagctgatgcagctgctggtagtccgtcccggccgctttctttcaccacctgaagttgaagaacgtagtagtatgtgccaaaacctccgacgataaagcgctagctgcgcgtttctactttcgaggcctcttgaatacatcctcgatcggcgcagatgcaggccgctaactggtgaagcaagcacatgacacatgagactgagagaggcagctgggcctgggcctggaccatcccatattcccatgatcgattccgccgctcaagcagctacgaacgggtactcctgcagtcctagctgtagcgtgggcgcagccgcagccgcgcgtggcgaatcagaatcatgcacggctgcagccttcacagctctctgcatgcattgcacccggcagcaacgcaagatgcgatgccaattgcccacaggcctcaggaatgacgagcagagcagctagctagctagctaggcactagccaccaggcaggcaagccgtcaaagatctcatgagccgatcgaatcgaatcggatctccgtctcctggccgatgatgatgaatggggtggcgttctgttaacacagaccagagcaacaacacgagtcggctcgggcgtacgtgcacggacggcctgaacgacgaccgggacgacaacaggaacgagacagaaacggccacgcggcggcggaaagccaagcaagccccag

SEQ ID NO: 43458 - DNA, 773 bp, Zea Mays
gtccgactgaagtataccttcagatttagggaaaagtttgacgagccaaacgacgactagctgaattgtatcgaagctaccagtgatgagctacttggagcatactccaaggccgaagataatgctctgtccgcagcttttggaggtcggggcaagaaaagattatacagggtatttgatgctattggcttcgtataccctgattaccgctatccgctgctagggtatgagaaaaagaggaagattgccgcttaggtcaccccagctgagcctgtgccaaagagcaaaaaggtgaaggttccgacccaccggccgtgttatattgaaccgaccgtagtgcctgaatttggcgcagggtccacttcagcagccgaagcaacaccgactgctccgattacacagagcgctgaagaaccaactgtaatgtcgaagatgcatacatttgagccagtcaaagataaggttggtaaggctgaagagccaaaggttgaagaaataatcaaaatgccaaaaattctgagacctcggacagaggcaaaactgccgaaggcgcaaaaggcttctgtcgcgactcccaagaggaggaggatggccaacgtgctggatgctgtgctggagactacaaaggccttgagtcctgctcctgcaaagaaaattgctgaagctgccaaatcgcaagctgaagccgaagctgggcaagaagaagccaaagctacgcaagctcaagctgaagtcaaagctgggccttcagtgcccaccgagatggaccttat

SEQ ID NO: 43459 - DNA, 514 bp, Zea Mays
ctgctgccatgcaactagaatgtggaggagaagacccgacgtgaacatccatggaagtatgagaaggagaacccgctcggacaccctcgggggctgggtcatagctcgcgctgcccacccgagccggatcatcaccggcaacaccctcgggggctaggtaaacgcaagcgccatccttggggaccgagttctctgtagcagccacctctaaggctgaaggattttcagccacttccatgggaacagagcaatccagatcagcctcttgactcctaaaactgcgctccaaggtcgatgaggcacgagacgctgctcgggataactctaatccgacggcaggcacatcagcacaaatttccatcatcccaccatctgccggctccgacaacagatcttctgggaccatatctttgagagtctgatcaaaatttgccagagacaattattgcagaccaatgagagcagacaaagctagagaaggaacatcactactctccccgctagctatgtagtg

SEQ ID NO: 43460 - DNA, 501 bp, Zea Mays
gaagaacagaaccctaagtgggattggtggagctccaagaatatgcagcattgttctcccgtgtgggggaatagaaacctcagttggaggtcgaagcctccccaaggaagatttgagttcaaagaagacatgcaagtttcttcacctagagtgatgggggtctgacaggtaactccaatatggccttccctcctctgttgaatgattcagacttggggcgccaattgtttggccagaaatgcagtgaagaaggtcaccatgctagggattgttctaaatccctatggtacgagatttgcagaagagacccgtgtcatggccaaatgtgtttggcctaaacaaagcaagctgatgatgtcaatcatgggcatggcagtagatggtcttggattttatgtttctcagttctccaaaaatctagcaaaaaactaggaaaagtttcttaggtttggttaaagtccttaaagggatagtttctactgaagacaaaaaaagattttg

SEQ ID NO: 43461 - DNA, 405 bp, Zea Mays
tatctttacccagtcagaactgaacatgaggcagagaagatggcttgagctaattaaagattatgacttggaaatccattatcacccaggaaaacccaatgtggtggcagatgcattgagtcgcaaagcttcatgtcattgtcttacaataaggacccctgacatcaccctatgtcaagaaatggaaaagttgaacctgggtatgatacaacatggagccttgacacagttaaagcttgagttagttcttctacaaaaaaattattgatgcccaaagaaccaacaagggtatgaagtacattcatcagaatatggaagccggcaaagcaaattgttttaggaaagatgatcaaggaataatatggtttgatgatcgcatagttgtgcccaaagatgctgaagtct

SEQ ID NO: 43462 - DNA, 631 bp, Zea Mays
ctgaaatagataaatttacataacattatgcaagacaatatgatatcatatagtatgtgtcataataaatatgagccatttattacaacatacctgacaacatcactcgtggtacgtcacatcccatgcatgttttgaacgtattgaagacccactcgaatgtatcaactgtctcgtctcctagtaaagcaaacccaaatattatgcattgtaggtggtggttcgagccaacaaacatgcctaatggcttatcatacatattagtcttatgtgtagtatcaaaggtaactgcatcaccaaaatcaatgtactcggcttgctggctagcatgggaccaaaatatgcttaaaatctttccttctttgtccagttgaaagtctgaaaaaaattgtggattatctttcttgcataatgaaaaaaagataatagcttcgacacatcatttgcatttctttccctttgccatgtttttttcctgtcaaaaatgtaatgattatgcattacatctaatttaacacatttcaatttgtttcggtaatatataataccattattggcaatgcataatacaattacaggttactcatgtcctgcacggttattggaacgttttcaggaccaccatgcattt

SEQ ID NO: 43463 - DNA, 419 bp, Zea Mays
aaagagatagcacagtatgtggcctggtgtgacacctaccaacgaacgaaggtcgagcaccaaaagcctgcaggcccattgcaacccctcccagtgcctgaatggaagtgggaagaaataggcatggattttgtaaccggactaccccggacgcaaaaagggaatgactctatctgggtgataatagaccgtcttaccaaggtggcccattttatcccagtgaaaactacctttggaggagccacccttgcccgaatttatctcaaagagatagtcagactccatggcattccaagaaagatggtgtcagacagaggaacccagttcacctcaaattctggacaagccttcagaaagctatgggtaccaagctagacttcagcaccgcctatcacccttagacagatgggcagacagaa

SEQ ID NO: 43464 - DNA, 549 bp, Zea Mays
gagtccatgttgtttggtacaacatagttagtaattgttgtagcagtctattctttataatgcttgctaatatgctggcgcgttcaagcgtggctacaggaacgacggtacatatcgaatagtcgtcttgtgtagtctactacatatatcatggcaacactacacctacttaaccgcaatgtcacacgtcacatttaatatgctgcttgagagtcatatctaggccattagtaccacgagttagtctaaagtagagttgatgatacactacaagagaaaagcgtatcaacgaccagaaaatgacgaccacctgtaatatgtggttgttatgagtctcgacggtatagtgcaagctttgtccaacccagcagacgaccaaaaaaattgtcgtcgttagcgagctgacctctgtggtcgttaaacattgaatccagctttccccgcacacaaaactgattttggcgcgaatacgtgcctctccctgcgcacaaaactgattctggcccaaccacctgaggcccatccagctgcctgcctgcctctgaaacg

SEQ ID NO: 43465 - DNA, 692 bp, Zea Mays
gttcgggctgcctgaatgcataataccctatgtcatgtttgatgttgagaattgagtttgctggtggtgcacaaattatagatggattgcgggtggtgatggatgagatctactatcaatctaatggtggtgtggttgtgatgagagggatttcgagagagttttgtaggggtacccctaagccttatataactagttggggagatatccttttacagatcatgagagattatctagatctatctacatttgctattattgcccatcgactcattcggtggtcatttcccttcgtgctcgacatcaaatgatccgctatccggtcgcacgtagggcgcgttactcggaatctttttggctcctctgcgatatatgcgcatagataacgccttgatgtcgtgctcttcggaatccttcttgctgagcatattatcctcccgatagcacatgtttctcctgagggtcggcccaatagcacagatttacgacaacttattaggctctgttcaagtgacccatggggcgtatctgtgatgataacccatggtatatctatctccaacaagcccctgaggctcgagctaattttctaagggtaattggttcgagactccaagaatgggctaggttatttttctttgagggcatatttcttctttctctctcttttttgacgttctgatccagctgca

SEQ ID NO: 43466 - DNA, 530 bp, Zea Mays
tcactcaagatcattactttcgtgttgatatcttctatgcaactatagactctattacaacagaatttgatcatcgcttcaatgaggtatccacagaattgcttacttgctttgcttgccttgatccaagagagtcattttctaagtttgatgtgaataagcttgctcacctcacgaagatatatttggatgatttttctcttgatgatcgagaagcaataaaatatcaattagcaaccttcattattcatgtaagaagacttgaggagtttagagtttgtcatgactttgcaagcctagcaataaaaatggttgaacttaagaggcatatagtgtttccattggtttatcgcctaattgagttggcaatgctattactggtagcgaccgcatcagttgaaagagctttttcggccatcaagattattaaaaccgagttacggaacaagatatccgatggttggcttaatgatttaatggtggtgtatattgagagggagatattcaaaggaattgatcttgaatctatt

SEQ ID NO: 43467 - DNA, 451 bp, Zea Mays
ggaaggaggaagatagggtcggaggatgtgaaactaaaaaagagaggaagaagaggggggactgaaaccaaacgaacttacaaattccacaaagcccacctcatgatgcattggagggaaacctggggttgaaatacatatggaacgatgaccccattttcacccttatgaacttctatggccttcatgagccagcgagcgatcttcgcatcattgggaagcggagcgctcaacggactgacatctgacgaggcctcggcggtcatcttaaaaagcgacaaccgtttgtccatgagaggaggcaccccctgatggaggtaattctcaatcatgcccgctagcatgaccccgcgatcgcgaagaattgccacaatcgtaatggcctcgagtgtccttttctcttcttcctttgggacaccccacatccagctttgaggagtctcacagggtg

SEQ ID NO: 43468 - DNA, 766 bp, Zea Mays
tgcatgatgattacggattggagattagtggtttacggttcgtatgatttggttgaagtgcgaatatacgtgtaaatacgtatgtttataaaaatgttgtggtgtatgttgtgtctcggattgcgataataatgggctagccgacgtgtatgttatttagcggcctatgtcgttgctctaattagccgaattgttagacggctttggttaagctcgtgatcacgatgattggcttgttgttgtataaatgtgcatggttatggtcgcggatgaaagatagtagtgttcatgtgatgtctaagttaaaatgcaaattactatgtgaagagcgcatcgatatacacatatataccagatttgattattggggtgaatacgttgttgattgtgtatggtaattctagcgcacaaagtaacttgtataaaattagtaagtctacttgttgatcctaatttgattgatttaactctaacagatggtaaagtgtttgaatggttcaagtctctagaacgcggcaattcttgaagtaaataggagctgaattttattagttgttgttttcggctgcacgcactgttttcgtcgtgttgtttgtttaatgaaataaatcacgttttctgtataaaagctatatagaaaagttgtagataactttattatcctacttgtgtaaaaatttgacagccataagtctgatcgtttagaagttgtgcttttcacaaattcagtaactgaatctgtccaatttctgtacagatttcagag

SEQ ID NO: 43469 - DNA, 1597 bp, Zea Mays
cctagtgctaaaagctgtcttctcaatatcctcctcgcaaatcctcaactgatgctacccagagttcaagtcaattttagagaacacctgggcacccctcaactgttcaaagagaacatcaatacgaggtagcggatatttattcttgattgtcacttgatttaaagcacgataatccacacataacctcttgcttttatccttcttgtcaacaaacaataccgggaaagcccatggtgacctgctaggcctagtgaaacccttagccagcagatcatccaattgtcgcttcaattcaacctgctcctttggagccatccgacacggggccttatgaataggctgcgtacccgtaatcagctcgatttcaaaagccacatcgtgctccggtggaatgcctggtagctccgctggaaacacgttggcataatcacacaccacacggatgtcctgcacctgcaaggcagcctcactctccaccaccatggagaaaaagattctcgacttccttgaccgacgatccggaagtaattgggacaacaaggagagagtgaactttggagagcttcccaagaataccacctccctacccgacggcgtctgcaataaaactgtcttccaaaaacaggatataactgcgcgatactaagttaaccaatccatacccaagctaacatcaaatgaccccatggaaatcaccacgagattagctgaaaagacctcatcagcaagaatgatggaacaacccgggcagactcaacatctactaatggagccattaccagaactaaccacaattgggtgacccatcttctgcaccgaaagaccagcacgcgacacaaatttctccgaaataaatgaaaaactagcgccagagtcaaaaagagcatgggcatcaaacgaatcaactgagaccgtacatgtcaccacgtctccttgctctctgccatccgcagagggtagcacatatgctccagaaacactcatagaagaggaagctccctgagtgaaattaacagaagaaccccacagagtcgcaggatgaggcagacgtggagctccaaactgggatggtacaggagcggtcggtgctggagtgggcgcggccaggtactgagggaatcctcgcataggcacgaactgaggagtcctcggcatatagaactgctgctgaggggtggtacagaaaattgttgctcagcgcatgacaacatgttgacagtgcccagcgaagaggaagaagtcactggctcccatttaagtttctcattgggattcctcctacacaccacatccttgtgatcctggctgcagatagagcatctaccactccactaacactcggcacagcaatgcgcttcaccacaacagaaacacaccaaccacaacctaggcttaggaatagcccgatacctctgagtactccctcctaaagtacttgattcagagggtttgttatgataggggtggtggtgctggtgttgtgactttcccctcttgtgggctggacccccagtgttgcccctcctcgcgtcctggccacgaggctgatcaacacctgaagacttctgagattccatggtatattgatgttgca

SEQ ID NO: 43470 - DNA, 694 bp, Zea Mays
ttctgacttaagccaatcgctattcgagggtttgtttgcgtgtggatgaacacaaaagctttattgataatgagatctcgggtttacaatatgtagctcgccaactagagtttatggtatcactatgggtaaaatttcctgagatgctcaatattccacgagtttcctacttgagtttcgtccatctgggtaagccagtaggacctaggtcgagtgacttctgcaatgatgaaaggctcttcccatggcggtggtagtttgtgtcgtccttctcctaccaatacacggcgaagtaccaggtctcctactgcaagggatctgtgccacattgctttgtcatggtagcgccttagagtctgctgatacctggccgcttggatgatgacattcaaatgctcttcttctaagacgtcaacatcctccaatctggttgctttcgcttcctctatgctttcgaatgtcaacctgggtgcttcaaagatcagatcttctggcaacatagcttctgatccatataccatgaagaacggagtgttgccatgcaaggcccggctaggttgggttcgcagactccagactacatacggtagttccttgatccacttggctatgagcttttcactcttgtcgaataccttcttcctgagcgcatcaagtatcatctcgttgtctctttctacctacccattagttc

SEQ ID NO: 43471 - DNA, 746 bp, Zea Mays
gggaggcgagctgtatgtggcgacgcttcttctcggtggcttgctcgacgaggtggtgtgtgacactgtcacgatcctcgacgagcctagcaaggaaggacataagctggttgggccgagggaggcggcggcgatgatcacggtgcaagggcagtcgtgatggcggttgcagccagcgtcgacttctccggctttgaggaagatcatgattgtggtcgtgggcgtgtgtggcggcgacaacaatgatctagatgatggaggcggtggcgacaaactcggtgatcgtggtataggggcaatctcgttgcaggggaggtgattgcgatgctggggtctggtctgttttcgttggtgatcacggtgtcgggtgatgatgatagatgcggggcctagtctcgttggcgccggtgatcacggtgtggaagatcgtcgcttttggggtccttccttgctgaaggtcatcaaaacacctgtacttcggtataacaaagtgtgttttaggtgaataacaaaggctagacgaagctggcagcttcggtgtggagaaaagcttcgtccaaaaacgtgttgaagccatcatcatacggtatggagaaaggcttcgagcgcaagctgacgtaggaaaaggagtccatgacttgtgcaacaagaaagaaagggaaaagatagccatatccctacatcatttgtaaacaataagtgtaaagctttaagggggcatgattgtaattttgtacaaatacggt

SEQ ID NO: 43472 - DNA, 976 bp, Zea Mays
cactgccttagctgaagtcagagaagcgatgagtttgtactctatccatttagtgaatttgtcgatggcaaccagcacgtgagtgtatcctccttgagcttccttgaatggtccaatcatgtccagtccctagcacgcaaatggccatgttacgggtatggtctgcagttgctgtgctggtaaatgctactgctttgataagtattggcaagcttcacacctctggactagctcgattgcatcactctttgctgttggcagtagaaaccagacctgaagaccttcccaactagagtcctagatgctgcgtgtatcccgcattgtccggcgtggatctcatctagtagttgcttcccggtagccgaaagaatgcactttatgaggactcctgtcacgccccttctgtacagtgcttccccaatgagagtgtagtgggttgactgccttgcgatgctttctgccacagttttgtcatccggctcttcttcattctttatatatctgatgattggctccctctagtcatctgaatctgactctggctggctaagaacattgcactcttctgcctgatctaaggaaatactcgggcgtggcacttcttggacgaaaaccccaggtgggacctgggtccgactggatcccagtttcgacaacgcatcttctgccgcgttgcgatatctctctacatgatgaaattccagcccttcgaatttgtcctccatcttttggatggctgtgcaatacttgcccatagagtcattcgagcaatcccattcttcatttatctgacttatgaccactagtgaatctccgtataccatcagtctcttaatgcccagtgatatggcaatgttcagtccatgaatcaaagcttcatactctgccgcattattggacgctgagaataacaactgaagagcatatttaagttattcacctccaggcgcgatgaagaggattcctgcgcctgccc

SEQ ID NO: 43473 - DNA, 446 bp, Zea Mays
tgatttttgtctcttttgtaggaaacaagctggacctagtgtgggagcatggagaaggttggcacaagtctcggtgtgcatcatcaagcgggtgtgagacaattggagtactttcacatgcattcatacaaagctccgaaataaactaagctataggaaattgcattagttgttggttgttaactacaacctcagctcagtctttgcatccaacgagcatctgctatgcctaggcgtagtgagtttgattctgccttagccctcatagatatatgatacatcattacacagatataatgaagccattagagattggatggaaagatgaagatccaatgcacctccaacattggatgaagactcgctttacagtgacaattatgttcctattacaatatttacatcacttgcaagcgaacagggtgacatagaggatgtcaacaaat

SEQ ID NO: 43474 - DNA, 531 bp, Zea Mays
cccaggggtataaaagtgattcaacttagtgtttggggatattttatgacttttctcacaaaccctaaagtttttctcaacttgggttaaattttacccctttaaccactatttagggttaagtccttaaaccagggtcctatttgtaaaactttaaaacaatacaacttgtttgaaattcttgcctagtaaatgcactctaggtgtgtcaaacatatgcaatgccaatgctatgatgtcatgctcaagttttagttatagtaacaccaggggtgttacatccttccccccataaaagaatctcgtcccgagattaaaagtcctagggtaaataatggaaaaggaaatgtgtcacatgtttatttccttatttctggtacaaggcaggggtgatgtgggggttacttctttattacaacagctatacaggctttacaattttacatgaggctaggaagcctggaaaattcttatctaagaagtcttgggtttcccatgtagcctcatcttccgaatgctggttccactata

SEQ ID NO: 43475 - DNA, 583 bp, Zea Mays
gaattttatgccctggtgcaccgttaagtagagcttgagaagaagcagatgcaagaagagtgctaataatatcacaccaaatttgcccaaatcccaaatgcttcataacttcgaggagaaatgaccacgagatagaatcgaacgctttggtgatatccaatttaagaaggatccttgcacaatttttctggtggagcataatggatgtctgctgaacaagcataaaattgtcaaggatggatctgcccttaataaaagcactttgattctgagataccatattgtcaaggtgactgccaatctatttgttagaagcttagtgatgagcttagcaaaggagtggaccaagcttataggtcgaaaatccttgacccggcaggcatcgtccttcttgggcaaaagaaggatgtaggctgagtttagtagatctaaattcatccattttctgttccaaacagctgtagcagcgaccataatatcctcttttatgatctgccagcacgacttatagaatttcccagtaaatccatctcggccgggagccttatttgaaggaagagataggactgttttccagacttcg

SEQ ID NO: 43476 - DNA, 419 bp, Zea Mays
caacaacgacctagctgagttcaaaatgcgatatctcctagaatataccaccgaatcgaacacataagtactctatggaaagatatgacaaagccctacatgattttcatagtgattacagctaattaccaccgaaaaaatcctagaaactacctacactactgttgtccgctcgccaccaaaatcaggacaacactactaccaattcgcctaggtgaacggataaccaaatgtaattgcagcacaaatacaaaataaacacaagatcaccttgagttcttccttcacccctttcttcttcctcccaccaattctccaattagaggcttgcaccaactcgatggagatccaagggacgagaggtggctgcagcttggggaggaggaaatggtgaggcggttagggtttggtgtgatggg

SEQ ID NO: 43477 - DNA, 1063 bp, Zea Mays
cagacaataggtaaaacttaggaagttgcactactatgacaatctctatcaggggcatgtacaaccctaagcctttgtatcagttttccaggtataagaaacaactaaaagactgcataatacaaccctgagccccctagatcatcaatgtagttaatagacaatatgtatagagagtcgtgtagagacagtttcttcacaaagagcctgtctcttgtaccttttcaggtaactgcctaaagaccctccaagagaccccatattaaatgaggttgtacatgttaataatctggtaaagcgcagcttacagtgacctctctcaaatgttgtcttgggcatgctaatagtcgtatgcaaggcgggggtcaggttttggctggtcctcactgcaggtgggcataattgacctcttgtaatatgtagttatggacttcacaccttcgcatgcacatctctaattcaactcgacaatggaacaccacgttttccactgccaacatgtcgatgtcattgaggagtcgatcatggatgtagctagtcctgaggtatgcatcggcatggttattgcttgtcatgggggtgtgcctcgtggtatactttccattggcaccatgatcacatcggaaccatggaagttcacttctcatgtattgaccatgtatcactcctgaagaggggtgagatcgtcttcaatatttccttctctcaagacgtagatgaccatgtagtctacatactcatctaggtcgatggaattagtcactctctcattcagattgaatgttataggatctgtgttgtatgctgtgagctcgacatttgttggtgtcttgtcacccgcgtctccattgttaaaactatagatgcttgccattaggacaatttaatatggatcattgttgcatggtccctctaggaactccttggctgtgagagagttgagatctggggtggtcatcatagattaaaggagccaattgaggtaagtggttgcagcatctttgactctgattggaaaatcgacgataatgcaatagggtagtggtgttggatccatatcttc

SEQ ID NO: 43478 - DNA, 718 bp, Zea Mays
ctgggttacaccgcaacattcagcgtattgttgagtttcagtcgtaccaaagtcttattgatttggtacatcaagccaccaaagctgaatgccagctgcaacaagatgctaagaacaccaagcccttgtcatatggtgcacgaaccatgattggagtaagcaaatcaatctcaaggtttactgctgcatcctcagcgacaaaaggttcaactggaggcttgcgatccaatattcaaggcaattctagtggaaagaacggtgctgctccaaacacgagttataaaccagcagcatccacttcaacatcagtaggttcaacagccaagagtagtagtatttagtgcttcaagtgtggaggtcgtggtcatgtcataaaggagtgtccaaataatcgtgtgatccttgtgaatgatgacggagaatatacatcagctagtgaagaggaagctgaagcaagaaatgtagaagacactcataaaattgaggaacacactggatgtgaatttgagcatggtactactcttgtggttacacaaatattgagtgttctaatgaaagaagctgaaatgggacagcgacataatcttttataaacgcgagcaaaagtgaaagacaaagtagtaaaggtgatcattgatggagggagctgacataatcttgcaagtcgtgagatggttgaaaagcttggtttgaagttgcagcgacaccctcatccata

SEQ ID NO: 43479 - DNA, 1111 bp, Zea Mays
cccatttccctttcaaagtcgaagcacattacgttcttcgtgtaaggtagctcccagataaacgagatgtgcgtccaattgtgtcctttaccatacccttgaaaccaacctcctacgcccggttttaggtcacaatgttgtctcatgatattttcaccagttcgtcgcttcggtggcccatctctaaccctcttgccttttcaaaatgactttgtatcctttctaaaaggatgattatagggaaggaggcgttgctgaacatcaaaaaatgtttccttcttaccatgttctaacctatatgcttgtgagtcacccatacatttcggacaacgcagtatgccgtggacacaccaaccagaaaaaatgccatatgctagcagatcatgaattgaccatagatatgttgcacgtagagtaaaacgacatttcagatgactatcatatgcctcaaccccctgccacaacatttttagttcttcgatcaatggttccataaatacattgatttttgttataggatccttcagacctggaacaatcatttggtgggttgatatcaataattagtttcacaaaatcattataacagttgttggagaaggtgtactttgacttcatcgccatgagacgtgttaccacctgcagtatgctcacattggttccttcatgcactttagcctctgaggcttcaagaagcttgtagaactctttcacatcctttggaaaagcttgattattctgtagttctaggtactcattcctaatatcatccaacatctcttccattcgatctacatcctggtccccatccgactcaatagtatggtccacctctccatgctcatgccataccagatagttcggcataaagccatgtttgaaaacatgatacgagagctccacctttttcaaccgaaccaagttccgacattttattcacgggcacctcgctaaacgagcatcactagcaaatgcgagtaccatgaattcatctgcaactctcacccatgcatcagagtgcccatgagtgacactgtcgaatccatcgtacatcgcccttcttcgatcgtcactcatattcaaagctaaagaaacgacacatatttaacaa

SEQ ID NO: 43480 - DNA, 330 bp, Zea Mays
ttcttgaaaacaaagtcgacaacaacaacttcagcagtcaagcctctatccttcaatacacatatctctgcaagcaacatcctggactcagcaagctctgaatctgtggggatctctatccagctaggcgttggaacgtcgggctatctccctgatcgagtaggaagagacttgttatgattttccatagtaaaccactcgaagtgccatcccttaatgctgtctttcaaaggaatgtcgagatactcagccttcctgcctcggcgaagttccaagctagcacctccaacaagctgatgttgccctccagccatcccaggatgacaatgg

SEQ ID NO: 43481 - DNA, 830 bp, Zea Mays
actccaacttttgtacaacacttgtgtctgatgatttaaacaaagttatactcctttagtagctcttcaattttgatgtattgaccctaggcaaattctttatggattaagagatataagactccaaagtcagccttgttcaactattttcagacttagtcacatgagcacaagagtggcctttttgcaattaggcccaaatctcatggcttcttttgcaaatcttcaaatatgtgaaccatatgacttaaggtaccctaattccatggtttttgcacttaggtccaaaagtgggcaaaatttgcatataaccccctagggtttctatttggggttttctagggatctatttagggtttttggtacttctagggtttggatgccacttaagtccattaatggtgacattttatgatcattactaatgagttttgaagttttctcttatttaggctttgtttactcttttaagcccagtttagggttaagtactctaccttagggttttacccatgacatgtcatatcaatacaacttgtttgaaagttttgtctagtgaatgcactctaggtgtgactaacacatgatatgccaatgcttatgatgatatgctaaaattttagtggtagtaacaccaggggtgttacatccttccccccataaaagaatctcgtcccgagattaaaagtctagggcaagtaatggaaaaggaaacgtgtcatatttttatttccttatttttggtacaaggcaggggtggtatggagtttattcctctattacaacgagtgtacatatctcacaatttacatgaagctagaaagcctggg

SEQ ID NO: 43482 - DNA, 681 bp, Zea Mays
ccaaggcgaggtacttggtctgatgtaacccttctctaacagctcatctatctgcttcttgagttccaccaattctggcccagacacttgataggctcttttagaaatgggggcggtgccagggataagctctatggaaaattcgacttttctctcgggtggcatgcctgttagttcctcgggaaacacatctggaaagtccgacacaaccctgatagcctcgagcgggttggcctccttgctatcaaccgaaatctggtgacaatctcctttcgctgttttaggcatccttagctcagccactacctcctctccgggcggggacttcaatgttatggtcctcttgtcacagctaacattcgcttcatatttcattaaccaattcatccttaggatgacatctaccccaggggtgtctattactattaggttgctggggaaccctatcccccttatttccacccttacatttgagcatatcttatctgcttgcactttaccaccgaccgaattaaccctcatgggcggcatcattgactctactgagatgttatgcatttctacccatgttgtagtgacaaatgaatgagttgcaccagtatcaaatagcacttttgctggatgagattcgactaagaacatacctactgccacatctggtgcatcctggatcgcttcggc

SEQ ID NO: 43483 - DNA, 305 bp, Zea Mays
ccatgcttaaatgtgtcaccgagaccgaaggcgtccaaatcctgcgcgaagtccacagcgggacttgcggctctcacgcagggcctagggccctagctgcaaaggtgatccgtcaaggcttctactggcccgccatgatctgcgtcgcaaatcgggtcacaaggtcatgagaaggctgccagaagttttctccacgctcgggaagcccttcgcaattcacaaagctaatcgcccacacgtggccccttcagcgctggggcctggacattgtcgggccactacccacggcccaagggaacctcaag

SEQ ID NO: 43484 - DNA, 283 bp, Zea Mays
cgtctcgacgcagtgcgtgtcaggcggtgaccctcgggaggacagcatggcatctggctcgcgtcagtgcccatcggtgcagggcacaccaggccgggacaaacgaccgttgttgtgtgatcctacccgcgacagtgcctcggtcgctgcccttgagacgacacatgttggtcttgctactggtcacaacactcagtcggctgcaggcctcgaggggggtgttaatgccatgttcggcgccatgaacatcacgggcagcgacgctgcgcaggatgggcgtctt

SEQ ID NO: 43485 - DNA, 909 bp, Zea Mays
ggcccaggtgttgtctaatcccgcggcaccaccacctcgacgtgaggtgcacgcttccacctcccctgcgcctgccgtagtggattctcgcatcaccccggcgcgcgactacccctttcacctcagctggcttggctgtccaggcaggccaactgccactttcacctcggttttgttttaaacacttgcataattcgaccgcgtcactgttgtcagctagctgttcgttttttcttccgtgctctctggagttgtcgattgctgtcgcaaggccctgatcatgccatgccacgcgaaactagaaaactactatgatgctggttggaggatgagaggaacagcgaaaggacaagggtggttgcttttggcaatagctgctgctgggaaaatagtagtagcgtagtagtggttggtcaaacgtgaccctcgggccagaggtcaagcaggtgtacgtctaaacaaggtcaatcaacttcagccaagttgtccgaatgaactttcgtagtagttacagagagagacaaatggaacgacgggaagtttgtgcacaagcacgagcaaattaaaccagccagaggcggatcgaatcctaactctcccatcgtctgcctctgactgactgactgactgactactagaacaacaaggatgtccaaaggtcaaaagcgtgctcctgcagagagagacaacccgaggtgggcgatccaatcctcgacggctgaaaatatccagcgaatcgcttcgaacactgacagcacaaacaaaagcgctacactgtgttctttccctgtgcatgcatgcggagcggtggcttggctcgtcgtcaacgtcaagcatgaggagaaaaccaccagtccagagccgagcgcaacaaagcagacacctgcagctagcttcctccgaatccga

SEQ ID NO: 43486 - DNA, 542 bp, Zea Mays
ggcagcaccttcgcaagtgacgagggaggtgtaagacaccaagcccatcgcgattgatgggagtgtctctagctcctctgcagccagccaaagaagcgagtccccaactccccctagatctatcgaagggggatgtctcaccacccagatcacgataagcttcaacatagagcgtgtgagctcgacccacaccgccccgcgtggcagcctccacattatcgtgataggtcttcgtgtttttcgcctccactccagcgcagcagagcgctcccgagcggcctagacctctgtctgtgacttgaccatagactccttctgctcgcccagctggtgactgaggcccttgttctccttctcaagggtgccaaccttgtccagaagattgcgactcttatttacggtagcagacttgtcctggatagattcagtcttctgagcccgaagatgctcaaccttgtcctccagtcatttcttttcagaacgcagctgtgaggtcgcgaggtccacaagcgccctagacaccacttgttcagtaaaagcag

SEQ ID NO: 43487 - DNA, 354 bp, Zea Mays
aaaattttcaggtgtagcctattcacccccccctctaggctactttcacacatcacaatccttgacgagatgcatcacagtatatatcgaatcctttttgcagatctgacatgaccaatattgggggtgacatcaacatcaactttagctgattgaaactatcttggcagacctgagtccacttaaattccttccccttctctaacaacaaggttatcgacttcactattttggaggatccctcgatgaagtgccgataatatcccacgagtcccaagaaactccagattttagtaatcgactcaggtatcttccatcccattatttcttttagtttagccagatctactgcaa

SEQ ID NO: 43488 - DNA, 1073 bp, Zea Mays
caaaagattcattgttccgtattcctaccacaatgatattgcgcgcattgctaggaatttcatcatcaagatgaacctcttcatgaggcaaatcaccaccagggtgaattaatcggaggagagttatcacagaccatgtgaatctgcaatcagaacatatgctttgactaaggctgatggatcatattcgtaggcatccccgagaatagatcaaatgccaataagtcaaatgtggatatgatattaatcccgggtatatccacatctacatcaggtagaagcattcaaaccaatatggttaatcctcaacgatttctggcaaactccatatacataggagtacacaccgaacgacaggttcagtttggcttttgtgcatttaatagaatattgaggcattacactatatgggcattcctctccctaatgccgagatgttattaaagcatacatataaaatctccaaccacaatcatccagttgtggccaatgtatgctattgtggtgatttatttgggaaatcttacgcacattacagatcggggttttatgcagtgagctttggacttagattaatgtagtggcatgaatactacatatttttttcttcaacatgaagggttagtctcaacatccagcgagacacgcaacaacaagttgcttcatggttacaattctgcaaacttattgttattactaccaaatgcatagtcaatcattaagatttaaactgatatgcgcaacactattttattcataagggtccttcaggggctcatgcataccattcgtttggagccattagttgacttcagatcaacaagtaaaatgaccatcagggtctaatgctcacaaagacattcactggttgcattgtgcttttaagcacataggaaaaatgtgtgtgtttatattggtagtgaagtgcacggcatcaggccaatgctgccaagcaaagatttttatatgcagagatgtatagtccagctcgtttttatcactgcccatggtttacccaattactcatactgctctgaaattgggtatcgatttatgcaacatttttaggtata

SEQ ID NO: 43489 - DNA, 533 bp, Zea Mays
acctatattgcctctctagattgcaaatggatccaaaacaaagtcctaggcatgagtgttttaagctctcttatcgggtcattgataaatgcaatcaaggctgaaccaagaatcgcaaaatgaaagtcgcgagcttgaagtttggacatttatgggcactattgaaataatgtgtggtgaatgcgatggttcaagtggtctagtgagagacccatcccacatatgtgttgaataaacacagttccgctatgtaatatatctggcaaatggcatgaattataatatgcagttaataggattctgaagatccgtcatgagatcctaggaggactcatatctttgaattataaatatgcaacatataaatctcgtaccgaataatacattcctgacgaatgagcactctcatatatagagagaaatctcctagatgagattatagttccttgatagaacctttccagaagaaataaagtctgtgttaaacaccaaagtttggtaatccctataaagggataaagacccatacagac

SEQ ID NO: 43490 - DNA, 683 bp, Zea Mays
ccttgtctcaaccaaggtcccctctttcacggaataaagtttctacctcgcccgagcccatctaagataggaggacagccccgaacacagcctcagtcaaaggtcacgggaaccgtggagacatgtgcatttaatgtgaatacctaccccacgtgacgtttgagtcaaatagggaccaatggatcgtggtcccatacgcattcaccaactacgatgacgcatgaccgggaataacggccactccccccccacgccgactattgtgctcaaacaactccggatgtgatgtgcgcacgtcagagcatggtctcaccttcgggagggaacttcacctcgcctgaagtcagcctcggctcgaagaaactctgcctcgcctgagctcagcttcggccgaccgcctcgacaacaactcctcccgaatcctataggaggccactctgaaaactatgctaaccctccctgtacgattgcatgccccatggaaggctcgaccaaggcctcaggaggaacctctgtctcgcccgtgccgagcctcgacctagataacatcgaccaaaggatgccaccaactcctccatgaaggctactgacgacgggatggctacagaacagatgtcaagtctcctttatgccatacagaaagaattactatgcacttttcaccatacttatcactatttcaa

SEQ ID NO: 43491 - DNA, 280 bp, Zea Mays
atcttttgtggtgatttggtgtcttagaggttttaggctgaacttttagaaatcaaaccaagattgtttaagtgcaaatatatttgttggctcccattcatcccttaattggtgttggagttggttagggatctatccaccttggttgtttcttgatctgagatgggacattgaacctggtgttggcaagacactattctttgatgggtcaaattactcataccagaagatctgcttgtcgatatatttggagcattgactcatggatctaggaaatttt

SEQ ID NO: 43492 - DNA, 625 bp, Zea Mays
gacaaccacataattcggtgtctctcgctagctttacaagtatgtgaattgggtgagaatgataatgaaaacttaaaacacaagaactgaatgcaacaaggtcaaaagaaacactatgcaaagacgctactatttctctagctcaactttgatgaatttgatgcttggtaggagttgggatgcttagagttgttgcaagtattgaatgtgagttttgtgtagctcttgtgtcttcagtgtactggttggggtgtatttatagctccaacaactcatatatgcgttggagtaaatgggcatttactacacagtcgggtggcacactggacccttgtcaaattgttgtagcaggtaaccatttcaacgggtagttcccacagtgactgctccgctgacgcaccagaccctatcacgtcagtgccacgtcggagatagtcgttggagtctgaaactgtcgttggataatgctcggtcccgtgcgctccccatcggtccgtgtagccatcttccaaagtgtccattctacagcctacaccctctccacgtacacgatacgatgctcaccagaccgatccgacgcatcaactgataaagtgcaagtctcggtcttgtcttcatacaccgg

SEQ ID NO: 43493 - DNA, 591 bp, Zea Mays
agttgcttcaagtgactattgccttttgttgctttctctgtttacgcgcttgatagttcacccatatgcctaatgctcccggtgttttttagaggtaaccgccgagtaatgcttgatactgccggtgttttagaggtaaccgcctagtaatgcctgatactgccggcgttttagaggtaactgccgagtaatgcctgatactaccggaggtaacaaccgagtaatgcctgatactgtcggtgttttagaggtaactgccgagtaatgactgatactgccggcgttttagaggtaaccgccgagtgatgcctggaactttggtttcccgagtagtgacctagtactttagaaatagtacccgactcgggaaaccccatttatactcgcgccgacatgcttttttgattcctaagccctaacttcactttttcccttcgatccactcctctgcttccttgagatttcgatcatgctcgttccattggaaaaattgcgatggcgccaaagcggaagaggcagagcatcgttgctgcaatcatcccacctatcgaccccaacagccagctgccattcgctggtaatcatatgtct

SEQ ID NO: 43494 - DNA, 433 bp, Zea Mays
gaaccatatagatcgaagcttggtcgcggggactatgggtgggacggtccaggctatggcaccgccgtggggataaagtgcggccaccggggtatacagtgataaggataggagagagaatgagctgggtgctgatcgggcaccgtccgatccggatcgtgcggatgcggttagatcgcgcgcaacgcttcagccgggattcacgcgggccgtagatttgtgatcgggcgggtgtaggttgatccagcctaataaaatcgtggccgttggtgtctgatctggcggtccatgtggcataccgcttcatgatctaatcctgaccgattgatctaatctgatcggctcagatgagcttataccccttcgccgtgccacttttgcgtaagagcccctgattttcacagtaatcaacccgccgtcccgtatagctggc

SEQ ID NO: 43495 - DNA, 317 bp, Zea Mays
tgcatatatcaatatatacagttgtagcaggactgcaatacaatagtacactagttgtagcacactgattcagtgacggacccaagatttcttgactaggtatgcaaggcaagatcaagagatgtcctagggacattgtcgtagtggcctagtgggttgggaggatagctgcggaagacagaaactaatgggtctgataagatcgtggaggaagttttgaagagtagagatagtgttgcatacatacatatattatatgctatttatattttgcaaaacagcgtggaggaagttttgaagagtagacagagtgttgc

SEQ ID NO: 43496 - DNA, 1282 bp, Zea Mays
gtcctcgtcatcaagcactgtccacatatgagaaggaatgtttagctatattgatggcagtcgagcactggagatcctaccttattaattgtgagttcatcatccgaactgaccacagaagcctaatccatttggatgaccaacgtcttaccactccttggcaacaaaaagctctgaccaagttgctgggcctgcgttacaaaatcagctataaatagggacacaccaacagagttgccgatgctctatctcgacttcctcatgaccaactttgttctgtcactactgtacaacctacttggctgtcagaagttgctgattcctatgctaattattcagatactgcaccaatcctgaaattattggtagctcagactctttccaatcactacagcctgcacaatggattaattatgtacaaggatagagtggtgctccctgcacaatctgaatttccccagaaaatattctcaaatttccacgacacaccaattggaggtcattctggattcttggtaagctaccaaaagattaagaggttatttagctggactggtatgaaacaaatgatcaaaacttggtgcagtcagtgtccagtctgtcagcaagctaaagttgaaagagtaaaataccccggacttctccaacctctgccaatacctgatggtgcttggaaaatgatcacaatgaactttattgagggtctaccaatgtctgatcactcaaattgcattatggtagtggttgacaaattttctaaatatagtcactttgttccgctttgtcacccttttacagcattgggagtggctcatcacttcatggacaacatttttaaacttcatggattcccttcaactataattactgatcgtgatcggattttcaccagtgcattgtggaaagaaatgttcaaaattgcaggtgtggaattacgcttcacaacagcatatcatccccaatctgacagtcaattgaaacgcgtcaatcaatgccttgaaacttaccttcgctgttttgctcaagcatgtcctactaagtggaagaaatggctttctctagctgagttttggtacaataccagctatcactcatctttgcaactcacaccttttgaagtcttgtatggctatcctcctagacacttgggagtggacttcagagcagcctgtgatgttccttctctgcaagtttggctcgacgaaaggaaagtagtagttcaattggtccagcagcagctagctcgtgcacaacttcgtcagaaaacacaagctgacaaaca

SEQ ID NO: 43497 - DNA, 533 bp, Zea Mays
ccagcatctacgacgtgtcgctcggtaagaacctgtcccactaatttgtctggagctctagagcatttagcacttaatcgcatgatgaatcgagcaccagaacgccgccgtgcggacagagcgccgcctcaggtcggagcaaaaaggtaggagaagatctcagcgccgttggatttagtgaacggtcccgattagagatggggagggaaatagctttagttcgttggatcctttttgggtgatcgtgatcaaaacgctgataccgattcggctcggggatgtttgggtcgttgatcttgaatcggagggccgcgggttgattccggattcggatgatgcccgatctaatcctgcccatcgattctagatcggttggccgatactcgcccgtaccccttcaacctgtgcattttgcagaagagcacctgctctttctatgaatcaacccgccgtccaactcagggatttttgagtctgcgtaaatctttcaagttagtccctggtctcttaagaaataatgtgcccagttcaga

SEQ ID NO: 43498 - DNA, 320 bp, Zea Mays
cattcttgcgatgcttctttaatttggggaatttctgttgaatacaacatatatttagtacgaaggcatgttttggaatgatactacattgtcaaaagagagagaataacttacacgtgcacacttctcccacaaatttggttcagctgatatcatccccatagtctcattccatcctacaccactctcattctttgcgttgcttatggccttgtagcttgctttcaaatctttctccttgtcttgaagttgttgctttgtaaaatgtgctgaggggaatttctcattgaacttacaagtgatgcttctccaaccatctg

SEQ ID NO: 43499 - DNA, 1151 bp, Zea Mays
tttggtagtgcaataagcacccaaaacagaggacgcatatcacatcacatcatgattcatgggaatctcatcaccaaggttggaaaatccaatccctaatccccatgaaagttattcaacggaagaaagtaagaaaacgcggtagtaggatggttgctcgcatgctcctgccttggattgtgccaacggatccgctacacttggtgtcctataagatgacgctgaggttggtgcccctcaacacggcggggttacggttaacatagtcacaacacacacacaaatcgacctgatgagcgagcgtccgttatatacctggtactgcttggcctatacaagtagggccttggcgccatggccagcaagggctagtcacgagcacgcttaggcatcacctcatgcctgtcgggaatcttggcacgctacagcgacgcgaagctgctgctctcaatcttctccacctccaagaagccttcgatgatgcgcgataggccctggatcgtgaactcctcacatttgagcgacgggaccagcgacgtcggcaaggccatggcctccacatcacgacacatccatcgcgacaaatccctaagacatagtgtcagcgtcgtcttgttgtgtcagaggtagagcgccactgcagtcgcccacgccgaccacaacagccaggatcttgaccttcttcttctcattgtcctcgtctcctgctgccaatcgctccctattgttggagatgaggatcctagaagcgtccagcagcgtcgcgcaacctggcagaccacgagctcctcgcctctggtgacatagagcgcgcaggagctggagctgatgtcgcagggtcgtaaggaccgtgagctcctcaccttcgatgccatagagtacgctgaagccaaagatgatgtcgcagggccactcctcttacacgcgcaagcgccgtacatgatgcttgcagtggcctctaaagaaggagatgatgtcatggagctgccagagaagggacgattctcccctcgttgctgcttgcggtggcacgctgatggaggaagtgagcaggggaggttgtggactgcgaggtcctttggctcctgctcgctacgctcgactgctgcccgctcaactgctccttctcatctgaggctcgaccgagatag

SEQ ID NO: 43500 - DNA, 338 bp, Zea Mays
ggagattagatcgcgccagttagaattgtgcccattagatcgtgaatgcacggttgggatgagaagtcgcttactccttcgcggtattaaatccagcccgtcaattcgagatcaaatggatctggatgggttgcggtcaggcgctatccttgaccgtagatggtagatcgtagggtcggtaagggttaccgattcgtcatttaatctggaccgttgattgtaatccgtgtggccagattatgcgggataccccttcgccatgatagaatagcataagagcccctggaacctttataaattaacccacagtcctcggatcctgttcactgggtcttaga

SEQ ID NO: 43501 - DNA, 644 bp, Zea Mays
ggggtatcaacccccggaggaggatgcatgtaaacttcttcttgtagatcaccattgagaaaagcattcttgacatccatctgggagatagtccaagaagatgaggctacaactgcaattaaggttcgaacagtagtcatatgcgcaacaggagcaaaagtatcatcataatcaagtccttgagtctgttgaaagccacgagccacaagatgagctttataccgctcaatggaaccatctgattttgtcttaactttgaagacccatttacatgtgataggaacaatatgcgagggtaaaggaacgatatcccatgtatcagtgcattcaagagcagccaattcatcaatcatagctagctgccactcaagaatcccaaaagcttcctgatatgtagtgggttcaacaattgccacaccagccagtggaaaaccatagcgatctggaggttcaatggttccacggtcacgaagatggtatccctgattaaaaacatcattagactcattattgttagcacaagaatcaggtacaggatcagtatcaggaccagccgtagaaatagagcgggaacgacgaatgtaggtttggatgacaggtggtttggaagagtaagaagaagatgacgtggaagtgtaaggtgg

SEQ ID NO: 43502 - DNA, 418 bp, Zea Mays
cgtcggatgacctcagtaccatactctcagcagtgacccaaatacctggaaggattggacagtatgccataccggatgtatgtctacaacacgttgaaggatgacgtagggcccatgacgacgggacgaaccatgtttcgtacgaccgcgccgtgagactgatccgcgagacccacacacactatcacgaagacatgtagcagactcgctacagggacctgtatggcggatgaacaggacggagcgccataccaaaggtacgacaacgcacgaccctacagacgacgtcaggaggaccatgccacccagaggcagcaagccaagctccctcccagtagaatacgagatcatactgtaaagtcctcccttgagttataaaagggcagggcaaccttctttctacacacaagcacacaag

SEQ ID NO: 43503 - DNA, 700 bp, Zea Mays
aagggcgcagagtcctgatgctattgcctcgccatcggtggagaagatcaacagtccacctattatgactttgttgggccaacccaaagatacatgtgggccgcctgatggctttgatggatggtcttctggggctcttgccccagtttcgccccagcaccaagaatctggtgctgggctgctggaatgggccagctcaagttcgccccatcctgctgaacatccagcctggaggactgccaatccctgaagaaatccctctagaagtatattcaagaaagagactcaaaaacaagcagagtcagatgatgatcggggtttcgttgcagagacgcctaccctgcctccatcaacccccctggctaactcagaagctgggacagtagcagacctccaacctgatgaagaaagaagagatgaagcaggaagaaatgtgtttttcatgaagatcaccaagcaaacatcaagcttactgccttgtccaagaactgaaatgcaaacattacccccatcttctccacctgctgtttttgtggcaagacgaagtcgccgagttgcaggtgtaggattggaattcgatgtgcaggacttggggagtagaaccatcaagaaagtcatgaaatccttgcaggtaatttcagaaaatgagggcattagtcagtaggccttggaggaatatgccagattgtttaagcacccc

SEQ ID NO: 43504 - DNA, 810 bp, Zea Mays
ccagcgagccccaagaaactttgaatctcagagacactagaaggtctcttccactccaccacagccgtgatgttcttgggatcaaccgcaatgacctgctgattaatcacatgacccaggaaagacacttcggacagccaaaaggcacacttcttcaatttgccataaaactgattcttcctaagagcacccagaatgagacggagatgccgctcatgctctgcctcggactttgaataaatcagaatatcatccaggaacatgaccacaaagtcgtccaagaactcatgtaacatcctattcattgcttccataaaagcggcaggggcattagttaagctaaaagacatgactatgaactcgtaatgcccatacctggtgcaaaaggttgtcttctcaatatcctcctcacgaattctcaattgatgataactagagttcaaatcaattttggagaacacctgggcacccctcaactgttcaaagagaacctcaatatggggtagcggatatttattcttgattgtcacttgattcaaagcccgataatccacacataacctcttgcttttatccttcttctcaacaaacagtactggggaagcccaaggcgacctgctaggcctaatgaaacccttagccagtagatcattcaattgccgcttcaattcaacctgctcctttggagccatccgatacggggccttatgaataggctgcgtacccagaatcagtttgatttcgaaagctgcatcgcgatccggtggaaggcctggaagctctgctggaaatacgtcggcaaagtcacac

SEQ ID NO: 43505 - DNA, 300 bp, Zea Mays
gatggggttcattcacagtttactgatcttcgctctcatattcaaactagtgtgcatgatccaattatgagtcaaatgaacaacatgcaacaaagttttcaagacaatatgggtgctctgtccagtcaattcgagtctctgtctaccagtgacagcattcactcactggatgaaaggcagcagcagctacaaaatgacttcagtcagttcacctctatctttgacagcttcagctcccactattatagtatgtatccatgtcccccacctggtgcacagtgacgtccccttgtggaaatt

SEQ ID NO: 43506 - DNA, 372 bp, Zea Mays
cccggttccaacatcaggttgaaccatgtctttgaattgaataaattgccttatgatccctacccggatggggactccgctgatgctgatgattatcgaagcaaacaagtgaaaccccaggacgacgaaggcccctcaaaggagaaagctctggttccaaccatttgaaagaggaaattaggtatggggatgataagactaggccgagggccactgggtgttttgttgagtagttaatggaaacgtccgcgtttcctacagagctgatgtcttcgcccgagcttcagacacttcttcgcgcttgctgaaggttaccgatggtcgatggcctaggaatgatcctatacctcgggtcactagcgaagatttttt

SEQ ID NO: 43507 - DNA, 814 bp, Zea Mays
cttttttagtataattgcccaaaatttcgttgcacatagcctcaatcatttccagccactcttggcaaggctctttgaattgtttctcaaacttgaagcgatagggcagccgaacaagttcattctttttctatgttcccttcagctttgtcatactccattcactcaacgtcggaaataccccgttggctaggtattcttgcactagatctctagtgctgatctattcagccacaaccctaaattctgctacagcttgttggcagggtgaccccgacgtcatgcggcacaagggcctagtcagtctgaagcttaaactcagtgggctcaggacaattgtctttaacttctccctcttcttctcatcggccttgatatagaaccattcacttttccagccggttggccacttggtgcgatagctgagcaccagggccttcgtatccttgcgatacgcgatgttgtaatagccaaaattctcatgtagcctgccttatctagcctttgtttggtaatgtagctcatgcacccggtagaaagcttcagcattcgggtccattccttggcttcaaagggcccagatgaagacgctgagcctaacgatagcgttagggttcagctgatgaaggtagatttcataattatccaaaacttccccaatcatctcgttcaagggaaaccgcaattccgctctgaaaaagctcttgaaaaccactacttcatcatttttgggctctggagtggtttcttcttcagcaaagcgaataagtttcttcttagcttctccgaagtaacccacactagtacagataag

SEQ ID NO: 43508 - DNA, 723 bp, Zea Mays
cagccgggaggcggcattcaccggcgagtttatctgctcagccgtagggtagaggggaaagcacgggggggggtgttcaccggagtggagcccagctcaccggcggtgaagattccccttaccccgcgacgttatccgtctgccagagcacgaatctgcacgccgttgacgcgaatcgcggcgggggatcgtcggcggtgaagtacactgaatccccccccgatagcactgtaccatggcgatgatgttcaggcactctgacagatcattttgaagcttggttttctctcaattttgaatgacaacttaacacaagctctgcatcaaagttgtaatgctacataccagctacaactttgttatagcaatccaaggtagattcccactggatcttagtctaaatggctctcaatcttggatcaaagtcactgtccatctgaagttcagtctatatcagcctgacagtccaactttgggcaagattatcttcaaatttctcacaagaacatggcttgcactcttaagcaaacttgttatccattaataggtctacaagtttgatgtggtgacctagggcaaaaaccctatattttgaaagatacagggctccaaagttgagtcctcaacactgaatttcagacttagaatagaacctaattgaggtccattttgcatttaagtccaaaatccaatatttggcttacaagtccacacatttgtgaa

SEQ ID NO: 43509 - DNA, 319 bp, Zea Mays
gagacacgcaacacaagttgcttcgtggttacaattctgcaaaacttattgttattattaccaaatgcacagtcaatcattaagatttagactaacatgcacaacactattttatctgtaaggcttattcaggggctcatgaataccattcgtcatttggagccattagttgagttcagatcaagtaaaatgaccatcagggtctaacgctcacaaagacattcactggttgcattgtgctttgaggcacataggaaaatgtgtttatattggttgtaaagtgcacgacatcaggccaatgctgccaagcaaagatttg

SEQ ID NO: 43510 - DNA, 669 bp, Zea Mays
cgcggtccttcccagtcctttccatttatccaacattcttgttgctccccacatcattcaaaatcttctctctgcccgttagttcactactgacaactcttgttccatggattttgactcgtttggtctttctgtgaaggatcttggcaccaggaccctcctcgctcggtgtgacagccccggaccgctctacacacttcgcctgcctgcttccactacaccgacctctgccccacatgttcttgccgcagccgcctcttctgtgacttggcatcgtcatctcggtcacatcggtcgtgatgtgatgtccaagctctccagcagcacctctggttcaggttgtaggggatcttttgagcacctctgtcatgcttgtcagttaagtcaccatgttaggcttcccttccccatctcctcttctagagcagcaggcatttttgatctgatacactgtgatgtatggacatcccctataatcagcattactggctataagtattatttactcattctcgatgacttctcgcattatctgtggacttttcctttacgtcaaaagtccgacacttatcccaccttgtctcacttctttgcttgggtctccacacagtttagtcgcaccatccggagcatccagtgcgacaacgggcgcgagttctataacaatgc

SEQ ID NO: 43511 - DNA, 725 bp, Zea Mays
ggaggatgtcacataggttgcatgatgttgatcaacttgagggtggactttgcctcccctatgctgattatcagtctctcgacattgggtccttagctaaagacatggtgtgttcaggtagacgcaacattcaatgatgtttgttgtccatggagcattaatgtattagcctccagcatcaccttataacgtttgaactcaagagcaagatttctctgctatgtacataatgttggccatggaagggttgtacactttgtgtcctttgatttctaggaagtcaaattcaagattacgcactatagagtttcctagattgtgtcggtgatggtggaggtgcggtgggggtcctcgggagtggaagaagagacagaagcgatgactggtgctgtagagggggtgaggaatggtgagtggtggccagcatagcaggatactaagggcatgtggaggggacagccatggcccgacccagccacatggagacggtcctattccatgggtcgttgaaggacgactatgagggactgccacatttaggagggtcgtctcttgtagggtcaccgcccccacgaccatccttgcggtgtcggcgaccacctctagagctggtggcctaacgagaggatttggaaggagtggaggcagaagggtgcgagggaggcccctccgacgacagagggcgagggggctggctgtcagaggatgcgccgtagagggccatg

SEQ ID NO: 43512 - DNA, 353 bp, Zea Mays
cagctagcacataaagcaaggatccaatggctgcagatttgtacttgcctcaactaataaagctatatatatgagagcgagagatagaagagacaaaacattcatgagtatggtcagacagatcgacttttagacactgcagaaattacgagagttaaaaaaatgcgcttggaggttgaaccaaaacaaaacaactttagtactctgcgtcaacaattaaattgttgtagtgtgaaaagatgtgttcatgtgtcagctagcactagagtcatagttacagccatactagaatgtggtgctctttctcttctcaaggtccccagcatgatcactatctgaaaaacccagaagat

SEQ ID NO: 43513 - DNA, 293 bp, Zea Mays
cttcgagcttttttcgcagcactactttgaaaggcttaaaataatgcaactgtagagcatggtccatggcaccttcggtttgcacaggaggaggagcgcctccatggacatttttctgtgggtggaactgtaaccacactataagtactaatttacattaccagtccaaatgtcctatgcagggccgtgtgatatgtagcccttaggcatacagtttcactgaatatctagtaaaacttctcggctagcataaacaagagagataagactgtctccagtaaagtgtgacaaat

SEQ ID NO: 43514 - DNA, 272 bp, Zea Mays
atcaaatccagagacccattcttgcaaaatacgtgaaaattgaaagcaggaacacaactgttttgctcttaaatactgaattactagttttagcaaatccaaaggcacctaagcagagataatgactggatcggggcacactattcacaacaccaaaggttgaagacatctggcagcacattcacttctcaacattttcctatacctaaatctaagttaacatatcaagagcttatgcgagtgcctataaattatgcgcatccacattgaga

SEQ ID NO: 43515 - DNA, 1246 bp, Zea Mays
aagttaacataacatgttggtttcttaaatccaaaacttgtgacaataggagattgaatgattcctaatatgtctgcccacgcagttaagtcattcttcatataaaaccattcttttgcccacttgcttcgataggctaaggccaggaacattaaactccttcggtatgtgaagttataacaaccaaaattattattgaggcctcttgttgccttcgtctggaaatgcagttcattaatatgactgaaggcttcgcagaaagcttcagtgtcaaattctattctttggcttcgaacaacccagacaaaaaatcctaaacgcactatagcgtttggggtaagctgatagagatagatgttaaacctcttcagcactgcaactaccgtattatgcaaaggaaacctaagaccagccttcaagaagcaatgaaacatgacaacttcgtcctctctcagactcggtactaactcatcacctcctaaccacacccagtcaatgtagccaaagaggttaagtacctcgatgtgcccttctttgattttggatttctcgaagtccacatggctgggcttcgtagggaggataaccacatcgtcctcttcaaaatccatttccacgctgtcttcagattggttcaacgagccaactttgacctagggaatagtagctcccattgccagaatagtttcctcagcctgtgcctctggcacgcccttcgaaggtgtcagcgacatcccgagcgacacactaagtgaaaacgcaagtgatctctgaaactggctaaggctggtttgggagcaaacagacagtgtccgaaactagcttcgaaggcagagcgagcactagcagcagtgagcacaagcaacaaaagtcgtaccctataacgctgggcactgcccccttttatacgcacgatcatctcactttaattgtttcacccaatgaccattgggtcccactgtgtgtcatctgatttcacaacgagcttcgggaaggtgtttttcagaccttcggcacaaggcctcccacttacaaattattgtgatctaagctcgttatgaaataacgaactcatcccgcaaggggctactgttggggccctatattgctgaaggtcctttgttttattatgacacataattgacttaagggtacaaggaaaggttttgccgaagatcacttgaatcccaaagattatttgactaacatctggcttcgacgattaacaagtgcatttcaggaatgt

SEQ ID NO: 43516 - DNA, 485 bp, Zea Mays
gttggacatggacatggacttagggggaggtattgatcagttgaattagggggaggtattgatcagttgacaagtggatcaaccacaagtgaaattagtatcaagagctcaatagaaggggatcaaaattcttgaacaatataagctcatgaattcatgtttgatgcatttgttttgtgcattacatttgcttgactgcattgcatttgtcttaaattactacatagttgtatacaagtgttttctagaactaagacttggttgatgattggtgtaactagttagtatatatatactagtcttagtgtagctattggtaactagaaccatgtttaaaatgttgatctcatatggtagtcttaggatggtaatgacatgtgagatatatatgcaacaaaggtatatgtcaatcttgtattggttagcatcacttatcagcgataacactaccacaaattttatatttacatgtgtgaaaatttgaa

SEQ ID NO: 43517 - DNA, 476 bp, Zea Mays
cgggctcataagagcggatggtcagcgggtcgcggccgtagaccacgcggaatggcgtctcgtggagcgatgattggtaggcggtgttgtaggtgtactcggcccacggcagccagcggagccactgtcgtggacggtcgccggtgaagcagcggaggtacatgacgataacacggttggcggcctccgtctgtccatccgtttgtgggtgaaatgccgacgacatgaagagcttggtgccggtgagtcgcatgagctcggtccagaacacggacgtgaacaccgggtcgcggtccgagacgatggactgcggaacgccatgcaggcggacgatgtcggcgaagaaagcttgtgcgacggtttgggcggtgtagggatgtgccaacggaatgaagtggcagtacttgctgaagcggtcgacgacggagaggatgaccgtctttccctgcactcgtggcagcgcctcaatgaagtcg

SEQ ID NO: 43518 - DNA, 593 bp, Zea Mays
ctaatactgacaagtaaaggggccaacctataaaactctttagactcagtcatctactaggacggaccgctggttgaatcactataaacagaagggctcatttgttcttgcgtctgaaggggtaccgtggtcccacggccatccgatctagaatgaggcgcccaaattagatcaacccccatcccgaatcggtattcaataggactcgcccgatcgtgatcgaactgtcctggtgcactctggttgaattgttacgctaggcgaaatcacagccgtaggatccaggatcaacagcaccgatctaacaagacctaacgggttcgccgaactaatctctgtcgctggtgcaagatcggacggatgcgcccccgtcttcttcgcccggtcgtagagcacggaagcgtcaccgatccccgcgacggagaacacaacggcgacggctaaccgacccctggacgacctattactaaattcaacgatcgtatacaataacagataggtagagaactcgaagcaggcaacataccgaggatttgggccgcacaaaccctggtccacagtacaggatggccccgcggcggagcggatgtccg

SEQ ID NO: 43519 - DNA, 768 bp, Zea Mays
ccggggggcaggcgcaggcgcaggcaggtaaccaggcgcgggtccctgttctgcgcatcgtagacggtccggtgcatagacacagacggttcgggacatcatcagactgtccggatcatttaagcgtacggtccagcaacgcccaggaaccgcgacgaccacgtaccttcaaaccatgatgaccaaaaataggtacatggaaaactaacacagtcaaggcagctggttcattggtcaaatctggctcgacctttgatcaattattgtctaaatatgtgaaaagaaggcctgcccaaatgatcggccaccaaagcaacctcgctcacccactcaggagcaacagcaggtaagactgattagcccacctcaccaatcggaaaggacgggaggtcataatgttcaattagacctaacgtgcctgcatggacacctccacccccatatccacctgtgccatatcaatatacatacataccaccgccatatgtcccgaatcaaatatggagcaagccaccatatccatttaggatgccacattactccgcttgggggacaccccaaacatctgtattcgataggttggcacctccagtactagaccgattgagtgtccatcaaaccggtcaccaggcacaggcccaacaagattgctggaccactcggacgcaaaggctgacgaatccggtagggggcatatatctacagtcgccaagaggacgacaaaagggggcatcatcaaaataggtacatcatatgttgtcatacagg

SEQ ID NO: 43520 - DNA, 607 bp, Zea Mays
cataaccatacccgcgaatatcgaattccaccatacccatatccaatggataattatccatgattatttacccatacctgtacccactgccatccctactcctaagccctactctgctctacccccatacactattgtgctgccaccgctgttcgtcgtggacaaagctcttcggagattctccgaccccgccgaggccacaatagagtttcccaaagtgctctcttacttccctgcacctcctttgccccaatctcgtgtcgttgtggtcgttcgttcatcattagagttcactagtttagcttccgcaaggttgacgatgaacatctttcggtctggcccttgagtttttctcattttatgcgcaatttattttatgaaatagcccagcatcagagttcgctagcgccgttgtcgtaaggttgacaatgaacccgcagtcttcttgcatcatagccctagtatttttgaataactaagctatcagccctgttttcttagttcctaaccccagtaatctatattttattgcaaatgggttgttgtataggtattttcagtatcaaatgtgtattttaagtccaaacgaaacaacttttgttttgtt

SEQ ID NO: 43521 - DNA, 621 bp, Zea Mays
cttcaatgttatgcaggttgacttggtgcatactcagttcaaaagagctaaggaacgatcggattcatgtgacgatgatctttttaatgacctgatgtctctctataattcaagcagcagtgcgagtgttgacgcagatattcttcgaaggttatctgagaagttgcagcttatcacgatatatgacctaaatcatgaatctctgaccttgcatgagatggctagtggcggtgatcctggtggcattgtggtgctttattattaattagttgggtaaatggtgtccattcctgaatattgcagtatcgaagaataagaaacaaaaaaccactctctaaagtaccaccacgttcgaatccatcatgtattttgcaaggatcaaacacatttctcacacgccaacactcttacaccattttcatatcggtcagatgtacaaaccagcaatgaaaggaagctaagagtccctcaaatcaagacatggcatcaagtcatcctgctactacacgcgagaaaatagacaacaaggtatgcttcccagggatgaaccacaaagtttttttggtcagacaattaaatatatgacgcaacaccatttcagattttcaggaagccctatga

SEQ ID NO: 43522 - DNA, 891 bp, Zea Mays
ccacgttctgcccaaaatcctctctcgttctacgccgcgcagggagcagtgtttaaaatagcgggctaacccatttatccccggccttctccagcggctacaaaaggatatatcgggatatatctgcagctaaatgttttagcggttttcactagacagtacacagtagacacttagacagatcctcccatgatcccaattcccagacctcacactagccactgattgcaacaagcaaagcagccccaaaatacatttatctcacaactagccgctgattccacaaaaatccaagtcattgatctcacaactcacattctcacctacaatttaaaatgcacctcgaacaaaaacagctagccgctgattgcaacaaacaaagcagcccaaaatacatttaccattcacaaatgtaaacaactagcaaaacattcaccagaaaataatatgcacattcagtcagtcattcagcagaatgtaactgaagcagagttcacctatgtagtatgtacaaaaaaaaagaattacaaagtatagtaactgaagcagagtttacaatttacacttgaagcggagattataatcagctagcagatattgacaaatgaaaagtagcttcatcacaaatgtaaactagcttagttcaaaaatgaataatggcttcaaattcagatgtagtgacggaatctgaataaacatatgcagtgacagaattttcacaggctgttgtacatagtaatcaggctgttctcgttaagagtttcattgtgttatttgcaataataatcagatcaacactgcagattgaagcttaaaattcagatgtagtgacggaatctgaataaacatatgcagtgacagaattttcacaggctgttgtacatagtaatc

SEQ ID NO: 43523 - DNA, 611 bp, Zea Mays
cataggattaaatggtctataaactggttctgtaggtccactatgttctttgttgtgtttaaagtcggttatcgacctcaacgtgctatcccttgttgatatgtgattcgtatattttctaatgtcaacaataaaccatagtagcgtgagtaaccaattataccaaagaaaagtattgaacttgaaagcaatgatatgatgctatctcaagaacgctgaaaggacgacctgcatcatatcaatttgaagggaccaggccatcaggacacaagggatcaacatgaggaagaacactctatagataccgtcggttgtatcactcgtgtggatgcaaaaatacaatgaaccgtgctcacatccaacacagaaatgacgacacaagaagaaggagatggtagtgtaggtagcgctcgatgcacactggttataggcttcggaggcatcatgaaattgagattgaccatcatagcatcttttacttctcctctactagtcacattttgcgtacaattggtgttgtcctcagacatctgtagttaggtaggacgcagacggtaccttcgcttgtggattggtgatgtcattaagaaatcacacgttttgaaagtttg

SEQ ID NO: 43524 - DNA, 333 bp, Zea Mays
cttggagtaagctccaagcaactcatcgctggtagcttcaatatacttcaaccaatcgtcgtttggctcatcaaacttctccctaaatctaaaggtatattttagtcggaccagaccaccatcactagaatcagtggtggtctccttcggcatttcccagctttccacaagcggccataccctaaaggctatatgttcttgaattaaatctcttgtgccaatgaaggagcaaacagtgctgaaagccctctggcacgcttcgacagcgtcatcaatttctaccttcggccttttgaggccgaagcgggaccagatggggcgttggatgatttc

SEQ ID NO: 43525 - DNA, 519 bp, Zea Mays
tttgacaacggactggacaggtgcgtcgtctgcagggtggccctggcgccgcctaccagcggagtggacaggacgcgttaaatgctgagagggcacatcgcctgtcagcatggtgggcaggcggcgcgtcttctccgcaataaatgcagagaccgcgtgacattagaggccttacgtcaggcttcgcccgctggcttatgtcacgggccacaagccacgtggcagcagcgggtctccacctaagcagggagcgcaagcgcacaggataaggcctggacacgtgtcagcaccggacccttgctcatgccggggtcccccctgtcccgggaccttgctgtggtccggaccttactcggagggacctggggctcatccgagggacctggcatgccttcttgggagtcccgggccgtaatcgggggtccgggttgtgcgtacaggggtccggtgttcctctgtggaggtccggtcccaatgatacatcctggggtgtatcatcttttctcgccacgtggtgcc

SEQ ID NO: 43526 - DNA, 342 bp, Zea Mays
ctcgatcacatctatctccatttatcaagttactcatgaaagtttcaccaagttcggaattattcgatctcaagaacagccaaatttggagcctgttaaaactttttgtttcttgaagcaaacgcaaattcgaaagtcaatctcgtctcgcaactcccgtctagactcatttattcggactctcgatagttgttacgttatccaatcggtgtccgaatccgctttctctatattcggtctatgtccaaatacatagtccgaatccgcattctccagcggaatctctgttgtgccaatctctaattaattcttatgcaaatcaacttcttatctctatatcat

SEQ ID NO: 43527 - DNA, 360 bp, Zea Mays
ttttaaattaaaatgatttgtttagccttatatagactgaaaatcaattattaaagaggcaaaactataaccaaaatgcttaataaaatattcagtggacttataaccaccagagccccactacaaaaatacagagcacctcagcccaacttttaagtaaggaaaataaatacaaagtgataataaggcattttttcaataaatcatgaacaacccctattaatgtaataatgggtaacaaaaaattagctaagtccatgatgaaataaactaccagagaaaaatgcaaacccatgaaaaggaagcaaacccatacctattgaccatgatttaagggaaaggccacttaattcaaataat

SEQ ID NO: 43528 - DNA, 609 bp, Zea Mays
gcgagccctggcgtgctccacccaagcaggccacgcaccagattaagcgcttcctcagactgaaagcggtcaggatgaccaagcgaagccatggcatgtgcggggcgcgggcgtggaacagaggagcacgaaggcaaaggggcgcagctgattgggagagaatgcgaaaaggtaactgctgcacgcggggtgaatcctttttcaaggaaacctgaatccttgttcagggaaacccttccgtgcacccctgaatcgccgcaggaaatcccgttcaacggacacctaggacccaggcagcccagtctgtgacacgggggcctaggtccacaagtcatacagtttgtgtgccggatttcgggtgaggaaagagcgaaccgccgcacgcgatagcgtgcctccttagggccgctgcagaagacaaaaggtaatctttaaaaccaatgcagcgacaacgaggcgccccacgcatggcccaacaaaaccacgaggcatggggccgtgggtcagtgagccgcggaaacagatatgacagttgacgtgaccgaaggtggattgacagtgggcgcgtcagcagacgtgctaaaacagcgcgtcaatcaccaatcaggc

SEQ ID NO: 43529 - DNA, 285 bp, Zea Mays
gaaatgttgcataaatcgatacccaatttcagagcaatatgagtaattgggtaaaccatgggcagtgataaaaatgagccggactatacatctctgcatataaaaatctttgcttggcagcattggcctgatgctgtgcactttactaccaatataaacacacgcatttttcctatgtgcttaaaagcataatgcaaccagtaaatgtcgttgtgagcgctagaccctgatggtcattttacttattgatctgaagtcaactattggctccaaacgacgaatggt

SEQ ID NO: 43530 - DNA, 531 bp, Zea Mays
gtaggttcttggttcacactttaactcttctaaatataaggaacttattgtttcttcacttcgcattgaatgctaatcaagcgatcttcatcatcgtacttataactggttggtcttctggattattgtttgggtcttgcttcaccgtcttcttctttagttggtctagacgcttcttgggcacattggcgaataatatgtccttagttcttgcaatagtagtaagcacctcttgctttgagcaccttgtgagccaactttgtttgactggcgacagataatggctaattgggtctttccatcttaaacagttgagcctaatttgattctcttatttgggtataggaaggaaagagaggatgaaaaggttgagcaaagacaggatatagagagcagataaaacccaactatctaaggttttacatagctaactgatgccattgtggacaaaagtcacacaatacaccaacaattatttcagagaagcaaatcaaacaagaacacaaaggacaatgaactcaagcataccag

SEQ ID NO: 43531 - DNA, 521 bp, Zea Mays
gtgaaatcgaagcattttatgaagttctaactggcagggggacttttgtgcctgtgtaggtgcttgaggggctgtgtcactgctcgaaaaagctggctgtgaacatgcgaaggctgtaattcagccagaattctcagtttcagcaaattacattaaagaaccttcagctgaatctaccacccttggtgggaaattttattctgaagtgtggttgaacggaggcagagagatagcagacaaagctatcaggcaaagtgaagaaaatctcatcttgcttcagagaaagcaagaaaagctgaagaagccgcagaacgcaaaaggcgtataggtgtgtttgtcatattttagcttcgtatcttacagaaacttatattttggtgcaactgaactctctcctcccctgtagccatacgatcctgacaccgatccagccctaaaggatacctttgacgaattcaagatcgtgaacgcatcaatagatgaagctgttgaacaacttctaaatgaagctgcagaaaaag

SEQ ID NO: 43532 - DNA, 1448 bp, Zea Mays
gttgatgagcagccagttgaacccgctgattttcggggcatccaatggcttccagtttcctcttgatcgtgcgtagctagtcatctgcatcgaggggattgctggaccccgcgaacgtgggaggcttgagtctcaaaatttctcccatcctgtcctgtggtcttccaccacctaggcactggttttccagacttctagtgaggacttcgatgagtcgggtctgattggctagaacttgggccaagtctaggggtagttccggaggtgcggggaggtgggtctcactcccttctccgccagcttctcctttagctcttaggggaaaacctgctccaatcccggaggcggtaggcgtggttttatccgaagccatctgccaggggagaagagttactactatgtacatgccaatttttttaatcagatactttattcattacatcagttcattacagcatacaactaccaaaagctcattacacgcgagtgctatcgagggtactcccgaactccttctctaaagtgtccccaaattccttgagaaggtcatcaaggctggctaaggacatttcctcggtgtcggacgagtttcttatcctggtaggaggtagggctggaggggcttcttccttctgctcagtctgacatccttgccttttggtcttcttgcagatttttcttgcgggggcgagcttcttcagtttcttgtcgtaatccatcttcagagtgcggtaggcctcacgggtattggtttcctcgacttctgctatctcgaggctttcttgaagggacgccttttcccttgtaagttccctgactttttgctccaggctttcaacccgggagtttaggtgagtgcagtgggaggcaaggtcatcatattggttatcaagggtgtgaaggtatccagccatgtagacgatggtggggtcatcctcaatagggtctcctcctgacagggcctgaagtcttttcctccaggtaggtgtatttttgttgctgggtgggaagtagcgaagggggtttcaaagatcaccttgttgtagctctggcatagttgttggagggctttctgggcaacattttggcaagtatctgggaagcattcctcaatagtgacttggaaagaaggatggttcggatagtttcggctttctcccaggtagactgccatagagcatttttccatgccgttctccagatactccttccagacatattctggcttcttgcggattcccatgcgaagcgcataactacgcaacaggtgtgggaacccttccacctctgagcagtaggatgtcctaatgaccagagagtcttccatctggaataggaaaagaagggtctgttaatattggggaagaggagagaagacttttcttggggtaagaggtattttcttttaaggcaagttttagggtcagggctgtgacctacggccagtc

SEQ ID NO: 43533 - DNA, 793 bp, Zea Mays
cggttcttcttcattttttatatacctgatgataggttctctctagtcattggggtccgactctggttggctcaaggtgttgcactcttccacctgattcgagaggatgcttggttgtgatatttcttggacgaatatcccaggtggagcctgggcctgactagatcccagcttcgacaacgcgtctgctgctgtgttgcggtctctttccacgtgatggaactctaatccttcgaatttgtcctctagtttttgcacagctacgcagtactttcccatggagttagtcgagcattcctagtctttgtttgtctggcttatgaccactagcgaatcttcatataccatcaatttcttgatgccgagtgatatggcgatgcataacccgtggatcaatgcttcatactctgctgcattatttgatgctggaaatagtagctggagtgcatacttgagttgctcacctctaggagtaataaagagaatccctgcacccgctccttgtagcttcaacgagccatcaaagtacattctccacacctcggtaacctctaggttgtctaggacctggtgctcggtccactctgatacgaactcgaccaccacctgagtctttattgccgtgcagggccggaactctatgtcgtgagctcccagcttgcacgcccacttggctatccttccaatagcttccttgttgtggagaatgtcccctattggaaatcatgtgactactatgactttgtggtcgtcaaagtagtgatggagcttgcgagcggttaggagtaccacg

SEQ ID NO: 43534 - DNA, 1051 bp, Zea Mays
attttttaaggagctcagggtgttctacgctaattttatgactttatttgaattgttttctattgaatccggatggtgggttgaatcagtaaaagcttagggtctcttatgaaaaatctaccgtctgaaggggtatcgcgtattcctagccgttggattcactatctgtggtcgagattagatcgaatacttaatgaactggtaagctacgtgaacctcacgatctgagatctaaggcttgtagtgctccatgtcaaccttttcatcccagctacccgatcagagatgagtggtcacgattaaagcaacaaaggggtgtctggttgcctaatcctcaccgcatatcttccaatcaatggccatgctctaactatgtctccctaacgatgcccaatggtggcggattgccagccacgacggcactccaccgtagtgcgtgccaccggtgacctagagcccggattccctagtctaatcgatgttatatgaagagtaggatgaggcgaacgcgatggaagggttcttactcactaaccaaacgacgacgatgcggaccacgatgcagtgtggccctgcggcgtagcttggcctccgacaagaaattgttgtcgacttgctcgatctcgcacccatatttcctctacacatctcccacatgctctagctagtattccgtgtgaccctgtcaccgaggccggatcgacgacccaggcgagaatcgactgcggcggctctccccgacgtgaattcgcgtggcgatgacggtgactcagttcagctgactcagttcgatgggggtgatggagaaaagtggcctaggtacttatacctagagaggaggccaaataacgaaggctacccatgagatccatggaggaggccgttcacgcaagcgcgagagccggataggaaaaagggataagatgtgtccgaattgtggggcccatatgcctacaacacagattgatgaaggcaatggctgacgcacgagcacatgcatgactggagagaggctgtcgcgcgggtcctacatgtcagtgacccaattgcg

SEQ ID NO: 43535 - DNA, 305 bp, Zea Mays
gatgctgatcccaatgggtgtacccaacccgctgctgatcccaatgtgggtgctccatctgttgctgatcccaatgggggtgttgcttctgttgctgatcccaatgggggtgctgtttgtgttgccaatgtggattatgaggaggaggaaaatgaagttcctttgactcggaaaaacagtcggcagttcatcgctagtggtgaaagtagtggagttccctctcctgctttgtctgctctcattggtctgcaagaattgtctctggccaactttgatcagactcttgaggatatggttccagaggg

SEQ ID NO: 43536 - DNA, 1259 bp, Zea Mays
ggcgactttacaccgaggaccctagtcatccaaataacctgtaaagagtccttagcactattgctctgtgtctctaaccttcgcagttaggcccctacatttctatttcttcgcagcgctaggtccacgacggtggacggcgatgagcgcgctatccggtgagcctgtaccgttcggaatacgcagaggctaagcttcttacttggttgacaccaaatactacccttggcggccttaatccctcaactaatttcacgaatccgagtcggaatcactctatccacaacgactgcaagaaccgaggacgactcgaggtgttcttggcaatctagcatggtatagttcaattggctgggccgataagcatccatatcacaccaaggtgctgaaacgagagcaaggagggtatgaacggacctggaaacggcggtccacgacacgacggctcacggcgacgcagagaaccgaattgggagaagaaagaaattagggcgctatggtggctaatcggaggaaggggcgggtgctctggcttcgtggcaacctaacggagctagctgcaccatcaatttatagtgtccgagagcagtggtggctaattttgagaagttgtgctggcggccggagagaggagaagtgcacaggcgcgggtgatcgtggctttcaccgtggcaaggcctccggcgatggatggacctacatcaacggtttactgcgacatgttacagctactaggcacgtggcgcacagtcgataagcggccaacgccggcgagggccatctcggccggtcacaggtgaagtgggtacggtgaacccactagtgatcgggtccaagcctatccggtgtcaagatttttactccgctgcgattatctcctcaccagtgagcacgaatcgcggcaccggcgcatatcacagtgcatgggtcaccggcggcgaggggtgatgcaccagaagatctttctcagtctactgtaccatcgaaaccgttcatcagagcgcctgacagagcaacttcagagatgtttttcataaatttttgtgtggcaactccctaatccgtctttaacaaagttaatctccaatataccagctccaattctactatagaaacttgggtcatttactcactcgattaagcttaaatcaacttcaaagtttctcaaaagtcactggtagcccagattcagtctcaagactatctaacagccagactttaggtccattttactccaaattttgtatgccacaaaggct

SEQ ID NO: 43537 - DNA, 646 bp, Zea Mays
gtccagagctgatctatgctatgcatgtggcggcgcggcgcagcgcttttagtggatcggcgcgcaattgacggcatggagctcgatctatagaacgctgctcgatccaaacgggaggaacgggaacctacgaacgaacaccgaaatccacctagtaattcaacttaaacatgactgtactagtggattgggattgaatggctgctcttgggtgcagtgcaggtgtgatctgatctggtgccgtgagatcctgctcgtggatccttgatcggtgcttggttggagtctaaatacacatcctgcagcacgggcaagtcgcaaatggatagcaaagttggcacgggcgcttgccgagggaattctaagtgtcgatcttatctggtcggactttcctaggggagttctagtcatcttgctgtgagatctactctgatctgagagcaggaagcacggatctgttatcttgcatctccgatgcagaatctgtgcgtggttgaatctagatagtgaaacactacttgcccttgtgactgataaatcggtagtgatggtaaaagcctcatgaatctctgattgcattgcctaacagactcgagcaatttctgcagaagtattttagaaggaacagcaagagatttgctttgag

SEQ ID NO: 43538 - DNA, 523 bp, Zea Mays
tgtgttcaggaggggatgctagcgtggactcactccgaatggtgaaccacctgagattcgagtagagggttcaaacatagagttatactagttcaggcttttgccttagttcagtgtagtgctgattgtaatattgcttgaggactatgttacatctggtgcatgtgtgagaagagggaaggggacctgcccttttatagctcaaggataggaccttatagaggagactttttcctactggtaagagtgtgatctgttgcccccggttgacgtagtgcctctgatgtcgtatgtagggttgtgcgtagtcgtactcccgatgtggtgtaccgtctgtccgtcatacgggtccctatagcgagtctgatgttgatgtcctcgtagtggcacttggtgggtctcacggggtagtatcatggtatggttgtacatggcgcagtctcgcctttcgtcatgaaccccatgccaccctctagcatgtgtaggcatacacctagtatggtgtattgtcccatccttactg

SEQ ID NO: 43539 - DNA, 713 bp, Zea Mays
tggatgaataggaaatacatggccgcgctcataagaggaggcaaggacgaacacctcgtcgtcccacgaggccgaggcaccaccctcttcctgaaggcgccaccccaagacttcatggggagagaaaccatttcttctctaggttcttaggttggctacgggtcaaggagcaggcgggggaagtaatccatgggatcggcaaggagcgcaagcgaagaggaggaaagaacggaggaatgcaacaaggtttcaagggaaaggaaagggacaatgcatatgtgtgagattgtggtaagcgaaactaaacatagtcgacttccccctctttcttataacttgagaagtatgggacccaggcaacaaggtgggcccacgcatcatcgctctaaaaggatccaccgtttggagggacgatcttcggaaaccagtggattattgtgcattttgcaggaaacagacatatcaggcagagcaccaaagagagcatgagatgggaagcgataatgggcaggatgtttcctgcctatgcatgccacgcgcgcacgatgcaacaacaaggctatttcgcgtcccgtcagatcacccacgtagagcgacgtaatgatgaccccatgtattaccgtgctagcgagggcgccacaccaatcaggtaaaaaacaaaacacgcccgacttaacacgcaaagtgaggggtggaccgagcgaactcccaac

SEQ ID NO: 43540 - DNA, 589 bp, Zea Mays
gccaggatatcacatgaattactatacccactagtttccactccaatgtgggtcaccatatccatagtcttatgctctggtcgaggctttcttccattgtggtttaggaacttatttgcccaatgatcagtactactgcacacgaagtagccttcactcttcattttcttcttcttgaaagcagcggtaggattgggcttggtattcttttccttgccttttctgttgctatgaattgagatctttgcaccatgttcgcacttgcccaacctttagtagtcttaaatgtttgtccttagcccaatctttatcctcaacatcaagaggggtaatcagattagaaaccaacaactttgtcctcttgtgtgttaaaagttgtggaaaatccctgcttgaataaggcaatttagcaatgatgccaccaaccacaaacttgtcgggtaggttgatctttagctgctcaagctccttttgtcatgcattgtatcttatgagcctactcaactacaaactttccatcaattatcttgtagtcataataatgctccttgatgtacagttcaactcaacatctgtgcttccgtattcg

SEQ ID NO: 43541 - DNA, 535 bp, Zea Mays
atcctttaagttcttttttaccattgttcgcagcagcattgacaatgtacgattcaccacttcagtttgtccatcagtttgggggtggcatgtggtggagaacaaaagtttagtcccaagttttgcccacactgttttccaaaaatagctcatgaacttcacatcacggtcagatacgatggtcttgggcattccatgtagtctcaagatttctctgaaaaacaaattggcaacatgtgaagcatcgtcgctcgtgttgcatggaataaaatgagccatttttgaaaatccatcaaccacaacaaaaatagaatctctctttttttgagtcctaggcagccctaaaacaaaatccatgcttatgtcttcccaaggaattttaggagcaggtaaaggagtatataaaccatcagggttcagttttgacttagctttgtgacgggtgacacaacgctccacaaatctgatgacgtctctcctcatcttgggccaatagaaattatcactaagcatgtcataagtcttcttttgtcca

SEQ ID NO: 43542 - DNA, 553 bp, Zea Mays
gctgcttaacctggttccataccataagcctacaaccttccaccaccccagaacagttgacccaatacctcagactgagtacttaggggtcccctcattcaaactcaagggatggtcccaaactaggatcgacaagtctcagttgtattatttgaaggattgaatacgtcagggtaaggatcccaatggtgcgttgctaagcaccgatccttggccataatagggattgacccctggtctgatcgtagcctcaagcctccgaggttaccaatttcctagggggcagctgagggaaacacttgtctttacaacaggaagcgaggtccgggcgccacttacctaaaaccctatgcatgatccaaattatgttgccttcatgaaacctagattatgcttccaccttgtcacccggtttcagaacctccccttgtaatggataaggatcgggtcacgaggggctaggtcaaagggaaaggaccacgttctcgggggtggtctgaaggcaagtagccacttagcctagttctgtactgcaagcctggctccgtaccgt

SEQ ID NO: 43543 - DNA, 384 bp, Zea Mays
agtgcagtgttgttgctgtgtcgactcaatcacaacaaaaaacactaggaagaagcagaggaagtaaggagttgtgtcactgatatttccctagaacacgattgtcgtccttcatctgagtagatattcatttcggaggcctgctcagtgctgtaatggagtactcatctgacagttgagttgtgacacaaaagtattcgagagcaaatgataggatggtgtttatattggcgagtcaagagacctcaatagtcagggtgagtctagagaacaagagagctaaaagggcatgtgagatcaatggtcaggtaactctgtgtcatcaagatataacttcttaattaagttaaattgtgaaaatcctagtgttgcattcaaaaactc

SEQ ID NO: 43544 - DNA, 633 bp, Zea Mays
gggatttaagtgtaaacttttgtttttgtgataccgaacctcggttgctgcgcaggttccgacgtttgggcctgcgcaagcaaccgctgctggcattactgagtttgtggcggcctcaaccgtagtgcctgccgatgataatttatttggctctatatctgagtgttttgagtctgatggtgaatctgggagttcgttttcctggacggaggagtcctcggatgaaggcttggattattttgttgcgttagatgtggctacagcggagtcttcgccgcatgtggagggtgccggggatcttcctagtgcgagtactggttataggcggcgaagggtggtgttgaaacatagtgtgggtgagttttcgcgaagtggtaggtgccgtcgtatggggatggagcgtggccgtcttcgagtaaactggattggtaaacgagaattgttgtcctcgccgattggggcgagcataggtgagggggatctgtgaaatctttttgagggtgaggaattgaggataatgctgttcaattatagggagatgggtatcatcccgaaggttgagccgatgtaatatatgatgccctcgtcgtgtgtatgtaattgtaatttgtatggtaatgtggcctgttggcc

SEQ ID NO: 43545 - DNA, 509 bp, Zea Mays
cgggagagtagccaagtagctctgtagctggctagggaatgctagatcgggacaaatcccatttcaaccggaaagcaattaattaaccagcacaagtttcttgagataattagtttttcaccattgttccgaagtctcaacgaggagcggtaaaaaaaatcaaacagattataaatcggaacggagggagtaattcttatatatgcaaccaaaatcttggtaaactaaaacttagacttgacaagatcagaatttgtctagttagaaaaaaagaaatataagtgtacatttgggttcaactatatattgtagtaccttactacgctaagaccaatgtactccacagaatagcggcatcaggtgtcggcaacatacaagatctgcctcttgccatcacgcaacatgacacttgagcaatggaagctatatacctatccattccatcctatcgttcgatcgagatcgaatctcccgttgtcgttgcccgtgttcgatcagggctcatatcc

SEQ ID NO: 43546 - DNA, 1035 bp, Zea Mays
caaactggggaataacacattttggatgccattgtccatagaaaaataaatgtgaaattctgaaaaccaattggaaggaaacaagcacatatacaaattgaaaggcatggacagagatagctccagaaaactgtattcaccaaaagttaaatcaacagatacaattcaaataccccagctggccagcttaatatgcgatgaaaaccatactacaaaattacagaaacaaatgtaagagacaacttaaaagacgctaaccaacaataattacatgtaagcagatagcattagagcatcttttgtccatgaaactaacgctgacattaataactacattcagcagtctgattgcaaagacacatttggaataaaaggaataagaaacgtggactaatgcatcatccgttgacactgatcgttggagataacgtgaagcgagagtaaacggagccaaagaaacgggggaggaggttctgaaacagagacatacagaggatgcttcgtcgttccccttgaaccgagcaacatatgtttagcggccagcacaccattcttgccgaagaagcatgcacatcttgtcaagtccgctaaaagcctaacattcgttgacttcgaacgaaagaaaaactgctgtgattgttccactcgcaccgcacgctgcaaaaaacaaaaaaaaagttcaacaccacgtgggtacgtacatcttgacggttctggttgacccaactacctcctccgtgcgtgcgtgactgactggcgaccgccacggaggcagcgtctagggattccgaaggccaacaagtcagagcaaccaagcacacacgctgacatcttttttttgtatttattttgagaacgagaatggtaggcggacacctcggttggttatcctcgggcaaagatcagctcacagactccagctgggacgcaaatgacacatagtacctcgacgacatcaacttgcggatgatgattctgaatttctgatgaaccgcgtgagtgtctccaggcgtggtgtgcacaccaagcacgcac

SEQ ID NO: 43547 - DNA, 462 bp, Zea Mays
ctggagtagggtgcgaacccgaaccagtataaccctgtgtctcagatttctcgtcgagttccagtgattcaccattcagagcgagtccgcactagcacccctatcgaacacatatctcattacccctcggattccgaaaccatgacaagtttgctgcccgagacttgcagagaaggaatcgaagaactgaagaaacaagaaagagaaaggtcgctcagatttaagaatatttatcagtgctagtgtgctatattttgttagcattttgtcaattatgtttggcccagggtttggttatttcatggatctgccactgcacctaaccaaatcacctccactaaatccaccaaacaaattgcaatcacacataaaacaccattaaaaccaacaattgagatcgctgaataacccctccccctactcactcaaatccaataaatattattttctagatcgtcattt

SEQ ID NO: 43548 - DNA, 546 bp, Zea Mays
tcaccacagtttggacacttaaactttccccaaatgcttttcttcccattctcattgttagttttctttttaccactgcctccctcaaggcatcctttgatcctatttttcctctgtcgacccacaacacgtttccaaattggagcacccacttcttttgcaaaaggaacatctagccaaaacgatttgtcaccgataggctggaccacccttgagtacgatgtggtgaacatagctacatagtagtacttgtcgacaaaatcctccatcctgacatccctaaattcctgagctgttatcaagcacatggcatggatacatggtttgcccgtgtgctgccactctttgcacgaacattcccgcaactgagcatttacaatgtgcttcgaatgtacatcattgttatcccttacctctgcaatgtagttgttagctttccgtactgctaaatgacataaacctcttgtcctggcgtgtaggatatgcagaaccgacggtaaaatccgtccttgcaacttttgtgcaatcctcctcctcttgtgaaac

SEQ ID NO: 43549 - DNA, 506 bp, Zea Mays
ttgttgaattgcgtgcatttgcatcacttgttgttggtcacctcgtgtttacgttgttcaccgccattcttttttgctcatacatcccacgttcttaccttcctccctgcttgtttcgttttggcaagctttcatcctttctcttggaacatttggggcgcctgatctggttataaaaaaacaacaccaaaggaaagaagaaaagccacggtacagaataaaaaaagcaaaagatggaaagtgaaagaagtgcaatcagaattggtgtgccccatatccttatctagcaaatttgtttttcgcaagcagaacctccatgattggtgagcccaaactttctaattcaggctcttcgattttggaaagcagaaccaccctagcttgtgcaccatctttctttccttgttctagggtttggtgcgcccaagcacattaattcgcgcaggttgtgtcctctggcaatcgctctatctaagcttctttggttgcaccgctggttgtaggtc

SEQ ID NO: 43550 - DNA, 594 bp, Zea Mays
agcattgctgaccgaagcagcgtaggtggatagcggcgtcagagacttgtgagatgatagagtcctgaaacctctatctactgcatccaacactctgatatgcacgctagtgatgtagtaacaagcccgaggaggctcagacactcgctttgtgtcatataaggtcgaacatagattcccaacgcatgcagcacatcctagagcaagtttggaaagtgtcccgtctcaaacattgaagtgtaatgttctacgacaggccgcaatccaatgaagttgtcttcttgttcattgttgacatcctcaatgttgccattgttttcttattcttcttctttgtcttcatcatcgtcggaatcatccgggtcatcacctctaggaaccatggcttgagctactagtataggtggtactgaagatgaagctcccgcaataaaggcatgagactctgacaacggagtgggtgttgccaaaatctcttcagaattgtcctccaagattaaacgattcctcacttgaaggtgttatagctccacagggacttcttccactaccaatgggtagaaaggagcctgccgtggtggagggatatggttg

SEQ ID NO: 43551 - DNA, 1813 bp, Zea Mays
gataacattcccggaaagcctagagctcttccaaatgataacagatccgcccgagttccccatcgagggaacaaaagcaaaagaatcaaaatgggcagggcaaaagtttttaaggtaggccgagtcaaaggactccttctttgtttcttgcaaacaaacaacctcacaaccagcatctcgaatagaacaacgaatagcattccacttagcggtagagttaattcctctaacgttgtggctcagcacagaccactccaagaagttaacagtattgggattactcattgggtacaccagaagtttttggagcataacaatacccaaaccagtgggtaaagccagaatcagtccacaagcaaatattaacagaacaataaaacaagcacgcacaggtgccagccaagtatccaaaaaacccgcatgaaccaaaaataaaaccgagcacccccaaaagttaatggggcccacaccgaagcccagatcgtccgcgcatccgcctattggttgccttgtttatcctcatcagatgaatcatcagttttgtcatcaaccaggtccttcctgtcaaccctccacggcccaataggtcccacagtcgatttcttttgcttcaacctctgctcagaaagatcatcctcagacagattacaacgcctggtgcctagattccacagcaccttggaggatagtgggggtgggccatcgaagttatgtttgcacatgaggcagttcctttttgggcaggccccatgcctgaacccagcacgtgattccttcaatcgtttgcttcttctgagccctgactccacaatgattggagacggcccaccacaaccatcggaatccttggagatcccagaagtgacatcccccagggaggaatcaactggacattccttaggaaccacaaaagggatggaattcattccctgctcctacaaatttggggggatatctgacagcagaaaagtctttgaccaattgaaagcatccggctgaagaagattcgaaagaaaaaaaggtgcccacttcttagggatgtccaccgagtggtcagtcgacccagacggagcaaagtatttggcccagagccaagtgaactggacagctcttctcctctcttcaaacatctggaagacggggtcaggctgccattcctgatggagcatgaagttcatctccaaattctgagggttattattgttaggctcatcaacatgggcctgagggggcacgacctccaaatcatggacatgatccacctgaggcaccagtccatcgacctcctgaggcccaataaatggggcaacattgatgtcaattccatccccaagcagcgcatgaccattcaccgcaagatgaccattcggaaggggtgcaagctgaccagcaccaatggagctatctgacgacaagccagagtgttggttactgagttgtagttcttcctgctgaatgtgctgctcctctggcaaaaagggctgcggggcctgctgaatgggctgttcattcacaatccactggtcccactctccctggccaaagtcatcctgctgagccggcagcactccacccgcaggctccggagggaagtttaggtacgagaccttctcgttgttgtggagacagcaatggcatggcagcgtggagcctatatatcccctttcgtcattatttgttattttttcactagctaccccatctctgctcgaattaagaaatgcatgtcgggtaatacggcatgcgagctggagaaagggattatcagagaaacgttatcctgagagtcgtcagtgtgcttgcagttcgcaaa

SEQ ID NO: 43552 - DNA, 1245 bp, Zea Mays
gtgggatcacatcaggacgagcttggctggcaggtggttgagcgaaggaagaagacccaacatgtgcatcttcctcgtcgagggtcccttgtggacctccgaggtaggtgcttcaactgcttttcttcctcccatcttgctgcggtgtgtcgccgtcctacccgatgctttcgttgctttgagtacgggcatcaagtgagcacttgccctacgggacttgtggcgcgtacgaagcaatttggcggattgaagcacgttcagaaggaagacagaattccggtctggcagcgtttgactaggatggtgggggatgctcctctgaggaaggatggtcagggctcaaggtcaaggaagtcggtctggaaaaggatctccccactgcaggaggatgggaggtcggagtttgcatctgctgcatctgtcgaaggtgatagcggtggaggccatgaaggcttacgatgcaagcggaaccggaaccgttccaagcgttgacggggagagatgaagacggatgatcaccatcaacaagtatctccggttcctgttgttgaagcagtagtcccggagccatccctgttgagtgtcaacaattctaaggtttttgattccacactcaactccagctgtgttttggactactcggatgatttggcgagggaggaaattgctctccgacgagctctgtttgtctctgtggctggaacacgtccagtggtccttggttcagaaattgtggacgaagttgcacgccagtttgatattgcagtgaagaacatgtcaattcatcagactttgccagaagacttccttctgttaatgcctgatgaagatgctgcttctaaggttttcaatgatgggaaggcactgcgggggcctcgtttcaccttgctattcaaaaaatggtcgagatttgctcatgcttctgcctcttctttggtcaatttagtggatattgaaattagaggcatcccagagcatgcatggtctcgttctacgacggagcatattctgagaaactcatgttggataacagatgttcatcacaattcagggtgtgggagagattctgcatccttttgggtgcgtgcttggtgtttaaacacggaaagggtgtgcagaaaattggatttgcatatccttgagcctggagatgctatccatgagaagagatgcttaacatataagattgatatctcatgtcgcccagttgatctccattcggtggcctcagctactccacctcca

SEQ ID NO: 43553 - DNA, 572 bp, Zea Mays
gcggaatcaatcaaacggagctcgagtcagcggctggatcgagcaagagggatgtccaacacctggaacaatgggtggaaggaacggcaaaaccacgtcttcctgcgtgaattcggaaccccagaaatcagaaccctcgcaaaccggactccacgcggaacgaacggttcggagatctgtgtagcggaatcagcccagaacgcgagcggagaaattcagaacgaaaaacctgcaaatatatgagaacccagccgagactagcgaagaagcagaagagattggtaagacagagactgcgagacgcgagaacaactggaccgcagatcaaacggaccctcgaggagccttgcggagagaaggcggcgcagagagcagttggggactgcgaacacgccacgaaacggagaaacttcacaaatcagcccggcaggacccggaacgccgcgtcaacagacaccgacagcggaaacgagaacgcaaattcgcggctttggtcccagggaagacacgccgtgcgcacgagaacaccaggaaacgccgaacacatcgctgcagcggcagcggcaggcgag

SEQ ID NO: 43554 - DNA, 422 bp, Zea Mays
gcccgatgtgtcgcgtcgtcttggactcttgatctgtgcctttttccaagatagatcagtaagtgcttgatcctttgattctcatccaacctctgttcccacatcgtgcctcattgatgatgcgattaaatggtcgtattaacgaaaccctaatttggatttagttgaattaggcaacaacaacactatttatctacccccagcccctctcggcctatctcgtcattaaccaagccaccagcccaccagtgaccactgaccagccaccatgggaaggaagagggcagctgttaagaagtcttatgttagtagggacgatggttgtagcaatcctccctaactctctccaatcgtaggaaatgctgctttggatagtactggtaccgaatctgctgatagggttcatgttgaagctgaatcct

SEQ ID NO: 43555 - DNA, 885 bp, Zea Mays
ctggaatccactgaaagttcgataatagggatcaagcaataaacaagcaagtgaaaccaactgggttgtgcggtcccatccatcactgcagaaacagagaaggaaaaaaatcattcagatgctacaaagacaaagctatagagatcacacaggatcctcagatgacacctaaaggattattcatctcaaaatacaccaaaaggattgtcggttaactgcaggctacggtatggtaggggccaaagtttggaacactgtaggttctactgaaattaaatttggcattatgagttacctggaactttgaaatgcctaactaataaactacattgcttacaaaatctagagtgcaaaaacaatcaaacaaagtaagccataggttttcagttactcagagtactctatgaacattaggacaaggatctacaatgtttcacagccttgtgggggtaaccatgccacgcagacacagccgtggggttaatcatgccacacagagtaatgatcttaccaacccattcacatagtcacattgtatgcatgccaggtcaacacacgtaaggataaaaaattatccattgtaatctctacttaccacagtaaatagattaaatgggaattagagactgagggatcaagataaaaacctgcaatgtacaagaactgacgctgcttcttctgaaatttgtgcagcaatccatgaagcaccaaccagaatattctggatatggtttagccattcccccagtgttgaagaaaatgatgtcatgctatttagattgcctccaccccaggttgatccacggttcctctgccaaagaaaaataattaaaaacatcagccttctgtttctgcttcatacttgacgagcttgagacagatgtt

SEQ ID NO: 43556 - DNA, 341 bp, Zea Mays
agacgcagtagacgataaaatagtgttatactataataataacaacaatgtgatggtgatgtttgatatgtttgagttggatttttgtttgagtgcaatggtctgatggccataagagcattaaaaaacataaacttaagaaattcccctctagaatcttttctactccccacttggtgaacgctcgtcaaggacccaacaacaataggaaccagcatgatcaatagataccaccaccaccaccgaatcccaacatggaatagttcatcgccgcccagatgtagtttttgtaaggactcactgcaactgttcaacagattcagcagaagcagctgaatcaa

SEQ ID NO: 43557 - DNA, 527 bp, Zea Mays
acaagtcagggagcttacaagggaaaaggtgtcccttcaagagagtctcgagatagcggaaggcgaggaaaccaacactcgtgaggcctaccgcactctgaagatggattacgacaagaagctaaagaagctcgcccccgcaagaaaaatccgcaagaagaccaaaagccaaggatgccagactgagcagaaggaagaagcccctctagccctacctcctactagaatagggaactcatccgacaccgaggaaatgtccctagccagccttgatgaccttctcaaggaatttggggacactttagagaaggagttcgggagtaccctagatagcactcgtgtgtaatgaatttatgataattgaatgctgtaatgaacttgtgtaatgaataaagtaacttgttaaaaaaatatggcatgtgcatggtagtaactcttttcccctggcagatggcttcggataaaaccacgcctaccgcctccaggattggagcagggtttcccctaggagcagaaggagaagctgc

SEQ ID NO: 43558 - DNA, 475 bp, Zea Mays
ttcgtttcaattaccttccaatcgttattacttaatctccgaaaatgcatgtggattccaagatatttgaaggggtagctaccttctctacatccaaacaaagagagataactattctcttcctcctaggataggccaaagcaaaaaatctcactcttatgatagtttatctttgaaccttaagcttgtttcaaggcaaagagtaaaagctttaaattagctactttagccacatcatgatctaggaagagaatagtatcatctgtacattgtaggatggatatcccaccatccactaaatgcggaataagacctatgaattgatcctcttctttgccctattcacaaaaatagcaagcatgtccactattatgttaaaaagaatatgatactgagggccccgtgtctaagccccttataagtttgaaaatccattcctattttatcattcactttaatacccacatgccctccc

SEQ ID NO: 43559 - DNA, 382 bp, Zea Mays
gttttctccgagttcttcatgctctgggacatgctacaggaggtccacttgtcacctaacatccaagaccaacacatattgtctccgtcatcttcagcctcgctcctacccgtccaaatctgcatatgctcgtttcttcattggagtagtgaccttaaagccggctggtcgtgtatggtagacttgggcacctccacgatgtaaatatttttttgtggttagcagctcaagacagatgttggacaacatatcgctttgcaccgcatgggttggatcaccctgagcactgccttctatgtgatcaggttggagaaattaaactgtccaacacattctagtgtcatgcgtttttgttagagacgtttggtacaaagtgctcgag

SEQ ID NO: 43560 - DNA, 527 bp, Zea Mays
atcggctggtaagtttttaggatttgtcatccatgaacatggtatagagatagaccctgaccgaatcaagtctattcggaacatgggacctccgacctataaggtcgaattgcaaaagtttctcggcaaggtgaattatttacgaagatttatctctaacctagccgggaagattgatgcatcacccctatccttcggcttaagaatgaggctgaattcgcttggggggcagagcagcaggaagcatttgatctcattaaaaaaatacttgtcttcggctcccgtattaaaagcaccacaagctggagtaccattcagattatacattgcagctgaagataaggtcattgggggctgttctgacacaagagactgaaggaaaggagcatgtgatgacatatttaagtcggaggttggtggatgcgaaaataaggtacacttgtattgagaagttatgcttatgcttgttttatgcatgcaccaagtgtagatattatttactgtcttgtcattgcactatttctggt

SEQ ID NO: 43561 - DNA, 530 bp, Zea Mays
ggtcaatgcgcgatcagccccttaggcacggcgtcgagcacgtggcacaacttggtgtagtcactttcaatggcctgtaggctccatatctcagcgaatttgggcaagatccttttgtaagatctcttcccctgacttccctctatctgtttcgtgtggaggctgaggcatttcttggtctatgcaaggagtggtcttgtccctaaggtgggtctatccgactgctccatcccgagaaagaaatcatgccaaatcatgtcaaacggatttggttcgtcttctagcttcaccagagcttcctaggggtcttttggcgccactttgtcaattgaacctagtggttttgagttttggaacaaggtgaacgtgtttgatctttgtgaggggactgattttcagaaaactgaaattctagtttttatttggagtttccacttgagtgacttgttcgggggtttgcaaagcctttttgggacaactctcttactattttttgtgggttattaagtgtactacaacttctataatta

SEQ ID NO: 43562 - DNA, 524 bp, Zea Mays
ggtgggggtggctactgctgcacttgttgcatcgctgctaatgtctgaccaattgcctgaactgcctgagtttgcatcaagaacatctgctcaatggtcatcgggcatggcggtggcaaattctgctgcagagctgcctcctcctggggtgcctgctgctctggctgagcacgcctcgcacctctgcgcctgttctcagacatctgtagaaaccatacacatatcaaatttgactctgcagtctttcagcataagaaaagaaatatggaaatcttcatagcactgaacaattgatcatcttcactgacaacttctcagataaagaggaaagtggaaataaatggattacccaactagataactaactttattaataactacaccaagttgcagggggtacccacaccttggtgacaatcattacaaagatccaacttcattacatgttcatcatgacaagcatccaacataagataagcaaactaactctaactaagactgactaaactaagacactgaattaa

SEQ ID NO: 43563 - DNA, 275 bp, Zea Mays
aacattcttttcagtgtgcattacgtcaatgttgtgtggaaggagcaggtcgtcataataggggagccgagtcaagccagacttatgtgtccacatatgctgctcaccatatcccacaaaaccaccttctgtattggccatgagcccatctatctgttgacgaattttggcaccagtcatcgttgcaggtgggcggtctgtcactatgacacctttcgtaaagttcttgatgtctaggcggaatggatggtcagcaggaagaaattgtcgatgtt

SEQ ID NO: 43564 - DNA, 275 bp, Zea Mays
atatgcggcacagggagacaggaataaaggcagcaaagaagttatctcttctccacctctctctaccaactaagcctacggctgtgggggataaccacaccggagaagacgacgaaccgcggctacgaccttcgtagccgagggccccctgctctagacgcccaggcccttgacaacctggtatcatgagtcaggcgatcttcgtcctctcgatcccacacctccgatcagtccctcgacgtcacccaaccaccacccaaccctccaccctcacc

SEQ ID NO: 43565 - DNA, 776 bp, Zea Mays
tgacaacataattaaaacaatattttccctccttccacatgaagggatcgaaggtgacgaggagggagaaataaataagaaaattaatgctaaagctactaggcatgggatgaagatacataagtgaatcaagttttcagcttacaaaaggtcatgcatcatcatatttatgttattacgcatgaagaagatcgagaatataatgacataggaaaccttcaaaatgaggtacattctaaggtctcttaagttgactcaagggcttaaatatgattaatattaggatattctttagtataaagattgtgcagacataggtttgcatgggtcatcaacacctgtagtaatgtcattgtacacctatttatagggtcgaggttacatatatcagaacttagaattacaagaatgccacccctccttcgtgcatgtattttcctcctccttcgtagcctttgttacatgtatcacaactcaggattacaagaatgtccacacctatttatatgagcaattgtgtctttttgtagggattgagtgttgtgcatgtattttcctcctgcttcgtagcctttgttgtcatgtcagaaggaggttacaaaccctttcattcttcatctctacccccttttcagtctgtcgttcactattgtggagccaaaccaagtcgtcgattcatatgatctactcgaagaagccttcatgaaaatggacagagataaaaattatcatcaagtgtggaccttctgccaaagaccttctctccaacaatagcc

SEQ ID NO: 43566 - DNA, 937 bp, Zea Mays
gtacacctgtttggctagttagtctatagtcgtacgtcgaagtcttcttggagatgatgtatgacccttcccatttgggttcgagcttgccttttgtttgcgtataaggtgacagtatgaggacctcgtcgaattcatcgaattctttggttttgatagacgtgtctctctatgccttggttgcctcttggtatctagcgattgtgccaagggcttcggccctatagccttcaagtaaatccttagtcgtgagctcgtctgcctctggtgctgagttgctttctactcttggagacttgaattttatttcttttggcttgattgcctaagcaccgtacattagcttgaaaggtgtgaatcctgtgctcctagtttctgttgtatttaggccccatatgactttgggttgttggtcgggccatttacccttcgtgttatcatatagcctcttcttggctgttgttccattcgctctttctacgacaccattggactggggtggtatatggagacaaagttaaccttgatgccaactgatgcacataattctcgaaacagctggctatcgaactgtttgccattatctatggtatcttgaaggggaccctgaatctgcatatgatgttttgcaaggaaaaattgcgctgtgttcgatgttataacggagactgccttcgtctctaaccaccttgtgaagtattcgactgaaacgaatgcatatttaaggttttcttgagctattgggagaggaccgctgatgtctatgtcccatcgctataatggccatgtgggggcgatcaatttggatttctactaaggccccctttgtttggtgtaaacatctggcagactttgcagttctgagtagtgttttgggcatcgctgacaattctaggtcagaaaaaacctagtcgcatgatcctggaagcgagggccc

SEQ ID NO: 43567 - DNA, 293 bp, Zea Mays
tactgaatcaggacactgcgagccgttggattagagatctagggttcagattacttcacgaagcggtacgcaatctataccaccggatttaaaaacaacggtcccgatttcatcttaacctgatctaatcctattcgcacgcaggtagatcaacgaccacgattcactggttcgaatcgttaccctatcttctaatcaaggccgtccatcacaaattttacggctaggactcccaacaccatcttcccccaacgccgcgacggccaccgcgttggccacggcggcgaccccgc

SEQ ID NO: 43568 - DNA, 378 bp, Zea Mays
aggggtctggactcatgatagaagtcactgagcattttgacctcttggactcgtggcggcactgattttgtcctcgaacggtgagcagatattgaggccaatggccctgttagacgggttttgacccatggaccatgctgcttaattccttagtacacggttacagataaccacacggaccttgactcagtaggagatggtacctagttacggagtaccgacacacttcttgatctaacacaagactcatgcacacctcacaaacacatctagtttcagctcgtgggcactttgtcaaatgatctcttttgtcttctcttcgatgaccctcttctgcacaaacatatatgcatgatctagcctttccatcggacttcc

SEQ ID NO: 43569 - DNA, 427 bp, Zea Mays
ttcaattcgatgcaccaatttgaggcattgttggagatgctcttataaaactgaaatcacacttcacaaaaaatgggcatattctgcagaaagctcagctagcctagtaaaaatcagataaacaagtcattcactaacagaggatcccaaaatttccttgtgtgtgtttatgcgtgaagatgcacggcagacctagaggctgcaattcctgcctgcgggcaagattcatgagcagccatgatgaactgtggtgaagcaaataaggcaccttcaggctaaagtttctcttggcatgtcatggtggtggcgaaggctgaagggccaacctctacagccacacgttcccagtcttttttagcaggcccaaagtagctgagcatcatatgagagatgagatgggatgcatgcccccagaaaacaagaattg

SEQ ID NO: 43570 - DNA, 425 bp, Zea Mays
gtcttcaatcttttgcttgcctcgcgattttcaaacgttaccttttgctgtcttgtatccatttcttcgatttaggccctgttcaccttttttttaagcttatggccaccagaagctggtgtagacagctaaagtccagtttttcagtccgcagtccgcttctatgtaaatcattttagtcgtcagaaccgtctaaaattaacttgaacatcaaatcgatcgactcgtccgtgtgatagtagaaaaaccgtaactttctatattttaaactctgtaattttctatattctaaactctatgaactcttttatcttcttgtgcatgtaatctagacattctgaactctttcatcttcttccgtgtgtactctagacattcagcatcctcccatttgactactactatacgatctacggtatctggag

SEQ ID NO: 43571 - DNA, 857 bp, Zea Mays
atgatgatattttggtggatagaaatgtggtgattcttagtagtgatgcatttggtgaatctgatgttgggttgtggtcttcggatggtgaaaagttggggagcccatttgcatggatagataatgaatctttggaagatgatttagattattttgcgacgttagatttagctgcagcggagtctccattgagggtcgcaccccttgaggcgccgacgacttcgctcggggtagtccctagtgaatcgtgggggtgaaaaaagattggggtatcgaaacaaagtgtcgggatggtaggagagtcttcgcaaggtattagagtcttctgaagacatcgccgaatgggaatggagaggtcgcgccttcggattggaccgtggttggatcaagggatccgtcacgtcatactggcgccgacgaccaggtcgtgcttcggggagggggatctacgggctatttttgacggtgaagagttgagattgatgctttttaatttttgagaagtcggtcttattccaaaacaagagccaatgtaacaatgcgtgttgccatcgccgttctttggtgacgataaacgaaaacgctgcccacgccccccttcaccaaaggacgactgtggggacatgtatgtggacattttgttgtgcgtagtgcgcatcttgtaattgaagtatgacatgtcttgtattgtggtatgtgcgctaagttgcagatgtttgcgtctttgcgcgcttgggtgtcattaatacgtttatattgatccgattacaacgttaggcgactttttcttattagcgtcttcgcctttttgtgatacgcttgttgtgtgaatctagctgcacccttaggcgactttg

SEQ ID NO: 43572 - DNA, 1036 bp, Zea Mays
aaaggacctattttgcttcgtatgtagtggcaggcaattcgttatccttcggaagcatcctcttctggatagatagtaactccccaaatcccttgtctgataaaccattctttgccttccattgcaacaattccagtacggtacccaactttttctgcccctcacaagtcagataaagcaacttcttgtgatcctctattatgcgctcaaagttgatcttctccctttcactatcgcatcctctctttccatcaaggatggcctgaccaagctcatcatcatcaggctcatcttctgcctgtacctcttcttcagcttctcccattgcagtatcaccaaaggcatcataacaccgcgttctccatgcttagtccaacaaatatagtttggcatgaaacccgaccgaaataggtgtttgtgaagcacctttgagcaagaataatccttctcattcttccataggacacatgggcagcaaatgaaaccattctgcatgtttgccttggccatatttatgaaatcatgcacacccataatgaactctagtgagcagcggttagcgttgtacatccattgcctgttcatctgcactccatgacatacaccacatcaaaaaagatccaagatatacatcaatcaacatgattatactctaaaacatgaatttagtgaagcctacatacaataatgtacacaatcccaagtagcactagacaaactaaacctacaattcacttcagcaaaaaaggatttcacgaccaattccaactaaatagatagatcatcgatcggcttcttctactggctcactacctcatcatccatactttcactgtcaacagcctccttaacaacccgcttgttctccaggcacactgcctcatcatcttccacacctacactctcatcggccgccttagccgcctgcttagcaagatactctttgacatgggattcatagttttcctcctaataccaaccactacatgaactagtgccatcccactgaaattacaacaacaaatgagaaggaagt

SEQ ID NO: 43573 - DNA, 542 bp, Zea Mays
agccaaagggtccctagtgtcgtcaactaagagaatagattctgcctgggctatggccttaacatgttcacacccggctttttctaaatttgtcgtggctcctcgggcaccggcaaaagcacaaaaatcccaacgatcgctaagtatctcatcaaaagcttcagcctcttcgcctatccactggataacccctttgggatcaccacgaataaatttctgctccgaagaataagcccccacctttgcaaagctatcttttagtttcttcgcgcaatccatggatacttcataacatttttccttggaatcccaaagttcttcaatgttcttctgcaccctggctctttccatttcacttatttcttgcttagccttcgcaacttcaaaattttcattcatttcggcaagttttttctttaaatcttcaacctcggctttgtgagcttcggcttgtgcgttaagctcgacttcgatggttttcaacctatccactaaggagagcaggattttgtctttttcaagagcttcattctttaatgtaa

SEQ ID NO: 43574 - DNA, 932 bp, Zea Mays
caccatctcatggtgcgtggtcgaatcacacatgcattcgaaaaatctaccactcccagatttccatctcatgatgttgctatagaaaattagcgctagatgcatcgacaacaaatgggcctaaacgatcctagctattatatggtatgctagtgaactcatacccaagtcagtcgctgcctccacaacacctaatggacacaacaacacctttaagcacagttggaccatccagtaacccaccccggacagtctggcacgtcgtcggaccgtcctatgacttatcacggaccatccgatgtgcagtatgtaatctgacaccatgttgacaacacgcaaccacactccacagtatagcagtattaccctccacaaccttcggtccatcaaaccaaagcaatcccgcacctagggtagagtaccacccgacacatagggaaatagaggggttcccaccaccacgcaccatagattactctcatacagacaaccgacacaacaatgcctgaccatccaagcttcgtgttttcggggtctcgtcctataacgccgacaactatggataaaattcaagagatagccaaattatttcgagataggttaggaattagcatgcctaagtcagagtcatcatatcggaagcatgatgatcaccgatttgataccatcacatacccacaaaggactagaataccagatctctccaaattttccgatgagtgtggtagatgcacacatgagcacataggtcatttcttagtacaactaggaattggccgatagagaagctttccacgtttgtttattttttgtcccttactagtactgccttcacatggtatgctgccttgccacctaattctattagctcttggggcgcgttagaataaaatttctatgatcacttttactccggggaatatgagttagcg

SEQ ID NO: 43575 - DNA, 1143 bp, Zea Mays
cgagaatgctataattgtggggaaaagggacacctaagttacaattgtcctaatcctagaggaaatggtggccgaggaggatctcgtggaggtcgatgaggtactcgtgggagttatggaagaggtcgtggtagtcgtggaggaggttgaggtcgtggtggttctagggccaacatagctaccactgaagagagtccctctgttactctaactggggaacaagttgaacagtgggagcaatggcagaagggcaagtcttctgagtgcctcactgtacctgttgaacaagccaccaacaactttggtaacttttccaactatgcccacatgggcgaaggtactcaggcacaagtttttgcatcctcatgtaggcatcgcatagattgggtcatagattcaggagcatcaaagcatgtgaccggcatgtccacttctttcaaaacatacactccttatacacattctaagtcggttcaaattgttgatggtacatcccaacagatccatggtatagggtccatagagtgtacaccatctctgagcttgtcatcagtcctgcatgttccataaactggttgctaatcagtttaatgcaaggattcgaattattaggactgataatggaacagagtatgtgaataatgaatttagatcatatttgtcaggtcaagggattattcaccaaacaacttgtcctagaactccacctcagaatggtgtagcagagcgaaaaaatcgtcatttgttggaggtagcaagatctctcatgtttgagatgaatgtgcccaagtatatgtggagtgaggcagtaatgacagccacatacctcatcaatcgaatgccctcaagaatacttgatatgaaatcacctactgagcttctgttgggaaagagtgactttcgagttccacccaaggtctttggttgtgtctgctttgtaaaagatcatcgacctatggtgagcaagttggatcctcaagcagtcaagtgcatttttgtgggttatgcatctactcataaaggatacaaatgttgggatcctattggtaggcgactatttgtgagtatggatgtgacatttcgagaggaagacccatactacacaaagaaagttaatctagaacaaatcatggatgacttctc

SEQ ID NO: 43576 - DNA, 968 bp, Zea Mays
gttttatgcaatgtgatgggattcgtgattatatcgggagtatatttattaatgtgatgagtagtttagaaaatgctagtttgtgtggaggatgagtgtcggagttcatatattagtggttaagctacggcgatcgaagtgtctcgagtgcatgcccccatatggttgtatgcgagacagggttatgcgcatgatgagtttagtaaaaatccaccggtgtcactagtgttaagttgaggtttatttgtgcgtgaaaaataataatgtgtttaatacttagaactcttagtcgatggtagaaattgtctcggcttaaatagagtggtggtgacatgccaaggtagtcatcatttcctctatgtttataagtcgagtcgatgcacgttatgtgttcgttaaattatgtctcgcatagagtgtatgattgcgctcacgatttcaagtagacacttcaagtaagttaagtaggttgtgatacaagtgtgtaatggagttagttgtttaaggataattattgaagtactcgactcgtatgatgaacacgaatgcgttcgtgatttgggaagtaaatgcatggtgattgcgatttggagattagtggtttacgattcgtatagattggtcggtgtgcgaaaatacttgtgtatatggtgtttataaaattgttgtagtgtatgttgtgtctcggattgcgataataatggactagccgacgtgtatgttatttagcgggctatgtcgttactctagttagccgaattgttggacggctttagttaagcacgtaatcgcgataaatttcttgttgtagtccaaatgcgcatggttatggtcgcggttaaaattagtggtgctcatgtgatgtctaagtgaaaatgcaaattagtgtgtgaagggcgcaatcgatatacacatttataccaggtttgattaatgtggtgaatgtgtttgctgattgtgtatggtaa

SEQ ID NO: 43577 - DNA, 512 bp, Zea Mays
ctgggcctcaatttctggaaatgccaggggcctcggggtaaattgcccaaggcacagtgaacagcgttcactggacggcgggttgattccccggaatcacaggggctcttttataaaaacacgtggtcgaaggggtatcgtgggatgccagccgctggattagaaaccaagggctaggattagatcatacttaaaatgaatcggtatgctattatggccgtcagattggagatctatggcccccattaaagtacccgatcaacccatccggtccatccgagactaatctaacggcacagaaccgatcaccaaagggtatgcatcctatctgatctggatcgcttgttcgggaatcaacggctcacatccacgcagcgaaggaataccacgaaactaatcctagccgtatgaatcccaatcgacggaccaggagccatcgcctacctccgttttccccgggcggcggcgtgcacacaccgcgcggtggagaagtctggcaacgcgccccacgg

SEQ ID NO: 43578 - DNA, 335 bp, Zea Mays
gtttgagcacttttaatatgttgcatgcaccttttactatgttattggcaccttggtttgcactctaacttgatttgtagagaaagtgccattttgatccctgtttgaggtgaaacaggaaatctaaggagatagaggtaagttcctgagacttagtcaattcggttacactccaaatatgtttgtctaagtcatcagaaggtgctcaagaaagtccaagttgattggaagaaaaacaaaggaaaaaggacttaggagttgctatttaggtgtagcgaaccccaacaggaaactgtatggtctcgaaaatttggctaaaattcatcggatcgtgc

SEQ ID NO: 43579 - DNA, 401 bp, Zea Mays
cttgggattttcaagtcatttcttcgtttgctttgtctgtgaaatcaatccctctagagtagtagttgagtcattcgggcatcatatcattgcttttagggtgatgaccgagttattattgtcaacatttacacctttgaagtggcatccgagtgatgacaaagccacatcagcgttggaacgactgatgaccatgtcggtgcttttagaggtaatagccgagtggcttatgatgacgttggcgttttagagttaactgccgagtgactggagacgacgtcggtgttttagagataactgccgagcgactgaaggcgacgtcggcgttttagagataactgccgagtgactggagacgacgtcggcgttttagagataactgccgagtgactggagacgac

SEQ ID NO: 43580 - DNA, 349 bp, Zea Mays
tgatatgtacatcgctggcgacgttggcttggcaaggtttcagatttttcttctttaaccctggcaccacgtgactatgtctcctacactgtcaggcgaaagtggctacacttcacctagtggtgaatgtagtgctcgttttggatttaccctccgtgttgacttggctgtatcgcctattcaaactcattaccactgtgaatcattacctttgccatttacgttaccatccgcgaaccaaacagcacctaagtggctacacttcacctgagctgaagacatcttaaattttattttgagccccttacatccttctggcatgccttattcaagcaagtccgaggtcgaa

SEQ ID NO: 43581 - DNA, 1191 bp, Zea Mays
atctgccgtcgacgacctgccccctcgaccaggtacctcaccgccgcccccttacctctcatcacgtcgatgacctgcgtcgtcgccgacttcactcgccgcatcctgctctatctcattgccatccgcatttctctcgccccttccacctaacatgcccatccacatttctctcgccaacccctaaaccctaaccatcgctagatttgggtcatcgcagacgaccttgatggtgaacacaaggaggcacagaagtcagaaaggtccacaagaagaagaaggtaagccacatgcctattacgggtagcacacctttatgcatcggtatcttatggttcactctgcctaattcttagttgctaactattaaccgcatcaatgtttagactctgtttttgtggttttcacactgtattataaattgatttttgtattagtttaattattcattcgttgttgtcagagatattgtaaattgatttatgtaatcattgtgcactgatacagttgtgtttggttccttacattgtgttatatgcagtcacatccatgttttagtagagaacttatctttctagtactggtagaaagagatgagaatatctccactttttttgttcatcagcttgtgtaaatctaaatcgcctaatcaatgtactagctagtactttgaacattatttaagcctgcataaagatttccacaaccaaacaggcgaagtacactgcagaagcctagatacaggctaatgcaagccaccaaagagtcccataatgcctttttcctttacttagaagccaacaattacgtagatcaggggaaaaactacagttatagtgcaaccacaattatgaaattgcagaatcataagaaagcttcattatgactgaatctacacatcttatctatttgctctacacatggcactactacctctttcctcttatcttccctgcaaatagtagtacctcttagcttttagtaaaatcctttacattatctaatacgcacagtatgcttgttcttatctatcttgcaagtagttcaacatgagctaactgattatgagagaagacaggataaacaagtggtggagaatataaagaagatgcaagatttgggtctgaacaaatatacttctgttctaaataaatctttatcactgttggagacttgttctcaaatgctatg

SEQ ID NO: 43582 - DNA, 307 bp, Zea Mays
gctgcccatgcgggaagagacggaatttattcatgtatctaatgagcgggagttctggacgaccgctaacatgcataggtactacaggtaccttaattctttgtccaggatgaccgttctcccgaagggcggaaatcaaatgaacgtccttggggagagtcgagtcttccttctcctccttgctccaaacagtctcgcccgcatcaatgtgtttgacatgatctgggaagagatcgttcgtgcttcctggtctcctctcagagggtgtcttcatgcaacctttatcatgaagatgatcgaagtggtc

SEQ ID NO: 43583 - DNA, 321 bp, Zea Mays
gaagtcttgagcggaaagaaataaatataaaagacagtgttgaccttgtgtcatttgtaaatcatgtatgtaaaaccttgcggtcatggatgtaattctatacgagacttttcgtcttccctataaatagatgaacagcgtcatgtataaaggcaccttttcgagggccttagcttcgtcttgcttagcctttaaagtatcttcgagctatcttggatagagaagtcgaaatagacttgattcgtcatctatcttcgtagtggaagactatcatctacatagtggaagacttgacactactgtaaccatcatctatcttga

SEQ ID NO: 43584 - DNA, 422 bp, Zea Mays
gattagaccctttgagatagtaaatgcagaccaactattcgttggtaactaacctagtgttggtggacacctagtggatatggattatcctgtgaattgaagatattcacaacctaactcaatgcacactgatgaggctaggttatcgaaaaccctttattcttgttttggaatttcatgaggaatcataagggtgcataataaaatgacttcacatcaactggagaattatgttatctgaaagttacaagtgtcgacacatacatctcaacaattgtatttgtgctctaagtgatctaaaagactatggccatggcagagcacgagtatgctcaaacgggatcttgttgagtgatacaatgttcaagagatagccttgctcaacggaaagaagtgttgaattatttccacttcttggcatc

SEQ ID NO: 43585 - DNA, 860 bp, Zea Mays
ctatcatgttaggccaataaaaaccagaccttcgcaagagccatttcatctttggagccgattggtgggtaccacaaattccttcgtgcacttcggccatggccaatatagcatcatctgggcccaagcacttaagcagaacgtcgttaactgttcggcggtagagttcatcactcatcaagacatacttgaaagttgttcgccgaatgttcttatctgttataatattgggatttcgcaaataattaagtataggtgtcctccaatcacttgcatcggcttcattgtcagccgaatcaattaagagaatatttctggtaactccggacggtccggcgtcaccacgcggacggtccgcgacctaggaatttggctctgcgctggttatcagactttcagttttgtgaaatctccctctctttatccgataacctgatgcatcttgtgccaaatcgttagctctatgattctcaactctagagatatgtcgaatactgaattcgtcaaaagaatggattatactccagcatttttcaaggtaaccatttagagtaccatcaaaacattgatattcttccaacacttgttggacaaccagctgagaatcaccaaatgccttcacatattttactcccatacaatttaaaagttccaagccgaataagagggcctcatattcggcttgattattagtgcaataagtttccaatcggctagagaagtcgaaggagacatcacttggtgaaacaagtacgatgccaattccttgcccttcattgcaaaccgatccatcaaaatataaagtccaaggggtaatagtgagatatgacatgtctagtttatgaatatcattaatccga

SEQ ID NO: 43586 - DNA, 505 bp, Zea Mays
ggacgcactatttacaaaaaacacaggggcctcgagataagatttcctaagacacagagcgtccctggtgcggacggcgggttattaaactaaaaactgaggggtctatctgttaactcgactggccgaagggttaggcacggatccaagccgtccgactacaactctgcgacccagattaaatcgcccttacatcgaaccggtacgcggttgagtccgttagatcaaggatctacggtgctgatttaaagtgccctagatccatccggggccatccgattgacatccagtggacacgaaacctcaccgcgaatcggtatacgacttaatgatcacaaccgtccatctacccatccatggtacagatgtactcctctaccactcacgccgaagcacggcgacgcaaaggccagggcggcgaactctccggcaaatcgcccaggcgcaaccccgcatcagtacccgccccgattgaaactacatgatcaccgagctaaagcgaaat

SEQ ID NO: 43587 - DNA, 558 bp, Zea Mays
gactagcattgtggaaaaaatactaacctgaatgccttaggacaacatagaaaaatggttgtttaatttaccaaaaaattatgtcggctcatggaaagagctggcataacggttcatctgtcatttagcaccgcatgtggtcgaacaccaacccaacaagatcttaggcaagtgatccaagaagaaggcgagtctcttctcagatatacctagaggtggtgagatgtcaaaacaaatatctccaacataccagacaagatggctattcacattttccatagaggactcaacaataatagcttgcctctctagttcgagcacaatcctcccaccactctcgcctccatgtcctaggttgttagcaagtatgctttaaaggaataggtgcttcgacatgaaccagtgtctccacaaaacaaaactatgagagaggaggaaactaagtctgaggacaagaagagaaaagcataccaacaataccaacagagtgaaaatgctccataaccgaaccaaggactcgacatagatttccaagcttcatacagaacaagttccaaa

SEQ ID NO: 43588 - DNA, 352 bp, Zea Mays
cgaatttgggaggcgagcggggcttatcttcccggcgagacgattaccgaggcccgccgtggagcgcatgcgttcactaggggacggtcactattaaggggatgccatgaccatgacaatgcggtgaatcaggcgactacgtgtcccttgctgtgatcacggtgagcaccggcggcgatatttcactcactacgcgggcaagtgggtacgacggtgactcagctctggccaagtcctcctcacccaagatcctttatccgcaacggttatccactccacaccggcacgaatcacggcaccggcgtgaatcgtggcatggagatcaccggcggcgaggttcactgaatctggc

SEQ ID NO: 43589 - DNA, 405 bp, Zea Mays
ctcaacatggaaccacttagaccattgtttaccaacaaaatagaccacattctttcctgtcttcaatagtaggcccttatcaatccttgggtagaccggaccatgtgtggcttctccttcctagagggtgttcttccaaacatgccacagacacccccatgggaggagccaccatccatctcatacgtgccaccactcgcacttgcacctcctaagctcctccacctctcccgaagcacatactgcggcctataactcataaaaacatgaggtgaacctgccaatgccaacttacgtaccacctccactattcctacttaccttttatctaagcccttgtcaagcttccaccgaaagtaatcgtaaacctctggcagaacgttgcgagaacattgcatatttccc

SEQ ID NO: 43590 - DNA, 683 bp, Zea Mays
aattttaccaatggggctttgaatcaaccagttcacggcgacagtgcggatggtcaaatggatcaatgcgttccggataaccgaaggcatggctgaccaaattgaagcttgggtaagcttcacgggttcactagggtttacgtacatgatagaatttgggctaggcaagagtagaaaagcgggtcggcagagagggcgtcacggcgacgttctacggagcagaggggtgttccggtgacgagactcaggtaaactccaattggccggctccgagagcaacagggggctaaaaacaagcaagaacacgaatcaattgggtatgcactaacccgaggagtgttggccacggaagagttcttcacggccgcgaagagctgggcagaatggttttgcgggcggtgggagttcttctggtgcaattgagtcaattgctcaggagcttgtgtgcgtgatgcagtgaagaagtaggatccgggctcaatttataggttgctggccggagatggatgagattcactgagctgtgaccgtgctggcgagctcacccgcgcggcagagccatggtgaaagtacggtggccgccgattaaccgggtaacgccacctccccgctttaacgccacgtcgcggaagtccttcaccgtggccaccgacccatccccggccgcggtggcgttcttatcg

SEQ ID NO: 43591 - DNA, 395 bp, Zea Mays
cacacaagcattgtactagtgattatcttcatatcacacatttttgccacactagtgcacatccaattttcattacttgtagcaataaaatgaaagagttcacacaagcaagtttttaatgatggtagcaaacgatactgatatagcaactagacaataacagagcatagggctccttcactctttgctagggcgcaaaacataaaactactgatcagcatcatgaaccaataaacttcagccaaaccaacgcaacagcacaacattaggggtgtaaaaacaggctaatacatcaagaagctgaccacttaataacttctgccacttgcttatcagcaaatcttcgtgccacaggtgggtttacagaagcacaaataacattgatctgatatact

SEQ ID NO: 43592 - DNA, 881 bp, Zea Mays
caagaaaagattaaacaaggtatttgatgctattggcttcgtataccctgattaccattacccgctacgagggcaagggaagaagagaaaaactgccgcttcggccaccaatgtcgtgtcggctgcaccgaaaagtaagaaaataaaggttctgacccatcggccgcgatatattgaaccgaccgtagtgcctgaacttggtgaaggggcctcttcaactgccgaagcaagacaagctgctccaattgcacagagcgttgaagagccaactatagtgccgaagatgcctacagtcgggccagtcgaagctatggatgataaggctaaagagccaaaggtggaagaaacaatgaaaatgtcagaaattctgacacctccaatagaggcaaaactgccgaaggtgcaaaaggcttctgccgcaactcccaagaggaggaggatggccagcatgctgcatgatgtgctggagactacaaaggccttgagccccgctcctacaaagaaaattgctgaagctgccaaagcgcaagccgaagccgaagctgggcaagccaaagccgaagctgggccctcagtgtgcagtgagacgaaggctgtcatgcctgaagacgaagctgatcaccaaacttcgaatgctgtcatggcagaagggcaagacacagcagaaagggcaaaatctcctgcccttgaagccactgtcgaggatgctaattatatttatcgtcatgcttcggggaaaaagttgttcgaagaagaagttctggaagccagacactatgcacgaaaattgaaatatctgaagggagctttagtggttaacggcactaacgatgacgacttcttatactgtctcccggacaacaaagaaatatccgtttgcc

SEQ ID NO: 43593 - DNA, 788 bp, Zea Mays
ctgatacagagaggtcatgcatgggccagcaagtggtgctcctgtgccacaaggcgaggttaaggaaaatgtcgccatgaagaagagaaaaggcagaggacataactgtaactacaccgaggcaaaaaaaatggtgggccatatgaagaaggttctgcatgtaaagatgagattttattggaataagaaggtggcctttggccatctaagcctagctatattaagatggggggttccttgtgaagcccgaaaaataaaggtttttgaagaagcttggatgtattgatgatgagagcttaattcgctttgttggtgaggagaaaaccccaaaaccaaaggatgatgagatcattgtcttcaaaagcttcttccgtgcaggtcttcagttacccattcattggatggttggtgaggtgctaaataagtatgaaatgtatatgcaccagcttacaccaaatgcaattattaggcttggggaattcatatgggccatgagaagcaagggttccaagtctgatgcagaatgcttatgcagagtgcactagttgcattattagataaaggcaagatcttcaggcaaacatcacaacaacttcggatgttttaacttcacttattggaaggactcaaagttccttgtgctatcttagaagcaattggccgaacaaataggcacgagaatggttctatgcaaaaattgatacgaagaagagagaagacttgaagggcataatgatgaagtctatggaacttagtttcgacttaaagaggtctctctgtaatattag

SEQ ID NO: 43594 - DNA, 499 bp, Zea Mays
acaacctggggttatgtggtaatggcgcgtgccaaacatggctgtcccggagacgaatacaagcaccatgggagccacgagccgccggtcatgtccatgcatctgcttgctgatgacgtagatggtcgtcggcacctgggtggttaggctgagaaggtggcttttccagagcgcattgtcctccatagagaaggccgtcatggtctctttccctccaagatgcagcagcaggaagagcacccaaaagagggctagctggttgccaccgccacggagagtgaggcaggcgaggaccaagacagcaagggaggtaggcaagccacataatgacgctgagaatgtgggagctgtgacgcttccggaagcctgagaagaagaggacaacctgaagccagaagctggccaacaccatgccctcgttgatgatttgttgggcacgtgacactgcgctgatgtagttaagtattaaatgggattaaacacctgtaacagaaacccg

SEQ ID NO: 43595 - DNA, 536 bp, Zea Mays
gggagaccccgctcggacaccctcgggggctgggccatagtttgcgctacccacttgagccagatcatctccggcagtaccctcgggggctgggcagtggcttgcgcttcccacccgagctgaatcatccccggcaacacccttgggggctgggtaagtgtcaacaccatccttgaggaccaagttctctgcaacagccgcctctaaggctgaaggtccctcagttatttccatgggaacaagacgatccaagtcagtttcctgaccctcaagaccgcgctccaaggtcgatgaggcgcgggacgctgcccgggatgaccccaactcgacgtcgagcacatcagcacaaacatccgtcgcaccaccatccaccggctctgataacagatcttctggaaccatatcttcaagagtctgatcaaagttcgccagggacaattcttgtagaccaatggaggacatattgccgactgttcttccgagtcagagggacctcatcttcttcctccctgtcgtcttcatcagcgacacaaaca

SEQ ID NO: 43596 - DNA, 680 bp, Zea Mays
tactcctgcaggttcctagctccttcgggagggtttcaccacctaaaatggccatttctcgaaaaccctaatccaccgcacgccacgtgctcagcgaaatgcccaaaccagcaaaaattgctctgattgaatccattttttcaggcaccttcataatacctccagtaacatattcgccaaatttcatgccaatccgatatcccaggcttcaattttacacaattccccatttctagctaccgtttccaagccgagtgcccaaattccattttcttcgcctaaaatcaaaccaagcgcacagttcacacatatttacccatataaacctattcgtgaagtatcggctcaattccaaatcatttgatgcctcattttcaatttcaaacctcctatggcactatttcacgttcaaacgtcgttttcgcgtcgtttgacctctcgatcgccatatctctcgatttctgtgccataacactctgtgtatgtatttattcacatttcatatacttatgactatgtgactaatacgtgctcacctcttctgtcatttcagtgaccttgcctgcccgtgagccgtctcctgtcctgcctggattctctccctctcgtgtgagatttccaggtagctattcgttcttttgtcatcctatcggctgttatcgacttgtgcttagcttctc

SEQ ID NO: 43597 - DNA, 278 bp, Zea Mays
atccgtccttgcccctactcctctgactgcagcacccataccttccactgctcccatggcccctagcccctttggccccaccttcgtactggctgccagcaccccctccttcctagctccgcctagttccgccgggatcactatgcgcgtcttactttatgacggccagcttgtccggggcactttcgtgtccttccatccggcctggaacccttttctccgagactgcgtcgagctacatcctcaggcgggtcgtcacatgcctggaccgcttgtct

SEQ ID NO: 43598 - DNA, 285 bp, Zea Mays
ctcagggacacggagacacttcttaagttgagacacgtggaatacattgggcacatcagacaagtgatcaggtaactcaagctgatatgccatctccccaacttggctaaagattctgaagggtccaattaagcgaggggataattttcccttaactttgaatctcctcattccacgaagtggtgacaccttgaggtacacatgatcaccttcctcaaactccagtggtcttcttctattatcaacgtagctcttttgcctagtctgagctaccctcaagttctc

SEQ ID NO: 43599 - DNA, 466 bp, Zea Mays
cggccgctaagcataaaagattataagatgacatgaagaaaatagacgaggaggcccaccgacaaaaggatcaggtgctcaaggtggcggacaagtggtacctctcgcacttcagggtagattgccaccagaagaccgtccaagagagggagataaacgccgagtatatgttagccgtgctgcaacagctccccacgataggtgatgccaggccagctgatgatattccatctgttaaaaattcttttgataatcggattaaaagtatcacggaggatatagagaggatgacacatgcattaggaaaaactcacatgcctaattttttatcacataaattaggcgctgaaacaattgcgccaaacacatcggcgacaaatgggtttccccaaccatattctggtatgccgatggactcatatccaagacgaccgtcaccaccatcttcgctaaatggtgagtcaac

SEQ ID NO: 43600 - DNA, 557 bp, Zea Mays
ggaacatagacgacggactcatgagtgtcttccatcggaacagtaactccatggcaaatccgccaagaacagagttcttttgaaggtaaaaccccgacatccacaaggcgcagaagatcaaactctaaaattacagacatatggttacccacgaatgacaactgactgttggggtcgattgacgggatgataaccacggtggagctctgtttcttccgttttggcgccatcacaatttcgccggcggaacgaacagtagcaaaatctaagtaaaacaggggagtggttcgatgcgaaaatgtgaggatagggctcagaaatcaaaagtgcacgtcgacatgagtataaatggggttttcccgggttgtgcgccatttctaaaaagtgccaagtcaacacttgggaaaatgagacttcagacataactcggccgttacctctaaaatgccgacagtgtcaagcaccactcggctgttacctctaaaacgccgacagtatcaagcgccactcaccgttacctctaaaacgccgacagtgtcaagcacgactcaacaatt

SEQ ID NO: 43601 - DNA, 422 bp, Zea Mays
gaaattccagcccttcaaatttgtcttctagtttttggacggctgtgcagtacttgcccatagagtcattcgagcaatcccattctttatttatctgacttatgaccaccagtgaatctccgtataccattaacctcttaatgtccagtgatatggcaatgttcaatccgtggaccaaagcttcatattctgctgcattattggatgctgagaataacaactgaagagcatatttgagttgttcacctccaggtgcaatgaagaggatccctgcacctgccccctgcagctttagcaagccatcgaaatacatctgtcatacttctgcagtctccaggttgtctggtacttgttgctcggtccattctgatacgaagtcaactagtgcttgagtctttattgcagtacgaggccaaaactcg

SEQ ID NO: 43602 - DNA, 486 bp, Zea Mays
ttattggatgctgagaacaataactagagagcatatttgagtggttcgcctctaggtgcaatgaaaatgattcctgttcctgccccctgcagtttcaacgagccatcgaaatacatcctccatacttctgcagtctccgggttatctggcacttgctgcttggtccattctgatacgaagtcaactagtgcttgggtcttgattgcagtacgaggtcgaaactcaatgtcatgagcccccagctcgcaggcccacttggctattcttccaatggcttctttgttgtggaggatatcccctatcggaaatctagtgactactatgactttgtgatcgtcaaaatagtgacggagcttgcgtgtagttagaagtactgcgtacaatagtttttgaacttgaggatatttcttcttcaagggacctaggacttcactgatgaaatagacgggatgttgcactgggtatgcgtgtccttcttctgctcgc

SEQ ID NO: 43603 - DNA, 1552 bp, Zea Mays
gggaactagtgggccggatcaagaaccacggcccaactcgttcacacgtcaacccccgacccccctagcgcatgagtctaaccaaaattctactattttactggtgaatgcttccccaaaaattcccaaccccaaaagcgtaccacccgaaagaaagaaggaaaaaagaaacaaggaaagaataaactctaacttctcttctttgcaaactaggtatcacaataataaaatagtgtttggtactgcataaacaattttatcatgagactaacgcaacttgaacggcttaaatcggagtaaaaatgatgaagatataatttatctaagttctatgaatttgtttcacaatataaatcattttctttcttcattttgttaatttatgagctgagtggattgagaatctgaagaccgtaggtaggacttattagtaaaggttttaaataaatgttcagggtctcagttgtaaataaatggacttatcagtaaaggttttagccgtaggtaagacggcgggttgatttatagaaacccgtgggtctcttttgtaaaactagtccgccgaagctgtaatggccgactttagccgttcgatcctccatctatggaccagattagatccaggcttttatgaattagtacgcgatgaccgccgtcggatcccgaattcgcggccctgatttaatatgatccctgggaatgcctacatccaatcctagccctccatctcttatctgacggctggagtgcctctttcctctgctttccgccgagccacggcggcgccatggctagagcccacccaaccctgtggcctgagcactattccttgatccagacaatgctacacgaactatggagcaaggtgattcgaataaggtgattcttactggtgataaggcgatgagggtgtttgcccatggcgttgggcagatccggggtggtggagagctccaacgacgaattccggcctatgtgggccaagttcttggctaatgatgcaactcctgaaccctccgatcgatggcgaagctctaggtccaacccacaagcctaggatgtcaacatggtcgagttgcttcggtggcagccatggcggtccctagttttatagtggctagggtggagtctttatgggagcgttcggtcgggacgaacccgaaatcaccgcgcagtcgttgcgattcttctgtgctagcaacgatggggctcatggcggaggcgaggaaatcccatccagattccacgcacgtctccgccaggttttttgcgaaggtgggggaaggaccttacagtttgggtccacctatcagggaggtgtgtggctcaacgctggcgcgggtgggaagctggccgaagggccccacttggcaaggacagaacgagggacgaagagcacctgagaaaatgggccgcatgggtagagttttggcgcacatggccagggtagaggggcgaggctggaacgaacgacatggaaaacggcccaagcgcaggtatggattctgcttttctttttcttttttatatttcctgttttctttcttttttt

SEQ ID NO: 43604 - DNA, 969 bp, Zea Mays
aattaatcctctatccttttcttcctcctctgtctaatctgcgtagcccatcatgaatttttggagctttcgatagaaattccgccggtgcgtatggtggattctattgttattgatctaatgacgagtagtgcgccaattttggggttttttttgttcgggctactgtggatttattctccagtcacttatttgatggcgagatgttagatcaagttcggatgtgtatcgggtgttcttttctttgttgtgaagtatgcccctcctcgttatttccaccagcaatcgaggtcagctctggtgttgtggcgatgttgttgatcgagttttggggcaatatatcggctgtcgattgagtttttgggcaatatatcagcatgttgattgttgaatataactcgtttatatgcgctctactctggtcgatgcttttgtcgtctgtgggacatacatgccattttttttgtttaaccttttctagctgattagcagccatctgagaacgtgagaagataggtgaaattaatcttggagttctgaatccatcctatcttgtagcttcacatttgcacattgactcctggtaccatcctattggtaacaacgtcctttatattcatcttttatatccatgtaggttctctataaaagattcttttcttatatctcgttccttttcaacaccgttatcaattttatatataaatacccatattaaagacatattttattttaaatttttatgcgtacatatttgttattattctcaaatgttttatacatatcttagttttgtttaatatgatagaggagagtagaaagaatccatatatgcagaggaaagaggaacatcctctatatttagggaaccctgctggaggggatagaggagagaattacctaaatttggaggagaggagccttcataggctcttattggaggcagcctaaagggtcatctacccctct

SEQ ID NO: 43605 - DNA, 561 bp, Zea Mays
atgctctgcaattttgttacaaggagtatgacttaacgcttcatagatcaggcacaaaagaattctgaaattggaccaaacacacaaattcaaagtctgaatttgcactaagtctgggaatccagaatttaaacttgaatatttggaccacttttactaccagttccaaatgactttaaggatatgtacctcaagaaaacttatacaataacatgtgatattccattttgttacaataccccaagtctataactgtatagattagctactaacaggcctccaaatttgcttcacactgcaaaaactggagttcgaaatttcactaagtcagaatttcaggattaaacattccactttggagcaaggtttacaaatagttccatttggctttaggcctgagtaacttaatcaagtttgtgcagctagtgtagctatacatctttgatacattaagtatcctcaaacggtccatagattggaagttataaagacccatgatagctaattgctaatgtttttcagaattcaaaaccctaggtcaaaacttggtttcaagtgttt

SEQ ID NO: 43606 - DNA, 530 bp, Zea Mays
tggtacaatatcactataccattcaattcaaatttgtgcgcatatgtatggatcttagtttaattcattatgacacttcctctgttggccgttctggattgatgccttccttctgtaaaacaattcccctgtagactctaaacaattgatcttttggacatgaatcccttccattcactgttggtagtatccgtatctgatgctttttactttacaatataaaacaattccataatttaccagccatttgcaaatgatttaaattttaatgagatggcgtgatgaactgtacaacagagacgtgggcacacatgtgccatatacaaccaactagaactaactctttcagtgcccgatctgaaattcgattctaatttgcaccttcagttctccaaaacactttttttggaagttgtcaaacaacgaaaacacttatggtcctatgttccaaaactagctgctattgctttgcctgtaagaaatttaaaaactgattcgaaattcacttcttgaaccgacttggctgaaag

SEQ ID NO: 43607 - DNA, 718 bp, Zea Mays
cacattttggatgttttttattctgcaatggaacctgacgacgtcgtggtttttgtgtctctgttacattatcgaagtccctaggtggaatccagtgagttgtataggtttttttttattcaatggagtcttcgaatattgaagacaagctagtgtattttgcacttttggatgcagtgtcgttggctcccattgttatagagaaaggggccctcgttagttactcagggcgatccgaatgttgcaccgcctggttgtggaaaaaggaaatgaagggcgtctagtaaacaccttatgtctagtttaggggcgaactggcgatggttccgtcaattgggcaattgggggatgctgctctgcttgggtcgaggtcttctgtgcggggatgtctcatggattgggccactatccctgtcttcgagaggatgagattaggcgtttatttaaggttgaagagctcgagctgctgttgtttgattataggcagcttggccttcttcccaagagggagcgccttagcccttgcaataacgtttctgcctatttttgttttgtagatgttcgtgtttgcaatataatatttgttttggtttcttcgccggtctgcgatcgacaatttagacatgaaacactaccctcgtcctccttggcgattggatactaatgcgaagatcagctagatgattagcctaacttgtagttgacttcatgcggttta

SEQ ID NO: 43608 - DNA, 924 bp, Zea Mays
agtattctagcaatcttgttggaactgttcttgatgtctagattggggaggacccattcggtcatgtacttgtggtgttagcctttcaagcacaaatgtttgttgtatccccaaagacgagtgtggtggcatcccataagtgtatggtggcatgacccatatgtgatttgggacatataggtggggcatgcatacatgagggtatgagaattgaggtgggtatggcataggtgaatatggaggtggaggtgtccatggtggtgaagtgggttgtgggttggggaccaactgaacaacattgtgggccaatttatttggccttgtttggtgggaagacccaactgatttcgcatgcctccctcgggcgggtgaatagggtcgctttgccaggcgatcactgtgactggcctttttgttgacatatttggacaacaattggtcgaacataaggcctgctttaattagtcgaccagaagcttttgccatattttgcttccacgtacctatttcgggtcatcgcggcttgaaggtacgaagtcggtactgcctctggccactaccggaccgtccgccctctctggccagaccgtccactagcgattcggatagtccacgactttgggccggaccatccgcgatgcgcagaacatgaatcttggcctcgctgcctgtttgcgtctgcctcccaacactagaagatgtgatggtgatctttagcgtctctcccccgtcaggtgtcttctcagtaatgaccttcctaaagggatttttcttattttcattggtgacccgagggtcgccgatgaggataccctctcccttttctttatcggccactgcagtcgaaccaagactttttttaccattgagatctatagtgttgacaaggaagggttgtttatccacctgcatttcctacaaatt

SEQ ID NO: 43609 - DNA, 372 bp, Zea Mays
ctccacaaagtaaccaatagatgttgcctgcgatgttgatcagatcagtcagttggtatttgggcatcagagttcggtgcctacttggctacttcaaccagtagccagccagctactggcgtactgcatgtacgtgcgtgcagggattctccgtgcatgtacggtatgtatccctgacaagagggaggctgtgtggccattatgtgggacaagacaaccatgcattcaatttgcaatgcaacactgtattgcttgcatggctttgttaccgtcagtcaagaactgtaatgcagaggaaccggtataaacaacgagcatgtttgttccggtcttccgggaggcaggcatgtgccttgcataatgtaatgtaat

SEQ ID NO: 43610 - DNA, 535 bp, Zea Mays
tctccttctccttgcccccgcgtcgcacacaacaccacacagccgccgcacctcatcatcgccaccgtgttgtgctgtcatcggggcacctcctcaccgatctccctcgtctcaacccccaccatcgttttccatccgttttccatcccggtcgcttataagaatcaactagaatcactttatttgttaatgaattaagaagctgaagctagaaatcaagagattgaactctacgaaacacctaaaatcatgctgacacccgagttagagaataaaaaacaaaaaataacgtctgaaatgaaccaaaaaggaaataagtcgccgtcttatttcctgaattctttcactgcatcgtcatcgtcgctacagggtaggctcatctacctcccctgctggtctcgtttgatccaaccaattcttatcctgtacaaactctgattaaaaactagtatgagtattccccctgtccgactgacccgtacaaaatatcgctatagaaaacatgatgcttaatttgttttagctccgactaaat

SEQ ID NO: 43611 - DNA, 297 bp, Zea Mays
cagtttgacagctcgactttgtgcacaattttctccaaatttttcatgtgaccatggtttaattcctatagcaaagttgttctatttacatagctttacaaacttgatgtgttgatctagggaaaaatgttcataatttgaaaaatatagggtttcactgttggccctataccactgcaattcagacttagcccatggagcccaaatgtggctttttgcaaataggcccaaaacttagggtttcatttgcaaatctccaaatatgtgaaccatatgacctacgataccttatttcca

SEQ ID NO: 43612 - DNA, 675 bp, Zea Mays
cttgtccgcgacccactcggcccaacaggaccgccacacacaaaggagagccgacacctggtccccacttgtcatcctcacacgctcgcgctcgcctcgtgactcactatcgcatgggtccccttgttagtcgctgtaacaccacatgaggagctcttcctccagctgtgggacccacctggtcagcgactatcgctccatgccactcacccgcattacatgtggaccccacgtgacagtctcaatgaaccacagaggatcccctttccgtgcgcgcagcgccgatctcaacggcaaccaccgatttcgctggagatggttaacagctcgcccctagccttatctacccgacgtgggggacctctcccagcctttccattttgttcgccagggccgtgccatgaaaaatcgtgaactatgggcgcctccaatgccgacctcgcccaccagagacaaaatcgtacctagtagttgctagggggcattgtggtgctgcgagaagggcgacggtggtcgattagcgcagatacagcagctgtaggcggcggaattcctcggcggtgtccgaattccgctgtgatccgtgggcggctctgcacagtccctaacttccggtaaacatcctccccgcgtgtaccctattgttcctgttactcgccaatgtcttcagttagg

SEQ ID NO: 43613 - DNA, 391 bp, Zea Mays
acgcacaacaaatattctgcaaaccatgggtcgctttgtgccctcatgttgcgaacaagcttttggtggcacatggattcccagatataagaactccgtagtgaggcagcaactatctaagcccttgaccccttgcgtacgacagggagcacttgtctaaaatctcccccaaacacaattgtcttcccaccaaagggcagcccatgatgcccccattatatcacgcatgatgttgtctagcgcctcaattgcttgtctattagccattgatgcctcgtcccaaataatgagtgatgctttttgtagtaactttgttgtcccactttgtttcgtgaagctacacactgcaccatcatcaatagtaagtggcatcttgaagcgcgaatggacg

SEQ ID NO: 43614 - DNA, 571 bp, Zea Mays
cgacaccttcaccgccactgcatcaatgactagacctacttctgccatcggtttgtcgcgaattttcaatccctttccgacaaaccggtgcaaccgtgggacaccaaacccatcaagcgctaaagttatgagtccttctgctcgttcctaaaacttttctagactatgaggaatcacattcctgacgttgctaagccagctatgatcgaggacttccactgtggatccaatgactcaaccttcatccgagccatcctccaaaaagctccgaccacctcggaacaactctttcgggaagcagacatctacatcactgccaacgaacaggccaggacctcatcggccacatgaagcccgcaccccaaacatcaaaaagggaaaagaatactagcagtcggacaagcattgggacaagagaccgagagatgaagggcatgccgcgggacccctggcgacccgaccccatggtgcgccacaaggcaacaacacccggacactagacgagatcctcgtcgcccagtgcccatatcacaaggagatgcaccccaccacgtgtaacttcaaggacttc

SEQ ID NO: 43615 - DNA, 458 bp, Zea Mays
cccaagtcctcccagtcatggatttgggcaggtgggaggtgctcaagccatgctcgagcagagtcggatagaaagagtggtaggttgtgaatgatgaggttttcatcactcgtccctccgagctgataggccagacgatagtcagtgagacatagctccagtttggtttccccttagtacttggtgatagtagtcggggctccgaactagcgcgggaacgacgcccaacggatggctcgactgaagacttatggacctggtggctcaagcgaggggcttcgatcctcaccactgtcgtaacgaccatcccgccaagggtggtagacatgcgtggcttgtcgtcggtcgtcgtggtgtagccgtccgctgaggcggtcccggaccgtgggggctatctcctttgtggtcctaggatagaccaaggcctccctctctttactagagggccccgctggttg

SEQ ID NO: 43616 - DNA, 377 bp, Zea Mays
tatagacttgtaatgcctaaacttaggttaacatgcgctccctgattaatgtccttgcttgagtagttggttgtggataggaattcctcctctgttaaatttgtgcttgggatgcttttgtgtgataaatagaagaactaatggaaagccgtaacaaattaaataaatgctcgtacttatggggtcgtatttgtgttgcgtaattatacaaaatgttgttgtctttttaatggtgttatgttcaacgccgataacgtgtaaataactaatgttagcgtgtggttgtttacggtatcttacaattaaatgttagttcgctaccgtgtatttatatatcttatgatatttttcattgtattcataaatatgcatattgc

SEQ ID NO: 43617 - DNA, 625 bp, Zea Mays
gttgaaaaggagctctaccctcttttatagttttctcaatcgctcgtcctcctctagctagtgggatggtactatgtggatgtgatggctctacgtgcgactccctatagtgttgggctttggtggtttctcaaggcccatatgtagggcaacgactcactaatgtgcgcttgggtgtttttagggcctatccatggggtaagggtccactggtaggggaggggaatagactattgcgtgcgacttcatgtagtattaggcttgagtggtttctcatggtccacctatggggtaacgacccactaatggagcttaggtggtttttacggcctatctaggtggtaaggacccactggtaggagaagggaataaacctacacacttcacccataatataggacgaccgtcaaaatcgatgctttataatagtagagattttctcttatatgtatttatgatctagggctcagagttatttcatataatctcttatacttgaaaaaccaatactagggctcatggttgtacacacacttagagcaactccaaccatgagtgttatagttagtgttggtcacttgttcttaaatgctatgaatagaacaaggcaacacaattgttaaag

SEQ ID NO: 43618 - DNA, 406 bp, Zea Mays
gaaaattagaaaaatcatccaaaatcaccaagtagtatttatagccagcaagactgaatacatgagatgtctagagatcacaatgaacaagaccataagcctgctcagccctagaagtaaaagtagcaaaagggatatgagcatggtggcctagctgacatgcatgacaaagactctcaaaatggcccttgctacaagatatctttgaactactagtgagcttggtcatgacgttgggtcccgaatggtcgaaacaacaatgccaagtggtggagtaggtggtggaagccagagcatgcggggaggatgtgccggtggaggaggtggatggtcggagcgtgtagagtgttcctgagctgtcacatcaggcgagaagggtcctggtggctagatccttcacatacaa

SEQ ID NO: 43619 - DNA, 425 bp, Zea Mays
ttcacgttagggtgatttgaggcgtagatccgggatcgggcggatctgtgttgatctccggaaatacgtgatctcaatcgttagggttagatcggacgggcgctgagcggtccacgctatacaaaacgttgaccgttggatctagatccaaaagcccacgtagcgtatggttcagtctaattctcggtttaatctgaaccacagttctctgatctggtggctctaggcgtgtaccggttcgtttattagcaaatctgatccgtgtcgttcgtctctgatcgaacgagttgcatggcaagttaccccttcgcccgaaccctttttcacaagagaccctgagtttgtaagaaaataacccgcagtccacatcagatagaaagaaattacgggtgagccctagaattttaggtttaacctctgtttct

SEQ ID NO: 43620 - DNA, 577 bp, Zea Mays
atcgtggagaggtctagcagagacttgatcgagcgagcgatctgcttatacttcttagggatgcaacggaagatagcttctcgacagctccctcatcgtaggtgtcgtcgccgaactgcaccatcttctacaacatagtgttggcagagagcaaagtcatcaacatcctcacctgacttgaaggtcaggttctcccactccttacgaagtgcctacaatgtggtcttgcgagcacggtcgctgtcgatgagggtcacagcgatggtgtcccaggccccattggcggtccgcttctgtgaaagagtaaacggcatctcgagtgggactacaacaatgaaggcatccagcgcccgtggatgagcgtagtagtcaacatcgatgtaccgaactgcttcccacatgtggcgaacttggagtcgtaccctcatcaccgtggcccactcgacgtagttggtcttggtgagggtaggccacccaccgtcgggaccgatgtccctaacaacggcttgaaccccgcgattaccatggtacgatccggggagggagagctacgccgcctgtagaggccgcgaccttc

SEQ ID NO: 43621 - DNA, 777 bp, Zea Mays
atcatttaccccattagttttcatatacgtaaaaacttgctcaatatcatcaaactgcctgtacctgcaatatcctgcaagaattatttaattatctctcttggtttccacccctagatgacctagccacaagaatgataaatccttagagagcacacagttttcagagggaagatcatttacaccattagttttcatatccttaaaaacttgctcaatatcatcaaactgcctatacctgcaatatcttgcaagaattatttaatatgttgaaagattgggtgttacttctctttcaactatgtcttcgaagacatactttgcatttctgtacagtccctccctgaacgccacctaaaatagcattataagaataaactccaggtttaatatgcctagaaaagcactctgataaatatacatgtgcagatttcagtttcgtttctctacagctatgaaatatgaaaatttcaagagtcgaagcatctggagcaaaccctaaggcctccaatatttggaataacaaccatgcctgatcagtgccaagatttgtacacacagacacaaagattttgttgcgaagacgcaactcaggggaacatctccactctttccaacaaattcatcatatccccaatttgctttccttgttaaattcttcttctatagttgacaaggctcccttgcttaatttaagatccaaactctttagttgccgaagaataccaagagcttgcagaaaactatctttcttgattaaagatatggcaacagaat

SEQ ID NO: 43622 - DNA, 795 bp, Zea Mays
ggctgggtaagcgccagcaccatccttgagggccgagttctctgcagcagccacctctaaggctgaaggtccctcagtcacttccatgggagcagtgcaatccagaccagcctcctgaccctcaagaccgcgctccaaggtcgatgaggcgcgggacgctgcccgggatgaccccaacccgacatcgggcacatcagcacaaacatccattgcgccaccatctgccggctctgacaacagatcttctagaaccatgtcttcaagagtttgatcaaagtttgccagagataattcttgcagaccaatgagttcagacaaggcaggagaaggaacaccactactttccccactagctatgtaacgccggctgttcttccaaatcagagggatttcatcctcttcttcatcatcttcatcaacaacacggacagtacacccattggggtcagcatcagacgggtcacacccattggggtcagcttcagcaaaatcaggcagtggcacttcctcagcaacaggaacagaaggaccggcaccctgatccaagctagacactcgacgaagacgtctcgtcttctttttctgcccctcagcaggaaaagtgggatgatcggctcgacgagaacgtttcgggcgaacattgtcagacatctgagcgtccaaagctttgccgacctcagggatgggcgccaccaccagtgtttcagtaggagcggcgtcagaagaatcctcagctaacatatctagcatggcatttatctccgcgtcacttggattcaaaggcacctcaaaatg

SEQ ID NO: 43623 - DNA, 322 bp, Zea Mays
gtgaagtagagcgtcggtcgcgggtttgtcgaacttcagcgagcacaccgtcgtgggggggtcttgctccgccgtgcgggggtacctggtggcgtgggtatggcgcggtaaccgttggataccagatgaacgcacgagattaggtcgtcgaatatcgtttcggttgcatcctagcgtcactgttggatggcgatcggaccgctccgatgcaattttagggcaggaaggattgttgggcgtggatctttgatcctgcggacatcatcacataccggttcgtgcatgggatcagtttcatgtgggccgtaggattagatctgag

SEQ ID NO: 43624 - DNA, 565 bp, Zea Mays
ggctaactctagtgagttcatccgaatcggtcgttagtcaggcagacacggcggccggagtgaaacagtggctcaagttcatccacaaggcgatttttactaccctgagcaaatatcagtactccgttgagcatgaatcgtagcgtccggcatgaatccgagcgcgtggtcgccggcggcgaggttccctgaacctgctgatattttgctactgtaccatcacgtttgttcttcagaacaactgacagagcacattcagggggtcatttctccaaaatttatgtgacaacatcgtcacccgtccgcatcaaagttgttgagcttcaatccctcttcaattttgttatagcatccctagtcaaattctcactgaatcctactcaaacttgatcccaaaattcggccaatgccattggtggccatgtttcagtttaaatctgactgacagcccgactttgtgctcatttttctccaaactctgtatgtgatcaaagcttagttacttaagcaaagttgcactcctattatagctctacaagtttgatgtgttgaccctaggcaaaat

SEQ ID NO: 43625 - DNA, 727 bp, Zea Mays
ctgggtggatggagtaagctgagttgtgggcttcattgagcagggcttcccgtgcttctcccactggtacacacaggcggttcttgaaccagaggactccttgctcatctgtcctaaggtccagaagttgcttcttgcgagctctttccataagtctggctgtctctgtgtccaggtgttgagccttgcacatgagatcttccagattgggcttgacttccaggctaccgctgtctcccagacatgcattcagctgggctgattctttcttccaatcttccagaaggttggttcctttaatcccgaaaggttttcggctgagggcgtctgctactacattggccttcccggggtggtagtggatttcgaggtcataatccttgatcaattcaagccatcttctttgacggaggttaaggtccggctgcgtgaagatgtatttcagacttgtgatcagtgaagatgtggcatttgttcccgatcagataatgcctccatatttttagggcgtgcactatggctgctaattccaagtcgtgggtagggtagttctgctcgtgtggcttgagtaagcgggatgcataggcaataactttcttgttttgcatcaagacacaccctaagccttaccttgaagcatcacagaagatgacgaaatcctggtgtatatctggcagtgtcaaaactggcgcagttgtaagcttctccttgatgatctggaaactct

SEQ ID NO: 43626 - DNA, 584 bp, Zea Mays
tgaaaatttgcacaaggtcatgttataacacctaaatgccagcaaaaataagtcttagagaataacctactgttaaaagagagttgtagttcaaaacaccccatttgccctaacacttgataattttgtacagagagaacccctcactttttaagccccaaattttgaggcagagaattatacaccagtgagaagccactgtaattgttgtagaatttttgaaaatttattaagatatcttgtagttcaaacccaccttcaaagcataaaagaaatagagaagaagagaggaattagaaagattaataagtattacctcaacatggcagctaagaatattgttaaaaatatccataagatataaagaagaaaatcagtagaacactaaaaatgggttaaccattcagtaatcaacttgatctgaacttcctgaagtacacctcaaaagtctctaatatctagacttagccccattccctttttaattaatctttcatcatgcaatctcaagtactaaattgcatatcatgccatacatgcatcttactcattgcattccttagattgcaacctcgctgacggag

SEQ ID NO: 43627 - DNA, 604 bp, Zea Mays
gggcctcacgtcctatgcctcccttgtttcctgcgaaggcgttgcgaatgctgatctatcccgtgagggcttcaagaacatcgaggccttcgagcagagtaatgaggagttcgaccgggaagtgttctaggttgaggacgttgcgctgaagcagtcggttggggattttacgaccagatgtttgagccacatgccgtgctgtcgtccgggagagggctggtcgtgcacatcgaggccttcgagcagattaatgaggacttcgaccgggaagtgttctaggttgaggacgttgcactgaagcagacgattggggattttatgaccagatgtttgagccacatgccgtgctgtcgtccgggagagggctggccgggcactggcataggtgaaggctttttcttttgtctagggtgaaaatattgccttttgatttctgatgctatgttattttctttctgcaggcactaaggaacgaggaggttgaagaccttgctggcttcaagtgctttttggctactcaagatgttggtgttgaggagggcgcggaggagcaatcgtcctgtgctgaggtcaaccacgccatcctcgatgcggtggggacttt

SEQ ID NO: 43628 - DNA, 658 bp, Zea Mays
atctgacggagggccggatggtccgagatcgtgtgcatccgttaggccgtgctcagagttgacccaccatttagcggagatggcagtgacggtcgtcctggatatgagtccatcggcataccagaatatggctggggaaacccatttgttgccgatgtgtttgttgcaattgttttggtgcctaatttatgtgataaaaattaggcatgtgagtttttcctaatgcatgtgccatcttatctatatcctctgtgatacttttaatccgattatcaaaagaaattttaatagatggaatatcatcggctgacctggtatcacctagcatggggagctattgcagcacgactgatatgtaatcgacgtttatttccctctcccggacggccttctagtggcaatctaccctgaagtgcgagaggaaccacttctccgccactttgagcacctgattttgttgttattggatcccctcgtccatcttcttcatgtcatcttctaattttttatgctcagcggcgacaaattaaaaagccttgtgtcgttgtttggagaagcaccttgagatctttagaatcggcaatataagcaagattttatagatctacaaccttattccccagcggagtgaccaaaaagtgtgttggcgccgatcttg

SEQ ID NO: 43629 - DNA, 575 bp, Zea Mays
ctcgactctagaacagtgttattaactgtccgagcttcagactcttctcttgcatcacgctgttgctgaatttgacgctgcccttcatgctgttggttgtgtgacgaagttggagccatgaccggttattctggcaaggcccaagcagctggagagtggcttgctgaagctactgaaactgtgggatgtgaaaatggctactgattgcccatatactctggaatgtatggggaataacacgaaacagtatgcaagacttgttttggttgattttgccgtgcttcggcctcagctatctccttttgcttctgtattgtaacttggcatgtgctggtcgtgtgccccatatcctctccacagaacaaacagaacatccttatcggttgttagttgaatcttcttccgaagcttcgtcccctctgcctcttggggatggtggtctcaatgagttttgtggcgtcctagttgactgggagctgtgttgatatctttgggtttgattgcctctgtctttgctttggctgggattgtgtatcgtcctaacattactttgatggagtcttcctttgaagccc

SEQ ID NO: 43630 - DNA, 445 bp, Zea Mays
gtgccgaaagtcaaaaaacaccttcccgaagctcattgagatgttagttttggaccgttctagtcatggccagtgggtttggttgctcaatgactgtaacagtttgaaatttaaaattgacccatataaaaggaacaatgcccttggacgttggcatgacatttgttatttccgctccttgcttgcatcagtttactctgcctatgaagcttgctccgagtgtttcattgtctttgaaccagccttagccagtacaaagcaagggtttctttgctagaaatgtccagagagcaatctgcctggacagtctatggtgccagttttggatgtctcggaaccaaagattgaagacttgtccatggcagcagaggccactccttcccaagccgaagctggtgctgtagatccatctgaggatagcgatgatattgatattgaagaggat

SEQ ID NO: 43631 - DNA, 380 bp, Zea Mays
ttctgacgcggtgcccgatggagagaggagaaggcgtgacgagcggagggaggaggaggaggcatggcgggttgtggagggaggagaaagcgcacaggaggaaccgagtgtccctacagagaaagtgtcgagatggaaaagaaaggctacgagatgaagaaagattaagcagtttttgcgcatcaattggcagtagtgggtaaacttcacgtctaggttccttgtagcggtttgtagagtagaggaggtactccaatatactccaaaaactctatggagttatttcttcaaagttaggtgtttgaggagaaattttttattccaacttagagtttgtttgacaaagcttcggctctggcttttctcggaaaaaacaagag

SEQ ID NO: 43632 - DNA, 386 bp, Zea Mays
aaataagggcggtgccaggtataagctatatggaaaattctactttcctttcaggtggcatacctggtaaatcatcgggaaacacatccaggaattctgatactacattgataccttttgatggctcgatttcctcaatatgggcagtgatctggtgatagcttcctttccttggtccagacaagaccaactccactaacacttcctcttctgataaggacactaacttcacagtcctcttgtcacagctaaggcttgcttgatatttggttagccaattcatccctaggatgacatctatggttacatctcgggtacccattactatcagatcagcagggaactctatcccccttatttgaactcttgcactggggcaaaatcta

SEQ ID NO: 43633 - DNA, 336 bp, Zea Mays
aaaaacacgaagtccatcgcgaagactatccgcgcagaagtcgcctaagggtgcagccggactagcacaacaagtgcgaaaaaacccgaagtccaccgcgaagaccatccacgcagaagccgcctaaaggcacagccgaactagtacaacaaaagtagaaacgacagcatcaaaccgtccacgctaagaccaactataatcacaccagcacagcataacaaaacataccagacaaaatacacaacgccttcgcaggcacaggcaagcgagggcactcgacttcatcatacaagcctttacacttatacacgcgaaggcgccacactctacatcggc

SEQ ID NO: 43634 - DNA, 697 bp, Zea Mays
aaggatgttgcattggtctcaattttgtattttattttactttttgtttcacaactccttaatgacgattcttaggtgcactttaagaagggcatttctactattttggatggtaagtgatattttgtttgtcaaatttctacatttggacgagctttgagttgatttccccattcttttagcccttcttgatgccttgtagcaggatcttcctctcataatttgaagtagcatagaagcctaggctatttgagattgacggtcaactagttcaggagggcaattcatagactggacttaggctttgctgctatggatgagagtgatgcttgtgacgacaaggttggtgaatgtagtggcttgtcaccattagaaaaacctataccattccctagcccattaaactcactccacccaaatatgtcaccctagttgtgagagatagagtgtttgaggagcctccaagagtcccacctctaaagaaagtgcagattccataacctaaccgtgttaagaacccacttgatactttgcccaacaactctagtgatcaccttcctagagcaccataaccacacaaagtgagccatgtccaaaaatagacaccacctatgagagaggtgatgtaccatttgcgagtgctacaggagggatagtcacctagttgggttttactttaggaggaagatagatgagt

SEQ ID NO: 43635 - DNA, 1041 bp, Zea Mays
gagatactgcaccttgagtggctagcaaatcctgttcttatactaaaaaagaataaagttgattggcgcatatgcgtcgactataccgatctcaacaaacacttcccgaaggatcccttcggaatccctagaatagatcaagtagttgttttaagcgatgtctgctctatgctctccttcctagattgctactctggatatcaccatatcagtatggcaaaggaagacaaggaaaagactgcattcatcatgccttttggagccttctgctataccaccatgtcgtttggcctcaaaaacactggagcgacttatcagaggctatccaaacatactcagccgatcactagggcaagcgtgtagaagcttatgtcgatgatgtggtaatcaaaatagaaaacccagaaaacttcatcgaagatttacagcaggtcttcaagagcttgaggcgctaccactggaagctaaatccagagaaatgtgtgttcggtgtaccagccggaaatctactcgttagccatcgaggaatcgaggctaacctagaaaacattgaagctatattgaggatggaaccatcacgatcacagaaaaggcgtagaggctcactgggtgcatggcagcattaagccgtttcatttcaaggctcggtgaaatgggaatgtcaccctataagctactcaagaaggtaaacaaattccactggactgtagaagcccaagaagatttggaagcactcaagaaatttctgaccacaccgctcgtactcaagccaccacgcagggccacagctaaccagtcagctgaagacctgttgttatatatctcctacatgactcacgtagtaagcactgcgttggtagtcgaacgagcagaggacgggtgtgcatacccagtacaacatcctgtctacttcatcagtgaagtcctcgggccctcaaagataaggtatcctcaagttcagaaactattatacgcagtacttcttactgctcgtaaactcagacactacttagacgacaacaaagtcatagtagtcatggg

SEQ ID NO: 43636 - DNA, 469 bp, Zea Mays
tgaattatagcacttgggtgttgaattgggttggtgactattttgatggcactctcattatcacatagcaatggcacttgtgtgaacttgactccataatgtagcaatgtagctttcagacataacaattgcgcacaatttcataccaaaatatatgctctacttcgaccattgatagtgcaatcaaattttattctttgatgaccaagacacaagtgaccttccaagcatttgacatgtgtctgatgtctctttctatccaccttgccatcccacagacaaaaatctgagtatccaattaactcaaattgggactccttgggatgcaaaagtccaacatttggtgtatgcttcaaatacttcaatgcccttttgtggatttcatgttattgtctcttggtgtggtttgaaatcttgtaggcatgcatacctaaacatcacatcgggtcttcatgtagtcacatagact

SEQ ID NO: 43637 - DNA, 274 bp, Zea Mays
gagggaggaataggtggctaattaattaggccccgtgggccagtgcttagactttttagggatgccctaagagcaccccattatttggagaggagacgttacttccagcatgcatgcattataaacacgaaaaggaattaaaacttgagctaacccatttccttttaaaaaaccatccgggctctctttttctttttcttccaccataatctttacctttggttcccttccgcagatgaattcacccaccccaccagtggaggagacactcgtt

SEQ ID NO: 43638 - DNA, 701 bp, Zea Mays
ttcaagggaactcgtgacctcgaggattgggagggcagtgcctccttgtgccatgtcaatgtggaacggtgcaaaggttatccgtgtcgatgggcgccttccagttgatctcggctggctgcactgtggccttctctactaggttgtggaggttttggtatgttgtccttgcctctggctcgtctggctcagggatggaccgtaacatcatgaccgatgcgggcgtgttttgtctagggttgaggaagtattgagcctcgtcacttccttgggcgagcaggtcatagacctttcatgcctgcggccttttggcctcgaagtggtgtcactcgatgttgtcgtagactctattgagcctacgcatgagggcatcaagctcttcttgccgttgctatagactttcctcgcgagccaggattcatgcctagcgctagcgctggtattgctcatcttggttgggggcttcgttgttgcgccctccattcttgccccgtggcggtgttacatgaagcaagttctcaaaactgcctcagtggcatcggtgtcgggctcttctattgagccattgctcgagtcatcctcaagaaggtcgaggatggaggttgactggtggccaatgatggccacgagtattgactatgaggctccctatgcctttttgcttgattgcggtggcaagccgattaaggcgcaacttaaga

SEQ ID NO: 43639 - DNA, 344 bp, Zea Mays
tgtaaggggcctgctgccttcaaatcaaaggctttgattctctggcaggtatcgcactcggatatgtacttggcaatttccctcttcattctggtccaccaatataaagatctaagatcatggtacatcttgttgctaccagggtgcatggagaatttggaaaggtgagcttcatccagtatcttctttctaagctcagggtccttgggaacaaccaatcgatctccaaaccataaaattcccttgttgtcctgtcggaaacacttgtatttttctgccttttgcttgatcatgtctttgataacctgaacacccttatcctcaatctgtgccctcactatttg

SEQ ID NO: 43640 - DNA, 422 bp, Zea Mays
caccggcgatgagcgagcagcgctggcagtctgatctttatcaggctactgtaccattgaagtgggattcagttggcctgacagtcaattttcaggcatggtttgctcacaaatcccaatgataacatactccatgctctgcagcaaagttggagagctatataccatctacatttcggctataatgattgaactcatttgatcactagatcaaggttcaattcaaccccaaagatggctctgttacactgaaaacctgaatttcagagtgataccagcctgacagccagactttaggcttaattatctcttagatttccttaacaactatgctcacaaccttaagcaaagttgttctccttagtttggtctacaactttgatgtggtgccccagggcaaattcttactgatttaaaagtta

SEQ ID NO: 43641 - DNA, 472 bp, Zea Mays
tcacttatggcaccactgtccactgcagcgtcctgaacggaatacgcgcgcgcgatgccaaataatgcatacggagtacattcttcaggcgtccccctgtctactgtcgctttcgtatctctttgcctgcctcgattggcagatcgatctactaccggccggtctcctgaggcatctccattcgcttcatcgggattgattcaggcatacttagctcaaacaaaagcaaccccacacgaagtgttcgtccgaatgaggtccaccagcagtgcaggtgcgcgccggaaacagcacaggtcctggcgtcctgctactagcagtatgcagataagtagacaagacaactgagaggcttttctttagactgaagataacaggcagctgtgagacatgattattattgcaaggttaaataaacgggtttgggttgcaatctcggcgcacacaacatttctgcgcatgaaatgcaagg

SEQ ID NO: 43642 - DNA, 373 bp, Zea Mays
tggttatcaagggtgtgaaggtatcccgccatgtagacgatggtgggatcatcttcaataagatctcctcctgacagggcctgatgtcttttcctccaggtgggggtattcttgttgctgggtgggaagtagcgaaggggggtttcaaagatcaccttgttgtagttctggcacagttgtcggagggctgttcgggcaacattctggcaagtatctggaaagcggtatccggtaagagtgacttggaaggaaggatggttcagatagttttagctttctcccaggtagactgccatagagcatttctccattccgccctcgagatactcctcccagacgttttccggcttcttgcggattcccaggcgaagcg

SEQ ID NO: 43643 - DNA, 420 bp, Zea Mays
ctggggtcagacggctcagcactgaagtcgacaagagaacacatggaaaaacagttagttacatgcaaggtccatccgaagcactcaccaagtctagaatctcattcctccgattggatgcaggaattagagccttcccttttagtatcctgccagaattcttatccaagtttgcttttggaaacctctgtccttcaagaagagtgcatagctcaattgggacatgattcggtttgtccttgctcttgctcaaatccaagcatggcagcatctgatactcaataacaatgccatgtttctgagcataatactccataagacactttgtttgtctggatttagtatccacaaaggccatctggctggcaggtaagggtgtcaagccttgcactgtgtacttctgattagtcctccgatgac

SEQ ID NO: 43644 - DNA, 363 bp, Zea Mays
tgatttcaaaagatatatcctatagagcaccagccatgattaagcaaccatcattatgatccataaagcataactactctaaggacaggtagcacaacaagccaacttaagagcaatactaaattgcaattatgtacttaaaatacacgggtaccgtccttttgagagcaggttgtagattctcatcaaggtcctttatttgattcaccaataatgattcaggacctatacaccttatttcacttgagatgaacatgggattagtgtttcataataattcaaccttgggtcaataaacaccaaaacaattaacagcttaagcatatagttttagataaccgtcttaatctctctcatggtctc

SEQ ID NO: 43645 - DNA, 636 bp, Zea Mays
tagaacatcaatcaaggatgcttgagctaacctgtagagggtggccacgacgcggtggttcacggcgtgaagaaaatcgatttgagaagagaaagaaattggagctctctggtggctagttggaggtaggagcgggtgctttggcttcgtgatgacccaacagagctgatggcacgcttaatttatagggctcgagggcggtggctcttgaatttggaatggcgcgctggcagccggagagaggggagagcactggcgcaagagatgcatggctttcaccgtgacgagaccaccggtgatgaccagacatgctaaggcaagtcactgcgatgtggtattgcgcttaggcacgtggcacccgatcggaaggcggccaaatccggcgaggttatctggaccgaccgtaaggcaaggggggtacgacgtccagggcgaaacagtgtctcgagcacatccccaacgtgatattccttaccccgagcagttatctgtacttcaatgaacacgaatcgcaacagcagcgatgatcacggtgcgggatcaccggcagtgatacactgaatctggcgatcttcgtcagatcactgtaccattagaacaccattcagagtacctgatagagcttacttgggggcg

SEQ ID NO: 43646 - DNA, 1092 bp, Zea Mays
ataaaatgagcatatttgaagaacaaatcaaccaccaccagcacagtattagcaccaccagatcgaggaagaccctctataaaatccatactgacaatctgccaggcatgttcaggtaccggcaaaggctgcaaaagccctgggtagcgattcctgtctggcttagcttgttggcagactgcacaattcatgacataagacttgatttgagttttcattctagcccaagcaaacaactgtttgatacgacgatatgtcactggaaaacccgaatgtgcacccattggactgtcatgtaaggctctaatcacctggagttgcaaggtctcattagcccccagccagactcgacccctgtacctcaaaatgccttgagacaaagtaaaattaccctgagaatgcccagttactgacagttcagacaacaattgttgcgcatgggcatcactggaatatccttccaccacttgagtcaaccactgtggtgtacctgatgaaatactgaacagcgaggattcactttcagacactggtcggcatgacaaagcatcagcagccccattgtcaacccctttttatatacaatgcgatactgtagaccaagcagcttagtgaatacacggtgttcccatggcgtgctcaaacgctgctctgtcaaatgagacagactgcgatggtccgaatatataagaaattttgcatgctgtatatagtgacgccacttgtccactgccatcaatattgccaaatattccttttcatatgttgacaaacctcgatttcgagtcccaagtgctttactcacatacacaagagaatgaccattctgtaataaaactgcaccaatgcccgaactcgaagcgtctgtttcaataacaaactgccttgaaaaatctggaagagctaacaccgaggctgatacaagagactgcttgagagcagaaaaagcttcatcatgcacactagtccatacaaacaacactcctttcttcagcaattccgtaagtggctttgcaataatcccaaaattcctgacaaacttgcgataatagcctgcaagcccaagaaatcccctgagatccttgacattcg

SEQ ID NO: 43647 - DNA, 381 bp, Zea Mays
atccgagcgagaaaatccattaccgagaagctcgggcagaggacgaatcggccgatgcgacggagtgagtatcggtgggatttgttggcaatcagcgacaggcgctgatttggatttggaagaagacgaccctgacgcggcggcacaatcacatctctctgcttcatggtggtggcctcctccatcgcgctgctccatggcgagatgagcacaggcctgcctaacgacgagcgcgcgctaactctgtctcttttcttgccagcgattgattcccagttcttgcctatatagccatggctatggaccggataatgatggggttggtggcagatccgactcacgcggcgtggaaatcggatttagttaggattcctcttgagg

SEQ ID NO: 43648 - DNA, 635 bp, Zea Mays
caatcgacaaattcaccaaatcgatagaattcaaacccattgcttccttaacctcggccaaagctgtggaattcatacaagacataatattcagattcggaataccaaacaatatcataactgacttaggatccaacttcacaagttcagaattcttcgatttctgcgagcaaaagagcattcagatcaagtatgcttcggtagcgcacccgagggccaacgggcaggttgagcgagctaacaggatgatactggaggcactcaggaaaagggtcttcgaaaagaatgaaaagttcgcaggaaagtggataagggaattaccctacgtcgtttggagcctaagaacccaacctagccgagctctacatggaaacactcttttcttcatggtctatgggtcagaggcagtattacccgccgatctcaagttcggggcgccgaggttggtcttcgaaagcatagcagaagccgaagcaactaggctggaggacattgatgtactcgaagaagaacgactgaatgcagtaattcaatcagcacggtaccagcagactctaagacgctatcacgacaaggtcgtgcgacaacgatccttctcagtgggagatctcgtcctccgccgaattctaacgggg

SEQ ID NO: 43649 - DNA, 861 bp, Zea Mays
tctagtgtgtttcctatccaatgctctaaagatgatgtggctgtggcccaggatttgttgccttgcgagttttcttcctttccttgccgatatttgggcctgtctctttctctccgtaaaatttcaaaggagcaagctcaaccaattgtggacaggacacaggatagcagaccaacttccaggttggaaggcagatttgatgactagagcttgaaggagagtgcaagtccaatatgtcctcactggtatgctggcaatggcaattgatgttccacaatgtactctcaaggccattgataagatccgcagaggttttctttggagaggtagtaaatacgctaaaggagggcattgtctcgtcacctgggcaagggtgtgtagacctctacatcttggtggattgggcatttccaatctaaaggaattatgttgggcattacgtatgcgttggctatggcttaaaaaaaactgacccagattttccttggtcatcgcttcccactcaggttcctagcaaaacccgggatttcttcaatatggtgctgatatctgaggtcggtaatggatcatctacccttttttggaccgacaagtggctgcatgggcatagactaggggatatggacccaatgctgttcgctgctattccaaacagaatatccaaaaaaggacagttcaagaggctcttcagaataagagatggattgaggatatcaaaggggccctcactgttggcgttctggttgattaccttcaactttgggagatgctggaaggctttcaactgcaggctggcactcaagataagcatatttttactgtctcggccaatggactctactcggcaaaagctgcttatga

SEQ ID NO: 43650 - DNA, 550 bp, Zea Mays
aactttgcaagtcttaagttgagcattaagacttgccacctcattgttcaatttagtaatagaagcaagatgttcatcacaagtatcaacatcaaaatccttacatctattacaaataacaacatgctctacacatgaactagttttgttgacttcctctagcttagcatttaattcatcatttaaactccttaaactagagacagattaatggcaagcagataactcagaggatagcatttcatttctcttaatttctaaagcaagagatttttgcacactaacaaatttgtcatgttcctcatataaaatatcctcttgcttttctagtagtctatctttttcattgagagcatcgattaattcattaatttttttctactttagctcgatctaaccccttaaataaatccgagtaatctatctcatcatcagaagattcctcatcgctagaaggagtgtacttgggggtatctcgaatgtgtaccttcttttccttggccataaggcatgtatggcgttcgttggggaagagtgaggacttgtcgaa

SEQ ID NO: 43651 - DNA, 854 bp, Zea Mays
gtttaatgggcctcatgagccaaacacatacacaaatttatccaaagtattttcttaaggatcaaagtatttgtttaaataattactttcattacaaatgttctggaaacaacctccagcatatgttggtgaatgagggcttcacagcaagttaaatttttaagaagaacgagaagctgaattatgtaaacatgtggcaagtagggatggcaaaaaaactcatggttcactagcttgctcgactcgtggtcaaattagctcgactcgacttggctcgttaacataacaagccagcttacactagcatttgagctcgttacgttaatgagctagcttgtgagccagtttgtgaaccacacgaccaagcatacgtacacacagttcagattcttctatgtttctctcacattatctcccatctaacttgagcaaggcaaatgccattgatgactgatcaccacacccatgtgagaggcatacttacatttttaagataaaaacattaggacttttcctctgtgtgacttctctactgccatccatgttcccactcatatcttctcactctcacctcaagaagaccatacgccgcctcccaagttccaagtctaacacgtgccaggtcaccaacatgcagggtcgcaggtgatgctctccatcctatattgtcttgcataagtggtgcacttagccttagctcgatcgcatgtcttctctaccttcgtcgtctgttacctatctgcatgttcccaagccgaagacctagaaatatcgagcatggatccaaggatgtcactgaaaagactagcgacattatcttcggcacgtccgatacctgcccacatgttcccaag

SEQ ID NO: 43652 - DNA, 357 bp, Zea Mays
ctcgggaaacacatccggaaagtccgacacaaccttgatagcctcaagcgggttggcctccttactatcaactgaaatctggtgacaatctccctccgctgaattaggcatccttagctcagccactacctcctctctggacggggacttcaatgttacggtcctcttgtcacagctaacattcgcttcatatttcattaaccaattcatccctcggatgacatctattccaggggtgtctattactattaggtcgctggggaaccctatcccccttatttccacccttatatttgagcataatttatctgcttgcactttgccaccaaccgaattaatcctcatgggctgcatcat

SEQ ID NO: 43653 - DNA, 294 bp, Zea Mays
atcagtggtaaatcgacaaatggaaatgagactttgagcaatgttaggtgcaaggagaatattgttaaggtagaatggtccgggaataatcgagtcacctactgacgtaactggaagagtggaaccatcacctacaacgatagatgaaggaccaaaagatttcaaaggacgaagtttagagatattactaatggagtggtgtggtgtgacgcaccaaagtatgctacctagtcattgacgaagtcgagaggcaagtgtagtgctatggtgctgaaagtgttcgcgagcgactgt

SEQ ID NO: 43654 - DNA, 497 bp, Zea Mays
ggaaattcacacactactaggatgttttgtacttcttgcactatggcttcaaaagctcgtccggttgccttgaccggagtaggtacatgaatcagcaatctagcttctcctaggccacgattcaactgaatggttcgttgtctagtgttgatgactgcttcattttgtgtcaaccagttcaaacccaagattacatctatatattgcccctttataactaccatattagtgggaaacttatacccgaccatttctaccattatttgagatactatctctttggtatacattcgaccccctggtgactgtatcactatacccttctttgattccttagtcaagatgatatgcttctcaataaaggccttgcttataaaagtgtgtgatgcaccagaataaaaaagaatgactacatgatgatttgcgatggaaaacgtacccatcaacacaggttctccttctggtttagtagccacttgagtataataaacctgtcc

SEQ ID NO: 43655 - DNA, 1190 bp, Zea Mays
ccgcccgaagtccacgacggcgaacagcgcagggccgagctatggtgagcttgtaccggccggattacttgatgacgggtgctctacttcagttgaaaccaaattcaaggcgtaacaatcatttcccctctactaatttcacgaacgacgctctaacctgctctgtccatggtgaccgtatgatcaacggccaaaccaacgcgttcccggtgatctaaggtagcttagctcaatcgagttggtcgaggagcatcagggcacacaagaacactaaaacgagagggaagaggctatgagcggacctgagatgagctgaccacagcgaggtcacaccgctcggtgttcttgagtgatttgggggaaatcccaaactagggagttctagtggatgattcgaggcacgggttgcttctctggttgcacaattacatagcggagcaggcggggtcagcaatttataggcttccacagtggtggcgtccaatttcgtgaagatgtgctggcggccggagaggaagaaagttactggcgctcgggattagtggctttcaccgtggcaagctcccaggcgatcaccgggcatgcacgatgtgattcactgcgacgtggtcaagctctttagcacgtggcgcacgacggtaatcggccaacggcggtgaggtctatctgaccgattcgacgagcaagtgggtacggtgagcttagctgtgaccgagcccgagtcgatccaggcgccaagatctttactcgcccacagttatccgcatgtcatagcgcacgaatcgcagcggcttgcgtgaatcacggtgcgacgttcaccggcggcgaagggggatgaacttggaatcttgttcagttactgtaccatggagtccctattcagtgcacctgatagaccactttgcagggcttagatcttaggtttttacatgacaacttattgatctgccagtagcaaagttgttgtccgatgatccagctacaatcttgctatagcaatcatagccaaataatgactaaatcacaatcaaatccaagctcaaagattgcctaatctcactgtcagtctgaattcagacttaaagcagtctgacagcttgactttgggcacatttttctccaaatttttcatgtgaccatggtttaattcctatagcaaagttgttctccttacatagctttacaaactt

SEQ ID NO: 43656 - DNA, 435 bp, Zea Mays
gacccttgctgctacattcttcgtcgctgatgtagaaggacattacagtctaatcctaggcagagattggattcatgccaaccaatgtatacctacattacatcaaatgttaatacaatgggtaggtgatgatatagaacaagtacatgctgatgtatcggcctgtatcgctgtggtcgatgcccctgtaatctgtacttatgagactgctacatgtctcacaggagtagatttttctgattactagttcataagtatagataagaagggtttcattcctgtaatgctagagccgatggagaatcggctaaatcctaaataaagtttaaatgatgagtacacacaaaattcatgagtccttggtcacggacagtttggcttctaaggccggatggtctggtctttcataaaacagttcggactttaagaccaaac

SEQ ID NO: 43657 - DNA, 942 bp, Zea Mays
gttggttgcttgcaacggagggggcctgaaaggagctttaaccctaatgactgaaacatgacggagtgggtccagctggcttgttgaagcttagtcccttgggtggaaacccaaaggatcgaattctctggtgcctatcctgctactgagctcggaggacttggaatttcctcttgaggtgacccttttcttcttcccttgccctttccacttgtatggccttgtttgagaggtgcgagaagctgaggaaatcttggctggcaaggatagtcttgagttctggtcttagccccttcaagaaatgggccatcttcttggcttctgtgctgacatcgtcaggcgcgtagcgagccagttctgtgaatttgtgcacgtactcactgatagatcttccaccttgagttagttcccgaaattcatcttccttgagctgaacgatcccttggggcacatgatgttctcagaaagcagcttcaaattctgcccaggtagcatctctgacggcaacgctgaaggtatcccaccaggatagggccatcctggaaagttgatgagcagccaggtgaacgcgctggttctcggggcatccgatggcttctaacttcctttttatcgtgcgcagccagtcatcagcgtcgagtggattgctcgatccagcgaatgtgggaggcttgattcttagaaaatcttccatcctgtcctgaggccttccaccattcgggcgctggttctcaagacttctggtgcgtacttcaatgagtcgggcttggttggccagaatttgggctaaatctaatggcagctccagaggtgcggggaggtgggtctcactcccttctccaccggcttctccttcagctcctaggggaaaccttgctccaatcccggaggcggtaggcgtggttttatccgaagccatctgccagggggagagaattacta

SEQ ID NO: 43658 - DNA, 1593 bp, Zea Mays
ctggggacctactgaggctctacaacgctgcgcatttcaggacccatggggagacaatactcgatgaagccatcgcgttcgcgagaagccgtctggagatgatgctgccctacgtgaaagggccattgttggcgcatgaagtcagatcctcgctggagatcccgctgcctagaagggtcaggatctacgagtcaaagtattacatccatgcgtatgagacaagtggaacgctgcatgagaaggtactgcaacttgccaagctgaactccaacgttctgcagctccatcatcagcaagagctgaagatccttacaaggtacacggtgaagaatctagctagcggcttctaaacttagatttccacggttcattttataagcaaagtgtttttttagctctttgacaacagctatgtgcctgcatatatgtgcatgcagatggtgggaggatatgcagatcggatcaaaacttcctttcgcacgagatagaatcgtggagtgttttctatggatcttaggagtatactatgaaccgtgtcattcaagagcccggataatattgacaatggttatcgccatcgtgacactcttggacgatattttcgattctttcgcgaccccacaagaatgtgaaatactcactaattgcatcgaaaggtttgcatgaacttaatttcctagcagctagcttgcttaaaagatattctttttttatcctaggttctcgtctggaatcgacttctttgcctagtgtcagacactcggcaaagcttttttttactcctcagcaaagaagggatcagcaaacgacctttgtcgagtggtatttgtcgggcactcaacaaacactttgcctagtactacgcgacactcggcaaacaaaagttgctctaaaccctaaaacctttgccaagtgtcgtggtaggatactcagcaaaattaacggcgagtggatgacgttctttgctgactacaatttgtcaagtgtttttctttgcctagtgtccgacactaggcaaaccacctctttaccgggtgtttttatttgtctagtgttcagcgttaggcaaaccggtgccacatttttgccgagtgcttttcattgcctagtgtccggcactaggcaaatcatatatttgctgagtgtttttctttgcctagtatagcacttggcaagaaactctttgtccagtgcacgtggatttacactcggcaaaaaatttagcactagacaaagatcttctctcgggtaatgcatgctatgctcttgactataaaatttaattgtaaagaacaaacaaaagaaaaaggaaggtgtgtgctattttaaactacctaaaaagatttcagcatttttaatttctaccatgcatagcatagtggtagtatatagaattctcatatatgtacgttgtttcgcaattgtcatgtccagctgggatcccaaaggggctcaagacctcccaggttgcatgaaatttgctctagagaagatattggatagctaccagaccattacaaatatgctccaccgagaggacaagtatcgaatgacgtatctaagacactttgtaagataccttacatattttgt

SEQ ID NO: 43659 - DNA, 356 bp, Zea Mays
agcgtgcgatttcaatcttcatctttgtccaccaataatgctgttttagatcatgatacatcttagtgcttccgggatgaatagaatagcgactaagatgtgcttcacccaaaatttgctggtggatctcatcatttttgggcacaactatgcggttgttaaaccatacaacaccttgatcatctcttctgaagcagtcggctttaccggcttctattttctcatgaatgtgcttaattccctcatcatttctttgtgcatcaattatttgttgcaggatgactgactcaagcttcaaatgatttgaagtcccatgctgaatcattcctaggttcaacttctccatttcttggcat

SEQ ID NO: 43660 - DNA, 468 bp, Zea Mays
ctggttacatatggtttctgtcgaaagggatcatcgcgctagaatagttctgcttcagtaaaagcctcgacgtgtgtcgttatttgttcccgtataaatttttgctcacgcatcttcaagactaccagtgaagcatgtcggtgagggaagtccaagcatcattattactccttctgtccacgtctgcctgcaccgacccttggtcttcatagcctaacctcttggcttccctttgtagtcttgtgtgcttcgtatgctgtcagagaattcaggcctagggctagttggccatgtgtggggctcaagcctaggactcgtaagtcatgaatggggcccaggactaggactcgtaggtcatgagtggaaggcggaccgactcttttcccatgtagtggctcgatgccaagtgcggtattgatgatgagagcagtcctttggtcagacgcggaatccactcaagtgctccct

SEQ ID NO: 43661 - DNA, 379 bp, Zea Mays
gaaccattcacttttccagccggttggccacttggtgcgatagctgagcaccggggccttcgtatccttgcgatacgcgaagttgtaacagccaaaattctcatgtaacccatcttctctggcctttgtttggtaatgtagctcatgcgctcggcaaaaagcttcagcatttgggtccattccttggcttcgaagggcctagatgaaggcgctgagcttaacgatagcgttaggggtcagctgatgaaggtagatttcataattatccaaaacttccccaatcatctcgttcaagggaaactgcaatccggctctgaaaaagctcttgaaaaccaccacttcatcttttttgggctctagagtggtttcttctccggca

SEQ ID NO: 43662 - DNA, 515 bp, Zea Mays
ggtctataaaaggggagggttggcccgaaggcaaggggacgaaaaaaggagaatggcactggatgacttagccaagtagcaaacgcccgatatgtatcacttgagaaccaacatcgcatagagacttgggatccttccctctcttgcccgcttatatcgcacatctatctttgtctatcccgattatatcaaggatcttgtgaagttcagaaatatttcgccatagtaattaacgagaatagtgcctactcgacttagtcgtaaagcgaatatgaatttggagaataaactcagtctcgcgatttaattgaaattaactcgacgactttactcgcttccacatattcaaatagccatcgtcatctatctacaacatctatccctccgccagacataacataaaacaattattaataaaacattaactttcttaaatagactaaatcatcacaatagcatcgctaaaatatgtcggctagccggataaaatacttagcctatctctcgtattatta

SEQ ID NO: 43663 - DNA, 498 bp, Zea Mays
ggctcgcgccgtggccttagcttacagccgaggagtcctgtcgttacgcggagccatgctcgccgtcgccgggagtcgggtgaatgtcagggagcctcggtggaattccttcaatccagtgttcatcaccgagccgctgcaccatggttgagggtctcctcggcatgaaccctggtgagattctggaccccgttggttcgcttgctggtccgctctacgtagcacaaatcataggggaaaatggagctatggtgctcgactggacgggagcaccggtgatggtctccgtcgttgggggcggccgccgctggtgcgggatctgctgcgctcagctatcgatggtggaagacaacccatgaaccgtagatcgcattatcagtggccaggattagaagatagggccaacttgactagagcctatctccaccgttcgatcatttaccgacgtgtaggattagatcgcgttcaaaagtgacctggaccattgatccattatcc

SEQ ID NO: 43664 - DNA, 799 bp, Zea Mays
tgcgccgcgtgtcccaatctcgccaccgcatcgctgtgactccctctaagtgcccgtcgactgccggagttactgccacgccactggacacgtattcaccgcgccaaggctcttcctcatctccgcccgcccacgctgtccgctcaaattaagagccaccgccccgaggatctataaattgaccctgcagagagcttcacaacaccatcacccacctagccaccacgtattgctcgcaactgttcgcccaagcccgcgaattttgaattcgccccaaacccattctccgccacccgaaacccaatctcaccgcggccagctctttctaggttaattcattgctccctctcccttgtttgagcactctggttactctgtgatgctcgccgagcctccaatttaaactaggagaccaccagtcgctgggaacacgacgatctagccaccatgctctcggtcaccgtggccagagctccgtagttggtcttagatgcaattaggttgggggaaatgatcaaggtagccccaatttcatgtctgctactcggagaacctagccgttgccccaattggccggtacagaggctcgtcggacttcggccgtgcgtgaacgccgtcgtggaccttggtctgcgaaggaatagaagttcaaggacctatctgcaatctgtcagtgactctgcgcaatagtaaatgaccccgcgtcgagttatttgtttgtttagggccctttttgcgaaatcaccagtgcgggcgcgtgcgcgggcgcgcttctgcgtaaagttgggccgctcgggcc

SEQ ID NO: 43665 - DNA, 1214 bp, Zea Mays
acgccattgtcaccacaatgtcaatggtggtaatggtggtggcagctagagaggcacaccctggccatcaatctacaacccctagaccagacggatcaccatgtggcatgtaccgaccctgggtgcacggcaacagcatcacgaataacagcagcagcgtggacagcatcaacaacagccttatacatagcaggcgttgttggttgacgctactgccccatatggcctacctcctagcttgatttgtacgccttcactgcctccagcgccgaccatatagtagctcccccacactccacaataggtcacatcgtcgcctggctgccgcccttgactagtccttgggatcagcaatctttgtttagcacagtggctctcaaccctcccgccgtcatcgactatatggacacaagcgctcccaaccacatcacacctaatgttggtaatgtctccgtgattcgacctcctgattgcatgtctctttcctccatcattgttggcaagggatccattctccctatcacatatgtcgatcatacagttcttcctagaccgttttatattaataatattcttgttcctcctaataatattcagaatgtcctttctgtttgccagattaccactgacaacaattattccattgaatttaacccgcttggcctctcttcgaagggtctaactccaggaacttgatcatcatgtgcaatagctcgaggcccctctactccctaggctgtccactatcaccgcctttgtcgtggtttctcgtgctgcaccttccatctagcatcgccgcctcggtcatactggctctgagaccctctcatcccttgctaggtcatccactattctttgcaataaaagcatcggtgcttctttatgtcatatttgccaactggatcgctatactcattttcctttccctaatctatcctctcgtgctctccaaaaattcgacttagaacattgcgctctgtggacctctccaattgctagtgtgtatggttacaactattatctccttgtttgagatgattgctcacactttctctagacttttcctcaatgatttaagtttgacaccttctccaccttagctaattttatttctttagttcgtacctagtttggttgcaccagcaaaagcgtccagtgcgacaatggtcataagttcgacaaccacgcggtcctttctcctcacccatggtgcc

SEQ ID NO: 43666 - DNA, 552 bp, Zea Mays
ccagcaatcccctcgatgcagatgactggctgcgcacgatcaagagaaaactggaagccatcggatgccccaaaaatcagcgtattcaactggctgctcatcagctttcgggaatggccttagcatggtgggacaccttcagcgaggccgtcagagatgctacctgggcagatttcgaaacagctttccgtgagcaccatgtaccccaggggatagttcaactcaaggaagatgagttccgggagctaactcaaggtgggagaacaatcagtgagtatgtgcacaagttcacagaattggcccgttacgcgcctgacgatgtcagcaccgagtccaggaagatggcccatttcctgaagggactaagacccgagctttagaccatcctcgccagccaagacttcctcaacttttctcacctctccaacaaagccatccaagtggaaagggcaaaagaggaagaaaaagggcacctcaagaggaaattccaagttctccgagctcagcagcaagatcgtcaccagagagctcgaccctttgggcttccaccca

SEQ ID NO: 43667 - DNA, 726 bp, Zea Mays
taaattccagggagtaatagtgaggtatgatatgtctagtttatgagtatcattgatccgatgttctacaataaaatctgctacgacctggcctttcatagatttcaatggttcataggccaagtctactctataagtgcataagcccatttcccaatcctaccactcataattgggttttgcaaaaaaaaaattaatcacatcggtttgactggcaacggtgcaatgactagacattaaataacatctacacttggtgcatgcataaaataggcataagcataacttttcgataaaagtgtaccttgttttagcatccaccagcctccgacttaggtagttcaccacatgctcctttcctctagtcacttgtgtcagaacagccccaataaccttatcttcagctgcaatatacaatctgaacggtactcccacttgtggtgcttttaatacaagagccaaagacaaatactttctgatgagatcaaacgcttcctgctgttctgtccccaaataaattcggcatcattcttaagccgaaggatgggggtgaaggcatcaattttctcggctaggttagaaataaaccttcgcaaataatttatcttgccgagaaacttctgcacttcgaccttacaggttagaggtcccacattccgaatggatttgattcggtcagggtctatctctataccatgttcatgaatgatgaatcctaaaaactta

SEQ ID NO: 43668 - DNA, 631 bp, Zea Mays
caaacgaactcaaaacaatatcaatttggatcatgaccaagaactgcttaaataggctatgtgcagtgatccaaagagtgtatctcaccccactacaatcctcgaatcaaaacacaactcaagaactccaaggttgttccacaaatccaaagagataaggaaagggaagaagcggaggcaaaatcgaataaaaactgtagcacatacaaaattgagcgcaattcgatgaatgatggaccatgggtggttacgaccacccttcctctcaaatctggagttcacaaaaacagacaataggaaacaaaatcgcctatggatctcaggctaaactactacaacctagagaataaactaggattttctaaacacaatgagctatccaaaagggagagatagccaaatagatggctgcatacaacatccctcccacctatttatagggggttatttctctagtctaaactacccctaaatacatagagttcatccacttaactggaggcataatggaccaacttctagaatatgcatctgacggccacgtgctccacataaatttgctttgcctcgacgcaccccttcacgatgaaacgacatgtcacctccgattcccaccagaactgtaccacca

SEQ ID NO: 43669 - DNA, 902 bp, Zea Mays
actaaagccagcagcatctgccttctccaactctgtcaactgccccaagaatgctccaacactagcctccaagacacccaccaccaatagccaagtatgcaaacaacaattccacaacagggcccgagtaaaccacatcgacgcacagaaagctcatcaggcacctagagtagtgctcggtgagttcttggtagaatttaccgctgctgcagtactttttttattctggagcatctcattctttcatagccacgcatttcatggaaaagcatagattccaactgcaccgttagatgtcatcttgatcacctgaactccagggccagaccttctatgccacctcaaatgttcctaagtcagaatccttttaagtggtgtagtgtttctagcagacctagcagtgataccttcacagggaatcgatgtaatcctagatatggattggttgtcccaacataatggtgtcataggatgtgtagacaagattgtccttctcaccgatcatcaagggaaatcagtttcttgcctatcccgaccaacagctcaagacccgatgatgtcgagtctcacaacaaaaagcatatctgtagttgaggaatttatggatgtatttctataagaattaccaggaatgtctccagaaagagaagtggaattctacaatgacattctcctgggacggcaccgattgcaaaaagaccataccgtatggcacctacagaattggcagaattgaagacacaaatcgtagagcttcaacaaaaaggcttcattcgccctagctcatcaccttggggagccccagtcttgtttgtcaccaagaaggatggaaccatgaggatgtgtattgattaccaatacttaaatgaagtcacaatcaagaataagtattcgctacctca

SEQ ID NO: 43670 - DNA, 497 bp, Zea Mays
cgagcagacatgaatgaatgtgtagcaccagaatcaaataatattgttgcaggaattgcattaatgtaaaacataccaagtgcaatgtcagctccttctatagtagcatcaatggtgacttgattaaccctagcaatagagtatcccttgacagatcctggagtctactgcttattctgactagggtagtagcaatcctctatgggcaaacatttgcataatgtccagtcttcccacacttgaagcaagtagtgcctgcactcggtcctgagaatttcatcggggtaccagtgggggtagcctgacgagtcggtggagacctctgaggtgattgctgaactaggcgctggcctccgccagtgcaaactggtgtacactggggtgaactgtagcgtggacgaacactgctgcttccttgtccttgggatatagccttcctcttcaaatctcctagctgaacacgcttgtgttcaatagctagggccttgtcaagcagc

SEQ ID NO: 43671 - DNA, 333 bp, Zea Mays
ccgacagacagatatttacttgttgtctgggagacagtattggaaatcatcttcgtctgtgccattgtacaccaaggccccctttgggtatttcagttcccgggcgtagtgtttggcttccacgatttcttcttcaggtaacttttttcccgaagcatgttgaataataaagtcaagatcttcggacggtgcttcgggaataggagatttagctttttcgggtgtatccttcttctctagagccatgcctgtatctggagattcttgctcagctctttgctcagttgcagcaggctctgcctcggcgagcactaagggcccagctttggtttt

SEQ ID NO: 43672 - DNA, 650 bp, Zea Mays
gttacatccggtcggtaacttgtcacgtaaaaaatgaagaaaaacacttctgaagatgctctgtcagaacaaatgaagaagatcctgatggtacagtagtgaaaagatcttcagattcagtgtatctcaccgccggtgaccttacgccgcgattgacgccagtcgtcgcgattcgtgcgccctggtttgcagataacggctgacggtgaaagatctcaacgcagggaagggttgaagccttatcaccggactattcaccgtgccacttgccgcgcgattgactgaggtgtcctcgtcggagttcgccgcccttcgtagccgcgccacgtacttagaagagttaccacgttgtctatccatcgcctgagacattgccctggtgaacgccacggtagttcgcgccggtgacacaccccctctcttcggccaccagtctccccttcaaaattcggaaccaccgctctcggacactataaattgagtgcgctgctagctccgctaggttgttacgaagccagagcacccacccctgccctcgattagccaccatagccagaatttcgtttttccccaaatctgttgtccgcaccaccgtgagacgtcgcgctgtggccagccatctccaggaccgccctcgctctccttgtccg

SEQ ID NO: 43673 - DNA, 710 bp, Zea Mays
tatgtccatgatcttactgtcttttgagaccctttcctattctattgttaagtcgctatctttttggcaatttgtactttcttggtcttggtatgctcgtaccattggaatcttgcatactcttatttttatatatgcttatcttcatacccccagtatttgtttaagacatttcaacttacatgttcttgaccacccttgtttattaatgatccatgagtgatcatttcatttcacacacctgtggtaatctcgctgtttccttgtaacttccttcagtggtgaatttttacttcaactcttctgtcggaacctcacttatcttatccttgattgttttctccaccttgccatttggtgagtcttgccttgactctgtccatggattatgcttttcatcattatcacatttacccttatcacctctatcttaccttgatgtttatcttatactggccctttaaaatatcctcttttccatctcaatctaagcattgtactttacctacttttccctttgtcgtatcatcttctttcccacctgcgagtttttaactctatcctttgttttgttttgtttgttatttcctttacccttctcatcactctatcctaccttgtgattacattatgtctgttatctaaaatcttcagtctcctatctcaatttgagagcggtgttttacttacctcacccttggctatatcct

SEQ ID NO: 43674 - DNA, 741 bp, Zea Mays
aaagctcacacgagaggtgacgatccaggcgggacgggagacggcacacgatcacacaaggtcactgaaaagacagaagagatgagcacgtattagtcacatagtcataagcatatgaaatgtgaataaatacatacacagagagatatggcacgagacgggacgatcaagaagtcaaacgacgtgaaaacgacgtgtgacagacaaatagtgacataggatgattggaattcgaattgaggcacgaaacgatatgagattgagccgatacttcacgaataggtttagataggtcaatatgagtgaagtgtgtgcatggtttgaatttaggcgaagaaatagggttttgggcactcggctcggaaacgatcgcgcaaaacgggaattttggtgaaatttaagcctgggatctcggattggcgtgaaatttggcaagtaggttactggaagtgtggtgaaggtgcctgaaaaatttgggttcaattggagcaagtttggctggtttgggcatttcaccgagcatgtggcgtgcggggatctagggttttggtgaaacggccattggaggtgggaatgccctcccgaaggagctaaaaacttgcagggatacacaatgggaataatgcaatgcattccaccagcaggattcacaaaatttcacaaagatttgaaagaattgctcgaagggaagaggtgggaggctctgctcaccagaacagagaagaactgagggaggaggga

SEQ ID NO: 43675 - DNA, 889 bp, Zea Mays
ggaaaacattaattatgaagccaacgatgaacagcaggaccactatgtggggttatgacctgtcactgaacattacacctcaatgtttgagacggggcacttccctaacctgctgcaggatgttatgcatgcgttggaaacctacgtccgatccctgtatgagacaaggcgagtgtacgagcctcctcgggcttgctactacatcactcacattcatgtcagggtgatggatgcaggtgatagagggttcaggactctgtcagctcatgagtctctgacgtcgctatccacctacgctgcttcggtcagtgatgctgctaggcaaactctatggtccctcaaccacacctaccgacagtagctgcacaacacgaagtacatgcatcttcctctgcgtattcgtgaagaaaaccagaccagcattgttctaggtggagctggagaagatcgcctcaacaccctagctggtatggtggcaggtcttaacaccgacctggatagtgctaccctggacctctctagggtacacttggagctggaggatgcacatgcaaggatcgcagccctagaagattagcttgatggaaggaatcccccggaagttcaagtccctgccatggtgttatcccctccccgcaagaggatccgctatggagaaccaggatccatcaccaggctgctttttcttcaattatgttgtaataagttagatttcatgttagacgataaacatctttatattactacaatattaataataacaaccatgtaatggtgttgtttgcaatgtttgatttggatttttggttgattgcaatggtcttatggaatgatggcaataagagcataaaattaacattaataataagccattcccatagaatctttt

SEQ ID NO: 43676 - DNA, 622 bp, Zea Mays
ggaaaatttgtttcacaattttatcattttcctaccattttctataattgttttggctctggggataaaagaaaaagacaaattgatgaatagtactgggctgctttcagcccagtagcccagcacagagggagaaagcgtccgcgcgcgcccgcgcgtgctggcggttttgcgcaaaagtcctcggggctttcacaaactgggatccggtcttccactgtttaacgcagtcgctgacagtttgcataaaagtcctttcccttctatctattctgagtttaaagtccccgaccacgacgcgtttgccgttcatcactgacgccgcacggactggccccggccgatggcgaatgctcagtcgagcgacagcgggagcataacctactcaaggcgaccaaggaacatgcatcaattggacaagaacgccatgagaacggcttgtccacgttcacggtgggaaccacggcgttgatcccatgttcccaattacgcaggcccggattgggcaaacggttgctacggtgagctttacgtgcctacatagatgctagaacaatacttgagaggcgcggaactttaccagagtggtctggccacggtggggtgggtttcacggcggcgg

SEQ ID NO: 43677 - DNA, 840 bp, Zea Mays
ttcgtgctttctcggcatcaagggtcgcctcgttcccagggaggcacacactaactttactgctaaaataaccaagtctcttcatagattgctgatccttctccctcaaggtggaacgaccaatttcaatatagcttggcttcgaaggtctgtccttcggcaactctggagcaggcctgacgatgacgaagctctcacggatttggagatgggtggggtatcttgtcgtgcttccgaagaggtaggggtgatcagttttacgatggtctgaatcctagtcatctgagtggaccggaaattgtccgagatgacttagccaaagctatcttccaaagtagcggtggacgttaagcttcagaggcacaaaagtttttggtagcaggtagttgagggcggtaaatgtgatccgcacccactcgttcgactgtttttatactgagaaataggcacgaagcggcgcaagtcgccaaaaaacgttcccatgcatcacactcagcttcttctcgtccgtctaactttcagatcaattgtttttattgaatcgatctatcttcttcataacgagtttcggtaaagtgtttttcggaccttcggcacaagacctcccaattttttgtgacctaagctcattacgaagaaacaaactcatcccacaaggtgctactgttgggggtctacctttgccgaaggtcctcatttaaccttcactgtaatataaacaagcgtgtttcagatatacttcaatcaatggacgaatctggccttcgtctgaaatagcgtataaagaagcttattctatgcacgcaaataataaaggtgtgagccaaatttgatatcgtc

SEQ ID NO: 43678 - DNA, 313 bp, Zea Mays
gcgagttttgtctcccttgcatttggatcccaacttcctagttactacttttgcatttttgcatgaaagtacaaaagaagcattgcaagcatgatagacagtagtagaaccattgcaagtttttctaggcacatgagacataacatgattacgcctaggcctatttctaccatgtgcataagtagagcttgatgcaaacatagcatgtgaatcatgatagataggtaaagcaacatgattataactcctatcatgatgagaaactttcttaacatgagcataaagataagcatggttcttttgatcatgtgag

SEQ ID NO: 43679 - DNA, 463 bp, Zea Mays
gctcaccgtcggccatctctttgctaagaccggccatggacggcgtcgtctgacccaattaagtgtcggactagcatccccaaccctataaggatctaagcccttccttaattgcaccaatctagccctaggttctcccacccgcgacgacggcgaacttcacggacaaatcgaggtgttctagataattgagcagggtctagcttaatgggttgaaccgatgagcatcaccagtgaatagaggtgttgaaacatgaacaaagagaacaagaacgaacctagagttggcggtccacggtgtgatggttcacgacggtgcagagaagtgaattggggaaatgcgaaattggggtgcggtggtgcacgataggagctagctggggatgggttggacatgtaactaagaagcggagcagagggcatcctcaatttataggtctcgatcgaaatggacaagaatttt

SEQ ID NO: 43680 - DNA, 315 bp, Zea Mays
ttgcttcaaatcctgcgaatcctccgtcaatccttctatgttctctctcccatcctcacacttgccggaaggtttctcttgggggtgcaggtcctgtctaatgttcatgtcttgtaaatctagacaagatttaagattatcttttgtctttccatctaaattgaacagtgtaccatgtagattatcaaaaacattcttctcaatatgcatcacatcaagattgtatctaagaatattatcatcccaatatggcaatgtgaacaggctacttactgacttgtaagttttagaattcttaaaatcccctagtgaaat

SEQ ID NO: 43681 - DNA, 397 bp, Zea Mays
aggaaatggtgactcaaatacagttggatgcacagggcgtgtgggatcgtgtcaccactctagtgtaggaattaccggctatggagacttatttcgagaagctggaagctaagacgcgggctggcatggattaggcccattcgttgtttgttgaggcctatcacgtactaggcgctgtaacgatgcccttcgatagctccagggaggagctaggcacttgtttcctcggctggtggcaggaggagctggcaagtctcccggacaggttgatggcctatgcctcctttgttacccgcgaaggctttgtcaatgctctgtcggcagtttgagagctttgaatagagtaatctggacttcgaccaagagggttttcaagtcgaggacctgtatatgaagc

SEQ ID NO: 43682 - DNA, 363 bp, Zea Mays
acgaaattgaaaaaggacttaggaggtggcagattccaagcagagtaggcaacaggagcaccaacatttgatactttgcctctcaagatcatgtttagttggctcaacagatcctcagcaggaattctcctattagtaacccgagtcgagtcagtaacaccactgtacaaataagctaggtatgctctgtccttcaatggctgaatattcttaaaaacaaagtcagcaaccatagcctcagcagtcagacctctctcctttagcagacagatttcagcaagcagaaccctagcttctgttacttccaaggcagtaggagactcaatccaactcaaagtgcgcacatctggttgtctccccgat

SEQ ID NO: 43683 - DNA, 556 bp, Zea Mays
gggaggggccgttgtgatccagctgtacaccggctgatgttgcttgcttgtttcaatttgcttgcttgcttgtgtcgtccttatcatttgtgtcgagatgtgcctggaccatgcatggtgttgtgctatgtggccgcgtgttcacgttcaagctgtgtttaagcagcaaacaccttgcaccttatcctatgtgctcaattcctaaaatatttttgtggactagtcttgtacgtcttctcttcttcacattggctctgaagcctatacgtgtcttcctcaaacaggtgcttaggtcattttccctaccgtactatcggcacgaaaggttctcagcaccctcctctcaacgctcggacgtcatccttctccatttggccttcagccaggatgccagcttccatggtcccacagtgttgctcgcccaggtgtgcccacgtccggccatgaagatcctacgagctttctcccatcctggctccctggcgctcatcatgcaatgcctccgccagtcaatctctcgctcagatcactgtcgcccaaccccaagttgtgcttg

SEQ ID NO: 43684 - DNA, 721 bp, Zea Mays
gttggctacagtaaccatcatggagttaaacaaagtagtttcagcgacgataaaaggtatacatggagcaaagaagcactagacgtagctgaggccaacaatataccgtattgattacattcatacatggtgactgctaacgagttatacaatcccaccgttattagcaaagtaaccgctataatattctgatgataatgatcatttttccactgtactatagaaatacagatgaaggcaaacaaaaaataaaaatacatcaaaagtccatataaatctcagaatagtcactactgtgtacctttatttccacacttgctaatggtttaagatcagtggttgcactcgccgccaaggtccacgagtttaagtttcttctcgccccggatcgaatagatgcacgtaaacggctaggaagaaacgggaagtaatgagaaaaaataattatctagccactacactgaaagcaaatatggcgggttggtcttaatgttcaatgatttaacatgtccctagcaccataacatcaagataacacatgcttaaacaagtatccaacatttttggacaatgaacaagaagaaattggagaaaatggagcagaaatcacaacagtattgcatacctcatcatactaattttcttttgatgcatcacattacatttcatagtaaaacatcacattacaacagttttggacaaactgaaaaacaagtatttc

SEQ ID NO: 43685 - DNA, 475 bp, Zea Mays
gtagagaacaatagttgcgtaccaagttttacccaaaaattttccaaaagtaactcaaaaatttaatgtctcgattagaaacaatggttcatggactcccatgtaaatgaacaacttctttgaaaaacaattcagcaatatgtgaagcatcatcactttgtggcatggaataaaatgtgccattttgctaaatcgatcaaccacaacaaaaattgaatcccttccctacttggtttggtggtaaaccatgaacaaaatccatagatatattttcccaaggcacactaggaataggtagtggagtgtataagtcatgagggtttaaacgagacttagctttatgaaatgattcgcataagaagatgtcgatccacatcccttctcattttaggccaaaagaaatggttggcaagcacttgctccatcttcttggcgccaaaatgacccataagtcctcctgcatgagcttcctgca

SEQ ID NO: 43686 - DNA, 319 bp, Zea Mays
ggaagtgatgcagggcgccaagatctgtcatggcaaactccgagtggaggcgtcccatgatgtcctgaagaagtgttggggaggatgcgattacgacgatgtagtccacgtacagtagtagatatgccgatgcagttcccttttcgtaaacaaagagggaggtgtcggagatggcagtgatgaagccgagtcgtcttatgtacgtggcgaaccattggtaccacgcacgaggtgactgcttcagaccacagagagacttctagagaaggcaaacatggtcaggagcagaggggtcgacgaaaccaggaggctgctggca

SEQ ID NO: 43687 - DNA, 526 bp, Zea Mays
acatcaaagcatcacaagcgtttttacggaacctatcggttaacttgatcgacacactacccatgttccttgcctttcaaattttatcgcccaataggaatcatccccatttgccaatgacaccaaccatacctactgacctattgtttaccacccgagcatagttacatgccgcacactagtttctaacatgattctcgcataactcgtaattcaactactcactaacaataattcacgcacgacaactaccacatcgactaagagttctaagtattaaacatattatcacattccacgcgcaaataaacctcaactaaacaccagtgacaccgatggatttttactaaactcatcatgtgcataacctcgtctcgcatacaaccatatggtggcgtgcactcgagacacttcgatcaatgtggcgcgactactaatatatgaactccaacactcatgtcttaacaatacatcctccacgcaaactagcattttctaaactactcgtcacatcaattcatataac

SEQ ID NO: 43688 - DNA, 333 bp, Zea Mays
cgtatttccattttacagaatacatggtcgccccagctgttttgaaatacagcctaggtataaaactttctgaggtgctctatgttccaggagttcccaacttctgtgccatccatctgagtgaggcgatatgatccgggccgagtgacttctgctactatgaaaggtccttcctataagggtgataacttgtgccgtccctctcccgttagaattcggcggaggacgaggtctcctatcgaaaagaaccgttgccgcacagccttgtcgtgatagcgccttagagtctgctggtaccgtgctgattggattactgcattcagtcgctcttcc

SEQ ID NO: 43689 - DNA, 413 bp, Zea Mays
atagttcgaagtcattcaaagtcattcacattgacatattaagagcagtggaatcctaactaaggctatcagccatcacctggttggttagagttatggccacttctagcctaggctggaccgtgggtgatgaaaaggttgttcacccataaagtcatgtcgtcgtcttggccagatgcatctccaggtgctgcaaccaaagtcaaaggtgtctggaagccttgtaacacataagttgagatattaaacactaagttcttcatttctatcacatacacatgtatatacacaaaagtggcggaggtggaggcggcggtgcaagtgtcgaaggcggcaccccaaaggttcacatagtactcgttacgaataagatgcaagtagctgtggaggaagcacaaatacctgatctggac

SEQ ID NO: 43690 - DNA, 324 bp, Zea Mays
atcagctttgtatactgcgaggggttgcttgaccgaggagaaaacgtctgacaggcttcgcaggaccttgtgacccgatttgcggcgcagatcattgcgggccagtaaaagccttggcggatcaccttagcggctagggccctaggccctgcgtgcgagccacacgtgccgctgtggacttcgcgtaggatctggatgccctcggtttcggtgacgcacttaagcattggctgattgacccctttcttgtagagttggccttcgatcagtgtgaagtctcggcttcgatgtccgaggcgtttggcctcactgatgttggttgga

SEQ ID NO: 43691 - DNA, 395 bp, Zea Mays
agctgaacctggaagttgtttcttcaggtgacttaggctacatctcggtggaacccacattgcaagagcaaatagtcagggcacagattgaagataagggtgttcagatgatcaaggaaatgatcaagcaaaaggtagaaaaatacaagtgcttccgtcacgacagcaagggaattctatggtttgaagatcgattggttgttcccaaggacccggagctcagaaggaagatactggatgaagctcatctttcgaaattttccatgcaccctggtagcaacaagatgtaccatgatctcaaatctttatattggtggaccagaatgaagagggaaattgccaagtacatatttgagtgtgacacttgccagagaatcaaagctagtcacttgaag

SEQ ID NO: 43692 - DNA, 745 bp, Zea Mays
cttgccgccggtgaatgctgaagtgcgagccattggagtggaagtcatgcacagatggcgtgatggggtggttaatcgccttgcttgttattggtgtaccccctgcggtgatgcacttctgaagccgtgatcaagccagaaatcaatcctgaacatggcttagtactataccctcagggctcctactttgttgtgctcaacctttcgaatcatgtagctggagcttgtcgagcagagctttaggaaccaacccttaagtttggtcaaggtccagacctttagggacccagtccgaggtattaggacaacaattctagggtggtggagggtgtaggcttatggtacggaaccaggctaagtggctacctagctccggaccacccctgagaacgtggtcctttcccctggttggaggtccctagctattcgatcctcgttcaacatcaaatggggccccaaactaagcgacaagctagttacatgatcacaacagaagttaggaaccacgtgagggctagaggaaacaatatatgtaaattaaagcaggaaaatgattgaattgagagcaaattcttccttcataaatgaatttgtaagagttaggcgatggacgccagagattgggtttatgagggtggacctcaccgagtacaaaagaactgtgcgatggattctagagaccgggtttatgagggcggacctcaccggctggatcacaggtaaacactatcctattacgaaggaa

SEQ ID NO: 43693 - DNA, 543 bp, Zea Mays
gcttctttagcttcttgtcgtaatccatcttcagggttcggtaggcttcatgagtattggtttcctcgccttccgctatttcgagactctcttggagggacgccttttcccttttaagtttcttgacttgttgctctaggctttccacccgggagtttaggtgagtgcagtgtgaggaaaggtcatcatattggttatcgagagtgcggaggtatccggccatgtagacgatggtggggtcatcctcggtagggtctcttcctaacagggcctgaagtcttttcctccaggcaggggtatttttgttgctgggtggaaagtagcgaaggggagtttcaaagaccactctgctatagttttggcatagctgtcggagggcttttcgggcaacattttggcaagtgtctgggaagtggtgtccggtgaaagtgacttggaaaggagggtgctttgggtagtttcggctttctcccaggtagattgccatagagcacttctccattccattttcgagatattccttccagacatattccggcctct

SEQ ID NO: 43694 - DNA, 977 bp, Zea Mays
gtgggagcgtgtgagggtctagagagcagggagctaccgcatgtgaattctgactcgccgtcgaccgggctgcttggaattcgtggccagcaccgattgaattgctcaccgtcgatcaaatcccgccatggaccgcaagctcccgcgaccgggtccgcccgcgtgtctagccgtggtgagatgtccttctcgtgtcttgcaatgccttactctatattttacggccattggcgtgggtcttcgggcgagaaaatgggatagcgttgtgcctcagcggatacgccaccgtgcatacagggcgccgccggccggagtctggggagagaggtcgaaatcgtgccagccgttgagttactgatcgacggctctgatcggctcttgcgtggcgattggattggagggtgctgaccgtggattcggatctcgggcggtcaggattaaatatatggggggaagccctcggtcgtcggattcctgatgggcgctttggatttaatcaccaaataacgattcggttggtgggatcctcaccatcggatctagatctggtggtcggaagcgcgtaccccttcgtcattataacggatccatcagatcgggatcggatggctcatgctcgtctagatcctttcagtcgagctttttttctaaaagagaccctatgaaattccctattaaacctgtcgtcccacagctgttataaagtatttaaaaacaggtcctgacatttacagttttcaccctatactctctggaaattagggccgcagttcagagagggaatagaaggaatgaattaaatcagaagatactttttagttttaaaaagtaatcccaaaatttgtttaattcatagacattccattttaactcctttttagcccattccagttgcaataattttgttttaatattgtttatcattttataactctgttttagcatgaaacctagatcaaaattaatcacttggttat

SEQ ID NO: 43695 - DNA, 489 bp, Zea Mays
gtccgatcagatcctgatggtgaggattagatccacagccgctcgaaccggtatcctaggggaaccatcggatcccgatctaatggtctcgattcaatgtgcgctaatctcatctcgtccgcaagatcggatatcaacggtgcacaattagtgtggtaacgcagtagcccaaaactcatatcaaccgtgcgttgattgatcgatggcccgcacggctcccatcctcgtcaaccaaatttttctaccatggcgaccaggcacggcggagcgcccaccccgcggtggcgccattaccgacgaagtcgtgtcccatgacccggccacccaaactcgacaatgatcacaccatagggagagaaaggaacaacgaacgtttacagggcactctcaccaaaaatccgggcgtggtgatgatggcacgcggcgatgcgcgggcccgcagcaccagtgagaaattcctccacgatgcccacaccttcacgcccgcgg

SEQ ID NO: 43696 - DNA, 465 bp, Zea Mays
aaactgggagcgctcgcatccgtgcagaggtcctgaatgacatttcctcagccagcaatcttgtcaggcaagaaataacctgcatagtttaccatgcctcttcaacctttgagggcggcctgatgcatggtgacacctcggttcctgatgttacatgcaaaggttatccagctcctgagggtacgattgaggataattcagcccccgaaggtgctaccgagggtgattcagccctcgatgatgctgctcagtgtgacccagtccccgagggtgcttttgaaggtgagccagcccccgagggtcccaagctcgactcctcttcagctgcttctatggatgttcatgtcgggtcaccattagttcagtctgaggagccagcattggcaagccttgatcttcctactgctcttgttggcccagtcactttagaggtcagtgacccgggcattgaggatccgctgcaca

SEQ ID NO: 43697 - DNA, 487 bp, Zea Mays
ttgaaccactacatgatgcttataagtacaatgctttgtacattataagacatcacctccatcctgatctaaaagcagaatatgtgatggaagaagagccaaatgtattatggttatctcttaaaaacagctatgagcagcaaaaggctgtaatcttaccagaggcgaatcatgaatggacccatattcgtctgcaagactataagtctattggtgattacaaccatgctgttcataagatgcggcaaggaaccatcagatgcggataagattgaaaaaacacttcaaactatgatcccatttgatagagtcctgtagcatcaataccgtgctcgccattatcagacttactctgaactcatacattatctacttcaggcagaaaagcatgatgagcttacgatgaaaaatcataagcaacgtcgtgttggagctgctcctatgcctgaaatacatcatgctgtgaagaatgggaagaaaaaggatg

SEQ ID NO: 43698 - DNA, 674 bp, Zea Mays
cattgactcagttaggatcagataaagtgtgtccaatatccaagggttcgaaagaggaaacaaaagcagagtgtgcaaagcggaacatctgttgatacctagagcgagtgactcagtcgtgaggctcaccaatcatttgttgggaagggtgatcatactggatatgacgtggagcatctcacacagaggtagcctccccctcaacagtagcctcagctcctccaggactaacactctctagctcgagcagaccccaagtcatggaataagtcatgttgggtccatcgttcgaagtaatggacataggctcaactgggatagccaatgaagtcggctcgggatgaccccaatcagcagcatgatgctcctcctccacaaagatgatctcacccatttgatcgtgaactgcatgcttaaatatagggggtggactaggtgaaatctaatcaaaattcacctcacaggtttccatgatgcggttagtctcaaggttaagaatgcagtaagctcgagagtgcaatgcataaccaagaaatattccgcgagaagaccatgattcaattttgtccaaatttacctgtttaagcacaaagcatctgtagtcaaacaccctaaaatggctgaccttgggtggacgtccaaattacaactcataagaggctttgttaaaaaat

SEQ ID NO: 43699 - DNA, 565 bp, Zea Mays
caaaacacctctaggcctcccaggacgtctctaaacaggctgagcatgaacaccatgagaggggcggttcatgtccttcctgctcgactcagaaacccaccgctcatctctcttcctcctaaagcaaaaataagctagatgcccatccctctcacaatattcacaatggtacctcacctctctcttgggtggattttgtttgtggaagggggctttcttttcggatggctgaggggctctaggaaggggatcgctagagatgtcgggaaaggtgtcaagggtgttcctaagatggttaggttttggaagccacacttgtttctgaggaggatctctcataggttcatcaatcacaccatctctcacatgggtgacaggcttagcagaggtggttttgataagcttgggagtggatgaaggtttctctgaaggtgtcaaaccactgcactcaccaaccttcccaaagtgagcgacactcccatccttagtagcaaagcctaaccccggtccgccagttcccctcttgaactgactgaccatcatgcccaactagggctcactgcac

SEQ ID NO: 43700 - DNA, 1133 bp, Zea Mays
ctcaaggcatcaggaagcacaggtgttcgagaaaggaaggccccttcttttcccacagttgtcacaaaggtgcaggtccaccttgaccccccatgcggtgtgttgccgagcagggaggcacctagcttctaggaaaagggcttgacggccttcaccatgccgacgaaatccaaatcactccaagcatcacagtagccttcgcttacgtcttctagctcgaccccccttcaaagtgagatgtcacgacggcaaaggcctggcagatcccttggcagaaggattccttctcaatctcacgtagctagctagtgaggccctcaaagcgggagacaattgactcagacccaggcaaaggaagttctccaaagcgcccatgcatggcgctcaccacctctagcaggagatgcctctccttttccagctccttcaggtggctttgcacctcgacaaagttcccctcggcggcgtcgaattccccctgtatggatgatcggataagacacattctatgagagggggaagtgggcagtggacgcctagcttcaggaaaaactatcgaaaggtgttaccttgcaaagaggctaggagattctcctccttcttagtttgactgcccagctcctccaaggccgcgactcgagcctcggtgacctctttccctcgctataggatacagaggtgggagtttgctttcatgctctcaagacacacaagcgtcgccgattctgcatccctcctcgctaccccaaccaaggtatcataatcgttttggattgacacgatgcgggcgtgggcatcgacggcctcgcttttcgccgcgataagattactggcagaacgctctcatgcctccctttggtcaagaagaaggcgggacctacccgccagtgtccctatgagcgactgaaaacacaaaaatcggacaacgagtcgattagcaagaggaacatttccctcaccaagccatccacgcatggcttactgctagcttttggcgcgctgttgaaagccaatcaaggcctttctacaacgccttctcattcacatcgctccctttgttcagctccctgcaaaaggctgcaaaaggctagagggttgtcgccttcaacagagcagtctgaagtgagctggac

SEQ ID NO: 43701 - DNA, 442 bp, Zea Mays
ggaagacctgatgtcttcatcctcaggtgaagtgattcaatcaggtaatcctaacattacccccatctggttttaagaaagagaatgagcttgctcgtcgtgttttctatcaaaagtgtggggttgatggttaccatgctatagattgttttaatgctttgtggtgtgaaatatgtcgtaaggatactcatgttaccactagatgtgttctccctaaacaaagcaaacctaacatgcacatagttggtatggctgctgatggtctatggttctacctctcccactttgctaagacgttgtccaaaaaaacgaagaggagttttattggtctggttaaggttttcatggtttagtttcagctgaagatcttgataaggattttggatttcattttccttggggaaagatgtggaaagcgacaaaatgccattatgcctttttt

SEQ ID NO: 43702 - DNA, 613 bp, Zea Mays
aaagtcgccttagggtgccgccggataagcgcaacaagcacgtcaatcgacactccgcgtaaaaagtcgcctacgggtgcagccggatcagcacaggcatgcgaaaacggccaacatgccacattacaatacaagttgcagttacatacacacagcgagggcaccttatactacatcggctcaaccttcgggatgatacccagttccctataattaaacaacattattctcaattcctcaccctcaaatagatttcacagatccccctcacctatgctcgtcccaatcagcggggacaacggttctcgtttaccaatccggtccacacgaagacggtctcgctccatcccaatacgacggtgcctaccacttcgtgaaacctcacccacgctatgctttgacaccacccttcgccgcctgtacttggtcctcgcactaggaagatcagccgcctcgccaacctccacacgcggcgaggactccgccgcggccacatctaatgcagcaaaaaaaatccaagccttcatctgaggactcttcagtccaggaaaacgaactctcagactctccatcagactcaaaacactcagatccagaaccagacaaattatca

SEQ ID NO: 43703 - DNA, 1171 bp, Zea Mays
cgtcaatattcaagaacacatcatatatctattatatttgtctacgtagaagtttagtgcttactactaatactctatcatccctaaaagtttatgtgaacactattatttctctatcatgccaaagatattactaaaaatttcttgttctacattattgaattttctaggggttacgaagagtggattgtttgttttcaaatatattgaatgggaaatatatgcttggtaaaaaaacattgtggcattgttcatctctgacggcttaggattctttttgaaagtggcggctcaggaattaggatactacaacaatgttttaggcttttctcttatttatataattgaggttgcatatactacggctataaccttctaaggggttagaggtggtcaatttgcctaactgaaactaggacatcgaatttggatacatcattgaaggttgcctttccccctcacgattgttgactgggttcaattgcttgccctgtatcactccttttgcttgggacaaagctttgcctagcatcaactacacaaatgtcttatcatcaatcccccttcgctacttgtatcaagatgccgcatgaagatgtaaccaagccggtggaaacaacgacatccaagaggagttggtgctctccttcctctcacgaagaatcactataacacaagaattccagagtttaccctccgattctctctacaggtcgctcttcctctccttcaatccatcggacgtagctggccaatctacttacagtccaagtctccctcctcatgtaccccttacaagaaaagacaacctcaacaaaagcaatcatgtccttagcgggtccattctggcccatctttcacaattggtattggcttgcagttcgtgatcctgacggaaccccaagactatctccttcgtccgtaatacaagactcgggttcggaagatggctgaggttatggagaaaacattgcaaatttgtccatgcttctacaaactatgcagtcttagagtgggtccatttggaaggctcttggaagagaaccctgctgaagtccgtgatttgtcgacgtggcggtggcggcctcatatcgatgcggatgtggggcatctccgcgtcaaagtgggaaatctcgccgacagtggaggaactggtagtgttccgggaaac

SEQ ID NO: 43704 - DNA, 388 bp, Zea Mays
ttttgctaggttaaacttgaggcctgagcaattagtgaaaattgacaagagttgtcgtaaattttgcagctccgtatggtctggattggcgaaaattccagcatcaccagcataaagcgagcaatgcaaacgagctgatttgggtagcaccggccttaaaaaacctattcttgcttcttgctcaatcatttttgaaggggatcaatggccaagatgaataacataggcgaaagcggatcgccttgccgcagcccccgagcatgtttaaacttattgcttggacgaccgttgactagaactctagacgatgatgtagccaagatggccgcaacccaatccctccacttttggccaaaacccagggccttcaagacatctagaaggtaag

SEQ ID NO: 43705 - DNA, 294 bp, Zea Mays
attttaactagtaagagatttagttccctttgatcactccataaatgaacaagtcgttggtgggttccttttatgaaacggacatgatgataacgataaaaatggtgggagtagtggcctatcaatggacatggcctggtgcgcattcccgcgttcccttgagacagctatgtactatacactacgtgcaggagggcttggacgtacccccactttgtctaggcacactgaatatcaagagctagttattagcttcaagcactactggaatctggctctttgccaagtgatcga

SEQ ID NO: 43706 - DNA, 595 bp, Zea Mays
aataaaggcacaaaggaaaaaagattttttataccttgttaagcaaatttcgagcttcgtctccagccagttctcgaccgccctttgctcagatctgggtaataaacctgttacctatgtttcgagcttcggctggaatgtcaacaagatcagttggagataggctgaagtttggcctgttaacgacccttgcatggttgcacccagcttttatgaaagcggaagtcgtactgtgagaagctactagcgcacagaagtcaccgtggctagttatgacttcatcgaggacgtcaacctctttctcaacgcaatcaagtgctctggggatatcttcggcaaagagactagcttcttcagatgcagctccgactgaatcgaatatactctttaatcaagcagttcattgagttgcaaagttaaaacatttattcttaagagttctgagtgcttcacttagcttcaggttctttttagcctcacccttgattgtcatattcaaagcttcggtttcacggttgaatcggctggagttctcttccaaaagtatctgagtctccttcaactctttggttaaattctcattttgagcctgagc

SEQ ID NO: 43707 - DNA, 316 bp, Zea Mays
accaataagtagtccaaagcgagacacaactactttattagactcaaacaccagcttaaaaccatctcaacaacacaaagaactgctaacaagattcttgtttattgctagtgcatgctgcatgttctatagcagcacagtctatcctaaagtaaatttcagatcaatcataccaacaccatgaatagaagcatgcgggccattcccgtcaagacagaggctccatttgtggcctgataaaaagaaaacagagatatatcggcataaacatgaatattgggtccccatatcaaccccaccatttagtagattggca

SEQ ID NO: 43708 - DNA, 820 bp, Zea Mays
ctttatctagccaaaaggctagctgtgtatatgcaactagagcatgcatgcatatgcatgtcgacagactatggtagtaaagtaagtacatgccctgtctgtctacatcctgatcttcttgttttcttgtggtaaactgaccgtagcttgtcgtgtccatctggtcgggtacgtacatgtacaggatggcgcgacgacgtacgggatgcatgtgtggccaaaacgtttggcgccatatgcatgggccggcgacatgtagatatatcgacagctaacacgcgttcatcgatcccattaaatgatttaatggagctttcgccacaagctaggagggagaggaggtccatggccatggatgggtgagtctgatcgatctggtcggcaccatcactcacatgtgcaggccgtgtccgggtcccggccggcccctagctagttgttgttatgtgtaaaactgcctctgcctaggtatctttatccatcacatgtcaagacatttatacaagtacctgtgtcaacaaccatactacgtactgaaggcctgactgactgaaccagatgaagaagctggcaagaaggtgcagatggagcaggtgggcgctcaggtgaggagaagcagtcgggttcctacacccaataccaaatacgacagcaagacctggacccgctaagaagctggaagcattaccaactcgcgtaatagagaggaggattaggagatatatatatatactctatgtaatagaataagctagcggtattgaaccagtattattctgaaccagcaatacaaactacagagagcgacagggagagactt

SEQ ID NO: 43709 - DNA, 539 bp, Zea Mays
ccgggcttcaattcaatcacaaactccacatccctctccggaggtaatccgagcaactctttaggaaatacatctgggaattcacacacaaccgggatgtcttgtatctcttgcactacggcttcaaaaacttgtccaaatactttaactgggacggatacagggatggacaacttgacttcttcttgtccatgacttagctgaatagtcctttgatcagcattgataatagccttattctagactaaccaattcatgcctagaattacatctacatcttgtccctttataactatcatgttggtagggaactcacgtccgaccaatctcacgggtacgtggaagactattttcttagtaaagatttgacccccaggtgattgaattacaaaaccctcctttgattcaatactatggatgcaatgcttctcaacaaaagtcttgctcataaaagtatgtgatgcaccagaatcaaaaaggatgacatcgggatggttggcaacgaaaaacatacccatcatcaccggttctccttccgg

SEQ ID NO: 43710 - DNA, 725 bp, Zea Mays
ccgcactcgacttcggtctacgcctaattctacccatggcgctccactgggaatccccaatttggtcggaacgccattctagagctcggtccacgcacaccctggagctagcgaccttcctgacgtgttcccgatgttatagtgtgagatagccaaattggccgagccgacgagcatcacaagcacacgaaagtgctgaaacacaaaccaggagggcgagagcggacctggaggtggcggaccacgacggggtgactcgcggtggcgcggagagtggatttggggaaatcccaaattagggcgctatggtggacgatcggaggcgagggctggtgctctggctttgtaacaacctagcggagctagcagcgtactcaatttatagtgtccaagagcggtggctccgaattttgaaggggaaagctggcgggtgagtcaccagtgcggagtatcgtggctttcaccggggcaacgtcctaggcgatggacagactacctaaggtggtttactgcaacgtggtaacacttctcagtacgtggcgtttgagcggcaagcggtagactccggcgaggtcatctggaccggccgcagagcaagtgggtacgacgactgggcggcttgatccattccccttttggatcttttacccctccgcgactatcccctcgccagagagcacaaatcgtagcaccaacacgaatcacggcgcgagggtcaccggcgg

SEQ ID NO: 43711 - DNA, 748 bp, Zea Mays
gtgtttagcttcaaaaatttcttcttcagataatctttttcccgaagcgtgtcgaataatataatcaaggacttcggaagacgcttcgagagctggagcgacagctttttcaggcaaattctgttttacaccctcttcttccgctgccttttctcttgtttccgaggatttctccttggcgggcactgaaggcccagcttcggcgtcagcctagctcagtatagcttcggcttcggtcagctttgtctcggtttcaatttgtgttttcgaagccttggcaattttcctggagtagagcttgaagtttttatcgtctccagcacatctaatacactagccatcctttctctcttgggggttgctgctagatctttttgtgtcttcggcgcctccactcctgccaaagagcttagaacttctgatgttttcgtcccttcggttctcggttcttcaattttgtcagcattcggcattgcagtcggctcttcaatcctctgcgtaagagcatgtcctttggcttcaatagccgaagaggtctcaccgccaaattcaggcactatggccggttcaatgtagcgcggtcggtgagtaagaaccttcacctttttcctcttcgctgtgggctcgcttgaagcggcttaagcaacatccttcccagaagttgcaccctttcttttctgcctccgcggcgggtaccgatagtcagggtacacaaatccaatagcgtcaaaaaccctatttagtcttt

SEQ ID NO: 43712 - DNA, 656 bp, Zea Mays
gaaatcagcattttgtcatcatcttatgctttaaaaatgagcattttgtcttcctgggagtaaaaatctattgggtgtagcccccgagctttgagtggatttttgaaagtaatccattcaaaggtccacatcttatgctttagaaatcagtattttgtcatcatcgtatgctttagaaatcagcattttgccttcctcttatgttcttgcgagttcaaacgatggtatctgtccatgccttgttaggtctgaaattattttgatcggtgacggattggacatctggctggttgaggcagatgactctcagctagacatcaccccgctctgtgcttcaatgcttcttacagttcagtagctacatttggacttctttccatctttgttgatctctcccttttgttgtagtacattcattggtatactgtgtggatatgacttcttcagaagatctttgaaaattcttggcaacacacccaatgggtgcgcccaaggggtgtcttggtacgtagagtatttaccacactatcctggagtagtaacttgatgtgaccgtggggtgtaatcatattgcctgagtagttaaccttggtccaaatggtgtcgtgttacgtgaagcgacgcctgttgcctgactcattttcaggcggcttgaa

SEQ ID NO: 43713 - DNA, 923 bp, Zea Mays
cgagagtggcaagtttggtcatctgttcgggcagacctgcaaccacctcacctacaacttcaccgccccctcggcctgcctgcctgcctgctgcatactcgaactaataaccagtcgccatcacaaaacttgaggacccatctccaaccaaagaaactaaacgacgcttgcgaaacaaacttgccccgcttacaaagatggcggatcgtcgtcgtccgtttcacttcaccgcgcgcgtctaaatcagcctcgatctctccccatcatcaaccgctcgatcagatagatcatcatctactcgatcttgcgacggtcgacactaattctttatcatattttaactaacgtgtaccatgcggctccttaattcggttggccagttcgcgtttcatctgaaattgaaaggtcgtcgaccgtacgtggacagacggattgaaaaccgagaagagatggatggattgcggggttggttggttcagcacacaagaaactcatcactgtggggcttgacggcttcctgacaacggctacattgcaaccaccgccaccgctcctcctcgcgcgtccacctctctctccctccagacgtccacgtcgccactcaccagttcgccacggcagcaccaccaaccaaacaagcagctctccctccctcccacttctcattcaaacaacaaagctccctgcgataaaccgtcgtcggtttcggcatttcttggccccaaagcacgcgcgcgctaatgccttcgtcgccaacatcgcctactcgcttcgcgttgtcgtcccctttacttgttggacagcacctttaggtggcgcgtctcgtcgtccttgcttcccaagagaccgtcgccttacatctatcgctcgctgccttattgcctgcacctccgtgctgtgctgtactgcacctccgtgctgcg

SEQ ID NO: 43714 - DNA, 377 bp, Zea Mays
gatggggttccttcaagcacaacagttccattggagttctaggggtgatggtctttgcgcttggcacgatctgtcagggagatgttcgtgaggagctcgctatagtggttggtttgctcccgaagattatcttctgcaagggtgacatggcttttggtgttagccacacgagcttctatctaggccaagtccaaccttaacttcctccaacggacttctgcttcctcggtgtgttgcgccatggctctcacacgctagcgcaattggtcgcacatgtcatcgagactgagcaaatagcccaacaaagtgacaatcttggggtctttcttggctgctccgaggcttcccagacttcccaagttgtagatcctgaccgc

SEQ ID NO: 43715 - DNA, 777 bp, Zea Mays
tatcatggttggcctgagcatgacccggttttatttttcccctatttttcataaaagtctctatattatatttgagtatagagtctaaaataaaaaatgtgtgtgttctagtggctaggtggatgtgaacgtgagtttaaagtaaataaccatggttcaaatcctatttacatatattttatcttatttttactgtttagttccttgaatctatccaaacacatgtgttgataagcgtatttatttttaacatataattcctacccggtatcaaacacatgctctgacactcgcatgcgtagcacgctttgcattcacgcgtgtgcacatgcaggctttgcatgtagtggtggcatttgcatgcacggttgcatgcgtagctttagttgcattcgtagttagggcgttcgtgtgtgtgcacatgcaggctttgcatgcagtggaggcgttcgcatgcgtcgatttagttgcattcgtagttagggcgtttgcatgtgccggtttaggggttgcacgcgtgcggcgtggtgcgtatgagatttgaccgcggcaggaggatgagtgtgatatcccaattttctgaaaaagaagttaaagttctttttctcttttctttcatgttctgtggcattggggtttggagtttcaggaggcatttcttagagaaacagtagatcttttggcattttttctgctggggtcaggagctcaaatgggagagcgtgttcgggctttgatctcgatccgatggatgggacccccctgttggaggtatgc

SEQ ID NO: 43716 - DNA, 556 bp, Zea Mays
tcctgtttatgcacaatatcgatttagcataaatacttcatccgaacccacgttctagaaatacaggattaggcccactaccccactttccacgcggtcaaacaattctataccctaactccccacgcggtcaaccttcgtggccgactcgccgcgattcttcaagcatcgtcagggcgattcgtcttcctcccctcccgccagtgcgatttgccttcctccgcccccgcacgccctcaactctaatcgtcaccgccgttgatagtgtcatcgagccgcccgctgctatcaatccttctttgttggctcatgcagaagctagaccccagagacatgactcttcgtattggtccagacaaagaactcaaaatcaccaagcagactgtccatctgatattgggtcttccaaattcgggtggtgggaagccactaaatattgatgaagcgaacactgcggcaacccttcggtcctccttgagtattagcaaggatgaatttgtgatttcaaagctacaggacagactgaggctaggcaacgatgatgagctttcaatca

SEQ ID NO: 43717 - DNA, 613 bp, Zea Mays
ggcgggttgaataaatgaaaaggcaggggttcttttgcgaagcatacaagccgaaggggtatcgggtggcatcaaccatccgatctacatctgacggcccagattagactcatctaaaatcgaaacagtacgaagtgcggtccgtccgatcagcgatctacgacatagattgaaataactgtgatggaatcccagacacacgattcagatcagatggatcagaatcgtcgcaggatgcacacacttgctaggcgctatcgtggtcgttcacgcgacaatcaacggccacaatacttcttctctcccacgcgaacacccgagcacccaggaacacgcgcatggcggcgaccccgccggagggaactcaatccggcgctccacaaccccaaactcaaattaaacggcgcaacatgaaattggggacatggtttagcggtgtagatggttctcaccggaaatatcggagtgattcctcccggccacggcactaggcggactcgcggcaaacttgaagctccgatgacgaatcacgcgagctccagttagaaatcaccagtggagacccccccccccccccgaggagatcccgcgcacactgatgatgccaaccgtc

SEQ ID NO: 43718 - DNA, 757 bp, Zea Mays
tacaaataaatgataagtgtttcttacaaaaacaaagttgcatacagaaattctaaagtctcaatagacaagctctagtcatcccctttcaaaattttataggcagcttcgtttagtagtctgttgacagcttcgtcaacggcttcgttagctatcctaattacatcaagcgcccccttcagatatggatcagcttcaaggtcgtatggctccggaggggagagagctcagctgcaccatagtacaagtgtctattagttttgaatctaaactaatttacgaagctcattcacaaaagatgtacctatgagtcttgcatgttctgcagcttcttcggtttttctggcatcttccaaggcatcatgagactctttttcgttttttctgatagcctcgttagctttctctcggacaccccttagccgaacttcgctgtaaaactttccacttagtgaagcggcttcgaccgaagggtttctaatgttgttggctgagagcgagaatcctggctgaaccacaaccttggcatgttcaaagccaaccttctcaaagaccgacatagctccgcgggcgccggcgaaggcatagaagtctcctctatcataaagaatttcctcaaaagatctagctttgccgttaatccaccggataacccgtcaggatcaccacagataaagttctgttctaaggagaatgtgccaccatagcaaaaaaactattcttcaaattgttagcacattctgtagcaacattgtag

SEQ ID NO: 43719 - DNA, 457 bp, Zea Mays
tcgactatataccagccaacggagattaaattaactgtcaccggctaagctgaccgctgacaggacttaattagttcctgtcgactctactactagactgatacaaattaattaactcccatcgactctcagcctagccgaccagagttaatattaatgactattgcatgcctcttcctcttgcacgcctcttatcatcatgcctattcaatcgctgctatcttaggtgttatcttcgccctcgctgtcgacccctggccaccacagcgcatgccctgaccaccctcaccctcaccccctgccacagcgtgtgccatgcccctagcttgccgcactccaagtagccactatgttccctcaccggctcactgtcaggctgatgactgacgacctcgacatcccatggccacccctgacgaactcgtgtcctcatccccaacctcgactaataaagtgt

SEQ ID NO: 43720 - DNA, 436 bp, Zea Mays
gtacgttcaactgcgagggtgacccgtgagggagaggagaccgaaggcaccaagattgccccgatctccaaagtgatgaggcaatcgggattagttgtgacagaagaagccattgaacaaggtgcacctgctgttgaaactgaacaagatgttgaggaggaaaacgctgatgaagaagaagaagattatagcattctggtcctgtcaaaacctagccacttggattttggaaaatctaccatttctgaagctgatatgcccatgttgatgaagttaggctacttcggggaaactgagaagaaggtgattcattttgctggggaagaaaccactctgataccagaaaatgatgaggtggtagttttcaagagtttcttcagggcgggattgcggtttcccttgaacgagatgattggggaagttttggataactatg

SEQ ID NO: 43721 - DNA, 502 bp, Zea Mays
tgatgatgagtagtcggatctgtggagagaaagcaagggttccgctaggaagtgacttattatattttgattttgcaagatacttttaagtactacttgtcaagcaacattgcaacttatctgcatgctactttccctttgttgtgtgcgtcgttgtcaactccttccctggtacttggcccccctgggatctgggctcgacttgtcaaggctggataccagtatacttaagaaagaattggtaacctggtccccaggaggcaatctcgacggggacccggacctgcacacagccttagctagggagtttcaatagtgtactcatagggcccattaactagtatcctttatcctttgatttactcaacaggacctatagggtttagactggggagccaacccgtgtgtctggaccccctaggtcacggcttccaattactagggtactcgtcgcagggtggtggagtgcgtaggcttacggtacggggccaggctaagtagc

SEQ ID NO: 43722 - DNA, 445 bp, Zea Mays
cctagaatcactattaattgggctcgaaattctcttccttcaattttgagggttacccctcggactatacgatttgtgaaaacctcagccctagctaagcttatccagtacttatgccccacttctactgatgattggttaaagcggtgagcaaaagcagtactcatgaaagaatgagaagatccggaatcaaatagtacaactgcggtatgatcgttcacaagaaacgtactagccatcacaagttcttcgtcagtaatctcgtccacagtggtgagatgcactcgagcgggatagacgtcgttcttcttcttagggcgaggacaaaacttggcgaagtgccccatctgtccacagttggagcatgtccccttcacttgagctgtaccacccgttgaacttcctggtccagtctttgcacgcggtagggccaccttgaatgctt

SEQ ID NO: 43723 - DNA, 1554 bp, Zea Mays
atcatttgcatttctctctcgttgcttgcctttttcctataattattgtcaatatttagcattgggcgaaatcaacatatatgcaaatttcaattctgaattagaatctaaaaatattataaacttacaagttatacatgtcctgtgctgttacaggcacactctcaggaccaccgtgcatttctgaaacataatccataatacaatgttgcgggattcgactctcctccattgaacttatgaactccatgtattcaggatcatgtgctttgttgcattgtaattgattcttttctgtatccttcttaaaaaattcatgattatgatccaagtgcactagatcaatacgcactgatataactatctatttggcatcatcataattttttttaagtttcatatcggccttgcattgcatccgcttcgagctggtcttacatacctttgggttcgatattccccttaccgcactctttccttccatcgagcaattcaaccacttacaatttttcagttccctatactttttcaatgggaagccaacttcatatgcatacctactataaaattgatatgcttcatccacaccactgaatgtcataccaactttaggtaccaactttaggtaacttcctgtgcaaaataaataaaatacatatttatgttcaaatatcaataacatgtacgatgtttggtagtccgacctaattttccattgtatgcacaatataacatgtcataccatctagctgcataatattacccttgattcaattattatatcgtatgcaatctaagctacactaatgcaaatccaaacggttataaagtacttacatgtctctgcagaataactggtgtgtcctgttcatgctcaccaatagtccgcatagtagtcagctgttgtcctccttgatttatggccatcctcgacgcatatgatgtgttgtgatcatcaaccctcggcgccctcaatgctgttggtggagtaattgcccctccggcagtatctgtttacccatgtgcatctgcagccgaggcaaactggttccctcctggttgatcttcctgcaccattgatacgatctcaaagcatggatttgatcaatgaactgatatcggcgtcgtgtactctctgatcggctctttaccccatggcgctgtcatcttccagctccggttacttccttctgccagtcacaccctaacacacgattcttgttgtctaacgtttttggaagcgtgggattctttccttttcccatgcatatatccattatcgtgggcgcgatattcacgacaatttcgagtgtatatctgctacaatataggatcgtgggcgtaacagcaatttatgcaagttcgacgtaggtcgtatgctatcgtaaactctacttagatccacttccataatactcgggtgacatgtcaccggcccacgtccagaatgatggcccacgttctgttacgcaatatttatccaacatttatacatgcataaatacaccccaccattcggagcgactggctcggcccattctgattggctcgttt

SEQ ID NO: 43724 - DNA, 625 bp, Zea Mays
ttattattacaacagcatggatactaattaaatcagcactggtgaaatggagatgacgtgtatccactcgtctcggcgctccacctcagctctcctgtgatgttattccccctccctacagctacaacttgatcaagcatgcgggaatgcagtagtagcgtagccggcgggcagtgctgctgctaggctggtagtggtacgataatgatgagagtctgctgttgctgggctggttgtacgatagtactactagtgatgagagtggcgctagctagctactctgcgttgctctgctctgctctgcgtccccgatcaaacgagagagggatggcctacatagacgtagcagcgcccgactatttgcatgggctataaaatggaccactacctcaatcgataggaacggtcgcgtcacaatcgccactaccctacccactagtacatactagagttatcgatggcctcaccctccgtttcgctgctcgtcaccatcatgttgctgctgctgttgcctccgtcacctgcttgctcctcgttgagttgcgggcttgacttcaccagcgtggcgctgctctcctgccatgagacggcaccacaaaaccctactgcctcatgctgcgacgcc

SEQ ID NO: 43725 - DNA, 455 bp, Zea Mays
gtctggcgccatacgcagacggtccgaatgggctatctagggtttgcacggcatgtggcggcttgggtgcaggtctcggtaattcgcttctaaaaatgggatcggccgcgcgctggcccggacggtccgtgcccacgtgcggacggtccagacatgcgcatatcagcaaatttatagccgatgtgcgtgggaggctgtcgttgcctagggtacatgtccatcggcatcccataaaggggttgtgactggtcgtgacaacctgtagccgatgaattatgtgtgtactccctcaattcaacctcgtgcgaaggaagatttgccatagtagacttatcaagcacacgcactagcctttcatgatcattttgtatatcccctacgatacgttgcaattgttctcgctgttcgtctatgtaagctttaagagattggagttcgttggtgctacttacatt

SEQ ID NO: 43726 - DNA, 371 bp, Zea Mays
tgggtctcctcatccaccaccatccaggtaccatattgtatctccttctcccaaaatcatcgatgtttcattctagatgaagatgacccatcataccacaattcacatagaagtgagggatcttttcatattttacttgtagaaggacatcatccttcccctctagggagcataacaaagtgaacaagaggtatttaggcatctatattaactctagacatgtaaaaatatcctcctttagctggtatggctcccacctccacaaagaccacttcccaacattgttcactacctcatttcaatacaaatatgggatacaatgaacttgaacccaagccagcaccatgtgaggcatgatggtcaaaatcatt

SEQ ID NO: 43727 - DNA, 1177 bp, Zea Mays
ggggaagggtcgatccaatactgttgatccacgtcgatacgataagacgcgtaaccaccaaaccatgtccgaaccaagaatacggtgccgaaagtccccgtcgaacacgacgatacgcccccgcgtatagtctcgtgtgtatccccgctgacttgtggggccagtcaaccccagtcgtaggggcctcagcgtacgaagtctctactgtagcccacgtatcggaaaaaggacaagacgatacgccatatcgagtgtatgcctacacacactgaaaaagtgatgcaagggtcatagtagaagatgaagctgcaccaagcacgacatgaatcacatcgtaagttacccacttcatcaacaccaagcttgctacatgggacccgtatactggacggatgaagcggtacgccatactgggagcacgacagtgtatggcctcacagacgacgtcaggagggctcctgactacgccacccaagggcaacatgccgaactccctctagtagaatgaaagtcccaatgtagagtcatgcccttgaactataaaaaaggcaggggcccatatttcttcgcacgcaagcacacctgttgtgatacgactccaaacaatactacgatcagcactgcactggaatagggcgaaagtctgaaccagtataacccatcgtcttaaatccattattgagtcacagtgattcaccattcgaattgagtccatgttagcatcctcaccgacacacaaatcattgagtcccaattaattattctatcattcagagtaagttcgtgctcgtgttatcccaaagcccagcccatattcccaccacacattaggtataagaacggtacaacaacctttccttcatatgtagtagtacataagtaattggcgcagccctcagccaagccaatcatctcgccaacccacatgcaaactaccgtaataggaagctggagttaggtacgtacagatgcccttccgcatcctagacactcctgttaagttctgcctcttggacgtgtgtttcctgactaatctgggggttcaaagttccttgcttcccgtccaagttaaaggagatcctgagagctgatcagccatgccgaacgtttctgtaaccctgcattcacgcaatcccgttcgtcgctcactacatctgcgaaacgtggatcactattc

SEQ ID NO: 43728 - DNA, 663 bp, Zea Mays
gcttgatgaagttactgaaaacttcaacgtcgagcaatcaaaacgtgagatatccgataccgaacggttgagggttcagaagaatgttgtggagcttcgtcaggcgaaggaggagtgctacaaatttgttatgtaatgttcaaacaagttgaaaaatgattttgctagtgttggtgcattctcggctgagcaaaatttcatacgtggtgatcccaagggtgtaatcaagtggattttgggcgaagtcgaagcattcgacgaagttctaactgacatgggagatttttgtgcatgcgtaggggctcggagggctgtatcactacttgaaaaagctggctgtgaacatgccaatgctgtaattcagccaaacttcaagtttcagcgactgacatcaaggagccgtcagccgaagctatcacccttagtgggaaattctattctgaagtgtggatgaacgatggtcaagaggtggttgacgaaaccattaggagacatgaagaagaggctcatcttgcctcagaagaagcaaggaaagctgaagaggccgctgagcgggaaagacgcataggtacatttgtcatattttagctttgtaggtatgttatcttagtgcctaacaaaagattatattttggtgtagctggactatctcctcctctagag

SEQ ID NO: 43729 - DNA, 333 bp, Zea Mays
agggctatcaactttggtgattacctgaaatctttgggactccagaaatgagaagtgccatcaattgaacgtgtaagtagtatcggcagattgggatgtgagaagacagaagacacgggagacatcaaattttgttccatactatcataaacatatttcttgttccgcatgtcccatatctgatttcgaaagagaaagcatgcgttgttaagataagactgctctgcgaaattgaattactccattcggtcataaatattttgttatatttcactttacatggtgtctgatgcagatttttgaaaatttgtttgtagaatataatcttagaat

SEQ ID NO: 43730 - DNA, 545 bp, Zea Mays
ccagccttggttgtgtcgctgtatggctggacccgcttcccggaccaactcctccctcgagccgttcgctgacatgtgggcgctcttcgtcagaaccgtctacctcgcgttggactcgggctcctaacagaaacgcaacagatcctccgccttgggcgggagaaatcctcggacgccgcaacctcacgattttctcgcccttatcctctctcaccgttccaagcataaagtactcgacgccgcgttagtccttcgccatatccaggaataaagtgctcgtctcatcgaccgatggtggtgcccggcgtagtcatgggagagaagagcctcggaccgtggaggattagcactgttgccgtctcggtcgctctagagaaaagcagcgggcgtgtgcctccatattcatagccgccgtgcatggattacgagtgacgcgatggtctcacaactgggcaatttcttaccggaatttgagcgtgggcgcattgccgctgcactgcatggcgagcgatttagcaacttcaaactctggtaagctccttgac

SEQ ID NO: 43731 - DNA, 402 bp, Zea Mays
cttgtaggcagcgagcgcctgatgcaatgcaacggagagcgcgcggttgttcaagtccaagccaccgacgtctggttgcagtaacgaactgcgaggatatggatggagccgtcgatctgaactcagtagaaaaaatggtatgcattgcatgcatcgctgctcccgacaacttccgagaggggtcctctccgctcgtcgaatacccgccaacagtgttcaaccaccgatcgtagtcggtagtcatgtctgaaccacgcctgaacccacacgcaacgcctacggtacggcgtgcccagcctgcatccatccatgtctccgcctccggtacggtggtgctcgagagtcgagataggataggagtagatgcgcgcggacgacgtcaggacaggttggtgcatggga

SEQ ID NO: 43732 - DNA, 277 bp, Zea Mays
attttttgcagttcagagcattgttatctagtatttcagtttgcaactagcaatcagacatgttttcccatcggttgcgaagaagagactaaacaagtggtaaagcctaaaagcatgtgtgttagtggcgcgcttatcttcttatcccaaccatgctttcgccctgttctcaaccccacatgctcgctctcgcatgtcacaatattcttttgcctacatcgtgtgctgaagtgactccagccattatccattatccaataaatttcatattgcctcg

SEQ ID NO: 43733 - DNA, 904 bp, Zea Mays
tggatttataaatatttttctagaattgtttatatgccaaaaattcattttctcatatttaattaaagactccggaataggggcactattctacgaaagatcagggtcaaatctataaattccgggacccaaccgcaatattcttaacatagtcttggacggggggctgttttgagaaaaatgtggggtttctttagcaaattgtccacaccgaagaggtatcggccagatctggtcgttagatcaaaaaccgaccgcccagattacatcgtcccttaagtgaaccgatacaggctcacaaccattggatttcagacccacggtcgaggtttgtcccagcgattgactaatctacaccgctcccattggatccgatggtcacaatttcctagcacgaaggggtaagtggtgatcaatcctagtcacacaaacgtctagatcttcatctcctacccccggtcggcactgggtggcggcgtaggcctagggccacggcggagccccactggtgtaagccccatcggcgattccaagttccaaacccgaaacggatataggataaacgattagtagaacccattgaatcctgcgtgggaggactcaccggtgattatgcatcaagggtcacgaccacaatgtgatgtggtgccacggcggtcgccattgccccggtgagaaattgagcggctcacggtccaattcccggggtgggaagaccacgggcatcatcagggcgctactgtgattccccaggccaaccgccaaggttggagctccacccaattcatgagtcaaccatggcggacccaatcaccctccccccgctcgtcgagcatggcggtgcgaatagcgcccatgcccccatggctcgcatcatcgaagctagccagttgtggatgagagg

SEQ ID NO: 43734 - DNA, 293 bp, Zea Mays
caaacctatccccttaaaaagaatctcgccctcgagattcagggttggctagcaaagagttcagggtacttggctttcagatcatcttctctttcccaggtcgcttcttcctctgagtgatggccccacttgactttgcacatccggatggtgcttctttgagtgacccggtctactgtctctagaatatgagttggattctcaatataagttagatcttcttgaacctcaagatcctcagttggtaattgctcctctggcactcgcaagcatttcttcagctgagacacatg

SEQ ID NO: 43735 - DNA, 317 bp, Zea Mays
ttcggttggaggggttgaatccccaagtggaaccaatccagagagggactgagtggatccctcccttgtcactcgaaccgagtattaaatcctttcttccccattctcactctctgtccaaatggtgttcggttaatctctctgttcttttcctgttcagttgtattaggttgtcaatcacagttccagctttacatagatgtacatacatcttactgttaatacatgcatgacaaatgtatgaataaagcattagattacgagaatatggacctagttggacaatgaactgaacatgactagaacatggatctgga

SEQ ID NO: 43736 - DNA, 351 bp, Zea Mays
tcggaggggaaatataaagatagaaaagtaaaagatacattgaacttggaaactttctggtcgagcccatgtattgcttttagtaaatatgtctcgatttgggcacaatgctgttgactgtgcgagcttcggactcctctcgtgtgtcgcgctgttgctgcacttggcgatgcccttctggctgctgattgtgaaccaaggttggtgccataggtggtggtggtggtagctgagcccatgcagcttgagagtgacttgtcgatgcaactgatgctgtgggttgctagttgcccacatactcagggatatatggcgaacaacatgaagtagtgtgcagggtctgcttcggct

SEQ ID NO: 43737 - DNA, 532 bp, Zea Mays
cgagcaggcgcgggcagccgagcgaggcagcagctgctgcgctaatggcacggccgttctcgtcgctggtggactcctcgtatcgccgcaggatcatcgagtgcaaagcggcggcttactccttgcggctcccttcctgcgctaggccgcccgcacgcccccgtttcgctgccagctccgacaacactccaggtaaagttctctgcgaaaacgcaaactgtttgacctagtctcagcagataggaacaatcagtcagcaaacctgtctacatgttatttctatctttctaaggatgaggtgaaagaaatcgggtactagtactttagttgatctttcttgtgcaaaatgctaaccccagacctataagaattaccctgacttatgctttgtgcaatcactagaagtgctcattgattcttgcaaatctaaagatttcagaatgctgctggttgtgcattctacacaagttttgtctcgattctcttttcatctatctgtagcatccattgcaaaccgattccttaacacact

SEQ ID NO: 43738 - DNA, 999 bp, Zea Mays
tttagaatggggaaactcttcttcaaaactcatattgctctctctatgtggttccgcagtaaagcatggcggtgattaaataattccttatagtttctagaccgttggtgaccatggccaaattctttcaagtggtatcgaacaccacggtacggtgcaatgaatgatggtgtgtcagcatatcccccattgacaagataatactttccctcaggaacatggaatcatccaagtagcgtagaccttagaaccctagcatctgtagctgatccctcctaaccagatgatataaaagtaaatttcaagtcaaaatcacaaaccaatattacattttgacttagtgtgccttttctattcctatagggagattgcttttctgctgaaatggtaatgggaacatgtgttccatcaatagctccaatgcaattctggaaataaggaaagaaccgttcatccgtgctaatcttccaatgaactgaaattccagtggcaggcttcacaaatctatacatgagagatgggattatatggaaaactgactcgatgtgtcggtggatagtttcaccactatgtttgaattcatgttgtaaatcctcataactagcattatgggacaacatgaaaaggaacattcccaatttttcttccacagtaacaccccttatatcatgtaggatgtgttcttctctaagaaatgttgctatatctttgaatattctaggctccatacaaaatgcgacaagacaattcttctcatgtccttcgagaatctctttaagtctctccttgcctggtagaatagaagcatgccttgctcttttctctctccctctattactaattagataaagagcagggaaaagaaagagcattaactcctcgtcctcctcttctcttctattcctaattagctgatccattttttcttatccttggtacagtctgatatcatagcatacaaaacaaataaatggaccaatgaatttcagaatataactt

SEQ ID NO: 43739 - DNA, 327 bp, Zea Mays
aaatgatttcaaatgcaaaatttgtagatctaattgttggtgtatgtgatctgaccacacacactacggggttatccacgtgatgcttttgggtagaacggcgtcgttgatcgcgactcgatggttcgtgctataacacgacggggtgacacgcagacttatacaggttcgggcgcgtagagttgagtaatgccctacttcctgtagtgattctggtattgatgtgaggattacaagttgagagttgtgagtgttgaaggttaggacgagatgatatggtaggggtacctcccggccttaattgtcgttgcactgttttctcttttc

SEQ ID NO: 43740 - DNA, 1083 bp, Zea Mays
tattaattcaatctaatataaccatcagatcttaattattaaattaatctggagtgtacattagattatcaaaccaaatcaacccgacataaccatcaaatgttccgctatgcaccttaagcgcatggtctagggattaatcatccggaataaccatccgatcttctagtaagcatagtaagtgtatggttcacgacttcatcatccagaataaccatcagattttccggtgtgcactgaaagcaaatgatccgcggttttggtaggtgaaacgttgttaggtgaatgcggatgttggctgttgttgcacgtgcgaactgttgtgtggaagctgctgggtcctcctctattgtgcgtggcttgtggcgggcttggactactctcatggcttcggcgcttggaactgctcgtctgtccggtcctgcgtgcatctctctctcctggctggaggtgtggtggcctggcggcttctctgtgtttttctttttatgatgacttctcgtgttggctagggttggcgttaggggctcggtcagttatgctccctcagcttttataggcagcgcaccatagcaggcagagcagagataaagattccaattgcatccatctacaaacaaggctctcggcggaagggataaaagcatgcatcgcaattactgctgctctgctgcaaccttggctctcgtcaattggatgaccaaaagatgccaacgtctaagatcttttctttgtgcagctgcctgtttgtcaccaacacaaaattgtaggtgcctgtttgtcaccaattatcctctaccacaaagaactacaatagtgatggaggatccgatccagcacagatccactataatgcatagtgggtgatgcatgcctaatggtggttgtttagtgttagtttgggcatgttggaactaagcaattgtcgatgccatacactagaagtgaagaatgttgttagcgttaggagtagaggtgtcaatggggaccgatacccgttaagccatggagaatttctctattagatttagggtatgggaagattttaatttccatttgctgaagttaggtatacatctattt

SEQ ID NO: 43741 - DNA, 795 bp, Zea Mays
ctttggttgcaccttgttttccatagaagagtgaatgttcgtgggaccggggttgacgtggatcagtttgtatgccttttgaaaggagtagctcgaggatccccagttgtatctccattcgtatttaccttctggcagtggagtattttggagctcattgcttaggagctgaaactattcaaatgcttcagcatataatggcaagtggaaaagatctgtggttgagcctagggtttttgtttgctgaagaggtgatgcttttgttgattgcataggagaaaagttctaggtatagctcttgatgcaccttgcttccccggcagtcaggtcagaactgcactgaacgaccatcactgattagtggtttagccatactattgcacatgtgtatcgttttgaggacatcgttcaaccaaaaggaccctatcctcctagatatcgtgacttcaccggtaggatagcgattgtcccagatcaggtgcacccagggcaggttatacctagtgaagcttatgcagggatttcataagaagagcttcgttatgttttttatgttgatgattccaaggccaccttgcattttgggcttacgcgctatctgccatgctgcttggggtggcttcttggcattgatgtctgctcctttccaaagatagtatcttctatatttgtcaacttgtttgacgaccgaactaggcagctttagagtgtagaggtagtataaaggtagtgaagaaataattgaattaaccatctatagtgtacctgcttgcaatagaaacatggatgttcatg

SEQ ID NO: 43742 - DNA, 684 bp, Zea Mays
agaaagtattgaaaaatatctactatctattaagaacctaacgtgggcactggtgctaccacgacttcaccctcctcaagcccagcgctcgcaaaaaatagtgcagaacaagcacttgaacacatacccctctactctagaaatttgtgactaaccactataccatacataccttagtgtttacaaaacaaaaaatatatttgtagtttagacgtcgctccccacgctcctacgcctcgtggcaacgtatggacacatacctaatgaataaataataagaatagagagagaagtagacgtggtaatgtattcataatatgatatgacccttaataaagtttagttaaaaaatgaatggtaatataacctggttttagtctgatgtgacacttaaattttatagtataaaatttagaattcattatcacccctaatgagaagagacaagaatgattagactatctttagcagcttacctgtcctcatatacatattcaaacttcactctattaatattataatttacagtgtaaaataatgttttagatgaccagatacgtaaattgttagacatagtcttaggataatccatagcctgcaaatgttgtttgcacacccattgcgtcactacttccgaaaaccgcgcgccaaaagctcccttcccgcctcctcaccctttggaat

SEQ ID NO: 43743 - DNA, 621 bp, Zea Mays
tgagagagagagaggatattaaggagattattcaacgtcctatatggtctcgcttcggcattaggaggccatccattgcccttgggaatgatatacaagcatgccaggctgcttttaatacaatatgtacttacataggcaccagggacttagtccaggagcacattgcttatagagtgtggccactcgcaagtgggtgggagatgccgaaggaggctgctgctgggtctagccaaggtggtttaatctacttgaagtacacgttcaaatataggagccagtttgacgagccaaatgatgactgactagatgccattgaagcaaccagtgatgaattgcttggtgcctactcgaaggctaaaaatgatgctatgacaacggccttcggggctcgaggcaaaaagaggctgaatagagtatttgatgtcatcgggtttgtatacccagattactactatccttcgtgaaagcaaggaaagaaaagaaagactgttgcttcggtgacatctagcacgccgaggtcaaataaagttaaggttttaacacatcgccccaagcgcattgaaacgaccgaagtgccgaggcctattgaggggtcttcttctgtatctgagccgagtc

SEQ ID NO: 43744 - DNA, 651 bp, Zea Mays
taagaagtgactaaccggatctttatgagccagtaccgcaggaatttaagcggattttttggttgctttatcacgtacgacctgttattgctgagaccgagacaaacacaagccacgaagaactttctctagatcgaccgaggagagtgggcgcttgacaggtacgcgtgaaactgactgacacaggacgctaacgaaaagaagagaagaaacagaggggattgggagcttcagagacgacggacatttgcgcagcgggagcgagtttttacgcacgcgggaacatagggatattagatacagtactgctggatggttatttttcctttttcttcctaaaatctggattgggacgaggatattagaatctattggagatgctctaactacccgctgccgtttactagcccatgaagtcatcccagtgctaatgggtggggccggacggctagcctccttgctgtcggggtcgcaagagtgcttgagtccggggccggcacatgggtcccccaagctagtcactgcccgtctcaccttagccatgccagtctcgatttcactgccaagtatacccagcatggcagaagcttcttctacaacaagttgttaaaaactagatcgtcgcgggatctccgcaactgcctgatctcc

SEQ ID NO: 43745 - DNA, 787 bp, Zea Mays
tggtacatacatatttgttggcatcaagcaagcgtaacaaataatcgctagaaagcttttggattgtgacccccctgcagacaactcaatcactgttcaaatgttctagtgtattctatatgttaaactgatagtacttccattcctttttgaatgtggtaggatagacctgaaaatttcaattatctacttcggaaacttcaccttattggtgctcttaaaaagaagaacgctttgtctccatgcaatctgctagatagcttgattgtgaatatacagaatgccataagcacgggctaccaattagacaggaaaaggcttctgggagttcctgttagcatacagccttgcagttcagctatttacagtatattcgtaactggaaagggatcttgttggattccttttgatatgtttatggagaatgcaatggatgggagacatcttcatactatatcatcagttgaatatctgacaggtgcataaatgcataaagctgttaattcttgcctttccactttctgtaaaacattttctaacatgaaacagttggttgacagaactatccaaaacacttcaagtgttgaatcgggcaacttggcaagagacctttcaggctttatggatttcggctttgcggctagtacagcgagtgagatgacttcaaccacagtctatatgtattatttttaaataaagaataaggaaaaagaaaaatagtatatacttttgttgtcatttgacatatgctggaaacacatactattaatatttaatccttgctaaa

SEQ ID NO: 43746 - DNA, 488 bp, Zea Mays
gtccaatcatatccagtccccagcatgcgaacggccaggttacatgtatggtttgcagttgttgcgctggtagatgttgctgttttgacaagtactgacaggcttcgcacctctggactaactcgactgcatcactctttgctgttggccagtagaaaccggacttgaagaccttccccaccagggtcctggatgctgcgtgtacctcgcattgcccagcgtggacctcatccaaaagttgttttccagtagctgagagaatgcatttcatgaggactcctgacgcgccccttctgtatagcgtttccccaatgagagtgtaatgagctgactgtctcgcaatgcgttcgactacatttttgtcatctggttcctcctcattctttatatatctgatgatcggctccctccagtcatctagctctggttggctcagaatattgcattcctttacccgatctagtgagatgctcgggtgcagtacttct

SEQ ID NO: 43747 - DNA, 499 bp, Zea Mays
ttcgcaagaatcgccgtagcaaaaccagcaacgatgtcccaatacaggctctattagggctggttaatcttcagaggatgatgatgtctgccattgatcatgcactgaaggaggttatcccagaaggtattttattggaatttcctgaaactgggagtgctggcatccgtgtagaggtcccggatgaaattccctcagctagcaatcttgtcgggcaagaaataatctggacagtttcccatgcttcttcgacctttgagggcagcctgatccatggggacacctcggttcctgatgttacatgcaagggttatatagctcccgagggtacgattgaggataattcagcccttaaaggcgctgctgagggtgattcagcccttgagggtgctcctcagggtgacctagcccccgagggtgcttctgagggtgagtcagcccccaagggtcctgagctcggctcctcttcagctgcttctatggatgttcatgtcggatc

SEQ ID NO: 43748 - DNA, 569 bp, Zea Mays
ttagttataaatttttgaagtcgcaagtctgaatctgtccaaatctaaataaaactgtcatatatcactatttaaccttattaagtgtttaattacctcgagatgaaaataccaaagttagagagtatttaatatgatttctaaagagtatttgttcaccatgtttagataaataacgtgtgagttataactgaaacaagcaactgctatgctgctgtcccaaacatgttgaatgtgattgattgccctaccttgttttagctgtcttgagtcgactgcttgtttgttttgggatttggctgaacatgagtaataataatcagtgactagtataattggggttatatataagtaagtagtacacgtctcactaagttagtgaactaaattggttaaggtctaataagtagcttagcttaatcaaaaagttagcaagtgcagttataaattagggaaacaaaatgaataatgtcatgtctttggctttctgctaatactactaagtaaccaacgtcattaaagtaaaacaatttgtaattgtgaattaactatctcctcatgtgtttctg

SEQ ID NO: 43749 - DNA, 461 bp, Zea Mays
cccaactcgctaaagcacacttctacttgggccaaaataggagactgaaaagaactcgccctactcgctccttcttcccctctcctgtctcaacccttgatctcaacacagttgacaccagtacggtgagatgaaggtcatcatgaagatgctaagggctccagcttccagatcgaagtggaccccaccaacaaggaaccaatctatcgctatggttctagttgaacattaatagaactcctggcaagtgattgctagaatacctaaatggtttcctcaaacttagattacagttaagattatattcttatgctaaacaatttggttattgcggccctttgttttgaaatccctactactattaagaaagcatcgtggggttacaggggttcaaacatgcatgcatgaagttttccttttaaatcattttacaaaatgacataaaccatacataaattgat

SEQ ID NO: 43750 - DNA, 437 bp, Zea Mays
gtcttctctaatttcagatcttcggccggatttgtactagcctcgactggcatagcatgacatggttctgtgataggagcaaactctgcacgttccataagctcaggcacattgactgtctcaatacgtcgcggactatggttcaagaccttcaccttcttcgccttcggtgcactagaggacgccgaagcagtagttttccttttcccctttgttttcgagcaggaaaacaatagtgagggtagataaacccgataacatcaaaaaccctattcagtctctttttccctcgagcgccgaaggccactgtcatggcttcatcttcggccctcaaataggctccaagcagttcatcacttgttgcctctataacatccaaccaatcatcattcagtacgtcaaaccgatcccaaaatcaaaatgtgtacttcagatag

SEQ ID NO: 43751 - DNA, 1030 bp, Zea Mays
aaattgttagccctgtgattctcaagtctagagatgtgccgaatactgaattcgtcaaaagaatgaattatgccccaacacttttcaaggtaactatttagagtaccatcaaaacattgatattcttctaatacctgttggacaaccagcttagaatcaccaaatgccttcacatgttttactcccataaaatttaaaagctccaagccgaacaaaagggcctcatatttggcttgattgttagtgcaataagttttcaatcggctagagaagtcgaaggagacattacttggtgaaacaagcacaatgccaattccttgcccttcattgcaaattgatccattaaaatataaagtccagggagtaatagtgaggtatgatatgtctagtttatgagtatcattgatccgatgttctacaataaaatctgctacgacctggcctttcatagatttcaatggttcataggccaagttatactctataagtgcataagcccatttaccaatcctaccactcataatcgagttttgcaacatgtatttaatcacatcggtttgactggcaacagtgcaatgactagacagtaaataacatctacacttggtgcatgcataaaataggcataagcataactttttgataaaagtgcaccttgtttcagcatcaaccagccttggacttaggtaggtcaccacatgctcctttcctccagttacttgtgtcagaacagccccaataaccttatcttcagctgcaatgcacaatctgaacagtactcctacttgtggtgcttttaatacgggagccgaagacaaatactttctaatgagatcaaacgcttcctgctgttctgcctcccaagtgaattcagcatcattcttaagcctaaggataggggtaaaggcatcaatcttttcgactaggttagaaataaacctccgcaaatactttatcttgccaagaaacctctatacttcgaccttacaggttggaggtcccacattctgaatagatttgattcggtcag

SEQ ID NO: 43752 - DNA, 537 bp, Zea Mays
gttgtcgcagcggtgcataaacactgtcgtcatcgtcgacgtcgtccacaggagagtgagctggggctagagttggtggtgggagacgagcctccagtacgtccatgcgtgtaacaagtttagcaactcgtcgatcaagctgctcataggatgtcgccgcagagtccaggtattttttaaaagcttcagtcatcgcgcacatcatctccttcaattccagctgagagacacactcatcgtcgttaacctaggctccttgtccttgtccatttgattctttggtcctgtcattgttagcacaaaacagagacaaaaaggcaacaaacaatgtgaaccctacaactatctctcagggtggtggtggtggtggtggaatacaaattatgaagcgtcttaccccgctcttacaaggttcttaccagcactgcaggtggcaaacggtgaccggtgtgactgtccaatgagcgtgggtgtgattgcaaaggagtagttgttctgctcgagagaaaactggagctctggaaaggctgactaaat

SEQ ID NO: 43753 - DNA, 293 bp, Zea Mays
tagaaatagctttctcagtcacattcatctcttcagaggattccagtctgggactccttcttggaccttcagcctgctcacctacttttttgcttccctttcttttcattctccgcttgattatacttcttagtaactgcatcctcttttttatcatccacctcttcttgtggtgtgcttatatcaaccccaacactttttgctagagcttccaattcttgagaactgagcaagtcttcttcactatcttcgagattcactttatcatcatcataatctgagccctccaccag

SEQ ID NO: 43754 - DNA, 490 bp, Zea Mays
ctacaacctccatcttgattatctcatgcccaacactatactttccatatccacttttgtgtatctttgtgatccatttggggtaaggccatgtgtggcctttttttcatttctttgtagcccagaccttgagtagttgcaaccccttggtaaggtttacttttagctttgcactggaccccggtgacgatccccatacgtcaccactaacctattagggtgtatcttagtccacccaagcccatatctttagatgccaaagagaaagctagtggtaaaccggttttggtggaaatatgtcaccaacatggatgaagcctaggagccagtactatagaagatcgaggtgctgggggggcaaggctcaccacaaccacccttctagctcaatttttgttctagcgcattgccccactctagaggcacactaaggacatgtgggattacattggcaagttcaatgagatgtgggtttaggatgaggactggc

SEQ ID NO: 43755 - DNA, 641 bp, Zea Mays
ccggactgccccatggggtgccaaatcatttgtacgagctaaccctagccgacacataacagcatggatggaccaagcgtaggaccaacagtaccaagggcatcggatcataaggtctcactatgcacacagagtgtccatgggactaagcatcaggctcgcaataggaatggtgtcaaaccaaatagttacaccttcaacacttagaggattatcagatgggtcctacataggagcgtcgtaccattggagatgaagttcaatagtcaccagaaaggttcctgagaggacaatgggaaatcagactggtctgatgatagacgtaggactatacgtcgtagtggcatgccctaacaatcaacaacaactagtactgacatagtagtcattatgaggcgtaagaccttggaacatcgtccaacaggtacttgttagaccatctggcagtatgtagagatggttgttgatggtgaagtgactatatctgtctttagggatataaatagaacctcaatcgaccatttgagatgccttggagctaaggagcatgtcaagagggttgaggctcatctttaatagctctagacactcaatgctcaaaacatcatgttgatcatcgtaggtgcttagattgtttagac

SEQ ID NO: 43756 - DNA, 1430 bp, Zea Mays
aaagtagccctaaggattgaactaacaacaaattcttcccttataaccggatacatgagagctgtgcgatagacactagagaccgggtttatgagggcagaactcaacgggctggatcatagataaatgatatcctattacaaaggaagagttcactctcatgctaccttacgggtagatgatgcgggggtgccctttctacctctcgagcgatattgaacatcggtctcttcggttggacaacggtctgagccatctccataagggtcgagggtggagctagtggcctacgatgacaacctcgaatgacatggggctttagccggtgactggtgtagtggaccacgcaagtcttggcgctgcccttgaaagcacaccagtgtgagtggtaggcccccttgaggccccacagccagcaagccgcccccagcggggtcatgttgacgaaggcgtagcccttgtttgcctccttcctgaatccatcaacatgtagaggaaatcataatgctaacaatcccctacttgacatgccaaatgtcgaagagtaaactccagccgggtggtggaatgcacctgcctaatcctaagaataggggcagcctagggtttgcccgaagagatggatgaatacaagaacatgcaagggtttagagtggtttgggccaccggagctatgggtgtggatgaactcgggtgcactccaaagagcttgaagttgttttgttgtcctcagtaccgcatgcgccctcccttttatagcctaagggaggcatgtacatgggcactaggctcaacaggtgggcccaaaaatataataatatgagcatggaaggacgaatatagcttggtggactgaggtcttctcctatggtggtcagataccttctctcagtcatcgtgttgattttctgactagactcacgtttgccctgtcttgtcggtgtgtggataaaggctctggtgtaagctacgatgtagactggcatgtcgacgtgcgtagggggggggtacatggacagtgttgtcctgtcctctccacctgtcacttaagcgggaacagtaggagccatgatgagagctgaccatgagcggcacaaagagtcaatggtctcgcctcagtaatgagcaggttactagcgcaacccatgccttgtggggcgcacgccgcctatcaatggtgcagacatgtgcacatcttgcctgcatttaatgtgggtggccccatgttagaggcttgtgttagcctacacctagaggcttttgtcatgcaccataggccacatggcacaccgtatctcagcctgagcgaggagcggtggtttggagcgcatgcaaatgtggcagctttggacctcccctggccgggagtctgtagggcacttatggaggtctaggtccctctgtattggcttggacacatagcaacaccg

SEQ ID NO: 43757 - DNA, 414 bp, Zea Mays
tggaaagtcaacacagctcaggctagcttccaaatggtgcaagaacacctactcatcttgcagtacaatctctcgtcaacaccgacgccctctctctctctatcaggcgcacactgtcaagcggcacaggcacagaaaacctagaaggcaccttttccaagagcaccccagccccattcttgtcaccccggcctagcttgttcatgtccactgcaagtgcaaggtagggtatgatccgtccaaggaacaccaatttctgagcaaaaacatctactccatctagtcaagacaaatataaaagctactgtgtgcgtcgatctagatagaattaattttatcacctcaatctgaatccatttccattttcaggcacgaagcatccagcgtcaaaaccatcaagttactagaaccctc

SEQ ID NO: 43758 - DNA, 406 bp, Zea Mays
ccaagcacgatgttagcaccatcaggagtagcatcaacgctgacttgattaaccctagcaatagaatatcccttgccaagagtctgttgcttgttctgagctggtgtaacagaattccccaccggacaagcattagcatagtgcccaatctgactacacttgaagcatgtagggctaatcttctgtcgtgtaggtctcgccggggtgccagtgggggcagcctgacgagtgggaggtgtccatggagacccctgtggagcgtactgagctgggcgtggtcctcctcctcctggacgagctggggtaccctgaggtggaacattgcgaggacgaacactactgctaccctgtccctgtgagatagccttcctcttcaagtctcccagttgaacacgcttgtgttcaa

SEQ ID NO: 43759 - DNA, 592 bp, Zea Mays
agtcaacgtattgtgcgtccgaaatcggggatttgcactcggctggggtgctcgacggcgaggtcgccgccgttgtggggtcggtgttgccgcggttcactggaaggaaggtgacgaatcggtgaccgttagatccgtggggaagggcagggattagacgacgcgcgtattccttcggtagatccaccacgacagcaggattgtgatcggagggttggggtcagatctcgggatcgtaggatgtgggccgttggatctagatccaatagctctcggttcgtaacgattcgataagatataaatctaatcaccgctgtcggttctcgatcgggcggaccagggccgcccatacccccttcgccatgacagtttagcatatgaacccctgcaaaatcaagtaatgaacccgccgtccaactcgtggtttactgagtctagggaaacttgcagtctagcccctgggttatctggttattcggtgcgcagtccagggattttgtaaatcagaggaatagatttaaaaatagattttgaatataaaaacaattgctagaatttgtataaatcatagaaaatgcgtatgaactccaaa

SEQ ID NO: 43760 - DNA, 595 bp, Zea Mays
tgacatcttaatatacagtccctcttttggaacccatctagagcatttgacactggtgttacagctgttgcagaaggataattggaaggttaaacgttctaagtgtgactttgctcagacaagcatatgttatttaggacatgtaatcagtgctgatggagtagcaactgatccatcaaagatacaagtgattgaacagtggcctgttcctacatctgtcaaagccttgaggagcttcttggggttggccggcttctatcggaaatttgtgcggcactttgctactatcagcagacccctcacagagttgttaaagaaacatgtaattttcatttggacaaccgtgcatcagcaagcatttgattgcctgaagaaagccttggtgtctgcaccagtattagccctgcctgacttctttgtcacttttagcatttacactgatgcttgtctgactggtgtgggagcagtattggttcaaaaagggcacccgttggcgtacctcagcaaagcactgggacccagaaatcaaggtttatctacctatgagaaagaatacatggctattttgctagcagtagcacaatggagatcatat

SEQ ID NO: 43761 - DNA, 991 bp, Zea Mays
taaattcggtaagtgcactacttggggtaggctgtttagataaaccgaaaccggaacaattgctagccaattcgatttcatatttaaaatccgagataattaagactgatattgaatattcataattaatctgtttccctgttcaactgcggatactattatcgagtttcgaatcaaatcaaataaagtatagtcttcatatatcgaagatgatctcatttggtttggtcaatatgtttctcgcccgaatccaacttatttgtgtctcttttaaactctaatcctagaatacatatttagttgtgctaacaaaaagaagaaaatcatgttttccttgctgcaagcattcggctgtgggaaaagaaaatccatttctctctgaagccttttcttttccacgtactaaaacctccctcgcacggctctggatattttcgcttggcctcatccactcaccgctctatctctccaatgtctcttcacgtcaacaaatatcacattctactcattcccttagcccatccagccggtgtactcatccccatttcctccgtcatctccatctccgagctgcttagctgccttcgccaaaatgtcgagtagcctacaccagcccgtagtccttgtgcctcctccagcacgttccctagccatccgtctagccgatggccatggctgatgttagcagtaggaggagaaggtagatggggttttgggaagaatagagaagggagacgaaggacggaaggatgttatttcttagagtttccgttcatccataaaactcctagccagtagccagaccagattaagtacatccacacgtcagccgctacatacacagcaggtctacacctactcaggttcatatacgcgcctgttgggtcaacgcacacgacgagttgccgcctccagcttgcttggaccattcggtattgcgccctcttactgttgtagcggctgggacacctcctccattggtgagttgata

SEQ ID NO: 43762 - DNA, 468 bp, Zea Mays
catcaacacaactcccaatcatcaggaacacaacaaagctccttcaggccaccagtcccaagaggcagaggaggctgaagcttcagaggaagattcagctcgcagctaagaaggttgttttgcttgttctgtggagaagataaggggcatacaaccaggacatgccaagtcacgatacataagcaaaagtaaatagccgaggccaaagcacggcagaatcagccgaagcaagtcctgcatactgcttcatgttattccccgtacattcctgagtatgtgggcaatcaacaacccacaatatcagtagcttcggcaagccactcctcagctgcatgggccctgccaccaccaccaccagtcatggctccaacttcgtctcataatcaacagctagaagggcaccgccaaatttagcaacaacgcgacgcacgcgaagagtccaaagctcgaatagtcaacaacgttgta

SEQ ID NO: 43763 - DNA, 703 bp, Zea Mays
tttcccattcttcaaatggtgtaatttgtttgatctttgtaaaatctctattcatgacataacatgctaaaatggcctcaccccaccattccttagatagtccctatagggaagctattgagattttagagagaaagacaacatgacaacatgattaagttatatccttcttgtcttcgaaggtgttgtcagggagaagggtaaataaagtatatgacacaatacaactcaaaatagacataatgagttgaatgtaggaacaagtgtaaatacatatatacttttagctaaaaatgaatatcaatttaacatatcaatagatggtgcatattccttttgtaacatagtaaatgcacttataggttacacaaaagaatataacaacaacaaagcttcgttcttattatacttttggaggctctctagggagaagctgtgacaaacacgagattacaaaaacaggtcgatcccagtagtatgatagggttcacttttttatagggttgaactgttatacatcttcatatgaaattttgactccatccttcatgttacataattaccttacatattaatgagggtatagttttgtcattttacacactttacatgttgtgtacaaattttattttgagaagcctttgacattgctaaagaatcaaggtcagggccaatgaagcttcatcttcatcctagctttgcc

SEQ ID NO: 43764 - DNA, 757 bp, Zea Mays
cctggaatggccggggggcagcaccagctcgtgggtggtgcgagtttggagatgcgccgtgggaggaagtcagagtacctcgacatcccactcaaggacaacatcaaaggatggcgcttagagtggtttgttgtagagaatcatggcaattccccctcggtcggggagacagccggatgttcgtgctccaagttggactgaatcccccatagatttggagataaccgaagccagggttctgcttgctgaaattggcttgttgaaggagagaggtctgactgctgaagcggtagtcacagactttgttttcaagaacattcaaccactgaaggacagagcatacccggcttatttgtatagtggtgtcactgactcaacccgagttaccaacaggaggattcctgctatggatttggtaagccggctggagatgatccttagaggcaaattgtcgaatattggtgctcctgttgcatattctgcctggaatctgccaccttccaagacttttttcggttttgtgtccaatcctcctgctagcgacagtggcttgggtcttagagtgcgaccctctcccgaagaagtcgaggctctggttgcttcacttggtgatctccccaacgatgaaaggcaagttcactttgagatgcctgtaaacccaagtgatgcaaagataagtgctatgttggacatgttggctgaggattcctccgactccatctctaccgaaaccatagctgctgcaactgtccccgag

SEQ ID NO: 43765 - DNA, 683 bp, Zea Mays
ccggaccgtccgcacggtctttttagcttctaacacacgggtatgcagttataggtagtactagtacctgtctacccaacgggtagaggttgttgcccgttaatatatccacatgtatagaaatcattctatacctgtctacatatcgcataaaatctgtgagttatttgggtttggggtatgacatctctagacataagtgtggtatccggttcgatctcctaaccgaacaggatgagataaatccaataacttgaccaggacatggccaactcagtttactagttgggtcaggaacgaacctttttctgttctttcgtcactagaagtaaactttacgctaacactatgatatgaccctgataagtattggaagtgtggaaggaaagtaggaaacagtatcagcgtttataaacttaaacttagagttagtttaggagctacaaaatcaggactaaaatctcttaaatttgaataaggagggaagcctgaaggctcgaaccaacgcaaggaaaatgcttcctagcttctatactcgtccaaggtgggccacgaaaacaaaagatcaaaatactggcgaggatggcagagttctcggatacatgtttatatgttaaatatacgtgtgcgacgcgatggaaacagctagagaagccgtgtgcattttgcccactacattttca

SEQ ID NO: 43766 - DNA, 900 bp, Zea Mays
cgagagagggagtggacccaagtctctgaggatgattgcggcaggtgccaatattggtcgaggagggcaaaacctgtgaagtgtggttctccccctcctggatgccctgcacttcttttatagccttaaggagggacctcaggagcaccaaggtttgttgaaatgaggagaggaggcgagaccgagcccctatagcagcatgaccgtcggaatggcttcggtctttgcagttgtcttggatcaggggaaggacgttcggccctgtatcccgcatcttgaccgagcagagagtcaaggctaggatcgggggctcgtacgcgtaaccgagcctatcttgtggatgtgttgtccgagttgtagttgttggaatagtgataaatatggtaaaaagcacatggtaattcatcttgtatggcgtaaagtagacctacaccagccctacagttctatagccattccgttgtcagctgtctttgtggaagggttggtggcatcgagtgtccttttgtcgatgttatttaatgcgcacgtcttcatggttttcgagatcttcgactgaggctgggctcgaggctatcttctgtctgagatgagctcgggcgagtgacgaagattactttccataaaaagggggcccttgggcgagtcaaggatttctcacgtgcgcgactttcgcccatggataggctcgagcaagacgcaattttgagcgaccgttgagcggggcctcgggcgaatcatgattcaaccgtacttgatctcagggaacatgttttctgattttttcggtactcaggtgttaggtacgattatgggcatagtctgggtacccctaattatgatacccgacagtagccccgagcctccaaggaagtgtaggcacttgcttgggggttctgc

SEQ ID NO: 43767 - DNA, 364 bp, Zea Mays
aagatgtctctggctattgcacaataatctgatagagaagaaaacatgcctcaacaattatcaaacagaggccatgcagggattcatgatgcagcatgcatgaaccatgcatgagttgagcggcatccagtatcgtcttgtgtcatgcacgaggggtggttaattccgatccagctacaaaaaacagatgagctaatgaaccaaatgcctcaaacaacagccattcactacgtatctatcgtccatactttgcatcgaaaggccaccaaccatccctatctcgttcccaactagcctagctctagcaaaacagtacacactcatctccgaatggagctacaataaaatgctcaccaaggaccca

SEQ ID NO: 43768 - DNA, 465 bp, Zea Mays
cagctttcctctttttaccttgtccccgcagcgggtagcggtagtcggggtaatcgaagccaatcgcgtcaaaaactctattcagtctcttctttccccaacctccaaaggctacggatagtgcattatcttctgccttggaatatgctccaagcagttcatcacttgtagcttcgatgcacttcagccagtcatcatttggttcatcaaacttatccccaaatctgaatgtatactttagccgtaccaaatcaccttcgctagagttagtgatggtctccttcggcatttcccagttttccacaagtggccatactctgaatgctatatgttcttgaattaaatctcttgtgccaatgaaggagcagacggtactgaaggccttatgacacgcttcggcggcgtcgtcaatttcgactttcggctttcagaggccgaagcgggaccaaatggggcgcattatga

SEQ ID NO: 43769 - DNA, 589 bp, Zea Mays
gcgagggcaccatatactacatcggctcaaccttcgggatgatacccaactccctataattaaacaacattattctcaattcctcaccctaaaaaagatttcgcagatccccctcacctattctcgtcccaatcggcgaggacaacagttctcgtttaccaatccggtctaatcgaagacggccctgctccatccccatacgacgacgtctaccacttcgcgaaacctcacccacgctgtgcttcgacaccaccattcgtcgcctgtactcagtcctcgcactaggaagatcagccgcatcaccaacctccacacgcggcaaggactccgctgcggccacatctaatgcagcaaaataatccaagccttcatccgaggactcttgagtccaggaaaacgaactcccagactcaccatcagactcaaaacactcatatccagaaccagataaattatcatcggcaggcacaacggttgcggccgccacaaaattagtattgccagcagcggttgcttgcgcaggcccaaacgtcggaacctgcgcagcaactgaggttcaatatcacaaaaacaaaactttacaccgaaa

SEQ ID NO: 43770 - DNA, 2261 bp, Zea Mays
gcgaagaagaaagatgaaggctctttggcgcgacctgttgactaggtgtaaattttgtacactaggccatgctgaagattcgttaggttgagttttgcttgaaggccttggaaaatattatgtctgattgtctgccacgcttcaattgtcgaccaatacatcatgcacggtgaagcttatattacagttgattaccatgatattgctgtgtgggtaatatcttagccgaaggtcatcttgagtgaatgttacaggcatatgaaccacttagatctgatataggacccctgaacacctatatgttggaccctcctttgaagttcttgtttttatctcttattgagtggcccgaagcttgatcttctcattattgggaatatgtgctttgctggtggaactaagttgttgacgtctgagctttgggctcttcccttctactgagctggctatgttctcgtatgtggcgtttttgtggaggttgattatataacattggatcatattgtgatgggtctggtagttgggggttgtaagcttcccactgttgtgactgatgttgcacaattgggcttgaggacgaagaatgtgagttctgcccttgatgctggatgtatgacacatcatagttagtcgagcattaagatgatgtatggcacacattcttcggctggccttcctgcttcacggttgccaattccttatgcttttggatggtgatgctacaatattttgttgtatgctctttattctccccgcaaaatacacaatactagtcaatggcgcgcgccagcgcttgcataggatttccctttttttactgggaaggtagagcggcacaacaacagtcgtcgcccacgcgtgcggctagatgtaccaacggccaagatttttcgcgcgacatggatagtgcgaatgtcgaggaagttgcatcggtttaataagaagaaatagctttcttgattgaccgttgttggagtacctgcctccaaaggtgtggccccccttctgtccctttgtgttgagccaccccagaaactactttgctggctttgctaaggtccgttcgaaggttggcttgttgttggagtttgcggaaactacttttctccatcaaactagggtgtagtctgaattgttcgggcttcccttgcatccttgttgaaaaccctcatgatctctctgtgtttctgttgttcttgtcaacgctgtcgaaagtcattgtgtgctctaatatattcatccatcttctgaaacagcttcttcaaggtttgcggaggctttcaggtgaagtattatgagcatgggtcaactttgagctccttgattgttgacttaatgacaattttaactagtactccttgtgcatgtactttgacttagacaaaccttcacatataactttgaagggattcatctacttcttgaaaacatggaacaatgcatgtgccatgactaggtttgtttgaaagccttggaaacttgcaatcgattgtttcttaagttgttcccatgtggttatcgatctggacaaagggatgagtactaggtttgagctatgccttttgttgacggagggatgagtaccaggtttgagctatgccttttgcggccataatatgatttggctaacattgttgtgtttctgccgaattatgcaatggttgcttcgtaactcatgaggaattgctttgatttcgactgcccatcattcagaggaagcatggacagtttatatgcagcttgccatggggctacctgcaaatcccttgagaacgaagatgcactatcatagatgaaattacatttttacctttccctatttcatagtcaccctttgcaattaagggagtacaataatgtcattttactgcgtagacgtgtcgcacacatcttctcttcgtagaagcttcttatgtctcctctccttcgaagtcctctttatcgacgacaaagctttgctttcaatgccttcggcttcatgcacctttggctcattcagatctaccgaagctttttcaaggagagcggtgatcttcctttggccttcattagctttctggacctgaaaaaccatctaaatattgatttcatcattttggaccttcgactagagacctccccaacaacaaccaaatagaaacaattgctggtttacaaatgccattaaaccctggttagagaagtgcaaatataattctaatgcagtcttagacatacttcacgcgagtgtgaaatgtaacgttatatacttgtatactgac

SEQ ID NO: 43771 - DNA, 467 bp, Zea Mays
acgacacacaaaaccagtgctttgtaggagtagagatataaattgtctaagagcttataatgctatacatccaaactaattccattttctttcacggtatcacgagtttaggttatgacttaggctttcgttgtcgtcgctacgacccgtgaaggtcaatctccgcatggggctgtgtttttgtagttagaatgtgcgactgacctctatgatatgtcgcgcccatggtcattgtcatatcatcaaacttcaacagattattgattcatcggttccgcacatcgcagttgctgcttgggctttcatgcaagctagatcgtgtcttgccccttctgcttgtcgtcgttgtaatgattagggaccacgacatccatgcctccccttcatgtgccatcgtggtgacagttgtgaagaggccgctcgctacggataactagtggtgtacccaaatctattgatgatgtgaa

SEQ ID NO: 43772 - DNA, 486 bp, Zea Mays
aagaccggtaacaccagcctgctggggagaacaaaaggcatgaactctctagcggcaagttcaccggggtggatggcaccggcgcaaatccttccgccgaacgccggcgcatcccatccaagcaggcggtataccatgttgagcactcgctcagtctgggcacgctcgagatgaagttacaaggccatggcaaactacggcaacacaaagcaaagaccttgaaggtaaaggggcgcagagagctcggaggcgaaaggacgccgcgagtgggagagaagcaaggcatggctgctactcgagggatgaacccctctttaaaggcagactcccccgctcccgcctcgaagcgtcgcgaaaagtctcccccgatgcacaccggggtatccatcctatgacacgggggcccggtcccacaagtcatacgactagcgcgctggtcttcgagtgcgaagaaggcaaaccgccgcacaaggagcatgccaccgc

SEQ ID NO: 43773 - DNA, 882 bp, Zea Mays
tgaactcctacgctggaccacaacctcctccaccgatttgggataaacccacgatcctgcgcatggctggaccgtccgggtctaagctcggattgtccgacccagcggctgctggccccgtccttcgcgacaaaccaccaagatccaggctaggaccgcacactccacacaagggttaatagacacgcttggaccgtctagcaatatgcgtggtctgtccgagtatgcctccagaccgtccgcgcattataccgaaccatccgacgtagagtgcgcataataggatataggttattacaagcaatccttctatccacctcagcaaatcatggtatagttccacatacatatgggtagagcccttttcgcccccagaaggctgaaaatatttaatgcacaatatgggggtgtctagggctagctagcattaatgcacaatagaacttaatcccatgggcaaggggatgacataacaaaacacaagcacccacaccattggacccaaggatcagtggattataactgaccgccattgacatagtaagggagcaaatagctagggcattttgagacaaactcaaagttaacatgacccacggagggcagtcatattagaaactgtacgataaccgatttgattatggcccatatccttaggggactagggtaccatagttctcaatttttttggtgaccagggcaaaagcacacatgagcacgtaggccagttcctaagacaattaggaaaattggctgatatggaggctttccatgttcatttatgttcattatcctaactagtcccacttttgcatggtatgtcaccttgccacctaactctatttactcctggagggatttagagcagaaattccatgaaca

SEQ ID NO: 43774 - DNA, 274 bp, Zea Mays
aagccatctgacaagtcggctaactagagcaacaacacagctcgttatacaaacatacacgtcggcttgcctattacaaacatagctcgttatacaaacatacatgttgtggcgtgcactcgagacattaccgtttaacttaacgcaatcactactacaacacatttcagcacacacaatcatccatcgattcgcccttcgcataaattagacagacattttaattcttgtcgccacatcagacaagcacaactcgactgccctccaatttttc

SEQ ID NO: 43775 - DNA, 925 bp, Zea Mays
cattatcgggccactacctacggctcaagggaacctcaagttcaccttcgtcgccatcgagtactttaccaagtggatcaaggcaagggcagtatctacaataacgtcgaagactacccagaaattcttctggcaaaacattgtttgccggttcggagtcccgtccgagctcacggtagacaatggcaaacaatttaatagccaggacttcagggatttctgcttttccatcggcaccaggcttgccttcgcctcagtatatcacccacaatctaacagcgtcgttgagcgcgccaacgacaagattttcactgctatcaagaaaagactactcgacgacagcaagggcaaatgggccgaccacctacctgaagcagtctgggcgctaaacacgaccgagtgcggggtgactggtttcactccttttcgtttactatatggttcggaggccatgaccttgcaggaaataaagcacgggtcgcctcgaacaagtgcatcagccaccaccgacgtagatgagccaacctccaaagacctcatcgacggagaccgcgtctttgccctgtaggccctcaataaataccaagctcaaacgaaggcctggcatgaccatgcagtcgtcccaagagagttcaacgaaggagacctcgtactcgtccgaaccacccagacagagtcacggggcaagctggagccaaagcgggaggggccattcattgtcaagtcgaaggcgtcccccagcgcatacaggctgacaacgccatccggcgaggacctagaccattcttggaatattgacaatctccgcaaattttttgtttaaatcctcagggctcacacacccttgtaattcatcaaacagtgttatttcggcccgcactcttttcctcccggggggtgaggtttttaacgaggcggagccatg

SEQ ID NO: 43776 - DNA, 743 bp, Zea Mays
atacaaatagaaacaaactgcgcgcatgcaagaaattgaacgtatacaggaggtggactagcgtccacgctagtctggtagtgtggggatcggtagctgaggcttactgtatcctattgaaagtctagggctctcaatatcctcaccatatatatatagtgagtccaggctggtctggtagtgtgtgtttgtattggtagcagataaaagaggaccataagcaagctgtcaaggtcgttagcttatccctattatattaacgaaattagttagtagctagcgcacgacatatattgcaagtatagcactgcacgttccaatcatcgaactcaagaagagcctttcaatataccaaccatcaattcacaatcatcaggtagctagcgtttgacgcgagcatgcatggccaaaattctgtcgcatgcatgccaccatcagttagctgctgctgtctgtggactcgaaagtgtgctgctaattaaaactgccgctggagagagaccgagttagctgctgtctgtggactcaaagtgtgctgctaattaaaaccgcttgagagaccgaggaggagaatcaggtaacaggtcaccgtctcaccatccaaactgaccagcgactttgctacgtacgtaccaccttgtcatccactttttggtctcccggccacttttgctgcatttcctcttgtcgtcatcgttgcatgtgttcagatctcctggcatttcttctggtacgcaatcttc

SEQ ID NO: 43777 - DNA, 695 bp, Zea Mays
cttggaacacttattcagtgttgctatctgttactgacttgtgtgccacattatatatttagtcagccttctcagagccctagctttctctcgagcagaacagatactcctttgcaatcacacccacgctcgttggacagtcacaccggtcatcgtttgccacctgcagtgctggtaagaacattgtaagagcggggtaagacgcttcataatttgtattccaccaccaccaccctgagagatagttgtagggttcatattgtttgttgcctttttgtctctgttttatgctaacaatgacaggaccaaagaatcaaatggacaaggacaaggggcctaagcttaacgacgatgagtgtgtctctcagctggaattgaaggagatgatgcgcgcgatgactgaagcttttaaaaaataccaagactctgcggcggcatcctatgagcagcttgatcgacgagttgatgaacttgttacacgcatggacgtattggaggctcgtcccccaccaccaactccagccccatctcactctcctgtggacgatgacgacgatgatgacgatgtttatgcaccgctgccacaacgcctcgcacgtaatcgacaaggtatgggaggtaatggtagaagtcgtcatcataatcctcaatcagaccatgatccatttgctaagattaagttctctattccaccg

SEQ ID NO: 43778 - DNA, 450 bp, Zea Mays
attaagccttggtgtcatgtaagatttggagataattaggtctaaagtcaagatgatagtcaaccaatgaactgaataaggggtaacagtgaagttgggcaagctttgagattggattcgaccatgatctagtaattgtttaactatggttgctatagcaagattgtagctggatcatagggctacaactttgatacagagagatggtcgaaccactacatgaatttgggaacaaatctccctgcaaattgctctgtcaggctgactgaataagaatctgatggtacagtaaacaaagatcttctgttcagcccccctcgctgacggtggcctttgcgcccggattcgcgccggccgtcgagattcgtgcctcgggcgagtggattacgctcaacggtaaaaagatcttgtcgcggatgaacacaagacactgtggccgctctgtctctt

SEQ ID NO: 43779 - DNA, 678 bp, Zea Mays
ccacaccacaaacgtagttggtatgatcttgcaatactatagcctctccaggtacaactataattacatgcgcaagcgtcaagggacataattgtcgggtaccataattaggggtacccagatcacaaccctaaaatcctgagatgctcgagtaagaagggaacatgagcaaaacacgctcctgaccataccaaggcaagggatccaaatcacgcctcgcccgaggccaaccccaaacgggagaccctagtcatgaactcgcccgaccccacccacgggcaggagacatagtcataactcgcccgaggccaccctcgggcgagacacagtcacgactcgcccgaggccaccccaagcaaaaaacataaccacgactcgcccgaggcgagatgcacatttccgattggcacgaggatgcctcagacgacacttaggagctacctgcttcggcccaccacttcggctcctgaacgtacgtttatacgatcacctgccctgttgagggcgccaaagtcaacaaaggaagacacgactacggtcttatctactttcaccgaccacaacaaagcacatggcacggataccagacattgttcccccactccgaccactgttttaactggctagagcgtggctacatgtgacgccaagacctggcatcagccccgggagagatct

SEQ ID NO: 43780 - DNA, 368 bp, Zea Mays
catcgcgtgggcaacaccatctaccggataaaccaaaaatgagccgtcgctctcctgcttgcgttccccagcctatatataaaggctagctagccacccacacgacattgccaggcactctcgctgagacgctgacccagcgtcatccagagttcttcaatagatcgagacgatggtgtgttctgtcctgacgccgtcgtctactcctccgagcgtatgctgccgtgcgacggagctgtccgcgtcggcgcggccgtatcagccgggtcgcgtcatcttggtgaagtggtcaccgccgcctcgtggatggttcaagttgaactttgacggatctgtttatcacgatggatcagcgagagctagcgtcg

SEQ ID NO: 43781 - DNA, 421 bp, Zea Mays
taatttgtagagggagagaggaaagagaggtgaaggaaaatatttcgtctagtgggagaagcatggaggaggaaactacaacatgcagcgtgtagagtgtggataagaaatgagtcagagatgggagtgggagcatggagttagggcatcgagtcccatgtttaagattgttatgtgatcgcgcttctaagactaaaattgatcctgaccaattcacgatcacaaccaacccaaatgtctgcttagcccatttgatcccaaacccaataggccccacaggaaaaaacaaacgaactacaaaaaatgattttggcttaaaccattatcaagtttagttggtgtcaatgtgtaagtcgtctattataaaataaatagttgtatcaattatacaaacataagacataacctattaacctcttcg

SEQ ID NO: 43782 - DNA, 696 bp, Zea Mays
caagtcaagctctgcagcaaaagtgtagagcaatatgccctctacaactttgtaatatgatgatgccacaaaaacccattggatcatgcttgaatttaagcttgaagttgatggcatcaatctgtcagtctgattttcagacttattcagcctgacagcctcactttaggcatgattatctctaaatttctcacaagaacatggcttgcactcttaagcaaacttgttatccactgattgctctacaattttgaagtggtgaccttgggcaaacaccctatactttgaaagttacaaggctccaaagttgagcccatatcactgaaaatcagacttaagcatttgagaaaaagtgtggctcttttgcacttaagtccaaatctcagggtttagattgcaaatcttcatgattgtgaaccatatgacttaagataccttactttgatagtttttgcactttagtccaaaagtgaactaattttgcacataggtccctagggtttggttttagggttttccagggttccaattagggtttttggtatcccaggggtataaatgtgattcaagtttatgtttgggaacattttatgactattcccctaaagcctttaggttttctcaatttgggttaggtcttacccctgtaatccctatttagggttaagttccctaaccagggttctatttgcaaaa

SEQ ID NO: 43783 - DNA, 776 bp, Zea Mays
ctcaatgacacagcaatgttcaacccatggatcagtgcttcatattctaccgcattatttgatgctggaaataataactggactgcatacttgagttgttcacctccaagaacaatgaagaggatccctgcaccctgctccctgcagcttcagcgagccatcaaaagtacattcgccatacttcggtagcctccgggttgtctgggacctgatgttcagtccactctgatatgaagtcaaccagtgtttgagtcctttattgaagtgcgaggtcgaaactctatgtcgtgagctcccagctcacatgcccacttggctacccttccgacaacttctttgttgtggagaatgtctccaattggaaatcctgtgactactatgactttgtggtcatcaaagtagtgacggagcttgcgagcggttagaagtaccgcgtgtagcagtttctgaacttggggatacttcatttttgaggtcccgagaacttcgctcatgaagtagacaggatgctgcactggatatgtatgtccttccttcgcccgctcgactactaacgcgatgcttaccatgtgagtcgtgcaggagatgtataacaacatatcttctgctggttgattcagcgtggctcggtgtggtggcttgagtactagtggtgtagttagaaacttttttagtgcctcaagagcttcctgtgcctctgtggtccagtgaaacttgtccacctttttgagcagtttgtagaatggcatgactttctcgcctagccttgatatgaa

SEQ ID NO: 43784 - DNA, 560 bp, Zea Mays
ctggagattccagcaacagcgagagctttggtgttgaaagtgaaaacgaagatgccgaagattgggcatggaggccaagccatgttgttttcgggaaatcaactgttaagcaagggcaaattgaagcgatgaaggataaatatttccatgacatatccatagtgagggctggaggagaaagcattgttcctcttcctgaagcagatgaagtggtagtatttaaaagttttatgaaggctggactttatattccgttgcacaagatgctggtcgaagtgctaaagacatttgagatataccttcatcagcttattcctgaagccttaattaaagttggagttcttatttgggctatgagaagctaagggctggagccagatgccaagtgcttctgcaacattcatgaattatcttactagacgaaggcaattgggaaggagcagtatcataacaactttggatgttacagctttgtgcattgttctgatgtgaggtatcatgtgccaacatttcgaaagaaatggtcgagctcttggatgaagcaatggttctatgtcaag

SEQ ID NO: 43785 - DNA, 417 bp, Zea Mays
gtgatcccgaaggggttatctagtggatcggcgaagaggtcgaagctttcgaagaaatacttagcgaccgtggggacttttgtgccttcgtcgacgcacgaggggttgcaaaaattttgtagaaaaccgactgtgagcatattaaggttgtagcccaggcagaagccatcttctcagcagacgacacgaaggaaccttcggccgatgcttctctgataggcgggaaattctattctgatgtttggatgaagggcagccgtgagatggccgatgaagccataagaaagaatgaaaaagaatctcatgacgcccgagaagaggcaaagcaagctgaagaagctgctgaacgcgcaatgattataggtatcctttttaaagttgtttgtctcgttgtttgcttctagcttcgaaattcac

SEQ ID NO: 43786 - DNA, 328 bp, Zea Mays
ttttgggaaatcaactgtgtctgaagctgatatgactatgatgacgaagctaggctacttcagagaagccgagaaggggtcggttcgctttggcggggaagaaagtatcccgaaaccagaagatgatgaagttgtagtttttaagagcttcttcaaagaagggttgagatttcctctgcacggaatgattgcagaagtcttggaaaaattcaggatttaccttcatcagctaacccctaacgccattgttaggctcagcgtgtacatctgggctctctgaagtcaaggggtagagccgctcgctgatgcattctgccgagtacatgaa

SEQ ID NO: 43787 - DNA, 352 bp, Zea Mays
atacatgcctctaacataagttacatggcaagtgggcacgggtactgtacgaaggactccaagaactctttacctaaccacctagcctcaaaagcatgaacaagtagccacgaactacgacggccctcaccttagatataagaaattcaaaagacatggacaagacatgagtataagaagggaactacgaggaaaactacttgtacggcccctagagacgtatctcatggtaaggctccaagcacctacagggcccaattaccacatggtttggtcggcttaggaatgacatggcaagcacgcttgccatggcaggaacttcaaggaggaaccaaagaagattgtatccgaa

SEQ ID NO: 43788 - DNA, 866 bp, Zea Mays
gattaggcttgactttaaaaagtgtggcagctgtttggttgttcaccaaactccattcacaccgcataaactaaacaggtgcatcacatgaacacacatataagaatataagaatcttacaccactttaatcacatgtgcatgataagctaataatcagttcataatagctccacaacatgttcattacaggtgattaataggtctaaaatagattcgaaacagtctcaggtagttgctattacacacatacacacacaaatatgtatacataatggtgctaaacattcagctatgagcagcaccatccatctccttaaacattattgatctgcttagaagacgtgcaaaagaatcaggcatcaccaccgccatatacatcacctggccactgagcaaaataataggcaaccacctaaggaattcacagcaaaatagccagccaacaacaccacccttccatccacaaaagagtacctggttgagcctaaaacaagtgcaaaacatatcagctaagtacaagttgaaacaataaaactaatgatatgtgaatcacctaatcacttcacagtagtgttgaatcactcaaaaacttgaatacccatgactgaaatgttgtttcagctgaagtggataagaaaccacacatgcccttttgatcctttaatgttagaaatgtcccaactatcagttttttatcagtagtcaatgtcattttttcaagcctttgccataattcggcatcagagttcaaagaaggtataacagttggaggtggtggctgtttaagttcgttccggagatccatcaaagtagtgttgatttcatctcctatctttgccatgcggctccgtggtctcacatctc

SEQ ID NO: 43789 - DNA, 600 bp, Zea Mays
aagagctaagcgtagccctagaaaatctgcaagtgtataataatgctctgcacgtgctgtatgactagctacatccgaacgtgccaccggaggttgtagcgatgggagctagtgcaacaagaacagatggcgaaggacctaatggggagctagatctctttggagcccctccttccatgaacctcgcggataatcgtcctcccaaagctagcagtgtagcgggagcagccaaggacgcgaaggactagattagtgtagtagttgttgtttccttatgtaatctaaataaggaaaagtgatttgtataggttgagtatgtataattagaacaagtttggaataatgtaaaggaggttgtgtacttatggtatgtaataatcaagtatgttttcttcttcagatgccgtccagaactcatgctcatgatggggctagaacttctcgtggtggggaggaaactctgatcccaccgcatgtacctcccacgctggtagaagctattactgctttgattaatgtcactgctaataatactcgctttcttcgagaaatggctagaaatcaaattcatcagcatggaggcagaggccaacaccaaac

SEQ ID NO: 43790 - DNA, 444 bp, Zea Mays
gtggtcaccctgagtcgagtaagtgtgttgattccaagtctaatcaaatcgaagtcaattgataaccaacaatttgtatgcctttgagaatgaaatcttttattgatgacgtattctccaattacagagtacaacattgctcctatagcttttcaggtcttgctaagggtaaaacttcctaagatgctctatattccataaattccccagttccgtgccatccatttgagtaagccgatatgatcctggccgagtgacctccgataccatgaatggcccttcccatagtggtgacaatttgtgccatccttcccttgttagaattcggtgaaggaccaagtctcccactacaaaggatcaatgtcgtatagccttatcatgatagcgcctcaaggtctgctgatatctggctgactgaattactgtgttcaatcgctcttcctc

SEQ ID NO: 43791 - DNA, 694 bp, Zea Mays
gtccaatagagttttggtgtgttgacaccagagaagttcatgtggcatcaaactcgtgttccaaccaaactatgaccgtaaagaccaaacagattccttggtgagcttcatcagcctataaggacactaggacattgattcttatgtgttgagccatacataatcgcctcgccacgtaaggttgatgcgtcggcgatgtggtcaccagacacgttaagtgacttgaccaaaggaattgggcgtgtccagggtatagtttggggaaaggaaagcaacagaactacgttgaagctacacaccgtggttaacgacagaggtaaggatctctcctttgctcttgcctcctccccctgattactcttaaataggcagtgaaaagatcaagggatggcttggttcttggaatcacagtaaggataactccgagcgtgccagagagtgcatgggtgtgtaggcagggctccaccctgaagacccacgtagattccaagagcacagcaaggcaagggtgaaattatcctcggcaaggggggtagagataagatggtattgtagtagatatttccaactggtgatatttcagtgatgatcacagttctgaacatccctgccctcttctcatctctatcttctctctattccaaagtaagacacggcaagggaaaaaatcagggatagatatttctgcactttt

SEQ ID NO: 43792 - DNA, 784 bp, Zea Mays
ggaagcatggccctaaacttatatagaaggcatggtctcttctcttgatggaacctttcctaaggctcatgaatcactaaggattgatgataatggaaagagaacaaatcattgaactatggatttattacaagttctcgtgaccttcaaactacgtgatcgaggtaaagaatccatcaacctatctgtctaatgatcatccagttggcagttctcgtaaatagttcaatcattcacgagaattaactgcaagtattcatcattgaatatggagacatagggcaaatgagcacctataagagaaatgctagccaacaaaaattagaaagggtttgactcattattcaaagtcagtcttggcaaatttggaaaggaaacaatgcatgcatgcttcacaaatgcagcaacacaaccacatcaagtcatgtccagcgtcaagcaacgagaaatagagctcaagatcggaacccgtgtgatgtaccttggtgatattcaccatgactagttaccacttaccatctggaaacacaagtttcatgtcccttccttcatagagccattaggtgtcgttgagaagatatgatactccaatgttgaattgggaacttaatttttcatttcagttcaacttgtgagcttgtagagtaaactttacagcaaagtatcagtccctcaacttatcccacattctcaaatatgtcttgatacttacaattttcatttcttgcacctaaaacttgtttttactataccaatcaggtccaaactagctatgcacccacct

SEQ ID NO: 43793 - DNA, 588 bp, Zea Mays
tcttatcacattacataagcaatagacactgccacacacaggacataggatgtcatcttacattgagagctgaaacctatctaaatcctcgagcctcttttgcatttaccttcacttcttggtctcgcaatccaccccataaatttagtaccgaataatcctcgatagttggtacctaggtaggggaaatcgtgctaatcatagtagatctgatgtcaactatgggctttgcacagggagacatcatcttcggtaccttcagattcatcgccaacacgctcgagaacattaggcttgtcccagattccccgacgacctcaatgtccctcacccaagatccagtagatccaatctgcactttgtattagacttctcctcgacaccagctcaaactcggaccatgctttgactttgattccgaccatgacttgaactcggactcctactacttaggagattagttcatgtttagggcaagctctgggcactaggaaggtcgatcctctaatcatgcagacaacgacaaagactagacaacaagaatattgaggaaccatgaagagttgtggcagcgtggccaagatgcac

SEQ ID NO: 43794 - DNA, 289 bp, Zea Mays
aaatcatgtcttataatattgtgatctccaacacaacatgactgttcacaatttgattagtctatcagcattctgcaagtactctcttcttcaccctagccatgagacctcgatccacaagccatctacttgaccttcaccttagcttagtcccttgaaggctttaccttagctatcttcaccctatcagattgtctccaagtcatatcacattgaaaacctacttaatcaatgtccatccttcttctcatctttttccaacaaggatcacctagacattgtatgactt

SEQ ID NO: 43795 - DNA, 808 bp, Zea Mays
ggaggccctcgtgactctcccccttggcctaagtcagcgtccatgcctccaccagatagggagaaacaacagagagggagaaaagggaatccacgccgcccccgccaaatctcatccacatcatcggtcggagtcaagctggtgactagggcgctttgtcgacgctcggggatgacgtaaatcgcatcttgatgggagaattcgggccatggactacggaatttctcgccgaagacttgggttgccgcagatccgctttgcgtcatggtcgggagtgcctgctacatgatagacagtaagcaaccctcttcgtagttttgcttcattcctgctttgtttagctcgggtaagcatagaatacgggtcattgggggactggatcccctggctccggtgggtgcgcagtcggaaggctcgcgcgggccactacggcttggagctgaggaggaagaagaggggaccgttgatcttggaacggacgctgcagattagatgggagaatacccgttcgatgaagggatctgagtcgtgtagatgggattgggcggtttagattagatcacgacacattaaatcggcaccgtgagttcttgatcctgtggatgccggttgagtaccggttcattaaaagattaatctaatatgggcactcgattggtgatccaatggctcaaatgagcctgtgctccttcgactgcgataaagtgcaaatgagcccctcggttttcaaagaaacaacccgccatcccttgtcgtgttaagtaattgggtataggcccctagaatttacaaattgatccccgtagct

SEQ ID NO: 43796 - DNA, 419 bp, Zea Mays
gagccgtgaagcccgagcaagtgccctaaagcattttaagggtttcagataatttagagcttttctctgctttggctttgactttatcgtttaaacctttaacctcatgctcataacggattccagcttcctttaaaattgaatgtgcttcttcaagctatttgttttgatcagaaattcgagcattttgatctttaatccgaagatgagcttcagccaggtctgcttcggcagtcctaatctttgaatccttttctaccagaagattttcaagttctttcactctctctttttagttactgataacaagctcatttttcctatcttcatttttctgttgcagctttaaagtcttactcaacagtaggctctatttaaaaagccgaagttagcctaaaattcttgaaatttaaaaatta

SEQ ID NO: 43797 - DNA, 667 bp, Zea Mays
gcagaatgtgccagtgtccatactgattgattctggaagcacacattcctttgtcagtcaacttttgcttgctaagttaaagtcagtatcacttataaagactggggtgtcggttaaagtggccaatgggggtgttatgaagtgttctacaacatggcctcaagcggaatggtgcattcagggtttatggtttcaacatgaactgaaagtgttgcccattcacacttatgatctgatcttgggcatggattggttagagattcatagtcctatgaaggtgcactggcgttataagtggctttccattacttatcaggagtcttcagtcatgttgtatggatcgggttctagccactgggatgatttattgattcatgttgcttcggttgaccataatgaaagggaaactccagtttcagcattgtcacctgatattgcagcattgttggatcagttccctcaggtggtttcagctcctgcaacattaccaccccctcacccctgtgatcatgcaattccactggtggcgggagctaaacctgtgagtgtgagaccctacagatacccaccggcattgaaggatgaaattgaacgtcaggtcaactctatgttgcaacaaggtatcattcgacctagttcatcctctttcagttcacctgcgttgttg

SEQ ID NO: 43798 - DNA, 628 bp, Zea Mays
ccttctcattttttctaatagcttcgtcttctatctctcggccacctcccaaccatacttcggaataaaattttccgctcaacgcagtggcttcgactgaagggctcttaatgtcgttagctgagaccgagaattctagctgaataacagcctttgcatgctcgtagccagctttctcaaggagtgagacggttcctcgggcaccggcgaaggcacaaaaatctcctctatcactaagaatttcatcaaaagctttggcttcgctactaatccaccggataaccccgtcaggatcaccatggataaaattctgctccgtagagaatgccaactttagcaaaactatttttcaacttgttgcaatagtccatagcgacattgtagcattcctctttcgcttcacgaagctcctcaacattttctgaacccttaaccgttcagtatcagatatttcacgttttgtttgtttgacattaaaattttcagtcaattcatcgagcttcttctccaatccttgcacttcggatctatgcaatcccacctgaatagatagtgcgtattctaaatcagcaatatgcttgatatcattctcttgcttctttttagactccttgattttctgttctgc

SEQ ID NO: 43799 - DNA, 538 bp, Zea Mays
ccagaaatatgtatccttcatttcaacagatgattttgcggccttctgatatgtctagaaagcaaggatccaactccaaacctccagcttgaagatcgtgaagatagggttgtttggactgaagattgcaagctaattggtactgctttacctttgggactggaaggtgaagttggtccgttgctactcgatgagctaattggtatccttcatgctctgtccagttcacgttcatctatttgtatgggtatgtacttctttgtagagcaccaaattagagatttactcaatacaacagtttgggcacctcgggctagacatttttaattttgttgtatactttcgtactgcttcgtagacagcaagcgatgattgttgaaactaatagtaagaataatgccccatccattgactccaaaacccacgttcttttgtaattctatagtgcaactttgtcaattattagggtcctagattcagtgaccgtttatccaccccatgtcaatgtcttgcaactatatgttcatcttaaatgcag

SEQ ID NO: 43800 - DNA, 679 bp, Zea Mays
cagtgatgtctcaaatccctactaccattgatagaacaatcagacttgttgtggtgcagcgggaggtttgggcaaaaggaggtggtagattagtgaagttaggtcagatgaataaaggggggacaagaaggaagactgaggtgaagggagtagtggagcagggacactggagtaaggagagacaagtgaaggagtatagaagggtaaatggattgtgctacacttgtggagagaaatttgagccaggtcatcaagctaaatgccctaagagggtgcctcaacagctgaatgtgattaccaaagaagatttggagatggtgctttctgaggaaatgttggaaagggtagagcaagagaaagggcaggaggaagagttgcataaactgtccttacatgtcgtgagtggagctgacacttcagagtgcatcatattcagagccttgatccagaatcagttgatgcttatgctggtagactctggaagttccactagtttcatcagtcaaactatggtggacaagttgcgtttaaattctgaaccatgtgctgcagtcactgtcaaggtagccaatggggaagtcttgaggagtgataagaaggttagagaagtgacttggtggactgggggacataattttgtgtcatctatgagggttttggatattggtgtgtatgatgc

SEQ ID NO: 43801 - DNA, 331 bp, Zea Mays
aaataaagcaccaatgtataaaggtcgtttcggattgtatcttcctaggccatgaccatttgatcaatggatcaaaggaatataatggaggtgcccccagtctggatagacaaagggactatacatgtgccatggattcatcgtcgtaccattccatatttgaacaggattatataccgacgatgaataaacgggtggaaagtaccctggtctcataggatgaacaggcgatgcttgttgtgtcgtctttcgggctgttttgttcagtcgtttcattttagcaggtcaccggggtttcttcgttgaccgatcacatggaacagtcttcttg

SEQ ID NO: 43802 - DNA, 678 bp, Zea Mays
atcatttgaggtaattaattagttaaattgttgcgagaagaaaattccagaacaagtatctttcagtcgggcctttggaatctcctccaggccaggccgtcggttggtatccttcgctaatctagttgtttcgtacacaggcttcatgtgggttttattgcagcatttgttctaaggtgatcaattatgtttttaacggcatttagaactcatgaaaccctcaaagttcatcttatccaaataatgccctttctagtcttcatttgagctattggtgcattgaatatttcaatttgattcatacaaacctgcaaccatatacttagcaaaactagttagatcataatgatgtgttggccatcaaacaccaaaaccaatatagaaatgacacatatctcatttttctttcaaatgaatatttttttcaaaatgttactttactataattgttcactatgagatttggtgaatggttcatcgtgggatcaatgagcgtcgaagttactagattgtgacagatttttactcaacaaaatgctttccaaaagggtaatttgtatgtttttcgagtacaattaaaacttgaccaactaaagcaactgctcaagctagcccactataaagccagtccacttttaccctaaagtgggataattgttcagttgagtgcgaaagtac

SEQ ID NO: 43803 - DNA, 799 bp, Zea Mays
ctcttgggccccacctccggtcccacctctgtcatccagtcgcacggcagcgaacgctgcagatagagttcttctcagccgactgtattttacagctatctttccagtcactcgctgcagcaccattcgaactctatagcctacggtattctttacggttctttttcaagtacgtgactgcgggcagccttatccttggcatgacctagtagggattcaggagtatggataagttgggcaaaagctgaagatagaaaatttttggagtatgtctcaagtgaaatttgcataggttgcattatccttggcctgctctatcaggaattcaggagcatgaagaagttggggaacagctgtaggatagaaaattgttggtggtatctaacaaagttttctttatgttaacctttctggagtaatgttctgtagaatgacatagggtttggttatgttaagattcgatgttttcaatggatgataaagaagctttagttttccagttgattctggtgcttagttttgcgtacgagttagttagaactttgagcacacatgttcagagaactacaatagtaaccgtctgatcatcaatagtatataacaggattgaagaagtggtaaatttactgcttgtttaggagtcggttcgctgctttctattgtgagtcggtttgttgtttcctagtttgtttcgattggtttgttggctttccaattgagtacctctaaacaagtgctgcaggaatgcaggattaataggcagaacagagaagaaataagaatcttctagaggggcgat

SEQ ID NO: 43804 - DNA, 463 bp, Zea Mays
gaaaagcctcgcacagatgtacgaaaatggcaacttgcataattgagttcgggttcagatgcgtcagattcaactcatagaatcaaggaggccacaaaaaagggggatatggtaagagcaagcccgcgaatgagaaatggaacgtaaacgacagattcatgagtgtcctctgtaggaacagtgacaccgcgacagatccgctaagagtagagctccttcggaagcaaaaccccaatttcaacaagatgaagaaggtcggattcagagacgacagacatgtgattaccatcaaatggaagctggctgttgaggtcgatgggcgggatgatagcagcagcggtgctctgcctcttctgcttgggggtcgtcgcgatctttccggtgagacgagcaggctcggaatttcagggaagcacaggaatggccgaggggaaaagtgaagttagggctcagaaatcaaaaa

SEQ ID NO: 43805 - DNA, 628 bp, Zea Mays
ggtcactgaagggccctgttagggtcgcgggtgaattcgtgattcactggaggcttggtcggggcgacgtggagctcagacatgtcatgtgtgacaagtcctaggaagggtggtgcgatgaagtggtggcgtgagagcatggacagatgagcttagacgcgttgcacacggtgaggcctaggcggggcagcacgactatcgggtacccaataatggggtacccaagccaaggcccataagcctctcttcggtccatttacccgacccagtcctagccgagcaagtctgcgaggcggggcgaacgaccaagtcctcgccgagtaagtctacgagatgggacggatgaccacgtccctgccgaacagttctacgaggcggggtgaacgatcaagtcctcaccgagtaagtctgcgaggcagggtagatgaccaagttcccgacgagcagatctatgaggcagggtgaacgatcgagtaccagccaagctgatccacaagaaaggaacataggccgacgttgccagcccacgacagccgcaataagacgcaccatcaccaagctatgtctgaatcgtacatacagtacccaaagggctctggctgacgcaacggaacacccccgcttgcgc

SEQ ID NO: 43806 - DNA, 486 bp, Zea Mays
acggtgatgcggtagatggacagagacacgcggcgggcaacggcgaaggtttgacgacggtgagaaccttatccacgggcggtgagcaaggggggagggattatggctggccggagtggcgtccagtccaccgacggcgaagatccccttaccccgtgatgctatccatccgctcagacacgaatcccaacgccggtgacacgaatcacggcggagggagtcgttgacggtgaggacagtgtgctggtcatctcatccattacagttactgtaccatcgcagagtgtatgcagtcgacctgacagaccatttttgaacatgattttctcccaaacctgtatggcaacacataccaaactctgcagcaaagttatagagctactaaccagctacaagtttgtcatagatgccatgggcagattcatgctggatcatagttgaatccatgctcaaagtctcagtggttgcactgttggtctaaaaatt

SEQ ID NO: 43807 - DNA, 666 bp, Zea Mays
cagagtacaacgtcgctccgatagctctcgctaagggtaaaacttcctgaggtgttctatattccatgaattccccacttccgtgccatccatttgagtaagccgatatgatcctggccgagtgacctccgacactatgaatggcccttcccatagcggcgataatttgtgtcgtccttctcccgttagaatttggcgaaggaccaagtctcccactacgaaggatcgatgtcgtatagtcttatcatgatagcgcctcagggtctgctggtatctagctgattggattactgtattcaatcgctcttcttccagtacgtcaatatcttctagcctggtagcttctgcttcagctatgctttcgaagaccagccttggtgccccaaatctgaggtcggcaggtagcactgcctccgaaccatagaccatgaagaagggggtgtttccatgtagagctcaactgggttgagttcttaggctccagaccacataaggtaactctctgatccacttccccgcgaacttttcattcttgtcaaagactttcttcctgagtgcttccagtatcattccattagccctttccacctgaccattggctcttggatgtgctaccgatgcatatttgatctggatgctccgttgttcgcagaaatcaaagaaatc

SEQ ID NO: 43808 - DNA, 473 bp, Zea Mays
ggtgaaggtctcggtgatcattaagtcacaaaactataagaccctcactatagatgagcttttcagcaagctcgagtccacagaaattgaccatcacactcgagccgaaattgagaatcccagtgcacccatcatggcccttgtcataggtggtggtttctcttcagctaacctttcacttgatttgtttacattgtcctctttgttgtctattttagaggaatgggttaagtgtcttagggatgaggagttggtgcttgttgctagtcggtttgcacagtttcacaacaaccacatgaattgatggcatgggaggggcaaggatgactgcttcaggtatggaaacctcgaccacttcatcgtcaactacccaaagatgaagggcaagctagaggctaataagcacgactaccactccaactagcatagagtcaagcatgagtacacctccagtaagcacaagtctaatggga

SEQ ID NO: 43809 - DNA, 307 bp, Zea Mays
ggtgagcggcctaatcagggccaggcgaagaagcaacgattggtgatccgaccttcaaatcaaaatcgcattttttctcgtccaccctcattccccttcaaacagcctatcattattcgccccaacaataccccaaatcagccgggtgccccaggcactcgattccctgccttgcctagttcctcaactgggtgttttaattgcggcaagtcgggacacttcatcaaagactgcccatatcctaggcaaaatcaatcaaatgctccgcaaggatctgggaaatcagctcagcccaaaggaaatgttg

SEQ ID NO: 43810 - DNA, 455 bp, Zea Mays
actccatccaccccttttgcccaacttcaaatcctgtgaaatcttgtgaatccctgttgtggtatgtgtatctctgtgtgttttgagtatccctgcaggttcttagctccttcgggagggttttcccacctcaaacagccgtttcaccgaaaccctaattcctcgcacgccacgtgctcggtgaaatgcccaaaccagccaaaaatgctccaattgaacctaaatttttcaggcaccttcacaacacttccagtgacactcttgccaaatttcacgccaatccgagattccaggcttaaatttcaccaaattccccgtttcgagcgatcgtttccgagccgagtgccccaaatctctttttcttcgcctaaattcaaaccaagcacacacttcactcatattcacctacataaacctattcgtgaagtttcggctcaattccatgtcgttttgtg

SEQ ID NO: 43811 - DNA, 407 bp, Zea Mays
gttgattttaagggcatggtatagggagaacggctatgggagaaggtgatatgggcagagtgatcttgctgagtggcgcaatagtgttatataggaagaaccactacggacagccttagccaacagaccaactccaactccactccatgtccaacgagattttgctctatcccggtctcctctccccatcctctattggtcacttcccactatggcacacacaccagcctcactatggcacacagaccaacctcgtgtcgtgatgtctttccctcgagccttagcggtttgaccacattctcattgtctcatcatcatcatcgcttgtcgtcttcgggactatttggtttcaagctactaaagtttagttagttttagtggctaaaataccaaatagagtgactaac

SEQ ID NO: 43812 - DNA, 279 bp, Zea Mays
caagattgggtgtcaccttggctaggaaggtataagacaagttctccgcgggtaggggagtgtatttcaagtgctcggcctgcaacatctagcagaacctggtgctatgtcatccaagcagttcccaagatgatgtccatgttttctagccctagaataatgagatcaattttgaatattttggtccccatctttatagatgtgtgccaaacaatttggttagatgcaattttgccccctggcgttgtgatcatgattgcccctttagagtggaaaaag

SEQ ID NO: 43813 - DNA, 308 bp, Zea Mays
aataactgtcgagctgctctggaccatgccggcgtttttgaagtaacagccgagttatgttaggccacgtcggcgctttagaggtaactgccgagttatgttgggccacgttggcgctttagaggtagctgccgagttatgctgggccacgtcggcgctttagaggtagctgccgagttatgccagaacatcttgctttttccgagtgatgacttagcactttttagaaacggtgtctgacccgggaaaacctcatttatatcacgtcgtcgcacgcctctgcgttctgagccctaacttcacctttc

SEQ ID NO: 43814 - DNA, 778 bp, Zea Mays
ctcgggacaaactcacacggctgatttgagctttccaaattcatacttgtttcgttgataaatttcaaaccagaataagactcgacatttcaggcgattatttaactacgagtttcacaaattattttagacgattcagacaagtggaggcagataagatatttaaaatcgtaataggcgaagaagattagaatttagtgacgattatattcatcgatatcccgtacttaagtccgtagtcgatatcgaacaggagataaacacctgagtgttacagccttcccccttaaaagaatctcgtcccgagatttgagcgaaagacttttaagagtaaagaagcatgtaactcatgtccataccagtgatagcataagctagatacaagcgaagacgattatttcaagatttcaaatgggtgtagcatgtatcatatttatgttaattagagatgccacaatagaggcaatgattgacagaagaacacctaaggttccatgtgtgcagttgccactaagatcaagagaaagaagtccccacatgaaaagggtgattttaccacacgactagatacaaataggtttcgatttttttacgaagacttcggaactggtaagaattttaattaaggaatacatcagagttatatactcttttgatccaacagtgatggcatatgttttttgattttttttcagcaaacaacacaaaaattgtttcaagggaaaagtccacgaaagataacatattaatgtagttccataatggatcatgaccaaag

SEQ ID NO: 43815 - DNA, 536 bp, Zea Mays
cagggtaaagactagcgaagccaatcttgctgcacagtctgaagctcatagagctgaaattgaagatttaaagaagaagcttgcaggaaagaacgaggattttgaagtcgctaaagcaaaacaagaaataagtgaatggactagcacaagactacaaaagaatgtagatgagtttcgggaatcgaaggagaggtactacaaaaaatccttggattgtgctaaaaagctgaaagatagttttgcaaaggtgggtgcctactcatctgagcagaaatttattagaggcgatcctgtaggaatcatcgaatggatcagcgaagaagctgaagcttttgatgagatacttagcgatcgtggtgatttttgcgccttcgccagtgctaaaggggttgcagcaattttagaaaaatctggttgtgaacatgttaaagctgcaacccaaacgaaggccgtcttctctgtagaaaacacgaaggatccttcggctgaggctactttgatgggcgggaaattctactccaacgtttcgatgaaag

SEQ ID NO: 43816 - DNA, 724 bp, Zea Mays
attattcagcttgtcaacctttgggaaaccggaggggcctgtatgggttgtccctctcgttctgttagtaggtacggtcaagagtctctatagtagtgatgaccggacggtatcttcaaaggtgatcacaccctctgttcgttctgtttgcttggctctttctaacatttagaattagattaggttaagttacttccatacatttcaaagtccaagggtctaaagtactctcgctgctctccgtatttacgggtgaaggcttacgtcggtttatcttttttttccagactccattcatgcatatggggtgcctgcctttgacactagatctactctatcgtatatttgaaaaccataagtctctatttttttcctgactcagactctttttctttccgatctaataaggaccagagaattggggatatgtgtgacgtgattattaatctcacgtggcattatgctttctgctcctcctcctcctctgtggcttcaagttcccaagcatcacaatattcgagcattggaatgggaagtatatataggatcaagattggacctggacaaagatctgcccgcccttagcctgtccgtccaatttccgaaagcctttcgactcagacggtatgattgttgtccctcctttctccgtttatgcatctatatacactcgcagtccccttgcctctctctctctccatttgatgcaaatccccatatatac

SEQ ID NO: 43817 - DNA, 2078 bp, Zea Mays
taggacttttaaatctcgggatgagattcttttatgggggaaaggatgtaacacccctggtgttaatgtcactaaaacttgatcataacatcatgagcattttcatatcatgtgtttgttacacttagagtgcattcactaggcaaaaatttcaaacaagttgttttggtgtgacttgatatgtgtgtaaccctagggtagggtacttaaccctaaaccaggcttaggtgtgataataatgtccaagcatgagaaaacttcaaaactcatgagaaataatcataagatatcacatttaatggacttaaggggcacccaaaccctagaagtgccaaaaaccctaaacagacccctcgaaaaccctaagttgaaaccctagggggttatatgtaaattttgcacacttttagatctaagtgcaaaaaccaagataatagagtacctcaaatcatatggttcacatatttgaggatttgcaaatcaaaccatgagatttaggcttatttgcaaaaagccattctacacctctcatgtgactaagtctaaaaaccaatgaacagggctgactttggagctctgtagttctaaaaatattaggaatttgcctagggtcaacacatcaaacttgtagagcgactataggagtacaaatttgattatgtgcctaagccttggtattgtacaaaattaggagttaaatgggtttgaagtctggatgtcagataatgcagagactgaatgttgtataacagtgaagttgggcaacctttgggctgggattcggctatgatccagtaattatttggccatggtcgctatagcaaggttatagctagatcatagggctacaactttgacacagagaacaggtcgagtcactacatggaattgggagcaaatctccctgcaagttgcgctgttaggctgactaattgaggatccaatggtacagtgcactgaaaatatccaaatccactgaacctcgccgccgacgagccgtgcgctcggattggtgccaccgcggtgattcgtgccaagcgcagatggataacaaagaagggtaagaatcttgacgctcggattagctcgggcttgctcatcgttgtgccgccgtacccacttgaaccgcgattggtcagaatcatcatcaccggcgttagccgctcaacggtcgtacgccacgtgccttggtgtcttaccacgtcatagtagcttgtaatacacacgtccggtgatcgccggtgagtttgccacggtgaaagccaccgattgcttgcgccagtgcccccttttctcttcggtcgccaatgcgccacctcaaattcacgggccaccgctcaagggcccaataaattaagcacacccttggctccgctatgtaattgtgcacccaacacacccactcatgcctccaattactcaccagagcccccgaattgctcacttcccccaaatcggttttccgccgtcgtaaggaaggtctcaccgtggccagtgcgctccaggtctgatcttgtccttttccctcttgtttcagcacccttacgtgcccctgatgctcctcgactcgttcaattaagctagaccatgctagatcgtcgggaacccctctgttcatatgtagttcgcgctgtcgccgtgggcagggtgatttagagctcaactctagcaattaagagaggggaaatggtcgcgtaaggttgaattcggtgtccaggaaaggggagggctagtcgttgcttattctagccagtacaagctcgttggagctcatcgtagcaccgtttgccgtcgaggaccacgggttgtaaagaattagaaagtggagggcctcggtgtaaatgtcagtgacccattgaaatagtgtgtggggttcttcgctagttattcaaactcctggggacctccgtgcaaactgtccactgcgggcgcgtgcgggtgcgtttgcctgttcacgggctgacttgggccagtcccgacccaatactattcacacttttcccttttctttttcttccaggattagagaattatggagtatttaaaatagccaaaacctatactcctagaattttata

SEQ ID NO: 43818 - DNA, 1004 bp, Zea Mays
tccaaaccgaaccctggcaacagcacgctcgccgtcggccatctcttcgcgggaactcgccccaaacggagatgactgactaaatcaagcgttgcgctagcatccctgatcccaagcgaacctagttcatcccctaattgagcaagtctgacccagaatcccctctgctcaaaatgacaacaagtacagagggaagattgagctgttcccggcgactaggtatggtatcgttcaatttctaagtactaggagcatcactacaccctaaggaagctagaacaaatggtaattgggctggaaatacctcaggtgacgctggccacggaagagctatccacggcggcacggagaaccaatttggggaaaaacctgaattaaaatgctatggtggacgatcggaggcgagggagggtgctctggcttcgtgacaacctaacggagctaacgacacactcaatttatagtgtccgagagcggtggctccgatttttgaaagggaagggcggtcgaagagagggggcgagtcaccggcgcaggttatcgtggctttcaccgtggcaaagcctccggtgatggacggacttacagctatggttcactgcgacgtgttaaagctactaggcatgtggcgcacagatggtaagcggccaacgccacaaaggatcatctcgtccggccgtagaccaagtgggtacgatgactgggcggcttgatccatcccccttttagatcttttacccctccatgactatcccctcatcagagagcacgaatcgtagcaccggcgcagatcacgatgcgcggtcaccggcggcgaggtgggatgaatctgaagatcttttcgtgcattgtaccatggccatcttcttcagtcgttctgacagcccgagttgaggaacaattttctccaatttttatgtgatagcccactaatcctcctgtatcaaagttattatcctttaatccagctttaactttgctatagtaaccatacccaaacaatc

SEQ ID NO: 43819 - DNA, 471 bp, Zea Mays
ttccctcgtgccccaaaagcaacggtcaaagctttgtcttccttcttcgtatagtttcccaaaatttcattacacgttgattcaatggcctctagccattcgtcatctagttcaccgaactgacttttataccggtactgtaacacctctggtgttactatcactaaaacttgagcataacatcatgtgcattgacatttcatatgtttgttacacctagagtgcattcactaggtaaaaatttcaatcaagttgtgatgtaggacttgttgaatggttaaccctagagtagggcactaaaccttgagttagggcttatggatgtaagtgaagtccaaataagataaaacctcaaaactcattagaaatgattataagatatcatctttgatggactttagtgacaccaaaaccctaaagtgctaaaaaccttgaaaagacccctggaaaaccctaattaaaacactaggg

SEQ ID NO: 43820 - DNA, 359 bp, Zea Mays
agcgcgcggatgaactaacaatctacacgttcccggtgactcatgggatcttagctcaattgggcgagttggtgagcatcaccagcatacaaagatgctaaaacaagaacaaagagggcatgatcagacctgtggagggctggccacggtgagggtgcgctttgcggtggcggagaccagtttgggggaaaactaaaattcaagctctctgacgaacgattgctagtgatttttggtggctgggtgtgtgatgaccttgcagggctggtgggggcttcaattttatagggatcaacggcggtggccgggaattttagtggggacgcgcggcggtcggaggaggaagaagagtactggcg

SEQ ID NO: 43821 - DNA, 556 bp, Zea Mays
aaaaaggttctaaaaccctaatttcccctcttgagccattaaaccccaaacattggattaaagggaaaaattatgcaaatggccaattcatgaaatgaaacctttaccaaagatgaagtacattaataaatctacaaaatctagtaagggaagtattacaaaaaggcccaacaaaaaccccaaatcaagcccctaagtggagagcacactagagccatccattttactctaagtcccaaaatcagccctaacctaaagatcaaaagtgttcacccatttgctggcgccaaaaccacatggtccaaataacaaaaagtggccaaactacccaaggcacacccctgaaaaatttgaaaccaaaccagggtcgtttgatatggtttggcatccattttgtcgcgaggtgaacagtgcagacagacaagacttggcgccaccatatcttccaagctaggccagatctccccttggaactcacatgaactagatagctctaggtgcagggaagaaatcttacacaaggcatatggcaagattcgcacatttgggacctctg

SEQ ID NO: 43822 - DNA, 318 bp, Zea Mays
caatcacttgctgccaaattttcctgtgactccaaaactctacatccattgtcactttagaagcaatttcggtataacatcttcgagtgtaattcccttagatggcaaggatttgctcgactgctaagctgatcactcctacttctttgtcatcatcgagacctatgaaggagctacccagggataggtcatcgaagccaagctatattgatataggtcgatccatgttgaaggaaaaatatctgcagactatgaagaagcttggttacttcaacagcaaggtcaacgtgcggctccctgacgaagagacaattccca

SEQ ID NO: 43823 - DNA, 680 bp, Zea Mays
aaaaaagaaaagatacgggtggggctgagtagacgagacgacagacgagttcaaagtccaagcgaaagcaaaaggggatgagggtggttgagcgcaggggagctctttctcgtgattcgttatgttcttccgcacctttgatctccttccggtttgcttgagtgagatctcctctcctttctctttctttctttaaacggttggttcgtcgtcgatgcctcctattgttgagtgaaatctctgcccctagcgattcttttacttgtctttgtacaattgtactaaccattcgctctccggctcaaaagtctcctccagtatgaccttcgccgtttccttgttgctgatcttcgccgtttcatgagtaacatcacgggggactgcagtctgcaagtctgttatggttattgcgcctccatttttatttttattttacgtttcgtgtcagttacgggtaggtcaaagcccggtgctggtacctggtagccgttgctctagtgaggtcactgatctgtgggtgaacgatgaaaaagggtgggcggaccagcggagtgtaggagcagcggcttcatcagttttttttcctctccctggcctgatgaggccggagccggacgaggaaacgccagcacccagcaggcacaggcccaaaaatacctgccccgaaaagacagtagcag

SEQ ID NO: 43824 - DNA, 350 bp, Zea Mays
gttcttgatagtgacttcattcaaagcttggtaatctatgcacatcctcttcataccatctttcttctccacaaacaacattgggcgacccaaggtgaggtgttgggtctgatgtaacccttctccaacaacttgtctatttgcttcttgagttccaccaattctggtcgaacactctataggctctcttagaaataggggcagtgccagggataaactctatggcaaattcaacttttctctcaggtggcatgcctggtaaatcctcggaaaacacatctggaaattctgatgttactttgatggcttctattggattgacttcctcactatgggcagtgatctggtga

SEQ ID NO: 43825 - DNA, 642 bp, Zea Mays
ctctcagcgggaaacaagcgggcgcaagtcaacgacacaatacaagaccatatcatccataggatacgaaagacactccctcacagtatgcaaccgactcccactctccaggaagcactccgtgagcctataaataggatagtctacagcttctcaaaggcaggcaaatacttcgcaagtcttctccacacggtattggcacttgcctcaatcaccccctaagacttggtacacttccctctcccgctttgcttgtaaaccctactgcaagcacttaggtgcgagcaatataagtcacatccccactctgttggaagtagtacctcgattagcccaaaccaggataaatgacctgtgtcaactcgcatcaccatatgggtctggggcacgagacgttttttactagttggttaggtccacggatccaaaacaccgatagttggcatgtcagatagtggctagttgcgtgctaaacactcatctcccatcaagactccagatggctggctttcatcacccctaaggcttggcaccgtgatcaggttcgaaagccaggagttcatgtcgctcgggatcgagtacgacatggtgctcctcccaccttctcccatggttgacactcaggaacgtctaggtgtctgt

SEQ ID NO: 43826 - DNA, 670 bp, Zea Mays
gtctgctggcgcgtgcgacaggtcgggtgatgacgtggcgatgtttccgcgtgggtgcaccggggtcgtggtggcgtcacgcgtgggtattgaccgcgtttatacttgcgtattttgaatgtaacggttacataaatcgtcatagcgatgtggtctggtcgctgtggtgttctggtttgcgatttatgcttgtataattcgatgttatcaactgcatatcaatcgggcttgcattgtttacgatcatatacacaagaaattatgattcatatggacacgacgtacaaccaatggtttatatcacgtacttggcgtagttcttgattaatgctttttgtaaactgtttacgacactttgcacagttctttatgcttaatatgaacacagcgtaaataaaatgtccaactgatcgtgcactgactagtggaccccacaatcccgcgctgctcccccgcgggccgactgagccaatatggtcaacgttcgagacccacccgaccacaatcaattaactcctctcgggaccaccgaaaccctaaaaaaatcagctcctccccgtcgccgtcacccgctcctacgatcgccatcgaggactgcccccaccgcttccacccgctgtaatctccgtgcttcatcgattgaccgccgtcgttctccccctggttcgtt

SEQ ID NO: 43827 - DNA, 751 bp, Zea Mays
acaagcacttaagagatacatcctaatataactccttagcaactaattactaggttaaatcagctcctcgtagaaccactggactagtactcaatttccatctgacccaaccaacactttgattccacccaagcttcctaactgaaccatctatccttagaagatccactaatctcgagtccaggtcgttcttgaccatgggcatagttgatatattagttttataccatgtagtggttgcaagctttcatcacgagtcgtgatgcctaatttctcaaggtgatcagtctcttgacccatttccaatgtagataggtagggtttaatacaaggtcttcacaaaatagctccaagcatattgttttacacctccactaaggtttcatcgctaatagtgagtgtctttcaactccactatagaagccgcctcttgtgccactaaaattaacctgatgtaaactataactctaaggaaactaattacttggccaaggccaaagcaatatagccctgatagttgtgttgttatgtcgagttacatgctccaagaatgatacttacaattcaggtatgtaggagcacaaaaccattcctcttgttcaaataatctaccataaaacatgtaaaaagaccaacaatacaccaccaccatgaccaaccttcctacgtgattcctattcaccatattgctaaaaaatattaccaatccacatgttgcattgtcaattaatcaaggttaacattaaatcca

SEQ ID NO: 43828 - DNA, 744 bp, Zea Mays
atcgagtttgggtgtcaaagctcggagatgttgttccgatgggaatcggaggtggcacatggcgtcatcactaagggtgagtcgaggtgaagtaacttcgtgtgaagcacgtggccatcagacgcatattcctggagttggtccattttgcctccagttaagtggatgagcttatgtatctaggggtaggttagactagtgaaataacctcctataaataggtgggagggctagttgttttagtcatctctttggctagcaattagagcacttgcactttaattccttagtattagctctagttttgagatcctagggtgcttttaattcgtggcgtttgtaactatgcattagtgaggaagtgtggttgtaaccacgtgtggttcagggtttgtcaaatcgcgtgcatagttagttcttgcttgagttcttcgttcattttctcttctctcaatccctctcttatctctagtagattttttgtgaaaatcattgagttcttgagttggcgattgttttggggttcctctctaggtttgaattagtcctttgaccacaaagaaccccaggtttgcacaattcttggtcgtgggttgatctgaacttgttttgatcaaaaaagcaaacccccaacaaaaccccaagtctaggtcgtattttctgatctgtggttgatttataaatccatttgagttcagcttttgtgaacaaggtggaaactcacttgtaaagtgtgtgcaaaat

SEQ ID NO: 43829 - DNA, 368 bp, Zea Mays
cgacgatcaacaccgtcgtcgctggcacggacctcgtcgtgtggtacataaccagaatgtttttcctctaagattaaactcactttacctgaattcaatggtacatataatcctgacgcgtatcttgagtgggaaattgccgttgaacaaaaatttgcatgtcatgcttttcctgcaaaccatcaagttagagatgctactagtgagtttacccatttttcttctatttggtggcgcgaacattgtaacacacatcccactaaaatccctaccacttgtgatgctttaaaagtccttatgcgccatagatttgttccctcatactattctcacgatttgcttaataaactacaacatttaaaacaagg

SEQ ID NO: 43830 - DNA, 670 bp, Zea Mays
tgtatgtgggccctataacttaggaggttctatgacatatagcatgtaattgggcattggaattacgaggaatgcgagagtaattaaatgcaatgtgattaaacatagatttaatcggatttcttgacaatgcttggaggtgttatcctcgccacttgaaggagatggcgatgtagaggagtccatctcgtagtagacgatcttattggttctcttcttcttgccatccttcttatttgtgctcgagccggtgggcttttcattgtttccctccagaggtcccttatctttgttcaagtcccataatggcgccttctcattttcccacgacatcacttcgagcggttaggctcaaaaagacatgtcgagctctggtaccaattgatagtcacctagagggggtgaataggtgacgtctagaattcacaacttaaaaacaaacttgatctaaattagttgttagttcaaaatatagatcaagacaaagtgagagggaagagaagttctttcacttcattgctctctagatgcggaattataactcgaagcaataccataagcgaaatacagaacatagaatgagggaggaggaataaatcgcagatagagtagagcacacaagacacaatgatttttattgtggtttggccaagccctaaatgcttgcctg

SEQ ID NO: 43831 - DNA, 421 bp, Zea Mays
atcataatttaacggatcaaaaacctcgctggcacgcttgcacataagacctgattgcacaattgttgaccacaaagcaagcgttaaccaaccaatgaattaactatcagtgtactccagcactagcattactgcaagcaaaggacaaaggtgctgcccatggtttaagcccaaaagcaactatggacatgggcaagcaaggcagacttcgccatttgcttgcctgcccactgttcttgcacaatttcagcaacaccctttgctatccaccttttcacactcgcacctcctcctcctctctctctcgtgcttgctgttgctgtgctgtgcagctggttggatttcttctaggtcacccgcgagaaatacagaatactaccagtttaccaacacccacaggatctcctactccttcctctcc

SEQ ID NO: 43832 - DNA, 723 bp, Zea Mays
ggaggattgccttagctcagtaagccatgaattatggtgtgtacctagtcgatctatttagggtcttccttaagctctagagagccatggtcaatccctagggacaatgacgattaagttgcctgagacgtggaaatacccaaagcttgaggccttgcaggatcatgtcgttattttgctcgatctttccgttcgcacaagggtgggccactgcggcttagtctatatggatgtgatatttgttgcaaaattccaagaatgcgttcccgttgaactatgtatcgttgtccatgataattgagtttggcacctagaagcgatggatgatgttggtgacgaacctgatggcttggtcagaggtgatcttcatgatgggccatgccttgatccatttggtgaacttgtcgacagcgaccagaatgtgcatgttgccatggggtgcctttttgaggggtccgaccagatcaagtccccataccacgaattgccaggtgttgccaattgtctggagcaggtgggtttgtcatgcgtagtactggcatcccttgcatgttcacaccacctgatgtgcgttggacactgctgtaggccagtagaaaccatgtcgaaaagcgttcctcacaaggcttcatggagcgacgtggtgcccgtaggttccactacgggtatcctcgaggagttattttcctttgttgatcggggtgcatcattgctttattccga

SEQ ID NO: 43833 - DNA, 1080 bp, Zea Mays
tgcacgaggagccatgccgcttgcatttccaaattgatgcccagccacaacaacaggaattccatgattgccagcagcaatggatgctgtatgcctgtagacacaaatcttagaatcggaagaaaaaaaagtattcaaggaataccacatgattcctacagcatggtttttatttctttttcaatgcatttgctcatagttagaactaagaatgcatctatccaagggagtgccctcatatgcagaaataaataacaaaatgcaacaacaattctaacagaaattatgcatcttacatgataatgatctcttataaaacaatataatcaatcttctactaacgtaaattcctgttaaacatgtacataatagggttcttgtggttgaagaattattacatgatgtcatgtgaagtctagtattagatctattattagaaattagaaatgcagtctgataatcgaataacaaaaaattctatggcatacaggtgcgcaaccaaaaaataatagacagtctgcacaactaggagctagcagatcaaagtacaatagacacagtaacagaacatcagtagtcagtagaatgatacatttgtctaggtagcaactttgaaaggagttacttacgtcccatggccatcactatcagatggtgaagcaagatcctgagatgcgttgaagactcctctagttattgcagatgctgcaaaatgctgagcccccacgagctttctattgcaagatccagatggaaaatcatttgtaacctcacaaatgccagagtagtgagcaggtactggataactatcagtcgatagatcatctgcaaagctagggtgggttggatctattcctgtgtcgatgaggccaatgacaacaccctgtcccgcgaattgtggaccaccttcttgaacccaggctccttgtggcagtccaagaaattcaggggtatgagttgttgctgtcctaactgagtaatccagcatcacattcgctacttcttttctcccggatagcttgtctgcctttcgtacaagcagaaaacaagtaatggcaataagaggtggataaatccaaa

SEQ ID NO: 43834 - DNA, 764 bp, Zea Mays
gcgtaagtgacaccagcgaagagaattgagctgggccgcgcgatggaggttggaaagtgggccaaaacacgctgattccagcccaacagtcccatttccttttctttttcttttacattttctgttctgttttccctttttatttttgaattccaaatttcaaattcgaatttttgtggcaagtttgttctcagatcaaatatgaaattttgaatattctagtatgggatgaatccattgtttataaatttattttttttcatcgtttagtattttttcccttcctttatactatttccaattttctaagatttgacttaggttttaatccctaattcccattcttaaagtaaccctattaatattatcattattattaaatgcacaaacaattaactccagcatgatgcatgatttattttataggtggttggctaatcaatcattttaaagatggttgttcacatgttttaagaaatagagacatatcacataagaggattaattccttttatatgatttacaaacttgggtattacaaacttacaaggccatggcaaactacgacaatgcaaagcagaaaccttgaaggcaaaggggcgcagagagcttggaggcgagaggacgccgcgaatgggagagaagcaaggcatggctgctactcgagggatgaacccaccttttaaaggcagactcccccgctcccgcctcgaaacatcacgagaagtctcccccaatgcacaccgggggtatccatcctatga

SEQ ID NO: 43835 - DNA, 697 bp, Zea Mays
atccttttgaccctgcaaattacacaatatagtattaataccgttttgtttttaatagcataaaacatatgtttatcattttttccacttaccatgcaacctagtgcctctttggcctctttcatcttcctactatgcaggagcttcatcatttgctttgcaaattgatgaagcggtgtgtttgcatccatgtgggcactcttcaccagcttgttcatgctctcgcttcgttgtgtagagaccataagaccacaatagtctcctttgaaaaatgcaggtacccaatctttgcgtatctcatataatctggcaagggtgttgttctcgtgtagctggaaatcatttagcatcatttgccaggcagcctcgaactccatttcattcaatgaatgatgtattatagattggaaccttgttttgaaatccatctcctcaaatcttgcatacaattcattcaagtggggcatatacctgttttgcacatgccacaaacacaatcgatgtattgtgtttgggaatactctgcctagtgcgattggcatagcagggtcttgatctgaaatagataaatttacatagcattatgccaaccaatatgatatcatatagtacgtgccataataaatacgagccatttataacaacatacctgtcaacatcactcgtggtccttcacatcccatacatgttttgaacg

SEQ ID NO: 43836 - DNA, 474 bp, Zea Mays
gctgaggcaggtgtgttgctagctgaagttggactactgaaagagaggggtctgactgctgaagctgtggttactgattttgttttcaagaatattcagccattgaaagacagggcctacccagcttatctgtatcgagggctagccgactcaactcgggttactaatagaagaattccctctgcagacttggtgagtcgactagagatgatccttaggggtaaagtgtcaaatgttggtgctccagtggcatactcggcctggaacctgcctcctcccaaagccttcaccctttttgtgttgaatccacctattactgatggcagtttgggccttagagtatgaccctctgctgaagaagttaatgctttggttgcctcgcttggggagattcctgatgacgaacggcaggtccattttgaggtgcccctgaaccctagtgatgcagagataagcgctatgcttgatttgctg

SEQ ID NO: 43837 - DNA, 289 bp, Zea Mays
tggttcaaggatgggatatgtgttcctgagattgataaccttcgagagactatactaaaggaggcacatgattcagtttattctatctaccctgggagtactaagatgtatcaggatttgaagcaaaagtattggtggtatggatttaagagagatgtggttgcacatgtggctatgtgcgatgtgtgtcaaagagttaaggctgaacaccagaggccagccggactactacatccactgaagatacctgagtggaaatgggaagagattggcatggacttcattgttg

SEQ ID NO: 43838 - DNA, 522 bp, Zea Mays
ggaggtcaacgaccctcggccgttgtccaccacctgacagtcaatggcggcggctaaggaatctcggcagagggctccggtgaggaggctccatggaccccggctgacctaaccaccacgccgcagtgattggaacagagaggtggatacgacgaatgcgaagaagcatgctataccttgaatcacgatgagggaagcactctcctcaatgagcagtagctagacgacggcgtggttcggctgcggttgattccggcggctgggttcgcaatcccacctagcgcggtcacgagaaatcccccaaaagcaccgcaaatcgtccaggtccgtcacaaaatcctcgccgacgacgtgaggccgaacatcggcgacaattctcaatttcccaactctccttacaatggcggggcgtagggctcaaggtcagaacatgaacgattgggtgaggcggctccatatattgctgcgatggcggggtcggtccttaaggatcggacgcggccagccagaatctcgtgttgg

SEQ ID NO: 43839 - DNA, 635 bp, Zea Mays
aaataacatgagcgggtggcgcgtgggcgtgctcggtcgtcagtgcgtggggcgcacagtggtgtctttctcgtcgtctcgtcgagcaacgcacgagcatgggtgtgtgatagtgttctcagcctctcatgaagacatggatgtgcgagaccacgagctatgtgcctcttctgcatgtattgcctaggcggctaggcccatctcagtgtgcctccacggctctcttgttatggtcgctagaggaatgcctgctatcatgagcaggagccttcatattcaaccaggcctgataagggcaaggtagtagttatcgagtagcagcgcaagaagcttaagaggctcgatcacggttagtaggaggcaatcattgtcgcaaccaacacaaagcaagctaagagatggattggttcatatgcccctcccacataggcaccaccgacagagactacaccgcttaaacggatgatacaccattgtgtcctcatatacccttcagagagatagcctttagcacatcctagagtcacatcataaccatagccatagttcagtgagaggatgattttgaggtggagtaggtctaggatgaccccgactatcagatatttgtagagccacaaccagttgtgttcatt

SEQ ID NO: 43840 - DNA, 363 bp, Zea Mays
tgcatctggacagctctgggtagaagaaagtgtaggtgacgtccgatgttgtttgaacggtggagattagaagcagcggtgtccattcggggatgatgtttgggtcgtttgatccgaaagcaagggccacgattagatctccacgtaatgtgttagcaccgttagattttaatccaatggatatcgtaacgtactggttggcagatatgtctgatctaatctgcatcgcccgcgcgtgatccaacggccataatcgaccgataccccttcgccgtgtcaaatttgctaaagaaaccctgactaaaacagaaaacaacccgcagtccttccctagctagtctgtctcttagggtcttttgcgcc

SEQ ID NO: 43841 - DNA, 519 bp, Zea Mays
gggaaatccacagttaagacagaggatctaattttaatgaaaaaactaggatgctttggagagaatgatgatggactggttcattttgctggagaagaggtgattctagagccaaaacatgatgaagtcgtagtcttcaaaagcttcttcaggggaggacatcggttccccctttacaaaatgaccggtgaggttctgaagaagttctaaatttacctacatcagctgaccctcaatgtcatatttagacttagtgtgtacatttgggctcttcaaagccaaggaaagagtgtcaatgctgaagggttttttcgggtgcacgaactccattatcaaacgaaggctagggccgacggtttgcacaagaactttgggtgctaaaactttgcataccgaaaggacaccaaggctcctgtgattggttaccgcactaagtggccgaccgggtggacaaatgaatggttttacatgaaggctgacgagaagaaaagggagaagcttatgagtatggtgatgagt

SEQ ID NO: 43842 - DNA, 578 bp, Zea Mays
cggaccatccggatatggcatgaaccggtcggcgtattacaccggaccgtctgactctacacgagtccacgcgcagaccgtctaagtcgcgccatatatgaccgaaccgtccgggtacaaccctagaccatttggcccaatcgcggaccgtccagccctttacgacggacggttcgggtacgagagtacccagacaacatcatatacggctggacagtccggatatacctttggaccatttggcccggtcacggacaattcggccccttaccccggaccgtctgggcatgcgtacgcagaaccgagagctgcacaatacacacagttcccacactcattgcagcaacattatggtgccccaccagcaacacattataaccataccataccaactcatggacacaaggctgaatactgttcggccactagagagcctgagaggtatagggcaggagctggtgacattaataggacacctaacacacaactcagacatccctgggaggaaagccgacagagtgatgtcaggcaacttgagatttccacccacaaacttaatggatggtcgccagacatgg

SEQ ID NO: 43843 - DNA, 690 bp, Zea Mays
cacgaagaaccctaaaactcgccccgagaaagatctcgtcgagggggtcaggtccaagacgttgctccgggtcggcaggcagtccggtgcggctcagatcggcgtagagttgaagagaaattgtcgtgaaatactaaactagatctaaacctaaggctagattactcctactactaggaattgaaagaacgatccaaataaggtaaaatcgataattacatttgattagatcaattgtgggggttcaattggtcgtacccattcatccttataaagggtggaggtcttgatccgttacgagtcagttcttgagtaattccgaaggttttgctaactaatcccgctagaaatctggaaccctaactgattctacacatgtgtgatcgtccgctcatcaccgcggactatccgactctaagggcgaactgtccacagggcacttttgctgttgaacacctctcttcttctatcttcctcatcctcactcgaggtctcgagttggccatggtcacgtctggatgatccctagagacgccatggaagaagccgttttttggagggagaaagagacatatggtgataaatacgacctattagactatctttagcaaacttactatcttactttttatttcaaacttcaccctatcttatataactatatgcacgatctgctgagcagtggcggac

SEQ ID NO: 43844 - DNA, 595 bp, Zea Mays
gaaatatatcatcaataaaaagactttaagagcactcaagttgttcactatcaacctacattcttacttaactcggggtgaccactataccctgctaacggagcaatcggcttaagtcggcgatgacttaagacggtgcgacatgctcacgcttacttaactcggggtgaccactataccctgctaacggacaatcggcttaattcggcgatgacttaagacgatgcgacatgctcacgcttacttaacccggggtgaccactataccctgctaacggagcaatcggcttaagtcggtgatgacttaagacggtgtgacatgctcacgcttacttaactcggggtgaccactataccctgctaacggagcaatcggcttaagtcggtgatgacttaagatggtgcgacatgctcatgcttacttaactcagggtgaccactataccctgctaacggagcaatcagcttaagtcggcgatgacttaagacggtgcgacatgctcacgcttacttaactcggggtgaccactataccctgctaacggagcaatcggcttaagtcggcgatgacttaagacggtgcaacatgctcacg

SEQ ID NO: 43845 - DNA, 289 bp, Zea Mays
ctggacactatggttaagcttcatggggctcctaaaacttttgtgtcagacagagataaagtgtttacaagttctttctggacacatttgtttcagcttatgggagtgaagttgttgttttctaatgcatatcatcctcagacagatgggcagactgagagggtgaattagtgtttggaacaatatcttaggtgtgcagtccatgatcatcctcacaaatggaggcagtggttggctttagcagagttttggtataacaccacctaccatactgctctggactgttctc

SEQ ID NO: 43846 - DNA, 526 bp, Zea Mays
gcttgagtgaagatgtacttgaggctcttgtgatctatatagatattgcatcgagctcccatcaagtaatgtctccaaattttcaaggcgtggacgacggctaccaactctaaatggtgaataggataattctactcatgaggtctgagtgctcttgatgcgtaggcaatgactcggttgtcttgcattaaaaaacaacccaacccagtgctagaggcatcaaaatacacatcaaatggcttgttggtgttaggttgcgccaacacatgtctatggttagatgctgcctcaaggtgtgacaagcctcctcacatttctgaccccactcgaactttgctcctttcttcaatagtcttgtcatgggtttagcaattcgggagaaatacggaatgaatcgcctatattaccctgccaatcctagaaaacttcgaatctgacggacagtggtgggtggcttccaatccatcacttcttgtactttattcggatcaactgttattccttcttgagagatagtgtgacccaa

SEQ ID NO: 43847 - DNA, 1511 bp, Zea Mays
ggaacggcgcgtttgtctgccgcagatggaggcggggcagtgtagtgtagtgtagcgcaccagcgccaaatcgcaccgcccatttgctcatgtggtggtggcagaggaggaattcgctcgtgggtggtccgtgacgggggaagggacacaaaaaggcgttccatggttcgcttttggcgttttgctacggatacaggtctccttgctcatcggtcttactacccgtgaaccgtgatacgctgacagggggtcaaaactgttggaccctctcgtcctgtgtccaccagatgcgacgcgatgcgatccctcttttataaatttcttctgttattgtaatcagactgccagcgtctatgaaagcatgccattaggcagttgatggtagcgtctaggaacctactggtcttccaaaatcggaagcacttctgccaagtgatgaaatacggactgtgagcgtgattttgtggatggacctacgtgaactcgtgcttgtaaagatgggatgtgcaacggtgactttcgtagaagcaggcaggtaggcattataggccgtggtggtaccggacggtattcacgcgtgccatgtactgtgccgcctgtttaggctgctccctttatctctctctctcacacatattttggtttcccaaaaagttaaatactattagctttaactaaatatgtacaggagaatattgttctttagaatacataaccagtgtcattagaaaaaccgttgaatatattcttatattaaacttatatataatatctaatattgtctgtgaagtgtgaacctggtaaagtttgaccaccacgaattaaacaatggaacacttttcatggaacggagggggggggggggggggggttacgatacaaagctgagcagacacgagctttgttttcaaaagaggcgcaaagtggcaagtggcataaaaagccaaaacgaagtgaaattagacggtaaaataggtcacagatccttccccccatactgatactgagtgctcatgttggtctatctgaaccgttagatctagcgggtgttgcactggaatagaaacgccacgcaagacaacctggccaaccgcactcgtctgtgtctggtggggcctgctccttgcaccaggccgtcgtcaatttagcatttcagatgacccggacagctgaaccactgcttcatgtggagtactagtagggtgcagtgcagtgcagtcgttgtcccagcaataatcccacctcactcaaatgcacattgctatcatgcatggctgttgccaacgacagctcacatgcgttgcgatgcgatgcgatgcaactggatgcggggcgactgactgttggtaaccaaggtcatcgatcgacatgagttcagctatcactgccgtgaatcctaggacgcaacgcagacaagcagagatatttgtcgccgacgactaaccaggttatggccgcgtccactgcatacacgtacaggaggcgccgacgcctttggacctttgtgcgtg

SEQ ID NO: 43848 - DNA, 492 bp, Zea Mays
gaattaacttatctgtgttttatttatatttcaatttaatttcctagattttcaagcaccatacaacttgatatagttgttatggccacttggcaatataaataaatatatgatgccacacaacacaatcaaataaaatatagagctaaacaaaattatttacgaaggttgtgttatgatgtgacttcaggggcttgaacaacccaccacaatctatgcgagtacaagctctagtgtatctggcgtcaacgcgtgtgcgaccatcagggctacgacaacacaacaagccttcgtaataagtacaacaggcaaaattattgctcggtaattgaggtacacgataaatccacgcaacgtgcgcaacaggcgcaatcatggttcgatgatcacggcagacagacagtgcctacaggacatgcgaaaaatacgcgactccgcgatggcggttcgactcaacgggagctgtccgattaaacgagagtgctatatagc

SEQ ID NO: 43849 - DNA, 582 bp, Zea Mays
cttctctctaagccagtgtgtgttccgctctccttcacccattctacacacccctaagtcctctccctcaactctctagatagttccatttccataactcataattcgagcacattcaattcccccgagaaagaatctagtaagtggtagcagtcgtggacttatccattgattaggcaatcattatcttgagcacgaccttgagggcattggagatgaaaccaaaccagctactattgtggcctgaaggttgagaccaccgacggattcgatcccgtacagtcccgcccgccctcaccttgcacggagaggcatcacaatgacaacactacaaccatagtggtgggagaagcagtagcctcacaatgcttcggctacctctgtcagtggtatgcaacatagggaggaggagagcaacgcctttgccatcaccttgtggttaggtgggatttgggattcagggtttcatgattcacggatgccttcagtggcgttggtagcgtggggaggaggtaggaggagaaaaacgtctttgccattgccacaggggagcagatggctcgaggagggaggtggggtttt

SEQ ID NO: 43850 - DNA, 447 bp, Zea Mays
gaaactgctgagccaatcataacagagcaatcgatcagtgtaagcccatgtcagcacgatgtttatccatatgttggggacaccattggcgacttgacgagttatgtgcttcaagggcatcggtcgagttggctcttccaagtgccacccacgccgctacgtatgctgcatgtttgcatcaactcctaacgcttaaggttttgccttggacgtacacgggcaactaataagacatataaataaactaaataacaatcttgataccgaatctgcaactagctagttcatagtagacacttattttccagaagctgttttcttcctaggcgcaaggtcgttaccactaaaaatttgcagtgttaataattaactactaacccacgcccatgcagctagcgaaggtaaataactcttctgttctgagcgtgataaatccatgtcgatatc

SEQ ID NO: 43851 - DNA, 476 bp, Zea Mays
ggacgccagcgctgggctaattaccggcgagcaaaccactggccttcgattgatcctcgcccgaagtaagcgtgcgcctaccccccgtggttcgcgatgctccaagtctcccacacgaggggtgtggttccgcccatcatgatcccgaccgcggaggtgacttctcaccactgatggccatgacggtggtgttcggttttatacaaagagaaaacaaggatgaggccagaaaccacgcatagcccgcggagtcgggtttggctttcgtaccgggaagcacgaagtttgtttcctatctggtagctacaatcccgcgtgcggagaacggcagatccgttcgcccaggcctacgatgcggagtccgccaccatcggtttggggaagaagcttctgcgggtgggacccagccgtcagcgaaaccagagaagagaagcaagccgacggcggggaaaaagtcggtactgggccggcgggcg

SEQ ID NO: 43852 - DNA, 348 bp, Zea Mays
atttggtctagcgcaacacggatagggttctctgaccaccatgctacagccaggacatgaatgacgagtcatgttacaaggtaccgcctcagccatagctagattatgaccctaccatgctcgtcaattccatgatcaaggtattcaccagacccctgatttgggttagttggcccaagaatttcaaaccacctctcatcgaggcttacaatgggtgcaccaatccttccaattggctgggtttttaccgactctccgtcatagcaacaaggggagacgaaacagtcatggcaaattaattgctcatgtgccttagcgccagcacccgaaaatggttttccaatctcc

SEQ ID NO: 43853 - DNA, 518 bp, Zea Mays
atctaatctaaattaattagatcttatctatactaaactagttatatcaatatattctagatctaatctagtctagtaggttaatctaacctaacccagccaaacttaaagttgagctaatctaaaagtaagttacataacaggttaattatcctagtgaaataaattagaccttactttataagtatgttttaacctaaattggtgccctagactaacttgaccatatacaactacatggccttatgcaactaccttacccatcagatggttgcataaccactctgtatcaacctaacaacaaaacagagattctaactaacctacctcatgaaatctaccctacccacaattatcttaactacatgtccctaactcagatgatcacaccaagaccaaagaaaagaagaaggtcaacctcgacaagaaaggaagtgaatagaatcagaacttcagatgaatcaagatccaccatccaagatgaagtctttccttgccatgatctttcttaccccaac

SEQ ID NO: 43854 - DNA, 719 bp, Zea Mays
cctgcaccgcattgcgaacccatccgagaaaagatcttcttcgatggcgcttaatgcaggagcaggcttgcctcgcccaactcctgaaggagatcctcgatgccccgtgcccgtaccacaaggagatgcgccataccttgcgtaactacagggaattcaagaactcagtcggtcatggccgaccattcaaacagttgttgccccccaccacgagaagaacctgctgaataagaacaaccacaacagtagggtgggtggtggtggttccttcccacgcatcgacgggaaggtcaatgtcatcttcgggggccatgggtcccagagagaaaaatacagcagaagctcaccgatcggcaggtcctggtggcaacccatagcgccctaacaccgtatcaatggtcagaacactccatcacgttcagccgagctgactagtggttcaacttcgaccaactcggcaagtaccctctacttgtcgaccctatgattcaagaaagccaggtcaagaaggttctagtagatggtggcaacaacatcgacgtcactttccccaaaacacttcaggccctagggatcccgaccgctgacctcattcagtcagataccccattcttcggcatcgtaccaactgaaagggagtacccgctagggcaactcttcatgtcggtcaccttcggcgctccaaacaactactagaccgagttcctgcgcttcgaggt

SEQ ID NO: 43855 - DNA, 493 bp, Zea Mays
gtaaaacccaagcactttacaccaagcgagcagagattatcaagcagttcatcattagctactctattaaatccagcaagatgtagcagcctaccacaatctatctatacctctatacaacccaccaatttaaactttgcagaatctacccaaacaaatcacgctcacactcataatcttctctaaatccaccaaacaaattacacccatacataacacgttctcaaaaccaattattcagcttgctgaataaccctctcttctcttacccactcaaatccaatgtacaatgttatttagatcatcatttctgcttacaccgctgcctcccttcctgcaactatattgtcccttccctcgcgccgccgtcggtccctccctccgcaacctcgccgcccttacccctccctatcactcgtgtcgcaaccgccgttgccaacccctctctctctctcgtcgggatgttagcgttagcgactagtgtttggtaaag

SEQ ID NO: 43856 - DNA, 700 bp, Zea Mays
actactatgcccttgtgatcgtcaaagtagtggcatagcttgcgccccatgaggagaaccgcatataacaacttctggaattgaggatatctgaccttggatggtcccaggacttcactgatgaaataactcgggtactagactacctgtatgtggccttcttccttacaatcgactactaacatggtgctcaccacgtgtgttgtgcaagaaatgtacaacaacaaatcttcggttggatggtctactgtggctcggtttggtggcctgaggactaggggagtcatttagaacttcttgagtgcctcggaatcttcttgtgctttaggagtccattagaacctgttcacctttttgagcagcttgtagaatgggatgcccctctcgccgagtcatgagatggaacgactcagggtggccatgtagttcgtcagcttctgcaccttcttctatcaccttgggggttccatccgtaagatggcatcaatcttcttgagatttgcctcaataccccaatggctaacaatgaaaccgagcagtttattggtcaggaccctaaacacacacttgtccgggtgagcttccagcggtagcgcctcaggctattgagacttgttgcgtgtcgtcgatgaagttctcagggtcctctatcttgaccacaatgtcatcgatgtaagtttctatgcgcttgccctagtgg

SEQ ID NO: 43857 - DNA, 436 bp, Zea Mays
caaaatctctaataaagtcaacacatgcagtggtccagaatgtgacgatatgggcaatcaatcagacagaatatgcatggaaagtcacgtagggatggactcttatagaggagaccgttgttaacaacgctcaacgggagttgccggaggatcacgaggatgatcagcaaaggactagggaggaagaagcaacggagatgacatagccgatgctggggactgaagaagcgtgtgaaccacgactgaggcgcagtaacgtgcggttgtctggaccagagtggaccgtgtaagcatttgtgatgagcccagttggccgcatatgtatgccggcatgtaacgaaggagagactattctagatacaaaaacactatcgtaagaacacttcgattcatcgtctcccttcttcctaggttccttttctccgattcgatcttc

SEQ ID NO: 43858 - DNA, 412 bp, Zea Mays
tgattgcgtctcgctgctgccggaattaactagagcaggccgctagctcgatcatcgccgcgggctggcagctacgactacttaacaatggctcgcgcggcgccgatgattgccacctgctccgccttggcttcgcctcctggcattcctgcaccatggcgcgctccgcctccgcgacggcccccctctcctgcgccattgaccctgccatggttctctctcacaagttccccgaggtcacacggcttttgctagctttccgtcgtcgatcaccggactcttctgagttctgacttgacgagagctgctctctgttttgcaggtcgcgtacgagtacgatgagaggtcgttgccacccacgatctgctcgatggaacgtcccaatggttgctctgaaagtcggaatggctga

SEQ ID NO: 43859 - DNA, 1049 bp, Zea Mays
gttaataaagcatcttaagtattatggttcacaaatatgtggatttgtaagctagaccctggattttggacccatttgcaaaaaggaccccatttgggttctatgctaagtctgaaatcagtgttataagctcaactttggagctttataactttcaaattagtaagaatacaccttagggcaccacatcaactttgtagctctatgaaaggagaacaactttgcttaagagtgtaagcatagttattgagaagaaattagagataagtaagcccaaagatgggctgtcagactaaaacaatctgaagattttatgatcagtggcttgggatcacctttggagacaaattgtggctaatccagtaagaatttgtcttggggtactataataaagatgaatatggtatattggactacaactttgctgcagggcattggttatgttgtcacatgaaattgggagaaaatctccctacaaatcgctctgtcagctgtctcaaccgagctcgccatggtacaatgctttgagtggatcagactaccagcgcagagacctcaccgccgacgatccctccaccacgattcgtgccatcgccgttccaattcgtgcccggagtggatagataacgtcatggggtagaaaaatcttcgccaccgttgagctggacgccactccggctagtcgccgtgcctctccccttgctcaccgattccttggataaggtcctcaccgccgttaagccatcaccgccgtccgccgcgtgtctctacctttccaccgcatcaccgtaacctactctcactctccgttgatcatcggagtaactgccacggcgtgggacacgaatccactgcgccagtgaactccccttcctccgaccgccgcgcgtccttcttcaaattcacgaccaccgctcactaggcctataaattgagcccgctgtcagctccgcaagatcatcacgcaccacaccacccagtattgcctccaatcttgcacccgtgagctccaattttggatttcccccaaatccgctcaagaacaccgt

SEQ ID NO: 43860 - DNA, 290 bp, Zea Mays
atcccagttagagatggattataaaaacgttttaaagaaaagactgatggatatgctcagggaggaggaactgaagtggtaccagagagcgaaagcgaaaaatctgcttcagggagacgcaaatactcagtacttccacctcatggctaatgggagacataggaaaactagaatttttaagcttcaggatggtaacaatgttatcgagggagatgaaaatcttaagcgacatatcacttcttactataaagatctctttggaccgccggaagcctcgcatatcactctgg

SEQ ID NO: 43861 - DNA, 545 bp, Zea Mays
ctccaaggtcgacaaagcgtgggaaactgtccgggttacctcttgcccgacaggatcgcatgacaaagggacatcatccggaacctctaaacggacggtggaactttcaacttcaataggctctgataacaggttttcagggataatctcttctaatgcatggtcaaaggcagacattgtcaacccctggagtctaacatgtcctgataaggcctacgtcagaatgtcactgctcctgctgctgcggctgttcttgcgaatcaagggaatttcttcttcttcctcctcttcgtcctcatgaagcacacaaccgccaactctagcatcatcacaacctatgatatcgtcctcgagggtggtgctccgggccaccaccgaggagtgatgtcaagggaccagcatcttgttctaagcatgataactgccaaagtcttttctttctcttttttccctcatcaggcgcggttgggtggttcgttcggcgcgatcgcttgcgacgaacacctttaggattctaaacttcttcatcctcaccaagattttgc

SEQ ID NO: 43862 - DNA, 903 bp, Zea Mays
ggcgccttcccggcaccgtccccgtccctgccggcgtccatggcggcgatcgacggcctggaaacctagatccgagcaccttctgcaaagcaaggcgcataaacttcacaacttttgtcgccccacctcgtagcgcctgcccgcaccaaatgcctcgcagtccagtcgatattgtaccccgcgtcgcggagcgaggaaaaagaaggcgaatcgatgtgtggccggatctccgtggcgaagaataccagcaccgatgaccgaaccgggaggaggaaaggaacactgacacaaacaataacttgaacaccacgaacaccgccgcgacggatgggtgggtaaaaggcgacgaagaagaagagggcaaggatagggatgtggaggagagattggggaagccgcaagccaggaacagcaacgggaagggcaactgctcgaactgggacgattattacccacgcgctgcggcgctggggattgggtttggatcgctgctgccattgtgtgcagctaataaaaaccaaaccccgccttcccttttcgctcaggctttgtatttcttttgttttcttccgtggcagagtggagtgtgttttgtgtttgtgcggcggcagctgctgctgagcagcgaggaaaagaaattaaatggaatatttggatagatggagagagatggatgggatggaataattagcagcgtagctggtgctcagatttcttgggtttgatctttgcggacttgcggagtggtggtgggctttttgtgcttttgattgactagctgcgttccggtgctggggcggatggatttggacttttcgtggtgcccgcggatgcgttcataggactgttcctcctgtacgagggagaagccattggacgaagcgcgcttgaacttgttcggat

SEQ ID NO: 43863 - DNA, 948 bp, Zea Mays
ctctgacaccgccgtttcaacaacacgcggtggcgaagacatcttcgcaggcgccgctggcgccgcgggggggcatcgtcgcagctggaatagccccctcgcgctagggcgcgatgtcttggcgtcgtagcacaggtccactagtcgaagcagggctttccgtttcttccactgggtctcttgatgatctttctccatcactgttgacacaatagcaccaatgtttcttctgtaaggaaatattttcaactcacgagccaaacgggacataaaatagtcatcgcaggtggcccgagaaatagggtccttcctatgccatcgacgaccctctgtaaccttcaacatacgcgaagatgtttcccggagctcgagcgaagtcataacctcaccaggcctggcgcacatccccatcaactcctcaacaaaaagccgagaggccttcggccccatcttttccccctccgtaccttgcacatctattttcctctttcgagttgctacgaccacaacctttcccattgaggtgccccctttagactgggtcttcacctgttttcctcggtcgtcctcggcattagtagagtccccctccaggtaaggatcgtagcgcaagctattcaattcaaaaactcggttcaacctaacgttggaaccatggatatcccagctcctcaacatctccgtcttcggcacatattttccaacaatattaatcacctccgactccacctcccgaacgaaggtggctgtgtcccgccctcgcaaatcgatggcaaaggtagggctccacaccatcttggtcacccaaagatgacatcgagcgaagcctgacttcgcccagaccccactcgtgagccaacggccacacactgtaggcaacaaactcttcaactaaatcacggtcgctgctcaaccgggctgcgtcacgaagggcctcctcgtttttat

SEQ ID NO: 43864 - DNA, 332 bp, Zea Mays
attttttctggttttcgcaactcaccgagaaacggattgcggtcaggtttttgttagactattgtaattatagaaagtctaattatggtagtcagcccttgattgtagactgcccttgattggcttgtacgcctgtgcggttgccttgtgagtaaccccggcctctcctatgtatacgcacacattgcagtggaatagaatcaagtcattcccacaattactctttcatggtatcaaggttccgatccaccacacttccgcaacccaagaccgcgccgtcgccgatccgatcgccgcccctatagacctcgtcgcctggagcgtcgctgatc

SEQ ID NO: 43865 - DNA, 1111 bp, Zea Mays
tctcgtgcttcattagatacgtttgatgtcttatatctgacttctttccatgttgtagcttctctgagtgtcgtaactggtgaggtgttcggtgtctcctatagttgattttcagtcctttgtgtatgtcgtgtctcgtgtgttactgtgttatgtctgatgtacaggttccacaaaataaacgacctcataaaggtgtgccatgaatttatccgaatatctctcgatgttatataagaaaagaaggatatgcatggaacttggaagttatgaaaaaggaaaaaagaaaaaagaaaagaagaaagataagaaagaactccattccatccatcgagtaataatcacgtcatgaggcattcacctattacacgtgcatttggctataaatcttgtttgaaaaccaccctgttgacactcagtttgattcgataatataaacatgatgagaagtccttatatcttacactacctaaagttccatgaaagcgtacaggggctcagacttgcctcctcgccatacgcggccagcccgggtactcctagcagtcatccttgaggctataaataaggctgaccatggcttcaagtaggcagccgaacacttcacggttctcacctccaccacgatattgacacttgcctcgatcaactctaaggatttgggatctttccctctcgcgatcaacttgtactccctactgcaagcactttagtgcaagtaatataagtctcatcctccctccactggaagtagggctttgtctcacccaaaccaggataaaaacaacttgtgtcattttgcatcacccgtctgggtcagggcacgctgcattatttcactggttggtaagaccctcgggtcgagacactgacacattgcttcctaatgatgaaacacaaaggatgaaaaaagcaagaactcgataacacaagatttatcccgagtgaaggaaaaaatattttgggctattaatgagtataggctcatgccggtgtcaactgctcctggctacagtgtcaaatgagacataacagctaggcgggaccagacaggtggaatatatgatatcgtggcccgggctggttgtggtattttggcccaaggttttaa

SEQ ID NO: 43866 - DNA, 658 bp, Zea Mays
cgagaggtaggttcattttgaggtgcctttgaatccaagtgacacggagataagtgccatgctggatatgttagctgaagattcctctgatgcaatccctattgaaactctagcggtagcgcccatcccagaggatagcgaagctttagatattcagaagtctgacaacgttcgtctgaagcgctctcgccgagccaatcagcctgcttctcctgctgacgggaagaaacagaagaagagacgtcttcgtcgagtgtctagttttgatcagaatgctggtccttccgttcctgctgctgaagaagtgccagtgcctgcatttgctgaaactaatcctgatgggtgtaaccttcctgctattaaccccaatgggtgtgacctggacgacgtcgaccccaatgggtgtaacctggatgatgctgaccccaatgggtttactgtccgcgttgtcgataatggcgaggaggaggaggatgaagtccctctaactcggaagaacagccgacgctacattgccagtggcgaaagcaatggtgttccttctccagccctggctgctcatgttgatttacaagaattgtctctggccaactttgatcaggctcttgaggatatggttccagaagatctattgtcagagccggcagatggtgacgcg

SEQ ID NO: 43867 - DNA, 546 bp, Zea Mays
ccaatctcttgaatacggaaagccttgacgcatcaaaattcccagaggagtgggaaagcatcttattgcgatgaattgggataacatttgcaccagataacggaggaagcttaacaatattggcaaaataaattttcttcttgcccttaacaatccaccaattggcattttcctcctgaataaattgcctgtattcataggtccaattcggtccaccatgattccaaagattgaagaaagccctgaattccgagcgatcaatgcatttagaattatagatatgaaaaccaacggccttggaggaaactgagaaacaaaacacccgatcagcaagctgagagacattgaagccctttgcaaaaccacccagagcagcttgaagaagatggcccactgcaaccgtgttaagcttgaagatgcagcgactaaaagaaatgaccaaccaaaatgtcgacaaaatatccggacttccaggacacactggagaagctaagcggcgcctaatatcatcctcgaagattaatcccggtcgaaaatccaattttg

SEQ ID NO: 43868 - DNA, 467 bp, Zea Mays
cagtaacaccaggggtgttacagcccatgctcaaatctacttctaaacatatcactagtgtcgatgtttcgaacctcactctgacaggtaaatttattgttcgcgttccggactccggaggatgtgcatgatgggcgcaagatttataccggttcaagccgaacatccctactttcagttatcggtggcttgcgctatcggcaccattgatgattaaaactcgtagtgtagctctcaagtctcttgtcagggtggaagtggagctaatagctacagagtggagtcctagctaagtattgggactcttggcttggcgacagggctccgggtcctcgtcggtgctcctcctcctattcgtcagttcgtctagggtccgtacttctgtgtgcatatttgaaagaactccccactttgcctaggggtcaacccctcccttttatagaccgggagagaggtcaaccatcagt

SEQ ID NO: 43869 - DNA, 533 bp, Zea Mays
actagatgctgtgaagaattggaaaggagcttctccatggttggagcaaggcccagaagaaaaaactttattgatgacgacatagttggggtgatgaggtggatttatggctaagtgcgagccatcaaacacgtgctctcaacccgggaagactactttgcttgaataggtgcccaaagcacaggttcgacactactaggagttggttgcgatcacgtgaagctctgcttggatcctaactttaaattgtctctagaaaatatgagaagattatttgttgaatcttcggactagggcaaaaaattcttactcgatatatggagcaagggagaaaaagaaatcgcacttgaagagtcaagaaaaaacatgaaggtttttacttatcaactacttctcgttttacgctacttctttgaagtaaatgtgttattaatatctagcttgttgtaggcacaaagggcagctgaaaaggtggcgaccattaggaaagctctccaaccgaatgagtctgaaggtgtgtagatggtttgctt

SEQ ID NO: 43870 - DNA, 488 bp, Zea Mays
ctggttaacactaattacccacgaaaaatgcccagaaactgctaatactactgctgttcacccacctgaaaatctgtttttttacagcaacataaccggattcaaacaacgatatctcctaaattataactccgaattgagcgcataagtacccgttggaaaggtatgacaaagctctacatgattcacccactgatccccactaattacccacgaaaaattcccagaaatccctagaactactgctgttcgcccacccacaaaatttcaggacagcacctctaccgattcggataggtaaacatataatcaattggattacaacacaattaaacaagatacaatctcaaaatcaccttgaatcatccccctttcctcccttcttccctccaccaaaatccaattggatacatgcaccaacgcgacgtagatccgagcgggaaaggaatggcaccttggagagaagggcttgaggagggggcggctag

SEQ ID NO: 43871 - DNA, 628 bp, Zea Mays
acggtatcttctggtagtagtcaaaacgcgaaatatgcctgtcgcgcgcgtgtgttgccttatcgcttccggttgcgagagctacgactgtcaattgaaagttaagcagcgtgtgtgttcccagatggccagatctatacgtttagggcacactttgacttggaaatttcaaccaacttgtttataaattgttatttctttattaaacaccagttaagtgcaagagctcagaggtatcgaacctgcagtatcagacattcctgtaacactggagcaattggtattgacatactagtcaattcatagtgtggaaaacagtacgtttaaaggtttcggtattagtgtcatgagcactattcattttgccgtccattgtttagtagctgccatatgtattatgaaatactccaagttgttctactgggctccagagtagcaaacaccttaattttcttgttgattgcttattcttgattcatacaccattacttgtttatataaaaaataaagtggcatccaaatgaactagctatctaattttgcaaattttgagtggcatttttgaagaaaacccaaaaaatgccgacaacatattgcacatttgttgaatacatttttgatgaatggg

SEQ ID NO: 43872 - DNA, 342 bp, Zea Mays
aaatgctttcgtcaagacagcaagggagttctatggtttgaagaccgattggttgttcctaagaatccagaaatcaggcagaaaatattggataaagctcatctttccaaatttttcatgcaccccggcagtaacaagatgtatcatgatctcagatctttgtattggtggaccagaatgaagagggaaattgctaagtatgtatctgaatgcgacacttgccaaagaatcaaggctggtcatttgaaggtagcaggtaccttacagcctcttcccataccatcttggaaatgggaggacctcagcatggattttattgtgggtttacccaacacatcccgg

SEQ ID NO: 43873 - DNA, 661 bp, Zea Mays
gtcgatggctcgaattgattaaagattatgatttgtccattcattatcaccctgggaaggcaaatgtggtggctgatgcccttagcaggtctagggttccaaaagtggccttgcctttgatcgctgatctagaccatttggggatcgctttgtgctatgtcggcaccgctagtaaggagtctcggatgcttattcaatcctccctcatggagagagtgcgtgcggctcagcagcaggatcgtctattgctggaagctcgaaagagggttggtgatggtaaaccccgggagttcaccattgatgagaatgatttggttcatttcaggggccgtctttgtgtgcctcagaaatcagaagtgaagattgacatcttgagagaagctcataaaacgccttacaccgttcaccctggcgaaaccaaaatgtaccgagatttgaagcaaaacttctggtggaagcggatgaaggttgacgtttctaagtatgtggccacctgtgaagtatgtcagcgcgtgaaggccgagcataagaggcctgcaggattattgaagccattggaaattctggagtggaagtgggagcatatcaccatggattttgtggtgggcttacctcgttctcctcggggtagagatgctatttgggtggtagtggatcgctt

SEQ ID NO: 43874 - DNA, 663 bp, Zea Mays
tgatttcagttagttcacctccatttttgacagcttcagctctcactactacaacatgtatccgcgtcctccaccgggtatccagtgaggcccctcttttctggcaattgatgccaaagggggagagatgaagatgaagatggggatttcagtcagggggagctcatgtgtggaaacttagactttacgtgtttattatctgcactttatgtcttatgcatgtcttatgtagtttgtggacaaatgtctggggtctcgaactatgtttgccaaagtcttatgtttctattagttcgaagtattctgtgaatggttgatcgaggggtgactaaatttactacgtttatttcatatcatattacacttgtatgcctcgataaccatgttgaagatctccgccaaaaacctgatctattatgtgtgtgaaatgttcaactagatatatcatgcacacatgtagggggagctattcctacaccttgagttttgtcctgacttatctatccttcagatggaacttcaaatcaaaataaatcactcaaaactcacctcaaatcgttcttatacctagtgtgtgaggaagatttgagaaactgaaactacctctgtatgaaatgtgtagcgttttcatcaattaccaaagaggtggagattgtgaatcat

SEQ ID NO: 43875 - DNA, 306 bp, Zea Mays
cgcaaggaaaatccgcaagaagaccagaaaccaaggatgccaaactgagcagcaggaagagaaccctcccagaaaccagtccgacaccgaggacatgtccctggccagccttgatgaccttctcaaggaatttggggacactttagagaaagagttcgggggtaccttaggtagcactcgtgtgtgataaagcttgtggtagtggtatgctatgtaatggaatggcttgatgtaatgaataaaataactagttaaaaaatggcatgtgcataatagcgactctcttcccatggcagatggcttcgg

SEQ ID NO: 43876 - DNA, 361 bp, Zea Mays
atgcatcatgactatttctttgctcaattaaaacatattcatacctttggaccaaatcatcatgagagcactttagctcctcatgttctttggtcatcttttctaggctgttgttggttttgatgagggactcttctagcctgagaagcgtctcgccttgttccttgttccttctcaacagcttaaccaagagtgccttgtcctctttgttgagatggatgtagaaacggcgaatctcctcttcttccacatcatcggtatcattttccctgtcattaatgtcagtggaagccaaacaggaaaatgtaccttgaggtgatgaagattcatcctcgctatcatcctcatattcctcctcatc

SEQ ID NO: 43877 - DNA, 795 bp, Zea Mays
tggttggctaatgggccaggagatggttggggcttacttttgggtacccgttccacggtacctgattgatagttttaagtatgtacacctagcccctagtggaaacaattttacatctaataataagaaaatgcagggataagaacctatgatgactaggaaaacatatatgctagttgaataatttcaagtgatgagtactctctttccttttacacatattattacaagtcaagtgttctatgcttacaaaataagttcttccacataccttcaaaggggcctggtcctcgctttagaccacgatgctttgaaccttctattcaacaaggttagttagctcctaaagctaggataaattagtgtttagaaaaagatcatatgtggcgtgacaaagaacttcgaaggtagtacctcaataataactaagccatggtatcgatcagctctgtcatcgtcgatcactaaactcggcttggtccacccttctcttcgcggtgctacttagttagagtatgatggtatatgctagattccacatcttttatgtagtttgaggttcatcaatgtccaacaataatatgtcacactaccccatgattagaaatagtagcatgtagcatgttgtgtcctatttaacctacgtaggtgcggtgccttaacaattggttgtacaacatcttctacttccaatggaagatctataggggctaaaacattcaagtgtttctcaaattttttcaagttgcatcttgctcccaataattccttttgagatgaagccattctctaaaa

SEQ ID NO: 43878 - DNA, 902 bp, Zea Mays
gtcgttgtaccaattggggtcaatcttggttgaataagcagtgatggtcattgctgaagaggggtcgtcgtcgtcgtcgttgtaggattcatccatgaatatcctacaagacatacgccaacaccggagtgccgtatgtcttgttttgccgctgccgcatatcttacattgccgctgccacgcccagcatagttggcagatgaattgaattgattcttgcagctctgcctggtgttggaagaagccgagcttctaaggtaatcaaatgagcatagacacgtcatcaacagtaagggcgtcgtcgtcagatcgtgtggttatagatcgtgttctttcatccttgattcgtcggaagtatccagcagcagagaggtcagctcaacgcgaatttggacggcacgcgctctggtcgacgaagcaaacttctgttgaagtgagtccgaaacctctttagcgcttgttgatctgctttgagatgccaaggatgaaagaactggattgatgatctgctttgcaccgtcagtgggcgaggcaatcacctgtggcggcggcagattggttccgtcaaggtaaccaagtaatcaatttggtgctgtggagatacggccgcatcgattggcgggcacgccatagcagaaaactgagatgccatggcgtggaggaggtgtttaatttggaggatcaagaagaaattcctgcctgtggtaacatgtcctcaacgtagcataataggccgaggttgttacaagaggatgagagcagatatatatatagcagaagattggttaggttaggagaccgcagctccggtaaacttccgtattaggtggtattgccaataatggatcggaatattgatccaaaacgggatcacgcctcccccgccttcctacctataaaac

SEQ ID NO: 43879 - DNA, 281 bp, Zea Mays
actccatggccatcatcttcaagaacaagatcactctcagcccaggagctatgttctgcttcggaaccatctcatgcatagcggacatagagggaactctgcaccgtgtagcagatccacccaagaagagaccctcaggaatcccgagagaagctgaagcgagtctgcgagccacacccctgctccctgctcgggggaagatggtcactcacaagccagaactcagaagcccttggaagatggagggacagtaagtcggggcctctccaacccaaagaact

SEQ ID NO: 43880 - DNA, 419 bp, Zea Mays
ttcttgtagtatggaagcacgcaggaaaggaaactaaatcaaacagcgggataatggacgcgacataaggctcgacagaaccctcagggcacaagaaaaatcgacacacctaatcatagaaccaaagttctcatatctttactaaaactgactcaagtatgagaaccaaagttgtccttacttccaaggccaaaaataggctagcttcttcctagaaataacaaaaaatggacagttaacatagctgtgaactgaaaatggactcaaaatggaccgaacattggcacaagtttcatgtgtgagttgtgaagatcagttttaggcaactgcagctgcaactgaaactgcatattggacagttttctgagctgtgaactgaacccaaaggcttacttcagtgagtggcattattcttcagc

SEQ ID NO: 43881 - DNA, 557 bp, Zea Mays
gcgggctcgaatggctggactccgtctttgcccgttcggtcataacaactaactttcgagaattagcgacggccataggaagttagaaagtaatttctgaggggttgacattgaaccgtcggaagttactccgagatctgggagaaccgttaatgatataaccgctgagagctcgaataacctgtcggaagttactctgagatttgggaaaaccgtcggaagttaatgacataaccgctgagagctcgaataacctgtcggaagttaataactttcgaccgggtatcccgggctgtcggaaattccctgttttttagtgtaggatttgttcctgttgtgttggtggtgccctgcgttgtcgcagccgagttacatgatgattgaggtctggttcaatcttcttcccaacacagccgcgccacggttgcggacacctcctcaaagtcaaacccctgcttgatgtatccctttgccacccgacccacaagaagctgcaagcgattagtgagaagaaggatgaacactcgaccataagagaggagagagtgcgatttgtg

SEQ ID NO: 43882 - DNA, 1529 bp, Zea Mays
aagaataccaactcaatgaaaagtgttttttgtccgaacgaatcaaagtttgtcttcatcacgtgattactgtgcaggagcattcttgcaggggaccttgccagcaggatcaccagaggaagaaggtttgctcacaccagcgagcgcagcaagaacatcagcaacaatgtcctcaggcaccacaacaccaggtcttttcatcaggattcgcccaacacgaacaactttgtccatcgctttttcacacattactatcatgataccatggtcatcctctaaggccttaatgtcgcgacgagcaatgtccaactcatgcgaaacaagtttcttcgaggcgcgcaactccttgatgatagaatcttttgaagacagtaacttattaagctgtgacacttcggtatgggtggccctcagctcatccctatgatggtcaagctctgacatggtgaagcgatgactcctctccaaagtaggaagggaactgctggcgtcacggtacagtttatccagactgtcacgggaatcaagaagtcttcgcatctcctcctacaggcaagaggggcactaagcatcgaaataaaggtgcaaaacaaaggcattaggaactgttagaaaaaatctacctcatgggatctcttctctgaatcaagttgagcgttcaaggaagagttcagggttcgggcaccatccaagaacgtagaaacctggttcaagttggcttgactctgagcatacctctcttcagcatcagagcaccgtcgagtcaaggctagaaaagcaaaaaggaaaagagcatagagggtaaaacgagggaagcaaagaacaacgaagaaagctatcaatccactaacaagtgttcgaggcttttagatcatctatttgcttctggagcaggaaaggattccactgcagcaaggacaaaacctgatcgagaacaggggcaccgcaagacctcaactgagccgacacagagctcagaacattctgcaaatacaagaattagcaaaggaatatatttatcaacacaagtaaagcagggcaaaggttagctcacctgaaggttagagaggaacaaaggaaatcccaaagccggaggcattgacgcgccgtcgaacggcggggtactaacagaaacaatatagagagcagactcgagccccaaaagaggattagagctcgcgcccaaggcagtactcagtgaaacctcagctccgacagcgtgtagcaaattaccagcgcccgggtcactggcctctaaagtgatcggaccaacaagagcggcaggaagactcgtcaacactggctcctcaaactgagctggtagtgatccgacatgaacatccatagaagcagccaaagaggagccgagctcgcaccctcgggggctgggtcatcctcggcagcaccctagggggctaggttatcctcagtgacaccctcgagagctgaagcaccctcaattgtacccacatgagctgggtaaccctagcatgcaacgtcaggagccgatgtgtttccatgaactaggc

SEQ ID NO: 43883 - DNA, 386 bp, Zea Mays
ggccaaatgatgtcctcaccgtcgtccccggcgcgaagacccagtgacatcgtcgtgatggtcccctgcgacctgtgtgaaggaagaagggccttcatcgtcgatctgtttgcgaacgactagatctgagcgtcggatactgcttcaggggagagaaacgattgacgttgatcctaaatcgtatggccgattggcgcgttctgggtattaccgtagagtgatgatccaatggtcccgattgggtggtgtcgtggttggcgtttggaccgctgatcgtcgatccgatggccgttgcggcgtaacccttcgcgatctaatttggaattttggatcgggatcggatggctgacgatcaagcgtaccccttcagtcgagactcatttgca

SEQ ID NO: 43884 - DNA, 271 bp, Zea Mays
ttattatcgaagattcattccggacttctctcgaattgcgaagcccatgactaaattgttgaagaaaggagccaagtttgtttggggtcagaagtgcgaagatgctttccacaccttgaggcagcatctgactacaacaccagtgttagcgcaacctgaaaatggcaagccaattgatgtgtactgtgatgcctctggcactggactgggttgtactttgatgcaagacaaccgagtcattgcctacatatcaagagcactcaggcctcac

SEQ ID NO: 43885 - DNA, 405 bp, Zea Mays
cgccgccgacaatctgcgcgtccggattcgcgtcggcggtcgtcgcgattcatgtcctgagctagtggattatgctcgacgtgaaaagatcttgccctagataaacacaagccaccgtggtcactctgccttttgcccacttgcaccggcaacgtggccgcacggccattaccacgggcaccgccgttttccccggtcacgccacgctatgaccctttttaccacatcgcagtagctcggcttgcgatgtctgttcatcgccggtgagttcgccacgacgaaagacactaatcacgcgcgccagtaacttcctgtttctctagccgccgcgcgtattcatccaaatccctggccaccgcttaagcccgttataaattgagcccgccgtgagctccgtagggtaat

SEQ ID NO: 43886 - DNA, 542 bp, Zea Mays
gaattctttgattactctataatgctacttgtttttcctaatgttaacttgtcatgagtgctcagcaaatccaagatatttatcttttcccaaaccttgtgctgactgtgtgccatccataacaaatcgctaaaatgttctgtttgtgccgtagtctaacctgttgaatggggttccatgggagcacctctcaattacggaacctgattatctatacgaaaattgaacattccaaataataagaaattgatttgtacagatttgcacataccttgagcacttgaaagggagagagatttaggcagaggcaaaagacgccaccttatcaaggtgcgtgatctatcttacccctcgatcacccaattctataagctataaataacaagtgtatcatcaatcagctcctaagccatagcatctattagtcatcagtgtttcaaaccaacgaacatacatgcaaatctgatcttagtacatgcaacttggacaaggtagtacctcacggtcattggtgaccttgaacacagcttccccttgtagtg

SEQ ID NO: 43887 - DNA, 1017 bp, Zea Mays
gccccgccagtagatgtcagaattcttacatctggctcgccaacctccaaggtgacttatttcctcgaagtcaaagaagcatgcattgccatcaccccatcagatcatggtggagacaactcgacttgaacaccctcgggggctgggttgcagctcgcgccacccaccagagccagatcactaccggtaacaccctcgggggctcggtcgtagctcgcgctacacaccagagccggatcactaccggtgacaccctcgggggctgggtaactgccagcaccaccctcgggggctgggttttctgcgacagccacctctaaggctgaaggatcctcagtcacctccatgtgaatcaggcaatcctgaccaacgtcttgacattgaagactgacttccaaagtcgatgatgctcgagacactgctcgtgatacctctaatcccatgtctggaattttagagtaaacagccatcatgtcatcagcagtcggctccgataccatatcctcagggacgacatcctcaagggcctgatcaaaatccgttatggacagttcttgaaggttgacaagagcagacagagctggagaaggaatatcactatcccccctactacctctgtaacgtcggctaatcttacgaactagcgggacttcttcttcctcttcctcgtcctcatcattgggttcaatttcagcacgattacacccattgggatcaacttcagcacgattacacccattgggatcaattttggcgcgggttacacccattgggttaagattcagcaagattacacccattgggatcaacttcaacatggacaccaccattgcgatcaacctcaggaaggacctctgctggcacttcatcacaaaccagagtagaaggaccgacatcctggtccaagcatgacaatcgccgaaaccgcctcttcttcttcttcttcttttcctcaacaggcgcagtcgaacggctaacttggcgaggacgcttcgggcgggtacccttaggctttcg

SEQ ID NO: 43888 - DNA, 335 bp, Zea Mays
gagtatttcatatgtttctccaaacagaaacacaaaagacaagaagaaaatatgcaaagtacaccgaacatgttaggtggcacactagataggtgcagtgcatgtgctaaagattatgatgaagatagatcacaccgaacgtgtatgagtgcattggacatggcacattggatagggcacccagtaagccatggagcatgtacgcatgggtctataatataagggacgtgtccggtgatgcaccagattccacactgtatatgacactcagtaagggttgaaaatgcaacccgagtcagttataactcatcagacatgttcgatgtcacttcaat

SEQ ID NO: 43889 - DNA, 477 bp, Zea Mays
ttggccggatgtaacctttctctgacagctcatcaatctgcttcttgagttcaactaactctggtccagatactctgtaggctcttttagaaatgggggcggtgccaggaaaaagctctatagcaaactcaactttccgctcaggtggcatgcctggtaaatcttccgggaacacatctgggaattctgacacaaccttgataatctcgagtggatctgcttcactgctatcaatagccatctgataacaacttcctttctttggctcaggcaagactaactcgatcaccacttcctctcctagtggagacatcaacttgattatcctcttatcacaactgataactgcctgatacttatctagccaattcatccctaggatgacatttattccctgagtacccattactatgagattagcgggaaacgctatcccccttatttccacacttacattcaagcaaatgctatcggctc

SEQ ID NO: 43890 - DNA, 595 bp, Zea Mays
cgaaactaaaggattttagtgtccaaaccatagtaaaatgaaatttgagtctctaaaccataaaaaattcgagacatagtagaattttagtgaccaaaccatagtacacgttttgctcaccggaggccggtaaggctatttctggcctccggtgacttataacacatgttttcgacctcaaacaatgatttcatgtctcctgtccaccacccatgttttggtcaccgggacctacaaaactgttttgccctcctatgagctatagcacacgttttttgcctgaacgaccattttatgcacgtgttccgcctcacacactatggttctcggagcaccgtaaagcagtttttggccttccatgagctatagcacacgtttccactgccaaacagccaatttcatttcaccgatctgtcacctacgttttagaccatggaggctgttacaacattttttccacccgtgagctatatcacatgtttttatggaaacctaaaccctaaatcccttcctgaaaccctaatccttaacaccgacactaaaggactttagtctccaatccacagtaaaatgaaattggagtatccaatccata

SEQ ID NO: 43891 - DNA, 931 bp, Zea Mays
tattgcaaataaaataaatctaaatatactaaactaaacttgagaatagtggcgacagtgttcaggtggaaacctttcaattctgtgataaacacagttttagtgatcaaaataatatcgcggccaatgggaatctttgaaccatgtaagaagctcaaaagaaactatcctatcatgtaaaagacaaccactaaaaaagtgagtggctatcagacatgtcttgaaaaacaattaaccaaaaaatcagcacaaaggtcccttcctaccgttccctccctcccaaagaaaagaaaaaacatatgttttatgacggggagtatacaaccatgatttttttacccttccaactaaagacatgaaaaaagataatactaaagctagctatgaaaggttcaataccaaatgaaagaatgattttcaaaatttggttagtttaacaacaccacaatgatatgtaatgaggttacaatttcctttggtgccaaagcacattctaattttatatatttgagcatgtcacatttgtccactccactccaccacattacatttgttttattgtttaaaaggagagtggaaaaagaaaccctaccaacagtctcattatcctcacagactcatggtactaggctaccaactaaagcaaaggacatagaactaaaattcctgttatattctgatggtcaaacaatggttataactggaatgaaactaaaataacttcaacatccacaccagtacataattctcccaagttttatcaataacccaatctgaactctgaagtcttaacaaaaatgtcaacactcaacacttcctttttaattatttataacaaatgctcatttttccctactcaactgaccctagacagtttgttcaattttcccaattccaatagagtagcaacaataaccccacaaattccatg

SEQ ID NO: 43892 - DNA, 533 bp, Zea Mays
agtagccaaaattgttgtgatattgttccttcccaactgccttcgtctagtaggataattcgtggatgttgcataagcagtcggcatctaggtccagtccttggctcctcatcgtccaaataaaaactccaactttaatcaaagcttcgggagtaagctggtgaaggaatattttgaatttcttcagcacttcgactagcattttgtgcaagggaaagcgaagcccaaccatcataaaactctaaacaccactacttcgtctgcctctggaagaggaacaatgctctctcctctggctctcactatggatatatcatgaaagtatttgcccttcattgcctcaatccatcctttcttgacagtggattttccaaaaacaacatggcttggcctccatggccgatcttcgacatcttctacaccactgtcaaaatcaaagtcatagctgccctcagaatcttcagataatccagctagaattttgctagttatcttttccgtgttggtcctctccatatcttcataaaacccag

SEQ ID NO: 43893 - DNA, 746 bp, Zea Mays
ccgccacgtgggcccgctcagctggcttccctgtccacggctctgactcgctgacagcatgggaccctaacgtcggtttcatcctcttccccaaatcctctgctcgctgcaacagaccgcaccgcaggacccagattccaccggtgaattcgctcgccttgttgtaaccacttggatgcgtggtgtgcctgccgaccttttcccctagcggagacctcttcttccccgcggactcgtcacgccgaaccggccgccgtgtggggcgcctggaattccggatcggtggttgggatccgaagctcgtggcagccgcgatctctggccctatagaacctggccgggtgcgccgtcgatacacaagaccgggcgtcatctcctccatccgtctcgccgcaagcctagaacagaaccgcgcggcgcccgggtccccagatccccttcacatcggtctctcgcctgcgtataaacttggtttcgcaaccactgccgctcacctccccaacgccataaccaagcaccgtagttgtcgttgtgcagaacctcatcgcgagctgagcgaagccgccatcgatgccccgtgctctgggcgctaatcgtgttccaggggatagacagagagggagtgtcaggtggccgccgtcggccacatcacgcgatgtcgcgggatagtccttggagtgctgttcggcgtgttcaccggagcactccgcacgtcctcagcacttacacgggcgacgccggtggcc

SEQ ID NO: 43894 - DNA, 413 bp, Zea Mays
cgtaactgctcaaggctgtggcggtggaggaagatgctcacgtatgttgcagcggcggtggaagcttttgagagttggtttgcgaaaccctaatagctacaagcggttttcattataacccacgaaggaatgtgaagtgtcacgcgaatctaaagctagaagttggggctgaaagctgaagcgatatgcaaaatctaaaataccagtccaatgggttttatcgaattgtgaacattagaaggccgagtcatagactcagggactacattccgataaaggtaactcggttaccatggaggacaacttggagcatctactcctaagtattaacaagcgagaatcgatgatcatagtacgacttgatggctactattaaggatatataatattggcggtagctcagacgttccaac

SEQ ID NO: 43895 - DNA, 821 bp, Zea Mays
gcaggactcaggcgaacatgtatcggtcgatggtgaccgtccgatctagatctaagctctacagtttaaaacagacaagcggctcgacttgactaatgtagatctgtcgatcctgatccaactgaccaaatcacgcggcttggcatgagcgtgtggctccgtgcccaacaagctggggtgaaggggcgtgataaggggaacacacggcgtgcggcagtgcacgacagacaagctcaccaaagttggccataacggggatccaggggcctatcatgctgggagaatagctcaggagggagcgggggtgaaggcgaacatgattagggcctcaccaagggggtcgaggtagcagagagggtcggcgacgagcgatggcggggagcgtggagagaggtagcgaggcttgaggatggggagccagtgcttggaatcaaaggtggggcttcaggtgatacttataggagcgagaccgaggcatgacaggcaccaaatcgatggaaatcgatgaggagatcaactctgcctggtttccataaacagcaaccacaaaaggaatgaaatacttggtaagggggaggggagattggtcgagatcaaggggaaaaggaagggcatcacggtgcgctccacatcgggcaaggaatcgagcaagggtggcttgatgcgggcggcatggcggtgacaagctccagactctggtgcgagaacgaggaagaagaaaggaaaggactgacatttggggcctggctaacagagagagaaggagaggggaagggagcgcgctgatgggccgcctaggccgaaagcaggcacaggccagg

SEQ ID NO: 43896 - DNA, 1021 bp, Zea Mays
cctccgagccagtttccaccaaattcggcttgccccggaagaccaacacaagtcagcgttccaaacccatcatggccactttgagttcaaggtgatggcctttggtctatccggagctccagctacctttcaaggcgctatgaactgaaacttgggtcccttactgcgttcctgtgtgctcgttttcttcgacgacatcctcgtatatagccctacttgggaggatcgtcttaaccacctttaacaggtcttgcagctgttgtccacagacaagtggcaagtgaatctctctaagtgttcattcaccaagcaacaaatccattatttgggccatgtaatctccaacaggggtgtggccactgatccttctaaggttgctattgtcaccacttggccccaacctactaattgcaaacaattacgcggctttcttggactagcgggttactactgtaaatttgtgcggcattttggaatcatcgccaaaacacttaccagccttctcaagaacatgccgtttgtctggactggagaacatgagcaatcctttcaggcactgaagactgctttgtccatggcaccggtcctcgctctcccagattttgccaaatagtttgctatcgtgactgacgcttcgggcatgggcataggtgcagttcttacacaggaaggtcaccctcttgcattcgtcagtaaggcactcaacaccgagactcaaggcctctcaacttacaaaaaggaataccttgcagttctgttagcagtaaaccagtggagaccttatcttcaacactcggaattcattattttctcggaccaacgcagtctgtctcacctgtccgagcagaggctccataccccttggcagcagcgcctcttcaccaagctcctcggtcttcagtacaaaattgtgtataagaaggggtcgataacggtgcagcagacgcactgtcttgccacccacaagagggtctcgaagtattccattgtcacacccagttttagaaggcaaaccgaatgc

SEQ ID NO: 43897 - DNA, 398 bp, Zea Mays
cgcacaaccaaaatcatcacacttgctaatgacaccaacaatacctactgatatgttattcacatcacgaacacagttacacgccgcatactagtttctaacatgattctcgcataacttgtaattcaactacttactaaccctaaatcacgcacgacagatttcaccttaactggttaatttatttggagcaccgcctagcgtaccactagtaccccgcattttgacttgacttataaacatagaggaagtgatacaacgaccaaacatttatgtcgagcacaatttttttatgaccacatttatcgactagacaagtggaacactaaccgattattcgcacacctcgtctttaaacacaaatctcatgtctcataatttatatcttcgacccactc

SEQ ID NO: 43898 - DNA, 348 bp, Zea Mays
atcgacttactcaaatggatggcacggaagtagggaattcagggaatatagagcacctcaggaagttttacccttagcaagaactatcggagcaatgttgtattctgtaattggaaaatacgtcatcaataaaagatttcattctcaaaagcattcaaactattggctatccatcgacttcaacttgattaaacctgaaatcagaacacttactcaatcgagggtgaccactataccctactaacggagcaatcgacttaaagtcggcgatgacttaagacggtgcaacatgctcgcgcttactcgactcagggtgaccactataccctactaacggagcaatcggct

SEQ ID NO: 43899 - DNA, 388 bp, Zea Mays
aggagagggggtcgtcggagtggtggccagctcaccggcggtaaggatctttaccgagttgtgcataaccgatgaccacgacgcacgaatcacgacgagcagagatcaacggtgatggacaccggcggcgagcagggggggtgaacctgcgatcttcttcagtttggaactactgtaccatggtgaaaacctgatttagtcgcctgacagagcacattggagccactttctctctcaattttgaatggtaacttaacccaagctctgcatcaaagttgtaatcctacttacctgctacaaatcaactatagggattaaacctatttaagcactggatcaaggtttaattcaagtccaaagttagctctgttgcactgaacttctgaac

SEQ ID NO: 43900 - DNA, 779 bp, Zea Mays
gtttggacctgcacacgcaaccgctactgacaatgctaattttgtggcggcttcgaccgtggttgctgaagacgattctgatgattctgtgtctaagtgttttgagtctgacgattctgggagttcgattgtgtggacagaggagtcttcagaggaggacttggattattttgcagcgttggatgtggctgcggcggagacttctccgcgtgtgatagatgctgaggatcttccgggtgcgagtgctgggcgtaggcggcgaagggcggtggcgaaacagagagtgggtgagttgtcgcgaagtgataggcgtcatcgtggtgagatggagggtggtcgtcttcgtgtggacgggactggcaaacgggaattgttgtcctcgccggctggggcaagtgtgggtgagggggagctgcgaagtctgtttgcgggtgaggaattgaggataatgttgttcaactatagggagatgggtatcatcctgaaggttgagccaatgtaatgtgtgatgccctcgctgtatgtatgtaaccatgattttgtgtgatgaagctgcacgctttcgttgatcaggctggtcccgtaggcttctgtacggagtgctttggaaaagacttcgattttttgtacttgttattccggctgcacccgtaggcgacttttgcacggagtcttttggaaaagacttcgatttttcgtgcttattattccggctgctccattgggcgacttttgcacggggagtcttttggaaaagacatcgatgttgcatacttatt

SEQ ID NO: 43901 - DNA, 608 bp, Zea Mays
tgggggagattggctattttaggtggggagattgtctattttaagtggggtagattgtctattttaactaggggagattgtctattttctttggctatcgctaaacctcataatttgcaagaagtcaaaaactaatctttgaaaagatcgtggatgacatagcttacttcttaaacatgattccttttaagattcaaagggcaaaaccttgctccattaattgcgatattttttgggtcttagtgatgacctcaacggcgacatgaacaactacaatgctcaccacccaagtcatatgtagtttttatgtcatccacatctattataaattggagccgtctataaaaagatcattgtagtagtgtgaggtgcctatacacaccattattcatttcacataaatttatcttttatttgtcactctataacccttattttaaagctttacttctaaacttagccacacataattcacgtagactatgcattttgttttatatttcctttaatcatattgaacactaggaacattttctttactattgcaatactatgattgcaattgtgttaggtgctggtttgcaatgtcttgttttgagatgtctctc

SEQ ID NO: 43902 - DNA, 396 bp, Zea Mays
cccaccgcgtgaagctcggccaggccggctacctcaaccaccttccatccacctagccaccaccatctccggcgcataatagtccgcgcaatccctggtgcgcaaacactaagcctgggatcgggtcacagccacggtgaggagaagagggcagaactattaggtgctcacatgggtttctcgcctggtaccgctctggccggtaacgtggtgtggggaacatccttggggtgtgtcggaagcatacacgacacctatgagggagtttgtatcatcgtaatctcggaattcctcgccggacttgggatctccgacatggagttgccccatcgtggccatcgacaaccggacttcgacccacggtagggtatacctccaccgattcgctaagtcctc

SEQ ID NO: 43903 - DNA, 962 bp, Zea Mays
tggaattcatcgcacagttcttatgctcctagtgtggtccgccctcataaacccggtctctggcgtccgtcacctaactcttatgtgtccagttataaaggaataatttgctctcaattcaatccttttcctactttaatttacatatattatttcctctaaccctcacgtggtttctaacttctgttatgatcatgtaactagcttgtcgcttagtttgggggtccctttggtgttgaacaaggatcgaactgctagggacctctagctaggggaaaggaccacatccgcgagggtggtctagagctgggaagtcgcttagtctggtttcgtaccgtaagcctacaccctccaccctagaacaattgtcctagtacctcggactgggtccctaaaggttcggacctcgaccaaacttaacggttggttcctaaaactctgctcgacaagctccaggaggcccaagggtacaatactaagcattgatcttgagttgtgttctggatcgatttctggcttgatcatggctttagaagtgcatcaccgcatggggtacactagtaacaagcaaggcggttaaccatcctatcatgcaacctgtgcacgatacaatgaacgagtcgtttcacgtcccatcaagccacatgcgccaaacagcatcatgatggccacatattttaccgtgccaccacagtaactacttcatatcgaccaggtaaaaataaaaaactaaaactcaccccaacttctaacatagagtgagggatggaccgagcaagctccgagtgagccgcaagctaggtgaccagcccataggtcatttgctcatgcccacatccaaggtcgtacctcacattctcctacggtgacccgactaatggggtggccatagggcccctctttggttgtccagacttaccaaagagccaatatagaatcgaataaggaaggactcaatgaga

SEQ ID NO: 43904 - DNA, 402 bp, Zea Mays
ggggtccagtgataaggtcttcgtacggaccatcctccaagaggcctacatgaccaccgagcaactcttctagaaggccaatgcctacatcaccgccgatgagtgggcccacgacctcattgagtcatccaagcccacaccccagaagaaagaaacccactacaagataagcattgggacaagaggccaagggacaaggttcacgagacagggctgccgccggctcaagcacgtggcgccctcgagacaacccatggatgttggaagaaattctcaatggtttgtgcccctagcacaaggataggcgccataccctgcatgactgctgggacttcaagaactatgtcggccatgaccaaccatttcagccactccctgggccgccaccccgacgggatcaag

SEQ ID NO: 43905 - DNA, 346 bp, Zea Mays
ggggaacctaagctctacatcaactaaaacacacactggtcaacccggaaggcaccgttgttacaagaaacaatgaacacaacgacaaatgaagcgagagatagttgccgagaccagaacccaaaaggagggagaagagttaagagcaagagtaatgtatcacacatggatcctgtccatctagagaaattattacaaatccatagaaataaagaggacatctaaacacaggtgggcgggtcatcggcgagcgatgccaagctccaaggactagtcaggagggtcttcacatcaacccatttggcaagcagtcgagcatgagggtgaacctaatcttcaatggcat

SEQ ID NO: 43906 - DNA, 377 bp, Zea Mays
acgagactgagacgtgcagacgcgacggatcggaacgtgacaaccaccgcgtctagctagagctaggcgcgaggtcgaggccggaaccattgcatgagttagttgccatgtactcgttagttgttgttgttgtgtacgtgtacccatcgcgcccacgtggatcacggagctagcgttcatgtagacctcaaaaagacgaagtaaaggccttgtcgcgttgcaagtcacgtcgatcgaggagcgcgtgcagcgtgtggagtttgttgctgctacactgctagcaagtctcgttagttgttgtgtacgtgtatagctgcgcaagagacagacagtgaagccagtagtgacggaggccggagctgagtgctggctagctt

SEQ ID NO: 43907 - DNA, 737 bp, Zea Mays
cttttccagagaaggacagtgttaatgccaaagctgataatgttgttgctgaagccagtagtgatgatgaggaagacgaaggtatcttgagtccaagcaagcccagtcatgttgaatttgaaaaatctactgtaaaagcagaagacctagttctaatgaagtagcttgggtattttgggaagaatgatgatgggctgataagatttgttggggacgaagtaattccggaaccaaaggatgacgaagttatagtttttaaatgattcttccgagcaggactttggttccctctgtacgagatgatcggtgaagttttgaaaagatttgaaattaccttcatcaactcactccaaatgccatagttagactcagtgtatatatttcagatttgcggagttagggaatgagtgctaatgccgaagggttctgcagagtgcatgaacttcactatcagaccaagtccagagcagacagcctccacaagaacttcggatgttataactttgcctatcgaaaggacctgaaggctccagtgattggatatcgcattaagtgggctactggctggaccaacgaatggttctatgtgaaggctgatgagaagaagagggaaaactcatgagtatggcgatgagtctgttaaagctgagcttcggcatgacaaaactactgtgcaatatgcaactcggatccccatgccagttagctgaagttcaattcagagtcgtaggcgagca

SEQ ID NO: 43908 - DNA, 332 bp, Zea Mays
gtccttgccacctggtcattgatttgatcaccagaccaaaatccttgaggggctgggggtcatcgatctgggactacacaactagaactttctcatgaaattcattcacaagttcgactacatacttgacccccttgggtggaccttatttgaaataatcactatcattagggggactgtctgctttcaagatgacgtgttcgttttggtggagagatgtgctcaaattgctacctacgtacaaatctgacttcagggtcaacgtattcgatggctgatcgatttctctacggttcgacatctaggggcgagaacaccttgctgctgtttac

SEQ ID NO: 43909 - DNA, 991 bp, Zea Mays
cagggctccctccttctcgccatggcaactgtatactggtggtagttgacaaattctcaaaatatgcacactttatatcattgacacaccctttcacagctctggcagtagctaaggtttatttatctcaagtgtacaagcttcatggacttcccaccgctatcatttcagaccgcgacccaatcttcactagcaacctatggaaggaactgttcagactttcaggcacaaaactatgcttgagtagctcttaccacccacaatcagacgggcaaaccgagcgagtaaatcaatgcttggagacctatctccgctgttttgtgcagtcctgtccacgtcagtggcccagttggttaccgctcgctgaattctggtacaacacatgttaccatacagccttgggaaaatctccattcgaggttttatatggtcattcaccagcacaggcaggcattggatcagctgaacattgcaccgttccagatttacaacaattcctgcagagtagacagaacatgctgcaacaagtgcgtatgcatctgcaccgcgcccaacagcgaatgaagaagcaagcagataaaaacaggactgaacgggtgttctcagtgggtgatcgtgtcttcctcaagctccaaccatactgtcaatcttcgcttgttgagcgtcagaatcataaattatcatttcgatttttcggaccctacaccattgtgaaacagattaatccagtggcctatgaactcgacctgccagttgggagctccgtccacccagtatttcacgtctcgcaactaaaagcggtaatcagtcctcaaactcatgtcagccctactttacctaatctgcaccatggtattcaggtaccagaaatagtgttggctaccagacttcaccgccgtgcaggcaaggtggttaaacagttgttgatcaagtggagcggttggcattcatctctagccacatgggaagaggaggctgacatcaagcgaag

SEQ ID NO: 43910 - DNA, 331 bp, Zea Mays
cgaaaatgaggcgcccaaatcgacgcatgccagctcctccaaatttggcttcccaaacacccttcttgcacctcgctgtccaccctgtccagcaacctgcacgctcatcagctagcgccagcaagggagctagcgatagggacagcgagtggcagcggcactcacaagtcacgagagtgaagagaagagaagagtgacacacacgcacacgcactctccccttctctctcctcacaaaatcccaaatcccagtcttatcatcctgtcttgctgcctcccttgtgcctcctgcgctcggagctcccacactcccgaggggaaaaagaaagcg

SEQ ID NO: 43911 - DNA, 393 bp, Zea Mays
gcttagcaactaattctgtttttcggctcgcgcgctctgttttcccgcgcgcgctctgcttcctgcccaaaatcacgattcccagctaccctccctcggatctccctcaaatccctagtgcacacacgaacgtatccatgttctagggcgccgtcgttcttccctacagagggtggcatccatctccgcggaagagggtgcgcagaccatcctgctgcaaaaggccaccgttcttcacgtacgctcgttctctgttctgtcagtgccacaagatatgtcagaccatgtgcggtaagccctcctcaacacgatcaccaatttgagtatgcaagctaatgtactatgtgagtagagtagacagtagctattatagttgattgtataatccttttg

SEQ ID NO: 43912 - DNA, 396 bp, Zea Mays
tgtgatggtttcgaaacttgttttatggggtatagaagtcacccctatatgagtattcgtaagcacgcgaaatcgtcttaagtcgtcgctgacttgaatcgaccgcttttgttagtagggcatagtggtcaccccgagttaagtaagcgtgagcatgttgcgccgtctcaagttgctgctgacttgagccgattgctctgttagcagggcacagtggtcaccccgagttaagtaagcgcgagcatgttgcaccgccttaagtcgttgctgacttaagccgattgctccgttagcagggcatagtggtcaccctgggttaagtaagtgtgagcatattgtaccgccttaagtcgtcgccgacttaagtcgattgctccgttagcagggcatagtggt

SEQ ID NO: 43913 - DNA, 409 bp, Zea Mays
ggtgagctaagtcctacgtgagcttcagtgtggggtttggagcgctggtggctgaattggacaaggagcagggctgcattggccgggcgataatgaggcacagcggtccggcgtgcaacggctccgacgagctcgaattcactatggtgccgcatacttaagacaaaatgggggcagggtggagttccttacctaggggtggttctcggggagacttggcttgatgctggtggcttcggtcggctggacggcgaggaagcgtggcgacgatggtctccggtctgcatagggaagagggtgagcaagggcaggacgaagagagagggaagaggggaagccaaggcaggttcctagtgcatcaccctcaggcagagctcaccatggcaagggctacgacagaggctcagtg

SEQ ID NO: 43914 - DNA, 540 bp, Zea Mays
catgaacgaacctaagacgagctagccacggcgaggtgatcacgcggcggtgtttagaccaatttggggaaaacatcaaattggcgagctctggtgagtaattggaggcacggcttgggtggattgggtgcttgactaccatacgaacccgacggcacactcaatttataggctccgggggtggtggcatgtgaatttgggttggcgcggtagcgatcggagaagaaaggggtcactggcgcacaagattagtggctttcaccatggcggctctccggcgatcacccgatatagacgatccgagctattgcgacgtggttaaaggcctgaggcatggcgcaatcgcggtgaacaacacggaacccggtgacggccgtaaggccatgtcgccggcgcaaatgactaagggacagcgcggccacagtgtcccagacctatccacggtgtgtgcttttcaccggcgagctcaatccacagacctgaagcacgaatcgtggcgagcagcaccaatcacggcgaagggtcaccggcggcgagata

SEQ ID NO: 43915 - DNA, 396 bp, Zea Mays
gccaactggtattgcagtaaggatgtttttttctttgaagtgcatttttatcgttagttggtacataggctggaagacattccatttggaggccggtggggagggggagaccagcttcgcatcgatgattatagccagcggagtggttcatcagtcaccgacgaacgatcagggtggttgtgctgagacaaccgcagaattccattatccgtgaggtagaatgatggctagcgatgacgccccaataatcgctttcgcaatatactagctagtaatatgcagatcattatggcaaccacggctttgcagagcatttagcatcagtgcccaccctaacaggacggacagctaaaggcactcgcatagtactttcgttcgctctttcgaactcggaag

SEQ ID NO: 43916 - DNA, 999 bp, Zea Mays
atggctagagggtgatctttgtagtgatggaggcactaacccttacagtgccagaagcactgatgctagaaggggatgttggagcagcaatggcccctccatcaaatgatgccctagtggcccatccatggggtgatgctccacccgacttttgccaatgcctggtgctagcatgagaacccaaaggcgggagaccaaaggacatgccttcactaactatcagatcctgaagctctaccttagaggtagtcgggcccaaagtcatctctatttatcaagggcatcatatgggtcctaagcctaggggacaacttcgacaacccaagactgagggacacccacgcagatggaccttcctatgacagaagagttgccctctaggaggtcgccatttccactagagaccacacttacccatgcacaggagcatgccgaggaggtccatgctatcgcaaccactaattgtggaactggcttcaggagaagtggagcttcttgactggatgcaggaccacttagaagtgaagcttcataactaaatgcattgattagtggaagggagatattagagctccccttccacagggtgcacacgtgcccttgcccccaccactaggcatgcgagcaagcggcgttggagcatgttggggagttcggcgcacggtattgcatcagggggagttggtgagtgggaggcgttggagagggtctaatagccaatgtcaaagccctagaagccgagaggttgagtgggatgttacttgtactagcatatagcccgtgctaacgctacgatcccgaagaggagaggggagaggatgagggatgatccaaataatattgtccattaaatttggatgagtaatggaaagaggttacccaacgatctgaatcgttggttttaatggtgtgttaagtctggatgcaatttgtttggtggatttagtgaaggttatgagtgtggggtgatttggttgggtgagttttgcaaagtttaaa

SEQ ID NO: 43917 - DNA, 474 bp, Zea Mays
acacgtctgcaagtgtcatatcttgccacataacatgtgatttcaatcttcatctttgtccaccaataatgctgttttagatcatgatacatcttagtgcttctaggatgaatagaatagcgactaagatgtgcttcatctagaatttgctggtggatctcatcatttttaggcacaactatgtggttgttaaaccatataactccttgatcatctcttctgaagcagttggctttaccagcctccattttctcatgaatgttttcatacccacatcatttctgggcatcaattattctttgcaggaggactaactcaagctttaagtgatttgaagttcgatgttgaatcattcccaagttcaacttctccatttcttggcacaatgtaatgtcagaagtcttcattgtaagacaatgacagaaagccttgcgacttaacgcatctgccactacattagccttgcctgggtga

SEQ ID NO: 43918 - DNA, 696 bp, Zea Mays
ctagacacggtcatggccgacagcgtgtggggggtgcacgggcgcatggttggccgcgctcttgcttgccagccggggtcgaacgcgttgtcgagtctggtttagtccctttcaaatgctcataggtcgataattcgagtgaatttgagcaaaataattttgtaagatatcctccctaatcttcactctgtcttttgtgtgcaatgattgaagcattttgtggcatggataaggaatggtcttatccccaagactggtctgtcttaagggccaaaaccgaggtcaaaacactgttttgtcttgtcaaacgtgggcgcctcgggctcaaaattttgcaggttgttcctaaggtaatttagcaagactttgctaattggggttattatgtttgaggtttagatcctaatgaacatggtattagttagagggctgaaatcaagctaaggaatgtctgattcttcctttgtttctcaccatttcttgacgtaattaggggttttgttaaacctttttggtacctaacctttaataacttttgttacttatttagtaggctatcacttttattaatggttcatctcatgatgaggtggttcaattggtttttcttactcatttcttgttggtgctccttttgctcttaatgtggtgtgcttagggtttggtcatttccccttctttggttagtgtgagatg

SEQ ID NO: 43919 - DNA, 461 bp, Zea Mays
gttgattctgtggttggattaatcagcgcaagggtactacacaaggaagagctaggctttatctatttcaccttaaaagttgataccttctgctatggaaacataaccatggttagaaatttgcgaggactgctaggacacgaaaagtctccttgtcgcttccattttgttcaaattccctgcaaatataacttcttggaagcttcagggttcagaaacttcccactccttgggtttggtagtactgagtgtaggcagaaaccttcatttgtggaaaagagatgaagatttgcttcatgtatctcattgtcaacttgtcatgatttggaatgtattactaataaactgaggtgttttcgggcttgcatcctggcttgatcccattgaatactctgtgaatgccacccttgtttttgttgctgccatcctatctctctttactttgcaatagtctacctaac

SEQ ID NO: 43920 - DNA, 629 bp, Zea Mays
gctcctctcatctggtcgaacaaatcttctattttggccagagggtacttgttcttgattgtgacttcattcagagctcggtaatcgatgcacatcatcttggtgatgtctttcttttccacgaacaggacagaggcgggctaaggtgaggtacttggtctgatgtaacctttctctgacatctcatctatctgcttcttgagctccaccaattctggttcagataccctgtaggctcttttagtaataggggcggtgccaggaataagctctatggcaaactcaactttccgctcaggtggcatacctggtggatctttagggaacacgtccagaaattctgacacaaccttgatagcctcgagtggatcggcctctttgctatcaatagctatctggtgacaacctccttttctttggctagggtgagactagctcagtcaccacttcctctcctagtggggacgccaacttcaccgtcctcttatcacaactgataactgcttggtacttatctagccaatttatccctaggataacatatattccctgagtacccatcactatcatgttagcggggaactctatcccccttatttccacacttacattcaagcatacactattgg

SEQ ID NO: 43921 - DNA, 314 bp, Zea Mays
gattactctactctgttgtgtttgtcttgagtgactgcttgcttgttttggttttaagtgcatatgagtaacaatgatagtaactaatataattgggttatgtgtaagttactagtccacgtctctctaagtagtaaattaaattgttgaagtctaggatgtaatcagcttcaatcaacgttattttagcaagtgtcgttatatggataaagaaacacaataaatgagatgttaccatttttaatacttgcgtggcaaatctaatattgctaaataaccaaccacattagactagtataataagcagtatgatt

SEQ ID NO: 43922 - DNA, 477 bp, Zea Mays
ctagtgcagtagtgcccctgctggctgcttggacatctataattttgttatgttttcattttcctcccattctcgccctccttctaacctgtccggttgctcgactttctctggtgctcggctggtccttgcttgctgttgttggtcgctctgctcggctgctcctcggaccttggctccgttccgtcgtctctggtgctccggcttggaaaggtatgtttaattttagccatttaattcttgtaattgtgtggatagttagatgtacatttaattccattttgttgctttgaaccttgtagccattgaggtatccggagccaactgtacgttgtagccgttaaacctccttgccgtcgggcttgtgtctgttgtagtcgtcaggctcatggaccttgacgcggctgcagaggaggaggagcgcaggctcgaggactataatgagactgaggatgctaggttcttcattggtttcgg

SEQ ID NO: 43923 - DNA, 708 bp, Zea Mays
cccacgaatacccctggccacggcgtgctcgcagagcatccctgacgtggtccgtaccggccatggccggcgacgactgctacggctaacgaccggggaggcatcactggcttaaggcgacctaggaacacccatttaatcgacacaaaccccactggaaactatatgtccacgatcagggcggaacccgtggtgtcgatcctgtgttcccaataatctacgctcggattggtcaaacggccactacgaggagcttcatgaatacagagagctgctaaaacaaagcttgaatcggacagggccttaccagagagggctggccacggtggagctgttcttcgcggtggcagcgacaaatttggggaaagtttgaaattccagagttcgggtgaacgattaagggtgggagcgggtgctatggctttgggatgacctagcgcagttgcccgggccatcaatttataggaggcttaggcggtggcgcgggatttgatcgggcagtgcgggcggccggagacagagaagaacacagtggctgtaaccgtggcagtcgtcggtgtaacgacgcaaggagaatactcctaagggtgccacgcttgctaacccgcagtaacaagcttcggtcgtggcacaaccgaggtcaccggcgctgatgatcggacacggccgggaggagggatggccgcgtggcagccggagttagtgccc

SEQ ID NO: 43924 - DNA, 290 bp, Zea Mays
gcgggattagaagtagggtaacgattcacccagttaaaatcccagccgtccgatctagatcgaacgtgtgtggataggtttgccttcactggttttggacccttagaactaggtttgggcgcgactgatttgatttgtgcggtcggatcatgatcggacggctcagcccgtccgatacccccttcggccagtaatctttataaagagcccctgcccttttgttatatgaacccgccgtccattgcaacagtggactgagtctaggaaaattttacacgctagaccctgtg

SEQ ID NO: 43925 - DNA, 387 bp, Zea Mays
gtggaaggagccaaagtcttgagtttgagagtgcagagagagtggtggcagcaggggagctaggagaggctacacgtacgcagctacttgataggtagctagcaggctaggcatggacgtggtagtagagcgtcagtacgtattcagtcgtacgttcgtccacggccatgcagtgcagtgcatgcacgcatcagcttttggctgtggcactcacttggcgcctactggggcctgagagctggaaatagccttggtcgcggcctggcctcccatcctttgccgagctttaacccctttgccttttccaggactcctcagctcatctgatctaaccactgtgccttttatctctcttcctggtccatgtctctctctctatagctagag

SEQ ID NO: 43926 - DNA, 414 bp, Zea Mays
aaagtggataagggaattgccttatgttgtttggagcctgagaacccaacctagccgagccctgcatggaaacactcctttcttcatggtctatggatcggaggcagtgctacctgctgatctcaagtttgggacgccaagattgatcttcgaaagcatagcagaagccgaggccaccaggctggaggatgttgatgtacttgaggaagaacgattgaatgcagtaatccaatcagcacggtaccagcagactctaaggcgctatcacgacaaggctgtgcggcaacggttcttttcggtaggagacctcgtcctccgccgaattctaacgggagagggaagacacaagttatcacccttttgggaagggcctttcatagtagcagaagtcactcggcccggatcgtatcgcct

SEQ ID NO: 43927 - DNA, 905 bp, Zea Mays
ccctcatatcagagtgatcgattgccaaggcaggattcgaaacggcaaacagtagtactgaaatttgtggagtctatttggagtctgttgtgtagtccttatgtatgtgaatgaattgtatccttggttatgtgtgttgtgagaacttgcttatgtatccctggttatgtgtgatgaatttatatccctgttgtttctattgcacttcattatgtttggttgatcatgaacttagagtttgaggtcatattcatgattttgtatccttgcccatttttgttttcatgaacctgcagtttgaggtcgcataaaaacctggagtttgaggtcacttaactagctccaccgcgtgcagtttgaggtcaccttgcaacaacaacagttttggtttcacaattattttcacacatgttcaaacacacaatgacatgaatctaaactgaaaacacaagcaagtgcaggttctgacaagtgcagacatattctcacacattcacttgctgaaacttaaaacacacatgttctcacattaaactgaaaacacatatttgctaatacacataggctattgtgcgagaacacacatctgctactacacattcacttgatgaccccaatcaattttagggacctgcgaaacaattattttatgttatgtaaaccattgctctgtgtatgctaaaccctgaacacatgaaagaactataataacagaaccctaaacccataggtacaaatgtgctacaaaattaaacaactaatggtatgggatctaacctcaattccagtaatagccgtaggatccgaaaatcccaaattcagacttggagcagaggaatccaaaacagcaacaacatccattgtttcacaatgtgcaccagcaagaacatcagtgccaatcccac

SEQ ID NO: 43928 - DNA, 549 bp, Zea Mays
ctgaggcctattcaacccgaaggttagttccaacgggctctgaactagcttctcctttttctcaacaattttaacatgaaaccattcagttttccaaccggtcggccatttagtgcggtagctaaccactggtgtcttcatgtccttgcggtacgcaaaattataacagctgaagttcttgtgcagtccatcctccctagccttcgtctgatagtgaagttcgtgtacttggcagaaggcttcagcaagcggctcggctccttggcttcggagagcccagataaacacgctgagcctaacgatagcgttaggagtcagctgatgaagataaatctcaaaatttttcagcacatctgcaatcattccgtgtagaggaaacctcaaccctgctttgaagaagctcttaaaaactaccacttcatcactttctggtttcgggatagtctcttccctgccaaagcgaatcaacttcttctcgacttcatcgaagtagcctagcttcgtcatcatgggcatgtcagcttcggacatagttgacttcccaaaatc

SEQ ID NO: 43929 - DNA, 275 bp, Zea Mays
gtggaactgacgcgcggagcgccctgctaaactactagcagtctagcactactacagctgctatgctagggctcgcgcggcctgacacctagagaccagcgtcgccggcgacgggaacggagatgaagaggtccgcgtccccggttgccccggtttatacgtgcgcgacgagggttcgaggactcgatcggcggacgggggttgtgctgtgtctgtggctggccggttgccccggtttatacgtgcgcgatgagggttcgaggactcgatcggcg

SEQ ID NO: 43930 - DNA, 914 bp, Zea Mays
taatctatgaactcgtttgattaatgtaataaaaatggttgttcaaaaaatgacatatgcttatgcatagtagtaatccctcttctcatctggccggtggccatagatagagctgcgcctgcagcatcacggaacgaggcaagaatccacctaggtaatgaaggagaggacaggggaaggaagctaaacctacctccccacacctctggaaatgccattagatctagcccaagttctagccagccaaacccgactcattgaagtcctcacgagaaacctagagaaccagcgtcagaacggaggaaggccgcaggataggatgggatagttcctaaggctcaagcttcccatgttcataggatcaagcaacctactcgatgcagatgattggccacgcacagtcaaaaagaagctagaggctatcaaatgccccaaagaccaatgtgttcaactggctgtccaccaactctctgggatggcctatgctggtgggacacctttagtgctgctatggggaatgccacatgtgtagaatttgaagcatcatgtgctcatagggatgtctagctcaaggacgacgagttgtcagcaagtacattcacaagttcacaaagcttgcccactatgcaccagatgacgtgagtacagaggtcaagaagatggatcatttcctcaaaggattaaggccggagctcgagactattcttgctagccaagacttccacaacttctctcatctcacgaactaagccatccaagtagaaagggacagggaagaagaaagaggtcatcttaagaggaaatttcaacttctctgatcacaatagcaggaaaggcattagaggactcgatcctttgggtttcctcccaaagggcagaactttaataacctagcagggtttacttcgccgcat

SEQ ID NO: 43931 - DNA, 564 bp, Zea Mays
ttgcttgagtgcggtgttattgtttcactaataaaagctaataaaaatacaatgtgcttatataaactgattaaactttggcatgcataatggagacttcatataattcacagcatgctaaaatgcgctgatagttggatgttgtgttagatttgtatactggcccactatatgcagtgcaacaaataaaaacttaataatactaataattaactcgtgtataaagtataaacacacaagaaaacaaagcagagaccagatcaaatgagtatacatttttgttgcattggtatagaagcctccaaattaaggaattggtacccaatattcacctgccaccattattctatatagtgggcaacatatagtgttatgtatatttatgttaatcaatggaagatggatgtatagctatctagaaaattattggtacagctagctaaatcttgtgggccgatagaattggctagctaattgcaaaggttggttagcttagctagctatatatagattcaatcgagtaccagaatttagtgtcattagtactgatttaggtgttcgaat

SEQ ID NO: 43932 - DNA, 585 bp, Zea Mays
ttagcgtttactaatttggtaacgcagaaaatcgccttgtattgtagccaaaatattgttgaatatttgtagtgatgttagatgtcagtgttacattttagtactagttgttatatgttatttgttaaatatttttaagatcttatatgttattattatatgaaatgtctagttagatgttagagtagaattatatggtagggccaataacatgttatgtaggtggatattttgtcgtgttattattagttgcatgattgttgacacttttgtaggagacttgtcagaccaagtgtgggagcatggagagaaggttggcacgagtttcacgcggacgcaattattgtagggaaaccaagagcggaggcggcaatacctgtttgaaggagcatctcacatatacagggaaggatgtgaagaaatgtccttctgtttgtctggacgttcgtcctccagacataaagacaagggaaaagaagagggaaatgtttaggtagcgacagaggacaggtgaggcagccaaaacattatggtgaatcacacgatgatgaatatgaggttgaacttcaggctgctctacattag

SEQ ID NO: 43933 - DNA, 472 bp, Zea Mays
tgggcctgagattatacaggaagcagaagaacaagttcaacaaataagggagaatttgagaactgcacagtcaaggcagaagagctatgctgatacccggagaagactgcttgagtttaaagagggagattatgtctatttgaaggtgtcaccactccggggtatgagaagattcaaagtcaaaggaaagttgtcccctcgctttattggacccttcttaatcttaaagcgagtgggagaggttgcataccagttggagctaccggatcatcttgcggatgttcatgatgtttttcatgtatctcagctgaagaaatgtctcagggtgcctgaagaacagttaccaatggaggaccttagtgtttaacaaggtttgacttatgctgagtaccccatcaggattcttgatacattgactcgagttacaagaaataaggttataaagatgtgcaaagtgcaatggagtcaccac

SEQ ID NO: 43934 - DNA, 287 bp, Zea Mays
cttctggtgccatctttcttctccacaaataggacaggggcggcccaaggcgaggtgcttggccgaatgtaacctttctctgacagctcatcaatctgcttcttgagtttaaccaattcaggtccagatactctgtaagctctcttaaaaatgggggcagttccaggaagaagctctatggcaaactcaagttttcgctcaggtggcatgcctggtaagtcttttggaaacacatctgggaactcggacacaaccttgataatctcaagtgggtctgcttcactact

SEQ ID NO: 43935 - DNA, 632 bp, Zea Mays
tggaattagtatgaattttctaaggattaaacaagttttaatgattattcttacgctaaaaatcctttcccatatttattcatctaatttaactgttctccggactgcgcactaattaccagaaaaagcagggtcccaggcgcaagagttccaggacacagtgcacagttacctaggacggcgggttggtttcttgataactaaggggctcttaagcaaaatgtcccagggaaggggtacgagtgatcaccgaccgttggatcagaagcccacgaccctgattagatcatacccacctcgaaccggtatacgccccgcgaagcgatacgctaaataaaattagagccatccatatttagatccgagggattagatcacgctgtcgaaccgttatcctgggatctaatcccagccgcacatagccgatctaatggcccggggccgttcttcttcctttctccaaccagacacggcggcgctccaagcatggtcacaatttcacatcgacgagcccccagacccgtgcgctcgtctcgccggcgtacctggcaaatgcgccagtccctccgcagccctaagcgcgacacactaatctagaaagggctgagatgtgagcccgtgttcgacaccgc

SEQ ID NO: 43936 - DNA, 589 bp, Zea Mays
ttgggacaggacgtctcgcgtcagagcggtatacaaggaatagaaaccaaaattgttatgatattgctccttccccatcgccttcgtctgataagataattcatgtatattatagaagcagtcgatatctggttccaacccctggctcctcattgtccagatgaaatctcgattttgatcaaagcttcgggggtgagttgatgaagatgtatctcgaatcttttaagtattttgaccagcattttatgcaaaggaaaccgaaggccagcctttgtaaacaaccacttcattagcttcaggaagaggaacaatattctctccttcggccctcactatagttgtatcacggaaatatttacccttcattgcttcaatctgtcctctcttaacagtggattttccaaacacaacatgacttggcctccacggccgatctttggcgtcattgttgtcactctccacatcaaaatcctcactatcactagaatccccagatagtccagctaaaatttcatcagtaatcttttcaacattggttcttcccatggcttcataaaaaccagctagtgcggggtccacgcttttcttc

SEQ ID NO: 43937 - DNA, 995 bp, Zea Mays
cattacacagtccaaaagccatgaccaagaattcaaaatgcccatggtgagtgcgaaaagccgtcttttccacatctgcttggtgcatccgaacctgatggtacgctgatcgcaaatccagtttggtgaagaattgagccccatgcagttcatcaagcaattcttctactactgggattgggaatttatccttaatagtcgtggcattcaactcacgataatccacacaaaaacgtcaagacccatttgccttgtgcactaagagcaccggtgaagagaatggagaacgactaggccgaatgataccttgtgccagcatctcaatacactaacgctcaatttcatccttctggcagtgtgggtaccgatagggtcggacaaccactggatccgacccttccttcaaacaaatgtgatgatcacacggacgggagggtggtaggccctgtggctcgtgaaacagatccttaaatgtgtccaggatcccctgcagatgaaggtcatgttcaacttccaaagtgcgtaactgaactgacttcccatgatgtagaaggccttacaaactgacatgtccaccctcgaggaaaaaagacatttggagggagtcaaagttccagctgatatcacccaatttctagagccattgcaccccgagaactacatcaaacccttccatgggaatcaccaagaaggaatctgagaaggaatgatcctgtataccaaactgaacggccgacagacgccccaaacatggcaatcgagctccattggccacctacacctgctgcttggttcctaacagttgtggaatctggagcaaggaagccgcatggctgctaatgaaattgtgtgtgcttccactatccaccaagcccactagtcgatgttgccccataatcagaatgacctgcattgtgcggctgaccttcaacccatttatggctagcgcagaaagggttggttccttctcaatcacatcatcctcttcatcctcg

SEQ ID NO: 43938 - DNA, 478 bp, Zea Mays
cggaagtccaccacctgtttttgacacacaacttagtgcaccaatttcacataacaatgctcataaacgacgccgcacctacgcacaatttcaaaccccgccgcgggtaacaactctccccacacccaccaaactgcagtggcgctgcttaacaatttcataactttaaaattatgacagcagtggtaacaaacaaaacctccaaaggcatctacataaaattccccacaagttttgtatacaatttataattaaattccaacatctaattagcccaaaacagtccacaagatgaaccctgcaatctgtttttttggcagcaacatacccggattcaaacagcaatatcttttaaaatataattccgaatcgagcgcataagtactcattggaaaggtaagacaaatctctacatgattctcatactgattatcactaattacccacgaaaaattcacagaaactgctaatactactg

SEQ ID NO: 43939 - DNA, 369 bp, Zea Mays
cggcccatttgcacaaccgggctagcccgagcccgcacacatataaatcccagttttcaggtcaacaaacacaactgtcacaaaattttctgtctactatctactgtctcaggtcacaaaatgaagtcccaaaatcacagttacttcacagtctcacagatttctcaggtcacaaaatgaagtcacaaaatcacagttcagtctcatatactataaatacagttcacacttctcaggtcacaaaatgaagtcacacaatcacagttatttcacagtctcacagtcacagatagtagtagttagtctcatagactataaatacagttctcacttctcacttctcaggtcacaaaatgaagtcacaaaatc

SEQ ID NO: 43940 - DNA, 817 bp, Zea Mays
ccatcccggaggcggtaggcgtggttttatccgaagccatctgccagggggagagaattactactatgcatatgccaatttttttcttcaatcatgttattttattcatcacacaagttcattacaagcatatagttaccacaagtcacactacacgcgagtgctttctaaggtgcttccgaactccctttctaaagtgtccccaaattccttgagaaggtcgtcaaggctagctagggacatatcctcgacgtcggacaggttctctatcctggagggaggcagtgctggtggggcttcctttttccgctcagtctggcatgcttggctcttggtcctcttccggatcttcttagtgggggcgagcttctttaacttcttgtcgtaatccatcttcagggttcggtaggcttcacgagtgttggcctcttcaccttctgctatttcgagactttcttggagagacgccttctccttcttaagttccttgacctgttgctctaagctttccactcgggagtttaggtgggtgtagtgggaggaaaggtcgtcatagtggttatcaagggtgtggagatatccggccatgtagacgatggtggggtcatcctcagtaggatctcttcctaacagggcctgaagtcttttcctccaggtaggggtatttttgttgctaggtggaaagtattgaaggggggtctcaaagacctccctgctgtagttttggcatagctgtcggagggcttttcgggcaacattttggcaagtgtctgggaagcggtgtccagtgaaggtgacttggaagggagggtggttt

SEQ ID NO: 43941 - DNA, 1497 bp, Zea Mays
tgtcgaaccacacggcggtcaagtgttggcatcgcatggacgagtcctaccaggaggaacaacccttcgccgcaactgctaccactacttcctacaaggtcgatccctactggtactccgacacgggggctaccgatcacatcactagtgatctggaccgcctagcccttcgtgaacaataccatggtgctgaaaatgttcaagttgataacggggcaggtttgcaaattatgcatattggttcttgttcaattaatactgctactagacctctatccttaaacaatgtcctccatgttcttgaaattgctaaacatctccttttagttcataaattagcccatgataataatgtattttttgagtttcatccatattatttttttatcaaggacataaccatgaggcaagttcttctggaaggcaaaagtgaagccgacctctatcccatcaagctctccgacattgaaaccttcaaacaagcccttcttcatgtcaaggtgtccccagatcagtggcatgctcggttcggccatccctcgaaccaagttgttaggtctattttaagactgaataatcttccgtgctctaaggagtcgagtcccaccatatgtaatgcttgtcaattaggcaagagtcaccaacttccatacaacaatgctattcatcgttctacacgtcctctagaacttgttttctctgatgtttggggtcctgcccccacatccgttggtgggtattcttattatatcagctttatcgatgactacagcaaattcacttggctttacttgctgcgcgatagaactgaggtccagcgtatcttcttgcagtttcaagctcatgtagaacgccttcttgatgctaaaatcaaatgtgttcaatccgattggggtggagagtaccaaaaacttcacaatcaattttttcgttcgcttggtatttctcaccatgtgtcttgtcctcacacccaccaacaaaatggctcggccgagcgcaaacatcgtcacattgttgaaaccgggctctccctcttagctcatgcgtccatgcctataaaattttgggatgaagcttttgtcactgccgcctatcttatcaaccggttgctaacacgtgttattgataatctatgtccgctagagcgtttgttcaaagctccacccaattataacatgcttcgaattttcggttgtgcgtgttggccccatttaagaccttataacaaacacaaactctcctttcgatctaaagggtgtgtgttccttgggtatagttccagccacaaaggttacaagcgccttgacatggattccggtcgtgtgtacatctctcgtgatgtagtttttgatgagagcaaatttccctttgccactgatcctctatctcgtagcgatcacccacaaaccaaccaaactagtccaccagatcgtagcagtgttattttgaacactaacaatatgcatttgtttcctgctaataccatggctgcagctc

SEQ ID NO: 43942 - DNA, 327 bp, Zea Mays
ttcttgaatccagactggtgtagcaattgatatagcagctagctgaacacctgctggcactctggacaaggcatctgcagccttattttcactccccttcttgtattgcacagtaaactgtaatcctgccaactttgccatggcctttttttgtaggtcggtggccaatgattggtcctgtaaatgactcaagcttttatggtctgatctgataacaaatgaccccctttgtaagtagcatctccacttgtcgactgccatcaaaattgccaagaactccttttcataggtggacaatttgctattgttgaccccaagtgccttgct

SEQ ID NO: 43943 - DNA, 531 bp, Zea Mays
aaattgaatttttttttcagtggactgtcattcaagccagcaaaacattaactgaaacttcccttggtcacaagcctaattactctgtagctcaacattacacaactcgtcatgctagctctgaaacagaatcttaatgactctgaaagcaacgcaccaagattctcacatggaaaaaataacaatacagaagttagtttcataatgtaaatctatctaatgatcctgccacgcacaccgtctgaactgagacactacgcctttttttgggcatgggaatcacaaggtgccgtttggtggacagaaaagactgaagtggaccaacatgtctgtaggttatagagcaattgcaatcaatctgtacagagaaaatagggtagctcttacttgtaactcttagtggaaaactactagtaacagagacaagtgttgagatggtagtgtctattccaaccattccacaatttagtgcttaccaagtacagtacaagcaccttgactagccagcatgtttcaatgaacaaagcatta

SEQ ID NO: 43944 - DNA, 472 bp, Zea Mays
gcccttcaaatttgtcttctagttttcggacggctgtatagtacttgcccatagaatcattcgagcaatcccattctttatttatctgacttatgaccaccagtgaatctccttataccatcaacctcttaatacacagtgatatggcaatgttcaatctgtggatcagagcttcatattctgctgcattgttggatgctgaaaataataactgaagagcatattttagttgttcacctccaggggcaatgaaaaggatccctgcacctgctccctacagtttcagcgaaccatcgaagtacatccgccacacttctgcagccttcgggttatctggtacttgttgttcgatccactctaatacgaagtcaactagcgcttgagtctttatcgcagtctgaggccgaaactcaatgtcgtgagctcctagctcgtaggcccacttgtctattcttccaatggcttctttgtt

SEQ ID NO: 43945 - DNA, 1804 bp, Zea Mays
ttttgcttcggatatgggcagtccttgatgaaatgtccggactttccacaattgaagcaaccactggaggaactgggaaggccagggaaacgagtaccaggggcactcggctgattggtcggagcggggcaggagtgggacgaataaatacgggttgtttgaatggatatgaaggtgggcgaggtgaagaacagtttggattgaaagtttgaattaccaaccttgttctcttttccggtccctgagttgatctttcacccgcatatccctttgattttcggtgtcccgcattttttgcttcaactgccagtgttgtactgacaactctgctgtatgttaggtccaaacatgttgttttcttacgctggagtctgttatttagtcccctcataaaacaattcttctttttaggtctatatccacgtgatcaatagcgtactgggagaggtgattgaatttattaagatactgcatcacagaatctcccccttgcttcagtcggatgaactcttctagcttcatttgtagcaccccctccgaaacataatgttgcctaaatgccaacttgaactcttcccaagtgacttgatgttccgcaggttggatggtggaaaagtttgcccaccaggtgctggcgaggcctcttaactgttgagtggcaaaaaggggcttctgtacttcggtgcatcggattagctcgaatttatgttccatcacttgcacccattcgtcagcttccaagggctcctctgccttgatgaagagtggtggttgggttttggagaactctagataggtactatctcgtggtccgtgaggggggactcctcttccgtgctgttgaaattggttgcccgccatttcgcgcagaaagcgtgtgttgtcggctgtggcgttgaccaaggcagcgatagcctcggccagggtaggaggtactagtggcggattgggagtgtcctccccgccgcaggatgtacctgccccatcatgagcatgggtccgggatggcatctgaggcaaaaaaacatttggaaatataacatgtcatacaccatctttatttcattacggaacagtaataattatacataccccattatacaactcagctgccttacttattttacataagtacattacttagactatactactctaatcttcttcaaccttagctgttccgctgcctgcttcaggagactgttcatctgcaagattcatggaaggaagggcttcaaaaaggtcaatacccccatcagatcctccatttggtgttccagatggtctagctcccatcgggtggcacatttgggtgcagtcgatcatacaatacatgcacttcttcatgcaaggtgttgcagtacgcttgcagattttcgagggatgcactaagttccgctactcgagctagagctttggcttcatagtcccaagcgaaagagcgcgagttgacagcccagtcaatggccatatcgcgttccaaaattttgtactgtagacgattaacttcggctggtagttcaacaatgcggcgactatcgcgcgcacactccctacacccgtggtgtagttcggatctaaggcgatccactctggcctccaactccccgatagggtcgttgctttcactgctgcttccttcatgcctggatgccagctgatgtcgaggcacactctgaggcccagttgatttgcactgggtagtttttgtgcgcgccatatctccataagaggggaagatttattagtatagtttgaacatgatgcatgcataacctaataattatgggatccatcttgcgtt

SEQ ID NO: 43946 - DNA, 792 bp, Zea Mays
gtggcagtaacaccaggggtgttacatccttcccccataaaagaatctcgtcccgagattaaaagtcctagggcaagtaatggaaaaggaaacacgacatatctttatttccttatttttggtacaaggcaggggtggtatggggttctttcctctattacaacaaatgtgcatcctttacaaattacatcaggctaaaaagcctgggaaattcttttctaagaagtcttgagtttcccatgtagcctcatcttccgtgtgttggttccactttatcttgtaaaacttgagagtttttctttggataattctgtccttttgatccaagactcgaacaggatgctcggaatatgtcaagtctggttctaaggcaacatccgttacttcaatggttcgattgggaacccgaagacacttcttcaattgagacacgtggaacacattatgtactgcagacaaggtttcgggtaactggtatgccactggtccacattgttcaaggataggaaagggaccaatataccggggtgcaagcttcccttttaccccgaaacgtgatacacccttcattggtgaaactttcatgtagacataatctccaactagaaagtacaagggtatccggcgtttgtctgcgtaactcttctgtcgggcttgggcttccttcatattgtgaattattcattgaactctctcttctgtctcctttaccatatcaggcctgaagaagtttctttcaccaggttcagaccagtttaacggagtacgacatcgtcgtccatataaagcttc

SEQ ID NO: 43947 - DNA, 320 bp, Zea Mays
ttgcttgtttggtacaagaatttggaaacattgatttcttgtgtcccagaacctccagatataatcgttaaccgactcataccacccctattgtagagttgctaaatcgatcaaatctaactcatattcctcgaagaaaaaaatgctcatggactttttgctcgaaatctccccacaagtaaacggagttaggtggctggtaaggcgtaccatgcaaacgcggtaccagataaggataaacaaaaataagcgaacttggaaagcttccctattggccaattctcctaactgtactaggaactagcctatgtgctcatgcg

SEQ ID NO: 43948 - DNA, 441 bp, Zea Mays
gctgaatcaagaatcttcactggtttctcctgatattgaaggtctttctgaatctgcactgtctcttcttcgaggtgactttctggtgcttgcaggcatttgcggagctgggacacgtggaacacattgtggatgtcggacatggattctggtagttccaggcggtatgcggcgggtcctaccttgccaatgatgggatagggacctacaaaacgtggggctagcttccctttgacttggaacctcctgacaccacgcattggagaaaccttaaggtagacgaagtctccttcctcaaatcggagttccctccgcctgttgtctgcgtaactcttctgtcgactctgagcttcaagcaaccttctgcggatcagtgtaactttctcctctgcctccttgacaaaggcaggtccttctagtgctttttcccccacgttggac

SEQ ID NO: 43949 - DNA, 568 bp, Zea Mays
gcttcaatatcttcgggggagggtcgcactctatggcccgggctaccatcacgagcaggagggttggagacaaattcagagaatagcctaattggaggcaggttccacgcagagtaagctaagggagcaccagcattcgagaccctgcccctcagaatcatatccaatcgactcagcaagtcctcattgggaatctatctgtttgtgacccgggtggaatcattgatgccgacatacaaatatgcaagataaactctatccttcaagggttgaatgttcttgaagacaaagtcagcgaccacgacctcagcagtcagaccctatccttcaacaagcagatttcagcaagtagcactttggcctcggttatctctgaacaagtgggagactctacccagctgggcgtacgaacgcctggttgcctccctgaccaagggggagggatttgccgtgattttccatgatgaaccactcaagacgccatcccttaatgttgtcctgaaaaaatggaaacttgaagaatagagttagggtttaagtgtgtcagatttaagtcgtaaaaataaag

SEQ ID NO: 43950 - DNA, 286 bp, Zea Mays
gtttagttttgcctttacctttcccatctctcgaccataccttggtgattacattatgtctatgatctataatctccaatatcctatcccaatttgagagcggtgttttacttatcttacccttggcgatatcctcttctttaccacatgcaagccttgatgtaactccattctttattgtacttataccactggcccttctatgccttcatcttttctcttatacccttgtatgttatcacctttgacccttgtgatattgtggtcttccacctagatgctcatc

SEQ ID NO: 43951 - DNA, 750 bp, Zea Mays
atttctttgaactacagggtgctctgtataaattctggggcctgctttatatttattttacacgtataaggacgacgggttgttaatcgagaagccaagggggttttacgataatctgccacgatagtatcacatgcatcacactcgagccctcggatcaaacgtcaatggtcaggatcatattacataaacaacaaaccggtatgcaatctagggtcatcggatcctgatccaacggatcctgatccaacggatcacaatggatcccaaactacatgagctcccaaccacctgatcaaagatctacgatgacgcgaatcctagccaaaacattattctaccctctaatcagggtcgtccatcgctggatccacgaccgcacgccccttcctcatcctgtcacggccagaatagtggtgtcgccgccccatacggctgcgagttcgcgagactgccaccccattccagcagtaggtcataactcgtgcgcgaactcaagaaaaacagagaggggatcttcatgagcttgatagaagagaccataccggcggtaaggaggccgaagcgagctgttcatggagtggggcgacttcgcggcgacgtggcaactatggcgagaaattcgcaccgcaccagggttctacacgtggaattggcgatgcccaaaactcacacaagtcccgacaaggcgcccggaccgccttcctagcccttggcaacaacaccagcaagacccacgtttgatggcac

SEQ ID NO: 43952 - DNA, 804 bp, Zea Mays
gtcagactggggatggttctaaaactgagtttttagtgacaattctccaactttgaagctaaattgtggttgatccagtgaggttaagaccatggtcactatgacaaatatgaaggctgtatataggagtacaactatgctaaagccaagcaggtatgttgctgtttggaatagagagtaaaagtgacctaaacttgctcggtctggcggtttcgatgagccattcaggatcaacagtagctgaaaaagacctttggtttagagaacccgacgccgatgatcttaagccatgattcacgtttgcctgagagattcgtgctcaaagaagagtgaataactgtgggagggtaaaagatcggtaggggaaagaacttggctctaggtcagcttgtccgctatgcccacttgcgctgcgacgtggctgagcggccgttgccgcagtggtcgccgtcattctctgtcgcaacacgccgtgactcggttctccatgtcgccgtgatcgtggcacgcagtaaatcactgcctctgagccatttcaccgctgcgcgccacggagagcagctctagccagttatctgatcgcgccgatgagctagagcttagccaaaatccgcggcgtgtgtgatcggaccctttgaattcagtaccctccctgctccctcttgttacgcacctagcgcaccacccctcaccccagttcatccaccatagcccaagaaatctacatttccccaaaatcggctagaacgctgccgtgaaacacctcgtcgtggccagcccttctcaggttagttcatgtccctc

SEQ ID NO: 43953 - DNA, 474 bp, Zea Mays
ctttaaagcgcgaaatcatatatagattttttttgctttgagtttttaaattcgcgaggaaagagggaaacagctttgtccgggttgctttggtagggcgactctgggctgtccatttctgaaatgtactacacctgacctgagcctagtgtaggtgtgtgccttcgcccagttcagatcgtgattcgtgtgagcttgtttattcccatactactactactgcagggtgcagggccatgagccatgagccatgaccagcgttgtccgggtgagcagggcagattcaggcattcatgattcgagatttaattacaataatactgaggtgagggcgctctgaatggcactgaatacctaccataggaatggaattctttataaactaccatgatggcgtgaagagtgaagaccgaacttattcaaccgccaaagccgggtcaagatcagttttcacctttcactggccctttcttt

SEQ ID NO: 43954 - DNA, 313 bp, Zea Mays
gcttaatcaacattggacatcggtaaattgagaccctatgttcgattgcgcatgatgtggtggaagacctctcggacatgtctctagctggtgtagcccgtccttcgtggcggagcagacctcagcgagctggcctgcagcctcccgcacctcagcttcctgctgtcggtgagtgggaccgacgacctaactctaccataatagttcagtggattgtacttagcctggtgctgtcaatgcctgctatcgacttacagacttacaaggaaataatcattgacttcaaagtctcatgcgacaagactattctaat

SEQ ID NO: 43955 - DNA, 497 bp, Zea Mays
caccggccaagatatattgaaacgaccatagtgccaaaatttggtgaacagacatcttccgctgccgaagcggaacaagctactcccgccactcggagcgctgaggaattgactatagtgccgaagatgcctatagttgagccagtcaaagccgaagatggggcagccaaaaagccaaagtttaaaaaaataatagtgctgccagaaattccgagcccaccggtagaagcataattgccgaaggttgcaaaagctcccaccacaactcccaagaggagaagaatggctagcgtgctagacactgtcatggagataacaagagcattgactcctgctcctgtaaaaaatgttgccgaagctgctacgactcatactgaaaccgaagctgggccttcattgcctactgagacgaagcctgccataactgaggaaagagctgagaaagaatctccagatattggcatagctatggagaaggaagtggccgaagaagctaa

SEQ ID NO: 43956 - DNA, 733 bp, Zea Mays
gcgaaagtttctaagtttcattatagatgggtcctcgggttattattcacattggtctctaactacgcagaaaaccccctagggttctgctaaatcaaactcgcggtccttcccctaatgaaatagtaaccgtggcgaaggaaaggggcggaggggcttaccgacggcgagattgctccggtgaagtggtcgagggtgtagtggaggtcttgatggtcatgccgatgtgcggatcgtcttcggtgatggtcggagtaggtcggtccacgtgcgcaggcgggcgagctcgtcggcgacgaggactctggcctaaccagggtggtaaagttcaattgaactggtcagtgagcttcaccagaggtcagggaagacataggcgcgaggaattggaaaatggctcaccagatagctcggttcacacatggtggcgggtgaccgaagtccggcgagggtgattccgcttctccggtgaggcaatgcctcggctcaagcttggagaagcttcacagcctctcggggaagctgtccaggggctagggcgaggctgggagttgacagaaaagactggccacaacggccgtgcttgggtagtgatggcgggcggtggcgcttgctttccacggtgaactctgatgatctctggctcgggcagggctctaggtgcacgagtgcaaacggctaaggcctgtgggggaacttataggcgagggcaaggtacagacgcatggggcgg

SEQ ID NO: 43957 - DNA, 399 bp, Zea Mays
gcagccgagaccgatcaagagcgttggaggcgcactaggagcgataggttgcgacgcaggtaggctaggggctaccaaggccgacagaatgtgctagaggcagtcatagcaggtggcgcgatgactgtgaccggtgggggcaagggtaaaatgatccaggatatggacgggtgtagccagactggagcaggcaaatgtgttagccgtagtggggcaaggtgcaccgaacgacgatggcgtgatgggtagatgggcatgtttggtttcctacctaagttgccaaaatctttttgaagaaaagggctaagccacccattttcattaataaatggaattaagaagtaacaaccagagttaccaccaaaaggaacataccgaggtttacacacaaacctccgg

SEQ ID NO: 43958 - DNA, 318 bp, Zea Mays
ttttccaatcccaagcaagtcaaacttattattaacttgtaactaaaaccatatctgtacatctatcttctcttttctatatcactatcccaacttctctatatttagccttgtcgttgatcacttataaatatcaaacacattagctgtgtgtgttggtactatatatacgctagcaagcactagcttggtctacagttaaccatgtcgatgaacaagaatcatttgatcgctggcttcttcttcttcaccaccctggccttgctcatggcgtcataccgtgagtttactgcaggatcagagaaacatatatacata

SEQ ID NO: 43959 - DNA, 533 bp, Zea Mays
aacctcagtaaaggtacctataagccttgcacgctcgacagcttcttcagctcgcttggcttcttcttgagcgtcgtgagattcttttccattttttctgatcgctttatcagctatcctcacgaccgcccttcatccacacatcgaagtaaaatctcccacccagtgaagaagctttagccgaagggtctttggcatcatccgttgagaaaacaaatcctggctaagctgcagccttaacatgttcacaaccgactttctctaagatcaccgagacccctcgtgcgccagcgaacgtgcagaagtctccccgatcacttaaaatttcatcaaaggcttcgacttctcgctgatccagtggacgactccatcggggtcaccacggatgaacctctgctcgaaagagtatgctcccacctttgcaaaattgttctttagattcatggcgcattccaacgttattttatagcatctctctttggagtcacggagctcttcggcattcttttatgcccttgatttttcaatttcgc

SEQ ID NO: 43960 - DNA, 880 bp, Zea Mays
gcaatattaaccagaagaaacacttacagtggaatcaaatattgtgatgaacctgctatatttgcttgggaactcatgaatgagcctagatgtgtgtccaattcatcgggtccgtatattcaggtagattactatgtgaagaaccccttcgcttagaaagtgggcatatgagaaatcattaattccctatcattaaacctggagtttatttgcagtcttggatagaagaaatggcagcatatattaagagtttggacagaaagcatcttattacagtgggtactgaaggattttatggccctgggagaggtgagagactgggcgtaaatcctggagactgggcagcttcagtctgctctgactttatacagaactcagctgtcaaagatattgattttgcctcggttcacgcctatcctgatagctggtctgtatcattacattttcattactgaacaattttaattgtaccatgtcattgatgcatctttgctacaggctaccaaaggcaagtatggaagaaaaagtcaagtacctttctgtctgggttgattcacacttgaatgatagtgaatacgtcttgagaaagcctgtcttgtttacagaagtaggttacctccaacatgcagaagctaacagcacagttgatggagacattcttctaaaagttgtctatgataaactatacgattcggcaaaaaagctgcaagcaggaagtggcgctcttatttggcagttgatggtcgaaggcacgcagatgtaccatgatgacttctccatggtggcacgggatcgtccgtccacatataagctgatgaaggagcagtcatgccgactgcagagtctatatggaaaagagggagaccctacttggaaatgc

SEQ ID NO: 43961 - DNA, 481 bp, Zea Mays
atgttaggggtagcttggaaatcaaactctttgagtttctcaaagatgaaatcccattttgttctgtcatcaccatatagccaccttctgaattcaatctacatgcctctttctaacacaactttcactaaaatttctttatcattacaaatctcatacaagtcaggttcagaaacacataaaggttctttaaaaagccaacaatcttcccaaaatctgatttaacctcttgattttgtgacaatctatcttcctttgatattgcacttccttattttcaacaaatcactccaaacccaagaatcagatatcttgggacaaacattgtgaacacatttgccatgaagatatttttatagatgatttcctgccacattccattttcggtttccaattttccaccataacttgcataacagactcatgttcagcaactttaagtctttaataccaagcccacctttcttttttcaatgcaaac

SEQ ID NO: 43962 - DNA, 427 bp, Zea Mays
gggaaaatggcgccgcgacgactctgggtggaattgggaggtgagattggggctacacggccataaggaactatagtttcaccgtgcacactcaatttgggaagaggtggtagaggcagtgcgaattttgggcttcaatcaactcactggtggagatgtgaatacctcgccgtggttcatagcgctatttatagccacggcggtccggctaatgattagcgaccgtggaaggctttgcatacgcatggtaaccacgtatagaagaggtacagtaagggaggagcaaggcatgggtgacaccgcggcggaaagcactgagtcacggcaatcgctggtgaatatcttcggccagcacgactgagctcgcgggatgatgccacgtccaaagttcccctcccccggatcgatccccccactggatcactcg

SEQ ID NO: 43963 - DNA, 333 bp, Zea Mays
gtgcaaacttgtgtgtgaatagcgcctaacttctcgcctacgtgaacgacatatgacgtcgattctgtaagattacacgtacgcattttatctccctatcgcctctttctgatccatttaagacctcgctaaaattctaatcctagaacctggatgtctaaaactgtttttgctaaaaaacgaaaggaaaaacccttcttttctttttccttagctcttaactccacgctgacatctaggatcttttcggcttcgtcctcacatagctgtcgcctccctctagtggacgtctccctcacaccaccgctggcacgcttgtaccttgcatccctg

SEQ ID NO: 43964 - DNA, 848 bp, Zea Mays
cactggttgtattgtactttgaggcacataggaaaaatgtgtgtgcttatattggtagtaaagtgcacaacatcaggccaatgctgccaagcaaagatttttatacgcagagatgtatagtccagctcgtttttatcactgtccatggtttacccaattactcataccgctctgaaattgggtatcgatttatgcaacatttttaggtattatacttttgagagagaactaataacaatagtcaattatttgttatgttgtcagcagggcaaacatttctcctcatattatataccaatttgttctataaagcattatttcgatctcttcgttgttcggcaaaaagagaagctttggaatagaatatacaaggccaataattcattttatctgggaaaatcaccatataactagcttttgatgaagcaaatgatgataactgcttggcaagaatgaaataggactcgtgtccacctaggatccgtcttcaacaatagataatactgctctcatacgaaggagtcatcatgactagggagaatgcaacaggtctccataagatctttatatttttatcacaaattatcaccacttacaatctcgtggtcaagacttatggctcttctggtgccaaggaccaaggacatattaatgcctaatttagcttcaagctttgtgttgatgtgggatttcatggctatttttctactcttcttacttctggtagatcatatatagattatggtaagcatgtcaaggggtgaaatctaatgtagttctgctacataaaccccaattttatttccattcaatattgacctttaccattcggcttattatataccata

SEQ ID NO: 43965 - DNA, 992 bp, Zea Mays
aaattatacgcctcgtccacgttactaaatgtcataccgactttaggtatcaatcttatatcaatattgtccggctgcgcacagaaatttaacatttacgattcaatagcgactaaatttaacgtaatatgggagaacttacgtggctttgaagaatatgaggtgtgtcttgttcatgcggcccaatatgtctcatagggatgtgcttctctgcgccgaccacttctgctgtttttgtgtgctcttcgatatgtccaggtgccctcaatgccgccggaggagtaacagagacaccctctgtgtatgaggcgattgcagacgctacaggatgcatgtccattgaaacagacgtacctgctgacttatgcacagatgttacaggcagaatgtcatcgccagcgccggtggtggacatcttctcgccgcccatcgccggtcggacctctcacttccgccaccgctaaccgccgccaatatttcagatggacgagcgaacgtggacgcggctgtaaagctatatatatatatatggatacggacggtgagatagtttgagtgttgccacctctctgttcgtgtgggctcgtcagctcgatgttggccggggacagacggacagtgaggcaaaacgtaggatctgacgacgggacttcacataaagcaggtctagctagtgcctacaatacgctgttacgccctacgtactcgtacccggcacagcacaggggactatagtataggagagtgtgcgtgtgtggctgtgtgctcactccactttcgcatccttttcctgtctcagttgattgatgtgtcccgagaccattggtgccatgtcgggtcagcttgcttctcgttcttcgatctccttccttgccttcctgccatttttggggtcaggaggagtcaggacacacgaccggtgttgattgttgactgaccggtgctcgcttggccatctgctgaaatttcagcgcatcaaatgagtgtgtttc

SEQ ID NO: 43966 - DNA, 696 bp, Zea Mays
ggcgaagaaggccatcgaggatttggcggccgcgctacgtgaagtgtcgtcagaggcaagcgaggccaaggaaagggtccttgcgaagcaggcagagctagacagtgcccagcttcagatgtcagaactgaaggcggcgatgaagaacgcagaggaaatgtaccagttaaggataggcgaaccgaactacgagactgaatgcctcaggaagacgatcgagaggatgggttcggaggccaagatttcgaaggatgattgggtatcgaaagaggccgggtttgttgatatgctcaagagatctgatgatggaattagctctgtccagctggaaatgaacaggcttacagagtctctgagagctgcagagaaccaagtgcaggagctcggggcacataagacccagctgctcagtaagctgcaggaattcgaagtccaggcaacgaatactgaagaagaagcgaaggcagagagcgcgcacctcaaagaccttctgtcctccaaggacaaggagctgcttgctctgaatcatgaactcgccgagctgcgactaagagagagcgccgcactagagaaagccagcgaggtctccaagttgctcagagagataacagcgagaaaggccgtggtggaagaaagcactgacaagtccaaggccctgctcaccaagctggaaatggacagtgtgctcgaatcact

SEQ ID NO: 43967 - DNA, 271 bp, Zea Mays
aggaactttttcagtgcctctagagcttcctgtgcctcagtggtccactgaaacttgtccacctttttgagcagtttgtagaatggcatgcctttctcgcctagccttgatatgaacctgctcagggctaccatgcatccagtaagcctctgtaccttttttctgatcgtggcgctcccattctcattatggcctcgattttttctaggttgtcttcaattcctcggtggctgacaatgaatctgagtaacttccctgcttgtaatccgaa

SEQ ID NO: 43968 - DNA, 384 bp, Zea Mays
tacgggtaagctagatagggatgcaagtagcagattatgctagattcttgcatagggaaaattatgtagtattgtgggggtaacaagtaggttccttttttgaaggtacacgtgagcatgcctatactatgccagatgcttgatcagttcaaaaacatttgtgtgggggagctgtctttattcttgtttatttatcagttcaaacagattgtcatgaacatgcttgattgccttcgtttaacagagaaaccaatagtatataaaatcatgggcagaggtcctcgaaccatggtgtactatagtggccctttgtactctgtatctaatcatctaaccttagatgcaggcattagtttatgtgctgataccgtcatacgccgttgt

SEQ ID NO: 43969 - DNA, 354 bp, Zea Mays
ttgtggtcgagatttaattaacgcgggatcgaactacatccttccgattcatatcggatggccagtacaccacgggctgaactggtaagctagatataatcatgaccgtccaacagagcatcaacggcacacggtgagttgtccctaaatctaatcctagatctaatcctagccgcctatctcacaaccaagggccatcctttatcttcttccccagagccgtagaacacgacagcgcccacagtacatgcagttgcgccatcatagaagcacccggttcatgcattcctgaccccagcttccaatccacacgaccctaagaaaaatagaagtgaaagtgatatgtgggtgttg

SEQ ID NO: 43970 - DNA, 625 bp, Zea Mays
gaaatataaattcatatttcatataaagagaaggtggaaggttgtatggaataataaagacatgccaacatgagtatgatgatgccatttgacaagaaggtgtgaagccatcgatcgcgaggccgattcgaacattcctcggtttagctgcaaagtctggatcaaacgtgtcgagagccttccaagcatccccatctgaagggtgcacgttacctcatcgttctcacggacaccttctttgtgccatcgcatgtgcatagcggttttttagatagaaacaatcgtttcactcgaggagttagtggcaagtagtgaagctgcttatgtgcaacatttgtcatcaccttgtcaccctcattattaacaacttccacaaatctagattgtccacatctcagacatttttctctctcgcatgctctttcgtgaaaagcatacaattatttttgcacacatcaatcttttcataatccatatcgagacctttgataattatctttgaatggtacatgtctttaggcaacttcttggtctttggtagcacatctcctaataactttaaaatctcattgtaacagttgttcgagaaaaaatacttggacttaatggccattagccgggtcac

SEQ ID NO: 43971 - DNA, 433 bp, Zea Mays
ttcagtttgtgttcggctggtttctgtttcacttgtgttgggtagtagtagggttagtgtgtactttggatgtaccaagtaatactcatatgtgtaagtttaggctagtcttatctgataatgtgaggtcagcagggcgtgcttgtctcgtggtggactggttgtggtgatggtatggctgctgacccggcacggctggtcctcataaaatgccaatagaatttgactactggtgtatggtgtaagatggcaatggttatccaaaacccgtcggtttttctctattagcaatggttttctctattagcaatgggtacctgaaattaggtgggtttttctcaattagggtatgggtgtctagtagaatataagtttggtcaacttctctatctatggtattaatggtttaaatggaaacccaatggatatgtcg

SEQ ID NO: 43972 - DNA, 541 bp, Zea Mays
gataaattaaactggctaacacgttttcaatgacatcgaaaacatgttggtattagagaaagatcataagaacattggaaactaagcttacaactgtgaaaatattaaatgtatgtacatacctatttttttattagtcattacatgtaatgaactaatgatgatctgttatatctcaataaatataagtttatctgtatgtttcttaacatatgatgtgttcacattgtgtaaaaattttttacataaatgtttaatatcttcaaccttattttacctgcacagatgtctaatatgacgtcatcagaaatcataactgagtataaggacatgaaaaattgctggctatttttcagtcgtgccttgaagaatctgaacagacaattttgcatcgagagaatttacgcaaaaagttgcacaacacaactcttgtaagaattctctaaaactcaaagatctagtatatgtatatatgtgcttttcggctattactaatttttttggcaagagatgaagagaaacatcaaggtattctgtagag

SEQ ID NO: 43973 - DNA, 503 bp, Zea Mays
ttaggtggaaaaagctaatgggacgatactgtaagcactcaggaaagaaagtcttcgacaagaatgaaaagtttgcgggaaaatggatcagagagttgccgtatgtagtttggagcttaagaactcaacctagtcgagctctgcatggaaatacccctttcttcatggtctatggtttggaggcagtgctacctgccgacctcaggtttggggcaccaaggctagtcttccaaaacatagttaaggcagaggctaccagactagaggatattgacgtattggaggaagagcgattgaatacagtaattcagtcagctagataccagcaaaccctgaggcgctatcatgataaggttgtacgacatcgatcctttatggtgggagacttggtccttcaccgaattctaacgggggaaggacgacacaaattgtcaccactatgggaagggccatttgtagtagcggaggtcactcgaccaggatcatatcggcttactcaaatg

SEQ ID NO: 43974 - DNA, 379 bp, Zea Mays
cgatggtcacgtcggtgtgcgggtcggcgtcggaggtggtcggagctaccctggccacgagcacaggcggcgggggtcgtcggcggctcctgttttggccaaaccatgacggtatagttcaattaaagtgcacgaggagctccacggggtgatgtagaggctatctgtgcattgaatcggaaaatggcgcagagacttacccggtccacgtgcgccggcgaggttttgaactctggcgagcacgattgcgctattccggtggcgtgggtcctcggttcaagctcgtgcaagcttcacggcctcccaagggagctatccgagggcttggatcgagcggaggagggtgggaaaggggttggccacgggggttgacctcggg

SEQ ID NO: 43975 - DNA, 551 bp, Zea Mays
aaaatatctttgcaagggtttgttatagtagatcctcttacaaaaatacaatattgcaagtagtcctcacatagaattatttttgcaagcggtccacctaaaacttcctgtaaagatattttttacaggtggttggcttagcacaaccacttacaaaggttgttaatcaataactacttgagtgttcattacagagtattgcaatatacaacacaagaacataatagttgagtgttcatcatagggtactacaacatacaacagaagaacagagtagttgagtgttcattacaaagtactacaacatgcaacatgagaacataatagttgagtgttcattacagatacgacccaagaacagaatacttgattgttcattacacagttcacatgaccctaaaccccacacaacatgcagtacatctagctacccactcagtgcctgcaacaaaatataaaacatcatctagctatcaggactagttaaggatttttgaaagacattcttttgcttcatattctagcacgtcaaacatctaatgataatccta

SEQ ID NO: 43976 - DNA, 618 bp, Zea Mays
tgtatctagcaaatagcacgagaccagatattgcatttgtcgtgaatctgttagcaagatacagtgcgggacccaccaaaaggcattggaaagggatcaaggacatcttccgttacctacaaggaagcaaggatcttggtttgttttatcgaaaaaatcaagatctaaatcttatcgggtatgctgatgttggatacctgtctgatccacattcaggcaaatctcaaactggatatgtatttctttgtggaggaactgcaatttcatggaagtcgtcaaaacaaactttggtctcgacttcaacgaaccactaagaaattattgcattatatgaagcctcgcgtgaatgtgcatggcttcgaagaatgatcaaccatatccaatctgcatgtgggttgaatattgagcaaacacccacaatcatttttgaagacaatgcagcttgtgtcgcacaagttcaaatgggttatgtgaaaagcaatcttacgaagcatataaatcccaaattcttctatgcacatgaactacataagatgaatgagattaaaatattgcacactaagtcatgtgaaaatctcgcagatatgttcacaaagtcacttcctgcgtcatcctttg

SEQ ID NO: 43977 - DNA, 414 bp, Zea Mays
ggaagcgaagcccagctttcatgaagctcctaaagactaccacttcatcgctttctggcaggggaacagtgtcctctcccccaaccctcactatagatacatcatgaaagtatttccctttcatcgcttcaatttgaccttgcttgatggtggatttcccaaaaacaacgtggctaggtctccacggccgatcttcagcattctcattctcactctcaatattgaagctttcactatcacttgaatcaccagatagcccagccaatatttcgttggtgatcttcactacattggtcctttccatggcttcgtagaagcgagcgagtgtggggtcagtgcttttcttgtcttcgaccatttcggtgatggtcgcgtcagaaagccgaagcttgcaaacaattaaactcagagaac

SEQ ID NO: 43978 - DNA, 378 bp, Zea Mays
tcatcaaggagaaatggaaggctcctatggctagaagctctcattcttcacatgacaaaaagaaccatgcctatctttatgctcatgttaagaatgtttctagtgttgctaatcatgatagttgttatgatcatgttgttttacctactcgtcatgatgctgcttttgactctcatgccatgtatgcatcatctagctctatacgtgcccatggtaggaatagacctaggcgccatgttcatcatgatgtttctcatgtgcctaggaatgcatcaaatggcccaactatgctttatcatacttatgatgcttcatttgtgcttatgtgtaaaaatgataaagtagttgctagaaatttggggcctaagtgcaagagag

SEQ ID NO: 43979 - DNA, 357 bp, Zea Mays
ggggtatggacgtatgaccgaggtacgaagacaaacttcagaatgcatgtttggtaccaacactccatgcatgacttaccggtgtatgggctattctgcgcctggtgtgttcacggtaagttcccatgcccagtttgcaaggaagctctcaggttcatttggttaaaaaagtgtggcaaatattcgtccttcgataaacatcaacaatttctccctcctgaccatccattccgcctagacatcaagaactttatgaaaggtgtcatagtgacagaccgcccacctgcaatgatgactggtgctgaaattcgtcaacagatagatgggcttgtggccaatacaaaaggtggttttgtg

SEQ ID NO: 43980 - DNA, 437 bp, Zea Mays
gtaacaccctactccactgtatgttggattgctgtggaagcttgagagttgagagtctgagcctaaaattgagcctgtgttgtaacgttgcatggctccccttttatagctaaaggggggcatgtataagggtactaagccccgacatgtgggcccagtaacatagcggatgtagtacttggagctactaatatttgatgctagggcaatcttctcgtgccctgacatccgagatctgcgtagtatcggcgtgcaggggaagcttctcgtacaagggatgatgagcacagtgcaccgcgcagcacgggcgcactgtttcgacaatggactggacatgtgcaccgtctgcagggtggccctggcgccgcctgccagcagagtggacaggacacaataaatgctgagggggcacatcgcctgtcaacagggtggacagg

SEQ ID NO: 43981 - DNA, 544 bp, Zea Mays
gtgaaatctcctgccgggttgtgcagtgcgccaccatggggggggggcggtaggttgtagctccgtcgagctcgggtcgcagtgatgagagagcgtgtcggggaagacagcgtctgcgccgtcggatccaatttggacggtatagagttgatcaacggataacccttagttgtagtgattgtgaccgtagatcagagatcttgtggttgcgattattgaccgattcggggcttcgaatccaaccgttgattccaaatcataaggcgggtaggagagatctagtcaatgatttaatctggaccgctagtggatgatcgaacagtccatatttgcccataccccttcaccgtgccacaattgcataagagaccctggaccttttggaaatagaacccgccgtccaccttgggattactctgagtctcaggattagttgtagaatagcccctgggtttatctggatttgaggcccagtccagaatataataaaatcagggaaaatgatttataaatagattcttaataggaaaataattgttagaac

SEQ ID NO: 43982 - DNA, 933 bp, Zea Mays
gagcgatggccggagggaagggaagcaggggcaggcatcactcggcggaggggaagcacaagcgccctctgagcccttcatcagaggacttcaggggctcggagttctctgaggaggagttgtcctccgagtacaatggctcaccccctccggcgtcccccatggcgtcgtctgatgactcagatgactccacggggttgtcggcgacaaagtgagcctacatctgatccgttgagcgtgtggggctcggggggttggatgactcagagggggaggactcctcggactttgaggaggagggtagcggcagcggcgacgacgacaacagcggtggcgacgacgacatcgacggtgatgagggcgatggagacgacagtaacgccggtggcaaggcgccaccgacgtagatagtagtgtagtggtagttgtagtagtagccatagttgtagtattagttttgtagcagtagttgttgttgttgtagtagtagcagtagtagcagtagttgtagttgtagtagtggtagaggaacaatgatatcagggtcggctcataatgagtcggccctattttctttgtaatgttcttcctccgattgaatgaaatccgaccattgcacttctgcttttgttctactcctgctttgcctgataagttgattctgatggacccaatcgacgatttcagttttcgaaacactcaggtaggcccgtctggaaactctgtccgacccattttattctgttatgccaaaaacttgttcgagccacttgcccgccatgatgcacctgacttagcatgtgcgtatacatccttgtcaacggtttcccggtgcgtgaaccctaactctgtttttcttccgccacattccagtccctcgagcctgtgcttgctcctacgtcgtacccgagcctgcttgcttgtgagatcggg

SEQ ID NO: 43983 - DNA, 622 bp, Zea Mays
cgggtgcagtgcagacgacgcatgcgtggcatgggtttccgatgagctttggcaagcggaggggaagggggcgcgggctccatatatgtccagtccatggcgtgtttgtcgcggttcatgtggactcgccatgcgcatcgcccttccagtgtctctactctcccaccgtctctctcagctctgttctgagagttctgactcctccccatgtgatgtgagcactagcagcagcatggcaaaagtgacgtgcagcggtaaaccctgaaaaaggctgggcgcatctcgaggaggaagaagaggctgctgcctgcctgggaaggctggtgaaaggtgcaaagctacagcgcccggaggatggcgagccttttttcagaggtagtagtatggtggcgatcggcaaaggtagatttgctcttctttttttttatctctgacgtaaggtgaatcgatggcgacgaggttttataggtgtggtagggggtagtacacacctacgtacgtagtactgtgcgttgcagttgattggatgggttggccaggaccgtgcacgccgctacagtttcctcgcttgcagtgacagtgcgggaggcgttcagtgtccaaccgtccactatggtcttct

SEQ ID NO: 43984 - DNA, 333 bp, Zea Mays
agatcacgccccttggatccaaaacctacggtccggatcacatctctgaaacagtacgatggtttctctaatctgcgccgtccctgaccgaatcaacggcgcaaacattctcttctaccccaggatggtcaggaacggcggtgctctacacctacagtggtgggttcgccggagtgaaatccccaggtgcccccaaggcctaatccctaccctggtagcggtggtatggggtaagattatggtgaatccaatccggggaagggcgcaccgacgacgatcatgaagacgacaggttacgcgcaggcggatccttggcgaggctaaaccaccgac

SEQ ID NO: 43985 - DNA, 642 bp, Zea Mays
ttcttctatgtctctgacattcgcatagaggcccgtgcacttctgtttcttcgcagacccaggtccccgacgttgaacggcggtgagcgcgccctccgacgaatctgtatcggccgagatgcttaatgaccaaagccttagctcggccgacgcctaatcccaccctcggcgacccgaaaccgaccattaattgcacaattctggaccggagcatgtctgctcacgacgacgacgaaaaccgagaataatccaatgtgttcttggtgattcaaggcagtctagttcaattaaatgggtctatgagtattaggagacttaagggaggctagaacatcaagccaagaagcttgaactagcctgcagagggctggccacgacgaggtgttcacgatgtcgcgaaaaacaaatttggaggaaacgtgaaattgagaggctctggtggatgatcagaggtgagagttagtgtgctgggtgcgtaataacctagcggacctggttgatcacttaatttataacatcgattggcgatggcatccaattttgagagagcgcgctggcggccggagagaggggaagtcactagcgcgagcgctatcgtggctttcactgaagtaatgacttagacgatggactgactattta

SEQ ID NO: 43986 - DNA, 603 bp, Zea Mays
tcaaacggtgggaacaccacatagcagtgggagcacatcacggccgccaggagtcctgggaggtcttcgacttcgcctcccgccacataaaaccaataatcataccagttgccccacttgttgcgggcgcagggaactagctccacaacttccgccgatgtcttcccagtcctcagcgtaaaggtgcatgatccaaactgtgcaatcttgcttccaacttttcacttctgccagtgcaaacaataattcttggcgaagacctctacggagggctgaccgccatacgaagtcactgcccagacatacttcgctagggccaccacggcattaggtgtcaattgatggatctgcacgtcatacctctgcaacacctccgccacaaaacgatgcacaggtaaccgaaggccggcagtaaagaatgcctcaaacacaactatctcaccctccagctcaggaatctcttctgcccccagaactcgtccaactccattcccaaaataccccaactgctgcatgtcttgcacacgaaccgaggagatcctcgaaatgccgaattccaccgtgtggcccgggtgtacctccaccgccgccaaatcactaaag

SEQ ID NO: 43987 - DNA, 383 bp, Zea Mays
gagagagagaggcttttgaaagagacaaagaggtataaatagcctttctgctatatctctgtattaggatatgcagcaggtgactgttgtagacataaagaataaacaactcgaggcttctccacttccaacggttattttaaagtccgacattgatggagagaagttcagcagtgccacgcaggccagaaagatcaaaatgttgtgaaactatggcaccggctttctgggcatatgtagaggtgatatgtggagtttgagcattggagaagcaagaatgactggcaaacccactgattcttatagtatggcatctctaccctatgaaatagataaaacatacaacatatttataagcttttggtgtccctcctttatcatga

SEQ ID NO: 43988 - DNA, 864 bp, Zea Mays
aggaaggcggggcaagaggaggcatcacagaaaattgaggatgaagaatgtgtttgtttctagaaaaaagaagcttagaaagccctcaatcttgcgattcgattaactttagaataggaaggctatctcatacaaggaaattccctatgtcgagtaaaatagacaggatctggtttccccaagtctgaatttgaaattaatttgggaggagaaactttcgatgatgaaattggataacaaccagtcataatctatgatgaatgacagtcgcatccaaggcctgattgaccacatcgccaagatacaatggtggaggcggcctagctagaggcccaatctacggtctaaccactgatgaagatgcggaatgacccactcataaggatgcagaacaacccattaatcaattggaaaactttcgttagaagactaggcatgctacggtcgacagcatccgacccaaacaacatcgcccaatggagccaccatgaacacatgggactagtaggtgtagggcccaatctaaggaactgatgggaggaccggagcggttctctgcccccacgctgggcctggagagcatagggcaggcgggcagtcgagacagcacgccttgccacaacctatagacatgctggctctcgcacactagccgggaggacgggtcagtagtggaaataggagcggtgacttttggactgctttttgcagcctaccttaacttgtcgaggccacaagcaaagatgctttgtccaaccttgcaatctccaaggtctcctcgacaatcaagtgccagtgtattttagctcgaggtatcaaagcacatcgcccataaatacaactgttttgttgcctcggtgaagc

SEQ ID NO: 43989 - DNA, 557 bp, Zea Mays
aagcctggaatatcagattggcgtgaaatttggcaaatatgttaatggaggtgttgtgaaggtgcctgaaaaatttgggttcaatcggggcatttttggctggtttgggcatttaaccgaacacgtgtcgtgcggtgaattaggttttcggggaaatagccatttgaggtgtgaaaaccctcccgaaggagctaagaacctgcaggaatgttcaagggccacaaaggaacacattgtacaacatggattcactgggattcacaagatttggaattgggcacaaagtgtggaaatgggtgcttcactggtggcatgaacagagagtaaaggaggaaagagagagaggtggattctcaccagagagagatgatgcacttggacgaggtcgccggagagcagatcaccggagaggagaggtggtcgccggcgaggggtggagatcgccagagaccgagagagaggggcagagaacagagaagtggagagcgcaggcctcgggcgcgagaggggaaaggtttttttaaaaaccggatatgggcgcaccggacagtctaaag

SEQ ID NO: 43990 - DNA, 640 bp, Zea Mays
cgtaatgttgcaatggttcatctgatatgatctttaggtgcgcataggagttaacatgtctttgtagaggccattgtcaattattgggccaataagagtacttaggccatgtctatatgtacgtgaacctatagggtcacacacttaaggagaagaaagcctaactcagattagatccgaaattagacagggctttagggttactgatgggcctcggagttagaagcccactagaacgcctgtataatgaggggcaggggcacagttaacagaacccaaattcgccaccagttaagagaaccctcgccctcgcctagtcgccatcgtgaacctagcagttcggaacgtgatgcttcctccctgtacgtgtggatatttcgaaggtgctgcatttggagcactaggacgaactgcgcgaggacatgaaggtcgtcggcgactgtacaacactactcgacacgttcgtatacattgagacgtcttctgctgccctgcgcgtctagtggtacttccatggtctataaccgtagtagtttctggtttatggggtcaaaaatttttgttttgcgctagtgtagcctccacataatcattcagtcgttactcggaagactccatacggaagaaaggctaataagat

SEQ ID NO: 43991 - DNA, 340 bp, Zea Mays
tataagctaccgatcttgtgtgggggtcataggattttgcctactggtttcaaagatttggagccctgaaatccggtctgtctctcggctcgaacccaaggcaaatctagggttttgtcgtgtctagggctcgcgtcccaatgccatcatctggcatgtgacagaggggttagttagacacgtttttgtcaatggggtcattaggatttgagctagggatcaaggtgaacacacctagtctttagctcaagggctgaaattcagaattctgaatttcagaattccctattgaatccccacttgggaagcttgtttgaagttttatttaaattgttttggc

SEQ ID NO: 43992 - DNA, 358 bp, Zea Mays
gaattattagctttcttgatggtaatgccggatataatcagattttcatggccgaagaagatgcgtctaaaatgacctttatatgtccaggcttcattggtttatttgagtgggttgtcatgacatttggtctgaaaatgccggtgctacttatcagagggctatgaattggatctttcatgagctgttgggaaacactgtggaagtctacattgatgatattgtagtaaaatcggctgagtttagttctcatttagctgatttgcgcaaagcctttgataagatgtgtcggtatggtttgaaaatgaacccacgtaaatgtgcttttggagtatcggctggtaagtttttaggattt

SEQ ID NO: 43993 - DNA, 404 bp, Zea Mays
cacattatgcctggttttataaattctgcattattaaagaaaacttgatatgggaacaaatttaatattcacgtaatacctgagtgtttgacggtgtctctgtcttttgatgttttcactgtcgtcgtgaacttgaccctcatgaccttgtcatacttatttgctagatacaaactgtaatcttgttctctctttttgtgctactggattgagcttgcataacggttgattttggatttagattctagagttgcatgcttagccaggtttatagtctgaatcgtgatgtaatctaatgttctggaattgtggtccgacatgccatacctctaaatctgtggtgcaagttagttttttaaatgaaatttaatttatgaggattgtccttctctactcaaatatca

SEQ ID NO: 43994 - DNA, 284 bp, Zea Mays
agcgtctcttgcaaattctgggtcaaaacgatccagagccttccaagcatcgccatctgatggatgcatcataatgtctgggtcttggctatcacggtctccttccttatgccacaacattagcttcacagtttctagggttaaaaacagacgtttaagctttggagtgatggtcatatatcgaagttgtttaactgccactttgtagcaaaagtagctccatcctcttttagtacctccgcatatcttgatttaccgcatttctgacaatgggtggacgcttc

SEQ ID NO: 43995 - DNA, 508 bp, Zea Mays
catcaacctccttttgaatacaatcgagtgccccgggtatatcttcggctgagaggctggtttcttcggatgtagctccaactgaattaaatatacttctcaatcgggcggtgcatcggtttgcaaactcaaagcacctctctttcaaagacttcaccacctcactaagcttcgaatttttctcagatttaacctcaagtcttgctttcagagcttcgttttcctgtttgaactaattgaagttatccaaaagtgcttgagcgcttgacatgtctttactcaaattcttgttctgagttcgcgctttggcaagggacccttcggctgaacatagcattttgtccttctcctttaaagagtcttcgagctctttgatcttatcctctatgcccttgacaatgacttcgtgtttcctgtcttcgtcgtcttgttgcatctttaaagctttgctcagtagtaaactctgtaaaagcatgtccaaacttagaatatttaagctaatgcagac

SEQ ID NO: 43996 - DNA, 434 bp, Zea Mays
ggagatgactccaatcttcccttgaaaaagatgtcgaggtagaaaggagctactgtgatggcgcgtttctttccgtcctcctttgagggcaaaggtgccggaaagatgactcggcgagatcccgtccccttactcgagatgtttgcctccttctttctagtgatctgcgtccagtcctttgtgggcaaggtggacaacggagttcttcgggtaggtaagctcctggcttctggtttgtaaagggtgatcttcgctaggggcgtgggagcctgcgccacccgttgttctgctccggttttcccggggatctccgaggaaagtttcttctctggcgggtttgctatgcggtgcagagttcctttctcatccactatggacgagatggttccgaagtagaacacggatccagggcaaagaacgatcttgtactggga

SEQ ID NO: 43997 - DNA, 367 bp, Zea Mays
ggaagctttcgtcttgacaatgaaggggccctcccacttgggctccagcttgcccctggactctgtccgagctgttcggacgagtacgaggtccccttcgctgaattccctcgggatgactgcgtggtcgcgccatgcttttgtctgggtttggtatttatttagagcctgtaaggcgaagactcagtctccatcgatgagatccttcgaagtgggctcgtccacgttggggacggctgacggaactgttcgcggggacccatgttttatttcttgtggggtcatggcctccgatccatatagaaggcggaaaggagtgaacccggtcgccctgcactcagtcgtgtttagcgcccagaccgcctcg

SEQ ID NO: 43998 - DNA, 764 bp, Zea Mays
tatttctcaaaatataaatttcctaagttctctgtctattttaaaagaataagcagaaatagttaaaaggaaaaagggttttacattggggtccctggcgaaagttctaagtttcattgcagacgggtcctcgggttactattcacatgagtctatgactgagcagaaaaccccctagagttctgctaaatccaacccgcgatccttcccccaaataaacagtaatcgtggcagaggaaagggcggaggggcttaccggcgacaagattgctccgatgatgtggtcgagggtgtaggggaggtcttgacggtcacgccgatgtgcggatcgtctccagtgatgatcggagtaggtcggtccacacgcgcaggctggcgagctcgtcggcagcgaggactccggcctaaccagggtggtagagttcaattgaagtggtcagagagcttcaccagaggtcagggaagacataggcgcgagaaattggaaaatggcttaccggttagtcgtggccacgtgcgccggcggtgattacaactccgtcgagggtgaatccgcttctccggtgaggcaatgccttggctcaagcttggagaagctccacaggctctcgaggaagctatccaggggctagggcgaggctgggggttgaccgaaaaggctagccacaacggtcgtgcttgggcagtgatggcgggtggtggtgctcgctttccacggcgaactccagtgatctctgtcttgggcggggctctgggtgcacgag

SEQ ID NO: 43999 - DNA, 654 bp, Zea Mays
tgaaaaatatcaaacaacagagttctcatttttcttagttattgttttgtgcaagagaaatcattctgaagtttggcctctttttgcttaaggaaaggggtggtatgcattatttgaattaagtggcctttctcttaaatcattagcaataggtatgagtttgctcctttttcatgggtttgcatttttctctggtggtttatctcattatggacttagcaaattttggttgcccattatcacattattaggggttgttcatgatttatttggagaatacctcatcagcattttatatttattttccttacttaaaaagtggggctgaggtgttctttatttttgtagtagggctctggtggttgtaagtccactggatttttattatccattttgggtatagttttgcaattccaataattgatttttagttcaaataaggctaaataaagcattttaatttaaaactgatctgaactaatggtctctttatttttcctaggttctttgttacataggtaaactaggaaaaataattttaatcactgttcattaatttctaatgcctttctgatttttcctaagttttgggcaaaatagctttaaaagaataagcacatcatatttttcaatgctggggttcctactattttt

SEQ ID NO: 44000 - DNA, 720 bp, Zea Mays
tcaaaacaatataaattttaatatttttggactacgctaacactgttaggtattttcgggatcaggcaaattttcacagttgtagacagtggaacagattaattacgagtactcatttcggttctagttatctcggtccgatttaatttttcagcacttctatcgtgaagttctagtaatatttacttgggcaaaaatacaagagtggatcgggattccaaattcatgttctcttaatccataaattctaaacaaacaccaggctcgacatttcgcgaaataaatacgcgagatcgatccggcatcgaaattgtgatcccttcggaagcgaagtcacacatcgttcacgtgggcgagaggctgtgcgctgtctagacaccgcttaacaccagccacgcgccacgatgccaggccacagagagacacgggcaacataagcgtgaaaggatttcaaatgaagtttaagaaaccagatccgatttccagaattaaagtttgggcaagacgttgatggcttaacccaaacgatactggagtcgatgttccgaaattactaaagtctgaattttgcaaaataaattaggacaatttagacagatggagacagacacgatatcaaaatcgtgatagacgaggatgattaaaatttagtgacctttacattcacagctatcacgtgttaacgtccgcactcgtggtcgagtagacgataaacacctg

SEQ ID NO: 44001 - DNA, 298 bp, Zea Mays
gaaccatttactgacgacaattaatgaaggagtaggataccacggggaaaaaatatgtgaaagattgttggaaaaggatgtcatgtgggaagtagcacctgagtcagtaccattcggtggatgggggttgctgcagcgtctccgtgctgaatgcagaggccagcgactgagtgtcccaggaaggcaggttgtccatggggtggtagaaccctggtggagcccactgttcggccccttcagtcagtgtaacaggagccgtaggtggctgctgctggacgacgaggctgctatgtacgag

SEQ ID NO: 44002 - DNA, 528 bp, Zea Mays
gtttttctcactcaaggtacatgatgtgcctagaacatcatgcttgggcttaaaaagattttgtttaggcttttaatcctttaagtttggtgttccttgcattattagagccacatgtgataatggtcacaagttggcgtactcgaaaaccctaagtaacactggggtgttacaaagggattgcttgaaaagctccagacagaaaactgacaagtccggaggcaccgggggcaggctcaaccaagcagccgagcaaaactccttgactcgtgcatcgtagactgtccggcacctaggtgcggacgatccggtgctcatgcggtctgtccggctgactcagctagacagtccacccatggccataagcgtcagcctccacacagagcaaggaaagagacgcaagggcaaagccaacatgacgcacatggttggctggtaaaagctggccctactttcgatcaattgctagccaaatatgctggcaagaaggccgttctacgcgatcggccaacaaagaaaccctggtca

SEQ ID NO: 44003 - DNA, 486 bp, Zea Mays
ccgccctgggaagcccatgggttgtagcagaaccatggccccatggggcggttgcccccggtttgggcattgctgccttgctgccagccgatgttggtgttgccctggccgcgccagctgccttgcttcttgctgcctttgcctttcctgttgcccccacccccggagcccttgagaggagcaccggtgggagcatcgtaggagggagcgacatcccgtggaggtgcaggtggagccagaggcagccaccatggcggaggctgcggtgaccttctcgtcattggcgagacgcaattctttaagggagagcatctcgcgggccctggagaaggatggtaggacagcagaatttgcgatgtcgtcggcagtgccgccgaagcacgggttgaggccgcggaggaggctgaggacgagttgggcgtcttcgatggtttcgccgacgtctcgtagggcagcagccttgatcttgagtcgctggcagtactc

SEQ ID NO: 44004 - DNA, 686 bp, Zea Mays
gcatttcatattttaaaaacattattttctttgtctacttagagataataaacttgcatcatgttggatctttgtttgtgcatattaaagatttgaacctcaatctagacttgaattcaaaataagaatttatatagaaaagaactgaaaaaaagaaagaaccttacacccccgcgtgggccgattatacctggtcggcccatcaacacttgtcccgcacggcccagccaggggatctacacgcgctcactcactggcatcatgacccacatcgtcagccgcttcccacccagaacacacgtcctgtgcttcacagacaaatggaccccactgtccagggtcatcttcaacgtcgccgcaacagacttggtgtctgttcatctcgatccgtaggtcccgggccgagcttacaggtcaccgcttgcccttgcgaaatccgcggcaccataaatcctgagcccgtgaccgccctgctccctcgccggacccagtgaacgaacgccgagaacgccgccatggattccgctgagagtcttcacctaattcaatgcatatctgatcccttccccgggattctcggagaccggttcgaccgtggaatttccgggatcctgtaacaacctagatgccgatagaagcgaactggcctcgggcgcaagcctatttaatcgttcccctcccatgtg

SEQ ID NO: 44005 - DNA, 583 bp, Zea Mays
aagagatgaggcaaaaggggaaagaaataaatgaggtatccacgtgttagggcggatacagatagtaggtttggtactctagtgaaagaggtgataaaacacacgctaccttgtaaagcaggagtgattataaaccgtaaaggagtcattgcaagcccgcttgcccgttccttcatcttccttgacccacaacacgatgagatggagatctagtatgatggtatacctcgatggcgtggagccgaatatctatctaaattcatcatgctcgtctgcatgttccttcatctatcttgaccgacaacggatgatattgagaactgtgaaatactttaacggtgtggatgcagatctccacctagactcatcacgcatgcctccccttgatctacctcgatctatagcaagacgaggtggatattgtggacaatgacatagctcgacgtcatggaggtggatcttcgcctcggtttaatatgctcgtgtgctccttcatctgcctcaacctcaacatgacgaggtggagatcgaggatggggacatacgtcaacaacatggaggcggatctctacctctgatccac

SEQ ID NO: 44006 - DNA, 451 bp, Zea Mays
atctcgtcctcgagattaaagaacttctgagaataactaggggaattctgctctaagttcatcttctctttctcaagtggccttatcttccgaatgatgactccactgcactttacacatgttgataactttactccgaataattctgcgagatgtttccaaaattcttatagggtactctgaataagtcaaatcctcattgacattgagttcttccattggtaattattcctccggtactcttaagcatttcttaagttgtgacacatgaaatacgcgatgcacatccgataaactatcgggtagctctaactgatatgctacttcaccttttatttctaaaattttgaatggaccaatgtagcgaggagatagtttacccttaaccttaaatcttttcattcctctcattggtgaaactttaaggtatacgaagtctccaacttcaaag

SEQ ID NO: 44007 - DNA, 746 bp, Zea Mays
ctcgtggggccgcttggtcagagggagcgagcgtgcgagagagcgggtggctgacgggtggggacgccttgtcagcgagagggagggcggggtgtggagcggctgtcgcgcgcgcggaagcaggccgaagatgggccgaatgcggaggagtgcgggcgcgtgggaaggggggggttgcgggtgttgggccgagatttggtccaacagggagaggagagggtttttccctttttctttttacttttcaattcccatttcccattttgcccctttttcttctgaacaaaatattttgtgaatactctaagtgtttagaaaatagaatctaagtgaggtgctttgtgatcaaacaaaatgtatgcatatgatgaaagaaaacttagtggagatcttagaattagaggatgaagggaggggaaaaaggtagattagggtttcaaacctagattaggatttttgggatgctacaaacctaccccacttaaaggaatctcgccctcgagattcagacggggctcgagaaaaggtaagggtattccttcctcagagagtcctcactttcccaggtggcttcctcttctccatctctgctccactgaaccttacagagtctcacttccgaattgcgggtccttctgactgctgagtcgagaatcttcactggcttttcccggtactggagatctttttgaatctgaattgtctctgcctcgatatgggtttctggtacttttaggcatttgcgg

SEQ ID NO: 44008 - DNA, 919 bp, Zea Mays
gaacaggtgtgtgccggagtgtgttatattaatggtcgtgcaaggatttattgaagtgttttgaatgcatgtcgtgatgtggttgtattcgtgacaaggacggtgtgctcgataagaaggttcggtcagtataattattattttggcttgtatagagaggtggtgacatgccaaggaagtcatcgcttcctctatgtttataagttaagtcaatgcacattatgcgtttgttgaattatgcttcacatataatgtatggttgtgttcatgacgtccagtagacgcttcaagtaatcgagtaggttcaaaatgcaagttgtgtgatagagttagtttgttttagggtgcttgttgaaatgcttcattcatgtgataaacatgtatggttagtattattgaatcaagtatatgttgtgtaatggtgatatttgtgatgaaagtaggtgtcctatatttgtgtagtaaagcttaggttgaagatgcaagcgatgcgagaaatgttttggtaaatgtgtatgtgaagtgatgacatgccttcgtagtcgtcatgtgtgcttagtgacctggttgaaagtcgtagagaaaagttgattgcttgcgggttatttataattgtcgctctagcgctccatatggctggcgatgtgaagtagtaggccctctatgtgacgccagatgtctggatgaaattccgtgaattgtggtgctcaatcgtcgaatagaggttaagtcggtcgatggcgattaagtggttaaaaatgattaataaagtaattgtaggtataaaacaagaaactagtgttcttatatcctcataggatgttgtggttgcttgatgacatttaaaatggatatgtgttgcaatataaagtttgtaattaacttaccttcacatactagattacactagtaaggtaag

SEQ ID NO: 44009 - DNA, 548 bp, Zea Mays
tgaagaacaacttttcaaatgttggtgcattttcttctgagcataaattcatttgtcaaaatcctgatgaagttattcaatggataaacagcgaggtcaaagctttcgaggaaattcttagtgacagaggggacttctgtacctttgacggtgggctacatccattttttagaaggttggttgtgatcatgccaaggctgtagctcagccaaattttgccttcttagctaatgatgttagaaacccttcaaccgaagctactaccttgggtgagaaattttattccgaagaatggctgaagggtggacgagaaattgctgatgatgccattaaaaggaatgagaaagaatctcatgacaccttagaagaggctaaaagagttgaagaagccgtcgagcgggccagacttataggtatgccctttataactcagcttcgacactgataaatatttgtgttttaatgcagctgagctttctccccctcccgagccatataatcctgaagttgacccatctgtcaaggaggcgctcgatataatcaagatt

SEQ ID NO: 44010 - DNA, 480 bp, Zea Mays
gcctgcatgcctcaccgtcgcctagccgaagcctcgacgccgtcgcacgccagagtcctcgcctgccccaggcccattgtcgagcagggagtcgcgccccatcatcaccgtcacgcccatcaacatcgtcgggcccaaagctacctacgtcaagcccatctcacgccgaggtgagaacattgtctacccgtcgtcgtctacccctaaacgtctaccaactcccgcgcctcgcctttgcgtcgtgccttcgcatgaaatctgaaattattaactaagcattagctttcgcattatgtatttgttttgatctatttgtgtggcgttaacttcataataatggtgtatacacgttaaacatgttattttgtcatgatgtatgtttgttttatttacttaattgtcagtctatccgttggttattagcgtagcaatgtagtcaaaactagtttatgattttaagttgcgcgtctagtaaaatcg

SEQ ID NO: 44011 - DNA, 333 bp, Zea Mays
ctctggtgtcagggaactaacggaagaatgagatgtaaaagaacatgcatcacagctagagcaaggtacaagtttcaacttatttaaactagcgataagtcctcccttacaacttaaccatgtgtacccccatgttgtgatcacaacacatcaccactactccactaggccacagcaccttgatgggatctaaatccaaagccctctctgcattcccatgatgcttccatctctattacttaaaccttgtgagtgacacctaacatgtcccctaaactgtttgccgtcgctcacgcggtctcattttttttttcgtgcacttgtggtctgtct

SEQ ID NO: 44012 - DNA, 570 bp, Zea Mays
tccagacccatgagtcacccttccactatcgcgagcgtgtgtccaccttggggcttctctgagcgaagtagatcacctccatcgtaacaaaccctgattaatcctgaaagcggtctagagggggtgaataggccacacctgcaattaacaacataaacttcgaacttctgtgagaaatgatagttcaacaggtgaggccggttcaaccgcaattcactcattcaactgcgaacttaaatgaaactactcagatataccaacaataaacacatcagaagagttgaattaaaaccaactagatagatcaaagatctgagatgatgggacaaaatcacacacacaaaagcacataagacacatgatttttaccaaggttcgatcacaccaccaaggggccctacttcctcgttgaggcacccacaaagagtcggtctctttcaaccctaatcctcccctcaccgaccacaaagatccaagtgaggtcacttactagagattgctcaaaagagcgggtaacacaaacttcttgcggtcttccacaagatttgaggctcacaagcgatgcctggc

SEQ ID NO: 44013 - DNA, 647 bp, Zea Mays
ccttattatcctgaatatatttatctatctcagaatcaaaatttatttgaggaatattttcagaatgattaacaacagccctacaaaccaaagtatttctagacaattccaaggatttaattaattcaagatttgatatagattcatcaacagaattaccaagatctatgtctaaatcagaagcaatagacaaaagcacatgattatccgaattaaggacagaaaaaggattagcaaacataccttttgtcaggaaggcatccttagccatagctcttgttgtcgctttatctacaatcttcatgtcatcagtagtttcaagtctgctgctccttcttatgccatccccatattcaacatccatactaactgaatgtttttcagagttagttttaccagaaacttctttttggttaccaacgggagacttgatgttttcccttgcgaagaagggatgactccctcatcatctttagcaaattcttccaagtcttgagaacttaataggacatcttcactttcatgaaattcttcatcctcattagcagggtcttcagaaattgggtttagatcctcattcacagtcccaaagtcagacttctgaataacatttttgccatgagaggttatctcaccaaccttttcca

SEQ ID NO: 44014 - DNA, 388 bp, Zea Mays
gtcgtgtgtttccaaattgttttgttccaatgcacatgaaaccattttggacacctaatcattagttagcaaaaaagatttatctttttggccaaatatgcatgactactgccgcttttaaacaatttgtcaaaggaagtgtttgcccttcattagacccaacctcctatttgttgtagatttgtgctaggacattcttgttcagtgttggtatttgttgacccttcaatgtttatatttttagatagctattaggggttatggtaaaatagtcagggaataacaattattttttaactcctcttgtccattcttagatctaacatccacaatatctatatctgaatgcaatcccctcgcattatgtcttgttgacagttctgttcca

SEQ ID NO: 44015 - DNA, 904 bp, Zea Mays
gctacaaaagtgaaatatttctccattatgcatctatgggctctcaaagacgatcgaacatgtgcgctcgtaatctaacgcccctctccttgttctagcatcatctattccgcttcactctataaccaagcatagaatgaagtcgcttcatactgcttctgtgcttcacttggaaccaaacaaaaacagagtggctacgttcagactactaaacacagaacagaggtgttctatccatctggaatagagtcgctccatccaaatagtctctggaaccaaacactaccaataatgaccaaataattaatagttctaggctaccacttaatttaacttcgtagaaatggtctgactaacagctcaactaccccctattaaccactcactaaactatagaagatatctaactaacgactaatgcaactaagaacttttcaacccaaacaacatctagcgaaccctagagcacaactaaaaataatacctgacacattgccatgcaccaccacaacaacaacttggagcacctccaaagcgagacgacaatagcacaataacacgacaccagagctagaagggaaggtctacattcgagaaacccaacatagaacaagtatgactgcatgagaagaggtatgaagagaatgcctctaagaaggtagtagtgtctgcaaacattgttgtacaagctttcgccataatctcaagcatctcacctgccacgaccttccaaagacccccctgatacataaaagtaaacatatccataaggaagacgccagtgacaaaatgtaggtgtcctgtcatcattggatgtcaccatgggcatccatattatatgcgtagccatagaaacaattccccaccaccagggagataggacatgggtgtaaggaaaatgtac

SEQ ID NO: 44016 - DNA, 1053 bp, Zea Mays
aatttttttaccttgtaaccacttgtctttccagaatttggtatgggtctcatccccaacttcagtgaacacaacctcatcaaagaaagctcgagccttttttggaacttgaatgggagaccaaaccagggccttgagcggtcggttttgagcagccaaagccatctcattcggagggcctaacatagttctgataaactggagatgcccagcccaccaagctgaagggggcggcaaaccttcccccatgccacgaggcagtggccaccttttgcctcttttcgacctctccaaagaaatccttttctaattctatcaatggcatctaaaccccattgggggatgtccactgccatcgccaaataaacagtcatgctggtgaggacgtgttgaacttggactcttcttcctgctcttgttaacaagcctgccttccaatttgggagttgatcagcaattctgtcaaccaaagcctggaactgctgcctagataacttgtgtaaggatagaggaagtcccaaatagcgacatggaaaggaagatatttcacaaggcagcagcatctgaacttccaacatgtcctcctcagaacatctgataggataaacattagatttttgagcattattatgccgcccagaggcatcctcaaatagctgaagaatgtcaagtgtgagggacaagtctgctgcttttgggtgtaagaaaagagctacatcatcagcatacatagagatccgatgaagctttttcctgctggataactgctgaagcaatccctcctctgccttggagaacagaaacacaaggacatccgtagcaagaataaacaacaatggagagaggggatctccctgacgaagtcctctccgatgtataatgcgccttcctgggaatccattcaacaacacttgagtagatgaagaaacaaggagcccacatcacaatcattggttgtacatattccaaatcttctttaagctactttgtgtgggcatcacaatcattggttgtacgtattccaaatcctctttaagctactttgtgtttgac

SEQ ID NO: 44017 - DNA, 486 bp, Zea Mays
cacagtaagtgagttaaacaaatagaacttggatttggtcaaataaatcaaaacaaagactaaaaatgtgaaacagtgagcaacccaatttttacccaagtactcatgatgtaaactaccagagaaaaatataaggctaaggtaaaattttgatgaaatacacctcacccccctaccccatgaaaaagaccatatattccaagaaattttagaaccccttccgcatgagcaaagttaaccaactaaaagaatgattgctcttgcgcaaagaagaagataggaaaattgagaaatctgttgtttgacatttttcaattatagtagtagtagaaagcaccactaagccccaaagctttggaaaatccccataaaataactagtaggcatatttagctaaaatttggtataaggtcataatattatacctagataccagcaaaaataacccttaagataaaacccacacctagaagagagttgtagttc

SEQ ID NO: 44018 - DNA, 406 bp, Zea Mays
tgggcatcttttaagctaccgctcatgtatcatgtgttaccaaaagccctcctgtaactcagtgcagatagtcttaaacctatagccaacgtaataatctatgataccaaaattacacgccttggtgtcatagttatggagccagggtatatgacatgggagccatagttgtcgtgacctattgggactttgatgtcaagatctgcgtcgtcaaggtcgaagatatgatgtatgataccgaggttggtgcatgtgatgctgattttgatgtcatatattttggcaccacatctcatcgtcttcctcttatctctcgtttctctctcttctacctcgactttgatccgcgtgtagctcccctccatcggctcggacgtcaccctccctacttgtcacaccatcaata

SEQ ID NO: 44019 - DNA, 833 bp, Zea Mays
ctttgataaaagcactttgattatgagacaccatcttatctaggtgtccagagagtctgttggcaataagtttagtgatgagctttgcaaatgaatggaccagacttatgggccgaaagtccttgacatgtgtggcatcttcctttttggggagcagggtaatgtaggctgacttgagtagctcaaagttcctcaatcttctgctccaaaccgccgaggttgcaaccaagatatcccctttttgatctgccaacatgatttatagaatttcccagtgaacccatcaggcccatgagccttgtttgatggtaaggataatatagctttccaaacttcctcctcagagaagggactttccagctcagagagatcatgagaggggatgcgaagttcttccagattaatggtatgttctcggtcagaggaaacccccagcagattatgataaaacttgattacctctctccatgtcctcatgcttggtcaggatcagaccatcatcagaaatcaggctgttgatagaattcttgctttttctatatttagcgtgtaaatagaagaagcttgtattgccgtcatccacagaaagccaggtgatccgagaatggattctaaccaaagaacgctgcagggatgagagggcaacaatgtgagcctccagctgatccaacaaccacttctccaactcagataagggcctgttatcatgggtgatctccagttgatgagaaatttcacatgccagccccaactgagaaatgatgtggccaactcttttctgactccaactttgtagacgcttgacagtggcaccaaactttcttgagagagat

SEQ ID NO: 44020 - DNA, 447 bp, Zea Mays
ttcaggcctaataagtaataacacatgacatgggggataaggttaggacgcatgcgtgggtgattttggagaggggatctatgctcttgggctttaaagggggggaggtgtggggccaagggaaggtgcttacgggtatcaaagacgacgaggtgggggaaagggtgggggagaaaagaaaagggacgtcttggaggaaggaatccgtcgggtctgcccgtccgtccatgcagacagaagctgcagcagctttggcctttggggttgggtggtcaagtaaagtacggcgcccctgcaaaaggcttcgctccggctagtagggttttgatccaaatcttggaaagggatactgccgatcgcccactgggcactcgggagagctacgagactgcagtctgcagaccagtagagtactgctaattgtgctagttggatgaggctaccaga

SEQ ID NO: 44021 - DNA, 642 bp, Zea Mays
taaactactacacgtcgtgtgtcgattctcaaatctgacacgtactgtgggtattcttatgcatgccttcttttttaaacggagaggaaaagtagcgacgggatcggatgacttgacttttacgaggttcacatctgggcacgcagtgacaagtagtacgtcttaccggccttctgtgaccgatggtcgtcgcctgttgtctccgtctccgtggacgacgactgcagagctcaggactgctgctagtcaaataatgtatttaagacgaactcgagggggaaaagagagagagagagagagaagaagaagagtagcagcagctatagtagtgtaaacttggaagacacaacacagcacaggaagaccgggcgtacgtcgttctgaacaaggaagtcaacccgccgtctactgaaagaaaacagcgttctatctctcaggcaatcacctgttcttcagagtgttgcggctgcatcacattgattaaaaaacggccaagacggcaccggctaacccacgacatactacctgtgtacacggaatgcgatcgcatgttcaaagctgctgaatttggaccctcattaaataacgtgtgcactggaagctttcagagagctgtatgtattcgatgtgtacagcccaatt

SEQ ID NO: 44022 - DNA, 461 bp, Zea Mays
ctttattaagtcgttattatttcgacaacttgaacccacagctgaaacccactggccactgcccactggcaaccccccacgtacatatcacgaaaaccaagtttgcatttcttgccggcagcacaagctccctacttcatcgacgccaagagggcttgaaaaaacggaaaccgtagcgagaccccctcacggcgaagaaaacacgagagaggcgaagcagtcaccaggctaacaacgcaaacacacagagacagagacagatcaaagccgcccccatcgtcatcacgacgactgacgagaacgcacgcagacatggactacctatggagctgcaagggtcggttcagttcagtcgcggtagaagacgagcagcgcgacgcagcggcagatgatgcggagccgcgcaccctgctccttcacggccctgccgaggcccctagccccgcgcctcccctgtcgac

SEQ ID NO: 44023 - DNA, 1169 bp, Zea Mays
tttgggcatttgatgtggatggtgtgcaagggagagataaggattttatatcggttcgggtggaatgtccctatgtccatttggggtaacttaaccgggtggaatgtccctaggtccatttgggtaacttgcataccctgcactatgtctataacggggatggattacaaactcggttgagggagagcttaatgcccatgcatctggtgtgaagtgtgaatgaagtggagtgctaggtgcggttacatgtgttggctacttatgctagcttgttgagcgtgtccttcgatcgtggtccccccttccttttatagaccaaggagaagggagaccttattacatatatttagaggtcaggtgagatggatgggagcccaaccttaccgtgttgcttcttgtcctccaagacacttgttgatcaaaaggcccattaactgacgtcgttccttcccatcatcttactacagccacacatgccatactacatgccttttcttgttcggtagcgtgtgcttagttatcctttggtcctaggattggtcaagccatggtcagcttccatacagatgatgcacgcctgttcgttactttcctagaatggtcattcaaactatctctgatgtcgaagcccgtattttgacataccaactatagtactgtcattcaaactacacatccatgtcagagtctgactctttcgtacctttcctaagatggtcaccgatatgatcctgagagttctaggtttcaaggggacgggtgtagctctcgacccataggtcgggcaaggcgttctctacagggcatggttttgtaactgacccctgaagcagttagaggtcgggcgatacaaagaccatggtcagtccgtcctgccctcaatccttgagggtcggggatcagtcaagacagaaacacgaggcatgactattcgcagggttgggagttaggtaagacgcgttatttaatgtttatgttgtacctaggttattcatctgacacatgtgtctttagccaccatgttgttggtcttcttcctctcctttgggttgaggcagtgcataagatgttgctcgtgggcggatggtgcggggcagcgtccacatgcaccaaatgaaacatgctaagccaaacctaggatgaatacacttacaacccttggatctttc

SEQ ID NO: 44024 - DNA, 285 bp, Zea Mays
agctcctgaatttgctagaaatctggtttccacacatacatcatagtggtttagttctttttggtgtgaataaattgcttgtgtggaagatcatttcattatggatcatttcattacaatttgaaattggtttcctattttcagttcctatacaaatgcatgtttaaaggataggtgctggtgtggcagatgatttcattccatgactgttcctattgttgtggccacagtctagataaaaatattaggtgtagagccgaaatggtagcatttctatacgtggcc

SEQ ID NO: 44025 - DNA, 716 bp, Zea Mays
gaaaattgatgacactgtcaaagcgtgccagagggctttcaacactatttgctccttcatttgcacaagagatttgattcaagaacatatagccttcagggtatggccgcttgtggaaagctaggaaatgccgaaggagaccaccacggattctagtgatggtggtctggtccgactgaagtataccttcagatttagggagaaatttgatgagccgaacgaggactggctgaagtgcatcaaagctattagtgatgagctgcttggagcatactccaaggctggagataatgccctgtccatagcctttggtggccggggcaagaaaagattaaacagggttccatgctattggcttcgtataccctgattaccgctacccgctgtgaggacaagagaaaaagaggaagattgctgcttcggtccccccagctgagcctgtgtcgaagagcaaaaaggtgaaggttctaacccaccggtcgtgttacattgaaccggccgcggtgcctgaattttgcgcagggtccacttcagcagccgaagcaacacagactgcttcgattacacagagcgccgaagagccgaccgtaatgctgaagacgcatacagtcaaggcaattgaagataaggttgataaggccgaagagccaaaggttgaagaaataataaggatgccaaaaattctgagccctccgacgaaggcaaatctgccgaag

SEQ ID NO: 44026 - DNA, 421 bp, Zea Mays
atctattggcacgagggaatcacggccagtggttggaacggcctgagaaagggggaaaacgaagactgggattcagagctcacccgatggccatgcgagggacgcggtcgagtttgttgtgatccggggttgatgactcttacacgcggggcccatgtgtcagtgacttcaaggaaaagaaaagggcgagcagagtgggcaggcgtgaaagggaattggtgggccgcgcgagctgagggaatttgggccggctgagggtttgagcccaatacaggtacattctcttttctttttcttttattttcctattttggttttcattttgaaatttcaagtttgaattcaactctgattcatctttctgtttcaaatttaaaacagattccaatcctagtgtgtcatataaatcctactattttcg

SEQ ID NO: 44027 - DNA, 701 bp, Zea Mays
gggaactgtgcgcggtgcagttgataaacttctagctttcctgtgagggacgggcgaccttttcccgtgcgtgcgtggtacggttgctgaacttcatccgtgagtttgtgtggccgaatgttttttcatcgattgtcctatgtgattgagttagtaggtgtctttaggattacgattggatatttggattggatggaacaggggtaggttttcttcaattttgagcggcggagcctgcactgaagactgaagctgcttgagtcacgcctgttccgacgatttttgcagaaatcgcccagcctacgggactgattgggcttgaagttgtggcgcgtacgagagatgcctcatgccagagcttctgttattagagactgaagttctgcaagcgcgtgctgctgctctggagttttagcagctgtgttgagtggttgggagccatggagtcacggatggatcagtacgaggttttggagcagattggtcgcggcgcctttggtgctgccatcctcgtcaaccacaagacagagaaaaagaagtacggttcaatttagttactgagcctgtttccccgtgaatttgcctagccgacagtcttttgctttgctactgcaggtatgtgttgaagaaaatacgtcttgcaaggcagacagagcgatgccgcaagtctgctcaccaggaggtcagcagaacagaaattt

SEQ ID NO: 44028 - DNA, 469 bp, Zea Mays
gtccaaagctgtgggaatctatccaaggtaagaatcatgaaatggttatcagatttggttggttcttgagctgattttgtaagtgcacccacgaattgctttattcagatgtgttttgtggcttatttatgtgtaaatcccttgaaggtagagggttgaggtaggattatgggaatctatatttaatctctactatatataattcactttacgattcatttttgatgagttattttatcttgcttgtgattctgaaataaagaccaatgttgcataatgttccccaatatcatcaggaagtattaacttgaatggtaaactcattgtcgaagttagaagacccggtggtgagactgtcatgtctaacatacttcacttagttgaagaagcctggctgacaaggtatagtatgtgaacggattcctacacttatgaaagttagaggtatgatattcaaagcattacatct

SEQ ID NO: 44029 - DNA, 765 bp, Zea Mays
cgcgatggtacagtgaccagattggatcgccagctcagagacctcgccaccggcgaccacgtgcgtggattcatgctatcgccgtgattcacgctgaattaaacatggataacgatcacggggtgaaagatctcgccgtggatgggctggaatgtactgtgtgcgtgatggttcataagtgcacaccgacgacgtggccgagcggcaatcaccggcgtgttcgccattcactgggtggacgccacgccttaggaggtttatcgtgtcagtatgagtcgaggtgactatccaatgaccgtcgtagttcagtcgctctgcggttgccacggtagatcgccgccgtgactcattcccctatcggctgccagcgcaattcgcccaaattaaacaacacctctcatggactatataaattgagcacgccatgagctccgtagggtagtcaagcaccaagccaccaagtcgtgccctcaattgatcaccagagctcgctaatttctcatttcccccaaacctgctttccgccaccgtgaaagaggcctctccatggccagctcgattcaggtccaatcttgccctctgctttcttgtttcagcaccctaacttgctcctaatactcgctgacccattcaatttagctaggcggtcctagatcaccgggaacgcgtttgaatgtccgtcgtgcccgctatcaccgtggacagaacgttttcgagctccgatagtgaaattagttgaggggaaacgcttgttaggacttgaat

SEQ ID NO: 44030 - DNA, 745 bp, Zea Mays
gtccaccaatagtgttgctttaaatcttggtacatcttagtacttccaggatgaatggaatatcttctaagatgagcttcatccaaaatttgctggcggacttccgcatccttaggcataactatgcgattattaaaccatattatcccttgatcatcttttctaaagcaattagctttgtcgacttctattttctcatgaatatgcttcatacccatgtcacttctttgggcatcaataatattttgcagaagaactgacttaagcttaaattgggtcaaagttccatgttgtatcattcccaggtttaacttctccatttcttgacataatgtaatgtcaggggtcctcactgtaagacaatggcaggaagcattccgactcagtgcatctgccaccacattggcctttcctcggtgataatggatttctaaatcataatctttaatcagctcaagccatcttctctgcctcatgatcagttctgactgggtaaaaatatactttagacttttatgatctgtatacaagggcaggtatttcccagcagataatgacaccatatcttgagggcatgaaccacagcatctaattctaagtcatgagttggataatgctcctcatgccagcataactgtcttgaagcatatgatatgactcggccctcctgcattaagacacaaccaagcccactgcctgatgcgtcacaatacacatcaaaaggcttctctatatccggttgagc

SEQ ID NO: 44031 - DNA, 345 bp, Zea Mays
ctgaagaccatcatctgggacctttgaacagatagtgggattgtcagcttaaggaggctccgatagaaggtcttcaaggatgatctcttccagcgcttggtcaaactcagataatgacaacccttgaaggctgacaagtgctgacagggcttgcatgggaatgtcgctgcctctgttgcgacggctattcttgcggatcagtggaatttcttcctcttcctcctcctcttcctcatcaagcgcaccaccggcaacctgaacatcgctgcagcctccaacattgtcctcgaggatggcgctcgctgggccatcaccaaggaataatgtgaaggggccagcgtctta

SEQ ID NO: 44032 - DNA, 365 bp, Zea Mays
tgaaacttgacccccacctttcaaagcgtacaggctacgggcaggccttctgcaatccttgctactcatgtgtgcaagagggggggcctatcgctggattcctgaatctaaatttcagtagcactgttcaacgatcacggtagctcgacagtgtcggcatcacagactgttcctaatatatctcagcagtcaaagctcggtaacattcatgatctctccgtagaactttttctagcgtttttcgccctcgttctacacaagtcaccatgcattgccaaataactgttcacaacagtctctgtctcattgtgccttcaagaaatttcgcaactgacataaaatctaaatttgtaaaagtagctgat

SEQ ID NO: 44033 - DNA, 522 bp, Zea Mays
ttctaatatacctccatgtcgtttggcctcaagaatactgcagttacttatcaatgagctatccaaacatgcttagccgaccactggggcaagcaggtggaagcttacgttgacgatgtggtgatcaaaaccatgaacctggaaaacttcatcaacgatctccaacaggttttcaacagcttgaggcgctactgctggaaacttaacctagaaaatgcatattcgaggtaccagccgagaagctgctcggattcatcatcagtcaccagagaattgaggccaacccagagaagattgaagccattctgaggatggaaccatcgtgatcacagaaggttagaagcttactggttgcatggcagcactgagtcgtttcatctcacggctcgacgagagaggaataccattctacaaattgcttaagaaggtggacaaattatagtggactctcgaagctcaggaagcactagaggcactcaagaaattcttgatcactccaccagttctcaagccacccaaccg

SEQ ID NO: 44034 - DNA, 571 bp, Zea Mays
tgagaacgtcgttgaagagggagtgcgagagcgatgagatggaggatgaggatgtcaacattaggggattggactcgatgcctgcgacgtaggtggtgaccggacgaccagaggctagactcgatgcctaggtgaaggcggtgaccagattggcaagggaaaagggagcctgagcactcatgaggagccaagcgcgagcgtgaccgacgtgaaggaggcgcggggcgaaggtgagcagaggtaggagggggtggcagcggttgaggcgaggaaggcgtccatccttatcacgcgaagttggggtttggcaagcagagcagacacaaaatgggagtttgatgcgcagagagtagagaagtatcaggaaggactacaggttgattataaacaaaggtgagggttttttcgcaaaaagatgacgcatgacgactgtcgaaactggtgctttaatatagtacagacgttcttggctattttagttggcaacagtgaacttagcaagtgtgacacatatacatcggatgagggaggtgcggtggaccgtggaatggaacctggatcttgatgttac

SEQ ID NO: 44035 - DNA, 487 bp, Zea Mays
atcgtagcaccagtggctggtctctttaaattgagcactccactcgctctgcttctctgttacacgcccattccaccctccgcaagcctctctcgtgcaccgtagcccccagtcaccggatttcccctctggtcaccgtcccctccatgagacatcttgtcgtggccaacctgtctcaggttatttcatggccccctgatccatgttttagcattccttattgctagtgaagctctcggtcttggttaattgaacgctaccgcgccgtagctttgagaatgccacgttgtcgcctgggaacgccggcatggacactactcgtgtcatcctagtaggtcactgatttgttccgagtcattagatttaatgcaaccgacttgtgtaaaccagaatgagttcgccagagatcttgctccgctgttgtcgcggagagacaaagattagtggcaagttgatcaaattggtccctagaatgtgttcgggtagc

SEQ ID NO: 44036 - DNA, 293 bp, Zea Mays
ggaaccgtagcccagctttcattaagcttcagaataccaccacttcatctttctcaggcaaaggaacgatgttttcacctcctatcctcactatagacacatcgtgaaaatacttgcccttcatggcctcaacatgccctttcttcacaattgatttcccaaaaaccacgagacttggcctccatggtcggtctttggcattatcagtgccgctatgaacatcaaaatcctcgttgtcttctgaatcctcacacagcctagctaagatctcatcagttatcttttcaacattg

SEQ ID NO: 44037 - DNA, 396 bp, Zea Mays
gcattttcagggccttgctcagcaacagactctgaaagacaaattaaaagtaagatccatattaccgaaatacttaaattggcatgatgaaagaaaaaatagtaaaggaactttactttaaagtttgagtaaaataagctgccaataatgtgttgtcttctgtagctgttgatgtccttctctagtttcgggaatccgatgctctttgatactgtgcttataattttagctccagtgcggtcgtgaatacatcctaaaatctcttcgtcgatgccgccaaaaagcatggatccgggatgatagccgcaagatatggcaaattccttcagttctgatatatcctcttcagaaagttgttggccacctaggtgccgaagatcaaaatttttatcttcc

SEQ ID NO: 44038 - DNA, 898 bp, Zea Mays
tgtataagaccatttatcaattctactactcatgattgagttttgcaacatatacttgatcacatcggtttgatagcaaacaatacaagagctagataataagttatatctaagtttggtgcaagcataaaacatgcataaacaatttttagataagggtataccttgtctcagcatccaccaaccgccgactcaaatatgttatagagtgctccttctcttcagtctttttgggttagaacagctccaatgaccttatcctcagctcttcagcgcctgaagtactagaagcaaagataaataatctttgataagatcaaaatcatgctaatgttctgccccaagtagaatcgatattattcttgacccgaggaataggagtgaaagcatcaaccttccgagtagattagaaataaacctccacaagtaattcaatttgtcgagaaacttttgcatctcaagcttacaagtaggagctcccacattctgaatggctctagttcagtcgggatccacttctatatcatgatcatgaatgataaatcctaaaaacttgctaggcaactccaaaggcacattttcatgagttcatctttaaaccataccgacacatcttatcaaaggcattgcacaaatcagctaaataagaataaaatgcaaccgatttgactacaatatcatcaatataaacctccatgatattctccaacaactcatggaaggttaaattcatggccctttgataggtggcaccaacattcttaaacccaaatatcataacaactcactcaaataaaccaataaagccaggacatataaagatcattttggaagcatcctcttcaggcataaagatctaattatatctggcattaccaccaagaaaactaatgactct

SEQ ID NO: 44039 - DNA, 757 bp, Zea Mays
gaacttgggcgcccacgaccgcgcgggtagatttgcgcaaaggcccctgttggtttaaatatatgaaaggaagccctcgaccgatttcaatgtgtcactgacacaatactctctgcccctcctaagttccttgtctttcaaaattgagtccttgattccggtcggcggcgcggacgaacctccctgccacaccacggcgctggagagcccgagcacccattagatacctaccagacctaattctaatctaaaccgagcagccatgggcatggatgtagcttataaaccccagaacaacctaaccgcgcctacgacggggtcccagttccgtggcatctaccgagacgatacaagcaccggaggattcgaattaagggcacagggagcactagcaggatacggacgacgcgacgcttacatgaattggcatctgaccgactgagttttggtgggttgacaccagagtagttcaagtggcgtcgagcccatgttccaactaaactatgaccgtaaagactaaacggatacctcggtgagcttcaccagtttataaggacatagaacatggatgcatatacgttgaaccataccatagtcacctggccacgtgaggctgaggcgtcggtgacgtggtcaccaaacacgttgagtcacttgaccaaggaagttgggcgaatccaaggtatagtttggggaaaggaaggcaacagaactatgttgaagctacacaccgtggttgacaacagaggtaaggatc

SEQ ID NO: 44040 - DNA, 756 bp, Zea Mays
gttccgactaagtctagggttctcgatgccaaagatcatatctctagccctcggggctctctcaacctccagcaccatatgtgttaggggaaaaatcacgagtccctcaggacttattcccacatcatgtattccaagaagcgtgtaaggttttcactacataacctttcactacacaccctaacaagttagcagacgctaggtttcattggcaagtgtgcataggtgtattcctctgagaggcacaaatggtcacatcacaacgcacaccaaggtaggaaaacaataccacatgagacaccccctcttgtgcctttaaaaactactaacaagttacagacgtactaggtacttaattaagatcagagccatgtgatcctcgtggttgtatggtacctcatgagtgaccatttcagggctaagtccttaatgagaggaatttagagctctaaacctaatgccctaacttttgaaacattgatgttaaaaagcatagttttatcttgttgcataagatagttaatcagaattatccaattaccttggttatacttagcaatacctaaccaatcatacataccaaacccataggttcaagggtatatggatcaaagtgaactagatatagtccttatggacatttcagcataaacatatgcatgatgagcataattaagtaatgttcataggtgcaaggagtcgtttgtttacttgccttcctcaaagttgttttcttagtgttgttggtcaccaact

SEQ ID NO: 44041 - DNA, 632 bp, Zea Mays
cggtcttatccggagcaaaaagatcttcgcacggagatactcactgcccgatcatcccgatcccggcgcagattgcagcgcggacaggtcgtcggcgtcgaggaactgtcgcgctggcagtctgatccacatggggcactgtaccatggtgaatgctcttcagtcggtctgacagacagagtttgagcctcattttctctcaaattcaaatggcaactcgtccagatctctgcagcaatattatagtgttataaaccagctacaactcgactatagggattaaacttagttgagcactggatcaaggttgaatccaagtccaaagttagctctgttacactgtaattctgaatttcagagttcatcagcctgacagtccagctttgggcttaattatctccaatatcttcttaacaactatgcttacactcttaagcaaagttgttctcctttgtttgatctacaagtttgatgtggtgatctagggcaaaaaccctagaatttgaaagatacaaagctccaaagttgagcccttaacactgaatttcagacttagtatagaactcacttgaggtctattttgcaaataagtccaaaatccaaggtttatcttacaaatccacacatttgtg

SEQ ID NO: 44042 - DNA, 1642 bp, Zea Mays
cactacctacctcagcgaaagtaactatatcaatcaagttgtatcataaggtgtcagcagagacgaaaaaaggagaagcatggatacaataatacaaagcaatccctatctaaatgtatttcagttctaagaaagaatttgtgttgccactacagtaacgttcaatattatagcaacataaggaactcgatcaacatgctcagtatctaaaatgcaaaaggtctgttactaaaggtctatgtacacagtcctaaccatagtaactaggttaactagtttataggattgaggatcgagaacgtggtacgatacttacagattttaacactacgggacgagattattccctcgtctctatctatgatccatggcctaacaccatcccatatggtcggcctcgtcagtagtctcatccgacggccaataatgccagcagcaaacctagcaatagatgtcggccatattggctagcaccccaccttacaagtatcagcttcacccacccatggcggccctgcccaccctgctggcagctcgataggatctagatggcaatagggggtggatagcctataaaattctttctctaataaaagttaacacaaaaactaaaataaaacttatatgcgaaagtgtactaagtaatagagaatacttcacaatatgatgatgaaacaatatgtaatagcaagcgtgactgtattattctgccatcaaactagtcaaacgaccaccatcagaaccaaacaccatggtccgatgcccctgttcctagtcacaacggttacctatgagtgggaccccatggtcaatagtgtgattgtattgtatgatgctgcatttttctcaattgtcgaaccaaagacaacgggtctgagcattctagagagtaacctagtcagttgtattattctggcacccactatcgaaccatagctcaaggtctgatgaaccctctgctaaagctctacacttagtggttggattgacactatactagtccgacaccatcaacagttagggtatgacgccctctgtttgtcaaatatctttccatcttttaacaagtcataacccctgcttgtttaaacactttagatcatgatttagcctaagtcaatgatgtctaagattgttcttcacagattcattaggtcctaatacattactactacaactacttatcctaaatccaatcacacactctattataccttgactggtaaaacaaaatatcctagcttatacctttgccttgcatcttacttttacgattttctacaagtctctgctcctgcagcatcaatgatctcccagatccaacaatgtcaggcacttcatttgtcttactcttatcaatcttcattcttgtagagcacctgcttatctttgtggacttcatcctatctcattcatggaactcataaaacatgttagtccacctagttatattaattaccaaaactacacatagagctttatttacattgttatgaaggaagagaaagaattgttgagaataaaaattagacattgtagacacggtgtgattcagggatgacggtggaacttcaaacatcatcagggtgtgatgtttactttatagttcagtttcctgcatgcagttgaagttgaatcattt

SEQ ID NO: 44043 - DNA, 911 bp, Zea Mays
catgattctaatatgatctgatccttaaattttatagtgtaaaacttatagccattactaaaactgtctcttcaggttaatcagcatcatcatctgtattctacacttgagtcccttccaatgcttgaaaacaagtactggtcagcaggaggataattaatgtacgacgtgtttgatgctggcctgcgccaggggaaggatgcacggtgatgccgtccagtgttcggtgacgtggtcggttctagggtcaagaccgacgagagcgcgcattcatcatgccatcacaatcccagggttgtgcaagctacgtgatgcagaccgggcactcaaggtgctagggacgaagagaggatggaggcagggttggagccgtgcgagctaacgtacaattctgtggtggatgtgcttgtgaaggtggggcaaatgggtgaggcaactagactcattcaagctgattgatggggtgacacaagaacagatcaaggtgtggctgggttctaacaaaagtatttaacagaaggtggtcagtgccttacatgatcgggcacttggatgtcaaatctatcggtgtgtcaaatctactttcagctggcctggaagggaagaacagatcaaagcatatgtgcagtcctgctaccatactgtattgggcaaatctccatttgaagtgctagatgttgcagcaagtcaaaatgcactcgcagcatgctcaaactccgatgaaacaccagctgatagacaaaagggcgcacagatcgtacatccgatgtgggtgatcgggtgtgtacttgaaattcaccctttactgtcagtcctcagtggctgaacgccagaaccacaagctagcgttccggttcttcgagccttacaatatgcaggcggctcagttcatccggtgtttcacgtttcac

SEQ ID NO: 44044 - DNA, 296 bp, Zea Mays
gcgagagcagagagctgcatagaaatttgtactttggggaggaggagaggagagggggtacacatagaaatttattcaccagacttactcatctcatcttctatttcaaacatcactctataaacaatgcaatttgcagtgcaaaacaacattttgtatgattatatgcactatctgttggtcacatcttaagtgccctttaccttaaacctaatatatattccatttcacacatgaactgagtttgacctagtgccacatccatatagagtggaacatttgtatctacatggtgt

SEQ ID NO: 44045 - DNA, 728 bp, Zea Mays
gttttactgaacatgcctcaaaagggatgtgcattcttatatcaggcagtgcaaagtgtgtcagcagtccaaacataagcacttaaataccctagtcttctacaacctctccctatacctgagaacctgtcgcaagacatatctatggatttcatagaaggtcttccaaattcaaatggctatacagtgatcgtggtggtagttgatagacagtccaaatatgcccattttattcctttgaggcatccatattctgcacagcaagtggcccaaattttctttgatcaggtggttaaattgcgtggggttcccaaatcaattgtcttagattgagacagggtgttcaccagtaacttttggcagggactcttcaaaaaaatgggtactacattgaaccttagcttagcataccatccacaatcggacggataaacaaaaaggctcaatcaatgcttagagatatttctaagatgtgttgttcatcatacaccttctaagtggtattcttggcagttggaatgggaaaccctaacactgactagggttggaacatgtataaatataccaagagttgttgggcctggcccattacacaagggtatgacagtaattacaaggtgttaaccctgaaaccctaagtgggctctaacacacccccccccccttccgcagtttcaattctatcatgtacagatgttgagactggatcgaaaatcgacgaatacatt

SEQ ID NO: 44046 - DNA, 405 bp, Zea Mays
cacgaattcaccgcgcccgccttcttcttcatttccggccgccgcgcgtcctcccgaaattcactggccaccgccttgccctcctataaattgagcccgtgaccagctccgtagggtcatcagctaaccagccaccgccaattagccacaatcgttcgccggagctcgggaatttcgcgttcgccccaaatcgggtttccgccaccatagaatcaagctcaccgtggccagccctttctaggtcagttcatccctccctttccttcgtttaagctttctcatgcacctgtgatgcttactgacccgtccaattgggctatgggtctactgaccgtcgggaacgcatgggtcttgagttcatccgcgctctcttcgtggccagaccaaattagttcaccattcgtg

SEQ ID NO: 44047 - DNA, 581 bp, Zea Mays
gaaatttcatcaggtcaacaccatgtacctctagatccacatcatgtaccacctgatgtcatcatagagggtgtagaaggaggctagagcccagagccactagccatcctttgatgcagtcctcatctactgcagatcaaggaagaagttgcatcaaagtgcacaagatctagaggggcgtaagggaattgttgcacatgaaaagagggagggagggaagaggaatgtcacagcttggaggtggtcggtcgatgctataggaactcgccctcgggaggatgcacatgcccatgcttgagtggagaaagagagagaggtgttggttgatttgtggaaaatgaaaggggatcagatgaggaagagaggcactagttattaggggattttatataacagtgttgttgcaacacttaaaattgtgtgttgatatgtatatgttgtagaagggtggttttgtttagtagtgatggtggctcaatattgtgagttgtttgctgagtttggtcgctcttttccttttggtgcctagttttcacttttttcgttgttttggtgctccaattggcatgtgatgttttgaa

SEQ ID NO: 44048 - DNA, 689 bp, Zea Mays
ctacattacgtattcatgatgctaggatcgatggtaatcggttctggaccctccaacatgtcgatgtttacaattctgtgattcttcccaagaagcatcagcctattctgcatcagagatatattaactgggaaggatgtgaagcaattggtgatccagagatgacacaggctttgagggcctgtgagaggaagaggatgaagaacgttatgacattccaatatgattggagtgatgaagttattgctcagttctattctaccctttggatcaagctggctgatgaggaaagtccttataactttccttatctcaatttctatatcgaaggcagctggtataaggtgagctaccggaggtttgctcatatccttggattttctgatggcgatatttctggtgacaagattaagattcatgactatcgtcctcccaccaaggatgaagccagggatcttcatatctctgagactgataaatactgggagtcaaccaatctgcataagttctacagatacattaactctctctgcagaatgactctcattccaaaagaaggtaaccaaatgaatgtcctgggagagagcaaggtcttgctctcatttatgaagccaaatagttcagaaagtatcaatgtatttgacatgatttggcaagaaatcattcatgctgcctgcttccctctcaag

SEQ ID NO: 44049 - DNA, 808 bp, Zea Mays
aaacacatattattatattaattataaaatacattttatagcaagcatatttaaaagttaaaacattaatgtttgcattattcccaactatttaactacattcaaatactataacattaatggaggggagatgcacgtaccatccacagagtcagcatactacgcactctactatgcaagagtgccgacacatcagaggttttgagtagaaacttctgaaagagtctaaaccagaagacctaaagccaaaaagctccaaaaccaccaacaataacgactcagacgatgatgccggggcaagttcctaaagccaatgcaagccatcatttatatcattggtagccccgactcgtacgagtctaagagaaaaacaatagttggagatgaggtacgtctactctgtgtagccggccacaccagagttcctccactagtcaaatgtgtcgattacatttgacagatctaatcactctggtcatgtgccacggttagggtggtatcttctgatattgaatccaacagttggcgacacacgactccactgagtcctcattgatggtggatgtagtctgaatattctcttcgtcgaaaccttcaggaagatggggctatcggaaatcatagaagttgagtcttgtgccattttacgacattatcccgggcaagtccatgattccactagggtagatcactctgcttgttatatttggcaccaagaaaaacttctgcatagaatttttgcacttcaaggtggaaaattttgacgcgacacatcatgcaatcatcgaaagacctaggctcaccaagt

SEQ ID NO: 44050 - DNA, 302 bp, Zea Mays
gttggagatctcacaatttggtgtgttggtgttgaatcgagtaggtagacatgtagacgacattgatgttgtcacagtacaccaagatggcatgacgtattggagagtggagctcacaacggagaatggtgcaacctgaggccttgaccacaccatggtacttagcctctgcactggataggtgaatgtgagatattgaagagcacttgctagtctgcgaaagttttgagcatcactgactggagcaccatccacatcatgcaacttggcacaactggccacatgagtggaacaaggtttac

SEQ ID NO: 44051 - DNA, 575 bp, Zea Mays
ttgttgttgtggtataacttgtaaaatgccgtgatgtctctcctaaagataaaacacgcttctagcaacgaagttggtaataattacactggttttcatttccttttcttgcagtcaaagtaaaacggtaggtttaaaacattgccaaaactatgttagcttagtaaggcatgaaataagtggtgtaaatcagtgctacgggtgacacccaagaacggggtattccataatgaactaaatgaaagaagaatcttcctggaaagtattgtactctagtagtgagaagcctgtactaaagtattttgtcacatttttagcagcgcatttgctctacgttcacgtttcgaaccactcatcgttaccccattctatttttttgttccttttacccccggagctccttttaaatactaccttggacacaataatttggacgtgtagataggctattctcacagccagaggcatattttgttaagttaaatcagcaacccaacatgtttttcgacttcgcactgctactggacagaaatccctagcttgtgtgaacaggacaacacctgctgcaatcgaag

SEQ ID NO: 44052 - DNA, 1022 bp, Zea Mays
cgaagtcgaaggatgaggcagtcgtggagctccgagctgggatggtacatgagcagttggtgcaggagtaggcgtggccaggtactgagggaaacctggcataggcacaaactgaggagtcccaggcatatagaactgctgctgaggggtggtacagaaaattgctgctcaacgattgacatcacgttgacagtgccctatgaagaggaagaagtcactggctcccaattgagcttcccattgggattcctcctacacaccacatccttgtgatcctggctgcagatagagcacctgccactctactgacactcggcacgacgatgcgcttcaccacaacggaaacacaccaaccctagcctgggcttaggaccaacccgatacctctgagtactccctcctgaagtaccctgattcagaggattttccacgataggggtggtggcactggtgttacgactttcccctcttgtgggctgaaccctcagtgttggccctcctcgcgtcctggccacgagactgatcaacacccgaagacttctgagattccatggtgtactgatgctgcatctccacgcccaatgcctgctccaccgtagtacgaaaatccaccaacagaaaggtgcccagagcatgcctgatagaaggttttaggccctgacggaactggctcgccttctccaattcattgtaagccacatgagaaacaaagcggaccatcttgttaaattccacttcatactctgtgatggacttcttctcctgcttgaaagacaaaaaatcaatcttcattttctccaggaaggtgaccgggtagaacctcctctcaaactgcctaatgaaaacgtcctaggtaaggactcctggtgaggaggagtgagctgcctgcacgcctctccatcaaatttgagcctcccccttcaacatttgcgtgccaaaacaaacacgatctccatacacaatctcgaaaacatccatcttatcctccacataagtcagccaatccgctgcctcaaccagag

SEQ ID NO: 44053 - DNA, 535 bp, Zea Mays
cgcaaagttgccatgtgtaggagataaaaccagttttgtttagttgttcaacaacatcaactcgtaactcataaacccacttaattatgtttttggatttgtagttatcctttaatccaattcatttcttttatgtttgataacatcatgtcaggtgagtaattgttattcagcttaactacattttgacattgtgctaatattccttgggtgaactctctatgccactgaaatttaatttcgtgattatcaattacaaataagggatttctaaaattttcaatggcataatagagtaataaacgcttaatagcattttaaagaggtataacactcttctggcaaagtgtcactattatcttctagcaaactgtcactaatagagtaatagatgcttaatagcattttaaagagtataatatctgaagcttgtttgctcccccaaatttagaatacattgcaagtttgtgtttagaaaatacttgtttgatgtatctgctagaacatagtgggtgcttttaaccacgaaaaaact

SEQ ID NO: 44054 - DNA, 817 bp, Zea Mays
gcgattattgtcttcttgagctctcatattcacttgtcttgtattattgctcctaagtttgatacacatttcaaaggagcaatcaagtgaagagttctcatctctacatctctactcataccaacttagttttagctttcactaacactcattataaaccagatttgtgttgtttagagttgatttttgcagaatcaccgattcaccctcctcttggttctctcaactctgcgggagcatcagcctcagctagagcccctcttggatgccctatggaagctccatgatcacggtcttatcacagtcgggctcgtcaccgcctttcaccgtcgaaggatgctgatgttggttgagcaacgcctgcgcatgcatgagatgacgcctgaggtttcagtggaaagttctcggatgtcatcgaccaccctcaccactaacgacctcctcaagagggtcaagggcatggtggggaaggtcgattacagcgtccttgcccctatgcgtcctgagtgcggtcacgtgtaagtcgtaaaccacagaacctacttctgattttatctttgtttcttcatcttaacctgattatatgcccttctgtttattcataggggctacggggttacaaatccaccttgcctccggtccctgaggatgcggcgagtcgggcggcgcgcaggttggctacagagcagcagaagaaaaagaaggacgaggaaaagaagcgagcccacgagaaaagggcggctcgtgacgagctcgagaagcatcgccgagcgcaggagagggaggggttgcctctggaggcatccctagatacgtt

SEQ ID NO: 44055 - DNA, 429 bp, Zea Mays
cgttcaaagaaaggcatattggtcgctgggtcccagcgcgcggccacgtcgcacagcatcgcagggatgcgctacatcgccaaggtaaaaaccgtagggcgtcaggacggatcgcaatgtgaaacgcccaaaaaggtggccggagaactcgcctccgtcaactccaaccgctgtcctgtccttgacaccaacgatgttttcgactgattttacacgaaaagcaaaggacatgcagttgcaaaaaatatcggaaatgcgtgttttggttcggtgtccacatttcccgcgcttttgttcgttcctctggatcctcatctcgagccatcgtgtgtgtgtgcctagcaagcagtagagcggttcagtttaggtgccagcgcccccacgaattccacgtctcggatctgaatcctcaacctctccaccgaccac

SEQ ID NO: 44056 - DNA, 347 bp, Zea Mays
ccataaagttgctgggattgggcatgcccgtttgcaaccgatggatcttatgggttttgtttagtttcaacatcatgcgatggaaaatgggtaatgactgatttatcaaatgcccgtgctagcctcctataatcctcttgcacaccccctaatatttgttgcatatgttcccgtttttcatgtacgtaagatcaaagagcttggatgtcatcggatttacttacagtgggttcgagtgcaacgagtcaaagattcaccaagtttctgttttcggtcgaccttgatgagcttctgttttcggtcgaccttgaaatcatccaagaacttctcgccaacttgtacctgca

SEQ ID NO: 44057 - DNA, 331 bp, Zea Mays
ctcggttggagccatgcggtatggtctctttgcgatgggtgatgttccaggaattaaatctatgtagaactccacttctctttctggtggcattcctggcaattcttccggaaacacgtccatgaattcttctactactgatatactttccgttgctaggttgaacatcattgggtcactggcgggtggttgtgcctggcaagagactgactttccctgctggtcggtgaggaggactgtcttgtctgcgcaactgataatgcctttgtgtttagttagccaatccatccctaggattacatcaattcctttggatggcaagacggttaag

SEQ ID NO: 44058 - DNA, 468 bp, Zea Mays
ttcagatgcagctccaacagaattgaaaatacccttcagtcgagcgatgcattgagtagcaaagctgaagcatttatttcgaagagttttgatcattttgttcagtttaagattcttttcaacttcggccttgattgtcgtgtttagcacttcagactcacgattgaagcaatccaagttcctttccaaaagttttcgagcttcttctagctctttgctcagtttttcattttgagattgaactttggcgagagaaccttcggccgaatgtagcaggctgtctttttccttcaatgaagtttcatgtttattaatcctcgtatccaagccttcgataacaaactcatttttctcatcttcgtcgtctagctgcattttcatggccttgctcagcaacagactctgaaagatgaattaaagttagatccccattactgaaatacttaaatcggcatgatgaaagaaaaa

SEQ ID NO: 44059 - DNA, 623 bp, Zea Mays
gagcggcgcgccaaccaagctggagacctggaagccgatcagatgccagaagctgctaccatgggggcaagatatgaagatgtgcatgttgtcctccaactccgcaccacagtgggtacatcccccgtctggcataatgttcttcttgcatagggttgaccagtgatcttgcatatgaagatgtctggcagaatgttcttcttgcatgtgaagatgtgcatgttgtcctcctcaactccgcacctagaccttcgttgctgacatatagtggaggggcatatcacttaaaatactttggaccaagaccaatctgcccgcgcattgaggatcttagatttccgcgcattgaaggacggggcaaggatcgttttcgagaacaggatcaggatggcaaagatcatgggccacacacctctagaactaatgaggctgcgtaagacgtcagcgacaacaatgaagatgtagggagagatcggggcatcttggcgcaagccggttttgcaaaaaatccaaggaccaggcactccgttaaggagaatagaggacttaccagagctaaggatatcgtgcatccattccagccacaccactgggaggaaaacccacgctgctgcagaatgaga

SEQ ID NO: 44060 - DNA, 530 bp, Zea Mays
ggcgcatcagttattttttttcattgtgtcgcttgctagtgggtctaggacgccaggctccttcatgtgaccatcgacaccgtggggcccaaacggcagacgcctatcgcggcttggagtccagctcactcgcgccgtcgttccactgctggtgggatctttttttttatttattcattttctcccgccgggccactgattggtgggctctgggtcagtcgctttccttgccgcatgcatgtgagtactgctcgaccgggccgctgacaaatggaccggcgtcgtcagctctatcttcccagctgcctgccgaaatccccaaacagaatcgcaccggccttgccgagatcccgggctgcgtccgccatttccggtaacaactccaccgcggcaaccgacctttgcaggtttccctcgggtatatatactagctccgcgaccgccccgtggtccatcccagcgtggcgtcaagcaaccgctcctccctgctacctcctcggcgaaaacctctctcctccctccagcctctg

SEQ ID NO: 44061 - DNA, 400 bp, Zea Mays
gaattgaggagctactgtgaacgattggaggtgagggctagtgcattgggcacataacaacctagcagagcatgctgaacactcaatttatagagagcgatcgcgagtacgacaaatttgggcggagaagaactggcggtaagaaaggggaggagtcaccgtaggccgctcaacatggcattcagtgggctaagtcctcgacgacagaggggctatctatagcgacctactacaacatggtaacaaggtcagtagcatggcgtgcctaggttaaccgcgatcatcaccgcgacggccgcgcggccacgtcgaggcgcaagtgggtacggcgatagggtggccacagtgccccgacctcatccctggcgtgagatctttttaccctgggtcgttatctgcg

SEQ ID NO: 44062 - DNA, 571 bp, Zea Mays
ctagggatggtcactagttgcacctcccatcgccccttaggaactggtgatgcaaggaccctaaagatggtcacaacagaaaggttgtgaaagggctatcaagaatggcctcatgactcgtgggtcaatgtcgtgtggcacatcacctcgcatggagttctatagggatgtcgagaatgtgggggcaaacaagttccataaaattcaaaggagttcgaacttgaataggggcaatagtggacaatggacgaaatctagtcatcccttcttccacttgaactatggagcaagcaggacgttgcaccaccaagaatatgtcaagtgtgcggacccaagctcactgccatggtgaactgcaaccctcatttttatacaaccttctccacacaccccacaatgcttctcaatatggatcaaaggtatttccagtagatcatttcctcacaccacctttgtggtaggagagggtgacgtgtcgaccacggttaagggaccacccaaagacaaagggtctgtttggatccccttggctaaagtaaaagggataaagtacaaatgctaaactttagct

SEQ ID NO: 44063 - DNA, 762 bp, Zea Mays
tactggttcagaccgaggtcctagtctagtgtagtgctgattcatgtattgtctaggagcatgttacgacgagtgtgctagtgtgtggaagaaagaatgttccgtccttttatagctcaagggtggactttaccgttgaaacttatattctactcgagggtccttggcttgttgcccctaggccgctctagccctcctagcgtcgtctatgggggtgtgcgttgtcgtcctcccgatacgacgttatgtcatgtctgctctccatacggggcactgtagcttgctcggtgtcaaactgtcaatgttgcggtaccgggtcctgcaaagtggactcacggcgaggttctgggttgtgtctaatatagcttcatcttccgtcataccccttacatcaccttccagcatgtgtaggtatacatccactatggggtattgtgtctaatatagcttcatctgctcgttgcggtcccacacgtcggtcccgcctccatcctggcctccctcccattcgctcctcgcgacatcgcctcctcctcgatgcccgcgcctctgctaaggatttctcgggttgtgccagtttcagggaacccacttcctccacgaagaattccgttgatagccatgagcatgtcgatggccagaagcccagaacgacgacttcgttgttatatatgggccttataccattgaaagcatgcttgcatttgccttcatagttctaatagggattatttatgttataccatccaaagcctacttccc

SEQ ID NO: 44064 - DNA, 527 bp, Zea Mays
attggttccgcactcctttgcgctgggttttagggccgagtggtgtaggtcagcgcacttgggtgcatcgccggcgaggtcgcgaccgtcgtggtggaagcgccgccctgttaagcgccaggggtggaagatggcctttagaccgtaggatcaaaatctagcgatcatgagtggaccaagtcgtggactcgtggtagtacgtgggtcgttgatcactgggtggacggcttagattaggcgccgcgtaccccttcgctcggatagatccacgccgtgaatctcggatctaacggtagtatttagataaggtctcataaactttgggcctttggatctcgatccagcggttgataaggcgtaccgtttcgcattatggtggatctaatctggcgcgttcgtttctgatcgagcggtcgatagatcacgataccctttcgctctggcacattagcaaaagaaaccctagactttcttgaaatagaacacgctgttcgtcctcgtagatgactgagtctaaggagttttta

SEQ ID NO: 44065 - DNA, 755 bp, Zea Mays
aagtttgaacaaggagggtattgtagactacttaggttgcttcagtttttttatctgaaggacgctaacctccgagcgtgctgctatttcttctagatgggaggtatagatgaatctgtgttggatcgtctctcgctggtcacagatatgacaaagcacatacgtgtccgggcctcaggtggaaggtccactgcatccgaacttgggcagttctcgcctgtctttgtttggttgttgcgagtaatatatttcattccttttctcctatactaattatgtatactgaatgttgaacgctttggctattccctagctgcacatcatcttataaaccgtcaaacataaacctcaggggccctgttatgcatcagacacctttggtgtgcgacgagccgatgacaccgtgcttcctttactacaggacttttatctggatttggcagaagacaacagaaaaattactccacgagattacctagagctagcattgaggcctgttcaaggtggaggaagggacatatctgcaaagaatgcggtatgatagattttcatgggtgaaacgtggctttgtacttgtgcttggtaactagacgtatggactatacttatacttcttttgttgttctggaagatacggaactccatccgtgcactttttccggacagggaatgttttacacttgtgcaacctgtgaacaatgagaaagatctccaacgtcttgatcaacttcctgtaagtatttcttcctttgaac

SEQ ID NO: 44066 - DNA, 448 bp, Zea Mays
tcagctgatgaaggtaaatcccgaatttttccaagacttctgcaatcattccgtgtagaggaaatctcaaccctgctttgaaaaagctcttaaaaactacaacttcatcattttctggtttcgggatagtctcttctccgccaaagcgaaccaaccccttctcggcttttctgaagtagcctagcttcgtcatcatagtcatatcagcttcggacacattcaatttcccaaaatccaaatgactgggcttcgatggcataatgatgttataatcaatctctccttcattagcatcaccctcttcaatatctgcatgctcgacttcagcagcaggtgcttcttcgtcagaagtgccttcagtcacaaccaatcctgaccgcctcataacttcggagatcggagcagtttcagcagcttcggcttcctccccgtcgcgagtaaccctagc

SEQ ID NO: 44067 - DNA, 512 bp, Zea Mays
gaaatggcatcgaagtcatacctatgcagcttcagtccaacttcgagctatgcaagaattgtgggatttatttcctactaaagacatgccagttactgatggtcagaaatctgtgcaggaagagcatttgttttcagtgttgttatctgaagctgtggtggcaactccaatcaaggggaccttacagtttgatggtctgatgcaaggtatcacagtcaccattttggttgactctgggagtacccattcattcatcagtcagtgtctccttgacaaactctagttagtcatggtcatggaaactctagtacaagtgaagatatccctctcgctgaatggagtatccatgggtatacttttcagcaagatttgaaggtgttgtctctccagagttatgatattattttgggcatggactcgctagaaacacatagccccatgaagatacattgccgacagaaatggctctctattacttctcacaattcttcatttgtattgttgggatctag

SEQ ID NO: 44068 - DNA, 647 bp, Zea Mays
gaagttattcgggccctgactcctcgctatgggtactgtggtcctggtcatactcttcttggcgtctcagttcttgttcatgtcatcacacacgtggtgcctcgatgctgctctgcatgttacgaaaactattgggtcggtggtgtgtgtccccctttggatgagccggaggaagaagatgattttcctctttcctaaggatttgccagtaggagtttccatctaatgagttagggaggtcgttgtcgatttgggccagcacaccttcgacttgacttggagtttgcatgaatcaagcaaagtcggtagcatcttacacggaaggaataattggccacgtggttgaaggtcgtccgctcggcaagctcacgctcgacatgctcgtgtcggtgctcatgctcgtgcatgaaatcttgaacatcatgtcgactctttcgtctagcattcatctgctcaaggaatcctcgctcgtctggggtcggatcatgttcgctggcgttatgatgacaccggatattctagcgctggttccagtgatggcgcctgttacgctactacaagtcctcccctgccatggtggatttgtcgtcagagacaacatcgtcttccactcccccgttgatgacgagctcctcatggaagtagag

SEQ ID NO: 44069 - DNA, 338 bp, Zea Mays
aagacgaaggcctcccccagcgcatacaggctcgcaacgccaaacggcgaagacttggagcactcctggaatatcgacaatctccgcaaattttttgtttgactcatcagagccagttcacccttgtaattcgcaaaaacaattttattctggcccgcactcttttcctcccggggggtgaggtttttaacgaggcggagtcatgtaatatacaagtgaaaaatcccccgcaaaaatctacgtcgaaaaaagaccgcgtcgacggtcttcgacattcgaccaatacaaagtcaccgcgaggcccagcgctagctaccctcgcgtgcgacaactccgcg

SEQ ID NO: 44070 - DNA, 378 bp, Zea Mays
tagcgtatatgttgccactttttgagctcttcctccaccaataatcgacaaccccgtacgtacaccatcaacgacacccacctttgtcatcaccacactatcattgaatgagccaacacaagccttcatgagtgtctgatatcaccaggggccactccaagctagttgggaccttgctcaacgcaaatgggatcctcgaccctactccttagagtacatcaacatcactcgcatgtgtacctacatcactcgctatgaaatgtgccagtaggttggtggacgttagcagcaccgacaaagctaggtgatcttctctagaattggatcccaaagtagcgcccatctcaggcagctccacccatcgggtcctcatacaca

SEQ ID NO: 44071 - DNA, 1038 bp, Zea Mays
aaaatggataagggagttgccatacgtcgtttggagcctgagaactcaacctagtcgagctctgcatggaaatactcatttcttcatggtctacggttcggaggcagtactacctgctgatctcaagtttggggcgccaaggttgatctttaaaaacatagcagaagctgagactactaggctggaggatgtcgatgtactcgaagaagaacgactgaacacagtaattcaatcagcacggtatcaacaaactctgaggcgctatcacgataaatatgacattgatccttcgcagtgggagatctcgtcctccgccgaattctaacgggggaagggcagcacaagttgtcacctctatgggaaggaccgttcatagtagctgaagtcactcggccgggatcatatcacctcactcagatggacggcacggaaattgggaactcatggaacatagaacacctcaggaagttttacccctagctgtatttcaaaagctattgggacgacaatgtattctgtaaactgggaaatatatcatcaataaagagacttcaagagcactcaaattattcgttgtcaacctgtatttttacttaactcggggtgaccactataccctactaacggagcaatcgtcttaagtcggtgatgacttaaggcggtgcaacatgctcacgcttacttaactcggggtgaccactataccctactaacggagcaatcggcttaagtcggcgatgacttaagacggtgcaacatgctcacgcttacttaactcggggtgaccactataccctaataacggtgcaatcggcttaagtcggcgatgacttaagacggtgcaacatgctcacgcttacttaactcggggtgaccactataccctactaacggagcgatcggtttgagttaatactaacttaaattggcgcaacacactcggcacgtgtgcggttactcatcttagggcgacctctatgtcccatgaagaaatttcaaagccatcatactgcattcacttctacaattataaatatc

SEQ ID NO: 44072 - DNA, 741 bp, Zea Mays
ccgccggccaccccctcgctgggattcgcctcaaacggcgacgactgtcgaaaccgggtatcgggtcagcatacccgatcctagatgagcctagtccacgccctaatcgagctaatccgactcggaattcccttgcccacgacgacggcgaaaaccgaggatggaccgaggtgttcccgacgatccagtgcggttgtgttcaagctgttgggtcgatgagcaacattaacagtcaaggatgcttaaacacggcatagaaggggatgaacgaacctaaggatggctagccacggtagagtgtctcacggcggcgcgacagactgatttggtggaaaatccaattcgggcgctacggtggctgatcgggggcgaggagcggtgctctaagttcgtaacaagctatcggagcaagccggggcgtcaatttatagcgggcaactgcgagtacgacgaatttgaatggagaagagcccatagtgatgagagaatgagtcactggagctatttgtcgtggcgctcactgatacaacagttcaacgatggtaattctaggcttgccacggtcatagctacgtggtgaaagagtcacagtgtggcgcaatcgcgatgaacgacgatcaccacacgatgaccatccgaccacgtcgctgcgcaagtgggtacggtgaactgagcagcaaaagtgcccaagctcatcccccgcgctagatcttttacctccagccgttatccgcgtaccac

SEQ ID NO: 44073 - DNA, 480 bp, Zea Mays
tagctaactttatcgatccatgcaaagccgtagattgaacgcgtgattaatgtggcttagaataacacgatctacacacatgcatgatggttaggtagcctaggatgctaatagcccgttattaggcggccggccctaatatatatatagcttgttcttatcactactgtcgtcgcaagaaccacatactcgctagctagctagaaggtcaattgcatactatgcatggtgcacaaacgatatggaagatgacaagcggtcgaattccttgaatttgtgtgctacactacactacactacacgtatttgctagctgtcctgtcctcggatcgaaagattgcagtctcatgctgctcgatcagaatgcgtgccatatgagtaagaaactaaaacagcccctcaagttcagatgtctgtctcgtaaagtcgggcgcaggctcatttaattagttttgcttcctgctttggcactttgtgtcg

SEQ ID NO: 44074 - DNA, 696 bp, Zea Mays
cctttccgtgttgatcgcctgggccagtgccgcggcaaaacgagagttgagggcgccgccgacgcttcccttgtcctcctgagccaaattcgtaccttgctgggggcatcgccgagctgcgagaagggcgccagtggtcgagtggtgctgatacaacaactgtgggtggcggaatttctcgctggtgacgtcaagccaccgtgggtccgcttaacatcgcgggtagagcttcttcgcgggaaatttgtggtaagaactcctcctatgacttcgagttggctcccgcttcgtgtagatgcgtcgggaggaatcttttggggctggcatcactgcttggctgggttcggcaatgtcgccgccagtatggctctaggcgctgccgtgctgcaccgttggggaaggggtaagcgccctgaccgtagatctagtaatgtgcggtcgggatcgggtcattttgtaccccttctcgcgaccaattctaggtcgtagatcggtgatcgtgcgagcaggagtcgagcgtagatatgttaaatttgggtcgtggatctctaatcctaggggccctattacataccgtttcgtggtaagatagatttaatcttggccgttagtttacgatcaaacggatctgagcgacccataacccggcggtcaggtgactttgcttatgagaccctaggatttcattgaatcaac

SEQ ID NO: 44075 - DNA, 437 bp, Zea Mays
ctgtcagaactaaagctccatttgtttcctttgtacaaaaaacactgagcttacaaatatctaccacaggtagcagcatcgacaaataaacaaatagaggttcagagaagtgttttttgtaaggtagtaaacatgtatataatcaaaacatgcagatgcttagtggaataatcagaacatgcacttgcttagtggaaaatataagcatgaaaaggcattagctgcaaggtatttattaggttttcactttctgagattaagcaagccatttagttgttgagtgcatgttatatgctgcaacataccgacgggcatggtggtgaacagaactccaactccatcgacaaccggaggagcatgaggtgagttcactggattaaaatgtaaaggtgccatcttcaggcccattttatttgctaggatactatccatcaaac

SEQ ID NO: 44076 - DNA, 698 bp, Zea Mays
cactaaaacatacttgaaagatgtacgtcgaacgttcctatgtgtcctaacattgggattttgtaggtaattaattatgggtgtcctccaatcaattgcatcggcttcgttgttagccaaatcaactaggagaaatttcttggtcctggttatcagattttcggtgttgtgaaaccttccttgctttatccaataacctaatgcatcttgtgccagattgttagctctgcaattctcaactcgggatatatgccgaatgttgaattcgtcaaaagaatcaattatgtcccaacatttttcaaggtacacatttagagtaccatctaaacattgatactctcccaatacctgttggacaaccagctgagaatcaccaaatgccttcacatgctttactcccatacaacttaaaagctccaaaccgaacaaaagggcctcatattcggcttgattattagtgcaataagttcataatcgactagcaaagtcaaagtaggtgttacttggtgaaacaagcacgatgtcaatcccttgtccttcattgcaaaccgatccatcaaagtacagggtccagggagtaacagtgaggtatgatatatctagtttataagtatcctctatccgatgttctacaataaaatttgctacaacctagcctttcatagatttcaatggttcataggccaagtcatattcta

SEQ ID NO: 44077 - DNA, 276 bp, Zea Mays
tgtggatcctggggtgttacagttggtatcagagcataggctttagattcttggcaatttgaagacaaatttgacacacttgcacatataggaagggtgtgggttcaaatatctttgatatatgttaatgtctttgaagtgcagatgaaataatttcaccctccctaatcctttacggtgatgtggtaagttgtttatgacttaatgcctgatataattcatttctaaattttgatattgtttattaatacgattgatatcgctgttcttttgtga

SEQ ID NO: 44078 - DNA, 295 bp, Zea Mays
ctggcaggcggcatgtctgtccagtccgttgtcaaatagtacgcccgtgctacgaggtgcgctgtgtccatcatcacttatacgttgccagggaagcttccccggcacgccgatactacgcagatcttggatgtcagggcgtaagaagattgctccagcaacgaacattagttgctccaagtattacatctgttatgttcctgggcccacatgtcggggctcagtacccttgtacgtgccccccttagctataaaaggggaggcatgcaacgttacaacacaggctgaaaaaagc

SEQ ID NO: 44079 - DNA, 509 bp, Zea Mays
catagccttttggtcatgctcacttctagggctccaattgtccacagaggggtttaaactagggtttgggcatttcctcactatatgtgcatgataaagccaaggcatgacttctaagatgggttgcacttacttaggatcttgattcccaagtttggtgtattttgctcaatttaaaccacatgtgatgatgggttttattagtgtagtcttgagtgaaaaccctaagtaacacctggggtgttacacccacgggtaccggcgaaggcacaaaaatcccctgtgtcactaacaatctcttcaaaggcttcggcttcaccgttaatccactggataactctgtcgaggtcaccgcggatgaagttctgctctgaggaaaatgcaccaactttagaaaagctattcttcaaatttttggcgcatctatagctacatttgtaacatttttctttagcttcacgaagctcttctacatttttctgtactcttgatcgttcaatattagatat

SEQ ID NO: 44080 - DNA, 714 bp, Zea Mays
ggaatttcagcgattacaattaccattttgaagcaaagcaaagcgggtagagaggataggcttagcagacattacagcaggattacatactaaagatgtcacaccaggcctgtatctgccttcgctttgttcgtggagaggaactgtgccacaaccaggaatcaaccttgcatgattggatcacttgtcgaagtggggtgagctcgcctcttaatacctttgtgttccggcgtttccaaaggtgcaaacaacataggaggataaagccaattaaaccctgtccttgaagagcatgggggcaagcaagttcgaggaggtgggagcagtgcatatccggggaatggcgatgccagtagcaatctagaaggttttggcaaagctaatgtggaagagcatgtgtgacattgtcttgggttctaaggcgcatacttcacaagtgtcagaatctaggattttctttttgcgcaagttcactcgggtttggagcctgtctttagaggtgtcagggatatgatccccaatccctagggcccatcggtcagcgagcacaccggggaaaagacctatggaaactagggcccgctggtcagtcgaagttattgttgcagaaatgcatagtgatgcagagaagaggaaaacatagaattcaggtttccctgagattatcaagaaatgcgactttcatattttacactaaatgctactcatcaaaat

SEQ ID NO: 44081 - DNA, 865 bp, Zea Mays
acccataactccgtctcgtccgggcctgccctcaaacaaggtacatacttgggagaatccttgtcccggccgagttcccctctccctagaactaccatctccgcctcacccgagatcatgtagggcaagaaagacaaccccgaggcaggtctcagccgaaggccgcaagagacataagcattcaatgtgcatacctaccatacactaatacacagcgtcacaggtgaacaggagcgacaagaccgcgatcccatcgaccttcaccaactacgatagcgtatgtctgagtacagcagctactgttcccccacgccgcctgccaacccctgatgggacacacataagataaaagtgttggatggtccttgggagcaaactacgcctcacccgaagatggcctcatcctcgggacaaactctgcctcgcccgagcccagcctcggctacctgctccccgcgaatcccgcaggaggccatttcttcaactgtgtcgcccgagctcggcttcagccttgatattatcaacggaaaggcacccgacgtcaccagaaacagtggagttgatgagtggctttttgtcatgctcagcacttcaccaaccactatgacatgggcagcttccccattaggtaggctcgggcacgtgaccgatccctaagctcttgcctcggttctctacaggaaccggacgtctccaccgggcataagtcaacagcaagtacaagccccataccacaggccataccgtctacaggggctcgacctcacctcctcaccatatggggccaacctcgacactcctggcagctctccttgaggctataaataggggagttcacggcttcaggcaaggcggatgaacactt

SEQ ID NO: 44082 - DNA, 992 bp, Zea Mays
accgctgcctttgcacacacaccattgcacccccctccctttcttgaacactagaaagcaaaaccctagcactgaccatggcaagctgcctcgttcaccacggaacggaacggaacgacgccttccatttgcgcccacagatgcttttgagcgcctactagaatcaaacggtccggccgggtctctgcgaatttttattttatttgaaaaaatcttcgtgctttataaagctttcgtgggggagaaggagtctgaatttcgtcaggatctggtgcagttccacgtggggattgatttgaacgaccgtgattataaagcgcggctcacctttcgatcaacctagtattccttgcttgcttcggtttaaaacccaccctaaccagatgcatctttcgatcagctgtggggggaatccagttaacaacgactgcatctgaaatctggggagctgtgcaaaaccactggcggagcaatgtgactgggaatccagttaacaatgactgaatctgatctggggagctgcgcaaaccactggcggagcaacgtgaccgaacatgagcgcggcagccttccagtgcatcaccggccggccacatgtggacagattagcgcatgcgtaagtgcgtaacccatgtccctaagcagtattcaagcggggcacacgggtacagcccgcctcggtttctgcgctaaggaatcgagagaggtcttattcatttcttctcaggccatatccccccaccccgatcaaggcatgtgtatctttttttttacgtaaaatatctagcaggacatattttcgcgtgatagcttatcgtgcgcacacgaatgaccatgccaccgtgctttgattgataggacctgagctatacactgttaacaaattcttataaacagtcttatactatatgccagcatttagcgccctttgctatgtgctacataaaacctcgctctttattctacgcgcctttattccaagtcttattcgg

SEQ ID NO: 44083 - DNA, 585 bp, Zea Mays
agaagcggactgccaaggaggcctaggacgccatcgctgcgacccgcatcggcagcgaccgtgcccgcaagaccacaatgcaggcacttcgcaaggagtgggagaacctggccttcaagccaggtgaggatgttgatgactttgctctccacctcaacactttgttgcagaagatggtgcagttcggcaacgacacctacgatgaggagagagctgttgagaagctcttccgttgcatccccgagaagtacaagcaaattgcttgctcgttcgagtctgctagacctctccacgatgataattgaagaggcgataggtcgtctcaaggtggtcgacggcgacgaaccacaggctccctctgggcctatcactatcggcgggaagctacatctcactcgggagcagtgggaggcctgccagggtgacaagaagggggagtcctcgacacgaggccgcaaacgcggcaagccgcgcaaggcgcgtggaggcgcccaggccggggcgcgaggacatgctgagggtggtgcccgtggaggtgcccaaggcggcgccgtcggcaacaagaagtcgacacgagacggcggc

SEQ ID NO: 44084 - DNA, 750 bp, Zea Mays
aaattctctatcctggcgggagttggtgctggaggggccttcttcctccgctcagcttggcctccttggttcttggtcttcttttggattttcttcgtgggggcgagcttcttcagcttcttatcgtaatccatctttagggttcggtaggcttcacgggtgttggcctcctcgccttctgctatatcaagacactcttggagggatgccttctccttcttaagttccttgacctgctgctctaagccttccacccgggatttaggtgggtgtagtaggagaaaaggtcatcgtagtagttgtcaagagtgtggaggtatctggccatgtagacgatggtggggtcatcctcggtagggtctctccctgacagggtctgaagtcttttcctccaggtgggtgtatttttgttgctaggtgggaagtaacgaaggggggtttcaaagatctctctgctgtagttttggcatagctgtttaagggcttttcgggacacactttggcaagtgtctgggaagcggtgcccgatgaaggtgacttggaagggagggtggtttgggtaacttcggctttctcccaggtagaccgccatagagcacttctccattccattttcacggtattccttccagacatattcgggcttcttgtggatccccatgcgtagcgcgcaactccgtagaaggtgaggaaatccttcctcctctgagcagtaggatgtcctaatgacccaagagccttccatctggt

SEQ ID NO: 44085 - DNA, 513 bp, Zea Mays
aactgccaccgttgtatggagtataacattaccttcgtttcactatcttaaaatgccctaattccgataaaaatttcccttgaaatcaatatgatggagttgaccaaacttctcaactaccttaaaatgggctaattccgatttggaacgacacatcgtagcaaagtcaaatccacgcatcccattccaatacaaaaaggcgcccccggcattctttaccgttgatttgatgcgtgacgggtcctgatccaccccagtctccacctcacccctctccactcgacggctcgatccttgctgcccgacctttttttttgatctgctatgctgtagactaatcgcgattaaggaaataaggggggaaaaggaggaaggtccaagcggcggcagcagcaaaaacccgctccgaaaggcagaaaaccacaataaacaaggcacgcaacgaatccgatcccgatttaattcgcccaaatccgtcgattaatccccacgccggccgcgtcatgctccggc

SEQ ID NO: 44086 - DNA, 374 bp, Zea Mays
gagcagcgaaggatgaagataagtagagtagtgtagtagtaggtggtatccttatgtaaaataaataaggaaagttgagttgtaccagtgcgtatgtataatgagtacaagtctggcataatgtaataaaggtggtgtacttgtggcatgtaataatcaagtatgtttttcttcctcagatgccatcaagaacttgtgctcaagatggtgcgggaatttcccgtggtggggaggaaactccgaacccgccgcatgtacctcccacattagctaaggctatcgctgccttagttaatgccactgctgataacacctatttcctgtgtgaaatggctgggaatcagtttcatcagcaggcaggcagaggtcaacca

SEQ ID NO: 44087 - DNA, 646 bp, Zea Mays
gcatgattacacccagcttttatgaaagcagcgaccgtaccacgagaagccaccaacgcatagaagtctccatggccggttatgactttatcgaggacgtcaacttctttctcgacgcattcgagtgccccggggacatcttcggcagagaggctagcttcctcgaatgcagctccaattgaattgaatatacttttcaatcgagcggtgcattggcttgcaaaattaaaacatctctccttaagagttctcagtgcttcactgagcttcatgttcttctcagcctcaaccttgagtgtcattttcaaagcttccgattcacagttgaatcggctagagttttcttccaaaagtgtctgagcctctgccagctctttgcccaatttcttattctgagcttgcgcttcgacaagcgatcctttggctgagcacaacaactcatctttttgttttagagaatcctcaagtttcttgatcttatcttctaaacccttgacaataacttcgtttttcctgtcctcatcatcttgttgcatttttaaagctttgcatagtaataaaatctataaaaatgaactcaaagttagaatacttaagttaatacggagatatcagtggtaacttgcaaaaagaatcttactttgaa

SEQ ID NO: 44088 - DNA, 446 bp, Zea Mays
gaaaggaagggcaaaggaagtttatggtctctttgaaccagtgaggactagttactggttgttggcacctcttgacggccaaataccaacgacccgagggcctccacaccacgtgtaaaactttgaggtcgactctacgatgtggaaacttcatatctatttctacttaaagatccaccacctctttggggtcaaacactaatgattcctagatcccactcacagggagtgaagacctcggggacctctctgcgaggtgcgagcgccaaacggtacgcgataagtcaccagaccgtccacatgtaggtcatcatcgagcagataattacgctcttctctgtggggtgcggaccgttcgtgtgtatgtggcggaccgtctgcgctggcgtagagggattcacgttgaacctagatctcgcctcccgggagggaccctgtcggggagg

SEQ ID NO: 44089 - DNA, 669 bp, Zea Mays
tttagaaatggtaggagagaagttaaacatcgaactcgtcgttgtagtagctttggatgttgccagagagggagaagatgtcatggtcgaataaagtgcctctctagtcggtgcttctattgcctctgctcatattggcgaaggtgagcttgaaggtgatctggctgattggagacgagtccaacgaagggagtgaagaatttgagtttgaagaggattgatgttcggccttcaaaggccaaccatgtatgcttcaacaagtcaacaattatcaagggtcatattgaagtgttgaaaaatatagactacataagtgacattgatatggttaggcttgacttcagctcctgcttcataagatgattgtacaagtgttgaaaaggtatgacatatatcttcatcagctaacccctaatgctataatgaggcttgggtgtttatctaggtggtatggagccaaggtgtggagcccagcgcacaatgtttctaccaaattcacgagcttcattaccaaactaaagcaaccggaaaagtgtggttgcacaataatttcaagcgccatagtttccaatgttggatagaagcttgcttcccgaccttgctgtaccgcagcaagttgccaaactcctggacaaaggaatgattctacgtgaagaatgatttggagaa

SEQ ID NO: 44090 - DNA, 376 bp, Zea Mays
ggcgaagctccgccgcgactccgcttccgtccacgggccggcaatgtcgcagcgccaatgcaggtgataattgtcctcctaagttagccttgatcgccgtcagaatatatgctaatctacgctaatgtgcttgggatggccggatggctttgcgccggtgatggcctccgccacgggaggcgcgcgcaccgccgcctccggctctcagggtgggaagccgaattcctagacgtcgatcttggcctgaacggccgagattagatcacatgtgtaccgatttgggaatgttgatctggaccgctaatctcgaatcttggggccgtagtcgcgtaccagtccggtttatgacggatttaatcctgatcatacgatctaa

SEQ ID NO: 44091 - DNA, 334 bp, Zea Mays
ggggcacttccctaacctactgcaggatgttctgcatgcattgggaacctacgtccaactcctgtatgagacaaggcaagtgtctgagccccctcgggcttgctactacatcactcacattcatgtcagggtgatggatgtaggggatagagggttcatgactctatcagctcatgagtctctgacgccgctatccacctacgctgcttcggtcagcaatgttgctaggcgagctctgtgtctctcagccacacttaccggcagcagctgcatgacacgaagtacatgcatattcctctacgtcttcgtggagaaagccagaccagcattgtcc

SEQ ID NO: 44092 - DNA, 427 bp, Zea Mays
tttcccggccgccgcgcgtaatcgctcgattcaccggccaccgcccccagagtctataaattgagtgcaccatcatcttcgttatgtattcgagcagctagagcacccacctgcaccccaaaccccccaccagagaactcgaatttgagattttccccaaatcaagtctccgccaccgtgaaacccacctcactgcggccagccctttcctggtcagtttatccctcgctctccctcgtttgagcactcttgacgctccgtgatgcttgccgaaccaccaatttgtacggagtagctttagatcaccaggaacacgtaccaattgtcctcatcgtccgcggttcacgtggacagagcttgatagcttaccaattgtgaaattgatttaggggaatcgttcggggagggttcaatctggtgtatgtcg

SEQ ID NO: 44093 - DNA, 522 bp, Zea Mays
ccccgcggagcaggcgcatcgccgctcagcagctggctggggtaccggtctgcaagcgtggcgaagttcttctcatgcggaagtttggtattctcaaagacggggcaccagtgaccgccgtggccaaggatctgtacgacagcttgtaccggtccgagctgaaaccggagcacatcaatgccattcgtgagttgtttccctaccgcgggtccggcaccagcacttggccaggggacgtcgtcgacgcttgctccgaggaaggggcaccggcgctggaggacgcggtgtgaagctcggccacctgctcgccattgttgctcgccttcatggataacatcaagatcctgtcctggaatgtgcgcgggctgggggctcgtgccagacgcagtgttgttcgcacactcgtagacgacgtggttgccgacattgtgtgtatccaggagtcgaaactgagtaccgtcactcgtgacgttgtaatcgcaatgcttggtttgcgtttttcggattttgcctgcgtccccg

SEQ ID NO: 44094 - DNA, 685 bp, Zea Mays
cagcagcaaagttccgatctcctggtatgtatcgcaagaggagacagatgggatggaagtggagagcatgtagaggagagcttgtatctctgagctgcagggcgtaggaagttggacgcacgagacctatgtgatggtggcgcaggcgctctcgcgacccaacccggcttcagcgtgaggctccctcgcgtctctctccctctcagctgctctgtaggctggtggggacaggagctcgcgacggtgtgaactcacggcggcgtgtagtggcagccgacacggacaagcggtggctcgtgctcatgggatcaggcagcacgttcgcaggtgcattgaccaggatgacatgatcctagcattccttgatttgtaattgaaaagtaaaggctcatgctgccacttgatctacctaccataaagctttgtagggtacactacactcccttgttctccttcatgcatccccattccattggaaagcatatgttgatggtttcttgttagtaacagtcgtgggcatactttagatgaccctgaacccaagtagtgtgtccatggctccatgcagatgggcggcggtctcaccacaacggcagggataaggatggagatagtaactcatgatctatttcttgcttaaccgaaaagagatataatcccatccttttataaatagggtcactag

SEQ ID NO: 44095 - DNA, 750 bp, Zea Mays
ttgtctcgtcacttgagggtcaaaccaatgacatttgaatatcactggagtaagaggtttggaaccatgaaaattgagtttgtatatttcttcgatttgtccaaaataatcgacatcgtcaaggccggacgtaaagactacagaacacgttgtttttcgattggtttgactttggtcgtagcttgttgtgcgaaaacggtatccattgatgtcatacccataatatttcctgaccctataagcaaagtcattggctacttgtctcaactcgacactcatagacgggtctctttggccctgcaagtattcgcaagttaaaagacgctaaattgagttcatagacggatctctttgacaaactatgcacgtatcttatgtttgaaataggaaatgaaatcaggcaatccatttcccgtaccctttctaagaagggcatcatattcctatggagttgggtcccttgatcgatgctagaattcatgaagaaattgttccatgtatggtgtcacctcttcaaggttggtcaatacatatacatgatatggcgccactcttcatgtctcaaggtctgatggtcgaaccacttgcgcttccgagttggcctcaaaatatgctgaggtttgattcattgccaccatcattgtaacgcgggggtggattatgcacgctcggcagtttgtcaccatagtaagttgttgtgaagtttgacacctcctctagaatgtatgcctctgcaacggaagccttgat

SEQ ID NO: 44096 - DNA, 793 bp, Zea Mays
gaagtacctggccaatttcaaggtggaccggcatcagaagatcgtctagcaagaggagtgtgacctatcgtctcttcgacccactgcaccgcccccaatgtaagtaaaacagatggtgttcaatctcaaagaatttatgtggttgaacagtgatagcaattgaaacaattaatagggggtatgcaagaagattataaaaaatgacacatgcatttgaaaaatccaccatttctaattttccgtagtatgatgttgatgttaggaacactacacaaaattcatcagctacaaatgggtattcacaaccccacctatattatggtataccgatgaactcctacgctaggcaacccatcctcccccaccaatttgggataaacccacgaaccgacgcacgactggactgttcaggcctgagctcgaattgttcgacccaacggcgactggtcccgtccttcgtgactaaccatcgagatccattctaggaccaccctactcctcataagggttaacagaaatgctcgtaccatggggctatatgtgtggaccgtctgaatatgctttcggaccatctgcatatcctattagaccgtcctacataaagtacacagaacatgatgcatgttattatcaggaaaacttctccctaccacccacaactcctcaaaatcatggtatggctccatgtgcacatgggagcgagcccttttcagccaacagaaggcctcaaatatttaatgcacagtatggggcgcctagggctagcattaatgcacaaccgaatcccaaccca

SEQ ID NO: 44097 - DNA, 932 bp, Zea Mays
gtggagtgtcgcacgcgaggatagtcagcgctgcccctcgcggtgacttcggtgtggtcgaatgccgaagaccgtcgatgcggtctttttcgacatactgtgtcttggtttttgcgggggatttttgcgggtaaattacatggctccgcctcattaaaaacctcaccccccgggaggaaaagagtgcgggccggaatgatactgtttggtgaattacaagggcgtgttagccctgaggattcaaacaaaaaatttgcggagattatcgatattccaggaatgctctaggtcctcgccggatggcgttgttagcctgtacgcgctgggggacgcctttgtcttgacgatgaaaggtccctcccactttggctccagcttgcctcgtgactccgtccgagttgtccggacgagtacaaggtccccttcgtcgaattctcttgggatgactgcatggtcgcgccaggccttcgtttgagcttggtatttcttgagagcctgcagggtgaagacacggtctccgtcgatgaggtctttggaggttggttcgtctacatcggggacggctgaagcgcttgtctgtggtgacccatgtttgatttcctgcggggtcatggcctccgatccatatagcaggcgaaagggagtgaatccaatcgcccggcattcgatcgtgttcagcgcccagactgctttaggtagtaggtcgacccatttacccttcttgtcgtcgagaagcattttcttgatggtcgtgaaaatcttgccgttggcgcgctccacgacgccgttagattgtgggtgatatactgaggcgaaggcaagcttggtgccaatggagaagcaaaagtccctgaagtcctggctgtcaaactgtttgccattgtcgactgtgagctcagacgggactccgaatcggcagataatgttttgcc

SEQ ID NO: 44098 - DNA, 519 bp, Zea Mays
agcagtgaagcagacccactagagataattaaggttgtatccgagttcccagatgtgttcccaaaggacctaccaggcatgccccccgagtgaaaagttgagtttgccatagagcttcttcctggaaccgcccccatctttaagagagcttacagagtatctggaccagagttggttgaacttaagaagcagatcgatgagctatcagagaaaggctacattcgaccaagcacctcgccttgggccgcccctgtcctgttcgtggagaagaaagatggcaccataaggatgtgtatcgattatcgagctctgaatgaagtcacgatcaagaacaagtaccccttgcccagaatagaagatatgtttgatcagttgagaggagtcagtgtgttttcaaagatagatctgaggtcaggttatcatcagctcaggatccggccctcagacattccgaagacggcattcattaccaagtatgggttgtacgagttcacggtgatgtcttttggtctaacaaat

SEQ ID NO: 44099 - DNA, 462 bp, Zea Mays
gagatatggcacagaaaacaagagatgagacgatcgagaggtcaagcgacgtgaaaacgacgtttgaacgataaacagtgccataggaggtttggaattagaactgaggcacgaaacgacatggaattgggccgatacttcacgaataggtttatataggtgaatatgagtgaagtgtgtgcttggtttgaatttaggcgaagaaaaagagatttgggcactcggctcgaaaacgatcgctcaaaacggggaattgagtgaaattgaagcctggaatctcggattggcgtgaaatttggaaaaagtgttactggaagtgttgtgaaggtgcctgaaaaatttgggtttaattggagcatttttggctggtttgggcatttcaccgaacacgtggagggcggtggtttagagtttcggggaaatggctgtttgaggtgtgaaaaccctcccgaaggagctaag

SEQ ID NO: 44100 - DNA, 520 bp, Zea Mays
gccaaatcatgggaattcaattggtgacttgatgaaggattaccaaccaaagcaatccgcaaggcatcagtggggaccaactcagtgtcatcagcagaaatcaaaactctgtcatcaggagcgccgacctctaaggcgacttcctgacccgaagctcgtgccgctaccatgcaaccagaatgtggaggagaagaccctacatgaacatccatggaagtatgagagggagaacccactcggacaccctcgggggctgggtcatagctcgcgctacccatccgagccggatcatctccggcaacaccctcaggggttgggcaaacgctagcgccatccttgaggaccgagctctctgtagcagccacctctaaggcagaaggaccttcaaccacttccatgggaacggagcaacccagattagcctctcgactcttaagatcgtgctccaaggtcgacgaggcacgagatgctgctcgggataactctaacccggcatcaggcacatcagcgcaaacttcca

SEQ ID NO: 44101 - DNA, 591 bp, Zea Mays
tggggttgctgccagatctttttgtatcttcggcgcctccactcctaccgaagggcttagaatttctgatgtttttgtctcttcgggtcttggttcttcaattttgttagccttcggcattgcagccgactcttcaatcctctgggtaagggcaggtccttcggcttcagtagccaaagaagtatcaccgccaaactcaggcactatggtcggttcaatgtagcgtggtcggtgagtaagaagcttcacctttttcttcttcggcgcgggctcgcttgaggcggctgaaacaacatccttcccagaagttccactctttctcttctgccccccgtggcgggtagcggtagtcaggatacataaatccaatagcatcaaaaactctatttagcctcttcttttttcggctcccgaaggccacagatagtgtgttatcttcagacttggagtaggcccaaagtagttcatcactagtattttcaacacacttcagccaatcattgtctggttcgataaattggtctctaaacctgaaggtatatttcaattgaaccaaaccaccttcgttagggttcctgatggtctcttttg

SEQ ID NO: 44102 - DNA, 485 bp, Zea Mays
cgatgtagtggaggggctgagccacgcggcgcaaggccgggaggcggctgtcgccggcgagcatatccacatccgccgtggtgagtgcggtacggcggccgggattgtttactgcccggagttatccacggcgacgatattttcgcgactccgcagtgctatccaacacccaggcgctaatctcgacgccggcgacacgaatcacggcggagagagccatcggcggcgaggaactgccgcgctggcgatctgatccagtcgggctactgtaccatggcgagtggcattcagacagcctgacagagcaagttcatagccatttttcttcaatttttgcattacaactttgtcatctatctgcaccaaagttgtagggctacataccagctacaactcaactataggacttgatcacatttgagcactggatcatgctcaaaacctagcttgaagtcgaggtcagttcactgctagtctgaaaattc

SEQ ID NO: 44103 - DNA, 669 bp, Zea Mays
gtgcatatgatgttgttaaagcgtaggaaatatttttatgaagctaacgcgacttgaacgaactaaatcggagttaaaacgagcaatatatggattaaatgagttttaagtcatttttaaaactaaaatcgagctctagggatttatttgcaattttcagggactgttgcataatcttcttaccgcacgggtggacagcgagtttatttgtaataacccaaggggctcttttgcaataatgtcggactggagtatcttaaggtcttagccgtccgatctaataccgaaggcacacattagattgtggatggaaccaagcgttacgcggctgaggccgtccgattcgagatcaatggcccacattttacctataggataacagcttagatccgatcgatgtcagatcaacggcccggatcacaccaccgaatcggtatagcactatcagatccagaccgctcgcatgggatccaacagcaagatttctatgcgacgaagggtatgtgctatcacatctgaatcgtatgctctagaatctacggttcacaactcattttcctccgatctaatcctaggcgctggatggaaatccaacggcggtcgtgcatcagctccaaaccgacgacgccgagcgacggagctgtgccccatacggcggaggccgtggcc

SEQ ID NO: 44104 - DNA, 442 bp, Zea Mays
tgagcatcgagaggggcgttctgcaccgggaggaaggtaaccgggtgccactgttgacgttactcgagactctaatccacatgctttttatgtccattgttttgcccatcggttgtagttagtcattgtttctgtttctagctgttgctcgactattcatgatttatttgaatatgtctctttaattgtgaccacaacaaacgcttcatgcaaaagaagagatgcattggttgaaagccatcataacaatattttgcgacaacttgattccttggagattgaatcgggtacaggaaaacatcaacaaaccagtcttgctagacctggggacactagatggggttcacatcacataacccttatttgattggagctaatgtgggactcagttactgaggtgcttgagatggttgacaaagatattcgtggtccttctccagct

SEQ ID NO: 44105 - DNA, 675 bp, Zea Mays
agaaggacaaaattttgctttccttagtagacaaagtcaaggctagtgaagccaatcttgccgcgcagtccgaaactcatagagccgaaattgaaaatttaaagaaaaaaacttgccgagaagaatgaagatttcgaagtggctaaggcgaagcaggaaataagtgagtggactagcgcaaggttgcaaaagaatgtagatgagcttcgggaatcaaaagaaagatattacgaaaaatccttggattgtgccaagaagctaaaaagactgttttgcaaaggtgtgtgcttactcatccgagcaaaaaattattagaggcgatcccgaaggaatcatcgaatggatcggtgaagaagccgaagcttttgaagagatccttagtgatcgtggcgatttctgcgtctttgccggtgcctgaggggttgcaacaattttggaaaaatctggatgtggacacattaaagctgcaacccatatggaggctgtctttaccatggataacatgaaggatccttcggctgaagcgactctgatgtgcggaaaattttactccaacatttggatgaaaggcggccgagaactagccgacgaggcaataaaaaagagtgagaaagaaacctatgaggcccgagaagaagccaagcgagccgaagaggctaccgagcgtgcaaggcg

SEQ ID NO: 44106 - DNA, 483 bp, Zea Mays
gcatggtaaaaaggtctcattctttgattgtcatcgacggtttcttccatccaatcacctgtttcgaaatgatacaaagtcatttagaagaggcataaaagttaaagacggtccaccaaaacgtttaatgggtgaagatatcatgatacaacatcgtgcccttcaaagggttgcagaaggtcatgagtttgaaggctatggtcaagatcacaactagactcatatttcttttctctgggaacttccgtatgcgaaggtattgattttaccacacaacatagatttgatgcaccaagagcgcaatgttgctgaaagcatcagaagcatgtgtctaaacattaagggtaaaacaaaagagaacatcaatgccaggaaagatttagctaatctttgcgatcgccctagccttgaggtcaaattaaatcctaatggaaaggagaggacaccacgagctccatactgtctaaagccggaagagcaaaa

SEQ ID NO: 44107 - DNA, 436 bp, Zea Mays
gagattagtaccgactgatggctccaacctatactaaataatagatattagtaagggttgaatccatccagtgtcgttgcgcactcttttttttttaccaaaatagtgcttcttttgacaccgtttcgttcttcttgaatccttgttcgcgcttcttccatatgtcttagcataaatgtgggttggatcatctgtgttggtccgggatattgtttcggtcaccgaaaaccattaacacctaccgtgcacatggagaaagaaaggtacgtacgtacctaaaagacacaccatcatcttgcatggccggacggtacggcgtgtgtcaacgctcactttgctgtaacatcagtctctttctttttcccctgaaaacgacttcacatctgtatatatatacaggtacgtacgtacatacgtacgtgcacgcacgcaagtc

SEQ ID NO: 44108 - DNA, 453 bp, Zea Mays
cacagctttcgtcttcggcctcttttgggctcttaaagctttactaagaattaagcccaacaaaaaataaaggatcagcacacaataataagaaaagaaacaaagagtaatctgttaaaacatcctcaccttcagactgttataggcaaggctatctgcaaggtcatccttcgtcattgcagataggccgagttctagcttcgggaatcctatattttttgccatctcccggcaaacagatatttccttattgtccggaaggcagtacaggaagtcgtcttcatcagtgccattatacaccaagggtgtttacccgaagcatgtcgtatgaaaaaatctagcgcttcagtagatgcttcgggggtaggagatttaaccttcttgggtgcgccttatttttccaagaccagagcggcatccgaaggtccttgttcagtatcattttcaacagtt

SEQ ID NO: 44109 - DNA, 639 bp, Zea Mays
atggctctcagctggacatcaccctgctctgtgcttcaatgcttctgctgattagacttacacttcagtagccacatttagacttcctcccatctcagccgatctcctccttttgtcgtggtacattcattgcgtatattttgtggatatgacttcttcagaaaatctttgaaaattcttggtgacacacccaatgggtgtgcccaaggggtgtcttggtacgcagagtgtttaccacactgtcctggagtagtaacttgatgtgaccacggggtgtaatcatattgcctaagcagttgaccttggtccaaacgatgtcgtgttacgcaaagcagcgcctgttgcctgactcattttcagatggcttgaattgcttattgaattcttgcgactgttcggcgagcgtggtaggaagtggacggtcacccccggcctctataaatagcctgcttgccccgttgttctcttcactcatccttcgatcgtctactttcttcttcttcgctctctcctccaaccgaccatggatagaggcaggaggggtcatggttggcctcgccgcgctgatggaaagcgcaagcgtgctctgagtcccccttggaggactttggggactcggagtacttggaggaggcctcc

SEQ ID NO: 44110 - DNA, 1916 bp, Zea Mays
ctaaactccagaagagctgatggcaaggtagcagtagcggcatttttgaagactgaagcaagctggagttgagaaacatggatgactgggtgtattttgctagaagcaggtaaggccaagcgatagactgcattacccactctggctgctacctggtatggtccaaagtaattgtagctgagttttgatgagcccgcgacataaccgatgcttgtacatatggttgaagcttcaagtaaacctagtaaccaaccgcaaattcctgctcagacctgggtttatcggcctgacgctgcatgcgaagctgagctcggaccaggtgttggtggacaagatcctgcatattagaacattcctataaccattttgacagctgaccaggcacattctggtttggagatacgcccagagaatgtggtttacggccatataggacttcaaacggagatgaacccaaagccgaatgaaaagtagtgttataccagtattctgaagtgggtaaccaagaggaccatttcttggggcaagcagttacaaaacagcgcagaaatgtctctagacactgattcacccgttctgtctgaccatccgtttgggggtggtaggaagaactcattcgcagctcagacccgaccaacttgaacagatgttgccaaaagtggttggtgaagacaggaccgtgatctgatataacagccaatggaaatccatggaggcgatacacattggaaagaaacaactgagcgacagaggcagcagtataaggatgagatagtggtatgaagtgggcaaatttggtgaacttttcaaccactaccattatacaatctgctgaacctaagcgagggagaccttccacaaagtcaagtgaaactatgtgccaagcagtaagaggaatggggagaggttgaagtttgccaggatacgtcgatctatccggtttagcttgcagacaaacttgacattgctgtacaaattcttggatgaattgcttcagtttcggccaggcaaacaaactcttaactcgacgatacgtggctggaatgcctgaatgaccgcctatagcagaggtgtgtaatgcggacaacaccttgttttttaactgaggatcatcgcccaaccatattccacccttgtagtgtatgataccctccttcaagataaagtgtggcgctgtcgttggatcaagcgacaatttagcgatcaaggacagagcctctagatccttatcatagttggtctaaacgtcgttcaccattgaggaactactgctgaaacaacctgacactccgcatcaactttacgcgacaaagcatccacaacacgattttcagagctcgaacgatactgaatcttgaattgcaggcctagcaacattgtgaacaccttgtgctgccaaggtgtgtggaggtgttgctcaataagctgcgttaaactcttgtggtctgtgaggataataaactcagtatgctgaaggtaatacgaccactgttgcactgccaatattacagcaaggtactctttctcataggttgataatcccctagattttggacctagtgctttactgagaaatacgagagggtgtcctttttgcatgaggacaacacccacaccgactacactcgcatctgctttagtgaagaatgttgtattgaagtcaggcaaggacagtacaggtgcttgggtcaaggcgtgctgcagattgtgaaatgcaaggttatgttcattagtccaaatgaaaagggctccctacttcaacaatgtattcagtggctgagaaatgacaccaaaatatcagatgaatttgcggtaatatcccgctaagcccgagaagctacgcatttccttaatgttggtcggtaggggccatgctgcaatagcttgaatcttcactggatctgttgatactcccc

SEQ ID NO: 44111 - DNA, 9685 bp, Zea Mays
atgcaaaagccaggcgctgctgcgtctacatgggtcatccctctctcgtttgatcggggacgtagagcataacaacgcagagcagagcagctagccagcgtccctctcatcactagtagtactatcgtacaaccagcccagctgtagcagactctcatcattatcgtaccactaccagcccagcagcagcacagcctgccggctacgctgctgctgcattcccgcatgcttgagcaagctatagctgtagggagggagaatcacatcactggagagcttaggtggggcgtcgagacgtgaggatacgtgacatctccatttcacccgtgctgatttaattagtatgtgcgcgattgtaatattaattaattcagaaattgaggtatggacatgctggatgctacctcgcgctttggtcgctggagtgcaaaaccaggagtagtagacacaccatctgaggaagcctgcaatggccacacatgctacgaatgtgatggaggctatggcacctgatccaagcccgtcgggagctggctgtggcggtggcggtggcagtggggtcgcacccttcttctccacctgccgagagcatggatttgtaggtgtatgcacataatataataataatacgatgaaatgtagtacgcagtgattaattaaggaatgtccgagacttaccattgcagtttgtagggcgagggatgatgacattccactgcagtacattacttgagtctttacacccgcatgagacataagacgtaggcaggtcaaaggtagtgttccttgaaaccatgtacacacataggcaacaaagacctttttctagttcatgaattggctagatgtcgaaggaatagaggagggcgtcgcagcatgaggaagtagggttttgtggtgtcgtctcctggcaggagagtagcgccacgctgatgaagtcaagcctgcaactcggcgaggagcaagcaggtgatggctacagcagcagcatcatgatgatggtgacgagcagcgaaacggaggaggaggccatcggttgctctagtatgtactagtgggtagggtagtggcgattgtgacccggccatccctatcgattgaggtggtggtccattttatagcccatgcaaacagtcgggtgctgctacgtctgcctgagccatccctctctcgtttgatcggggacgcagagcatagcagagcagcgcagagaagagcatagcagcgcagctagctagcgtcactctcatcactagtagtactatcgtacaaccagcctagcaacagcaaactctcatcattatcgtaccactaccagcccagcagtagcgctgcctgccgctacgctgctgctgcattcctacatgcttgagaaagttgtagctatagggagggggaatcacatcacaggagagctgaggtggagcaccgagacgtgaggatacacgacatctctatttcacctgtgctgatttaaatagtatgcgtgcagttgtaataataattaattgattcagaaattgaggggtggacctgctggatgctacctcacgctttgggcgctggactataaaaccatccgaggacgcctgtagtggccacacatgctacgactgcgatggcggctatggcaccagatccgagcccgccggaagctggcggtggcagtggggacgcaccctttttctccagctgctaggagcatggatctataggagtatgcacatagtataataataatatgatggaatgaagtacgtagtgattaattaaggaatgtccgagacttaccattgcagtctgtagggcgaggggtgatggcattccactgcagcacattacttgagtctttaccctcgcatgtgacgtcagacgtaggtaggtcaaaggtagttttccttgaaaccatgtacacacaaaggagcaaagacctttttccagttcatgaattggccagatgtcgatgggatagaggagggcgttgcagcatgaggcagtagggttttgtggtgctgtctcctggcaggagagcgtcgccacgtagtataataataacaataacaataacaataataataataatatgatggaatgaagtacgtagtgattaattaaggaatgtctgagacttacaattgcagtctgtagggcgagggatgagggcatttcactgcagcacattacttgattctttaccctgcatgagacgtaagacgtaggcaggtcaaagttagtgttccttgaaaccatgtacaaacataggagcaaagaccttttccagttcatgaattggccagatgtcgatggaatagaggagggcgtcgttgcatgaggtagtagggttttgtggtgccgtcaactggcaggagagcagcgccacgctggtgaagtcaagctcgcaactccgcgaggagcaagcaggtgacagcgacagcagcggtagcaacatgatggtgacgagcagtgaaaaagaggaggaggccatcggctgctctagtatgtactagtgggtagggtagtgacgattgtgacccggccgttcctatcgattgaggtggtggtccattttatagcccatgcaaacagccaggcgctgctgcgtctgcgtgtgccatccctctctagtttgattgggacgcagagcagagcagagcaacacagagcagagcagctagctagcgtccctctcatcactagtagtactatcgtacaaccagcccagcagcagcatactctcatcattatcgtaccactaccagcccagcagtagcactacttgctggctacgctgctgctgcattcccgcatgcttgagcaagctgtagctgtagggagggggaatcgcatcacaggagagctgaggtggagcgccgagacaagaggatacacgatatctccatttcacatgtgttgatttaattaatatgtgcgcggttgtaataataattaattaattcagaaattgaggggtggacctgctggatgctacatggcgctttgggcggtggactgcaaaagcaggagtagtagacacaccatccgaggaagcctgcaatggccacacatgctacgactgcgatggcggctatggcaccagatccgagcctgtcgggagctggcggtggcggtggtgatgcacccttcttctccggctgccgggagcattgatctctaggagtatgaatgtagtataataataataatatgatggaatggagtacgtagtgattaattaaggaatgtccgagacttaccattgcagtctgtagggcgagggatgatggcattccactgcagcacattacttgagtctttaccctcgcatggggcgtaagacgtaggcaggtcaaaggtagtgttccttgaaacaatgtacacacataggagcaaagacctttttccagttcataaattggcaagatgttgattgaatagaggagggcgtcgctgcatgaggcagtagggttttgtggtgccgtctcctggcaggagagcagcaccacgctggtgaagtcaagcccacaactcagcgaggagcaagtaggtgacgacggcaggagcagcagcaacatgatggtgacgagcagcgaaactgagggtgaggccatcggcggctctagtatgtactagtgggttggctagtggcgattgtgatccggttgttcctatcgattgaggtggtggtccaatttatagcccatgcaaacagccgggcactgctgcgtctgcgtgggccatccctctctcgtttgatcggggacgcaacgcagggcagagcagagcaacgcaaagcagagctgctagctagtatccctctcatcactagtagtactatcgtacaaccagtccagcagcagcagactcttatcattatcgtaccactaccagccctgcagcatcactgcatgccggctacgctgctgctgcattcccgcatgcttgagcaagttgtagctgtagggagggggaatcgcatcacaggagagctgaggtggagcgcctagacgataggatcacgacatatctattttacctgtgctgatttaattagtatgcgtgcggttgtaataattaataattaattcagaaattgaggtgtggacctactggatgctacctcgcgctttgggcgttggactgcaaaaccaggagtagtagacacaccatccgaggaagcctgcaatggccacacattctacgactgcgatggcggctatggcaccagatccgagccggcgggagctggcggtggtggtggcggttggcacgcacccttcttctccagctgccaggagcatggatctgtaggagtatgcacgtagtataataataatacgatggaatgaagtacgtagtgattaattaaggattgttcgagacttaccattgcagtctgtagggcgaggaatgatggcattccactgcaacacattacttgagtctttacccccgcatgagatgtaacacgtagggaggtcaaaggtagtgttccttgaaaccatgtacacacataggagcaacgacctttttccagttcatgaattgaccagatgccgatggaatagaggaggacatcgctgcatgagacagtagggttttgtggtgctgtctcctggcaggagagcagcgccacgctggtgaagtcaagcccgcaactcagcgaggagcaagtaggtgacggcggcagcagtagctgcatgatggtgacaagtagagaaacagaggatgaggccatcgactgctctagtatgtactagtgggtagggtagtggcgattgtgacccggtcgttcctatcgattgaggtggtggtccattttatagcccatgcaaacagccgggcgctgctgcgtctgcgtgggccatccctctctcgtttgatcggggacgtagagcataacaacgcagagcagagcagctagccagcgtccctctcatcactagtagtactatcgtacaaccagcccagcagcagtagactctcatcattatcgtacctctaccagcccagcagcagcactgcttgccggcgagtctttaccccctcatgaggcataagacataggcaggtcaaaggtagtgttccttgaaacaatatacacacataggagcaaagacctttttccagatcatgaattggcaagatgtcgatggaatagaggagggcgtcgctgcttgaggcagtagggttttgtggtgccgtctcctggcaggagagcagcgccacgttggtgaagtcaagcccacagcaagcaggtgacggcggcaactacaacatcagcatgatggtgacgagcagtgaaaaggagggtgaggccatcgacagctctagaatgtactagtgggtaggctagtggcgattgtgatccggtcgttcctatcgattgaggtggtggttcattttatagcccatgcaaatagccgggtgctgctgcgtctgcgtgggccatccctctctcgtttgataggggacgcagcgcagggcagagcagagcaacacatagcagagcacctagctagcatccctctcatcactagtagtactatcgtacaaccagcccagcagcagcagactctcatcattatcgtaccactactagccctgcagcagcgctgcctgccggctacgctgctgctgcattcccgcatgcttgagcaagttgtagctgtagggagggggaatcgcatcacaggagagctgaggtggagcgccgagacgagaggatacacatcatctctatttcacgtgtgctgatttaattagtatgcgtgcggttgtaataattattaattaattcagaaattgaggcgtcgacctactggtttgtacctcgcgctttgggcgttggactgcaaaaccaggagtagtagacacaacatccgaggaagcctgcaatggccacacatgctacgactgcgatggcggctatggcaccagatctaagcccgtcgggagctggcggtggcggttggcacacacccttcttctccagctgccagaagcatggatatgtaggagtatgcacgtagtataataataatacgatggaatgaagtacgtagtgattaattaacgaatgtccgagacttaccattgcagtatgtagggcgagggatgatggcattccactgtagcacattacttgagtctttacccccgcatgagacgtaagacgtatgcaggtcaaaggtagtgttccttgaaaccatgtacacacataggagcaaagatgtttttccagttcatgaattgaccagatatcgatggaatagaggaggacgtcgctgcatgaggcagtagtgttttgtggtgcctcccctggcatgagagcagcgccacgctggtgaagtcaagcccgcaactcagcaaggagcaagcaggtgacggcggcaacaacagcagcaacatgatggtgacgagcagcgaaacagagggtgaggccatcagcagctctagtatgtactagtgggtagggtagtggcgattgtgacgtggttgttcctatcgattgaggtggtggtccattttatagcccatgcaaacagtcgggcgctgctgcgtctgagtgggccatccccctctcgtttgatcggggacacagagtagagcaaagcaacgtagagcagagcagctagctagcgtctctctcatcactagtagtactatcgtacaaccagcccagcagcagcagactctcatcattattgtaccactaccagcccagcagcagcactgcctaccggctacgctgctgctgcattcccgcatgcttgagcaagttgtagctgtagggagggggaatcacatcacaggagagctaaggtggagcgccgagacgagaggatacgcaacatctccatttcatctgcgctgatttaattagtatgtgcgcggttgtaataataattaattaattcagaaattgaggggtagacctgctggatgctacctcacgctttgggcgctggactacaaaaccaggagtagtagacacaccatccgaggaagcctgcaatggccacacatgctacgactgcgatggcggctatggcaccagatctgagcccgccgggagttggcggtggaggttgggacacacccttcttatccagctatcgggagcatggatctcttggagtatgcatgtagtataataataataatatgatggaatggagtaagtagtgattaattaaggaatgtccgagacttaccattgcagtctgtagggcgagggatgatggcattccactgcagcacattacttgagtctttacccccgcatgagacgtaagaagtaggcaggtcaaaggtagtgttccttgaaaccatgtacacacataggcagacaaagatcgttttccagttcatgaattggacagatgtcgatggaatagaggagggcgtcgtagcatgaggcagtagggttttgtggtgccgtctcatggcaggagagcagcgccaccctggtgaagtcaagctcgcaactcagcgaggagcaagcaggtgatggcggcaacagcagcagtaacatgatggtgacgagcagcgaaacagatggtgaggccatcggcagctctagtatgtactagtgggtagtgtagtggcgattgtgacgcggccattcctatcaattgtaataataattaattaattcaaaaattgaggggtggacctgctggatgctacctcgcgctttgggcactggactgcaaaaccaggagtagtagacaaaccatccgaggaagcctgcaatggccacacatgctacgactgcgatggcgactatggcacccgatccgagcccgctaggagctggcgttggtggttgggacacacccttcttatccagctgtcgggagaatggatctcttggagtatgcatgtagtataataataatacgatggaatggagtaagtagtgattaattaacgaatgttcgagacttaccattgcagtctgtagggcgagggatgatggcattccactgcaacacattacttgagtctttacccccgcatgaggcgtaagacataggtaggtcaaaggtagtgttccttgaaaccacatacacacataggagtaaagatctttttccagttcatgaattgacaagatgtcgatggaatagagtagggcgtcgtagcatgaggcagtatagttttgtggtgccgtctcctagcaggagagcagcgccacactggtgaagtcaagcctacaactcagcgaggagcaagcgggtgaaggcggcaacagcagcagcaacatcatgatggtgacgagcagcgaaacggaggaggaggccatcgactgctctagtatgtactagtgggtagggtagtggccattgtgacccggccgtccctatcgattgaggtggtggtccattttatagtccatgcaaacagtcgggcgctggtgcgtctgcgtgggccatccctctctcgtttgattagggacgcagagcagagcagcgcagagcagctagctagcgtcaccctcatcactagtagtactgtcgtacaaccagccgagcaggagggaactctcatcattatcgtaccactaccagcccagcagcaacactggctgctggctacgttgctgctacattcctgcatgcttgagcaagctgtagttgtagggaggggaatcacatcacatgagagctaaggtggagcgccgagacgagaggatacgcgacatctccatttcacctgtgctgatttaataaatatgcgcgcgattgaataataattaattaatttagaaattgaggggtggacctgttggatgctacctcgtgctttgggcgatggactgcaaaaccaggagtagtagacacaccatctgaggaagcctgcaatggccacacatgctacgactgcgatggcgactatggcaccagacccgagcccgccgggagctggcggtggcggttgggacacacccttctcctccaactctcaggagcatggatctgtaggagtatgcacgtagaataataataataataataatacgatggattgaagtacgtagtgattaattaaggaatgtccgagacttaccattgcagtttgtagggcgagggatgatggcattccgctgcagcacattacttgagtctttaccctcgcatgagacgtaagacgtaggcaggtcaaaggtagttttccttgaagccatgtacacacataggcagcaaaggcctttttccagctcatgaattggccagatgtcgatgggatagaggagggcattgcatcatgaggcagtagggttttgtggtgccgtctcctggcaggagagcagcgccacgccggtgaaatcaagcccgcaactcagcaaggagcaagcagatgacagcggcggcagcagcagcatcatcatgatggtgacgagcagcaaaacgaagtaggaggccatcaactgctcttgtatgtactagtgggtagtgtagtggcgattgtgacccggctgtccctatcaactgaggtggtggtccattttatagcccatgcaaatagtcgggcgctgttgcgtttgtgtgggccacccctctctcgtttgatcggggacgcagagcagatcaacgtagagcagagcagctagcgtcactctcatcactagtagtactatcgtacaactagcccagcaacaacaaactctcatcattatcgt

SEQ ID NO: 44112 - DNA, 644 bp, Zea Mays
ccggtgtcgccatggatatggatccgaccgctgaggaggaataccgacttgaggaacataacaaggagcaggatgcacaggcctatatcgacatcgtcaacgatgatgctcctagtgccggtactggaacagggataggctcaactagccccctgctgctgatggaagcagtactggtattggtagtagcagtggtgtcgatgcctcaaggaagagatctaaagtctggaatggctttgaggtaggatctccccgtctcctcctcggccaccccaaacgttgagagcacgcaaaccgagggcgccgggggggggggggggggggggtcgtggagcacgccgaaggaaaaacaccgccgtcgcgggcgagattgaagatcgccaccattcgaggtccgggttcgtgcctgggtgcttcacggggccgtaaggaagatgagcggcagaaacttagggcgcaagggcaagcagatcgtcgataatttgtcaccggagtgctccctccgccgtggctccgcactacaccgtcgatcgacctcgccttcatccctacacgcggtgagactcccttctctgggttcacgcacatctatacttcgagtagtgacgtttgaattaaagattcgtgcactgggtcatgggttt

SEQ ID NO: 44113 - DNA, 645 bp, Zea Mays
cttggggataacctgacggagctcacagaggcatcaatttatagagatcaaccgtgagcacgacgaatttgagcggcggatggctatcggtaagaaacaagatgagtcaccggcatggtgattcgtggccttcaccgtggcggcctccccggcgatcatcggatatgcataatactggtgattgcgacgtggtaattgctgaggcacgtggcgttcggtcgacgggcatccaactccggtgatgataatctcggtcgaccgcgcggcaagtgggcattacggccggaccagctagcggccgaaatttatcccaccactgatcttttcaccccgccccagtgttatccactcctcatcgagcacgaatctcccaggcgaaacccgaatcccggcgcgagctcaccggcgacgggtgcactacacctacgatcttcttcagaccactattcattctgaatctcccttcgaagttgcctgacaacccatgtttgagccacaattactccctgctctaggcagtaacacacctaccttcctttgacaaagttgtactccaatatatggtctccaatattgtcacagtgacccaagtcttaactccactggattagtcacaacttgactccaaagttgatccaatgccac

SEQ ID NO: 44114 - DNA, 380 bp, Zea Mays
gcttgttctaggtccgttcaagctctttgctctcctgtttcagtacccatatgtcctcctgatgctcctcgacccgttcaattaagctagaccgcgctacatcgtcgggaacacccgtgttcatctgtagttcgcgctgtcaccgtggacagtgtgattaagagctcggattgtgcaattgagtgaggggaaacaattattaagtgttgaatgaggcctcagccaaattagggtaccggccattgcatgtcttggtcggtacaggttcgccggagctcggttcgtcgccgttcgccgtcgaggaccacaggttgtgaagaattagaatgtagtgggcttcggtgtaaatgtcagtgaccgaagcaaatagtgtgtagggt

SEQ ID NO: 44115 - DNA, 2377 bp, Zea Mays
caagggcactgtcatgcatagctgatacgagcttggtccgtaaagctgagttgttaccgatccatatcaattctcctttcttaatcacccctatactgagctgaaagccgtgctcatctggactatgtaaactgagtttggcgagcaactgttgcgcttccagatcagtgaaataagaattgagcacttcctgcatccatagaggctgcacctcactaattaaagtcatgaccagcaagggtcccactctggaaagtgcatcagccacaatattttcattgccttgcttataaactaccttgaattgcatgcccatcatcttagccattgccttcctttgaagttcagaatgtaactcctgctgacccaagaaactcaaggctctgtggtctgtgtgaatctcaaactcacttctctgaaggtaatggcgccacttatccacagccataataagagctagaaactccttttcataaatggacaactgcttgttttttactcccagtgccttgctcaaatacgccaagggtcgtccttgctgtagcagcactgctcccagaccgtgctcactagcatctgtctcaactacaaaagtcttctgaaaatcaggtagtgccagcacaggtgtagtgcacattgcttgtttcagagcttggaatgccccagttgccagttcagtccacacaaattgtcccttctgtaacagctgagtaagaggcttagaaatagtgccataattcttgacaaagcgtctgtaataaccagttaaaccgagaaaacccctgagctcagtaacattgctaggttgtggccattgcagcatcgcagtagtcttggctgggtctgttgccacccctttagcagatatgacatggcccaaatagatcagttcctgtcggccaaaaacacatttcttttgttttaaatagaactgatgcgatttcattgcttcaaacaccaacctgagatggtctaagtgggactgccaggaaggactgtacacaaggatatcatctatgaataccatcacaaagtgtctgagatatggagctaataccatgttcatggcacattgaaaggtggcaggtgcattggttaagccaaagggcataaccttaaactggtaatgaccatgatgtgttttaaaggcagttttatactcctctccttctcccattcttacttggtggtatcccgaagtcatgtccaagctggaaaaaaatttggtgcctgacagctcatccaagatttcttccacaaccggcataggaaacctattcttgatggtcatgtcattaagtttgcggtagtccacacaaaaacgccatgtaccatccttcttttgaaccaacaaaactggagaggcaaaaggactaacactatgttctatgaggcctgccttcagtaattcagaaatttgcctttctatctcggttttgtgggctggtgaatatttatagggcctggcattcacagggactaaccctggaatctgaggaatgtggtgatcaaatggccgagcagggggtaaagttgcgggaatagcaaacatctctttaaattcatccaacagattctgcaactccacaccaacagttggttcctcagacttgggggttacttccagcaaggccaaagcccagacatcatttccttttaaccatttgtccacatgcatagtagacacctccaccactcttccacactgtcccccagtccccttcaatttgacctcttctccatcaactgaaaaactgatcaccttcttctcccaatcacagtgcattggactgtgttgcttcaaccagtcataacctaaaatagcataatacgcccctaactccaagactctcatgttagtcctgaaagtgtgtccatctgcccaccattccagtgaatgcaccatttggtcacttctgagagtttcaccattagctaccttcacaatagccggagaacacttggatgtaacgagaccaagtctgtccaccatcagcctattaatgaaactggctgagcttcctgaatccatcaataccaacatcacctgattgtggacaagggccctgactcccatacaatcgtcagacacagccccactgatagcatgtaaagagagccgaaattcctcctcctccacttgctcctctttctcaatatggctcagtgtttcatcagacagcatcattcccagctcctcagtagtcagagcatttagttgcatctgaattttttttgggcatctagactggtggcctggttcatacttctccccacacgagaaacacaaaccattttgccgtctatattccttgaccaacctctccttggataactctattgctggggcttgtggtctgccttctgtccttccaac

SEQ ID NO: 44116 - DNA, 432 bp, Zea Mays
cagtacttgagtcttagttggtggaatccaagatttataacctctctttccttgccctatgaaagtgaggggttgagtaacaaaatagagggtttagactttaaaatagggatcgcacattgtatattttttggacactcttgtactcgagttctttcggtagatagacataaaagtgggctatgaccattaggctagaaccctaccacaaccaagaggtgagagtgagctagaaggtcttgactcattaatgtttgagcttgtaatcttttcatcaagtatgttcaccaatcgatgagtagcaagaggacatagggtattatgcacactgtagactgaacctctctaactgcttatgtgctgactcccacttatgcgtggatctagtatgaccatcaatttgcaccatgctccttcctaactctccttaag

SEQ ID NO: 44117 - DNA, 492 bp, Zea Mays
aacttggctgcgtcatgtgattgctatgtcgcgctctccattaatcggatcgctcccgttgagtcagaccgccatcgctgagtcgcgtattttttgcatgtcctgtaggcactgtctgtctgccgcgagccacaattgcgcttgttgcgcacgttgcgtggatttatcgtgtaccccaattaccgagccataattgtgcctgttgcgcttattacgaaggcttgctatactgtcgtagccctgatggccgcacatgcgttgacgccagatacgctagagcttgtactcgcgtgggttgtggtgggttgttcaaggtcctgaagtcacattatgtgcaaccttcgtaaacaattttgttttcgctctatattttgtttgattgttttgtgtggcatcatatatttatatatatcgccaagtggctataacaactatattaaatctgggaaattaaatcgaaatacaatgaaacacagataaattaaatctctg

SEQ ID NO: 44118 - DNA, 553 bp, Zea Mays
tctatagtgagggacttgccctttaaaacgcttaggaatgagagaaaacactgcacaaagttgtgctgtcaaataaaaggagtattgactattattcagtgcctaagtcggaaatcaatgtgtttggttaaactttggggctttgtggtgcttgatctatacgctttcggactgaatttattgtagaaagtttgaagaccatatgttagtgaactatttacttcaagtgagttgggcttgatcccacacaaaaagtgaagtaagcgttgtccaatattggactgtcagtttgcagaaactgaattttattcagtccaatgaaaactgaaattgcagtgtttggtgctctgttggagcacttttgtgacctttccatcaggttgtagactatggattatattgaaaagttggagaccaagtattagtgacaaactttacttaggggtgcttagcttggtgctgcacaaagtagggagtaaatctgttccaaagtgcttcctgtcagcttcttgttttcagttaactgaaaacgacatttagtggattgggttca

SEQ ID NO: 44119 - DNA, 707 bp, Zea Mays
cagatgagccaatgcaattaaaattcatacctgcgccgttggctgcccggatttgatcagttccagtgtagccttcatgagtggtgagtttctcgagctcacctatgatatgattagtggcaccaaagtccagtaatcattgtggatcattaccttgagagtatgttgcagacgccgcgaggcgtgaatcaggaacatagtcctcatcaaatcggtaccagcatatgtttgctatgtctccggttttgaagcaaacttggcactgtggactgtcatcggaggaacgggaggcaccattatgcgacgattgttgctatgtgagaatccactgcgcgagttaccagatgactgcccaagtgagggtgcacgaccacgaccacaccccttgttgccatttcggttccaaggagtaccccgaccccgagaggccgaatttacagatgactgataggtgcctccagattgccagttcgtgcgaagttcatagctcaacatttgtgagagtaattcagaaggcgtaataggttcaacgcgaccaagaatggaagaaaccaaaggattataacattcttcatcaaggccagtgaggagataggatacaaaatcttcatcattgagaggctgtccagcagtgctcatgtcatctacatatcctttcatcttggtgtagaatttcgtcgttgtggcagcgcctttcttcgtggttg

SEQ ID NO: 44120 - DNA, 813 bp, Zea Mays
gaaggaccactcgttggagtacatggacggtaggtgcaaccccaaacctgggaatctcaagaaacatatcttttgcttcactgaacctcttcgctttacagaaaccgtcaatcatgtttgtaaagataggaaaggacaactccatggaatcctacaatcaagtatagtgaacttgtgtaagtctcaacaacatatgaagtcttacatcaagcctcaatgggacagacatgtcctatttaagctcaatataagcagccaatgaataagtagcatctatatttgtattgccataggacaacaacaatcacaaaggtataaagcatatactagcataggccattttgctctgatcccgttcgtttcatcaactcctattgtttcggtagtccagtttttggaatctgtcaacaaacaaaccaaaaacattagagtctatacagcaagtcagcaacacaagttgcaaaaagcaacaagactgcctcgatgaactgaaccaagaaaatattattaggcctaatattatttatgcaatattgggttctcagttattaatttggtagtacaataatttttggggagaaaccaagaaaatggtgaaatccattactcccatgacccatctcattgtctaagatccctaggccttttagtcacacaaggcctacaacacatcaagttgcaaaaaaaagatcatcagatgctatgcaaagactgtgttgtaactaacttagaggaaaaaaggacaacaatatgcatcttttgaaaccaagttaatgtcaggaaaataatatgtgtggtatgcaaaagtgaaag

SEQ ID NO: 44121 - DNA, 1995 bp, Zea Mays
  misc_feature (820)..(919): n is a, c, g, or t
gggggaggagccgccagcgcggcgtgcatggaggctaaggtttgctcgtctgtcctgttccctctaatctcgcattcgttagtgctctcgctcggggggccgcgctgctctcgtttggtggcgcgtcgcgctgttcctcgttatgcgatggggttgttgccttggggcgcgctcctgggttcggccatggggatttcgtcggtgatcacgcgctcccgtcgtgtttctctaggctcgtatccgtgcttcgtgcccgtgggcgtgcgttcttgcgtgctgggtcggggttgatttggtcggccgtgtctcttggccgcgagcctgtgctcggtttctcctttccgttgctggtggtcggttgcttgttttccacggtgtcatcaggattcgcagtcgtgggtacgattgtggtggtgcctggcctgagatatattagctggatacaattcgtggcttggttggtgactctggaattacttggtttgcttgatctagtggctctggctgttgtcggctcacggtgacggtgaggagctgcacagcatgttggactataggttctgttcgtgatggtgcagtgcttgagcttgatgccttggtgctgttaaattgttttgcactgcttgtggtctgtggagtgattcaatcctccaagtcgtttttctgtttctttaccgacccactttacacttgagacctatgtttatcgatagcccctcgatgatggatcttatacatgacaggcattgacttcatttgctgcctgcaagagctagctgttacgcaaattttctgttgggactgatagcataccattttnnnnnnnnnnnnnnnnnnnnnnnnnnnnnnnnnnnnnnnnnnnnnnnnnnnnnnnnnnnnnnnnnnnnnnnnnnnnnnnnnnnnnnnnnnnnnnnnnnnnagttcctcaaaatcgtcttttcatgctacaaccattatgcatcatagggatgcatgctaactcacatgaattctgaaaaaaaaaggaagaagatttccatgtgcatgctcctagtttttctagagtaaataacaaatctcattattcctaatgacgatgcacatgttcttgtattgttgactattgtaatggatctttacaattgcactttttttgttataattgtgatagatggagtctgaatcactcgattttgaagacaatggagaccaccaaccttcatcagaagcttctcttgcttcagatgtggtatatgatgactcgcttgtatgtccatgcattggaagtgagcaccaggcagaaatccccaatcttgctacagaggatgagtgccgtaagctcatggccagttcacataatgattccatattccatggctatggttaccctgttgtggttgggttagctttaccaattacgtgggcatcaccaagcgaagttgataagacggaagaggtactacaaacgcaaaaatgttcagaatttggaacaaaaggcagcactggagatgtgcacagtcaggtgacctcaacttgtgcaactagcaatgacactggcatatgtgctgcaacattccagtatccacatacagtagtgcctgtagttcaaattaaatctgacagtaatcaagcatacgatgaaaaaatggtcccttgccccactcaagaaggacagaatgttaccaataattcaataatgcagcagagagaaaccaaacaattaagtcctctaccttattcacccgttgctctttggagtgatcttgaggcagaggtatttctccttgggctctacatttttggcaagaatctcaacctgctgagcaggtttctgggtacaaagactgttggtgatgtgcttgcatactactatgggaagttctacagaagagatacatacaaaagatggtcggactgtagaaaggcaaaaactaggaaatgcattcttggggaacgcatttttcaaggatggcgacagcaggagctaatttcacgtctgaaatctaaaatccctaa

SEQ ID NO: 44122 - DNA, 687 bp, Zea Mays
cccaccagccgggagcagaagatccaactacccgaaggactccgctgaccacctctcctacgaaaagatggacacggatcacaaggaaaaaggaaccaaacggagtaaaagctcgtcaagctgctctccaggtatctccaccctcaaaggagaacaggaagaagcttgtcactacaacgacaccattctaccctgacgtcctctttatcgagggaagagtggaatttactcctgtctccgacgacgaaccaatcgcgccgggagaagaacctctttagcaagaatctcaccaacgaaggaacagacaccgaaatattcggagacatcatgaagccggagaacacgatccggcacagcccgtgtcacgggatgaggtctcggaggtgggagaaactccggatgaacgagtcttcaaggaaagaaggaattctcgacgtcgcgatcgtcagcaagctcaagagcatgccgaacaggaagcgaaacaacaccgagagaaccctcttctcggccgaaacctgaaccctgacttcgcccgagctatgaacacatcgagcgaggtttgtagagtgttagctcggatagctaatggcctcccccggactccagacgctgagggttatcaacggctactcactcgggcagctaatcatcttctgcctctcgctcatcctccgagcgacctacgac

SEQ ID NO: 44123 - DNA, 408 bp, Zea Mays
acttgatgtcgttcaggtacaaggtgggtagcaaatttctgttatatcgtcatttcccaatcaagatatccctcagcatcataatgacccgaaaaagatggtatagaaaatttaatcttagcataagggtcgtcaggagcacgattgttattaccttgctggctgtgtggcataccttctgtgttttgatgaagacggcgatgtaggcgcaaatctctggtggccacttcatcataattaccttcttcatcaaacaccacatcatcgggaagacatggatgaggaggaggaggtggtggtggtggtgcttgttattgcgtctccaacacagcaagtctgtcgatgatctgggacaatcgtcgatccagcctctcgtaagtcttgccaaggttcatgtcaatgaatgca

SEQ ID NO: 44124 - DNA, 522 bp, Zea Mays
aacaactccttctcaaagaggccaccgacgaccgacctcccaccttggcctataaaaggaggaggtcagcttcgaggaccaaggagatgaccaacaccagcaccacgacagacctagagaagacactcgacagaaggccatcacctacgcctaaagagacctgaagacttgggggccggagccaaggcttagcgtaggactccagttccgtagtctttaggtccacccccgcataagggacttgggagcccttccttcctctctcgtatgcttgtaacccctactttgagcatcgagcaacagaggtgtcggtagtgcgagccgccgaagactagatgtagggatgttctgcccgaactagtataaaccttgcatgcaccgagcacaccgtccgaagcccagaacatacacatggaaatttacttgtcagagcagagattaacttagcgagcagtcacgtgaggttgcctaaaaacttaattctataaatttagggggtgtttggtttgagaaatcactcta

SEQ ID NO: 44125 - DNA, 471 bp, Zea Mays
attcttccaattattaacatataccacctttctaggttatttgtatgacaacacatcataggttaaatctacttatctcggaagggcgctaacacagttcacacataactcaccatttaggccctactgataattcattgccaattacacatattaaatctatgggctaactcaattgaaacactacatatgccattcacatttttagttttatcgtataacaaagcttcatttaatacatcatgggcactgacgatgcctaccataattccacgttgcgaacacaaccaactacgacctaccaccaaacatttcgaccatagaggcgatcatctccataacgatctacacaaaatcatccccaccaattattatgcgcatagcatctagttaaccatattcgagacatacagtcttcgagcacccttcatataatctacaactatcgaatactaaacgatactgttaaat

SEQ ID NO: 44126 - DNA, 1324 bp, Zea Mays
ccctgaaaaactctaaacctaaaccctagagcgctaagtgtaaaatcagtgcacttttggactaaagtgcaaaaactagtaaagtaaggtgttttaagttatgtggttcacaattatgaagatttgcaacttgaaccctgagttttgggcttaattgcaaaagagccacatttgaactcttttgactaagtctgaatttcagtgtaatgtgcttatctttgtgactttgtaactttcaaattctaaggttttttccctaggtcaccacatcaatattgtagagctattaaagctaaacaactttgtttaaggggttaagcattgttgttatgaagaattgggagataattaaacccaaagttgggctgtcagtcgggttactgactgaaaaatgaccaccagtgttattagtcgagctttggaattgaaattatgtatgatctagtgctcaactgagttcagttcctatagtcgaaatgtagctggtttgtaactctacaactttgctgcagaaatttgggtgagttgccacgaaaactttagagaaaatccaccctaaactttggctgtcaggagcactgaagaacattgccatggtacggtgcctgggaggataagcttcagaccctcgccgccgacgaccaatccgcgtcgtgatttgcgccagggtcgggatgggcgtgcggagtgcatctcctcgcaaacatctttttgatccgggtaagatcgccgcggtggagcgtgatgattccagccgccacgcgaccactaatcactctggccatatccggtcatcgacgccgctcctcttcgttcatccacgccctcactgatttgaccgtgttactgtcgcggcagaatgtggcaagctcgtaggaaaggatagcgctcgatgccgttgttgatcgccagctaaggccggcgatggttatcaccatggccatggcagtggctcactgcgcctataaattcaccgcatcctcaccccctctgttcaaatcaaccgagcacagctcttcgtctctaaattgcgaagccgaagcacctgctcccaccctcgattagccaccatagccggagaatctcccttttcccccaaattaggtcgccgtgccaccgtgaacagctcaaccgtggccaccccgctctggtaagacactgtctaattcacgtattgttttcatgactctgcacgcttgtgaagctcactgtggcgcccgtttactcaattcggccatggtttggcaggaacgcgtgctcacgaactcggtttccgccatgatcgtggacagactgttcccagtagggtttaggtcaaataaat

SEQ ID NO: 44127 - DNA, 1052 bp, Zea Mays
gaaggggtacgctagggtcggagccgttggatcagagcccaacgatccagattagatcgggaaaccctaatattcatcaagcatacagaaccgtgggatctacgatagatggctctgatttgatgaacggcgcgatcacatggaaccgtccatcactggatctacggctgttgcttaatggggcgatggggtatatactaatctgatctcagccggttgctacccatccaacgaccacgacattgtcttcctcccaagaccacgtccgcggcaggcggcagcgcgtggtccgcgtggtggcgccatggccaaacacccaggcacatgcccacgcagctagcacttcgattcgacaagagctacacaccgcgggttttgggtcgagtccacggggcatggttctactagagattaggttccaaaccaggcggtcgtacctaatctgcggcggcaccgtgctcccatggcgacgagtacgccgacgcaacagccatttcccaccccactaccccaatatacgatctggaagctaatacacgttgctaggagcattacgaaacaaggagaactctcacctgggcaagcagagtgacagcagcgcccgaccacggtgtacgacgacatggcggtgagggagaactccgatccgcaattaaccattcacacgccgaatcaccaagcctgaagaccccacgaaccggcccccggagtcgccgtccatcccaataccacgcgcacgaagaagatccgcaccgccggtctctaactctctttccgtctacggttcccgttggtggtggctgggttctcggctagatggataagggagcgggagcggctgggttatataggggcggggcgattcaatcggccgagaatctcggcaatttagttgaggagcccccggattcggtgatcacgcacgatcgttatgagctcaccgagcagagcgtgcatggaaagggggaatcaccaggattccgcgcaggtcgttggggaggaagacgacgctgtccacgcgggtccacccgtcatcgccacagcacgaagta

SEQ ID NO: 44128 - DNA, 345 bp, Zea Mays
aaaaatttagagaagtctggtattctagttctctgtggatatggcacggtgtcgaatccgtggctataaggctttcgatacgattgccctgtacctgacatactaacaccgagtttgtccctgaacatcccggcttcctcgtctctgatcctctccgccatgtctggcgaccatccattgagtttgtgggtggaaatctcaggttgtctgacatcactctgtcggctttcctcccaggggtgtttgaggtgtgtgttaggtgtcctattaatgtcaccagctcctgccctatacctctcaggctctcttgtggccgaacaatattcagccctatgcccatgaggt

SEQ ID NO: 44129 - DNA, 2519 bp, Zea Mays
gttggttgggaaactgaggaggattctgcgcccgggattgttagtggctgcaaaacaggctgaggcaacatatttggaacaattggtaaaacacatgcatgagtattgaccgcaggctcatctgcaggaaccgtggaaataggatcaggaagaagaatatcagcagtatacctggcgcccgcggtggaatgaagttcagaaaaaggaaaaatattttcatcaaatataacatccctagatgtgtatatacgtcctgtagagatatctaggcacttgtagcctttgtgcataacactatagccaaggaacacacatcggacagaccgaaattgaagcttatgggaattgtatggacgtaaattgggccagcaggcacacccaaaaatgcggagggccgagtaatcaggtgtggagccaagaagtttatgaaggggtgtatcaaaatttagaagtttggtgggtgttctgttgatgaggtagacggcagtgagaaaagcctgatcccagtatttcaatggcatagatgcagtggctaagagagctaatcctacctcaacaatatgtcggtgttttcgttcggccacgccattctgttgatgagcgtgagggcaggagactaaatgagtgatgccaattttccggaaaagagagttgagccgaacatactcaccaccccaatccgtttgcatagcaatgatcttacgattgaacatgcgttcaacaaggttttgaaactcatgaaatatagtgaatgcatctgatttgtgacgcaacaagtaaacccaagtgaatttactataatcatcaatgaaactgatataatatttattgttgccgaaagaatcaattgctggaccccaaacatcagaaaagatgagatccaggggagcactagacctactaaccgaaataggatatggaagctgtcgtgccttggcacgcatgcatgcatcacaaacggatgacttattatttagagtggaacataaaagaccattatctctaatgacacgaaggacgatctcatgagccggatgacctagccgagcatgccagcgatgaggtgaagacttgatggcagatagaaggagcttctgagtggggttcagctgggtcggtaagggatagagaccacccttacaggggccgcgaaccagcaccttcctcgtggcctggtccttgatcaaaaagacatgaggatgaaattcaataaatgtattattgtctagagtaaacttatgaatggacacaagatttttttgtgtaaggggaacatgaagaatattgtgaaggtgtagagggcgggtggacgaaggtatgacagatgagccaatacagtcaatattcatacctgcgccgtttgccgccttgatttgttccatgccattatatcgttcatgcacggtcattttatcaagctcgccggtgatatgatcagtagcaccggagtctaaataccattgtgaatcactggcttgaaatgtcgtcgcagatgcagcaagacgttgatcagggacgaaatcctcgtcaaaccggtaccagcagatgttggctgtgtgtccgattttgaaacatatttgacagtgaggacgagattggcccccagatgaatcagcggaagagcgacggttggatccaccagaagagcccccgcgtgacatgacagatgattgatcacgtgacggggggcgaccgcgtccacgccatttgttggcgccacggttcgacgaagatccgcgaccacgggaggccgcgttcacggatgagtgataggaggcccccgactgcctctccgtgcgcagttcataactcagcatttgcgagagtaattcagaaggtgtaacaggttctatgcgagtaagaatagatgaaacgagaggattgtagcgttcctcatcaagaccagtgaggagataggatacaaactcttcgtcgttaaggggctgtccggcagcactcatctcatctgcatagcctttcatcttggtgtagaagtccgtcatgttggcagtgcctttctttgtggttgccagcgcaatgcgcgtattgacggagcgagcacgggtacgggacgcatatgttgcggccagtgtgctccatacctcggccgaagagggcagcgtggcgacgttggtgagtacatctcgtgtcagggacgacaagagataccccaaaactgcttgatcacgcgcaatccaccgagcatactcggggtttggttcggtcgtcgaggcatcgccgatcttgctggcgatacgggccgggggctttggatcagcacccgtgagaacgtcttcgagttgcgccgcgcggatgggcggcaggatttgagcacgccagagcacgtaattcgtgcggttcagtttttcagaaactggaattgagaaggaggaggggatggtggaggagaattcatgcgccatggatgaaaaaagaggctggctatggtaccatgtaaacctaataggatgaagcgttcaaccaccattggtggccgcaggttgcatgtttatatagcg

SEQ ID NO: 44130 - DNA, 759 bp, Zea Mays
gggattgagcgcgtttaaatctttaacaagtcaaaaaaattatatcccaaccttatccaatccatatctaatgacaataacggaataaggcctcagtgcttgaaaaaaaaggtaaatcttagccaatttcccatgcatccaagcaggccctgtgatgcctaggtggctagtttgcatactgaaaccttactttgagtcgcgaatatgtgataacggaagtgatattaaccctaatctttagtgcatggtacatctgtacctgagtcatctaactggggtttgtattcttggccaagaacacgctatacatgcataagaacttgtcaaaattgctacttgatagttatacgctgcccacctgtatctgtatatatgttgcacatactatgtctcttgctgattaagcatactagttcagtcaatgcactgcaatgtgcgatcattcgttaccctggtcaaattggacaaatatccaattttttggcattatttaattcgtttacttccgattctgaaacaggtctttagtcgagtgaattgcacaaaacaggtattggaagttggaatcatctctccacgtggcactagtttaaacattctttcacgtaccggggttcaaatcagtttacaccatcttcgatctcccatctagcaagaatgatcttagacaataacaataaactattttaattcgaaacaagttgagatgcaacagaaaccacaaatcaagatttagacacgtcttttcatttgctcctg

SEQ ID NO: 44131 - DNA, 366 bp, Zea Mays
gcgaccccatatgcatatgcatagccctgtagctagctagctagctagggtttgcatgcatgcgacggatcggtcggtcttatgtacccgcccatatctttcgctcgctttggtatggaccaatatatactacccttgttcacatgatcaaaaatggtccccccctgcacacgcatacacatacactgagaactagagaagggggagagagaagatatatagatgctacgctagctaacttgctgctgctgctgcataccctgccccgtcaatcaagctatatatttggtccgtgcatcaccatcattccgtgcgtgatcgtccctttaattacttttggttaagttaacagctcttggagtttgg

SEQ ID NO: 44132 - DNA, 460 bp, Zea Mays
tttaaagctaaccatcagaccacacatcttattgtttaaaaataaacaataattatatttgtaacgtagatgtcactcccacgctctcccgattcgtggcaagcgtatgtacacataactagtagcaatatagaagaaccctagtcaattgactccctgcgactgccagattgggtcattttctagcccacagtccacaccgctggcgctggatccccatggcagcgtcgcaactaaactggcgtaacaggctccgctgcacaaagcaaccaataccaccaccaacaacaacaacaacaaaatgcaaatcctcttcaacccgacattaggttaattggcttgtcaatccacccagaacttggcaatttccttcgcacttcactgtaagctgctttgattttcttaaccctagcaccaactagtgtccgctttttggctccccttaatatggcaaactttc

SEQ ID NO: 44133 - DNA, 425 bp, Zea Mays
ctcgctcatcctacgttcgggccgtacgaacggtgcctggctgagaaattcaaagatgtggcaccatctaccctgtcacttctcgagactctcctgtcgattgacccggacatgagaggcactgcgactgatgctctaaacagcgaggttaataaaagtttgaataaataaagaaaaagataaattatgggcagacattatgcaaaaaagaatgatctgcatctggtcatgattgcacggattcggggtagttggcattcgtgtatcgtagagactagagatcggattttttttaaagttggaaacagataggtggtcctttgttcagctgtatgtgcttaccaagccccattgttttctgtggattcagttcttcaggacagaaccatatgcctgcgagccatctagccttccgcgctatccac

SEQ ID NO: 44134 - DNA, 342 bp, Zea Mays
ttgtcgaagatgttaaagtctaggccgaagccgaagctgggccttcagtgccccttgagacgaaggctgtcgcggctgaagataaagctgaccaacaaacttcagataccggcatggcaacagggcaagatgtgacagaaagagcaaagtctcttgcccccaaagctccagccaaagatgttgactacattgttcgacatgcttcagggaaaaattatccgaagaagaaatcctagaagccagacactatgcctagaaactaaaatatccgaaaggggccttagtgttcaatggcactaacgaagatgatttcctatgctgtctaccggacaacaaagaaat

SEQ ID NO: 44135 - DNA, 767 bp, Zea Mays
aattgttaagcagcaccgctgcagcttacctcgttctcctcggggcagggatgctatttgggtggtagtggatcgcttgactatgtctacgcactttattcccatgaagaccaccaattcagcttcagaattggttcccttgtatatgaaggaagtaatcaggctccacggggtgcctaagttcattgtttctgatcgagactccaaatttgtatccaaattctgggagagccttcacagtgcattgggtaccaagctttcgcttagtgtcgcgtttcaccctaggactgatggtcagtcggagcgaatgatccaaaccttggaagatatgttgtgtgcttgtgttctatcatggaagggtagctgggaggatcatcttgcattggcggagtttgcttataacaacagctaccaggctagcatcaagatggcaccatttgaggatttatatggcaggcggtgtatctcccctttgtgctgggagaccttgggagagagatccctggttggtcttgattgggttcagcagacttctgagaaggttcgggaaattcgtcataatattttggccgctcagagccgtcagaagagttatgctgatgtgaggaggcgggacttggaatttgcagtgggtgaccaagtcctcctcagggtatcacctactaaaggagttgtttggttcggtgtctccggaaaactcagcccaagatacattggaccgttcactatcttggcccgagtgggcagcctggcttatcgcttgcaac

SEQ ID NO: 44136 - DNA, 478 bp, Zea Mays
ggagtatccatagaacactaggcaaaatcaccaccacttacaattaagaagttctatgtgcatgcgtttggacgacataggatccttatgtacacaaaaggaaagagtacaaaaataatgttcatctttgtgtagtgaattgtagccaatgcaaattatgttgttcaccgcttcactgtggttggtgcacgtagcaaatttcaatgcatcttcaacgcatgtttctccactttcttttacgaaaagatattggcttttcaaccaatttcgcgttcacgcgagctagtgtaaccgttgcttttagagttttcggtggcgtggcttgttatgttcgcaagcatctacgagagaatcagttatactctagtaattctcagattagaccgcatgctaaaagcacacaacaacatgatggtgtttttagccatcctgttgtccgagataaactataccatcttcggatcttggatgtcccaaa

SEQ ID NO: 44137 - DNA, 572 bp, Zea Mays
cactcaggaaaaaggttttcgataaaaatgaaaagtttgcaggaaagtggataagggaattgccctacgtcgtttggagcctaagaactcaacctagccgagctctgcatggaaacactcctttcttcatggtctacgtgtcagaggcagtactgcctgctgatctcaagtttggggcaccaaggttgatctttgaaagcataactgaggccgaagcgaccaggctggaagatgtcgatgtactcgaagaagagcggctgaacgcagtaattcaagcggcacggtaccagcagactctgagacgctatcacgacaaggtcgtgcgacaacaatccttttcagtaggagatctcgtcctccgccgaattctaacgagggagggacggcacaagttatcgcccttataggaaggaccattcatagtagcagaagtcactcggccgggatcatatcgtctcactcaaatggacggcacagaaattgggaactcctggaatatagaacacctcaggaagttttatccctagctgtatttcaaaaagctatcgggacgacgatgtactctgtaaaat

SEQ ID NO: 44138 - DNA, 415 bp, Zea Mays
gcggaatgtgtgctgagataggctccaaaggtgttgggtcatgcaagttgaatggcaaggtctcctactgctgctgccaaccaaaatcccccacaaacatcggtgtccactagctagtagctaggaaccagttaatttggtttttgatccatagtatggctgttaaattgacatttttcattaataataaacgaaacgtgtggtgcgtgattgatcaataaatgtgtggcaccaggaatgttacatcattgtcaagatgccacataactgtatgcagtacaactttcaagggacttttgtcaaaatacaacatgatcttaaattttaacttttgataagcttaaggacatgttttgtattaatttaatctaaactatatagattaacatatccaaacaaggtctgacgatcttcg

SEQ ID NO: 44139 - DNA, 751 bp, Zea Mays
cgcgaagtccctggcctcgacccgcgccctcgccctcttcagcggccggccgttgaccaccatctccccctccgccgccgtcgtcagatcccctcagatctgcaacgcaccgtcgtcttcctcgtcgtcgattaaccggatcggaactcaggttagggtttgcggcggcggcggtagctgcgagataacgaggaggatggtgatggggtcgattccttcgaggtgaagcacgatcaggtgcgcctggtctttgtgcaccagaggggacggagcaaatgtcgggcccacgtaatcgtgcgtggcgtacagtggagtgggtctatgcatgctatggtggaatgggctcgtcaggtcgtggcagagcgctaaccagggttaatcgtgggtggggtgggtggttgggttcgagagctttccgaaaaggaggcgcgagaaatgggagggaataaaggatcggggcagtgtcgtcattttgtatccatggctcgatgagaggtccagtacggcacatcaaagtgatcctgtgtagggacaaattacacaactgccctcatagtccgtggaccctagaatgcttttatttcgattcgttgtgtacagaccacagaatccctccactcgaaacgtgtccactgtaatctttataggcgactttctcaagtcacagagacaagtgatacggtattttttaagtatacccttctgcaaacatgttgtcgtattgggtagttgccacaaatttgattttttt

SEQ ID NO: 44140 - DNA, 491 bp, Zea Mays
tctagtcctccacattcttggtcgctccagatctgctactagcttcaggagggcgatcatccatgatgttcatagaaggaggggctccaaaaatgtccagctctccatagggtcctctttcacttacttccgttgtgtcagcacccatctctgcaactttaggtggtacgtttgggtttaactaatcatacaacacatgcacctcctcgtgcagcatattgttatatgcttgaaggttttccaacgctagactcagatcttccacccaggctcgggcagtcgcctcacaatcccaggctatggatcacgaactcatagccgagtcaatagtctgatcacgctctacaatctcccgctgcagacgttctacttctcctgacaactcagcgatgctgcgactagcacacactcgctctctacctccatgacacaactccatagtcagacgctcgactctagcctccaagtctcctatgggatcattgctccca

SEQ ID NO: 44141 - DNA, 1021 bp, Zea Mays
cttttgaaatgagttgaagcagaggaagactggctagcattgctatacttttcagtgatccctatcggcatgtcagaaaggacttcgaatggattagaagaggttctcttttgagttgagaagggagcacgtgatgatgttgaccttctcgaccgtccaaccaacctttcatgaatagggcgagcatggttggatgtcgagttactagtacatcccaccctactagccatagagtcagctggaagtgccaactctcttcgtttgttggcagcacgactagcgcgcacattaacagcttgtttgacatacttcttgcgttgtgggtttctctttacccaatcttggtactctagccattgtgcaaatgcttcagcacatcgcatgatctcaccattaatatcatctccagacattgatacccccgggagtaacttattcaaatcttggcatatggttctttccaaggaagcctgcatggctcgtcttgccgcatcttgaattctacgacaactttcttggtgttgagttaaaatcatatccacaatggatgaacgatgtgcatttgtcaacgcggcactgtcaaccacaatgaggttagctcgcgcacgacggttatttcgacggtggcggcggtgccttttcggtgacaaggaaccttgcacagaaggttttgaaaccataatttctgatgatatgggatcagaaagggttgtagttgggtccacatgacctttcctgatttcatcattggtgagaccaattccttgccacctaagcacacgtccatgttcaaccaaaccgggattatagaccggagatgggatgaactcaggagcctcaactcgtagctgagttctagtatgtgactcattttcagaggatgatgtattatattccatcaccacttctttccctttttccatggactgttgaagaacctccttttccaccatggcggcctttcccttattacagagctatggatgttgatgttgatctaccaataccacctcttcatttg

SEQ ID NO: 44142 - DNA, 939 bp, Zea Mays
catttttgcatggtcaaagtgaccagtaaggtggttgcccctagcagaaaaagatctttcaaactaatgtcagaaccatgtagccaatccccaaacatatgtttcatgctatctggtttttgttttcatgaagctaaataaaaatggtccatatagagtgaaccaggcagcactcaaaaaacaagtgattagttgtttcggttttgtggcagaaacaatatgataagtcatcgttccagttgcgctttgccaaattatcctttgtgagcaccaccccacgtcataggtaccaatggaaaatcttgattttcagggagcttttaatttccgcaggttcttatttagattcgtggtgtctctgaatattagagcagcatatagggattttactaaaaaaggcaatttgaggttaacttctagtagaaaccatcctgctcacgtgttaaaataatattgtctatgcgagagcacaattcggtccaagctactagctttgggccaactagacttcgccaacatgagagattaggtgacacattaagagcgtccacaattgttatatatttgtgcctagcgatgttatacaaacaagggtattgggtgtttaaggttgaaccacctaaccagatgtcctagaaatgcatttgagatccatctttcacaataaaggcaccaaagcgaaagaactctcgttttaccttcattagacaagacaaaaggtgtgaatcaccagttttccactccacttgagattggttttgaaccaaggtatttgttaagcaagatttgttgccatagcccattagaagtgagaagcttaaacaaccatttgttaagtagggcaatgttctttaagtttaagtcttgaatcccaaggtcgtcttgatctttgggcgaacacatgatattccacttggtctgtctatatttcttcttgtg

SEQ ID NO: 44143 - DNA, 402 bp, Zea Mays
aatttttcttggatgaaggaaaggatgtccgtgtaatgttgtactacagcctccaaagacatgctgtttgttaagaagtactagagttataaataatccatatgctgagagttttgtaccctcttgctaacctcctttacttattattattgcattcattagctaggcttctgcatgacgagtcctcttgcagtaggtgaaattgattagataaacttcattccacatttgacgtgtagatagatagatatacgtaggttcatatgagtgacgttgtagaaagagcctacgatagttttcttattgacccaacgaaccacctgctgcgctaaggccacacattgcccaaattaagtcacctcccggttaactacggacttgctcctgaacgttctgtttgtg

SEQ ID NO: 44144 - DNA, 295 bp, Zea Mays
taccatgtcgcaattaatcaccatagacagcccatctatcgcctgaggccttgccacagtaagagccacgaatcacttgcgccagtgacctcccttctctccggctgccgcgcgtcttcttaaaattagcagccatcgccgatggaacctataaattgccgccctagtgagctccgctaagtaatcacacacccaatgcaccagcccgtgcttcagattgtccaccagagagctctaatttagagtttcccctaaatcagtcaagaacaccgccgtgtgtgagctcgtcgtggcc

SEQ ID NO: 44145 - DNA, 844 bp, Zea Mays
aatccatcttagtttgatcatatatatgatataaaatgtaaaacttatcattataacttgatatagatggtaaaatggacccacatgtgactcgatcattaatgtaacacccctggtgtttacctcctgttaaactatgcttatggactcaagcatggaatatcggcaataataatggtctctaggttctaatattcaactatcaaaaatttcgatatcttttccgtctttgtctatccggcctgttctaactgctttgcgaagtcataacatatttgttctggagattggcgagtctagtgattatttaatattcatcgctcgcacaaatacgaatttgaaaatttagttcagttctctgatttcatcccaaacaaattaaatagaactcgaagactaaagtgtttggtgccaaataatttagtccctacttgccaaccgagaaattgtcacgtccgaggatttataaatgagatttgtttctccagtaaatcatctatagctgtggaatcagatgttcagaccatgaatgaaataatttgatttcaaatcaaattgaacgcagtctaaaataacgttgttgacatcgttccagttcgtttcgattgcatctcgcctaaatccaaacgttcgggtataaatatctggtaaaactttatctgattctgagaatgtctaccaaatcaaacatcgttcaaatattatcggcgatatcaattcggtccaatcaatttgtgcatttgttaaatgttaatttgagcacccgtatttatccgtaggttattgtaaaaaaaggaaagtacttatttttcttattttttccttctattcttatccagccacc

SEQ ID NO: 44146 - DNA, 575 bp, Zea Mays
gtccattcgagggaaggcttcacaaaaagatgttctaaaccaagcaagcaaaaaaactatttgaaacaagatgtggatgcaatgcacgtatatatgtgagattgggttatgataattggtattatattgcttcatttgttgaggagcataaccatggtctagtatcatctgataaaattccttttctccgttcgaaccgaacaatcagtcaaagagccaagacaaccttattcacttgccacaaagttagtattggtacctcgcaagcctatagacttttacaagtgagtgatggatttgacaatattggatgcatgaagcgggatttgtagaattattattgaggacttagggagaaaattaaaaatgcagatgctcaattatttgtgtcacagagggagaggaagaaagaggcaaattctgcctgttttatgactttgttatggatgagcatggaaagttagttttacatattttgggcggatgctaatagtaggaagaattataaacattttggtgatttagtatcttttgatgcaacatatagcacaaaccagtacaatatgatgtttgca

SEQ ID NO: 44147 - DNA, 421 bp, Zea Mays
gtgttcgctctttatcttaatgtcatgcaagcctcttatgcaatccgtctcactaactcatttaccctctgactagatgatgaaccccaatggaaatgaagtaaatgatgccaatgacaatactcataccttaacgactatgaatgagaaaaataagtcaccgagatattcgatgaatggaatgaagaacaacaaaaggaatagaaaaatgtttggatacatgattagtccacctcaaccgcaagcaaaagccacgaaacacatggatacccaaatggaagaatcaagtcaggctcagctacatgagatacagacacccaatcaaccctcacctcctgttggtcaagcaaattgactcgcaaagacctcaaagcaagaggtgcttgctactactgcaaaaataaaggacacattattcgtg

SEQ ID NO: 44148 - DNA, 364 bp, Zea Mays
aggcaatcggctctccatgagctgaatacgatgataaacctgttctattaaaagtaggagcatgcttctacattggatcttagttgcaacatgaccggaacatccaaagatcaagaacggaccagacacgtaaaacctaactttgtccggtctaagcaaaacagaggccagatgaccgacgagaagccgacataggaaacatctttatttgtaccaaaccaaacagccagttctactgtaggatcctccatcctttcactataggccaaaccatacggacaacgattaagcaattcagaagaaaagccgatccaacacaggagcaccctcgtgcaaataatagaacagggcgcatggactacaa

SEQ ID NO: 44149 - DNA, 606 bp, Zea Mays
gaatcgaaccccagtctatggctggggattatcggctggcatgccatgcaagaggaacgaatcatgatgacttcataatccgcaatctccccctgtacctagcagactcagcgtgggcatggttggaaaacttgaggcccggctgcattcaaaactagaccgacatcgaagagatttttatggggaactttcaagcacatacgttcgcccctgcaaggaaaacgacgcgcgaaggaggggaaggaggagaaggtcttggtggctacgactttgacatggatggcacgctcgtggtggcagagcatggcgagtgggcgttggttgccgagttcggttgagctcctaagccggatggatgacgcgaacgatgcaaagcggttttaaagacacacagaaggcttcaacatgggggaggagtggaggacgcactaaagtgctgcattaaaggagtagatatatgacacgatgtgaaacataggaagttatttattatatttactttatcttaaaataattatcgttcttaatttttaaagagtcaattattctaatttgagccaaatatataaaaactagtacaatgactatgcattacgacgacacaca

SEQ ID NO: 44150 - DNA, 796 bp, Zea Mays
ctggctgcggtagagttcaatcgggcgggtcgatgagcattacgacatgtaagagaactcaaaacactcccaggcccgaccatagttaccttagagggctctggccacgatgagttgcctcacggcggcgtggttgactgatttgggggaaattccaattcctcgggctacgatggatggcaggacatggttagggttgcgttgggttcgtgacaagggggcggagcaagggaaacgctcaatttatagaagctgaccatggttgctccgaatttcaacaaagttaggatcacggtggtgacgagacattgttactaaggcgagttcatcgtggcacgcactggggcaaagtcctatggcaatcactagttactctccacaactcacgacgacgtggttagacgacctatggcatggcgcgattgagatcgccggcatcccacgacgtcatcagccactcggccacgtcgcataacaatcgagtacggccgatgagctcacaccagagagttatctaatgcacatgtattccctttcccccatcttacttggaggaattactgcccacgcttctgctcgaggagtggtggtgtgtgctagtctgtctctgtcctattggtgggtcggacgtgcttccttgtcaaatgagtaaccttgtctcaatctaagtgacgaagagttgtagggtgcgctttatttaatcaggtcgctttccccattctcctcacttttctcttgcccccttattgtcccatctcctttatctagacttctccttgcctttgtgtttttgacg

SEQ ID NO: 44151 - DNA, 550 bp, Zea Mays
ggaagttgttgatggagattagtttcctgaacatgagctggcgcatagtttactcatcttgtgtggttgaacaagcaagactcaaactaaaaggaaagcactaaagaagtttagaaaaaagagatataagcaacaatactttcccttaagggtgttcgcttgcgctaaatggtagatccaaaaaagaagcatgaagagaagcgggtgagagagaattgtggacgggtacaagtgtatcgttcaaaaagaagagggtgagagaaagaattgtgggcgagtgcaagtgcaacatacaaaaagcatgctaccagctaagcctcccaactatcattttttatctaagatttagcatcgacctctatataccggaagcatgctataaactttatacagcccaaagaataccccaaatacacacaagtctggtattttatttaatgtccttaattatcaaccatttactgattagtgataaataatgaacaaccactaagattatgtcaaattacaatttagaggactcagaatttagcagctaacaaatacaaag

SEQ ID NO: 44152 - DNA, 818 bp, Zea Mays
tatacttttggggctctcttggtcaaccctaaggggccattagacctttgaggctcctgacctcgcaacccctaaccaatgtctagatctcgaggcccttcaagtgggaaataaagctcgactaagaatgggagtacatgtagagtaaggaatatgactggctctaaccccaaggtaggacaaccctagaaagtatgccccttgtaccctgtacatcgctactccagataggcacgtgatactggttgtctagataaggatcgacatcgtataaaatgagatggatgacatgtggtcaagaaggtacattttatccattacacagacaaacaagcatactcgagaccactattcaatacgtgccattacccctatagccatgccttgacatgccaacatactagcaagaattatatggtacaaggtgctacaccatttaccaactatatcgtagctgaccacatgaactctagtacctacaaatatgataagtcaaacctacctctatggcaggacatatcaccattatagcaagacatgttcaaccatgtgtcatgacaaagttattccactgagtatgagtatgactccacatctacgatatgaaaggagttgttgagcctctgccgaggagggcccactatctagcaggcatgtatcgccctctcctccccagcgctataaaagagaggagtagagccacgtagaaaaatattggcatttactcaagggggttgatagagttaactgatttgagaggactctgttaatcttggttttatggtacatatatgtgaaatataatcagtagtttagaa

SEQ ID NO: 44153 - DNA, 710 bp, Zea Mays
attctatttacttaaaacaagggctaaggacagctggtacaaattctatagagcgcaggggctagtttataaagatccagggctcggctttaaaattggttttgacttgggagaatggcgggttggtttaacaaaagtgcagggactcttttgaaagaagtgcacggcgaaggggtactaagcatcctgaaccgtccgatcaaactcgcacgacccagattagatcgagtacccttgcgaaccggtactcactggtgatcgtgagatgggcgatcgatggtggagattttaaacaacgctgccagccgcacgaccgaacgatccaggatcgacggcccgctcacgaagggtataacatttataatcacagccgccaaccgcgagatctacggtctggatcccaccccatcaaagcggtacgtttcttagaatcctggccgttaagtatccgatcgacggctgagcgtccttcttctacctaacgctaggcacggcggagtcctagcctgactggcggcaaacacgtcggtgaacagccatcccacccaacaggcattcatccctaaatctgaaaggtgttacgcgaagtggaagaagatatgagttcactagaggtgcccttaccagcaatcgcgtagccgaagccctgctctattttctctcttcttgcatctctctcctccacggcggcttgttcgcccacacggttc

SEQ ID NO: 44154 - DNA, 412 bp, Zea Mays
gcaaaggtttgattcgcaaaggcagtctgatctagattagtaacaactctgcactcaaaactaaaatagtagccgctctacatgacagtgctttgggggggcattctggtgtccaggctacttaccaacgagtgaagaagctatttcactagaaagtcaaggaggtggatgtggaggactatgtgaaacaatgtgcaacttgtcaacaagctaagggtgagagggtgcatcctccaagcttacttcaacctctaccagtacctcagggtgcttggcaggatatcaccttggattttattgagaagcatccaatatcagaagggtatgacactattttggttatggtagacctttttactaagtatgcacattttgtggctcttaaacacccctttacagcagtccaagtggc

SEQ ID NO: 44155 - DNA, 312 bp, Zea Mays
ttcggaaccgaaaggtatacttcagataaaccaggccacccaggctggagccagcagcggcctccttcggcatttcccatacgctcgcaagaggccatactttgtaagtaatatgctcttaaactaagtctcttgtgccaatataggtgcacacggtgttgaaagcagcttggcacgcttgcacatcattcccaagtgcagtggatggccttctaatgccgaagcgagaccatataggacgttggataattcctttcacatcttccctctaacccaagtcatttttcacataaaaccattccttcatccaag

SEQ ID NO: 44156 - DNA, 488 bp, Zea Mays
aattgtaaatttataacggaggtctcaacttaaacctagaaaggccaaatccttagaaatttttctaatcttttgcacttaacacctcttctttcggttctttttatttttttcgcttacacttaccgttgcacagatgacttcccacttacccactgacggagggggcacactttcccacacggacggtcacgcataagagggttttcccctcatcttgtgggaggtactgcagggagcaggttacactacacctccccagtacacggtacagctggtcgaggaacacagggtacctcgctgtagggtgaggatgactctggagcctcatcccctacagcgagggtggcgttcactggactcagaatcctaaggtttccgggccgatgacacttcagaggccacaaccatgcacgtctgacgactttttgtggatttcactccccggagatgtcgacccaccccatcggcttgttccctgctgaaaa

SEQ ID NO: 44157 - DNA, 625 bp, Zea Mays
ctgtggaccagccgaccaccacttgccacttggggagggtatgtatggtatgattggctgggctgcgattgccgctgaaatagcagtaaagcaccgtcacaacacaactcgcacaagacgcgcgcggttcatggagtcagacattcgtatcagctgacatcttggctactcagatctgtcatccgaacaatcaacggctcagctcagatcccatgtagggttaccccaacccacatgctagaatagcaaatacccaacggggacgctgtgcactataccgtttgttcatcctttgctaaaccagttaatcttgctgcgggtccagtcggaacgacagaatggttcactcctgcccccaccgtctcccccaatggcagcgcgtgcatcctagtccgtccagcgaaaagggaagcgccgcgggccgcggctcctccttcgtccgtttcggtccatcatcactctcccagtccccagagagtcccagcacgttcctcggaatcgaattcctattcctttgcgcgctcgtgacagcggtggtagatctgagcttcaccggcacttcacgcgcagtctaaaaccccatcacgttcacgcccagtctgcgcttgcagatgctgttatcgcg

SEQ ID NO: 44158 - DNA, 367 bp, Zea Mays
tgaccattcacttcctaccacgctcgccgaatagtcgcaagtattcattaagcaattcaagccacctgaaaatgagttaggcaacaggcgccgcttcgcataacacgacaccgtttggaccaaggtcaactgctcaggcaatatgattataccccacggtcacatcaagttactgctccaggacagtgtgctaaacgctctgcgtaccaagacaccccttgggcacacccattgggtgtgttgccaagaattttcaaaagattttctgaagaagtcatatccacacagtatacgcaatgaatgtactacgacaaaaggaagagatcggctaagatgggaggaagtccaaatatagctactgaactgc

SEQ ID NO: 44159 - DNA, 681 bp, Zea Mays
agaatacattaataatgagaattgaattaggattaaacctaatttaaagtctagaatttggaaaaagaaaataaaaaaagaaaaaaagacaaaaagaaaaaacaaaaaagaaaagatgaaggaattctgagctgagtctgggcccaaagttgatccggcccaactaactcaccacgcccgctcccatgtgctgatcgaccttgggcatatgcaggtgggaccccatgtcaggtacttctctcgagtgtcgccgacctatggacccgcatggtcagcctaccccaccgttcttgtcgccaccattcacgacgaagccatggaaatcgggcggggccgttgcgcgcgacactcgcagctatcccctcctctactaagataaaggtgagttggtgccaaccaatctggtcccaacagcttaccccacacaagccccgccgcacaaaccaaaacgccatcgtgagggagggagacatcgacgcaagtccttccttggttcatcatcgattcagctccgttgaagcatcgaggggcgccgcctggggtcgttgaagccaattcgggaactgtgggtgtctaaagtcacctcgcgcgtggcaaattgctcaccggagcacatctacaccgcggatccgcccgcttcatgaaccggccacgctacgacatagaccccggtgagaaacc

SEQ ID NO: 44160 - DNA, 1244 bp, Zea Mays
gtgtgtgggcacggcgcaaagccgaaatcagcgccggtctccgcgtgtgttgagcggccccctcaaccgaattcctgggatcattaagctgggcgttggggactcggttcctccctttctctctccccagtgaccctatcagccgtcgcgggcaacaccaactcgtcgacatcattcgcttcaccagggctgcggtcgaagccttctctctctactcattcctacttctcgcacggccaccattttcgttgaccggagatctcgcgggagacatcgaagctgtgcgatgccaggcagccgggagcatccgacctggacggtctataaggctacgacgccatggctgactccccaacgccaagcccctggatctggcgcaagctgagtcacctccacctatacgccatgactccgccgccgtggaaacatcactcgataaatccgattgcgccgccgcaaccacgctctgcgccgctgggtgagaggaattaaaggatcgggatttcgttgtgggctcctcggcgtgcgtcgtgcagtcaccaatttgagcaatagctcgttgggttcagctcagcgtcagcctaccgccatcgggatccatcgggagtctctgcgccatcaacctcggtgagtgcctgtccatgaggtctgcgtattatcggattcgcgtaactgcatcccatgtcgtgatccgtctgcctgggcactggtgctatcctctctggcataatcaccaatgcgtgttctctgttgtcgtggggttcgatgtcggggaggaagaagggtgttagccattgatgttaggattggtggggcctacgccggttgaagtcgcgccaccgtagggagacctgtgcgccactttggctctggccggaggtagatgatgacagagcaccattggattgagtatgggcgtgtaggattagatggtgcggtgagtgatggcttgccgtcgtggatgactgggctcgtcgtgtcgtcacagttctcgaccggagttgaggagagagagtgacgagggtagaagaagcgctctgcacgggagcgccgccgccttgtgcctgtgcgctggagggtggtgaagacactgtcctagacgttgctgccgtgttgggtggttgggaggaatgggcgctagaaaccgtagggattgaatccaaaggccaggcgtggatcgcgattcataaaaccttaaccgtcgatctcagatcttgcgatccttaacgcgtaccggttcagat

SEQ ID NO: 44161 - DNA, 699 bp, Zea Mays
gaaggcggcggtaagcacgcaagcttgccttggtcacttttctttcccggcccgatcttgctcgcgttgtcttccctctccttgctttacatgtattattacagtaatataacttgctgccatttcgtcaccttccttccggatttgattcctctgtgtgctgattaattcgattcagctgttttcttctttcggtgtttgctatacgcttggcgcgatcacattcgtatcgctgttctttctggtcagatcggtaatcgatttgtaaaaatagccgcgcgcaatttgattcagatcgggggattcttagttagctactagctactgtgtgggtggatcggtggacacatgcatgcatacatgtagcggcataattgagaaagaggctcttgttactcgctccctgtgcttcaggtcctccatgttcttttctagggcagtagggcagggctaccattgtttcctggttggcctgtgcacaaaggtcgacgcagtatttcattaagacgaagacacacagatatattttgcctgaataattggatcgtttctctctacctagatgctctgtcacaccagaaattattactttgtttgttgatcctcatatttgccagagcaggaatattcagcctcagactccaagccccctccctgacaaatgatatgcctatagttccttccactgtgccagccgca

SEQ ID NO: 44162 - DNA, 514 bp, Zea Mays
catctgcaatgtactgtgtttggatttgtgttgttgggagatgaaacagttcaaacttttgaatgggctttcaattcattcaaaacatgtatgggatgcgagggaccgagagttatgctaacaggtatgtgaattttttatgctaacacgtcaaataatttattgtgatagtcaaataatggtttgtgagcaattgcatatcaagatcatgcaatgccaattgctctacgaattgtatttccaaaaacaattcacagactgtgtttatggcatgttcagaaccgatttatgccattcttaaatgaattatatgtaaggtttgctaataaagattttaaaacaaaattccaatctattatacatcatcctttaactcctcgtgagtttgaatgtgcctaggaaatgatgctagaagaatacaatctgcatgaagatatgactctacgcaagttatatgaaataaggaaagaatggataccagcatttttaaaaaatgacttctatggggtaatga

SEQ ID NO: 44163 - DNA, 482 bp, Zea Mays
gacaaatataagtggggttcttgaaaggttatgtagttgaacagtaaggaacatttgtagatccagcagtcctgattatcaccttttggcgtttcgctgataactaagaaaaccctgacctagaacctttccatgcctgcttcacattttgatgtactcgtgccttttcttccacagctatagccacacttattgcccgattgaaggtaagatcatagcaagtggccatcttcttttgcaattttgagttgaggcctctcataaagcaatctcttttcttgatatccgtgttcacatgctcaatagcatattgagaaaggtggttaaatttcctagtgtactgcatcacaatatctaccccttgcctaagtcgcagaaactcctcaagcttcatttgtaaaaccccgtcaggaacatgatgagtacggaaagcttctttaaattcaacccaagtaacctggtgattttgtaagacctaaatt

SEQ ID NO: 44164 - DNA, 640 bp, Zea Mays
gacatcaaggatctactcgggccacgtgcaggagacgcatcgtttggggtattttagggatggtgtggggcacgctcctggagccgaagtggtcccggagccggaggggaagttggttgtttttgtggtgtctttcactgcaggacttcgcttgcccgtgtatcggtttgtcgtccaagtgttgcaacgcttcgaagtttagattcatcagcttacatcgaatgccatggtggcattagcgaaatttgtgtgggcagcgacttcgtatggcggggagccctaggtcgaggtttcaactagaattattggctccattggcagaagaaagttattggttgcaagattgcacagtttatacatgcactttcatgccaaggactgggaagacttcgggtgaggttgtggagctcgtgccatgcgccaagaataaatggggaaactggtggtacttttggttttacgtgacgttggaggacaccgagggggttcctgggctgcctccatctattttgtgctcgcacttctacatcgcattcccgtagtttaagctgaaaaagtggtataaaagcaaagatgcccttcgacgcatggctaggatgagctgtggtcacgacttggtggaagagttcattgcatgtgg

SEQ ID NO: 44165 - DNA, 550 bp, Zea Mays
gggattccttccatcaagctgagcttctagggatgcgatccttgcgtgtgcatcctccagctccaagtgtaccctagagaggtccagggtagcactatccaggtcggtgttaagacctgccaccacaccagctagggtgttgaggcgatcttctccagctccacctagaacaatgctggtctggctttctccacgaatacgtagaggaagatgtttgtacttcgtgttgtgcagttgctgccggtaggtgtggctaagggaccacagagttcgccaagcagcatcgctgaccgaagcaacgtaggtgcatagcggcgtcagagactcatgagctgacagagtcctgaaccctctatcacctgcatccatcaccctgacatgaatgtgagtgatgtagtagcaagcccgaggaggctcgtacactcaccttgtctaatacaggggtcggacgtaggttcccaatgcatgcagaacatcctgcagcaggttagggaagtgccctgtatcgaacattgaggtataatgttcagtgaaagcccataaccccacg

SEQ ID NO: 44166 - DNA, 542 bp, Zea Mays
ctagaggtaggttggagattgatttctgctttcctgctggttcatacaacctattcttctgactccatttgggtcgatcgcataagctgatgggccacaaaggatgttgttttgagaatatccatggttgggacatcaaatggacacagttgggacatcaagtttagacgaggtgacgaaactcaagctctctatgatgcagtttgatcgtacgcatacaaaagacacattgtgtgttgattcaatccgtatatacccaaacatcacggatatgaggattgagagaatcgaccaagtattaggagtgtagtcaaataattattatattcctaatatgttaatcgtctttattttaaatgtcattttagttcatttgttcgcttggaacgtttcacatacaacatgcttagaagtattactactatttaaaatgaggtttattcacatgtggggggtaagagttgttgttacctgttgcttagtagctctatgtgctcagttgattgcagcttcaagtggatcaagccatagtatggtagttc

SEQ ID NO: 44167 - DNA, 531 bp, Zea Mays
cgccgacttaagccgatggctccgttagtagggtatagtggtcaccctaagtcgagtaagcgtgagcatgtcacaccgacttaagtcgtcgccgacttaaaccgattgctccgtcaatagggtatagtggtcaccctaagtcgagtaagcgtgagcatgtcacaccgacttaagtcgtcgccgacttaaaccgattgctccattagtagggtatagtggtcaccctaagtcgagtaagcgtgagcatgtcacaccgacttaagtcgtcgccgacttaaaccgattgctccgttagtagggtatagtggtcaccctaagtcgagtaagcatgctgatttcaagccgagctcaatcaaagttagctgtaagtcaagagtctgaatgcctttgaaaatgaaaactttattgatgatgaagtccccagattacagagtacaattttcttcgagaatttttgaggcctcgctagggatagaacattctgaggtgctctacgttccatgaattccccacttccgtgccatccatttg

SEQ ID NO: 44168 - DNA, 579 bp, Zea Mays
cgagggaacaatttgcccttaattttgaatctcctcattccatgaagtggtgacaccttgaggtacacataatcaccttcctcaaattccagtggtcttcttctattatcagcgtagctcttttgcctggtcggagctaccctcaagttctccctgattatatagacttgttcttctgcctcttgaacaagttcaggtccaaagaattgtcttcctctagtcttatcccaatatagaggagtcctgcatttcctgccatatggagtctcgaacagtgacatcttcagactggcctggtaactattattatatgagaactcaacataaggtagactcttgtcccaactactaccatgctgaagagtacaagctctcaacatatctttcaatacatggttagtcctttcggtcagtccatcagtctgaggtaggccgaactaaaattcaacttcgcatccatattctcatgaaaacttttccaaaatttggaggtagattgtgatcctcaatctgaattgatcttcttcggtacaccatgtagagacacaatctgagccatatataactctaccaattaag

SEQ ID NO: 44169 - DNA, 686 bp, Zea Mays
cgtgagaggagagtttagatccaagtatgagagcacgcttagggaacttgagtctgctcgagcttcagtcgtggtgtccgacgagactgaatgtgataagtgtgctcttcacatgtcggacatcaccactttgcagaccaagtacgccaccttgctaaatgagtgcaatgagttgagatcgatgtttagcttgttggttgtgtgtattgtttgtcctggcttgcaaattgagctagcagagagagtcgctaggatagccttgcttgatatgtctagctcagtgagtgcccctgcacctgtgcagtgtgcactctatgagggtttgtagtgtgctcttgagtcctacagacatgacaagacaagaatcgaggaaaaaacacataccttcaatctgtcttgagctgggtgtcattcagtgagccctagttgagcatgatggtcagttagttcaagaggggaactaatggaccagtgttaggcgctgctaaggatgtgagtgtcgcttgttttggtaaggttggtgagtgcagtggcctgaaaccctcagagaaacttttagccaccccaagcttgtcaagttcactccacctaaaaatgccacccctactgtgaaaaatggagtgattgaggagcctatgagagcctctccacagaaacaagtgtgaactccaaaaccttaccatctc

SEQ ID NO: 44170 - DNA, 973 bp, Zea Mays
cggggttagccggatcataactctcatcatcactatcaaccatttcatagtcaacaccatcggaagatgcaagttcgtcattaatgtcattgccttcaaggattactaagtcattatcattttgcacctcatcatcctcctcatcaacaatcatttcaatatctacgtccattccgatagcttcggttaagtctatctcaaatcgcccttctagcccatcttcttggaagaactctccatcatatatgtccgggtctaagttataatcttcatcgttaggaataagtaacctcccgtgcggtgataccttatacacaacatcccaacccttaagatgttctttcgcttggcacgcatatgggagataatacacttgtgtggcctgttggtccacgatatagacatcatctcctggtaaggtggaatcttgtcgaattttgactatcccaagattagaatgtgtccgtctagtcacttgagggtcaaaccaatgacatttgaatatcactggagtaagaggtttggaaccataaaaattgagctcgtatatttcttcgattagtccaaaataatcgacatcgtcaaggccgggcgtaaagactccaaaacacgttgttttccgattgggctgactttggttgtagtttgttgtgcgaaaacggtatccattgacgtcatacctagaatacttcttgaccctataagcaaagtcgttggctacttgtctcaactcggcactcatagatggatctctttggccctgcaagtattcgcaagttaaaagacgctaaattgagttcatagacggatctctttgacaaactaagcacgtaccttacgtttgaaccaggaaatgaaatcgggaaacccatttctcgcaccctttctaaaaagagtgtcatattcctgtggagtggggtcccttgatcgacgccagaattcatgaagaaattgttccatgtatggcgtgacc

SEQ ID NO: 44171 - DNA, 563 bp, Zea Mays
gatgaaatatttttttagagttgaaatttagagtagtatgtatgtggatatcctatatgagcaggtttctgtagcgaatggaagagatttgtccagcagcattttcgttgcctacctggcatgtgggtaatctggaccatccatcccctatcgtctgccgcaccacccaaatcgcaaacctgttcaaagcgccggatagcagtctagcacgccactccacagtccacagtcgatctccgacgtcactttcacgcctcacgcggcggccgcgtcatcaaatctcatcgctcggccgctctcacagtcacagctgaatcctctcgcagagccaccacgggagctgaagtcgtcccctcccgcagtcacccccaagcgagaccactcccacctcctccactggcgtctagccggtggctgctgctggtgcgctacgtcactggctcggggggctcggcgcaccttgtgatgaagggaaggcggcagtcagtggtccggcgcatgtacaaggcgctcctgttcctcgtcgccgaccttgtcctcgaatccgcaggtcagcacggttt

SEQ ID NO: 44172 - DNA, 557 bp, Zea Mays
gatcagttgatgacagctaccttcagcacccgtgaaaaacgaaggttgaatcagatgatggatgctcttaactttgaatatctagattacgacaggcttgatgaaggggccgggggagcaaagagaaagagggttatgagtattctgaaaaggcaggccatcctgtccatcaaagaagatcagagggttgttaagaagcagaaagttctagtagagtcgaaggatatgactcccaaaaaatgaaagtctgttaggatggctgctgcagagatgaaggtacaagatgtaccagaaaagactgcgggcccttctccgttttcctctatcgatgtttcagaaatactaaaggtaacgactgaacccttcccgtttgcaatgataagttccctggggtcagatctgactagccaattgcagtcaaaggaggaggggtttgaacaaagctcgggaggaagggagactgcttcggctaccgggggaaatgtcggggggtcagaagaaacaacgaatgatggacgtaatgcaagccatccaaaagaccccgccctcggcttcgg

SEQ ID NO: 44173 - DNA, 993 bp, Zea Mays
ccgcgacctcttgcctcgcctctcgggtcccctagtcgagccatcatcttctcccatcacgcacggcaacgcgccgccgcgactcgtgaggctaccaattgccaaatccgactgtctgccgttgataccgcccttagaaccaccttgtgtgcgcggtgtgggtctcgggagagttctgttggagcgctgtgaacggagctcgactgaggtgtacggtactcgtcgccggattcgcgcctctgccgcagacccgcggttcaccgtggatcgacctcgtggccgcctgaacacttggtaagttgctctgccgtcatgcgcctagccatctagtccatgctgtgcgggttagtcttctttttcatgcagtaaatcgtaggatagcccgactccggcgatggaccaccgtgtccctgggcggcgccgccgtctggttgctctgttggggggggggatgatgccagtaaccactgatgcgagatcgaacaatagggattagatgagcgccgttgtcgtccaatcggttttgggcgatcaggattagaagagcgggatgatgaaacccgaaccgttggatgatgagatctaacggcttggattagagcgcgcgcacggttaatacggaccgttgatcttcaatccagtatatggtaggattataccggttcgttgactcgtgaacctaatctgagctctcggcttgcgatccaacggctcagatcgcaccgtaccctttcgccgagccaaaattgtaaaagagcccctcaccttttagcgattcaacccgccatcctctggagctgtgctccgtgtctggcgaatctttcctcgaaccccctgacttttcctaaaattgaggcccaatccagagaacatataaaataggtaaataaatgcagaaattgatttttaatataaaaagaattcctaaaacttgtttattgcatagaaaattcattctagctccaaattgagccattccaatttctaaaattt

SEQ ID NO: 44174 - DNA, 813 bp, Zea Mays
aagtgctcaacctaacaaacacaacaaacatgtattgcattttttagcaataattttctagtatgatgaatgttgcaggatactttggacaataatgcttgggtgagggacatcaagggggtggctgtcagctgcagccttgatggaatacctccatccatgggatatcatggcagaagttgaacttcaccctagaatagaagaccggcacatttggtcaccatcctctaccggagaattctcaaccaaatctgcttatcatagtttctttgtcggggctgttggttttcacccgtggaaagaaaactggaagacttgggctccacccagatgcaagtttttcatttggctagctgctctgaattagtgttgaactgcagataggttagctcgctgggggcttgagcatcctgagagctgtcaaatgtgtgatcgagaaaaggagaacatacagcatttgctcacctcatgtatctttgcaaggactgtgtggtactctgtcctaaagttggttgggctgcagaagtatgctccagggttaagggacaacatctttactgaatgatggtgtcaccatgtctggctacaccgcagataccaaaacaatttcgtaagggcttcaattcattgatagttttagtggcttggtgtatctggaaacatagaaacgcatgtgcgcttgagggatgtgcacctagttttgatagcatcatgagaaatgcgcttggtgtacagtgggagctaaatagctccctagtttatggtcatgattccccctccttggtactggtcatgtattagtgtgtgtggcag

SEQ ID NO: 44175 - DNA, 345 bp, Zea Mays
gtaaaggccacatattcaggagcccgcctagcagagttgtacttggcatggattgtatgtctacatggtgtgcccaagaagattgtgtcagaccggggatcacagtttacttcctagttttggcagaagttgcacgaatgcttggatacaagattgaattttagttcagcctaccatcctcaaactgatgggcagaccaagaggaccaaccaagtactagaggatatgttaagagattgcgctcttaagcatggtggcagttgggataagagtttaccgtacgcagagttctcttacaaatagctatcaggtcagtttgaagatgtcatcgtttgaggctttata

SEQ ID NO: 44176 - DNA, 580 bp, Zea Mays
ccgggctgcctgttattcctagtcctagaaaccttttggcttctgacgttggttgctccgctctcgctgtagtgcaaaaaaccatctcatattccacctctcgccatcaacactgtttaccctcttgcagtttccctttgctgcctttgcctttttccctcatggctaacttcccggtggaccctcgcccattccatccgccggagttcattactatggatggggacgccaatcggcgtgctcgcgctcgcattcacctggctcttggacaggagactcatcgtgaggacttcgtcattgcgatggacatggaaggagtggtgcaacccgcggatgccggtatgtgggtcaatcacattcgggactacttgcaaaatgatcttaggttgcatgtccttagttgctttgatcacccgtttggcttggaaatctttgaaatgggaagccttcttcagaaggacacattgatctcttgtgatatttttaatgtggaaggcactctggtgcgttttatcagtccgaatagagcgtgcaatttcagagaagttgaaaaggatggatttttgatgctgggttttcc

SEQ ID NO: 44177 - DNA, 590 bp, Zea Mays
gaagatcctacgtgaacatccatggaagtgcaagagggaggacccgctcggacaccctcgggggttgggtcatagcttgcgctacccacccgagccggatcatctccggcaacaccctcgggggctgtgtcgcagcttgcgctacccatccaagccgaatcatccccgacaacaccctcgggggctgggtaagcgctagcaccatccttgagggtcgagttctctgcagcagccacctctaaggccgaaggtccctcagtcacttccatgggagcagggcaatccaaaccagcctcctgaccctcgagaccgtgctccaaggtcgatgaggcgcgggaagctgcccgggatgaccccaacccggcgtcgagcacatcaacacaaacatccatcgcgccaccacctgtcagttctgataacagatcttctggaaccatgtcttcaagagtttgatcaaagttcgccagagataattcttgcagaccaatgagggcagacaaggcaggagaagggacaccactactttccccactagctatgtaacgccggctgttcttccgaatcagagggatttcgtcctcttcttcatc

SEQ ID NO: 44178 - DNA, 528 bp, Zea Mays
attggatcagcacccgatggttcagattagatctagtgcattatgaatccgcggacagcgcaggaccgcccaatcacaaacctacgacctagatctaaagcaaccccgagtcgatcacgatcgtccaatgatggatcaaggatccagatttaatatatcgaagaggtatccgatgacatgatcttgcccgtccgctaccaaatcgacggtggcagcacacgcacacctagatctaatcctagtcattcgcagagagatcaacggtgggggtgtatcttcttccccagactccacggctgacggcgcatcgccctgcccgacgggacatcaccggcgaggcccccctccagccataccaatggccaaaccccacataaaacggtgctacacgatgaggacaacgaggcgaaccatatagggtagcgacttaccagaattcgtagcaagagctccttggtcgcggtggaatgcggaccgcggcgcggaggcccaccacgggacggtgcaggctccccaccatgacttctg

SEQ ID NO: 44179 - DNA, 508 bp, Zea Mays
cggtaaccgaacaagccacggcacaggtattcaaccgagcaggcccaccctcaccactcttcatcaccgtcaaagttgtgctcgtcaaagttgtgctgcatttttcctcttcactctctaagtgcaaaagagagagggcgatgttgtaaaagatgaacaggccctggcattcttctttcctcttttgctgctttctaggttgtgcttcttaccgtgggttttaggataaggggaatagaaaagactgacaaagatctgctaccgttctttttttataatttcattcatttcgtaagcttttccgtctgtgtcaatttgtttatgcattcaatacaatggaaattccgcgtccaagggttctaggctccaaatcagcatgtataatgtacctttagaaaagaccatcgccatggatgcaaaatttatgttatctatatatatatgttatgcatacaacaactggacactgcatatgtgagctccctctcagggaacatgtagtgagggg

SEQ ID NO: 44180 - DNA, 920 bp, Zea Mays
gccccctagggttctactttagggttttccagggttccttttagggtttttggggattctagggtttgaataccatgtatgtctattcatggtgacattatatggttatttcaattgagttttgaagttttctcctgtttaagcttggtttgctctattaagcccaatctagggttaaacactatatcttagggttttgcttataacatgtcacatcaatacaacttgtttgaactttttacctagtgaatgcactctaggtgtaacaaacacatgagatgtcaatgcttatgatgttatgcttaagttttagtaacaataacaccaggggtgttacacctggcggcaaccatgtagtctcgggaggcagcttttgcccgtgaggaccacttgaggggccgttttcaggatctggttctagcctataatgatctggaggattattctaatgagctacatgaataagtccaccaactttactatcagatgcactccaatgatgcgccaggagccgcagaagcagaaggtcgtgtggtgctagctgatggtggtgagcctaacacagacttagaggatggagtcgctcctatgtatgtaccaggtggtgagtctcaaggggtagtgatgcttctaagatagctagtgatacagagggttagtgtgacatgtgtatggtgtcgtgacctctagtgtagacataggataataagctatgtcaattttggtattgtaatgaataatactccatctacctgtctcatttaatatatttcatggttatggatgtttattcatgagtttgttttactccagatgcctatgcgtactcgtgggtcggatggggctggcacatcgcgtggtggagcggaagccgatatcaatcctccaccaccaccagttccacctacattggcagacac

SEQ ID NO: 44181 - DNA, 463 bp, Zea Mays
gtatacacaaaaatggatttaaacaaacataaaacggattaaaaacaaacatatatgcaacgaaaacgagcggtcaccgaaaaatttggccaaaatatacaatattgtaccatcactcaacaaaatacaatattagaagtttaggacactataaacataatttcacaagtttaaaagtcagcacaaacacataagttgttttaaaagaaatcaacaatgtgcgcaaaggtaataatttttccattaacattcatcaatcatcaacccaaacttgcggatatataagagaaaagggagtagcttgtaaacccaaacttacggatatacaagagaaaaggcagtagcttgtacgattgtacttgtcgtaacaggctaacataataacatcaaatattatgcaagcaatccttaatccaccatgcgattacaaacatcatggttcacaggctcgcgtgcaaaaaaa

SEQ ID NO: 44182 - DNA, 393 bp, Zea Mays
ctctccttggcttctcgtcaaataaacgagaaaagataagctttatctgcttgcattgcatgtgtgaccaatcatgcaaccaccacaagcgcttcctcctataatgcaccagtttgcaaccaccatgaccgcttccttctataattcaccagttttgaccgtagtcctgcgcacgaagcgtataaatttgttcccctccatcacttctcgcataacaaactagataagataagacttatcacttgcttgcaagcataaccaaccatgcaaccaccacgagcgcttcctcctcctcgttgttgtcatcgtatattaatccacaacttcccatcatcccatccaccgactcaccagccattgccgtcatgtcccacctgtcgtgctgcctttatc

SEQ ID NO: 44183 - DNA, 520 bp, Zea Mays
gtgatattcattctccagctctgtctgctcttgttagccttcaagaattatccataacaaaatttgatcaagcccttgaggatgtcattcctgaagatatgctgttggaaccgactgctggtgatatgatggatgtttgctttgacactccagatgtgggattagaggtatcccgagcggtatctcgtgcatcgtcgactttggaaggcagtcttcggtgtcaagaagttggttaggattgcccgactcccatggaggtgactgaggatccttcagcctcagaggtggctgttgcagaaaacccagcccccaagggtgatgctggcggttacccagcccccgagggtgtcgccggtaatgatccgactctggtgggtagcgcaagctgcaacccagccccgagggtgttgccggtagtgatccggctccgatgggtagtgtgagctgcaacccagcccccgagggtgtccgagcgagctctccttcccacacctccatggacgtccacgtcgggtcatct

SEQ ID NO: 44184 - DNA, 507 bp, Zea Mays
cagggggatgcatctaggttatatctgctcaacttagcctatgtaaccttcttgccaaaaaaagagtgaggccattgaggtgaaagatttcaggccaataagcctaattcacagttttgcaaaaattgttacttagattttggctgatagacttgcacctatgctctttgatttggtctctatgaatcgaagtgcttttgtgaaagggagaagtatacatgataatgttgtcatggtgcagcaaacaactaaggccattcatatgcaaaaagcatctagaatcttgtagaaattggacattggaaaggcttttgactctgtctcttggaccttcctatttgaggttcttagacatttgggttttggtgcggtataatctcaaaggttctgagttcatccactactagggtcttggttaatggggagcctgaggatattattcatcacagaagaggtcttaggtagggagaccccctgtcccctatgctctttatcattgtaatggat

SEQ ID NO: 44185 - DNA, 870 bp, Zea Mays
caagtgatgactacttggagcatattccaaggcagaagataatgcactatctgcagccttcggaggtcggggaaagaagagattaaacagagtttttgatgccattggcttcgtctaccccgactaccgctacctgctgcgggaacaagggaaaaagaagaaagctgctacttcggccaccccagacgaacctgtgccgaagggaaaaaagttgaaggtcctaactcaccggccgcatttcatcgaaccggccgcgatacctgaatttggcgaagggacctcttcggctgccaaaacaaaaggaactcttccttccgagcagaggactgaagaaccgactataatgccgaaggtgcctacagtgaaggtagttgaaatgaaggttggtaaggctgaaaagccaaaaactgaagaaataacaaagatgccagaggttttgagccctccagtaaaggcaacagtaccgaaagtacaaacgggttctattgtgactcctaaaaggagaaggatggtaaatgtattagatgtgttggaaacaaccgactccataagtcccgctcccacagggaaggttgccgaagctgccaaaacgcaacccaaagttgatactaagcaaatagaagctgaagctacaataacccaggctgaaaccgaagcagggccctcagtgcctgctaagacgaagcttgccacaaccgagcagagggccgaaggaataactccagatagtaatatagcttttgagaaaagtgcggccaaagaagccgaatcccttgctcccgaagcactccccaaagattttgattatatcattcgacatgcttcgggaaaaagattatccaaagaagaaatttttgaagccaaacatta

SEQ ID NO: 44186 - DNA, 426 bp, Zea Mays
tgtgtgaatccatgttgtgcctctaatgcacctttttgagctataaggtgcatgagtaaaaggagccctcaattggtaacaactggtgctctcatggcaattcaggaaaaggcaaaggtatggagaatggaactatgcaatttcattgaatatcttgaagttccattgattgtaatcacatctatgttcttgcctctgaattggtagtatcttggcttaggtgctccttactttaaaatgttgtttcttttggtgtacctaaggaatcttcttaatcatggtgtacttagacattgcgctttatatgcatgatcttgtcgttttcaattggtatatgtggtgcaatgattatcatgtatgaagcatgcctaggttgcttgtaaaatgttatacttcttgaggcatgcattgttgtattcagtcaac

SEQ ID NO: 44187 - DNA, 287 bp, Zea Mays
atgcagcaagtttattttcttctgccttatgtccattagctgttgtcttacgatgttccccatatggtgtaaacccacgacttacagggactgctactgaatttactcccacagaattaggttttcctggtggctttgaatacccactcatctccacccttctattttccctctttccagtgtgcatcaacacatcctcttgcaacacggctagagaacaggcagtgtccaaatcaactggacgttgaatcgccacaactgacttaatttcatcctttagcccatcc

SEQ ID NO: 44188 - DNA, 819 bp, Zea Mays
cagtgacatggggtgaactttgggagctcttttgaagataatccagtgagtgtttgagcatggttactatagcaagattgtaactggattatagggctacaactttgatatagagaggtggtccagtcactacatgaaatttgaagcaaatcgacctgcaaattgctttgttaggacaactgaaacagccctgatggtacagtgtctgcaaaaatatctcaggttcagcccccccccttgccgccggtgatcttgcgctcggattcacaccggtcgccgtgattcgtactagacacgtagtagatatccacggggaggtaaaaagatctcacgggggcacggatttggtcgcggcagaagcttatcaccgtgcctgtagccgtgcgacgtggccggaccactggtgtcaccgtggaaactcctgggacctcggttatgccacgccgtggctcgttgctatgcggtagtaaccgtggcacatttaggattaaaatctttgagccgttgcaccggtgaacgccacgaccaagccaccagtgttctcccctctcttcggccgccagcgcgccatctcaaattcacgggccaccaccctcaggtcctataaattgagcgtgccatcagatccgctaggtagtcacgcacccaatacaccaacccgtgcctcagatcgtccaccagagcgccccaatttgagatttcgcccaaatcggtcaagaacactgtgtgtgtgagctcgctgcggtcagcccttcgcaggtccgatcacccgctccttgctcttgttttagcatccttgtgtgcttgtgatgcttcttg

SEQ ID NO: 44189 - DNA, 476 bp, Zea Mays
ggtatggtagatagatagtgatgaccgggtaattgttttcaagactgcaagccattggcttgagcttgagggtgtccggttaaacaaatgagggtgttcgatagccccttgagatccgtgctttgcaagaatgtttagtttgatctatctagttcctctcagataaaccatacatgcgtatttgtagccatgagcatcaggcaccacttgtttatccgcgagagcatgagcatgtcatgtagtagtagtcgttgcagttttttcagtgcgttctattgtgtcgtgtgcctgtgtggagccatttcagaagaaagcaaggggatccaaatgcaagtttgagttagttaattcctgatatttccaaagtgataatcatgtttcatactacctttgtttttgtgtccttattagtgagtagttactgatttttttattccttggacctgtgtaagtttcagttcagtcgtgtgcacttg

SEQ ID NO: 44190 - DNA, 370 bp, Zea Mays
atgtcctcatcatcctcccatcttgaattggagtcatcctcggctcaggcggtgcccaagtgtgtacaagttttttaggcccaaaacaggtgtcgctgatttctagaagattctgaatgtcatcttgttatgacgattcccatcaactccaagaatgttttgacgtgggtccagttgggttggaaagcttatcttcttagatttccaataatatctagagcgttcaaaatggagtctggatgtgtcctggacgtccattttcaagaggaccactcttgcagtctgaaccggattcgcgaataaactagacttcaactctacttgagcttgcgactctatcattgattgggccttgaatatatagaatgtg

SEQ ID NO: 44191 - DNA, 865 bp, Zea Mays
tcccaaccattgctatttcccgttcgtgagaggcacgatggttccaaagaggaagaagatcaccaaccagtacaagaatttggtagacatctatcgtggtttcggaaaactggggacaataaatttttgttcggtgggggatgcaagcgcggactcactccaaatggtgagtcactgggactcggtgagaaatctgagacacgagtttataccggttcaggtcggggccctagtctagtgtagtgctgatcatggaattgcagtagattgtgtgcttatgtgtaggacaataaaagggtttccattttatacttcaagggatgaaacttacagccgagagagagagatttggttgccatggtgggcccttcatgggccctatgtgcggtcgtactcctgacgtggcaccgctcgcctttcatgtccctgtagcgagtccgcagctgacgcctcgtgcagtagtgcacgacgggtcccctagggcagtcttggggcatctttgtacatggcatggctcctcctgtcatcatggaccttgcgtcactccccatcatgatgttgtctagctttcggtatggacattatcccgtcccttttggtatacgagtcactgtttggacttctggcgccacagtgctaccttgaccagtatcaactagccccacagggtagtgtgagtatccctatgaccatacatgaagacatgtggtcgtgcctaatgaagacttcccgacacgccctcggggcaccgtacgcacctcccggcgtggcttggggatggtgtgccttttcgtcgctgacgtgggggtttgggtccgtgcctcacaggattacttgtcaatggtttggccatccgctgcccctc

SEQ ID NO: 44192 - DNA, 371 bp, Zea Mays
cagaaaacagattgtttcacagatttcacaagccacttctagctactccctttgcacatcacgcttcattttcttcctcggagtaattttcttcacaagccacttcaaacttctgggtggataactaggaggggtttcaacacgcacaagttctgcttggccaccagtttcaacacggactagatctgcatcagcattgctgtcttcatggccaccggtttgaacaagcactagatctgcatcagcattgctgtctgcttggccaccggtttgaacaagcactagttcatcgccaccagtttctacatctttatttgaagtactaggttgtgatgtagaagtccgcaactctttcgggatctaatttttcg

SEQ ID NO: 44193 - DNA, 422 bp, Zea Mays
agctacttattatgtaggatataagagttggataggttaggaaaataatagcctgggtaagaaagtttccggtgagaaagaactccgtgttgggtggtaatgcatctgaagatcgagtttgacttctctccttccttgacggggttgatcctttccctcatgagctttggtgtctccaagaggttaagatagatcggtaggtaatagtcaggtagagggtttagtaggtggctatatgatagttgggattagttatgtaaccaattatgtaggtcaagttgtttatgtatggctaagtcgatctaagtcaccaatttaggcttaagtgaattaggagtatggtcgagttgatctaagatctcaaacgggtttataggagtagggtctattgtatttcctcagcattagccaatcctgtttga

SEQ ID NO: 44194 - DNA, 438 bp, Zea Mays
caatttcgctaaaattcgtaatcatttacgctgttttggttcatattttacgctaaaatctgtccgagtcagaacccgatcacgatgggacgcgcgagattcttacgccgtaattttcgggctgcattctccgtttcgaaacagatctacgatttacgctaaaatttgtaatcatttacgttgttttggttcatgttttacgctaaaatctgttcgagtcataacccgatcacgatgggacgcgcgagatttttacgctgtaattttcgggccgcattgacctttttgaaacagatctacgatttacgctaaaattcgttatcatttacgctgttttggtcacgttttacgctaaaatctgtccgagtaagaactcgtgctcgatgggacgcacgctggtactggacgtggctatacctggctggggcttcctagcac

SEQ ID NO: 44195 - DNA, 957 bp, Zea Mays
taaatttatcagagctggctccaattgagtaaaacacatccttcagccgctgcacgcatcggttgccaaaatctaagcatttttcctgaagctccttcaataatttctgcaaatttgaattcttctcaatttcggtcttgagacttgtttcgagattcttcttttcttgctcagatttttctgattttataagtaattcgctgttcaatttgtcaatttcggcttgagcttcagccagtgaaccttccgcacagtggatgacgaagtctttcttttccaaggcagcttcgtaatctttaactttgttttcaaggtcttgaatgaagaagtcctttttcttcaaagcagcttcgtaactttcgactttgttttctagatctttgatggtagcttcgtttttctcgtcctcaagatcttgttgcatcctcagcactttacttagcaatatactctgccaaatcaaccttcgtcagaaaacatcttaattaaaaaaaacaataaaaagttgagagtttttaccttgaaattagcatagagcaggctaccggcgatatgctgtcgctggtacctgcagaggtccgcttcaatcttcggcagaccaacgctctttgagaaggtcctaacaaccttggcctcggttcgattccgaaggcatcttagtttcccttcgttgactccgccaaacagcagagaccctggtttatatccacaggatatagcatatttctttagctcttctttctcagtctctgataattcttgtccaagtatatcttgaaaattaaagttttcttctaccaaagtgtcttcaatttgctcttttcctttctcaattgtcatgtccaccgcggccgcagcatcttcttcttcagccattttcagaagtatgttatcaatatcaccaagtgtggtttctagattaggatgttcggtggtctcggcttcggctccggtggt

SEQ ID NO: 44196 - DNA, 483 bp, Zea Mays
tgtcaaccaaggcaaaaagacacagctgcatgtgtgatctgtattacagtactgtagagtctgtagtacagtactgtagagtcattatcaggccattcatttataatgccaacaggatggctttataattgaattgatacccaccatgttagatatatctctactactacttttgtactattattcatgtggtgtagtagtagtactggctctagcatgatttctgccaaaggaaacactacttttgtcttctgaatagaatctcagttttctgtcggctgtgttgcaaacaggtatcaaatctgacagaccctagactcttacataggagccaaaaacagttgggtatctataagccctcagctcctatgcaatgtgttatctatttttttaatttactgcctggtgaacaatttagatagagacaattttacacaacaatagagtgaattagtcgacaaagtaaggcaatcctatttacat

SEQ ID NO: 44197 - DNA, 460 bp, Zea Mays
cgacaccaatcaacacatttctctcgcctgcatcaatccatcctctaatcggcactcttgttgtttgcttattactgcaacctggttgtttggcccacgtgtgatcctctcccctatagtggccatccatcacaacactgggaccgactatgcgctgattcgcaatcattttagtcctacgttccttctcccagctagcagaattactcagttgtcgtgtatccactacatcaagcctcatacgcttgcttctcatctcttgaccaccaccactttgtggcctgctcacctgtaatttgtttgtcccaacagcagctacgtgcccatgtcctatgtttggcttggctgtcacttcttcaccgttctttatgtaattttttgtgacagccacctgaccattctgctttgccacctctgcctgggaaccttctgcagcatttaatatgtcgcactccactgt

SEQ ID NO: 44198 - DNA, 1747 bp, Zea Mays
tctgtacgagctcaagcatggctcacctaggacaaaccccaaggccatcccagacatcgacgagccgacaacaaaagacttccttgacggggaccatatcaatgtcctcgacacattaagcaagtaccaagtagcaacgaaggcctggagagacaaagccatcactcctaaagaatttgaagagggggacctcgttctcatctagactagtagaacagaatccagaggcaaactcaggccaaaatgggaaggacctttcatcataaaaaagaaacatccccaaacacatacagacttgcaagggaaataagcgaagaccttgaacattcattgaatgtagacaatctaagaaaattctatctgtgagacggcacatagccaggaccttcgcgccttcgtaacaattcctgacacatcactccgattaggcccaccctcttttcctcgcagagggcgatgtttttaatgaggtggtgcaatgtaataaaataaacaggaaaatgcccccacaaaagaaaaaagtatgtctcgaaaaagttgaaaaaggcagagaggtcggccttcaccattcaacggcaggatagtcaccacgacggcaaatcttaagtcagccattgtgtgcgacaaatcaaacctatctgggcaaaaagtcacctaagggtgcaaccagattcgcacaacaagtgtgccataccacctaagggtgcgaagtcgtctaaaagatgcaacatctatcctagcaaaaagccacctaagggtgcagccgaattagcacaacaagtgcgccataccacctaaaggtgtgaagtcatcagagagacacaaaatctatccaagcaaaaagccacctaagggtgcagccggattagcacaagcaagcgaaaatacctaagagcgcgaaatcaccacttacagaaaaaggaaaaaaatccttagcgcattcaacaaacaaagactcacatagccattcctcggtgaaggggggcgagggcagcgttttcacttaattcgccaaggcacgactatcccaatgtaaaatattacaaaggttccaccttcaggaatcaagccagcctcccgcaaattaaacaacataatcctaagctctttgccgtaaaaaagagccctaaggtcgtattcttcaaagcctcgaccgattgtcgccgcaaggatgatccggcgaggtccctcatctgaccacaccctatcccatccttaaggacgccgaggttacatgtggagcacctcatgcagcgaaacctacatacgaggcacatccattcccatatgatgatgcctccgggggcctccaatgccttcgggtggctcactagctactcccaatcttcgtttcggttctccaactcttctcttgcctctagctgcagtcagcgagaccctagacgaagactccactgtcttagactcttctgcagacacatctaacgcttcaaaaaaatctaagtccttttctgaggactcgtcatccatccttgcgaatggactctgaaatctttcgctacccaatgaccatgaatcaaaatcagacaccccttgctaaaccctgtcggactccgacaaagcaaaagctttaacattttccacaacatcaaatatttctttccctttgcccaataggccaaaatctgcttgtgtaggcctagtcaccagaacctgcgtagcagccgactttaggtataaacatatagtcaaagtattgttacaacaatcctacaatcattacacc

SEQ ID NO: 44199 - DNA, 474 bp, Zea Mays
aattgaagtatggtggctatagcaagattaaacctgggttataggaccacaactttgttaaaggtggattagcaagttattacaggaaaatttgagatatgggcactgcaaaccgctctgtcaggcaggatttctgatggtacagtgaagtgaatgagatcacaggtgcagtgcaccttgccgccggtgacccccacgcctggattcgcgctggcgatgcgatttgtgcccactggtgtctggataacacctcagggtgaaaagatcttcaccgcggatgagaccatgggctagccgccataccaacttgcctcatggccggtccagatagcctcgccggagttggccgcctaccgcatgatggtcacgtgccttgaagctttaccacgtcacagtaagccactttagatagctggtttgtcgctagtaagcctgccacggtgaaagccatgcatcccttgcggtagtgatctt

SEQ ID NO: 44200 - DNA, 729 bp, Zea Mays
caacaccctcgggggctaggtaaccgctagtgccatccttggggacatggttctctgcagcagccacctctaaggctgaaggattctcagtcacctccatgggaatggagcaacctagaccagctccttgactctgaagaccgcactccaaggtcgacgaggcacgagacgctgctcgggataactctaaccccacatccggaatgtcagaacaaacgtccatcataccaccatctgttggctcggacagcagatctttaggaaccatatcctcgagagcctgatcaaaatttgctatggacaactcttgtagaccaacgagagcaaacaaagctggaaaaggaatatcactactctccccactgactaggtagcgctgactgttcttccgaattaaggggatttcctcctcttcttccccatcctcgtcaattatacgaacaacacacccattgtgatcagcatcatcaaggtcacacccattgggttcagcatcaacagggtcacacccattgggatcaacatcatcaaggtcatgtacccattggggtcagcccaagtaaaaagttccactgtttcttcttcagcagcaggaacagaagggccaacatcctgattcaaacatgacactcgctgaagcctcctctttttcttcttcttcccctcggcaggagtagttggatgaccagccaggcgaaggtgctttgggcgaacaccatcagatttttg

SEQ ID NO: 44201 - DNA, 526 bp, Zea Mays
gggttcatcatgagaaatttacaaaggattctctatgcgtatttgttcatgacaatatttggaaccaatctcccgcaatatctctccaccgcaaacctcatttgtaggtcctccaggacatctcacccaaggtttagtcaagggtaagtgacgatgggaaaggaggatagaatgtggttcttatatattattgactgctaacacaaatttgagaatcatggtttaggtagtatttctagagttgaaaagaaaaatgtagtatttaaattggtggctacccaaataagcaaatatagagcttatttttttgtagtgttgatatagatacttttaaggacatagtatactaaacagaagcctgatgacacgtttttcgggagctttttctgatcacgtctctcaccactgcccccatttacactaaccagcttctagggaagttgtagcaaacaagaccatagaggtgagctagcttagaaattatttgaaatagaggagcaacgactaatacgcaaccagatattag

SEQ ID NO: 44202 - DNA, 735 bp, Zea Mays
tgcagatcgcgttccggatgattaatgggatcaaagctaaaattgaagcttgggaaggctttaagggttcaccaggaactaggtacatgattgagtttaggccgaacgaggatagaggagcggatcgacagagagggtgcatagggcggcgttcttcggagcaacggagtgttccggtggtgggactttggtaaactttgattgattggcgtcgagagcaacaggaagctaaggacatgctggaacacgaggcaattgagcgagtactaacccgaagagggctggccacggagaggtccttcacggcggcgctcggaatagggtggaatggatttgtggactgtgtgagttctccggtgaaattcagtcgattgctcaagtgctcgtgtgcatgatgtggtgaagaagcaggacccgggctcaatttataggccgatggctagagttggatgaggctcgcggagctgtaaatgtgctggcgagctcacccgtgcgggcaaagccacggcgatggtccggcgactaccaattaaccgggcagtgccacctcgggacattagcgccacgtcgtagaagatttttaccacggccacagacccatccccagccgcggtggtgatcttatcccggcgagatttttctgatctcctgtgaacagtacgccaatccgcctgatttcaaagggctactgctccaaatttcatgtagttgctcgcagacaaatctgtatcaaac

SEQ ID NO: 44203 - DNA, 329 bp, Zea Mays
caacaacctcattttcctcaggagcaagggcagtgctgtctcctccaaccctcatgatagacatgtcgcgaaagtatcttcctctcatgatgtcaatataactttgtttaatggtcgatttttcgaagatggtatggcttggccgccagggccggtcctcagaatcttcatctccactttccacatcataatcatcactgtcatcagaatcttcagacaaacccttcattatctccttggtaattttctctgtattcgtttttgccatagattcataaaatccagcaataaaaggatccgcaactttcttttcttcatacagctttttc

SEQ ID NO: 44204 - DNA, 789 bp, Zea Mays
ctcattgtagctttggcttcggtcagttttgtttcggtttcagttggcactttcgaagccttggcaattttccctagagtagagcttgaagccttcacagtctccagcacatctagtacactagccatcctttttctcttggggtcgccgcaggacctttttgtgccttcagcattgtcatttctgccgaagggcttaaaacttctaacgtttttgttccctcgattcttggctcttcagctttatcagtcttcggctcagctaacttggctgagggtgcctttggcaaggtggccggttcctcagctttctgtgtagaaggaattggttcctttggagtagcagatgaagaagtttccccgccaaactcaggcactatggccggttcaatgtagcgcggtcggtgggtaaggaccttcaactttttcctcttcggcgcaggctcacttggagcagccgaagcagcaacctttctagaagctgcaccctttcttttctgcccccgtggcgggtagcgatagtcagggtacatgaatccaatagcataaaaaccctatttaatcttttcttttttcggctcccgaagggccgcagatagtgcattatcttcagacttggagtatgctccaagtagctcatcactagtattttcaacacacttcagccagtcatcatctggttcgacaaactggtctccaaacctgaagatatatttcaatcgaaccaaaccaccttcgctagggttagcgatggtttcttttggcatttcccagctgtctattagtggcc

SEQ ID NO: 44205 - DNA, 671 bp, Zea Mays
tgacaaggcaggtctttccgctgtttttgtagtctgttagaggtctagtggtgcactaaacctgtattgcaggaggtccggtgcacccgagagaagtgcagattttggggattccacccaacgactatttggataactggaggctataaatacaccccaaccaacccattcaaggcacacacaagagctgtgaatcaactcctacaagctagagcaacaccccatagagattaaaagcctctcaagtgccaattagatagaatcgtgcaagtgagagccattcttgagtggttgttggtagtgccttgtgtgagtgcgatagaagagagtgtgttcttgcgatcttgtgctcttgagttttggagttgcatcgttgtaaaggctagcaagaggctatgagtctgtggagtgccttgctaagactatagtctctcatgtcagaagatctagtggctcaagcttgatctttggaattgcttgagagggtttgtttagaattgaactttggtaaatcaagtcgttgtgcctttgtgtgtgtgtgtgtgtgtgtgtttgtttttgcttgtgatttgttcttccctctccctctctaagttctcttgcattgattttgattcaaatcttaagtgttgctcttaaagttaattccgcgatcatttgagcaacacttt

SEQ ID NO: 44206 - DNA, 633 bp, Zea Mays
gtccattcctatattttgattatgttgagactattgctttatcttagtaatttcatattgtctcttacatgagaataatgtttctcataaagtatgctacttcacatcaatccaacttgttaaaataatgtcgcttttatcaaggattgttgctttcattgctaaagtagcttgcttattggattctcctattttaagcttaattcatattccaatatgttactctcttgatcgcatccattgtttgtttgatcatagaataacatcaaatgacacttagtgcctcattctttcaaatcgatatctctctaagatatgcactaagttaaaaggagaattcatgtttcatttatgcaatttatgatccacttgatatatgttaatcatgacttggaaaaggatcactaggtgtagaactctctcttgtgcaaatattttcatatattgtcttgagtataggtcttaagcaactaagactaaggacaaagcacaatgaagagagcatctctatttgaaggtacaaaagggtaaaactacttcctttcattcaaacctgtacctaaaatcttcctttttctatactttccttacatatcttgtaaaaggaagagaaagcatgtccatgcatttttc

SEQ ID NO: 44207 - DNA, 350 bp, Zea Mays
gaagaggtgagcatgtattagtcacatagtcataagtatatgaaatgtgaataaatacatacacagagaaatatggcacagaaaacgagagatatggcgatcgagaggtcaaacgtcgtgaaaacggcgtttgaacgataaaaggtgccataggaggtttggaattcgaattgaggcacaaaatgacatggaatggagccgatacttcatgaatatgtttatatgggtgaatatgagtgaagtgtgtgcttggtttgaatttaggcgaagaaaattagatttgggcactcggctcggaaatgatcgcccgaaacggggaatttggtgaaattaaagcctagaatatcgga

SEQ ID NO: 44208 - DNA, 747 bp, Zea Mays
ggcaagaaggcttctgttgatagacaaggttttggtgacccctcttatgagaaatctgttaaaaaagccaaaagtggtggtgaaaaatcgggcatggatgataaaggaaaatctcctttcgaagatccttcatcgcatggtattgaaactggttttcaatctgaacactctgaagatatgaagtatgggaaaattcaggaaggtgtcaaagcttatcttgacaatcagtggaatgaggatgatgactacaatgaaagtgaggacgatctgttggattcccaagatctggagaaattcatcaaggatgaagaacctattccttccctttctcaagagaaaggaaaaatgaatattaatgctccttattctgaagatgctggtaaggatgttggagctaagaaaggaggaaccttggaaggggagcttgctgaaggcgttaggaggagcagcaggttggagtctaatgatgaaatgaagattgcagataaagctacagcaagagcaatggcgaaagatgctttcatcaacaaagatacgtcttacaatccattttctgttcttaatactgataatgttgttcttatggatgttgcgcacaaaataggggttgaattaggttcttctgttaatgatgctgttaatgatgctgtggaaaatctaaacctgattaaatccttagagctctctagaaaaaatctggttgtgcaatctgttaaatgtaatgctgataataccaaggcagacatt

SEQ ID NO: 44209 - DNA, 612 bp, Zea Mays
gtcatgtacggaagagtagaaggagtggcctactacgggttttacggggagttgttggccgaggccgagctagggtgaagcagagttttctcctgaggctggagctgtcctcgggtgaggcagagttctctcaagaggatgaggctgtcttcgggcgggtgcacgtcctatccagagttgttcgagaacagtagctggcgtgggggagcagtgttcgttattcgcgggtgtgcgtcatcgtagtcggtgaaagcggatgggaccacaatcccatcactccctgtttaactacgacgtcatgtggggtagatatctgaatcatcgcatttaatgcgcaggtctacacggttcctagggcctttggctgaggctgggctcagggtcgtcctcctgtccgagacaagctcgggcgttaccgttccatagaggagggctgttgggcaagacgagaatttctcccgagcgctgcctccgcccgaggatgggctcagacgaggcggagttctgagcgaccgttgagtggagtctcgtgcgaatcatgattcaaacccgcttgaccttggagaaggtgtcttatggtttttcggcacttaagtatttaagcatgtttag

SEQ ID NO: 44210 - DNA, 424 bp, Zea Mays
ggcctgggcgcgctagttaccaccgtattatcgaggcgaagaccattgacccattgcgccacgtaagggcaactcccataatgacttctactattcctgctgcagaggaacgcgaagagacaaacagaggggacatgacgacaccgtccacctactcccctatgcaagtcgataagctagtacgctgcagcctaaactagagccttcacccacacgctgacaaagacggggcgaagacgattctagccagaggtgcccacacggcaaccaagagaagattcttgtccaccgcgagagaagacattggttcaccagctatatctgtcactccgtgcttcatattttggtattcatggggccacatgttggagtttagctcccttgtacattctcctccttagtatataaaagggagggcacttgc

SEQ ID NO: 44211 - DNA, 581 bp, Zea Mays
tttcgagttgactggaccgggcgacaattaccagaaagatcagggcacttggcgtaagattcttaagacacagaactacatctgtatggacggcgggttgattctaatattgatcaggggttcttttgcatgatacgctagccataggggtatcctttaatctgggtcgttggatctggttttagtgcgcacgattagatcgcgaagcggtacacgcccctgaacgtccgatcaatggtgagcggccctgatttaattatttgatatacgatcgtggccctcggatcatgatcaacggtcgtgattcttttagacgtgggtattccagtttctaatcctagccgtccagtaagatctgacggcgcgcccaactttccccaacctgacacacgcgcacggcggcgccgcccacaaactacggtggagcttcaccggcaaaccatgcgccccatgctctagtgctcggtttctcaagattttaggtgctaaacgatgtgcgaggtgaagtcaatcgaagaggcagggtctgaccaggggtggcggcgcagagaacccccaacacgaccgactacggatccgcg

SEQ ID NO: 44212 - DNA, 432 bp, Zea Mays
aaaggattcagtccccatggaagatgggagtacattatatctagcgcacaataagaggcctctcggaagagacaacaccaaggcaaccagaaagaagacatcatcagatacaacttcagatagtggataattcatatctaagatgtctgatttgaccctcaaaaagcttgagtactgggcacggtcagattgaactctaggtaacgacctacatcaactcgtggagttaaaaaaaggagtgcctatccatcaaggcaaagagagaagtcagggaggcggagttggcagccttagcacgggcaaaagaacacatcatggttgttgatttggacaaccgcaatccaacaaagggcatactatgaagcaatataggatgaaatcatgcaaaggtttgcaacatctaaaaagtgaatctagactgcactaaattgg

SEQ ID NO: 44213 - DNA, 1601 bp, Zea Mays
aaaaaatcacaagctctcaacgacacatcgaaggaagactagaaatcaggaaaccgagccacttgaattactagctctcaggtcattgaggaccgctagacacgttctcagtcgccggaccttgacatcggcagcaccactagcagagtgggctacgacaaggtcccttttagaggtcccccactaacgactccaaatggaccaaagaattaatcggccaaagtgaaggactgagctccccatgtaccctaaaataggaatcctcaggctcgagtagggtcttagtgttgagtaaaacaagcaaacccagcagagcaaacccaaggaaaatgcttgtattgtatccctcgaggacgatttccagaagattcccctaccgagaggtgctcatccctcaatgatctaccttgacccatggccaagaacgaaagacaagggaggtcagaagtcgcaagagcaactcatctatttaagaagacggacacataaaaattctacatctttcaagaaagcaattgacgcctcatggaagacttaacaaagtgggcctaccgacaaaaacccattggaagccaacgtaagaacctcggtatcacgaaaacatgacccctcccaataaacatgtactaaggaccaaaaggcaatgcgaaaagttgtttaatgtttctcaattgggacaataatcccaaacgaacaaaaaacaaaaagtagaaaattaccaagacttgcggatgatgtcatccattgacaacctagctacgacccgactggacgccttgtcctaacccttcagcatatcctctagctcatcgtctgggacgtcttgagggaagccgatgatgtcttgaaggctacaaatagagcaaagctcccgacgatcaaggctatggttgtccctcgatgaatgctaaaatctataatatccttgacgcaacatgagacattgtataagcgctccatatgggacgaaccgtgggccccaacatacttcatgacctagttcatccagtggcgaaccttctttagctcggcctccaaaattgtaaagaaaaacacacgaatggattggattagaaaagagcgagggaggcacaaaaaggggagcgctacctgccacacggccattagactcgacaagttgttcccgaagaagacttgcctcagcttcagttgtgtctaaggttgcatcggaagtggtgaggttctcctcgaattcgaaaaaatatggaggggaccccgcaggcccaaccataccaacccgaaaggaggagatgcatcccgaccccacaaacgatggaagatgcactacagtaagaagccagacatcaaaagattgcaatggaaagaaaaacatatcacaaaggagttactctaacccatctcgacacaacatgttcctcgacgaagacccgatgaccgactgactgcgtggatccatctgagggggaaaacgaaagaaaggagtggtgtggtggccgatgctcccccacctcctatgcttataaatagtagagggatacgacaccccatgtatagggaggggtcaacacaaagatatctctttagctctagggacattgaaactgcaaccacattccaag

SEQ ID NO: 44214 - DNA, 575 bp, Zea Mays
gcctacatgtgtgcttggatggtttggtttcaagcttacacacatgcaaagatatgaaaattgaggggacattatcactaccatatgatgttaaagtatacaaaatagaaatgtacctttgtagcgtgtttactacttttaatttcatccttagcatcatcttgctagaaacaagtgaaactagataccacatgagatcataataaatagggttctagttactcctttcacactaagactaggcttataaatatcactaaatcaatcatcatccaagtcttagttctagcaaccacttacacacaagtatgtaggaatataagacaaatgtgatgcaagcaagcaatgtagtgcacaaacaaatgcatcaaacatatattcacgaccttgctccccctacttttgtgcatctcttgttcaataaaatctcataccattatactttgctcttgatccattcgtattcattctaactcaattgatcagtagctcccccagagttcatgtccaattttctcttgtgcatatttgcatatctttgttccaacttgcacatttgcatatctttgttccac

SEQ ID NO: 44215 - DNA, 614 bp, Zea Mays
gctcaagatgatgtcatgcttaaattttagtggcgcttaacacctaggttgttatagcacaacccccctaaaaagaaatcttgccccgagatttaagaacaactaaaggcttaggttaggaggagaagaagaagatagtattcacaaccacttcgaaattctttacacaccaaccggatgatgtaccaagttgcacttgctggctagcgattacattacaatactgtaagttttttaaaccaaagcaagaaaatctggaaaattctccacaagaaaatcttcagattcccaagtagcttcgtctttagaatgtttgttccattgcaccttataaaacttgattgttctccttcgagtgatgcgatccttctaatctaatactcgaattggatattctgaataagtcagatccggttcgagattggcctctgagacatccatagcttgctctggcactcgaagacatttcttcaattgtgatacatggcacacgttatgaactgcggacatatgctctggcaactgaaggcgataagctactggtccacactgttgaataattccgaagggaccaatatagcgaggtgcgagttttcctttgacgccaaagcgat

SEQ ID NO: 44216 - DNA, 735 bp, Zea Mays
aaaaattattgcactagattttcctcaaggaaaggaagttgtcctctttcagtgcaactggttccatgttcctaccgccaagaacaaaggaagaggctaccaaagggatcagtatggaattgttgatattgataaaactcggttgtgctatttagatgagccttatattcttagttcacaagctgagcaggtattttatgtcaatggtacaaagaaaaaagattggtgcactgttgtaagattgaaaccccgaaatctgttcgccatgccaaaatctgaaaaatcagaaattgatcttgattcaatagatgtgggattggaaggcatgagtgttttaagcagtgatgaagtattggtgaagtggagaaggtctgacatggaaggtgtaaccagtgatgcttgtgtcattgagaaagcgcttgatgaatttatagaagaaacgtatgatattgggttagaagatgaggaggatgaataagacaacacatacattgatgatggatatgtagcacctatggactcatcatgagactcaaatgatgatgatttttttgtttaaaagaaaagtcacagactattggcacacactgaattgaggcaaacacgtacaatcgtgtaactattatatatttcatttgtaatgatcttacaatcacgtacctcttatttttatattcttaataatgtatgcaccaacttatctatatgtgttgggcctatgcttcgtcgccgaag

SEQ ID NO: 44217 - DNA, 310 bp, Zea Mays
gacaaatccgcgcagaagtcgcctaagggtgcagccggactagcacaacaagtgcgacaaacacgaagtctatcgcgaagactatccgcgcagaagtcgcctaagggtgcagccggaatagcacaacaagtgcgaaaaaaacccgaagtctaccgcggagactatccacgcagaagccgcctaaaaggcgcagccgaactagtacaacaaaagcagaaacgacagcatcaaaccgtccgcgttaagaccgactataaccacaccagcacagcataacaaaacataccagacaaagtacacaacgcctccg

SEQ ID NO: 44218 - DNA, 562 bp, Zea Mays
cttcgtacgctctgggtgtggataacggccggcggtgaaaagatcttgaccgcggatgaggtcatgagctggccgccgtacccactagccctatggctggtcaagatgaccctcgccggagtctgccgcttgccgcctagacgccacgtacttagaagtgttaccacgtcgcagtagaccaccgtaggtagcctgtccatcgcctgagacattgccccggtgaacgccacggtagttcgcgcaggtgactcacccccctcttcggccgccagcttccctcttccaaattcaaagccaccactcacggataatataaattgagtgcacagctagctctattagtttgttacgaagccagagcggcaacccttgccctcgattagccaccacagccagagaatttcgttcttcccccaaatctgttgtctgcgccaccgtgtgacgccacgccggggccaaccgctcttaggtccgtcctcgtccttcttgcccctgtttcaacaccctcgttcattcgtgatgctcctcgactgaaccaattgagctagaccgcgctggaccg

SEQ ID NO: 44219 - DNA, 2820 bp, Zea Mays
gttggcatcaccctcctttagatagtggatccgcgatctcaaccgagcaacagtcctttcaagagacgcaaggctaaggcatcgttgcttcaacaaattcagcaaccaaacttccccactggacaaaattctgatatcctgtgccatttccagcctatgcaacacttctctgacaagccccagctgcatcctcacattacccacttctttatgcccctaggactgcaaaacatgagctaaccttttaagcttcaatgacacttgctccaacaggcatgagctcctaactggcatgctccaagacgcacccaccacctccagaaaaccaggaattttgggccaaaaactctcaaagtgaaaccgtcttttccccatgcagccacctctgacactgagggtcaaaggacaatgatctgaagatgtggtagcattactatgaagagaagcgtccgggaatagatcttcccaacagctagtgcaaaaaacatggtccagcttaacaagagttggagcatccctctggttggaccaagtatacctccttcccttcaaatgaatctcttttagatccaaggaaataataagcctacggaagccccccagcatagccctgttaatattggaattgttcttgtcttcctccctgaaaatcagattgaaatcgcccccaatgatccatggtcccacacaggtatctctgatttctattaattcctgaagaaaggaggatttaagattgtcctagtgaggaccatacactccagtgaaccaccaacaagaaccatttttctcttgcaatttaacgaaaaccgaaaattgttggataactaaagccaacgatgtaaaaactccatcacgccatgatattaacaccccacctctggtaccaatcactgggctataaacaaaattactgaaaccagaccccaaaattgagagaatatcaaaatctgaaatagaacaaagtttggtttcctgtaggcaaataatcgaaggtctaatgtcaaccaccaaagatttaacagaatctctcttcacacgatcatttagccctctcacattctagattaaaaaacagcttgaatccatctaaacaatgatcaaacaccaccagaaaaccaccccaaccgcacctaaacaggtccgttcagcggcaccgtctagccaaacagcgctgccaaagcagcaatatgaacgctagagagcccagaaacaaatagcttcgcatatttcccggcatcctgtacagaaataacttcattgtcatcacagaaacccagatgtctgtagaccagggcagcagcctcagaaccgagttctggaggaaatttggccaccctcctgctccgccttggtacaaaattactaggtagaggcttcttccttctcttgggaaaccgtggagttggcagcaaggcatccaccggtttagtgaccaaacactggaactcgcacaagggtgaagaaattaccatagaattatcaaaagttgactgaaccaatgtgtcatcctgatcatccgaattagatggtctcaacctcctagagtagaccttgaaaactggtggcttaaaattccatctagcagaagaaacactgtcaacacaactcactgccaaaatcgaatcctccctcaatccagcagccaaaacatcagtggcaccatcaggagaataatcgagtaccataacatcacacaaggccagaacaccaggcgccgccagctcctcaactgcaacacacgggagagtaggggcatcaactggtcctgccaacaaatccaaagagacaggctccgccaaaacctccactggagttaaagggcaacccggatcaccagtagccatcaaccccacatcatcagaaggtccatcacacatcgacgaggaatgaaaacgagggcccagtcacgagtgcaccgaagtccgaggcaagggggcctgatcacccagcctccgcacccaccgagcccgacgaccctgctccggctcatcatcagagggatccgatggaggtggcggcagatgcccctccacaagggcaccctctagaccaataatcttcacgatcacagggaacaccaacgaacgtggaatccaaactctgtcttcatcgaggaccatcggctccacagtgtgcaggtccaaaacctctggcaaccccacgagagagcggcaccatgctctcaacctaatgactgacaagtcctccccgctgatagaatccgggtgcaagccctgaatcaggcagtatggaccaagcagaacctccgttgtctccagtccccaaaggtgagtagggataccacgtagctcgacgtcaatgagggaagacaagacactgcctcccgaagcaaaagcctgcctagtccatctcttaacatgcaacctcagtggagggacaaggatcgatggtccttcactaatcacccgcacagccagctcctctgaagggaagaggacaagaaaggagcctgatgcaacacgacgtaggcggagcgcatcagcgtcaaggccaaaccttgaggcgagcgcctctctaacctccgtggcgcaaccagttccttcctgcccaacaacgctgacgaccagggcatggcgaagttccaactcagcacggtcgatcatcctggaatgcccaataaacctcacaggacgaggaccgtccctagccgtgggcgacaagttccccgaaggcagaagcaaaggatcaccgccaagtccaccactagacccggccctgcgccttcgctgccaacagcgggtacaccgcttcccactgatcgcggcatctgaaccaccaagcgccgagccacccgcc

SEQ ID NO: 44220 - DNA, 514 bp, Zea Mays
gattcatggtagagtttgagggatacaagagttggaagcttccccagcaatgcctcatccataaaattctcttggagggacagttcaattaggtagctaagggatgaagtccatggagtcttacccacacgtacaatatttcaatgaagacccccccggggggttgatgttaactccacgaagatttcaagtccgacattcttgttgcatcagtggattgtggatgatagacagcattttcatcatcattgctacttacgcattcttcggtaaggagaggcagttgtgggtaggcatttggtgggatgtttggcagctttgggtttgcgtaggcatgtaaatatagaaagttggtggctttgggtttgtgtaggcatgcaaatatagcaatctccaacaaaccatataaaatgcactcccttttatttggatagttggttcctgcatgcattttgggaaacggtcgttgctctaagggcggatgtcacaatgagagagggtattcatttttggc

SEQ ID NO: 44221 - DNA, 396 bp, Zea Mays
ctggcgcatgtcccatgctgcatttatggaaaccatgctgatgtcagcctgatgtcctgtggaaatgtcagtggcgttgtaggtacatgccctacctgtaccggatatcccgagtgccatgtcgagcatgtgcctgtatgccgaaaacctagaacatggcaggaggagcaggctctacatgccaccacatgagacctgagagttgtatcgtacgtcacgaatgaccggggtggttagacatcgtgatgtataaagtagatgtcccatgatgtgatagaccatgacgagtatcgctcatgttgccatagtggtcgtgccagggcgcgccctatagcgtgcatgtcgccacagtgccacgctggcgccactccccagattactagggcctgacatcca

SEQ ID NO: 44222 - DNA, 743 bp, Zea Mays
gcatccagaactctggtagggaaagtcttcaggtctggtttctatttgccaatggcaaagagtgatgcagccgagttagtccagagatgtgaagcttgccaattcttgtcaaagcaacaacatttatcagcgcagcagctgcagaccatacctataacatggccattcatgtgctggggattggacatgattggacccttcaagaaagcttagggaggctatactcacgtgatggtcgccatcgataaattcaccaaatggatagagtacaaacccattgcttctctaacctcagccaaggcagtggaattcatacaagatataatattcaggtttgggataccgaatagcatcataaccgacctggatccaacttcactagctctgaattctttgatttctgcgaacaatggagcatccagatcaaatatgcatcagtagcacacccaagagctaatggtcaggtggaaagggctaatggaatgatattggaagcactcaggaagaaagtcttcgacaagaatgaaaagtttgcagggaagtggatcagagagttaccttatgtggtttggagcctaagaacttaacccagtcgagctctgcatggaaacacccccttcttcatggtctatggttcgtaggcagtgctacctgccgacctcaggtttggggcaccaaggctggtcttcgaaagcatagctgaagcagaagctaccatgctagaagatattgacgtgctggag

SEQ ID NO: 44223 - DNA, 497 bp, Zea Mays
ttgggacatgcctcatcgaagtcaatgtagtttatgcacatttgcatcttgcctctggcctttgggacaacaatagggttgacaatccacttggggtgctaaactttgcagataaagttggcatgaagaagcttgtcaatttcagcatagatgaactcctgccattttgtagattgcatttgaagcttgtagctagcaagtcagatgtcgagggaatttttcaggcaatgcttggtcacctccctcgggtcctcaagcatgtcagacaattcctagggcaatatgtcgacatgttccaaaaggaaggtgatgagtgtgagttcctatttgacccctaggtttctacctatgttgtctaggagatgctatgctcgatctatacaactttggtggggaccatgtcaagatctagggtgtaggactctccttgaagtcactagggtatctttggcaaggtcctagggcatcagggccacttgagaaccttgcacacataa

SEQ ID NO: 44224 - DNA, 555 bp, Zea Mays
gggtaatgtggctacaggcggttcttctttatcccgctgatctcgtttctcccagggatttttggtgatttcttgggtttggttgggctaacgcattccaagagattggttcttgatcggtgtcagttggggaatgtgcgttgcatacgcagattcctgattctctgttgaagcaggggaggtcttggagtaattcgagcggattagtttggtttttggtccaccgtttgtttcttcggtttggatatcaagggtgttgttcacatcacattcttgtctcgttcggagtgatcagatggggaactgttgcgatttacgtttctagtcaattctttctggtgtcttgcattcactgtggtttggggggattaggcattcgtgctcttcataatcgaacgtcacctcgtaatgtggattctttggtctttggtcttggaatcatccatctttttcaccaatatgactgaagaagaaaactcactgttgctgcgctgaataatgcctgacgacaacatctcttgtacttggcgttcaatttcagtcttcagagctggt

SEQ ID NO: 44225 - DNA, 278 bp, Zea Mays
cttccttgagagaaacaaacgtttcactctaagagtgagaggcatgtaccgaagttgtttatgtgcaacctttgtcaccaccttctccccttcttcatttacaagctccacgtacctcgacttcccacattttaagcatttctgctctctaccatgttccttccaaaaaatcatgcagttgtcttggcaaacattaatcttctcatactccataccaagaccttcaagcaatttcttggactggtacatgtctttgggcatcttgtgaccagtaggaa

SEQ ID NO: 44226 - DNA, 359 bp, Zea Mays
gtcgcggtcatcagaaaagctctacaaccgaaggagcctgaaggtgtgtaaatttgtgttgtttcatcgctctttgatccatttcgtacgtgtattggtggttcttgctttctttgtttgactttttactaggaaccttacacttagcagtccatgatcgaagctaaacaacttgaagttgaccccaaagtcgatgatattgaagcgacagagaaaattgtagatgatattgtaataaaaatttgtagagatatttatgactaagtgatgaaggggcactgaacgcttcacaaactcttttaatatgacattggaatgtaataaaaagtactttacttggtttgctatttttgcctttg

SEQ ID NO: 44227 - DNA, 414 bp, Zea Mays
cacaagttcagatcgagtgggtatcgcagactggtggaactggaatcacaggtgatggtaaaggaagccatccacgtacgtcgagggctgcataattgctaccgggagaagaatagagtagcaaagtgtaccagtgtctgccgctggtgggccgctttcgcgatcctagttactgttaggcgaccattattgcgctggtaatttgagaagctgaattaccgtgctccgtcgctctgactgctcctgttctaccggccgagacatcatcgcatttgctttgcttctgcgactgcggttcgggcgatggacatgaggatatcgatcccggctgtctcgcagctgtgcgcgctggcgaccgcctaccggccaccacgatacgatcgcgccgccgatctgtcaggctcgatggccgcg

SEQ ID NO: 44228 - DNA, 334 bp, Zea Mays
tctgctttgtatatcttatttctatttctctcagcggccaaaaagcaacctttaggtctggcccctgtgatcttccaccatgagcagtctaaaggtaggttcggcataaagcgcaacttaccatttaattaactataattgagcttggtcatcttgatatatccctggctaatgattgcatcctattacagacttaaatcgtttgggatatatcacaaaaagatgatctatttctttttcttttaaaagttggaggacggacgatggctaaacctcgattgctaattagcatttgccaattaacgggagacaataacatgattgatcagtgcat

SEQ ID NO: 44229 - DNA, 449 bp, Zea Mays
cccccctcagaaagaacatgggacaacctaggatttgggggacctgaaacgcacacacattagcaatccaaacagactatgataacaacgtgtctagaaggatcataaacataattacgaaatgttgtggattatctcctccacaaacacctccccaagtacagcattcacggtggtgtcgaattcaccaaccaaacggtctagatcctctgtcgatgaaccctccggcagaccaatagcgctacgaaggttgctgccggtgtgcagctacacgatagccaaggccacgaccgtgcctcgacgaatgctgaattccactgccttgtggacgcgtttagaaatgttgagaaggcgtaagtcgtgatttcttccccgagcatgtaggaatccaaagcctggccagcgcatagggacatgctcagggtctcaagctccaactctgaaaaaat

SEQ ID NO: 44230 - DNA, 560 bp, Zea Mays
accgggtgagggtggctcctccgtatgtagtctttactggtatgaagtgggctaccttggtaagacggtcaattatgacccagatagaatcgttccccttctgtgtctgaggcagtccgatcatgaaatccatgcctatctcttcccacttccgtttgggcactgggagggattgcagtaaccctgcgggcctttgatgttctgccttagttcgttgacaagtatcacaccgagctacatgttgagctatctcctttttcatccctttccaccagtatctagtcttgaggtataggtacatcttggtggaccctagatggatagaataggatgaattgtgggcttcgtctagcagaatttctcgtgcctccccctttggtacacacaatcgatccttgaaccaaagggttcccttcttatctgttctgagatccaagggttgctccttgatagccttttctacaagtctcactatctctgcatccgaacgttgagctttgcgaatgcagtcttctagcacgggtttaacttctattctacttttcttccccaaacaagca

SEQ ID NO: 44231 - DNA, 290 bp, Zea Mays
taacaatcatgtttgtagggaactcacgtccggccaaggttacgggtatgtggaagactacttccttagtaaatatctgacccccaggtgagtgaataacaaatccctcccttgattcagtgctatgtatgcaatgcttctccacaaaagtcttgctcataaaagtatgcgatgcaccagaataaaaaaggataactgttgggtggttggcaacgaaaaagtacccatcatcaccagttcgccttctggtgtagccgccacctgggtataataaactcgcccagttttca

SEQ ID NO: 44232 - DNA, 369 bp, Zea Mays
ctaaggcagagggaatctgaacggctccgcctatacgcctctacgcacaacaggcgtaccaggctactctgtattctactacaacaagccatcacccacctgcggacacggcaagacgtggcaatagccagtcagagaagcaacacagtgtccagcaaagatctttgtgtgctgtcagcattaattattcacataatgtattccttccattatgctcctgggcccgcatgttggagctcagcatccttgtatgtacctcccttaaactataaaagggaggggacacagcgttacaagggagacggtgaatacaacttacggaaagtggatgtagggtattacgctccagcggcctaaaccactataaac

SEQ ID NO: 44233 - DNA, 318 bp, Zea Mays
gctcaggcgcacactgcgctcgcccctgttcagtcctccgacaaccctgctccaccaatggcagcgcagggcggttgggatcaggctggcctcatagccgcactgaatcagatgtccctccaggggtcctctccttgggtccttgacactggcgccacagctcacatgtcatcttcggctggtatactcctgtcccatatcccctctccttcattcggcatcaccgttggaaatggcaccaccatacccatcacctgccgtggcacatctacactatcctcccccacctctacctatcgtcttaacaatgttctagtt

SEQ ID NO: 44234 - DNA, 535 bp, Zea Mays
ggggttaagaagtttagggtttctaaccttggagccaaaaccggggtgctatagacctatcccacttaaaggaatctcgccctcgagattcaggctgggtttgagaaaaggtaaggggtattcctcactcattgagtcctcactttcccacgttacctcttcttcgccttctctgctccactggactttactaagccttacttctgaattttgggtcttttggacagttgagtcaagaatcttcactggtttctctcggtactgcagatcctcctgaatctggactgactcttctgcgatgcggctctctggcactttcaagcatatccagagctaggatacatgaaacacattgtggatatctgacattgattctggcaactggaggcgataagctgttggcctactctaccgatagcaggataggggccgacgtagcgtggggctaactttccttttgcttggaatcttctaacacctttcattagggaaactttgagatagacgaaatctccatcttgaaagctaagttccc

SEQ ID NO: 44235 - DNA, 435 bp, Zea Mays
gcactttagatgtagtaacatttaaaacaatccaatgtaacttttaatttttcgtactttaggggtagtaacatttaaaaaaatccaataaaactgtggcagacagggaaaagaatcagacgttcagaaacaattactcacaatagaggagaagcactcagcacacaacgcttgccgctcaggtggtcgctgcccattggccagggaggcgctttgccctcgcctatgaataagaaaagaaaagaaatcaggttgaggaagttgtatactttgggaaaagatgtaatggcaggggtagatttgggcggtggcgtggtgccagtgcaggccgcgcgcgtcattgctacagggacgatagaggcgaactggtggaggtggaggccggacttgcggtggcggatgcctgagtcagagcccgcccggccgcctcggagg

SEQ ID NO: 44236 - DNA, 861 bp, Zea Mays
gcaggacaggagacggcacacgggcagtcaaggtcactgaaatgacagaagaggtgagcacgtattagtcacatagtcataagtatatgaaatgtgaataaatacatacacagagaaatatggcaccgaaaacgagaaatatgacgatcgagatgttaaacgacgcaaaaacggtgtttgaacgagaaatagtgccataggaggtttggaattcgaattgaggcactaaatgacatggaatggagccgatacttcacgaataggtttatatgggtgaatatgagtgaagtgtgtgcttggtttgaatttaggcgaagaaaatgaaatttgggcactcggctcggaaacgatcgctcgaaatggggaatttggtgaaattaaagcctggaatatcggatgggcgtgaaatttggcgaatatgttactggaggtgttgtgaaggtgcctgaaaaatttgggttcagtcggagcatttttggctggtttgggcatttcaccgaacacgtgacgtgtggagttctagggttttggagaaatggctattagaggttgtgaaaccctccctaaggagctagaaacctgcaggagtactcaaggaacataaagggactcaatcatgcacttggattcacaagatttgatagaaattggaattgggcacaaaggggtggagaggggagcttactgcagagacagacagagaggaaagagagagcagatgatgttcaccagagagggaagggaagcacgagcactggaggtcgccggagagatcaccgccggtgagggaggggtcgccggagcgcagagggtgtcgccagagaccgagagaggcagtggccagagaggaaacagagcctg

SEQ ID NO: 44237 - DNA, 586 bp, Zea Mays
gcttcttcgacaattcttattgtttctagtgccgctttcatggctggatcggcttcgggatcatatggctcgggtgtgtaacaccccaggtgttacttagggtcttcactcaagactacacaagtcctgcccatcatcacatgtggtttaacttgagcaaagtacaccaaacatggaaatcaagatcctaagtaagcgcaactcctcttaggagtcatgacttggctttatcatgcacatatagtggagagacatgcccaaaccctaatgcaaacccctttggacaattggagcactataagtgagcgtgaccataaggctataaaaaccacatgatcatgacttgggccaattatagcatttgtagtacacctaataccctactaaaaatagtaaggaagtgaccccaaaaatgtttcagaaaaacctcaaaaggttcaccaaagggggaaacctaagggaaaatcagaattcttctaagtccaaaaccaacccttttccaaagatcaaacatgttcaccttctttcaaacttcaaaaccacttggcccaattgacaaagtggcacctaaagacccctagaatac

SEQ ID NO: 44238 - DNA, 802 bp, Zea Mays
gtaagcgtgagcatgtcacactgtcttaagtcgttgccgacttaagtcgattgctctgttagtagggtatagtggtcaccctgagttaagtaagcgtgagcatgtcacaccgtcttaatttgttgccgacttaagtcgattgctccgttagtagggtatagtggtcaccctgagttaagtaagcatgcaggttgacagtaaacaatttgagtgcctttgaagtctttttattgatgatatatttcccagtttacagaatacaatgtcgtcccaatagcttttgaaatatagctaggggtaaaacttcctgagatgttctatgttccatgagttcccaatttccgtgccatccatttgagtgaggcgatatgatccaggccgagtgacttttgctactatgaatggtccttcccatagtggtgataatttgtgtcgtccctcccccgttagaattcggcggaggacgaggtctcccactgcgaaggatcgatgtcgtatggctttgtcatgatagcgcctcagagtttgctgatactaggccgactgaatcactgtattcaatcgttcctcttctagtacatcaacatcctccagtctagtagcctcagcttctgctatgttttcaaagattaaccttggtgccccaaacttgagaccagcgggtagcactgcttccgaaccatagaccatatagaaaggagtgtttccatgcaaagcccgtctaggttgagttctcaggctccaaacaacatagggcagctctctgatccactttcatgcgaacttttcattcttgtcgaag

SEQ ID NO: 44239 - DNA, 612 bp, Zea Mays
tcaaaatcaaatcaaagcttgggggctacacctagtgggtgcaccttcggttgttgagctattttgctgcttttgagttgttttgcagtggtagtatgcatataaatataatggtcatcataaaatatttatcgtgttgttgagctattttgctgcttttgagccattgaattgcatttgtttttagcttcggttgctcttttagcttgagccaagatggtcgaggtcacgaatagtgaagatcttgcactagctaggttttacgaagctatggaaaggagtaaagctgcgaagatagctgatgagatcttagctgggttgtcggatgactccgaagatagtgaagactttggctttcatagtggtgctgatgatgcagaagatcggccgtggataccgagtcatgttaacttcggaagtcgactgtgaaaaagggacatactgaggccatgaaaggtaagtttttccatgatgtatccatagtgagacttgggggagaaaacaatgttcctctcctagaaaaggacaaagtggctgtcttccgaagctttttaaaggctggactacgttttccccttcatgagatgtttgttgagatgctaaagaggttca

SEQ ID NO: 44240 - DNA, 713 bp, Zea Mays
ccagtgtcacctaggctttctccttagggctgactcaaaaccattatcacatgtgaaccaaatagagggatgaacaccaaataaattaagaacaaggtttaagtaagtctttttcatcttaagaaattctctttaatcatgccatgcacctcaaggtaagaagaactctcaaaccctaaataatcctaagtgggccatttaagcacacagagggaaattgagaaaagacatgagaaaacacaaaaatttgctatggatcaaataacaaagttttaatgcactaaataaccaacaaaatatagtaagaaagtttggccatttgaatcttccaaaatccccaagcccttgaactaaggccctatgggaaaatttagaaatcagaattctaaatttcagaacccttttccaagttcaaatgtgttccctgtttttcaaaactcgaaaccaaaaagtccaaatatcaaagtggcgccaaatttccttgaacatgctctggtaaaatttgaactcaaacaaaaaccgtttgacacgattttggcgcagtttgacctcgggactcggctctctaacactgacaacatggtgacgctacaactctctgtccctagcctaaaaccgcgcaacatccacacacaaacgacaaagcacagtcaggggaacaaatccttcacgacgatcttgccgaaattcgtgaagatttgcgcccaatcggc

SEQ ID NO: 44241 - DNA, 628 bp, Zea Mays
attttttgagtgtccggttgccagatatgtgtggatggtgattcaggttgcattatgtttggattccattccaaataacaatgatgacctttgtgacctttagatgaaaagtcctaaaaataagattgctaatctgtttcttttttggtgtggtgctgttctttgggctatttggagaaccagaaatgattggtgttttggtgacaaatctttacttgatccctctaacgtcatatttctttgctgcttctggctggattcctaggctattcgacagaaagagaagtaaaaaagatggtggtacaaggaagcaagctcatcataagaatgacaagtgaagatctacaacgagcttatggttggagacttagagatcgtcgcattactggatagtgggttccagtgcttttgctagtttgctcgtcttgcagttccctgtatgtcggtggttatgttcttctgcatgttgtgtcttgcctcctgtctggagtgcaattgtcgtaataagaaaaacttgtggtttctatcggggcatgtggttcgctgcggtaggtcacttctctatcgagttagctcgatattgtagggggtacttgacgcggtgtctagttacctgttagttagtctg

SEQ ID NO: 44242 - DNA, 549 bp, Zea Mays
tgggtaggtgtgaagttaccatagcattcattgtcattgcactgttgtgctgttgaaaaatttaaccatagccaaagctttttcactgcattctcgagcgaaccatcattttgaattagcttcgtcaaaagggagagcttcgtcaaaaactgtaaaaaacatcagcttcgtaaaaaccgcaaaagatccatcagatggccagagtacgctcgactgcaagggtgactcgtgaaggagaggagactgaggccactgagacatctccaatttccgaagtcatgaggcaatcgggcttagttgtgacaaagggaaccattgacgaaggtacttctggtgctaaagcttagcaggctgatattgaagaagaaaatgttgatgatgaagaagaagattttagcattctgatcccatcaaaacccaaccacctggattttgagaaatctactgtgtctgaagccgacgtgtccatgatgatgaaactgggctacttcggagaagctgaaaagaagcttattcgttttgccagagaagaaaccactccgacgccaa

SEQ ID NO: 44243 - DNA, 362 bp, Zea Mays
cttggcaagaccgaaagaaataccaatatccgtctgggactagtcttcaacaacagatgatactgatctcatacgaagtagtcatcaagacaatggagaatacatctggtctccataagatcttcatatttctatcacaaattaccatcaccaatagcttagtggtcaagaattatggatcttccgacgccaaggaccaaagacatattaatgcccaatttcacttcaaactctgtggtaatatgggatttcatggctattttctactcttcttactcctggtagatcggagatatattatggtaagcatttcaaagggtggaattcaatgtagttctgctacataaactccaggtatatgc

SEQ ID NO: 44244 - DNA, 743 bp, Zea Mays
cttgttcaggacatttttcccgtctcaagatgatctagctcatatgttagaatggggagcggtgcataccagatacaatgcagtgatgaaaattgaagaagcatcggggaagtctcttgccaagtcggaactcaagaaagtttgggttcagttcattggaattcctcctgatatgttgcagttcaagttgatttgggcggtaggttcagttcttggggtgaccaaagcggtggatatgagttttacaaacaaatataatgttggtcgtcttcaggtttgcgtgcttgatcctagcatcattccacaatttgtggatgttgtgattggtgattttctatacgaactgcagttccgggtggaagagaaaacgttggaggataatcctgtgccgatggatatggatgattatgatagtggagaaaataatgcgaactcatcaaataataatgccccagataatcataaagggggagctgctcctaatgtcattgggtcagctagcaacattgaaggggaaccaaagaacaaggatgtgaacgaaaagaaagtggggctgctaggagggcaagagacagaggtactcatggacagtgagatggagggatccgatctggtaccaggctcaggtgctccagatttgtcttttggtgatggggccgtaattagcaagatttcaagattgttaactcctgaaggcttagcacttgcggcagtaccggaggcagtggttggctcctctgtca

SEQ ID NO: 44245 - DNA, 595 bp, Zea Mays
tgatctcttcagttatatccgatatgatctacttcaaccctttataaccaattgatctattcaaattgtgcatcaagtagatccatctcatgaacctaaatccagaccaaaaactacgcagaacctgctccgataccactccaggatcatggggaggctacactagcgcaatacaaaattttcgaccctataaaaccaagaactcctactgttatagatcatggaattaccactagaagggcagggcagtggaagctgtctcgatgtagacgtacacgtcgatctgtgtcgtgcagtcaccgacatccttcgcatccacgcgtggtttgtcctagtgctccagatgcagcacctccaaggtatccacacgtacatggaggaagcattgcgtaccgaactgctaggttcacgattttggcttggctagggcgagtggggcacgactactggtttgctggtcgtgaattaggcttatccctaagcgcacccatccctcattatataggcgttctagtgggcttctgactccgaggcccatcagcaaccctaacaactagtctaatttcggattcaatccgagttaggcttcctttcc

SEQ ID NO: 44246 - DNA, 1109 bp, Zea Mays
ttaagccctgcaaaaacgaataaaaggattagcgtgagagtaaaagacttcatttccaagttcataagcttcaaagttcacttctgtaccttcagactattgtatgcgaggctgtctgcgaggtcagccttcgtcatggcgtagaggccagcttcaagcttcagaaaccccataattttggccatctcccggcagacggataactctttgttgtccaggaggtagtacatgaaatcatcttcgtctgtaccgttaaacactaaggcccccttcgggtacttcagttcctgggcatagtgtttggcttcaaaaacttcttcttcagataatctttttcccgaagcatgtcgaatgatataatcaagaccttcggatggtgcttcgggagcaagggatttggcttctttggccatacttttctctagagctacgccagtatctggagattcttcttcagccctctgctcggttgcggcgagcttcatttcagcgggcactgagggcccagctttagtttccgtatgtgttgtagcagcttcggcaaccttcttcacaggagcaggagtcagtgctcttgttgtttccacaacggcgtctagcacgcttgccattcttctcctcttgggaggtgtggcgggagcccttgtcaccttcgacagttctgcctctgtcggaggactcagaatttttggcagcatcactatttttccaactctagctctctgaccgcattatctttggcttcggctgacccaactataggcaccttcggcactacaatcgatccttcagcgctccgagcaatgggagcagcttgttttgcttcggcagcggaggaggtcccttcaccaaattcaggcactacggccatttcaatatatcgtggccggtgggtcaaaatctttattttcttaccctccggcacaacagtgatggccggagcgacaatttttctcttttttccttgccttcataaggggtagcagtaatcagggtatatgaagccaattgcatcaaaaaaccctgtttaatcttttcttgctccgacccctgaaggctgaggacaaagcatcatcttcggccctggtatatgttccaagcaactcgtc

SEQ ID NO: 44247 - DNA, 280 bp, Zea Mays
ggagcagaagggtcggcatcctgattcaagcatgacactcgccgaagccgtctctttttctttttcttcccctcagcaggagaagttggatgattggttcggcgaggacgcttcgggcgaatattatcagatctttgaatatccaaagttgttccagactctcggatgggtgctacagctagtgtttcagcagggactgaatcagaggaatccttagccaacatgtccagcatggcacttatttctgcgtcgctcggatttaaaggcatctcaaaatgaa

SEQ ID NO: 44248 - DNA, 530 bp, Zea Mays
ctttggatgtacggggtcactttacagacctcgatgcccattcattgtgctgtgagtatgtccggacgtggcttgatggtgatgcatctcgtcgtagccaatgtggatcaatagcgctagactcagatcttttccatgtcaggttgcttgatagtgagttggtcggccagagctaattgccagagagttggtcatcggagttggtcatcagagttggtcaatggagttggtcatcggagagttggtcagtcggtccgcctcacagagttgatcggcggagttgggcaccttccagagcatcgcccgagacgccctcgagcaagttggaaatgcgctgctcatctagggttggtctcatgtgagccatgattgtgtctcccgctcgaggctggcctcatgcgagtcgttgctgcatcccctgcccaaggttggccttgggcgagttgtgaccgtctccctactgcatcgcccgcccttggttggcctcgggcgagtcgtgactgcgttccccgcatggggttggcctcggg

SEQ ID NO: 44249 - DNA, 611 bp, Zea Mays
tcaaaaactaatgaaaaaaatgtcaaataactgaactatagtatatagcaggagctggataaggtgaatggttggagacattctggatataggggagtattgtttgcggtgatatagtaaaatataatagaaagtacagatatgagaacaattgtggaggaatggttggagacggtcttgtctacattggtctgatttgctacaggagatttccatgttatgtccactcctgtttttttgtcgtctatgatacagtttaagtaggggtctcgacccttccatgttctctctcgacaataatttgaagaaaaaaacccttgtcaaactatagctacagctgaatctacggttggatcaaaatctaaagacccagaagactcgtttacatgcttgcatctaaggtccgattacaatcgttcccatcacccgaggcctcgtcgaagatgtgagacggatgtgatctgcatagtccaccattgtccattgttttgcttcttgctgccaatttaccttgcccatatcaccgatgacaccccagatggagatgtttactacgccacaattcagaacagcacgctcaacctaagtttgcgcaacagcttgttttttta

SEQ ID NO: 44250 - DNA, 891 bp, Zea Mays
gaccaactcacctggagattggaaaggaattgtggaagactcagggcaggaggaactggagcatggcttgacgagggaagatcagtaggaacaatctggagagcaccacctgaggtgacctcaaccccaccagcagacagcaggctccttgcgtctggctcgccgacctctaaggcgacttgtccagttaaggtcttagaagcacgtgctgtcgtcaccccatcggaccggattgggggtgacccgatgtgtacatccatggaaacattggaaagagagcacacctgaacatcctcgggggctagattgcagcttgcactacccacaagggctgggttgctaccagcaacaccctcgggggctaggtagctgccagtgccaccctcgggggctaggtcttctgcagcagccacttctaaaggtgaaggccctttagccacctccatgggagtcgggtaactcggatcagtgtccttgcatgggagactgtcctccaaggtcgacgatgtgtgagacatcacttgggttacctcttgcctggcagaatcaagcagtgaaagcccaccatctgggacctctggacagatgacggggatatcagcctcaggaggctccgatagtatgtcttcatgaatgactttctccagtgcttgatcaaaatctgatattgaaagcccctgaagaccgacaagtgccgatagagctggagagggaatatcgctacccccctcgctgcctctgtagaaacgactgttcttgcagatcaatgagatttcttcttattcctcctcttaatcctcatcaaacatgccaccattagcctgtgcattatcactgtttttggcgtcaaccttgggaatggcgtccgccgggacatcgtcaaggatcgac

SEQ ID NO: 44251 - DNA, 548 bp, Zea Mays
ttaattgcatgccgtgagttcgaaagctcaacgcaacacaaatatttagaacgattcaaatatgagtagcatagcctttacgtgtattttaataattttttgataattatttactatagtaaataaagcataaaaataagtaccataattaatgcatgatcataaatagatcgggtgcgagacttctttccatatttaaacatggattatcaattatttacggtaggaaataattaatgaaaatagaaattaaaacataaaacatgcctttatttcttttccatacgtcaaagagaaattttgtgtaaaatcctaatcatggcatttggacatttctatatattaaagctgggcacaaatctgctctctcgtgcaaccacgtcatcccttgatattacagccgcacgatcatgcgtataggggcacgattcatgaaagcaagtgaggtaaaaacggtcgatctctgcagacggagtgacggactttatcggctccgtcaatcgagtattctagaggccacacgaaggaatggatggaaatgaagaaag

SEQ ID NO: 44252 - DNA, 368 bp, Zea Mays
atcagtcagcaaaaagaaaaagagaaacaatgaatagtgttgggctcaattcagcccaagtcagcctgcagacgggagaaccacgcgcgcgcccgcgccctcgatgtccatttcgcgcagaggacgctggtcattcaaataaccggtaaagaaccctacgcactattcccatgtgtctctgacattcgcagttaggcccctgcatttctctttcttcacagcgccgggtccacgaatgtggatggcgacgagcaagtctccggcgagcctgtaccggccaagatacgcaatgaccggcgctctagcttggctgacacctaattccaccctcggcgacactaatccctcaaccaattgcactaaaccgt

SEQ ID NO: 44253 - DNA, 453 bp, Zea Mays
gccagctatttggatttcccgagtcatcgactcgtcttcacagcttgtgctatggtacttctgatcctcctcggcgccctcacggtggagttgctcctgttatagctcacatcgtggctttgttccgatcgcccttctgagatgggtcgcgacgttctccgacagatttcaccataacgaccaagtttttatatcagctcatgagacggacgcttctaccgcggatgggttacagggaggctgccactcatatccagctctggctccttggtgccctagtctctcactccgagtttgatgttgtggatttcctcatttgtgagatcgaggacaccgtattggatggtctacgtgccaggcaacagctaccgtatgctcactatctttgccacatcttcgctcagctgattcggccaccacagtttcagggcactcttgaggcctctcgcctac

SEQ ID NO: 44254 - DNA, 328 bp, Zea Mays
agaaatagattagtggctagaatagaaagataagaaattagatcctaaagtttagggggagttgttgcaagccaaggctatatatatctgtaatcggcacttgagggaattgaacaagaatttagtcatccagtcgtcttcctcttttccctgtcaagccgacggctagggggtataaccctgccggcgaagacggaccgagactacgagttgcggagtcgagggccagctaccttaggaaccaactcccttgacaacctggtatcgtcgtcacgtcgatcctcttccactcattcagatcagtcctccacagccaccgcgcccaaac

SEQ ID NO: 44255 - DNA, 621 bp, Zea Mays
gcgccgacgcaagtttgcagctggcttgctcacatgcttaggctacgtcaaaagaggcagtgaccgtaataaccccgtgggggtctgggcatatttaacttgagataggtgtaattaggaatcgccatgaacttgatgtaacatggcctcccaaatatggtgttatagaccctagggatgtccaccacctcgaagcgcaacagctaggtgcagatgttggaggggctatcaaacttgaccagcaacgtgattcgctcgagcgggtgagcccttcggcctgacgtggtgttgtggaccagctccatgcttgggtatagtgcgtagctctagatccgcatgcagtcaagagtcttgatgtacatgacgttgaggccgcttcctccatccatgaggaccttagagaggcatttcatgcccacgatcggtttgactatgagtgggtaggtcccagggtgaggggccctacacaggtggtcacaccgatcgaaagtgattggtaagtctgaccactagaggtgctgagggttagcgggtcgtgccacaaacacttccttgcctttatgtcggtgcttgttgtcgggcgcccgccggtagcttgcttcgaccgtattcctgacaatg

SEQ ID NO: 44256 - DNA, 558 bp, Zea Mays
agtgcatgaatgcttgctgccgcaagtgtcagtacaagcatcccctgcagacaaaagaaagtggaactgaacatgcggatgcagattaatttgacaaagaaagtgaaggcctgcggcggcggccaagagtggagtggagctgagctaacaaccatggtaaagatggcgagggaaatgacgatcgtccgttgccttccccaatacgaatccgccaggaatgcgccgagtaggggagtcaggtagcaggttccctgccatgaggcgacgttgctcgccgcagcgacattgctctgcttccgcgccttggttaggtagctcaccaggttcgtccccacaccgtagtacgccaaagagacgcagaactcaccaccaagaatcgagtagcaggctctccatttcccagtgtgctttttcgacgctgggtcgccgttgatgtcaacagagccatcgcaagtgtacggctcatattcctggactccgtgacgaaaacaggccatggtaaaacagtgtttgctcatctggatttgcttcttttttagcaacaacaatgcagtttag

SEQ ID NO: 44257 - DNA, 286 bp, Zea Mays
tgccaatcgggtgagaaaaagagagtaccagctcaatgtggtgggttgtaaatctaaattcaaggtgagcaagaatcaccatgtagaagcagttgatgtcaactacaacccgctggctctaggactaatgatctcttatttttacgagtcatagccgaagtgtcgcaagaaagtagatccgtaatttcagtggctgatagtttatttattgttagacccaagaaacaaggtttagagcaagagcgttgtagagccgtctaaccaatttccaaaaccaatatatata

SEQ ID NO: 44258 - DNA, 914 bp, Zea Mays
atcgccattgagaaaaacattcttaacatccatctgggagatagtccaagaagatgaggctgcaactgcaatcaaggttcgaacagtagtcatatgcgcaataggtgcaaaagtcccatcataatcaagtccttgagtctgttgaaagccacgagcaacaagacgagctttatacctctcaatggacccatctgattttgtcttaactttgaagacccatttacatgtaataggaacaacatgcgagggtaaaggaacaatataccatgtaccaatgtaccagtgcgttcaagagcagccaattcatcaatcatagctagctgccactcaagaatcccagaagcttcctgatatgtagtgggttcaacaattgccacaccagcccgtggaaaaccatagcgatctggaggttcaatggtaccacggtcacgaagacgatatcactgattaaaaacatcattagactcattatggttagtacaagaatcaggtacaggattagtatcgggaccagccgtagaaatagagcgggaacgacgaatgtaggtttggatgacaggtggtttggaagagtaagaagaggatgacgtggaggtggaaggtggtgttattggaatgagaacattagatgtggatgtagaagatgatggtgtagatgcaggaatggaaggaagacacatgaaagaagtagattctgtgggggataatatgaggagtgagtaggctggttgtaaaataaggggcgattttcattgaaactcacatctctagaaattcgaatacgacgagtcgaaggatcataacaacgatagcctttgtgttctggactgtatccaaggaatacacattctacagattgagcagtcaatttggtccgctcacgtggtggtaacaagacataacagatacatcca

SEQ ID NO: 44259 - DNA, 356 bp, Zea Mays
tacaaacccgaaaaggaataagatgaggtaccaaaggacttgaagttcaccgaataagcacatgtgcattccatgagttttactcatggtaatttccactagatgtggaattatggtatcctctaaagccctgatggcataaacctgtaaggtttaggtgttactagcaaaatatccccattgtgccagaatgacagactataacgatatatctgatcgatgaaaaatccctgatggattatgatctttgatggacttttgttacaccatcatagatgttgcaaaggatgaacgcctggagcgatgtgtcatatttagaatatgtactattgcaactatattatcccctaagtcct

SEQ ID NO: 44260 - DNA, 857 bp, Zea Mays
ttatttgattaaaggtcatctagtcaaattataaccataaaattaaaatactattttaatattaaagaagttaatccaatagacctagattaatccaattaatcataggataaataaatatctaattatcaaagtatgagacatggtataatcaatgttgttaccgcgtagtaaatgtttatatggagctaacgcaactagaacgggtcaattcggagtttaaatggggaagttatgaatttccaaatatttttatgtatttgatatgggattgattataggatcaattttattattattttcatgtaaaaacagaggcaatagatgataaacaacattgttacaaaattatagagactgaaatgggtcaatttggaccaagtatgcattttatataaattaaacaagttctagcatttatttttacactaaaaagtattttcctaatgaatttatctgattttctaattatctggactgagtgcaccattaccagaaagtttaggggccacaacgcaagtgtcacccagaaacagaacccaactacgtggaccacgggttgaatccctgattctacgagggctcttacgcaaaactcccacggcgaaggggtattggtgattctaagccgttggatcgtcaaccatcggaccggattagactttccccttaatgaacccgcatacaacgttgaccattagatctaggatcaatggccagcgactcgtccacgcccgtgctcgaatcatgcccatccgagaccagatcaacggttgagatgagcccgacccaaaagggcatgtgtgcacaaatccaggccaccatcttttgatccaagggcccagagatgcccaatc

SEQ ID NO: 44261 - DNA, 272 bp, Zea Mays
ggggtatcggccgcctctgtccgttggattagttctggacagcatagattaactcgttcttcatctgaatcggtacgcggctcgcagcggttggattagggataaacggtggagcaccccaaagcgacagcgccatccatccctcaatcgacgtccaggattcatcccacaaaatgtgatgtggttcgtttaatcccgatttccattcctagatccaccgttcgcgtctgcccaaacccggcggcgcagcaccgccgcagcgccattgccgg

SEQ ID NO: 44262 - DNA, 339 bp, Zea Mays
gaagagtcgaacctggaaaccacatttgaggttattgacaatatactgctgaaaatggctgaagaggaaactaccgtggctacagtgagcatggcaactaaaaaggggaaagagcaaattgatgaaatttcggaagaagattttaactttcaagacttgcttggagaagatttaacagacgctgagaaagaggagttgaaaaaatatgtcgtatcttgcggatacaaatcaggggctatgttatttggtggggtgaatgaagggaaattaaggtgccttcggaaccgcaccgaggccaaaattgtcagaaccctttccaaaagcattggcttgccgaag

SEQ ID NO: 44263 - DNA, 388 bp, Zea Mays
ggcaaatgcactggggcttgccttgtgttactggtgaattaggctctattccacagatatcaaaatagaaacagttgcctacctgatgttcctcaggtggtggtggtggtggtggtgatgaagtccttgtctcttcgacttctacttcctctttgttttctaaatatagccaagtataataatgaatgctcatgtagtgcttatgaagatgcaaagataataaaagtttattatctaaggtcttgaatacaactttccttcatggatctccgagaacttagggttttcggagtcaatagtgaagttcaaagggcaggggttagggttttaggttctaagtatcaaacatggtccaaatcataccaaactttacccaaggcttcgaaat

SEQ ID NO: 44264 - DNA, 359 bp, Zea Mays
gatttaattattattgtttatagtggaatcagatgcagtttgggttaatttagtttaagctacacgttgacacttgtcattatactttttggggacgctattctacttgcagaaacatagttgttctatcaattttattctgtccattgtactactttaatgtgcgtggaatatgaacaagaataagttccatcaatgtcctttcctacgattggtacatattcacattccagtccaggaaagtttctgccatgaaatttatgctctttacgttggataagctccttttgaacaagaccactttgattgtaatgatcgctagtcaaagcaagagtacttatgtactgtgtttatgtttc

SEQ ID NO: 44265 - DNA, 529 bp, Zea Mays
gatttgcttgaaaaacatttgttcattgagttagcactttttaaaggaaaagtgtagcgtgagttctgtgcacatgtaactgttatgtttgaattgattgttctgtcagcagggtgctgaaaaacacccctggcactttaagcgaggtatttttcttcgaaacacctcccgatttcagttagctattctgttgctagggtatggtggtcaccctaacctgtgtacgcatgagcatgtcgcaccgacttaaggcgtttccgacttaagccgattgctcaatcagtagggcatagtgaccaccctgagtcatgtaagcgtgagcatgtcgcaccgacttaaggcgtttccgacttaagccgattgctttgttagtagggcatagtgatcaccttgagtcatgtaagcgtgagcatgtcgcaccgacttaaggcgtttccgacttaagccaattgctccgttagtagggtatagtaatcaccctaagtcatgtaagtgtgagcatgtcgcaccgacttaaggcgtttccaac

SEQ ID NO: 44266 - DNA, 372 bp, Zea Mays
agacatttggggtttcgagggcctcaaagggttttgttgaggagttggcagagacactgggggtgacatcaatttaaacctcagttgattgaaactctcttggcattcatgagtccacttaaactctttccccttctccaatagtgaggtcataggcttcgctatcttggagaatccttcaataaaacgctagtaataacctacgagtcccaggaaactccggacctccgtggctgaacttggtatcttccaacctactatctcccttactttaaccgaatccattgagattccaccattggagatgatatgcccaaggaatggtacttcatcaagccagaactcacacttgctaaacttggcatagagttg

SEQ ID NO: 44267 - DNA, 559 bp, Zea Mays
aggaattatatgtggaatgagcccactgataataccttcatatttagccttttgaaccatacaaacaagcccatcggcagcaatattaaaaagcaagggggagaaagggtcaccttgtctaactcctttgtgagtggtaaaatagggacccactctatcattggtcttgatggccactttaccacccctaacagttctcataacccaatcacaccatttgtcaccaaaacctttttttcatcatcaaatgatgaagaaagttccaattcaccttgtcatacgctttctcaaaatcaaccttaaagattatcccactctgcttcttttttcacctcatgaataatctcatgtagagagaccactccatccatgatatatttacccttgataaaaccatactgaaaatcattaatcactttattgatgtagctggccaatctgttggttaaaactttggtaataatcttgtaacacacattaagcaagcaaataggtataaatgctttaatgtcaatagcattaggaactttgggaataagagtcaccacaccaaaattaa

SEQ ID NO: 44268 - DNA, 1771 bp, Zea Mays
gtaatatttgggtttttcatacctcacaaaatctgcgtagcctgtgggttatcagctggtagtagaaaacgatcagctagttgttttccacataaatccccatccaaattgcgcctagaagcccttctcatagcctttagagtcgcatcctcatctgcccggggaagaccattagcatctaaaacattggaactagtacttcttctaatgaacagaccattatgaaagggataaaattttgaacctgttccagaagaacacagtgaaccaactaagtcatcatcacatgcatcccttgcttcctgagtgtcctgcaccagggaaccatacattccctgagaaacaataggcatcaacattttattctgcatggatggagacaaagagacaggttcatatgagatgtcattagttacctttctcagatcagcatcattcgaagtagagtttcccatagtcacgcacaagtcaacaggtgtcagcaatgtacctgctcccacctcacaaaccgggttctgaacccctgaatattttgacgagtgatctgcagcgtcagttgagccatcagagctgaacaaactacagaaagggccatgtagagtcgttgtgaggggaagagcagcagcataaagcataggtacatcatttccaacactatctcccccacccgatgaagcaccagacccaccaacactccatccatttctttgtttcttctttgcatgacctgggtttttgtcatcttggtcatctccaatatccccgccacctttgccaacccagcgtgggacatctgtgaacaccacagggtctgcaggggtgaatttctcatcttccaaaacaaaagtgatctcatatcctttagtgccaaagacaatgtcagtggtaaggggaagaggatctctgttcatcattccaacaagcactctaatcactcccatttttctatatgtatacatatccacatccaaggtcgctccaattaccgagcctagagcccaaaatcctaggtaatgtctccaagcatggggaacccccttgatatggacccatacctcatcaagctggtaactaggatcagcatcactagcatctttccattccgagatagtgacagtcacaccatgatttttaagggtgaagcccacatcaaccattctctataattcctcaaccgaagggaaaaccaccaagaaggattcctcactatggggcaaagcttcccaagtccagtccttagtaatgaaacgagccagtttcgtctgcactgccgcatgcgtaagttttcccccagttactttgatgagggcagtcggggctggatccggtgtttctaacttataatcaaattttggtatgcgaaagaaacccaaatcataatttccaaagccaaaaaaggaagcatccggcctaggaaatttcagaagaggacacttggccaccacatgcgagttcttcttattgcagaccacacagtctaaaattgctttgcaatcctcattcatatggccactcaacttgcatcgaaaacagaaaggattatttggtttcttggccttagaaattgtacatgggtccaatgatgttgagagaggcttagccgtggtcctttccacctctacagtcccaacaggaagctcatccccaggcgccattacatggctagccgtaaaaccttccaccctcctctggtatcgaggctgtggagggaagcgtcctccccgtccagctaggccacagccaggcatcccttgattgacccggccatgac

SEQ ID NO: 44269 - DNA, 438 bp, Zea Mays
aaaactgggcccaaagttgggctgtcagtctatctaaaacctgaattatggtattcagtggcatgggatgaactttgggggtcattttgaagatgattccgtggatgtttgagtatggttaccacagtcggtttatagctggatcattagacaacaactttgctactggccgatcaacaacttgccatgtaaatttaggagaaaatcaatgccaaacttggtctgtcaggttaactgaagaacaatccgatggtacagtaaccggataggatcaggttcaggtccctcgccgccgacgagccacacgcggattcgtgctttcgccgccgtgattcgcgctcagatcagttggatagcgccgaagtcagtaaatatcacgccgtggaaacactctgaccattattttactccagccaccgtactcgagcagaccacgac

SEQ ID NO: 44270 - DNA, 320 bp, Zea Mays
tacaaccataccaaagaaatccctttcatatcttatcaatagcttgtagggcctatggagggatgtgaatagtcattgccaagtagataatcatgcctgtaaggatgtgctacacttgaattcttctgcctgcccttgtcattaagtcaactttctagcttgggaggtggtttgcaattctgtccacaattggctggaaggttgacacctcacatggcagaagatttttgatcaccgataattcctcctcgagcactgcatagtgtagacattgttaaggcccattaggaccatcctattgctaaggcctcctgacctca

SEQ ID NO: 44271 - DNA, 331 bp, Zea Mays
gcggcatgcaggacagacggcgccgttacgcggttgtttgaatggcaaggcggtaaacatatggtaaaggcgcggaattatagggaatagtttccacatgcaaacgtgattactatgttacgtgggcgcggaatttatggatcttgcatggcgtgtaatggcggcaggtaaatataacgtagaataagatgttgaaagatatggcataaaaccgaaacggcacaaaagttgcataaatagtatataccgtttggcgtaaaacgttcagtcattgtgtgtaaatagtgtattatggatattagttttacattgacatcgccataatatcggg

SEQ ID NO: 44272 - DNA, 415 bp, Zea Mays
atggattaaagagagatgttgctacacatgtggctaagtgtgatgtgtgtcaaagagtcaaggccaaacatcaaagaccagctggactattgcacccgcttaagattcccgagtggaaattggaagaaattggtatggatttcattgttggactaccccgcactccagcaggatatgactctatttgggtaattgtggacaaattgacaaaagtggctcatttcataccggtgaggacaaattacacgggagccaagctagcagaattgtatatgacttggatagtttgtctacatggagtgcctaagaagatcgtgtctgaccgaggttcacagtttacctctcggttttggaagaagttgcatgagagcttggatacacagttgaattttagtttggcctaccatccccaaat

SEQ ID NO: 44273 - DNA, 1076 bp, Zea Mays
cgcagcaagcgcccacggcaacagggaagtgacagtgggtcatgccatgtccaccccaatagtcgccatagtgcttcggaatgtcgagagatcctaaagctcgtgaagcgcatcagcgagtggcgcgagcaggcctccaaggatgtctcaccgcctcgacgccggcctagcaaggagaaggtcgacgaaggtgacgtagccgtgggagaacaggacctcgtgtatcaagctcctgagcaagttctcaaggacatcctcactggagactccgacttcggtgacgacaacgaccgccacaagaagttgtacgtaatgtatggcggaagctaggagcttacctcccgtaggaacgtgaagtccctgcgccgagaggtcctttcggcgaccctaggggtcccaaaggcagccccacatcagcggtggcggagcaccactatctccttcggggcatccgactgccccgataacatggcaggggctggtatactaccactcatcaccgcccctgtcatcgccaacatgaagttgcatcatgtgctgattgatggtggggctgggctcaacgtcatcagccacgctgctttcaagcagctgtaggttccgggatcccgactgggaccctctcgcccgttctccagagtgggccctcaaccggtgtatcccctaggaagcatcgcactccccgttacattcgggactaaggaaaacttccgcactgagaacgtccaattcgatgttgcgaaggttaacctctctttcaatgccatcattggtaggtcggccctgtaccagttcacggccattgtccattacgggtatttggtcctcaagatgccgtcccctgctggggtcctcaccgtgcggggcgaccgccccgctgctcttgcagttgtcgagaagttgcacgccctagcggcagaagccgctcacctagatgatggggggagggacccctcgacttccggtaccaaggtgcgttccaaggtgcccaaggtgcaaccatctggtgctgatggcgtccccatcaagaccatccggctcagtggggattcctcccagaccactcgcatcgtggg

SEQ ID NO: 44274 - DNA, 496 bp, Zea Mays
gctgtttttcttggtgataacctcatctcttggtcctccaagcgtcaacctactgcttcccgttctagtgctgaagtagagtatcgtgcagtggccaatgccgttgttgaggctacatggttccgtcagctccttcaggaaatgcattctcccctgaagcacgccattgttgttttctgtgacaatgttagtgcaatctatttgtcctcaaactcagtgaatcaccagtgtgcgaagcacattgagatcgatctacacttcatccgtgaacgcattgcagccggtgtcgttcgagtattgcatgttcccactctctctcaatatgttgatatcttcaacaaggagttgccttcatcaatgttcacagagttcagatccagtctgaacattcttccaggtggctgacgacgtttagactgccggggggtgttggattactataattagattgatcgccttccttgtcttagtcttgtatggcactatttttatatac

SEQ ID NO: 44275 - DNA, 731 bp, Zea Mays
tggcattgtacctctatttatagtggcaagttagagtataactttgtataaaattataatcatgtcctcagttcctaaacatacaacttacataatcttctaggggcatcgtcgtcttttcctttaaagacgtactgaccaagcctttagatttttctccttcatcttcgatgacttgtctcgcgttcaggccatggagccaaagcttcttagcttcacctttgcatgtgtgtcgtccaaatgaaggttagcttcattatatattcggagtagttgcaatagacttagaaacaattggcaacttaatgttttgaggagctttgacatgaaaaggcccccaacaaatatcatgcataaattcatattaatccatttcatagtagcaacgatatctcttacgatattaaattaactctaattccaataaacttaactcctgtcagcccaatttatactacaaccgaagtgagaataaatcaacaccctcctactaattagaattatactgacaagcattcacaagttttatttgtttcacctgagggggaagcaggggcagccattggggcgtggttaggctggttccagtgcaccatccctctcttgctcctgccatgtcagctcttgactccattctcacccctactgctccagtcatagactgcactagactatagcctcagcccatagccacatcagtttttctattttagaattacacctaaaagtta

SEQ ID NO: 44276 - DNA, 278 bp, Zea Mays
cgaatcacacctcctcgatcctcaccctcacgacatcaccacagtagatccgaccaacgaccaccgacccatcgatcctcatccacctctacgaggcgtaggtgagcccgtcatttcctcctaaggcctttccttcccctccgtgcccctagttgatacttgattttaattcccttgaaggtatcaaaaattaaggcaacacaagttaggtataaagaccttcgtcctcctgatttaacacttcttcgaagcgttaaagcatggggcgaaggttttca

SEQ ID NO: 44277 - DNA, 325 bp, Zea Mays
gaatcattactaccaataactgaaatacttcggctttatgtaagcagcagcatatcacaactatccatatgcataataattcagttgcactcctccataatataaagacgcatatggagcaaaatgatgccataaaggataaccgaacataccttgggacgacatatatggcatagctgaagaatatggacgatgcaatgaccaatagctttgttgagctggggcaaacctttcacccaaatgtcttgtacttgctttctttcttgtgtttgcctttgctccacttcttccaaaagcatcatccttacctggatcttgagaactc

SEQ ID NO: 44278 - DNA, 799 bp, Zea Mays
aatcaattcaaagctcgggggctacacccattgggtgcacctgggtacagagatggagcaaagctgccttcaaaagcctagaaaaaaaaaatcaaagggcaccattattccttagagtctcgagccaactactttcgaaagttggcttgagcctcgggggcctgtgtgggatagatatccctcgggtcctcacgaacacacaaatgtgtcatgggccgcctgatgggcctcccgacggtttgccttgcgagacaggccaacatgctacaaccagattgggcaaacttgatccaataagacaaagactgggcatccgagttatgcgtcgaccgaagcgctgatatctcgggtgatgaagttgcacacactcgaagagctatacattcggcgctaactcgactaaggaagtgattgaactctagataagcaggactacatggcacgataaaggaggagataagtagaatagatagtgatcacaacttgtaaagggataattctctggtcgtgtatataaggtcaagggagactcctacaaaatcatatcatctcatgccatcacacaccagccctcatcaacaaccctgagcgccatcacagctcacttgtaatcctcatactccagagaaatttcagtacacggcctcaacatgaagtagggtgttatgcattctagcagtccgaacctttataaatccttgtacaagtatgacgtgctcctgcacgtaccatcgagtcacagtcaacgacacctccctacccaaaagcatcacgtgggtaaccttgtggtgcgcggtcg

SEQ ID NO: 44279 - DNA, 385 bp, Zea Mays
aggggcctaggtgtaactaatcctaagactcagacgacccaccaggtggactgcgggttgatttctagagagatgagggtctcttatgcataatcttctgaccgaaggggtacgcagagatcttggtcgttggatcaaaatttaatggccaagatccactataggcgaagggggatggctgcgtcgatctgggccgcccgttaggatctaacggccccaagttttcttcaatcccccctcccgagtcgcaccgaggcgagcagaccacggcggcgcccaccaccggtgttggacgaaatccaggtatagtgactaatccataactacaattgaagctatgcacaaagggcaccaaggggaactcaacagatggacctaccaccgc

SEQ ID NO: 44280 - DNA, 428 bp, Zea Mays
gtcttgtcaaaattaggaagttgcagcagtggtgcttgtgtgagctttgacttgagggcatcaaaggcttgctgttgtgatggtccccaacgaaacgacactccattctatgtcaactcgtggagaggtgctgcaatggtgctgaaatcccgcacaaatcgcctgtagaatcctgcaagaccaagaaaacttcgaacctgcgtgaccgtggttggaagtggctagctcgtgatggcaacaatttttgcctcatccatctcaatgccctgcgatgtcacaacatatccaagaaaagacacacgatcggtgctgaaggtgcacttctcaaggttaccaaataaatgtgcatcacgcaaaacatcaaaaacaacacgtaaatgttcaatatgatcatcatgacttactatagataagaataccatcaaaat

SEQ ID NO: 44281 - DNA, 756 bp, Zea Mays
tgaggattgaatggtggaaacggcatatcagccactagcaacgtgaactatccggattagcgaacggatttgaagcgtaccacgagaatgcaacctcggattcacctacaaggccaaggaacaatgaaggtccagcaattcgatggggaagggggatgttggatagtgaccaaacagagagcacgacgagaaaaagattaatgtcttaccgcagcgacgagcggatgacggtcgagctggaccgtccgaagtggtgtcggagacgcgggaacaacgagttgccaaaaccctagggttggggacaaaggaatagcccgtgtggaatgcaagatgtcaccaacttcttgaagatgtggacttagggaggcttcttgcgatctatggtaaatgggctgcgaacggaagcgcttccaccaaaagttgcccccgaagctgagcgtttgatccggattctagcttcttgcggccaaaagctgcgcataagctgaaccaaataggggctatttttctcgactaccaaaagcagcagccatgagctgatcttctttcttagtataattcccgataattttgttgcacattatttcggtcatctccaaccattcagtgtaggggccgctgaaggtatcttgaaatttgaagcgatacggcagcctcactagctctagcttgttcccttcgtcttttagcttcggcattccccacccatgttgtgttggaagaactttgttcgctaaatattcttgaaccaaatct

SEQ ID NO: 44282 - DNA, 833 bp, Zea Mays
tggctccgccagggctattggttcgccaccatttgggaaatgagatccgccgcgaatgaatcatgggtacgccgtcggtagagactcgacagcgggtctgggagcttcgtcggttaccctggggcatgttcgatgtggtgccggagtcgatggccaacctggtggcgaggaatttctcgccgtcgtgcagcgacaccatgaatccgccgtgcgccgtggccaagcttcatccgcacctcaatgccggtaagtatacatccattatgatcgcgaggccgcgctcaccgtgtagctccagtcaatttgactgtggggctcgggggagcgcgcgtcagcgatggcctccgccgtgaccctgtacagcgccgccgcttggggatagtgcggtgtgggtgaggtgaggggagagcgatagccgttgatcactgatccagtggacaggatccgatcgcgctttagctcttcgctcgtctgatcctggccatcgagccccgatcggatggagtacaacagataagctctttcgttaaaaattaaccgttgatccctgatcggtcggcccggattggataccggttcgatttagataacttctaatctgggccactggttttggatcggacggatcacagtgcctcgtaccccttcagcgcgactgttttacagaagagaccctacacttgggtataatcaacccgcagtacacatgccgtataaagtatatacgcagtgacccagaattcttatagaataccccctgcactcctctgatttaatgcgcgcagtccaagggaatagaaaatccagtaaaatgaaatagaaattgattttta

SEQ ID NO: 44283 - DNA, 543 bp, Zea Mays
cagacactatgcgcgaaaattgaaatatccgaaaggagctttagtgtttaacggcactaacgatgacgacttcctatactgtctcccggacaacaaagaaatatctgtctgccgggagatagctaagagcatgggatttccgaaacttgaagaaggtctttcgattttgtcgaaggatgatcttgctgatagcctagcgtacaacaacataaaggtataaaagttaactttgaagttggaaacgaagtattttattgtcatactcaattctttcttcttctttacagggcttgattcttagtaatgccttgagggcacaaaagaatactgaagacgagagttgtaccatagcactcaacaaccttcggaccgaggtgattgagctaagaaatgaaggtctagagaaagacaagattttgatttcattggtagaaaaaattaaagaagacgagactaaatacaatgctcaagccgaagctcaaaaggctgaagttgaagaccttcggagacaactggctgaagctagtgagaagtgcgctctcg

SEQ ID NO: 44284 - DNA, 566 bp, Zea Mays
aacaaacatgtccctggcgatctagggcaatctagtttaattgaatgggtcggggagcatcagtggcaagtaagagtgctgaaacaagagagcagagggtatgatcaaacctgaaacgagctagccacggtgaagactctttcacggtggtggaaacccgatttgggggaaatgagcaattcgtggatttaggtgagtaattggaggcacgagcgggtggattggatgctggaatacctaacggagctgagggtgtgctcaatttatagggctcttgagcggtggccggtgaatttgaactcgcgcggtggcggccggagaggaggaggtgcactggcgcacgcgattggtggccattaccgtggcaacctcaccggcgatcactggataggataacatgagtcacggcggcgtggttaaagtgctgaggcatgtggcacaagaccacgaggtgtctaactccggcgagggtaaatccggagcgactggggctaagcttacacggtggccggagtgaacagtggccggagttcatccactgggtgatatttcgcactcccacagcg

SEQ ID NO: 44285 - DNA, 380 bp, Zea Mays
tgctccacatctaggctagctagtgctggtggcacgcagagggatgtcgccatgctctcaagccactaaagcatcgatcgtgctcttcagtcggtgaacttcatcacgtctgcagtctgctacgactacaccaaccagggagattgccatgaacactattagtgttggtatagggctttttctacccaattccgtatcagattaagttataatagactatatgtgatcttataatagactaagagatcttgtgagtatgcccattatgctgtacatttatttatccaatactgcacgcttttaagatgcacgtagtagctgaaggaatacgaagatatttggttgattctcagtttctttcatgattgatagcattgttt

SEQ ID NO: 44286 - DNA, 300 bp, Zea Mays
gaatagtaaacaaggaatgcaatctgaattctagttgttgtaaagttaaataaccatccaacaagaagttcactacctagtgctgaccacaagatatgagtgatgtaagtagatcaaacacacacgcaaagaaatttcagatttgatgcaattcaaggagtatggttggaatgcaagtgttgcgatcagacccaaccaaaatttttgcaccaaatgacagtagcaaactagttgaacaacttgataaactttcaacacttgtgcacataaacaaactgatcgtttttctttcacaatctt

SEQ ID NO: 44287 - DNA, 514 bp, Zea Mays
ctgaaagttggatttattttgcttcgggtatgggcagtccttgatgaaatgtccggacttcccacagttgaagcaaccactggaggaactaggaagagcagggaaacgagtaccaggggcactcggctgattggtacgagtgggggcagtagtgggatgaataaagacaggctgcttgaatggatatgaaggtgggcgaggcgaagaaagattttgattaaaaggttggatcaccaacctagttctcttctcaggtccttgatttgacctttcacctccaaacccctttgattttccatgtcccgcatttttggcttccactgccagtgctgtactgacagccttactttaggtgaggtccaagcatgttgccattttccgctgaagcatgtcattgagccccctcataaaacaattctttttcttcaagtcggtatccacctggtcaatggcatactgagagaggtggttgaatttgttgagatactgcatcaccgtatctcctccttgcctc

SEQ ID NO: 44288 - DNA, 635 bp, Zea Mays
gtaacgtcgcatgcctccccttttatagctaaagggggacatgtacaagagtactgagccccgacatgtgggcccaggaacatagcggatgtagctactaatactttgctgctggagcgatcttcttgcgccctgacacccaagatctgtatagcctcggcgtgcagggggaagcttctcgtacaagggatgagtacagtgcaccatgcagcacgggtgcactatttcggcaacggactggacaggtgcgccgtctgcagggtggccctggcgccgcctgccagcggaatggacaggacacaataaatgtcgtgggggcacatcacctgtcagaagggtggacaagcggcgtgtcctttccgcaataaatgcggaggctgcgcggcccaaagcccttacatcatgctccgcccgctggcctacgtcacggacaataagccatgtgacaacattagaccctcgaccgagtggggagcggaggcgcttcggatagagcctggacacgcgtcaataccagacccatgcctaggtcacggtacttcctctcccgggaccttgttatgggtggtccagtgctcacttggtggggtccgaaccctatccaatggctccgggctgctttgcttcgggggtcc

SEQ ID NO: 44289 - DNA, 402 bp, Zea Mays
ggagcattagtgcaggaggaggactatcagtggtaagatcatcatttaaaggagaaggagcatccatatgagatcgatagggatacaaaggagcatgagtgggtatggaaacaaaggttatggtgtgtgggaacaaggacaaatagaagtatcctcccgatgatgatgcacaagagaaaggtcatcgaagaagacctaccccacattggttggggtattaggatgttgtagatattggccattggtcaagtccataaggtttaaaagttcagactccagctaggatatatatataaagagtgggagactataatataaagaaaggcgagtgttttggaaagtgatgggtgtgaataaacctgaacatcccatctttttatatgctagattccaagtttttta

SEQ ID NO: 44290 - DNA, 582 bp, Zea Mays
gcctttgatcatgttactttcagctttattgtctttaattgcttatatttggtgctcaagttgtacaagtcatccccatacctcacaagtccctatgcaaatgtttagggggagatgcgctacaacttgactcccttgagattaacctatttgttgagtattcttgaaatagtatcaaagggatattgaaagggaaaagtgaacttggacaaagaaagagcttccactacattcctgtataaatgtatcttgtcccaagttctttgttgtgctctcattgccattttgctcttatttgacattttggtgaggcaatgaggttaaagggccacaaaggtctcctgttttggtgcttaatgccaaagggggagaaattaaggccaaagcaaatggatcagccaaccacttgtgaatttcaaaaatattagagctagaatctttatgattgatcaaaaccctcttattgcaaaaagaagttgttctcttatggggagaagtttgattatgggaaaaagggggagtttgtggcatttgatcaaacttactcttgaaagatctcttgattttccaaaacaagtgttt

SEQ ID NO: 44291 - DNA, 475 bp, Zea Mays
attgcattgcattgcatgctccgcattgatttggcagcagttttacatgctgcgttcatacatcggttgtttacatatgtgcagtgattgttatccatgatgctgataagctctcgtttgatcttcaacattatattggttggtttttggggaggtatgccgggtgcaacaaaatcattttctgctgttctgatgcttctaatcttgaagccattaagcatctctgtaaggttgtgactcttcaaccaccttcatttgacgaggtacttcactacacaacttgttgatcagtgttatgtgtatgattttttcgcttattgcactaggcggtttgttaaaagattgtttgtttttagataataaatgttctagagtacattgcaacgcaagagagcattgatttgcctcgtgatcttgctagaagaattacagtcggcgcaaacaataatctccgacagacaatacgctcttttga

SEQ ID NO: 44292 - DNA, 378 bp, Zea Mays
ttaatttggagcaagtatgagttttctaggaatttaacaaattctaacatttatttatgaattaaaagtcaatttctgttttattttctatggtttctctgtcctctggactcggcctcatttactaaaaagtgcaggggttctagtgtaagatttcataagactcagtaaacacttctctggacggcgggttgattccctaatataataagggttcttttgcaaactgcgcaagcgaaggggtacgggcgaaactgagccgctcgatcagaaactgagggctcagattagatctaggttccgcgtgaatcggtatgaagcacctaccactagatcaggattcaacggctagattttaatgaatcggttttcccaccg

SEQ ID NO: 44293 - DNA, 738 bp, Zea Mays
cgaccgcagggccacgcccacggccgggctagaggcacccgcacgctggcagggttgccgcgaccgcgcgcacgctggccgcgcctggccacgagcaagggcccgcagtacctacggggaagaaggctggggaagacagagaaggggtttctcacctgcgttgagagagctccggcgacggcgcagtgcaggggtggaagggcgccaggtgtgagggagatggagggctgctacgttctgggaatgagggggaagagagagagcgtcatgtgtgctacgcaaaactgcatagaacgtggcccttttttgtgggcaagtgaggtgaggagaaaagtggggccgaggtggttactgtttttgtcgtgggttcgaactcagccgatcgagcggagggaagtttggaaatcaacccaaggtagagaaaatcatcacgacatatgagtttgtaccataaaaaatgaggataatgatagatggcccagagccacggtctgagaagatgaagctggcatgctggcctaggatgacagcaaaaaaacgagtgacgaggaataggcgattgcacgcatagtgcgaggaacgttgtacgacgaggcgagacaagaggatagatagggtagacaaagggggtacacggggatagcagatgcgagcgacatgtcgttcgcgaggagaagcggttcggtgatctcgccaaaaagaacacgaaatctataataggttcgacgagaggaagaa

SEQ ID NO: 44294 - DNA, 830 bp, Zea Mays
tgtcgactaaaagatggatcctttcggctatttatggtccctgtcacggccttgatcggttggccttcatcggctggcggagcaacctgtgcatttcctcgatggataattggatgttgatgggtgatttcaacttctgtcgttcggttgaggatagaaacaagccaggtgggaatgtgtcagacattggaataattcaaatccctatgaagggcagaagctacacttggagcaatatgcagttggaccccttgctggttcagcttgattggtgtttcacttctatcaattggacctccacttaacccgataccttgctaattcccctggctaagactacttctgatcatatcccttgtgtggcacagattggcacttccatccctaaaggtagttgctttcacattgaaaattattggattgagcttccgggcttcatgaatgtggtccaaaatgcttggaacaagacagtaagatcctcttctagtttattgagaattgtggctatgttcaaaaatagactgatgcactatttacagagtgtagtttaaatatgagtatgtggataggtaagctgctggagatatcctcacatctttgttcattacgagaggcttcctgaacacaccagctagaagcctctgagttagtacatgtgtataggctagagatgtgtgtatgttcttttctccattcccgtttttccataccatttgagggcaatgcaggacagtcaatgaaatttcatgcccacaaattaataaacatttctctccagtttcttctggttccagtgtacttcttgatcaaagtagttcctggttcttctt

SEQ ID NO: 44295 - DNA, 498 bp, Zea Mays
tatgatattgttcttttccggtcgccttcatttggtaagataactcgtgaatgttgcagaagcacttagcatccagctctagtccctgactcctcatggcccatataaaaacccccactttgataagtgcttcgggggtaagttgatgaaagaatatctcaaatgtcttcaaaacctcaaccaacatcttgtggagcggaaagcgaagaccagctttcatgaagctcttgaaaactactacctcattagcttcgggaagggtaacggtgctttctcctctagccctcactatggaaacatcatgaaaatatttgcctttcatcgtttcaatttgtccttgtttgacagttgattttccaaaaacaacatggctcggcctccacgaccgatctttgacatcttcattctcactctccacgtcaaaactttcgctatcgctggagtcctcatacaacccagccaacatctcattggtgatcttttctgtgttggtcttct

SEQ ID NO: 44296 - DNA, 309 bp, Zea Mays
ggagcatcagggacacaccagaacactgaaacggaagggcagagggtatgagcggacctgagacaagctggccacggcgaggtctctttcacggtggcggacaacaggtttgggggaaatgggaaattggcgagctctggtgatcaattgagggcacgacttggtggcttggtgcttgactaccctacggagctcatggcgtgttcaatttatagagtccgtgagtggtgttgtttaatttggacgaattgcgctggcggccgagaggggaatgagtcacgacggcgatctacagtggcaatcgcagag

SEQ ID NO: 44297 - DNA, 521 bp, Zea Mays
gtaagttcgttgtcttggaaaatctcagcagcccccatttcctactcgatttgactttcaacataaccagcatcaccaggagcatatagtcgttcatgaggattaactttgtacactaccctacaatcaaccaaaccctttttcttagatggatatgtcatataatacacctgctcgcattggtgggcaaggattatagtgtcgtggccttttaatcgatcgttgtgtttgacttccaccatgccatattggttttcttgcgttgtatttggagaaaaccaatcacaaccaaagaacaccactttgagttgtttatctccaaaaaacttgtaccttcatcgacagctctagttacaactccggaatttgtcgtggccgctagaggatgatcatcttcgaaccttgtagaacggaatctaaaaccattgacatcataccgaccataacgtctggcagttactgttcctagggacaattgtcgaaggtccgggtgtattttcatttatatatacataatctcg

SEQ ID NO: 44298 - DNA, 453 bp, Zea Mays
aatgatttaagtcttacctaaatgtggcactgttatttgggtcatataagtgagaatcgcatgaagaagcttcattctgatgggcttttaacttcgtttgattttgaatcatatgagacatgtgaagcatgcttacttggcaagatgaccaaggcacccttcacaggtttacctgagagggcattagatttgttggaactcatacatattggtgtgtgcggaccaatgagtacgacaactagaggaggattccaatacttcataaccttcactaatgattttagtatatatggatatgtctacttaatgaaacataagtctgaatctttagaaaagttcaaagagtttcagaataaagtggaaaatcagtgtggcaagaaaattaaagcactacaatctgatcgtggaggtgaatatttgagccatgagtttagcaatcatctagagagttgt

SEQ ID NO: 44299 - DNA, 703 bp, Zea Mays
taagggtaaaacttcctgaggtgctctatattccatgaattccctacttccgtgccatccatttgagtaagccgatatgatcctggccgagtgacctccgacaccatgaatggcccttcccatagcggcgataatttgtgtcgtccttctcccattagaattcggcgaaggaccaagtctcccactatgaaggatcgatgtcgtatagtcttatcatgatagcgcctcagggtctgctggtatctagttgactaaattactgtattcaattgctcttcttccagtacgtcaatatcttctagcctagtagcttccgcttcagctatgctttcgaagaccagccttggtgccccaaacctgaggtcggcaggtagcactgcctccgaaccatagaccatgaagaagggggtgtttccatgcagagctcgactgggttgagttcttaggctccaaaccacataaggtaattctctgatccacttctctgcgaacttttcattcttgtcgaagactttcttcctgagtgcttccagtatcattccattagccctttccacctgaccattggctcttggatgtgctactgacgcatatttgatctggatgctccgttgttcacaaaaatcaaagaattcagagctagtgaaattggaccccaggtcggttatgatgctattcggtatcccaaacctgaatattatat

SEQ ID NO: 44300 - DNA, 542 bp, Zea Mays
cgcgtgcatgagttgcactatcagacaaaggccagggcagatagtcttcacgaaaattttggttgttacaattttgtgtatcgcaaggatacgaaggcaccagtcctaagctaccgcacaaagtggccaaccggctggaaaaatgaatggttttatatgaaggctgatgagaaaaatagaaagaagctaatgaccatggtcatgagtccgctatctttaaacttcggaatgaccaggcccctatgcaacatgcaactggggtcaccatattagttggccgaagtagagttcagagtggtagctgaacaaattagtaccagggatctggtgcaggaataccccgccaaccggacgtatccacgtcaaatggctggggaatgccgaagatgaaagaaacgaagaagaagcatgaacttgttcgactagcttatcgtttcaagtttgaaaaacaattcaaaaagtcgtgcaaagaatggctagacatgatcgagacaatgtgcaatgaaatacttggaaattatacaaaaaaggaagaccaactg

SEQ ID NO: 44301 - DNA, 458 bp, Zea Mays
caagggtgttgttctcgtgtagctggaaatcatttagcatcatttgccaggcagcctcgaactccatttcattcaatggatgatgtattatagattggaaccttgttttgaaattcatttcctcgaatcttgcatacaattcattcaagtggggcatatacctgttttgcacatgccacaaacacaatcgatgtattgtgtttgggaatactctgcctagtgtgattggcatcacagggtcttgatctgaaatcgaaacatttacataacattgtgcaagttagtatgatatcatacagtacgtgtttaatcaatatgagccatttattacaacatacctgtcaacattactcgtggtccgtcacatcccatgcatgttttgaaagtattgatcaagacccactcgaatgtatcaactgtctcgtctcctagtaaagcaaacccaaatattgtgcatt

SEQ ID NO: 44302 - DNA, 347 bp, Zea Mays
ggggcctcagcttaacgatgatgagtgtgtctctcagctggaattgaaggagatgatgcgcgcgatgactgaagcttttaaaaaataccaggactctgtggcgacatcctatgagcaacttgatcgacaagttgctgaacttgttacacgcatggacgtactggaggctcgtcccccaccaccaactccagccccagctcactctcctgtggacgacgacgatgtttatgcaccgctgcgacaatgcctcgcacgtaatcgacaaggtatgggaggtaatgatagacatcgtcatcataatcctgaaccaaaccataatccatttgctaagattaagttctctattc

SEQ ID NO: 44303 - DNA, 625 bp, Zea Mays
ggcgtccccgcggctccagcttgcgggagtttgctttgctggggatctggcgagcgcggaagagacaaacgatggtgtttctagcggttaatggcgcagtctggactctggcggcactgcgccggtggtccggccaataatactatgccacgccagccccccaacccaaagggaaggggatacgtacgtacggcttgcaaatcgtcgcgtgtacatctcgtgctcgttaactatatatagcgtaactaactaactaactaactgtaacgagagccatccacagcaggggtttgacatttgcagcatttaggagttgggatagtcacgtgaaaagacttgcatttgtagcatatttaggagtttgaatagccagagactggctctgggctctggctgcgcctgctaactacccctgcaggactccactcccctgtcctccttggaaggcgttggatagcgccaacaaccattggttagcgaggactcggcagctactcctacatactacacctgacctgagttcctttctacacatgtgcactagaacatgtcggcaaaaccatcacagcccagttccgtacactatgaccagtaacaacaagcacagactagccatgatcgtgat

SEQ ID NO: 44304 - DNA, 959 bp, Zea Mays
gtttctgggcgtagtgtctggcttctaggatttcttcttcggataattttttccccaaagcatgtcgaataatgtaatcaacatcttcggtcggagcttcgggggcaggagatttttctttttccatcatatcttgccctgctgtcatgccagtatttgaagtttgttgttcagctttatctttagacgcgacagccttcattttaatacgcattgaaggcccaacttcggcttcggcctggaccttggcaacttcggcaaatttcttaataggagcaggggtcaaggcttttgtagtctccatgacagcgtctagcacgctggccatcctcctcctcttgggagttgtggcatgagcctttgtcatcttcggcaattctgcctctgccagtgggctcaaaaaattttggcatcatcattgttgcttccaattttggctctctggccgtatcatccttggcttcgactggctcgactgtaggcacattcggcactacaatcgattcttcagtgctctgcacggtgggagccgcttgttttgcttcggcagttgaagaggtcccttcgccaaattcaggtactacggtcggttcaatatatcgtggtcggtgggtcaagaccttcattttcttgcccttcggcacagcagtggtgaccgaagcggcaatttttctcttctttccttgccttcgcagtgggtagtgataatcagggtatacgaagccaattgcatcaaacaccctgttcaatcttttcttgcaccgacccccgaaagctacggacaaggcatcatctttggccttggaatatgtcccaagcagtttgtcactggtagcttctatgcatttcaaccagtcatcattaggttcgtcaaacttctctctaaatctgaaggtatatttcaatcgaaccaggccaccttcactggattcagcagtagtctccttcggcatttccca

SEQ ID NO: 44305 - DNA, 384 bp, Zea Mays
attcttggcagggttccttgaagtgtttcttgaacttaaaatgatagggcagccgaacgagttcattcttcttctcacctttaagcttcggcataccccactcccttagcgttgggaataccctgttggctaggtattcctgaactaaatccctagtaccaatatgttcagatacaactctaaattcgcccacagcatctgggcatggttcccccggcgtcatgttgcactgaggcctagtcaacccgaaggttagctcccagcgggctctgaactaacttctcctttttctcatcaatcttaacatagaaccattcagtcttccaaccggtcgaccaattagtgcggtagctaaccaccggtgtcttcatatccttgcggtac

SEQ ID NO: 44306 - DNA, 459 bp, Zea Mays
cttggatgcaggagtggttttatgtgaaaaacgatctagaccagagggaggatataaggggcatcattcaatgtcttatatggtcacggttcggcatcagaagaccttcagtcgcacttggaaatgatgtgcaagcgtgccagacggctttcaatactatatgcacctacatcagcatgagggatttgatccaagagcatattgcttacagagtatggccccttgcgagtggatgggaaatgccgaaggaggctgccgctggctccagccaaagtggcctgatctatctaaagtacgcattttggttcaaggatcggtttgacgagccgaatgatgattggttggatgctatagaggcaacaagtgatgagctgcttggagcctactcgagggcagaagacgaagctatgacagtcgccttcggtgctcgagggaaaaagagattgaatagggtttttt

SEQ ID NO: 44307 - DNA, 525 bp, Zea Mays
gttgttgcttatttagtataatttaatgtttataattggcccaagccatgattctatatttttcatacccttttcccctttctcttgaattttgtttatagggctcaattagggtttttattggggttgcaacattttgcccttttgaaaacccatttgttttgaacatgatacttttaagtataagcttagtggatcctttattcttaagtcaatttgatgctcattctcaatttggttcacataaaatgatggttcttgggttagcacttgagagaaaccctaggtgacactggggtgtcacaagaacaggattgggagaagtaaggaatttgtggtctctggtgagcgatttgaagcaatagctggtgcgttggattcgtgattacatggcgcaacagacccggccatcaatttataggattgttaagcgacggctgatgaatttgggcgagacacgctgcggccggagggcaaaaggagctctatgcttggaacatgtggctttcactgtggcagtcactc

SEQ ID NO: 44308 - DNA, 1204 bp, Zea Mays
tcatattaatgtttgtgaagagaggtgtggtgttcagatttgagtgactgatattttaaaaaataaaaaatctgacaagtgttaaaatagctcatgtggtacactcaatatacaaatgccgcacaagacacattgcccacaaacactgattcaactacaactaaaactctatttatttaaggaaagggtgcacgaatgctaaagctacagtcaattggagaaaagtaaacatatataaaacttagaaacacaaacttgaaattgtcagatgaacaaccacacgagtagttctctattttgtaaaccaactttgtttgtgtttcagagaggtgtggtgtctagatttgagcgctgagagaggtgtcttccatcttatactcgagcatcgcaagatctgggcgggcctagcgcgtagaatgggaagtactctagcatcggaaggtccaagcagggctagcgcgtagaatgggaagaatgagatggcagggtggtcctgcaaacttgctatgggatgcgggccgatggtggtcctgtgcgctggatggcgatgagtggattgggttgcgattccttccatggcggcgaggcgtggattgtgtttggggcgcggaggatatgggcggggcatccgcggtgcatgggaagaacgattgggcggggtggtcctgcgcgtcgtcggcgatgggattcctgcgtgctggattgctgcgaggggatgtgtttccttctgtggcagtgacgtgatttttccttccatagctgagacattgaccggtgaggggattgcgacgaggaccatgcagatgcaggggtagaggggagagggcgcgcatggggaagaagggagacactaacatgtgggccttatgcgccgtgaggatccagaacagtgcaccacggtctacgttaggttcttatagagtagtagagatatgtatgtctacaatatctatataaaagaaataaaaaaacaagataaaaaggggagtacgtccatgtaccttggcccactagtctcctaggctcccagccccaaatcgtgctcgcaggtacaagtgcacgcacagccaatcagccacaccctggccgcgggcccaccggtcagttgctgaaaacccacctccgctcagatttttctatagcagttgatgaggggcccacatgtcatattctcctctctccccacaaccgccttcatccgatc

SEQ ID NO: 44309 - DNA, 766 bp, Zea Mays
actatatataatgtttacataataaagttcaaatatgaatacaaggatgctatacaaccggatggtaaactgtccacttcaatgtgaactgataaatggtcagacttgacttgtggtattatagggtgctcttatgccgggctgtggacgtgtgctgcatgcgctgccgtctcacgctttgaccggagccttcagccttggacgtgtgctgcaagctgtagactgatctggccacactacctggtgttatctcttggcggtaacaatgtcagcgttgtctttttaatttacaatatttgtaaattaatgttatttactgaaaacggaagtgactacatcaagtagtgtgtgtatatatgtagtgcaaaaagaattagagtgctaacatactagtatcgaattttgtccatcagatccatcatctacggttgaacgtaatcctatcggtgtttagtactgacgtcacaatacggaatgtatcacgtagtgcttttgggaggatgacgaggtcgattgtagctcgatggttcatgcggggcatgacggaacacaatgaattatacatgtttgggccactcaagtgcgtaataccctacgtcctatgagttttgtgagagtgtattgctcggtgattaaagattatagagagttctggagatggaagatgactatgctactaaggtatgtcctcgttttcgtaggggatcccctccaccttattgtcgactgagagttacaacgcacgacctgatacacgatctccgtc

SEQ ID NO: 44310 - DNA, 1194 bp, Zea Mays
aaacatggaatatacaaataactacggtgatttgatacccggtgtcatcgctagcgattttcataatggatggtcaacctaatagtgagcgatcatgcgaataaaaggccatgttgggtggctaacaaggtggcaactaccaatctaatcttgcaaagctaatgtcaccttgtaccatctgctacatggattcccaaccctacaaagactatttggctgtcaagtgtcaaatgtactctccacgaatcattaaccagacaaggactctctaagatacatctccaagactctcaaggcgttgaaatctttgatcacatgggttttcatttctcctgtggttgaggttgagaggttaagggagagaatgagggaggggaagatgcatgtggacagtggactccatgctggattttgccaacgactcagtatgcatgtgagatggatgctaacctaagtgtactatgcagtttaataaagggcgtttgacatgtataattcaatcacattttatgatgatataaaaacatgaaggcactactagtgccccttttttcattctttttccaaagtaaaccaaggtagctcaggtctactggttaagtgagggagctgaggtttcattctggtgaccactagcggtgtcgacacggcgggatggccccacgtgggcgccagcggtgtcagtgacggagagctcctcagatctgaactccagtgggcggcgacccttcaccgcggaggttgacccccaaaccgccgtctcgcactctcccgcctccctataactaatctcctcctttccactccccgccgcgcgaaaccacacgcggcggccgcctcctccaccacgccgatggcgacccctcactcacccagacccagctgaacaactccctccaccaagcacacgcaagcaggagaaggagcaggagcaggagcaggagccgagggcggcgacagagaatagaggtagaggaaggcgatcgacgaggagctcggtctcacctgctagcggcggcgaccatggaccggatgctgctcgaccagctggccggcgaggccctgcgggaggtgctgcacgcggtgcagggcaccctgttctgccgctccaccgccgagcgcctgcgccggagcgtcgagccgctgctgccgctcgtccagggcctcggcccgcacagcacccagcgctccgcg

SEQ ID NO: 44311 - DNA, 835 bp, Zea Mays
gatttaggagggaccttggcactaagctccaagagcgcctcaacattgttacgaccaacaactataatgagctggtcaatttggtcatctcacaagaagactatgtcatggctcacagagtagagaagaagaggaaagcacttgtggcaggaccctctacacagcctcagcgtttcaggatattgtccaacatccagagaaggggaccacaacagcaacaaggaagatgggtgcttacaccaccacagtagcaagcacatagtcgtcctcaagctctagctcagaggaatgctaacaaccagcccccacaacagcagcagtaccgccagggaaatggcaacaagtgtttcacttgtgacaaaataggccactacgccaaggattgtcctcgaaaccagccaaagccagctcaaaatgtaaatcagaaccagggaaggaagcagaaagtgcaagggagaggcagggcagattgaacttcaccacattagctgaacttcccgagggagcgcccatcatgactggtacctttactgtttttaatcatcctaattttgttttatttggttctggcgcatcacataacttcatcagtccaaagtttagagtcaagtgctaactacctttttcccacacaaaaggggcaatcatgatcgcaacgccagggggcaaaattgcatctaaccaaattgttcggcacacacctataatgctgggaaccaaaatattcaaaaccgatctcataattctagggctagaaaatgtggacatcatcttgggaactgcttggatgacacaacaccaggttctgctagatgtcgtagcccgagcacttgaa

SEQ ID NO: 44312 - DNA, 387 bp, Zea Mays
gttttatatttggaaaaggaaagagtccaggcctcaacagaaccccagagattcccggcgcaatcaacgatctgcacggacgagttctcggagcagatatgcctggcaaggcggttacaacaacctactgattccgattgggctcggcacacagagatggagctgtcctcaggcccacccgccagcaactccatacgagacgtgagtgcagcgagcgtactgaagcatggccctacctgttattggattctaggcgagcgactgtccttacgactgggtgagatcagatacgtatgcgtgcatgagatttgcttgattacgtggtatgtagagttcagccgatgtcatttgtggctagagaataaacgaaagagaagaaaactatgg

SEQ ID NO: 44313 - DNA, 483 bp, Zea Mays
gtccttcaccggtgaagcaaaattggggtgtgtggttggccaatgatcttcgtagtgccctagggagtgagattggcgccgctgcagaaccaatcgggtcgcaaatccagtggatttcctcactggtgtgggcagaacgtggcaaactcgcccattgccgtgggtggagcgctcttctgtcgaatccccaatgatgtacctcttgagccttctgtaatcgctttctcattattttggaaccatcgtatgcgtgctgttgtgcctcactggtattccggctgtggaccgaccatggcgccgccgctagggaccggttcaccgtcgtgggcgcggtcggagggggagatggacctcgtccgctggatcctagccaacggtcgcgattagatagtaggtataccgcttcgagcgggggaaatcgtggccgttgatctctgcatcaacggattagattagatcttcaaataactcttcgacctttta

SEQ ID NO: 44314 - DNA, 519 bp, Zea Mays
agaactaatgattgtataaatacagaacaacaagtagggcttcttgccggctttgatctagtctccattcctttcgagttcaaagccaaaggtccctaactagattcctgaaatatggacttggagacttgggtttgggcttgagacggggggccgtagggtagctcgtagtagcacaagcacagttggccacctctctctagggggaacgccactgccaactgaagatggcagggttatggctagctataggtagagctgtgcaagtggagagacttaaaaagttacagagtttgctattaatttggggtattcgatcaaatcaggtggttgaagctagcacccactctcacctgatggctgctttgcagaaaaactactagaattaacagcatacgacgtacatatccagtacaccatctattcatatttcagtacaatcacgtatatgagaactaaacagacatgtttgagacaaaacctcaagttttttttctaatggtatgacacatataaaca

SEQ ID NO: 44315 - DNA, 553 bp, Zea Mays
attctagatcttttactgcacgaacctaattgtctccaaagtagtacagcctaaaagcacttgcatacaaataaagtacgttccaaataagtgtggctttttccaggttacaaaggagctaatatatcctcctacaatgtacttcactgataagcacacccatatattcagttgaaaaatattgaactaatagttactttacctcaacaaacaacataatcttcaatccgatattaaaaaagaaacaacaagaatataattcttcctcctttttgcaagtcatattcataaatttattgactatataagtacataacagaaaacaactcaattttctcctcctggactacataatgaccaccagtcaggtcaaaggaaaaactcgctacaacccaacttgatcttctctaaaaaggttaggctcctaaatatatataccttctttttgcacctacttggatattacctactgcacgcagaacaattaccttccaaattataatgctcctgaactccaataaactgttctaaacaatgctctgtccatttattt

SEQ ID NO: 44316 - DNA, 418 bp, Zea Mays
gatttgaactctggttatcatcaattgaggattcgtgaggaggatattgagaagaccgccttttgcaccaggtatgggcattatgagttcatagtcatgtcttttggcttaactaatgcccctgctgcctttacggaagcaatgaataggatgttgcatgaattcctagacgactttgtggtcgtgttcctggatgatattctgatttattcaaagaccaaggtcgagcatgagcagcatctccgtctcgttttgggtgccctaaggaagaatcaattctatggcaagttgaagaagtgtgccttttggctatccgaagtggctttcctggggcacgtgattaatcaacagggtattgcggttgatcccaagaatgttgcagctgtggtggagtggaagagaccctctagtgtctctg

SEQ ID NO: 44317 - DNA, 464 bp, Zea Mays
gttgtttgcaacagaatacttttgccatttgtttctcctcatcagagtctaagccaatagaaataagttcgcatttgtcataattaattttcatacccgacaacttttcaaataaaccaacggccaattaagattcatggctttctctaagttgttttccaagaaaaggagagtatcatcagcatattgtaaacggataatacctccttcacacaccctaggtagcagacccccaattaactaggcttccgacacattacctaaaatcttggtgaaaacatcagctataaggttgaacagtaggggagataaaggatcccctgtctcaggacttttccaggtctaaattttttactattctcatcattgaccctaacacataaggaacccctttcagagttttcattacctaaccgacctatttggagctaaagcccctagatctaagcatctcttctagaaac

SEQ ID NO: 44318 - DNA, 643 bp, Zea Mays
ccagcccgcacatgtgcatcaccatgctccacaacatgtcgccttttggtgcatcccgtaggaatctgtcggtgcaccgaatctcccggagccacaccaaattccacattctcgctggcaccttgggtccacacgttagagtcgtcttcctctaacttttgctcccatgcagagcctgcgcatgacgttgtgacacttcccacctctcttgagcgattcaaacctctatgccacgatgccctcctctgtataagtgtgtggcaccctacgccgctgctcaagcccactcctgccagttgctgccactagggtgtctctttattctttgcccacacatgtcgttgtctatttcatcgcgttcctgagccgatagccagctccaccgtcgaattctactgggtgagcaccaccttcggttcctacacctaaaacatgccttgttctctctttaactcgctagtcgtcttgaccatcgttgtctttgtgttccattcctccatcgctagagcttctctagtgtcaaagaaccctcggcgagtttcctcggtgcactttgcaccatgtgcgcacgctagttcattttctatgtcttcttaactcgtcgatgtcgtggcatcttctttgtatgcatagacccaacccc

SEQ ID NO: 44319 - DNA, 564 bp, Zea Mays
agcctatggatcgatatcggcctgctgtaccatagccttgtccactaggttgcggaggttttggtaccacgccctcgcttatggctcggggatggactggagcatcatggctgacgctaccatgttctatccgcggttgaggaagtattgcaccctatcactgcactcggcaagttggtcgtaaactttattcgctcgagaccattcatcctcgaggcgtttttgctcgatgtcactgtaaactcgattgagcttacgcatgagatcatcgagctcttcttgctgctgccggagtgtgttgtcgtgagcaaggatgcgcgcctggcgctagcgctgatactcctcctcctggatgagagactcattgtccccctgtcattgtcgttgtggtttcatggcggtattgtcacaaagcaagccctctccagcgcttcatcggtgttggatcgagttggccctggtcgagctgtggctcgaatcatccttgagcaagtcgagcatggatgttggctggtgaccgacgacgaccaccagagttgacggcgaggctcctgtcgccttatt

SEQ ID NO: 44320 - DNA, 542 bp, Zea Mays
gcgagatttgcaggggcgccatggacagggacgccatgggctgctggagaaatcagggcgccatgggagggaagaagagctcctgcgtcgaacagaaagcaagggggacgggggtgctgggcagaggaggtcggcaaccatgatagggccgatgagcagaggaaagcgcaggggccgacggccatgtggggggaagaaggtgccatggataagagctggaaaatctgggcaccatggttggagcatagggatccgcgcccatggagcttctcccactgcgccagggaagctagggaggagggagctcgcagggaggggctgttgcttgcttgaggaagaagaagggaggagggaagggcgccatggctggggcgcgtggaacagggcagctcgctggtggctgttgctgccgtgaagaagaagaggcagggaagaaagaaggtggcggctaggaaaaatggaggggtgggaatgcaaaaatgcctccacttgctaggagagggctcctatttatagaagggcactagggttagggttttctc

SEQ ID NO: 44321 - DNA, 459 bp, Zea Mays
aaagaagtcgattgaatagaatcagaaaaaagcatctaattgatagctcatcatcattgccaagcactatcttgtcttgaagcttgacaacatcaaattcttctttaccaacattgagatcacgtctcagttttgcagcagcatccacttcaccgtaccaatcagtaaactccttgcctcctctagcacatggcaaacccaaaatcagatgaaccgtatcttttgttatcttcagttccttgccagcccctgggcgtatggtcatgtcatgtggatccaatttatccatcaaccacctgatgagtgatatgctctctaaggcatcagttcgcaaatcaaatatactagaaaatcccaacctagcgacagcatcgcgctgccgatcgctcattatccaagatgatacaataacatcatagggaatgcagcggatattcaatttctggaagcataaatgaa

SEQ ID NO: 44322 - DNA, 1138 bp, Zea Mays
caaccacaatgttggtttcacaatctacattattatcgactagaatttgtgcctcacaaatctcagcatcggaaacttgttccactcgaggagccttctgtgagctatcttcatccctaaatcctaatgcatcataaaattgttcatctccagcaaaaacatcagcatcatataacatagcaggatccacgtccccttcagactagcttgattttttgttgcttggcaattttcccaataacttatcctacatttttaggcttctcacataacctagtttcaattcaaactgtacaaccaatgccaacaacttacttatccagtacatatgaaatgccttctgaatatccatgtttgtgacaatttgctgcagatatttgttttctcggttccaaaaccaaaatattggctcctgacaagtccccaaattgtcttgcttgcaagatcattcatcaaatgttgaactaagtagccaccagcaatattcatagaaagaacatgatttttatcctccaactcaactctattaccatcatcaagaatagctgtataggcaggaatagtggcgcgcaagcaaaacacatgttgtttcctacccaaaagttgagaaaatgtgtgaaaatcatattgcagtcagggagattgacatgaatgacaaaatcacattgggattcatatttgaacgtaccttatgggtgaggcactgtgatacacaacaattgacgacctattgccgaccatcctgtcgtcgaatatgtcgtcttcgtcgttgttgccgcttctgttgtccgtgtccgtcgcccatggaatcaacacccattcacccaacttgcacagccccttcatgccaccgctgccttggtcgaattgattagtggacgatgaggaccattctgtcctagggttatgttaactctcagtgttctgttttttataggaactctctgtgttctgttgggaaggggataagagacgagggcaacttagtattttgttttggtggaagccaaagggatacgagtacgcgagtattcgtgccgaaggggatacgaatcgtgcgttttctggcttcgtgcggtagtagtagtgttattaagtcattaaggcatgtacaacctagattttacgtttcagttct

SEQ ID NO: 44323 - DNA, 272 bp, Zea Mays
gatgagatgaagtctttttgtaggataatcaacctcattctagaagtgtccttgtataatgttggtacacttgaaatgttgataaaagtaatgcgagacttgagcggattgtagggtcatgagaatggagtctcgatggcatataccgcttgaattgattaaggaccgtccgttgttttgttgtgagcaaatttccgtgctaccacatatccttttatgggaaggatgagctaattaccttagttgatttgttcctatggacacagtcctag

SEQ ID NO: 44324 - DNA, 484 bp, Zea Mays
atttcacgcgtaacttgcaagggagaatggctggactcctcgtcgtcccctgtctcccgtggtggtccagggggacatgaacacatgggtatggacgtatggcgccacctgggacgaaatcttgaggaatatcgtggagttgtcgctcttcattgattgattgaatatgttgcgtcgtcgtgggagagggagggcattcagtttgtggcaataaatggatgccaacatgtctgttggcctagcgtctgcgacactgctggcgttgttcgatccttgcaaggctttgcacaactctcttatattgcatttgcttggtgtagtctccacgtagttctgacacaacacagcaccgcttgcctgcttcccttgggatacgccgtcgtcaggcaaattgcggtgtctatgaggatcccattgccctgcacatttcatcactacttggcattttggagttccatagttcatgtttagcagtggcaggatc

SEQ ID NO: 44325 - DNA, 362 bp, Zea Mays
gagaacagcagggggctcaggataataatccgcagactcaggacatagtgccagaggatggcgggttcattctaagaaattacaggggctcttaagtaagatcgacgcagtgaaggggtatggaacgcctgtgaccgtccgatctaaggtgaacgatccagattaaatcccgagccccaccaaacggaatgtagcgcggacccttggattaggattcaacggtgtggatgtttatgtgcccagatctaatcgcacccaatggatctaaggcctacggtttggatttagtatcgcgagtgtgtgatggttgctttgatctgcaccatcaatccatagatcaacgatctagggtagcttctaat

SEQ ID NO: 44326 - DNA, 503 bp, Zea Mays
taaattcaagaaacatttcaaagtaccttgccaagaatggttagacacaactaatgattgcagcctttgacactcgtccaaagcgaaggttaaaccgggtaatggatgctctgaactttgagtatcctgactatgagtgactggaccgaggcgccgaaggacagaagagaaagagagttgtcggcatcctgaataaagaagatgttaaattggtgaaagatgatgaggaaaaactgaaaaagagaaagctgaggcctgagccgaagacagatgcttcgaagaaaagaaaggttgcggctccgaagcagaaggcaactgatatagaagaagaaactgctgcaacaccttctgccaccgacgtggaggaaatcttaaaggtaatgactaaatctttgcctatcaagataagtccactagggccgcatacgaagctttttcagaaggaaaatgagccctcgataacgaagaaggcagctgggccaaaaaacgaagaattgttacag

SEQ ID NO: 44327 - DNA, 724 bp, Zea Mays
gaaactaccccagtgccgaagaaggatgaagttgtggttttcaagagctttttcagagcggggctgcgatttccgctgaatgagatgataagggaagtcctaaaaaatttcgaaatataccttcatcagctgactcttaacgctatcgttaggctcatcgtctttatctagccccttcgaagccaagggatgaacctagatgccgaagctttctgccgcatgcatgatttgcactaccagacaaaggccagggcagttggtcttcacgaaaattttggttgttacaattttgtgtatcgcaaggatacaaaggcaacagtcctcagctaccgcacaaagtggccaaccggttggaaaaatgaatggttttatatgaaggctgatgagaaaaacagagagaagctaatgaccatggtcatgagcccgctgtctttaaacttcggaatgaccaggcccctatgcaacatgcaattgggatcaccatttcagttggccgaagtagagttcagagtggtagctgagcaaatcagtactagggatctggtgcaggaatatctggccaaccggacgtatccaacgtcaagtggctggggaatgccgaagatgaaagaaacgaagaagaagcatgaatttgttcgactagcttatcgtttcaagtttgaaaaacaattcaaaaagccgtgcaaagaatggatggacatgatcgagacaatgtgcaatgaaa

SEQ ID NO: 44328 - DNA, 639 bp, Zea Mays
taggaggggcgccactaccaatgccctagcaggagcagcgtcagaagagtcctcggccagcaaatcaagcatagcgcttatctctgcatcactagggttcaggggcacctcaaagtggacttgtcgttcatcatcaggaatctccccgagcgaggcaaccaagacactaacttcttcagtagagggtcgcactctaagacccaagctgccatcagtgacaggtggattcgacacaaaaaaggtgaaggctttgggacgaggcaggttccaggccgagtacgccactggagcaccaacatttgacactttacccctaaggatcatctctagtcgactcaccaagtctgcagaaggaattcttctgttagtaacccgagttgagtcggctagccctcgatacagataagctgggtaggccctgtctttcaatggctgaatattcttgaaaacaaaatcagtaaccacagcttcagcagtcagacccctctctttcagcagtccaatttcagctagcaacacacctgcctcagctacctcctgatctgtgggagactcggtccagtttggggtgcgaacgtccggctgtcttcctgaccaggaggggagagaattcccataattctcaactatgaaccactc

SEQ ID NO: 44329 - DNA, 366 bp, Zea Mays
gtgcgcttcactaaaaattgtagacaagactataaagactgtttttttgcgaccctctctataagacacaataaactatgccctcactatgatttgaattgcctatatatcgacaggcactaatgagtttctattaacaaacaacaatctgaggttgaattgaaagcatcaagattgacatccgtagatacatttatttgatgaacacaaaatgtcaatattagcttgcattagtcacacaataataacggtatttctgaagtcacggcattcatttatatgtttattaggaactacaaaatcacatcatcattatgaagtagaaaagctaacggtctatatgctaacatgcccttttgattcatg

SEQ ID NO: 44330 - DNA, 301 bp, Zea Mays
ggtagcacggtttggcacttcgattgtctcggttttctcctgttccgctattaccatcaatttcggcacttcagtcgattctcccttggcttcagcaagagcgaggtagtttggctcaacagcagaagaaggcccttcatcaagcttcggcactttggtcgttcaatatacctgggccgataagtcaaaactttaaccttttttcccttcggcatggtagaaatagacgaagcagcagcctttcttgtctttccctgctttcgtgagggataacaatagtcgtggtacacaaaaccaatta

SEQ ID NO: 44331 - DNA, 458 bp, Zea Mays
gccattttgaagatgattccgtggatgtttgagcaaggttaccacagtcggtttatagccggatgatagggctacaagtttgctacaaacggattggtaagttcttacgtgaaaattcaagattttggcgtcacaaatctatctgtcagactgactgaagaagatcgtgatggtatagtaaccaaaaaaatcagtagattcagtgaactggccgccggtgacccttcgccgggattagtgctgctcgccacgattcgtgtgtctggtctgtggattgagttcgccgatgaaaagatctcgtcgcggatgggttcaagttactgtggcctcgctgttcctcaatcacttgcaccggcgacgtggctttacggccgtcaccggagttggcgtctttcaccgcggttgtgccacgccccaggcctttaaccacgtcgcttctagctgcaccagctcaccga

SEQ ID NO: 44332 - DNA, 308 bp, Zea Mays
atagtgtccctactttggggtcgtaatgtcgtcggtgggaccagactcatccttccatcttatggacatgattacccttagtcgtagttagtcccttgttcttacggaaggcttcgagccccgatgggttcggggctcgatcgtttatattacgtgaagccaaatacctagtttcctaggggctagtagagggcctgcgtgactaattattgttgagtgccttgagggacaatggtctcgacaccaaactccatgagaaccccgaggcacgaacgaccctgaggacttggattatgggcgccctaggg

SEQ ID NO: 44333 - DNA, 489 bp, Zea Mays
gccgacgttgtcgtcagtcactcggctgttacctctaaaacgccgatgttgccatcagtcactcggttgttacctctataacgctgatatcaccagtaaccacttggtcgttaattctaaaaacaccgatgtggccccgccatcattcggacgctacttcagaagcgccaatgttgtcaataataactcggtcgtcacccctaaaagcgacaatgtgacctcgagtgactcggccactacttctgaggcaccaacatcgcaggtaaagcgaacggaataatgactcgggaactccaagttactacccaagcatagcagacagagaacatcatggacaataaatattgcaacaatcgtcaactgaccaggaggcaaagtaattaacacaggaggagacgaaatcattcttcataaagggaagctacataacttgcaaatcaactcgttatgaattgatgctttccctactactactacattacattccac

SEQ ID NO: 44334 - DNA, 417 bp, Zea Mays
ctcggggaaaccatccccacttctcaacctgggctcataattcttgcttaatttcttgaattcagcgtttcttggtggtgcttgattattgccgtctgatattgcacagtcctgagtttctagttgcttcgtcagcaaccggtagaggtgtcttttttgcgggatgatagaattgagcttgattgcggtggagcccttttggatttgcagccgattcttgaatcttttcttttctctctctccttggatgcctgcatgaaagccatgctcttaaagcacggttccttttcttttcttcctatcagtttactcatttcttttctggaggtggctcttgtgttggattactcccttaattactctcttatatactttatatgacaaaaatcttagctccttttttttatccaatccgag

SEQ ID NO: 44335 - DNA, 465 bp, Zea Mays
gatcggacctgttttttttctcgtgaacgttgatccttagcattttgggtccatttggttcagagaatctgaattcttggaaaatttgtctccggggagaatttgaatatcgtgggcacttatgtgcaagagaagatgaggggtttatagggtttaagatctaggaggtgacgtatttctctcatcatgatttggacgattttcgccaaagtcacgaaggtcgactgagaaccgaaacatttagctgctaaaatctgattctgacggccaggattcgattttaagcaaaaacaagcaccctctttatcttgcatgctgcaggtccatccataggccatacatgttaaggttttgaggagcatgacaattaatcattgaggtccttctcttttgataactctaaaaaatccatattgatcacctataaagattcctaaaaagaaccctaattaaagtaatatggtc

SEQ ID NO: 44336 - DNA, 616 bp, Zea Mays
atagagtcaagcagttaggaggctgcggccaggcagccgacctatttatgtaatggaaagttatgaaataaagcaagcaatgaattatctccaaaccgtatttcttcccttctaatccggtctccctccttgctgcccaacatagatcggcacccagccgatcgtccacgccacctgcaaagtcaggagccggcgcctgcgccattgccacttcccccttaccaccagccacataacagatgtatataccataacaagttttcccctggcatttcagtagatggaatttgtaagtcataagcactagggtggtatcaatctttaactaataaaccacaatttggctatagtttacattatggcacaacaggtagaggtaaggtgtttgcatatctaagcatcgcctagacttcaaataagtttacctgtaatgcaatcattaatattattaatatataactaaacactcctgaactatcatattttttaggttgctataaggattcatgtctctttcactgcaatctgctccattgtctggtctatcccctcgaccctgcatgatgaagtattcaacgtcttcatcctcctttgttgttggcatttgtgaaaaaca

SEQ ID NO: 44337 - DNA, 594 bp, Zea Mays
cccagaactagctcaaccattgcgagcagttcttccgtgggcaatgtacgctcgccttggatcggatctggcttgcttcgtaccacctcgcagacctagcccggacatggtactatgccctggagcaagatgagggcatgtcattgtgggagtagttcaaggatctttgccatttgcggttcgacctagccattcccagtcattgtctcgccgaactcgcgaggctgcccatccacaccacgatccagggctgtcaggagcacttcaacacactagtgtgcacatgctgaatcttcttccaatctagaaggctgtcctcttcgccgggggtcttccaaagcacattttggttgatgttgagctctaggaaccccaggacctgtagacatacatgcatctggcgcgggcctaagagcgccacgtcgcagccaccataccaaccctagtgtagtgggtgtttcggcctccctagcgcttgctgttggtgctacctttcccgtcgtgtgcaactgttggtcgtgcctgtgttgctcgcaccacctctaatagcggcactacctgctcctagggatgaaaacgagtatccgaattgtt

SEQ ID NO: 44338 - DNA, 445 bp, Zea Mays
ggaccgtgtacccatatgcctagctactactgtgctccctttgtacgtagtatgcagttatgcactaccgacatgcatgcctaattgcctagtacgtacgtacacagtgcatgtcgtaggagcagccagcaggagggagctcagctgagtgccaataatgcatcagcaggagcataatgcatgtgttcttcgtcgtgcatgcgattagcaggctagctgcagcagctgctgatgactggtggcacggggaggctgcatatgcaatccgtgacccattttgccttgtcgtcgtcgtagtaacacacaatataatgcatgcatatagtatatatatagagagagatagaacgacaagccaaaacccagcgggtgatgtgtgtggtggtggtggtgctactgctacgtcgtccaaaaccaaaaccatgccctcaccttttcagtcccc

SEQ ID NO: 44339 - DNA, 464 bp, Zea Mays
cggctcttcaccgggccggaacgccactgctgatcagtgtcggcgccaggaactctggtaagaaccactcctagctgtttctacttcatttggttgtgccggtcgtgttcctgggctatggttttaagtctggcaacgtgcgacttggtcgccggtgttagtggttgccctgggtggggacaacatcatcgccggcgggacgcgctgttgacggactcagcgccgctggtgcgtgtaggtagaagaagatcccctgaccgtcgattcagtgtcgaaccgatcggattggaagtaacgtaacgatgtggtcaagtatagcgtgtgccgtcgattctgaaatccatggttcagattagatgacacttaccctttcgccattttaaatctgaaccgtagagttccgatcggagagttgagagcttatgtggactcggggggctattgaccgttggattagtatccag

SEQ ID NO: 44340 - DNA, 725 bp, Zea Mays
aataactcaaaataactttgggtcaattttagagatatagatcattgtaagattgatggcttgagttaatatgaattgaattgatcctctcaagcacatccaaagcttcatatcatctcctttccctgcaaagcttgtcatgcatattttggtccccatctcttgatgggtgcatcaaggttagtcaacaaagatctaggaacccaaatgtcctttgtgctagcacttggtaagctcattacctttctagcacaagttgcctttttggattgcctagttacatatgaatcaattgacaagttgggggcgggatagttaccaataggacaatccttagattgatgtcctttctttcggcatatgtagcaaaggtgatcttcatgccttgaagatttcttatttccttatttcttgcttgctacatggttagtaaatattttcttttctaaaactatgcctttttgttttacatagggacatgaattaactaaatgtcccttcttagagcatttaaaacaatgtttatcatccttattaataatcaagccattctctttaatatagggacatgacctaatcaagtgccctttttcaaagcattcactacacttcttacttttattagtgtgaagtgtgtcttgatcattaccttggatgttaccttgtatggaggcatggttgaggcttttggcagaggtattgattttcttcttttgttccttcct

SEQ ID NO: 44341 - DNA, 956 bp, Zea Mays
ccaccacctactcggtgaaatgccataaccacttatttaacctcaaaaagctccaaattttacccatgtattccccaagcacctaatactccccctactccatattctctctagtccaagtcaaaaaagtcaccacatctctatttgttgcttattcgcatgagttacgtacatgtcttccatataacctcacatgcctctaaatccaactaaaattcatgtcacatgtctctcttatgactcatttgaccttcataatattaaagtgactgaccccttatttaaacctctgtagcactgtcataagccaaaacctcaaatccataattccataccaattcatgtgccaaagccccttgttccaaaactccttatatcctctcttgtgtatttgtgctttagttcacatttcatatgcttatgattatgtgactaacatgtgctcacctcttatgtcatttcagtgtgactgtgtgcccgctcgcgtgactcctcccttgcttggtttttcttgagagacgtgccccaggtagcaaatcttttctcactctcttctcatctactgctttgttgctctcgcttatctactctcattctcatgcagcgtgtcagtgatcagtggtcagtttctactgtcaggatggcgaggaccaagaatcaccccagcaggaggaagcgatgatcaggatccccatcgcccattcagacaggacagagcaaggaggtcgactttgagtagtagggagggaaaaagaaaaggaagttggatagagctactagagcagcagtagcaacaacaacaattgagagagtagagcagggagagtagatgaggattggattagatcagataaccttccatgtccgccgcgtctcatctcgggcacgctccactccagctaggtttgacccctatgctctagccactactaccacttcacctttgtcacacccgg

SEQ ID NO: 44342 - DNA, 375 bp, Zea Mays
aaacattcaaaccaaaatattcagtagtcatcaaatagcactattattactcatacgacctgtattttgaaatgactagggataaaaaatagaagccatttcgtaccacgataatgtccaacgattcgacgccttaatccaacaaggatctacatatacattatatggagtgacatttagtggaaaccggggggcgtggtaatttcgaaattttgggcatagcctggaattgacgttggcaacccatactattgtggagctattccacgtgcctattcagttcccgccgtatccaaaacatcttatgccatttcatgaggtcatccaacaacctcataagaggtttgtaggtaacaatccttctttctatatgaa

SEQ ID NO: 44343 - DNA, 750 bp, Zea Mays
gatcatttggttcttatttcttagttgagcgaagaatttttgaagatcatcctcatcttcattatcactttcatgttcctcctcatcctcactttcactttcactatcactcccattagtgacaaagcacatgtgagaaatggatttgaaagacgaaccttgtgaagaggtggattcgtcgtttggtctccaacgttcattttcttcttcttcaatcttgttctttacctcatcttccttcattttgaggaacatcctttcggcgattctcatggcaaggtctattgccataggatcaacatctacaccaaagaatgaagttgaagcaacctcaacttcttcatgcttagaaacactttcctttcttagttcccccgacatgatcttttcctcacgcggttaagcgttagaacgaggattaggctctgataccaattgaaagttgcctacaggggggcgaataggcaagcggaaaattttctaacaaaaactagaaacagactaggtaaaaccggtgtcaaaaccggttcaaccagtttgcacgagtccaactaaacaatgagatatagaactgaaatgatatcgaaacccacctagttaacttttggaaatggtatggcctagatgatccatagggttcagagtagtagatccgagaagggcacttctcaaaatccacacaccaaaaagatatgaacaatacttccacggaatagtgagaggacaaagaacacaaacaaacacaatgag

SEQ ID NO: 44344 - DNA, 576 bp, Zea Mays
gcctaatgaaacccttagccagcagatcatctaattgccgcttcaattcaacctgctcctttggagccattcgatacggggccttatgaataggctacgtacacggaatcagcttgatttcaaaagctgcatcgcaccctagaggaatgcctggaagctctgctggaaacacgtcggcatagtcacacaccacctggatgtcctgcacccgcaaggctgcctcaccccctaccaccatggagaaaaagattcccgacttccttgaccggcaatccggaagcaattgtgccaacaaggataacgtgaactttggggaatttcccaagaataccacctccctacccgacggcgcctgcaataacactgtcttccaaaaacaggatataactgtgtgatactgagataaccaatccatacccaagataacatcgaatgcccccaaataaatcacaacaagattggccgaaaagacctcgtcagcaagaatgacggaacacccctgacaaatcgaacaactactaatggagccattagcagaactaaccaaaattgggtgacccaacctctgcaccgaaa

SEQ ID NO: 44345 - DNA, 755 bp, Zea Mays
ctcgtccaacagctaaagatccgatggtgttcagtctggcagcagaaagcatgtttgtggttgaagaatttatggatgtatttctagaggaattacagggatgtcccctgtcggggaaatgatccccggtcccaaggtcccgccagtcaaagagtgcacagaggaaagagcccctggtcattggggctcgtaagttagttgggagaagcggatgcgtcaaccctaaaagaacatgcccccgtcgaaccccgccagcaccgagcccggggtcgggcgggcgaaacctgataggggaggtcgagcgtgtcagaagggaaccactcgagtggatcacacgcccggccccagactgacctgtcataaataaccgactgcatttaaccacggcgggcaccaagccacagaacgaacaccaatctgcttcctactcatgacctacgaaccccttgggtcgcatagcactcatgacctacgagcacactagactgcggcacataaatggcacacgcatcacttggcatgcggcgcactcatggcctatcggactaggcctaagtgcatgggcctctggtaggatgctacaagacggaccgtcccgacccttaggctacagaggataggggttggcataacaaaaaaaatggcggcgcctagggccctcgtagccctgcgtcgtccgccacaataaatacgagatagccaggcgaccccgggccccatgagtacacgtggctttaccccgggtaaaatgctgg

SEQ ID NO: 44346 - DNA, 495 bp, Zea Mays
attggggacccgatatctgaatggggatgtgtataagacgaattctatacccctaatatgtatgagtatgagtatgattatgaggatagatatagctttatgaggatgggtatgagatgtctaaacccgatgatctttatgagaataggtatgagatgtctaaactcgatgagaattcctcattgatatctctaatctcagacagagtaggagtgacatttctaggccggagggctaattctcgaactggtcatgccgcagaccctccctacaattaagataaagcccctagatgacacagcccctacgcgccacttactctcaggaacaattaagataaacttctgtccatcgtacttatttgcaatggatgaaattatagttactttcactttgttagcaacattcattctccatattttcttacagtcaaaactgcaggtagccggatatgataaatttcgtaatagtgacatttaaggtattacaatttca

SEQ ID NO: 44347 - DNA, 966 bp, Zea Mays
  misc_feature (921)..(966): n is a, c, g, or t
ggcaagaggtaacacaaatatcccatcctctagtgatgatggtagtgatagtagtgatgatgaagataagccctctctagatgaacttgtgcatgccataattttttttgaggagctgtaaaacatatcccctagtgactcagttgtgtgtttgcttgtgtgctgtcagccatgcagcatagcagctccagtctcctctccctgtgtcttgccttaggtggtagccatgtagaagggtagggagatgtattagtgtgagtttggccctgtgttaagcccagtgaaaacccagaagagctccaattcttgtgagcacttgccatggttgtgtatggcataaactaaactccatgtgttcctgtcgatcctttgacccgctcaccgtgccacacttcccccttacatctcggttaggtcctcaaaccttcctcaaccctcttgttccactgtggtagcctgaacgcgaagggaactttggtagtggtggccaccgtagcaattgttctcggttcaccatagctagcttcctctagtgggtaacactcttggttagctcatgttttaagatccctaagtgaacttgatgctcaccgatctgttcttttgaacactatcgtgccaggctcgtcgaaacatcaccgcacaaccgctgaacaccaccgtgtgggtgtcctcgcgtcgaccggctaaaccaatggcccccaagctaaccaatgtaagaatcacatgtgagatgtgttgtgatgctagccatggcctcggattgaacgctactgcgttgtgggtcaaacccgacctcgctggagtccgtgatgccgttgtcactgtggttagtgacgttgtagagtccctcagcccgattggtctaaggagggtgaagagttagtctcaggggttatgttttgtgggctcggcttcacnnnnnnnnnnnnnnnnnnnnnnnnnnnnnnnnnnnnnnnnnnnnnn

SEQ ID NO: 44348 - DNA, 359 bp, Zea Mays
aagatattgatgttgtaggaaataaagaattgtcctatgcgaaaaaatcaaggcctacaacatggaggaaagccaaaggatggtaacaattatgcttttaagtgcaagtatcttaaattatcatttctcatgtgtcttgtgtagtcacatagaaaaggaagcacttcaaatgtctttaaaattatgtcacctttctttgaagaaattcctctcatatggtagattgcatattcatcatctctatactatggcaatctacatgctttaaattattgtaagcacctcatggcatgttttacactaattatcctattatagccatgttctagatatagagagatattccaagttcttaaaag

SEQ ID NO: 44349 - DNA, 402 bp, Zea Mays
cagaaacaaatgtaagagacaacttaattaatgacccataagcaagataataaaaaacacgagcttagacctgagaagataataaaaaagaaaaaaatacttggcacttggaaggacaccccatgtcaacttttgcaacttataagttataaccacacgagcttagacctgagaagatactaaaaacaccaacaataattacatgtaagcagatagcattagagcatcttttgtccatgaaactaacgctgacattaataactacattcagcagtctgattgcaaagacacatttggaataaaaggaataagattgtaaagctgaaaagactacatatagatagacattgtaaacaggtgtgtaagcaaacccctttggatgccacaaacaaataatcgaat

SEQ ID NO: 44350 - DNA, 280 bp, Zea Mays
gaacctgagagcttccttgcaaactgggcatgggaacttaccgtgaacacaccaggcgcagaatagcccatacgccggtaagtcatgcatggagtattggtagtaaacatgcattctgaagtttgtcttcgtagctcggtcatacgtccataccccttcctcccaggcacgtaccaattcatcgatcaaaggctccatgtacacgcccattttattccccgggtgtccgggaattatcaatgacacgaatatattctgcctttgaaagcacacaccaggg

SEQ ID NO: 44351 - DNA, 705 bp, Zea Mays
aaaagtattaccttcgaagctaagagggaatcttcggcagattcaacaatctctgtctttgaaaccccagcagtgggcagtatagcagctttctccaaaaaaatacgacttcgtccggtgagttacaactttcattttctttggtcttggcacggtagagggggtcgttgatgcaattttccttttcgtcccctacttccaagccgaaaagcagtagttaggatagacaaaaccaataacatcaaatactctatttagccttttcttgccacgggcaccaaaagcaatgttcatggcttcatcttcagcttttgtgtatgcccccaacaaatcatcagtagtcatctcaatggcctcaagccattcgtcatctggctcccaagctggcttctgtagcggtatgtatacttcaaataactagaccaccttcgcttgaactgtcagtggtctccttcatcattttccattcattaacaagggtccataccttaaaagctatgtgctcttggaccaagtctctggtgctaatgtaactgcacacagtgttgaacgccaccaggcaggcatgagccttatcactgttcacaatcgagggccttcgaatgccgaagcgtgattgtattagacgctgaattatatctttcacatcctccctctcaatcaaatcattcttaacataaaaccattgcctcatccaagatcctg

SEQ ID NO: 44352 - DNA, 377 bp, Zea Mays
aggattctgaagatccatcatgagatcctatgaggattcatatctttgatttataaatatgcaacatataaatctcgtaccgaataatacattcctgacgaatgaacactatcctatgtagagagaatatctcctagatgagattatagctccttgatggaacctttctagaagaaataaagtttgagttaaacaccaaagtttgatagtccctataaagggataaagacccatacagacccgaaaaggaataagatgaggtaccaaaggacttgaagttcaccggataagcacatgtgcattccatgagttttactcatagtaatttccactagatgtggaattatgatatcctctaaagccctgatggcagaaac

SEQ ID NO: 44353 - DNA, 434 bp, Zea Mays
agagctggtctggccacgaatctaggcggcggatctcatcggtgtaacctgtaccagccataccatgacggtagagctcaatccgaccgcacagggaggtttactgggtggcagggagtgtgcgtgtgaaaggaatcaaagaatggatcagtgattacctggtccacgtgctctggtaggtgaaggaagtccgacgaggtgttctggcttctctggcgaggtaccgtttggtccgagtggctgggaaacctttctagcctctagggaagctggctaggaaactagattggacggggttgggctagagtggtcgatctacggcggtcgtcgcatcaacaatcttgcggggtgtcgtgctcggtgttcaggcaattaccagcgctcagtcgtcggtggaagggtatgggcatgtgggagggcaaggccaagggatg

SEQ ID NO: 44354 - DNA, 367 bp, Zea Mays
aatcacccatctgcctgcctgctgctaaaaacccctgctctgattgtgagaaacaattcagaacctctgagcctgagcggatggtgctgccattggtgcctttctcttcttctctgcccagtgagctacaatgcaatcttcctgggagatggccatgttgaccaactcattgaagctatcagcccggacagtgttgagtcgttcccgcagcttggtattaagacccctacggaagcgatctctcttcttttcatcagaatcagcatggtaccctgcatactagcataagtcgttgaaggcttgcatactgcagtaccgtgcgggttccttgattaagggccacaaattcattcaacttccgatcaag

SEQ ID NO: 44355 - DNA, 357 bp, Zea Mays
cggcaggctctgcttcagtgggcactgagggccctgcttcaagtttagcatgagctatagtagctttggtagtctcctttgcaggagcaggagttgcccttgtggactctaggacagcgtccagcacactagccatcctcctcttgggagttattgtgggagctttcgataccttcgacaattctggcttcattggtaggctcaagatttttggcagtcttgctgtttcccctagctctggctcttcggtcgccttttctttggcctcggcagtatgtttcggcgctttggccgaatcggttgcaggaacctttggcacttcagccggttcttcctcgaagtcggcaggagcaggct

SEQ ID NO: 44356 - DNA, 326 bp, Zea Mays
gggagggccgttcgggcatcttgtcggcggtgctccaccgtgggagtcacgagcgccgccgtggttggcatatgccgtcatggggatgaagggaatggctgctcgatctgtattgtgcggtgtagattagacagccggataactcttcgtcattgctgatcgtggctatcgatcgtagtatccacgtgtgagatggggttcggacttcatagaattcgggccgtcggatctcgattcagtggtgactatcacgtactgatttactggtgatgggatctaatctgatccgttggtttaagatctaggggccgaaaaggaagcacgtg

SEQ ID NO: 44357 - DNA, 578 bp, Zea Mays
tcgacatatttgtctcccacatttaataatgatctccgttatttcccaaaacgaaagattcattgttccatattcccagcacaatgatattgcgtgtattgctaggaatttcatcatcaagatgaacctctcagtgaggcaaatcaccagcagggtgaattaatcggagcagagttattatagaccacgtgaatctgcaatcagaacatatactttgactaaggccaatggatcatgttcgcaggcgtccccaagaatagatcaaatgccaataagtcaaatgtggatatgatattaatcccaggtatatccacatctacatcaggtagaagcattcaaaccaatatggttactcctcaacgatttctggcaaactccatatacacaggagtacacaccgaacggcaggttcagtttggcttttgtgcgtttaatagaatattgaggcattacactatatggacattcctccccctaatgcgagatgttctaaaagcatacagatataatccccaaccataatcatctagtttgtggccaatgtatgctattgtggtgatttatttgggaaatcttac

SEQ ID NO: 44358 - DNA, 558 bp, Zea Mays
tacacacgcgcctcttttcgcgtggttactcaaccttttcttgctctcggcgtttgttgttgatgatgtatcggggcgtcgtggatatccctgaggcggtcttgcaggggaacgtgtgtcctcgtggattgggagggttgtgccccctgctccaggacgaggtcgtgcgtgggctatagttgtttatcgatcaatcttggcctattgtaccccaactttctccactatattgtgtagttttcgatacatcgcccttacctatggttcgtctagctgagggatcgatcgaagcatcgtagctgtcgtgaccatgttttgcatggggttgaggaagtattgtgccccgtctcatctttggttatgaatgataaaattgatatgtgctctatgttttttgtttggagatttggtcatgtgaactaattgatgatgtgatgtatgtgaattatgaaaggtgtttgtgaattatgaatggtgtttgtgatgtatgtgaatggatatatatattatgtgcttattttttgtgaatggggtgagaattagcaaaatgggctgctg

SEQ ID NO: 44359 - DNA, 476 bp, Zea Mays
gatgaagtgcctcaccttcacgcgttgggtgttcgacgagatcaactgtctcgatgcggcctcctggaactcccttcttgccacttacaatgagcgaaggcgagatctggaggaagctgaacgggaggaggatgaaccaggaaatcaggaaatgtgtttggacagcgagatgtgcggtggcgagtagaggattggaggcacgatgatgaaccatgggtgtggtgtgaggcggcatacggggctgcaggaggaggaagagagcggacgagcggagaaggagacgcactcgtgcttggagaaagggagtgatgcacatggagggagcgaacacatgagagagggagtagtttgccggtgctgtgatgggtggcggtggtggcgacagcgccgaggacggggtgcagggtgcgagcgccaatctcggatgggggcgaggtggcggcaccgttctcgaatgggggcggggtggcggcccc

SEQ ID NO: 44360 - DNA, 1775 bp, Zea Mays
atgaaaggattatggtgacccgtctataaagggcagacgtccttcagtcggaggtcacaggcgaacatcaactgactcatcctcttcttctcaattccctgcaccgccgcttctctgccctaccatcctaaacgacactttaatttttgccttttgtttatttggttatcaaatatcacaactagactgtcacatcaactaggagtaatggacaacgtgcgagatctctggatggttgcacgtagagatattcccggggctggttcctagaatttagcagatcgaatcaagggattatggcgacccgtctataaagggcagacgtccttcagtcggaggtcacaggcgaatagcaaatgactcatcctcttcttctcaattacctgcaccgccgcttctccgccctgccatcctaaacgtcactttaatttttgccttttgtttatttggttatcaaatatcacacctagattgtcacatcaactaggagtaatggacaacgtgcgagatctccggacggttgcacgtagagatattccaggggccgattcctagaatttagcagatcgaatcaagggattatggtgagctgtatataaagggcagacgtccttcagtcggaggtcacaggcgaacaacaactgactcatcctcttcttctcaattccctgcactgccgcttctctgccctgccatcctaaacgacactttaacttttgccttttgtttatttggttatcaaatatcacacctagactgtcacatcaactaggagtaatggacaacgtgcgagatctccgaacggttgcacgtagagatattccaggggccggttcctagaatttagcatatcgaatcaagggattatggcgatccgtctataaaggacaggcgtccttcagtcgaaggtcacaagcgaacagcaactgactcatcctcttcttctcaattccctgcaccgccacttctctgccctgccatcctaaacgacactttaatttttgccttttatttatttggttatcaaatatcacacctagactgtcacatcaactaggaataatggacaacgtgcgagctctccggacggttgcacgtagagatattccaggggctggttcctagaatttagcagatcgaatcaagggattatggtgacgcgtctataaagtcagacgtccttcagtcggaggtcacaggcgaacagcaactgactcatcctcttgttctcaattccctgcaccgccgcttctctaccctaccatcctaaacgacactttaattttggccttttgtttatttggttatcaaacatcacacctagactgtcacatcaactaggagtaatggacaatgtgtgagatctccggacggttgcacgtagagatatttcaggggccggttcctaaaatttagcatatcaaatcaagggattatggtgacccatctataaagggcagacgcccttcagtcgcaggtcataggcgaacatcaactgactcattctcttcttctcaattccctgcaccgccgcttctctgccctgccatcctaaacgacactttaatttttgccttttgtttatttggttatcaaatatcacacctagactgtcacatcaactaggagtaatggacaacgtgcgagatctccggacagttgcacatagagatattccaggggccggttcctagaatttagcagatcgaatcaagggattatggcgacccatctataaagggcagacgtccttcagtcggaggtcacaggcgaac

SEQ ID NO: 44361 - DNA, 374 bp, Zea Mays
attttctggactgggcaccaaaaatagagaagcacgggggtcacggtgtaaaattcctaagactcagtgaacagccgcataggacggcgggttgaatagctaaaagcatagggtctctactgcaaaatgcgcaggccgaaagggtatcggggaatcctatccgcccgatcatccatctatggccccgattagatcatcaagccccaggctggtccgcgacgtggcccgctagatcgggaatcaacggccagatttttaaatacacccgatccgttcacttagcgatcgacggctaggatcgaaccccgtcgagtgtgtacaccagttttaatctcggccgatcacatccgaaccaacggccaggagatcaccac

SEQ ID NO: 44362 - DNA, 441 bp, Zea Mays
tttagatatgtgttagttcatgaacttgaataacataaagataatgcttaattttcactgagagaggtcccaatgcatgatcatgatcgaccacaacgtaccaaaatgcggtgtacactgtacacacagggtgattaactgatcgagctgatcgaggttaggatctcctagcctctatttgcttgatagagccgttattagcgcttgatttttggtagaggagatggcaatggcatgcaagcagatacatgtacgtatatatgatcgatactgcagcaaattaagcatatgcatcgatgcatgtgacaatgcagtgtacgtgcaccgtcatcagtgtaattggtgagcatgtgcaggagagtcttgtttgcttcaattcgcacaccttttcatggctcaaaaggatgtgaagaatatagtatgctaccaataataatgggc

SEQ ID NO: 44363 - DNA, 299 bp, Zea Mays
cggggatgtggaggtcgtcgccacctgggagtggcgcttttgtcgtggctggtcgacccgacgggtccgatcccgcggggtacggagagatggttggtatagacgacaaggtggcgatgagcgtggtgacgtcagtgcccgcgttgccgtcatcgtgtttgtcgggccagcctgcggagatgatagggagacctgagttgggacacaaggatggagtcataagcttggacctctgcttgtaattcatatctcctgcttgtttagatcgcttcgatgcatttttgctttttttcaccctt

SEQ ID NO: 44364 - DNA, 498 bp, Zea Mays
aaaagatttaatatgaattttctatgaattaaatgagtttctagatttatttatgtactaaaaagtatttcttatattgtttttactgatttcctggttccctggacgagcgcaaaatacagagaaactcgaggggctaatccataattttccaaagactctagctacacccgagaaaggattacgggttgatactcattaaagccaggggctttttggtaaagagatcgaacgatggggtatcgcgggattctggccgtctgatcaggatctggccaccacgattaaatcgtccagacccccaaatcgggattccacagcaatcgtgcgatctaagatctatggtcgacgatcactcataactccaactctccccgaactacgtgatcacggaccgacaacttggatttaaaacaacgaagggattaaggatccagtggccatgcgatcccaactcccctaccacgactccggtcggcggtgatacccccgcacggc

SEQ ID NO: 44365 - DNA, 435 bp, Zea Mays
taaccatttgtcacatcagctccacatcataggtatgcatgattttatgacaatctggtccatatggcaaggcttaagctgattattagtgacatttttctttggagtaatgacaatatttaaacgtcataaaatctatgacgaagtagaatcgtcacaattttaatgacagaaaaacttcaattcgtcatagaacatgtttagccacgtcacatagatgacgaaccaaaaaatgtcacacaagcgtcatagatttcaatctatgacatatattcacttattaatgacttaaggtgaatgtcataaaaggtaaggtgtgttgtagtgaatgttagtgcgactaagtagttgcgaagcgagttcttgtgggcaagacaatcacaaagagatcaacacaagagacacgcgattttatcccgtggtttggccaagtaa

SEQ ID NO: 44366 - DNA, 302 bp, Zea Mays
ttaccgttattgatgctattgaagagatgccaccgccggcctcgatgttaaaaacaccggttgccgaagacactgcagctaccgaggctgcccccgctgaagctgcaacagccgaagctgagatggccgaagatacaaatctggacggcactttttctgatattgataagatgcttttgaacatggccgcggaagaagctgctacagctgccaaagagaccctggccccagtgcctgggaaagagaaggagattgccgaagatacttcggaggaaaaggattttaattttcaaaacatactt

SEQ ID NO: 44367 - DNA, 448 bp, Zea Mays
ggtcgccctaacctagagaccataagaagaaggaggaggagggacagacacatcagggtgagggcgagcagtcagtgtaaagcctagaatagtatcagagttagtctcggatctaggatctgttgtagaggctggagctagtgttgacttagatgatggtacactgtaaggatcagactgcagagcctgagatgctggtgcgggtactgagactgccactgctagagtagacactacagaaactgatggcactggtgactgaacactcacaactccaacgatctaagcagagaaatccaaagtgattgtccggagaggtgagaatgtcggaccaaaagtgtgcaactaagcccctgactggatggctggcaccattgaagtctgaagagatggggtgtagctgactgcactggaggcacaggaacaccgatgtgctgaagaatatgag

SEQ ID NO: 44368 - DNA, 345 bp, Zea Mays
ctttggtacgactgaaactcaacattacgttgaatgttgcagtgtaacccaaccatgaaacgtgcaatggtttgctcttcgtcttcatacacattggctctaatcatggccttctccatctccttataatactcctcaacagagaaacttccttgcctcaaattctgcaatttatcaaaaagatcatgtcgataatgctttggcacaaaacgaattctcatttctcgcttcatctcttgccagggtcctctccatcttcttcactatcacgaagaagttgctcccaccaaatcagagcatatccttcaaactcaagagatgccattgcaagtttcttcttctctg

SEQ ID NO: 44369 - DNA, 742 bp, Zea Mays
gtcgacaaggcactgaaaagggcctatttcgtggcaacaccgccacggaacgacgatggcagggagggggacaatgagtccccaaccaagaggtcagcgctaacgccaggcgcgcatccttgatcgtgaggccatcctccggcaacaataggaggagctcaatgctctcatccataagctcgattgggtttatggtgacatcgagaagaagcgccttgaggccaaaaggctatgggtgaagaaagtttacaatcagctcatggagagcagtgacaaggcgtaatacttcatcaacataggatagaacatggctgcagcaacaatgatgctctaatccatcccttggcccaacgaactggaggcaagggcgatgtacggaacctttatagtctattggagaaggccacggtacaacaggccaagatcgattggcaaccagcaccgatagctatagccacacacgacctcatcctagagcatggggcaaagtcctcccaatcaatggagacgtgtgttcccctaaaggaccgccttagggggatccacgatgcccaacacatcatcaacaaccagtgtcgggagcaagaagttgagctgccacatgaaagaaagtgcgagtgtagccctagcgcacctgggccagggccgcgtgccttcgggcgcgctatcaaaagggcatagttcctcgcaaaggtgctggcacccaccaatatctccaagtacgacgggtcctcaaatcctg

SEQ ID NO: 44370 - DNA, 327 bp, Zea Mays
gctatagtgggcgtcatgatgatagtagcccaagtggcacagggagtaaatggtcttgcctcagtaacgcgtggaattaatgttcggcctgcatactgcggatgcaacgcctgccactggggcgagcaggtatgtgtctcgtccttacttaatgcaaaggtgattcacgcttagagattgacatcaggcttttcccgatggcttacgtcacacttcgtataacacgcggcagcactgggccttcccttgttcgccctttctcgtgacaggtctggaacgcccttggctggtgtgatatcctggccctagtggatggtgatatcctgg

SEQ ID NO: 44371 - DNA, 869 bp, Zea Mays
tttacgcccggccttgacgatgtcgattattttggatgaatcgaagaaatatatgagctcaatttttatggttccaaatctcttactccagtgatattcaaatgtcattggtttgaccctcaagtgacgagacaaacacattctaatcttgggatagtcgaaattcgataagattccaccttaccaggagacgatgtctatatcgtggcccaacatgccacacaagtgtattatctcccatatgcgtgccaaacaaaagaacatcttaagggttgggatgttgtgtataaggtatcgccgcatgggaggttacctgttcctaacaatgaagattacaacttagacccggacacatatgatggagagttcttccaagaagatgggctagaagggcgatttgagatagacttaaccgaagctatcggaatggacgtagatattgaaatgattgttgatgaggaggatgatgaggtgcaaaatgataatgaattagtaatccttgaaggcaatgacattaatgacgaacttgcgtcttccgatggtgttgagattgaaatggttgatagtgatgatgagagttatgatccggctaaccccgacacatatgaagattatttttaatcgatgtaatgctatatgactttttatttcgcacctgtttttaaatacatctttttatatgtgcttatttgtttactcttaattgcaggtttttggacgaatatggtgggcgataattggttgaggaggaggaggggaaggaggagtaggacggcggacgtgacagagtaggcggtgcagcaggacgaccttgtccagtagcaggtggcgcagcaagacgaccttgtccagtagcaggcggcgtagca

SEQ ID NO: 44372 - DNA, 463 bp, Zea Mays
gtccatactgatatcatcccacttccaagaaggtatcgggagtggttgcaaggcaccaactacttttaggtgacttgccttgagtcctgacaggtgtcacactcagacacatacttggctatttccctcttcatcctagtccaccaatatagggatctaagatcgtggtacatcttgttgcttcctagatgtatagagaatttggaaagctgagcctcctccaagatttccttcctaagttctggatccttgggaacaactagtcggtcctcgaaccataattagcccttattgtccttgcggaagcacttatacttttctacctttcgggtgagcatatccttgatgatttggactcccttatcctggagctgtgccataataattcgatcttgcaaggttggtttaaccgatgaaatctaggtttctggagaaaccacttccatgtttaggtttcttaatt

SEQ ID NO: 44373 - DNA, 548 bp, Zea Mays
gtgggggagaagacccaacgtggacatccatggaggtatgagaaggggagcccacccggacaccctcgggggctaggtcgcagctcgcgctacccacctgagacggatcattaccggcaacaccctcgggggctgggtaaccgcttgcaccatcctcggggaccgggttctctgtagtagccacctctaaggctgaaggattcttagtcacctccatgggaattgaacgaccttgaccagcttcttggccccgacgactgcactccaaggtcgacgaggcacgggacgccgctcgggataactctaaacccacatctggaatgtcagaacaaacgtccatcataccaccgtccatgggctcggacagcaagtcttcaggaacaacatccttgagagcctgatcaaaatttgctagggataattcttgcagactgatgagagcagacaaagctggagaagggatatcactactctccccactgactatgtaacgcctactattcttccgaattaaggggatcccctcctcttcttcatcatcctcatca

SEQ ID NO: 44374 - DNA, 321 bp, Zea Mays
aaatgcccttcttggtcaggtcatgtaaaggggcaacgatggtgctgaaatccttcacaaaacagcgataaaagcctgcaagtccaagaaaactctgcacttgtgtcaccgtcgaaggcattggccaactctgaatggcatacaccttggtctcatccacctcaatgccctgtggagtcacaacatagccaagaaacaaaactcgtttggtgcaaaaggtgcacttctcgaggttagcaaataaacgcgcagctcgcaaagcgccaaaaacagcacgtaagtgatccatatgtgcctctaatgacttgctgtaaatcaaga

SEQ ID NO: 44375 - DNA, 394 bp, Zea Mays
tgtttgctgttgcctgataatcttcccttcctggtattgaccatgagagttagaagcatatggtaggatagttttgcaatgaaaagtatttggtaagcaaaatgaataggctagtaaccggttatgatctgaaaattctttagcagggcttaatcagttttatgtccagattggggtaactagtcgtataaggtgaatatccaaaggtaggatagaattttgtcaagatgagatagtctgcatgatgtaggttaaaagtttgtttgatgttaggtgggatagatagattataccattcatcatgactctatgggttgggttagctcatggttgagttgatctaatgcgctaagttaagttaacacctggctagaagggtccaagtaccactaat

SEQ ID NO: 44376 - DNA, 494 bp, Zea Mays
aatctaaataaaactgtcatgtatcactatttaaccttattaagtgtttaattaccttgagatgaaaataccaaagttatagagtgtttaataagaattccaaagagtaattgttcaccatgtttggataaataacgtgtgagttataactgaaacaagcaactgatatgctgctgtcccaaacatgttgaatgtgattgattgccctactttgttgtagctgtcttgagtcgactgcttgtttgttttgggttttggctgaacatgagtaataataagtgactagtataattgggattatatataagtaagtagtacacatctcactaagttagtgaactaaattagttaaggtctaataagtagcttagcttaatcaacagttagcaagtgcagttatatattagggaaagagaatgaataatgtcatgtctttggctttctgctaatactactaagtaaccaacgtcattaaagtagtacaatttgtaatt

SEQ ID NO: 44377 - DNA, 949 bp, Zea Mays
ctataaatctttggaccgtcactacgcttccttttatttccagtaatgtcagcctgcttccctggcctaacatatttcaccttctctagctcttgtaggacctcatccacactaaacctgccaggctcaactttgttttcacgcttaccattgaaatccaagctattccaccatgaatgtgtccttttaaggtaacgacgatgtccaatgtagcataacttgttccttattgccagagacaacatattcttgtcgcaataaatacatgcataatacccttttgttgttcgcccagataacgtggccagcgctggacaatcatgtatacaccaaagtacatcagcacgaaggtcgaacttcctaacagtacatgcattataggtcttgacacccttccatagcttgagcagttcttcaattaggggctcaaggaacaaatcaaaatcctttcctggacatcttggacctaggaatgagtaaagacataaagcagtttgttggattcacgcattcccatggtgggagattaagcggtgtcacaagcactggccacatactgtactgggtactcatgttgccaaatggattgaatccatcattagctaaggctagcctcaggttcctcggatcatctgcaaaacctgggtactttcggtcaaagtccttccacgtttccccatcagctggatggctcattacattggcgactggcttcctcactttcttgtgccattgtgtttcctttgaagtttgttttgaagcaaaaattcttctcaaccttggcaacagtggaaaatgcctcaaaaccttatgtggaacccacttcgaaccagtttcatctttccatctagactccttgcatactgggcactcattcattttagcattaacattccaaaacaacacacaattgttcttgcacacatggatgtttttgtatccaaggccc

SEQ ID NO: 44378 - DNA, 272 bp, Zea Mays
ctaagccctatgtttatcccaaatttgattctatattttcttaattaacgcaaggatcagcacagttgtgtgcttgtgtatatctacaaatcatggttaagcagaaagtaagacagacactttattctttttaccataagattgaaggtacattttgtggtgtgcaagggtaaaataatttggtccaccaaaatgcaagtgctttgttagaaggactagtggatggcgcgcgtcttgcgcgaggagtaaaatttgattttcagatatttttt

SEQ ID NO: 44379 - DNA, 380 bp, Zea Mays
ggccaacaagggccactcgatccagaatcaaaggaccagatcagttcctgattcaagcgaaccggtacgccattttatgcatcggattcaactccaatggcacggatttaaaacatcctcgactaccccgcatccgtccgatcatattcaacggcttggatcagatctaccccaacccgagctggtatgggatcagggtcgaccatccaacgatctatggtacgtattttaacgtgtctaggtccaaacttggccatccgctattgaatcaatggtcaggattgaatacatcgaaccgttacctaggatctaatcatagtcgtctgctgaggatctaacgaccgacgacaccgcttcccctcaatgccttctcctctttt

SEQ ID NO: 44380 - DNA, 1142 bp, Zea Mays
gaaagaatgaatggattaacatgagaacaaaagactctattacataatccataaacttaaaaactcacaacttttgtaccttcagactgttgtatgcaaggctatccgcaagatcgtccttcatcatggcacagaggccagcttcgagcttcgaaaagcccatacttctggccatctcctggcagacggataattctttgttgtctaggaggcaatacaaaaaatcatcttcatccgtaccattaaacactaaggccccttccgggtacttcagttctcgggcatagtgtttagcttcaaaaatttcttcctcagataatctttttcccgaagcatgtcgaataacataatcaaggtcttcggaaggtgcttcgggagtaggagcggcagatttttcaggcaaagtctgttctatagcctcttcctccgctgccttctctccaatttccgagggtttttccttagtaggctctgaaggcccagctttggcactagcctggctcattgcagcttcagcttcggttagttttgttttggcttcaatttgcatttttgaaaccttggcaattttccctggagtagagcttgaagcctttatcgtttctagcacatctagtacacttgccatccttcttcttttgggagtggccgcaagacctttttgtatcttcgacattgttacttccgccgaagggcttaaaacttctaacatttttgttccttcagtctttggctttttggcctcatctttactagtctttgcctcaacttgctcggctgagggtgtattcggtatggtggtcggttctttagccttttgcataggaggaattggctccttcgaatcagcagctaaagaagtcttcccgccaaactcgggcaccacggccggctcaatataacggggccggtgggtgaggactttcaactttttactctttagcgcaggctcgcttggagcagccgaagcagcaacctttccagagattgcaccctttcttttctgcccccgtggcgggtagcgatagtcagggtacacaaatccaatagcatcaaaaactctattcaatcttttcttttttcagctcccgaaggccgcagatagtgcattatcttcggatttggaatatgcttcaagtaac

SEQ ID NO: 44381 - DNA, 347 bp, Zea Mays
aagttctttaaaacttaccctatcatgtcatttaaggggaactaaagtcctgctctgaagaaactcttgaaaatgacaacttcgtcctcttttggttctggaactatttcctccccagcaaaccggacaagcttgctctcagcctccctgaaatagccaagtttcctcatcataaccatgtcatcctctgttacagtagatttcccaaactcaatgtggctaggctttgttgggcttagaatactgttatcttcttcactttcattgtcactttcacctccatctacaatctattcagcttcagcattggaggcaccttcggcagcaacttcctctaacacaaccag

SEQ ID NO: 44382 - DNA, 400 bp, Zea Mays
ttacagttctgattaattcatccaaaactgaaaacatgaatctttagtgtcagacttatagcccggattaaaaaattcagaactaaacaaatttctcaatcaaaatcatagaatatggttgtgtactagcgtttgcatgcagcgtgcaccggccaccggccggcctagcagatgatagtcatgaaacttagaccaggcaagaatctcagctagcgtaggacggacgaacaagtaccggtgcctcgtgttaatgacgatgatacattgctacggctcaaataatataaattagcagctgcatcaccgattaactatcttggggctggggcatgtactcacaactaaaagaccgcatgataaattttttgtttcgtctttttttccccattttcccctgaca

SEQ ID NO: 44383 - DNA, 450 bp, Zea Mays
gcaccatggtacagtgctcagagatggataagactgccagcaccggatgttcaccgtcggcgaccaattgccgccgtgattcgtgcgacagccggtccacattgttctcggggtaagtgggtaacaccggtgtacgccgccgtgggtaagctccaaccgttaaagaactccggccaccgtacggtgtcaccacggtagaagtcgataagaacgccggtgatcgccgcctcccggccatgcgtcgcatggctctcgctttccatcgcaccgccgcgacttactctcgctctctgtggctcaccggagtaactgccacggcagtaaacaccaagccgctgcgccagtgttcttctttccttccggccgccgcgcgtcttgctcgaaattcgcgaccaccgcccgctggcactataaattgacattgcccgtagctgcgccatgtcgtcgtga

SEQ ID NO: 44384 - DNA, 280 bp, Zea Mays
gatgggactgttgattgctgaattactaggttgcacctgcattttgtcgattttattttgattaggcccgattaacaatgaatggcccccttttcataaccttctacttttccacctcaacatttcctccagttttgaaacagtttttccgttctcatgctttttgacatatattgttctgtcctatggtatgagcctgttatttatgtaaaagggcctctagctgagttgatcaggtggcctaagtttctgatttcgactcaccgtggaagtaaatttt

SEQ ID NO: 44385 - DNA, 1174 bp, Zea Mays
ccgttgagctctttgtttccagatcttctactggactggcactagcttcgacagtcgcagtaggaatcgactccgaagccaaggggatagcttcagtctgttcagtaatctctatcctctttgtatcggatattgtagttgtcctttttaaagaacgtggcctcggcctgtgagttaaaactttaactttctttggcttaggcgaggtggaagagaaggaggcttccattttcctttacaatccttgttttcaggtaggaaagaaataatcaggataaaaaaattcaataacatcaaaaactctattcaacctcctttttccgcgagcgctgaaggcaatggtcatagcttcatcctctgccttcgtgtaagctcccagcagctcgttactggtagcttcgacagccttaagccagtcatcattcggctcatcaaactgatttctgaaacggtaggtgttccttatgtaaatcagaccaccttcgctggagccggcagcagtctccttcggcatttcctagtcattcacaagtggccacaccttttaagcaatatgctccggtaccaaatccctggtaccaatgtaagtgcacacagtattgaaagccatcaaacacgcttgcacttcatttccacttgcaattaacgaccttcagatgacgaagcgtgaccatatgggacgcttgataataccctccacatcttccctctcactcagatcattcttcacatagaaccattgtttcgtcaagagcccggacacttctttcggtatgtcggcacagggtacctcacatcagagcggttcacaaagctatagcacccgaagttgttgtgatactgttccttcccagttgcttttatctggtaggataattcatgaatattgcagaaacgcttggcatttggctccagcccttggctcctcatggcccaaatgaaaacccccactttaattaaagcttcgggagtaagctgatgaaggtatatctcaaatatcttcaatacttcaaccagcatcttgtgcaatggaaaacaaagtccagccttcataaaacttttaaatactaccacttcatctacttcaggaagtggaacaatgttttctcctccagccctcaccatggatatgtcgtggaaatattttctcttcatcgcttcaatttgcccttgc

SEQ ID NO: 44386 - DNA, 679 bp, Zea Mays
cgaattagcaaaagtgcgcgacaaccagtctctcacccaaagacggccagcaggccacattacaatacaagttgcagttacatacactcagcgagggcaccacatactacattggctcaaccttcgggatgatgcccgcctccctataattgaacaacattattttcaattcctcaccctcaaaaagattacgcagatccccctcaccaatgctcgtcccaatcggcgaagacaatagctctcgtttaccaaaccgatccactcaaagacggtctcgctccatccccatccgacggcgcctaccactttgcgaaacctcgcccacgctatgcttcgacaccacccttcgtcgccggcacttggtcctcgcactaggaagatcagccaccttgccaacctccacccgcggcgaggactccaccgcagccacatctaacacagcaaaataatccaagtcttcatctgaagactcttcggtccaggaaaacggactcccaaactcaccatcagacgaaaaagacccagatccagaaccagataaattgtcattggcaggcactacggttgcggccgccacaaaattagtatcgtcagcagcggttgcttgcgcaggcccatacgtcgaaacctgtgcagcaaccgagtttcagtatcacaaaaacaaaatcttacacctgat

SEQ ID NO: 44387 - DNA, 544 bp, Zea Mays
agagacactactgttcatgaacgggaaaaactgtaaacccgttccatgattgagttttgggttcaccgagccgttcttgtccgaattttgggatgatgcaggaggtgacgaggatcaaaggccagcatctgaatgatcggaacgcgatagtcaatggtcgggtcaaggggaagatcaacgtcaccagagcgttcggggtcgcctacctgaagcaggtaaaacttgggttcttctaccatttcgttttcagtgcgcatgctcaagtacatttctgttgtcggtcaggcttctgcagttccttgtgcataattagcgtttaaggcgtgcagttcttgtgaacatgctctgtgcattgtgctgtcgcagtctaggactagagaactgcgaggagccgaggaccaatcttgtaggccctatgctccaaatcatggctgattagtggccgtccaacagtggcttggtggagcaggactgtaggagtagcgtagtagcttctactagttccgacgattcttccccaccccgtactgtgtgtgtgtgtgtc

SEQ ID NO: 44388 - DNA, 403 bp, Zea Mays
cgaaggggtatctgcacacgacagccattggatcatcgtccgacggcgcagattaaatcagtcattaacccgaagcggtacacaatgctatccgctagatctgggatcgaccgcccagatttaaaacaccgagatccactccaaaccgttcgatcagagatcaacgcacctgatttggttccctcaaagcggtcccaatatttaatctagaccagtcaacacgagatcaacggtccgtggctcatccacgtcatcatcccgtagccaccgttgatctccagatcaatgggctccatgcttcctccacctcccgatggtcaagcagggaggcggcgctcctagcaaccacggccgtgacatcgccgccgcgcccaaccaacagaggaagaaggggggatcagag

SEQ ID NO: 44389 - DNA, 1090 bp, Zea Mays
tttggctgcagatgctttgtgttgaaacatggtaatttggacaagtttgaaccatagtcttctgatgggcttttcctatgttatgcattacactctcgtgcttatcgtgttcttaacctggagactaacacatcatggagacttttgaggttacattcaatgagactacaccttgtccatcccctatctttgagcctgcaggatcagatcagatgggatagaccatttttgtggaggaggagcacgacaacgacgattggggtgatcctgagccaactccatcggttgcactaggcgagcatgcttccactactttggctgctagactcgaccccgcttcttccactacttggggtccagtcaagcgtaagcctactaagcctagaggcggttaggctgctgttgagggggggccacttcctcgaggtaggctccgcaacacattcaacattgtcacccaccttagcagttgatcaaggagcttcacgagtgagtcactcgctccaggtcacaacaattttttcattttgctcactcagctttagtttctaattttgagccctaggatgttggacacgctttgtctgatcctaactaggtcaatgctatgcatgaggagcttgaaatttttgagagaaatcaggtttgggttttggtgccactgccttcaaactgccatcccataggtaccaaatgggttttcaaaaataaagagagtgaggatgggttggtagtgagaaactaggtgaggttggtagcccaagggttttgcataaagagggaattgattatgaggatacttttgccactgttgcccgtttagaggccattaggatccttttagcctttgctgcatcaaagggttttaagatttttcaaatggatgtcaaaagtgcctctttgaatgggtatatagaggaaggggtctatgtgagacatccccctggttttgagggttccaagttttgaaaccatgtttttaaaatctttgtatggttttaaacatgcccctagagcctggtatgagtgttgaaatctttcttgcttttaaagggttttaaaatgggtctacagacaaaactcttttctc

SEQ ID NO: 44390 - DNA, 537 bp, Zea Mays
cgcagagagaggtcatgttcaagcgtggattggctccaaatctttgagattatggccatgatcccgttgagagatctcttcccctgacattcctttgtcgtttgtgtgtggaggcttatgggtttcgctgactggatcaagagatatggaggggtgaagttgggtttgtctcacttctgaacaccgagagaagatcccgggtttgacgtgtacagggcacgcatcccaatgcaatcttcaggtatgaggtagaggggttagttaggcacattgttgtcaatgggagcttagggttttgagatagagattaaggtgaacgcgctcggttttggtttagaggctgaaaattcagaaatctgaatttcagatttccctattaaacctccacttgaatggcttgcttgaggtttttaaccaactattttggccaaacttttataatcttttttgtagcttagttagtgtattacaattttaataattggcttaagccatgattctatgttttcatggttcttttatcccttttctcccttt

SEQ ID NO: 44391 - DNA, 399 bp, Zea Mays
cggggaggggacaacgccatggcagggacttgggcttcagggggatcccttccttgtagctgagcttccagggctgcaatccttgcatgggcatcctccagctccaagtgaaccctagagagatccaaggtagcactgtctaggtctatattaagacctgccactgcaccagctatgatgttgaggcgatcttctccagctccacctagaacgatgctggtctggctccctccactaagacgcagagaaagatgcatgtacttcgtgtcatgcagctgctgccggtaggtgtggctaagagaccacagggtccgcctagcagcatcgctgacagaagcagcataggtggatagcagtgtcagggactcatgagatgatagagtcctgaaccttctatcc

SEQ ID NO: 44392 - DNA, 501 bp, Zea Mays
aaagggtgcaacctctggaaaggttgctgcttcagctgctccaagcgagcctacgccgaagagtaaaaagttgaaagtcctcacccaccggccccgttatattgagccagctgtggtgcccgagtttggcaggaagacttcttcagctgttgatccaaaggagccaattcctcctacgcagaaagctgaagaactggctaccatgctgaaggcaccctcagccgagcaagctgaggcaaagaatggtaaagataaggccaaagagccaaagactgaaggaacaaaaatgttagaagttttaagcccttcggtgaaagtaacagtgccgaagatacaaaaaggtcttgcggccactcccaaaaaagaaggatggcaagtgtactagatgtgctagaaactgtaaaggcgtcaagccctactccagggaaaattgccaaggcttcaaaaatgcaaatcgaagctaaaacaaaacttatcgaagtcgaagctgcaatgagccag

SEQ ID NO: 44393 - DNA, 926 bp, Zea Mays
gttttgagtattgaccactgaaacccccatggataacgtactccacacgtgtcccacatgtcttggacacgtgtcccacatgtcttggacacgtgtcccgtcggtccgcaaccacgtcagtgacacaatccactatgtcatgtccttgtgcctgtgagtgtccccaagtgtcagccatcacggctagtcacaccggcttctctagtcgctcagtcaagtctcaacgcttgtccttcattgctctcaaccatcaacacgaacctgcatgagcttcaccttcgccattgatgacctagactccacgcgcaccacaaaccaagagacatgtttgtgtgcacacactcatgcaccggttagtccacacgactcaacccaagacgctagtctttagcaaccactcatcacaacctaaacaacaagggaaaatatcaaccttgtgttcgcaatctctcctatgatgagtgcattgtcaacaccaccacataaacacaagaatcggcataaaataaggaaggaaaaagagagcactcacccaaatgacaaacagccaaacaaaggccaagtccaaatcatcaaaagtgagaaaagcatggtccccaaagatatggggaatggctcaacacaaccaagcaaaaaatggctagcccttaggaaaagacagaaatgggatcaacaccactagccgtagattagagccaaatcagagcaaaagatggcaatgacgcaatgatgctaaactaatccctctagaaagaggcaaatggatcaacacaactagtaggacatctccaaaaatctatccctgatagaaacaacttcctcttaccaagtacttagggcctcacaaagaaatgcatcatcaacaagatttgtgtgtgtataattatcccccttattgatacatgcactcaacaagcaccgcgtag

SEQ ID NO: 44394 - DNA, 825 bp, Zea Mays
ccccaaatggcgcgactaccatcattaaaaggccgatgccgaggccacacacgagaccaccaagcggacacacgcgagtacatccggcacccaccatcagccaggtgagactcgagtccgagttcatcatgcgcaattctttctctgtgttgagtatgttgttctttttgctggacaagtgactttcgagggatcttgcaggagcctacttctcactcgtccttgttcaggggtaggttacttggcattcttatgcacttctacgcaatgttgggtgtttagggtgtttctgcaatgtgttgggttcagtcatgcattggacagtcacacatatcatgttcctgatggttccttacattcgtcgatcataggtggatttagaatgaattaagtttatttctgagacataggttactggtttatcgatcctctccatacaacaggtctattctgtttacattaggtactctactatgtgcagctatgtgtgttttaaatatgttaatcttctcttggtgcttttaaatatgttaattttgtacaattgaagtctatcaaaagaattttgctatgctacttagcagtacgtatatctttatattgttgcctgctctttgctcatgctctagctaatttcagtgcctgatgctactaatagtactaaactgtacaatctcattcgattttcagttaaatcaacatgttaatttagtaccatgattttaaatatgttcatcttctcatggtgcttttacatatgctagttttgtacaattcaagtttgtgcaacccattttgctatgtttatgtattacttcattcagt

SEQ ID NO: 44395 - DNA, 759 bp, Zea Mays
cttggtgctttaaccacgccgaagtgagtcatcttagcccacccgatcgtcgccggtgagcctgccacggtaaatgccaccaattgcttgcgccagagcacccccttctctccggccgccgcgcatctttccccgaattagtcgccaccgctcatggatcctataaattgagcctgccgttagttccacaaggtagtccagcatccaatccacccacttgtgcctccaattactcacaagagagccccattttgggattttccccaaatcggtccgaaacaccgcgcgtagtgacctcgccatggctagctcgtttcaggtccgttcatgctctttgccctcctgtttcagtacccatatgttctcctgatgcttctcgacccgttcaattaagctagaccgcgctagatcgccgagaacacttctgttcatccgtagttcgagctgtctccgttgacggggtgatttagagccctattccaataatttagtgaggggaaatggttgcgtagggttgaattcggtgttcagcaaaggggagagctagccattgcgtattccggtcagagcaggcttgccaaagctcggcctggcgcggttcaccgtcgaggaccccatgttgtaaagaattagaaagggagggaccctgatgcaaatgtcagtgagacaaaacaatagtgtcgcggactcttccgggttgtttaaaaagctagggtcttctgtgcaagatcggcaccaagggcgcgggcgcgcgtgttt

SEQ ID NO: 44396 - DNA, 427 bp, Zea Mays
cttcttactaacatggtcacaatggtctcatacttctctggaagagatctaaggaacttatgagtgaaatccacatctggtacattaataccaagtcccttgagttcattcactatctcatttaaccggttgaacatatcggatacactttcatcttctttcataatgaattgctcaaattttcctttgcacacatatagcttgtcactcttcacaattgtagtttcttcatgaacttccattagctttatccaaatctcatgagcagtcgtgagattcttgatacggttgaacttatttatgtcaagagcatcatagaatacattcatggcttgatcatttgtaagaatgttttcattgtcactagccgatggttcatcttctttcaacacaacgaacccattcttgacaattggccaaatttttc

SEQ ID NO: 44397 - DNA, 608 bp, Zea Mays
ggccgatgcactagctaaagcagcagctaaaggcgaagccttaccctccgatgtgttctatcacgtcattggcacaccagccattcgaaatcccgaaggcttgcaaataacacaagacgccgacggacactggattgtcaaccttataatggccgaagactggcgggctccaataacactatacctccaaggccattaccatccatccgatcgcaatgaggccaaaaggcttcaacacaggagcaaagacttcacaatcattgacgaccagctttacaaaaagggaatcagacagcctatgttgaaatgcataactgaaaccgaaggcttagagcttctccgcgaagtccacaacggaacttgcagatcacactcaggaccgagagccctcacagccaaagtaattcgtcagggattctattggcccgcaatcatatgtacggccaaccgagtcactagatcatgcgaagcatgccggaaattctctccccgaacaggtgcccctttgcaacttaccgagcttatcgcccacacctggccgcttcagcggtgggggctcgacattgtcggaccactacccacagcacaagggaatctaaaattcacct

SEQ ID NO: 44398 - DNA, 442 bp, Zea Mays
tgctttttccttggtcagccaaaaaaatcgcgaattcgggtatcctggttccctgtgggtttgggtgatagtaaaatcggctagcatcaggtctccgatatgactgtctcccagggatcatgctaactccgagcttatctcggaacgccccggctatctcttccctcactatatcaatgacagtcggtgagagaccaccaactctctggtccaacatgggtgaagttgtttggatattagtatgttgtcttcctcccgatcggtttgggtttttggcgcattaatacttgccctatgcgtctcataggactgttcattcctttttggccttctaggaggggccgaaaagtactcgcccccatgggtttgggatgttatattatggtgctggggagctgcatgatgtgatgggaagtttagctgggacggatgtggataataa

SEQ ID NO: 44399 - DNA, 822 bp, Zea Mays
atttctaaccattcttggcatggccctttgaataatttctcaaatttgaaccgataaggcagtcgcacaagttcattcttttcctttgtcccttttagcttcagcattttccattcactcagcgtcgggaacaccttataggccagatattcttggactagatctctggtcgcgatctgctcggctaccacccggaattttgccacagcttcttggcacgttgaccccgatgtcatgcggcacataggcctagtcaacctgaagcttaagctcagaggactcagtactagcatcttgagcttctccctcttcttctcatcggccttcacataaaaccactcatttttccaaccagttggccacttggtgcgatagctaactaccggagtcttcatatctttgcggtaagcgaagttgtaacaaccaaaattctcatgaagaccatcttctctggctttcatctgataatgaagctcgtgaagacgctgagcctaacgatagcgtttggagtcagctgatgaagatagatttcgtaattttccaaaacttccccaatcatttcattcaaaggaaacctcaatcccgccctgaagaaactcctgaaaactaccacttcatcattttacggtatcagagtggtttcttccccgccaaaacaaatcagcttcttctcagcttctccgaagtaacctagctttatcattatagacatatcagcctcagaaacagtagattttctaaagtccaagtggctcggtttggctggcatgagaatggtataatcttcctcttcttcatcagcatcatcttcttcaatgtcag

SEQ ID NO: 44400 - DNA, 1085 bp, Zea Mays
gaagattaacatattgatgaaacagccatcacaagttatcggtcaaggcatgacaagatgatgcattcgataacacgatacataactgaaactcagggtactaacttaaaagggatgacagaaaaaaaaacagaactgctaaaaaacagaggatgatatccagtgcacacgaagggtttgtgcacatgtagaatcttggtcttcaaaatcagatataacggtgcacgtctattttaaaaacccactctcatccatgactggtttgtttcatagaaaaaaccctgatagcatgcaccgttagatctgattttaaagctcagtatcctatatgtgtacatgtgcaccaagccttcatatgcatcagataccatcccgaaaattggtaaaactataaatgacaccttgtacctaataagagagaaggcaagcaagttatcggcagccaaacaacaaagcaagcattcacaattggatgatcacgtcccactggacagacagattcgttcggtttcggtctactcaaattcctatagaaaacaaacaagtacacacattaggagaacaacttcataaaggtctcaagtcgttgattgttctgggcgcctggactctatgaacttactggaataggtgtgtttgatggtgtgtctcctaacctatctagagccctaatgctcgctggtgaagagctgcaggtttggggtttggccgaggccagagatacttcttatctcctcgcccttcgaccgcggtagatgattgtggggatggtcgtttccttgatgtttcttaatacaatgatgtggaactctcctgcgtgcccggtaaaaaaacaagtacaatcattcaccagaccatacatcggcacatcgcgacagatatctggccacatcattcatctcatgcaccggcgaatgcggtctctaagcaacaacggtgatccccaatgtaaacaaccttagcaggcgcggacttggccagggacgcgcgtaacggggctgcccaactgaaaccacagacttcgcggacaaaacacaaaccgcacgcgcaaacccaggcagaggttgatttcgcgcggggaagaa

SEQ ID NO: 44401 - DNA, 1597 bp, Zea Mays
gtaaatttctgttccctgacccatcacactgtcactgcattttgctgcatttaaatttcaatcacatcatgcatatcaaccatagtgtattcaacattttttatttctgtttttacatgcagataatggtacccatgctacgctctggacattggaccttgtatgttgttaatcttcagattggacgcatacatgtgttagattccaacccatatggaccagagatgggtgggactatctggaagaattaccattgtatacctatggatatgggtgataggaaggttcatgggccaggttaataatgagtaggctcaatctagccatacaaaatgctcattgtggctaatgaggcagagttcgccagtctcctgggcaaggaaatcgagggagtcgtaggtgatctagatcctaggagaaaaagtctcgctcccagtggatgatgagtagctggccatcagagcgaaagaagacgctttggcacgtttgcagtcccctacctagcgcgccaattgtcgtggttttggaaaccgaggggcaatagatttgtgtttggtggcgatgcaagtgtggactcacggagattcaaacaaggaactgaggcacaaggtttatactggttcaggcattcaccctagtccaatgtactgctgattgtagtattgctctatggtgtgttacaactggtgtgcttctatgaagaaagaaagttgcccaacccttttatagctcaagggtggactttacagtgggaactcgtattctactgggagggagcttggcttgctgcctttggatggcgtagtcctcctgacatcgtctgtagggtcgtgcgttgtcgtacccctagtatggcgttccatcttgtccatttggtatacaaatccctatagcttgctcgacgtcagcgttacggtacctagtgggtcccacaaagtgggcttatggtaaggttcaaggtcgtgtccggtactgcttcatcttccgtcataccccttgcgtcattataaaacatgcataggtatccacccgatatggggtattgtctcgtcctttttggtgtatgggtcattgtagagactctggtgctgaggtctccgcgactggagttgatcggccccacaagtcagtgagggtatatccacgggattacatgggggtgttccatcgtgtctgcttaaggccttttggtactgtaggtacgatctagtcatggtttggtgacgttgcgttttgtcgcggaggtcgtgggccgacaacgttggcccggattcgttccttgcagatctgcttggaagaggtttgttcgttcgcccacctcgcatacttgctcggttggggcttggtcgttcgccctgccttgcagatttgctcggcagggactgggtcggtcgccctgcctcgaagacttgctcggcgggggctcattcattcgccctacctcatagaattgctcggcgggggctcgctcgttcgctttgtctcgcagacttgcttggtgggagcttggtcattcgccccacttcgcatacttgctcggcgtgggcttggtcgtttgccccggctttcagacttgctcggcaagggctcattcgtt

SEQ ID NO: 44402 - DNA, 490 bp, Zea Mays
atcgattagctcgatgatagggtacccgactggcatgcatagacaatctaggtcgaccattcaaatgtgtgtctgagatcgtacctcaagctctcctgtgagcccctgaagggggccacctagccattccgctaaaacaagttcgaacaggatagagagaggaagggttatgtaaaaaaatgtgcccctagtggttaggcaacccatgtgtggaatttctactaaggatgatgcctcactgatcagatctctaggtgtcacttggattatttgctcatagctcgacgaaaatgacatttgcactttctaggtaatgtcagtatgtccacctcatctaggaatacataagatacctatcgatgaaggtttgataggtacaaataagaaaaggcaacactcgattctatctcaagatatatcattggaaaacgtccatcggacgatctatacatagctccaatgcaaaaacgaccaacatgcctgctcaaag

SEQ ID NO: 44403 - DNA, 697 bp, Zea Mays
cgacgatctgcgtgcccggattcgcgtcgatcaccgtgatttgtgcctggcacgccgtggatattcgcggggaggtagctttggacgtgttgcgctctcgcggacctagccagagcctagtcggagataattcaccggcggccaccgtggctcggttatttccgccgccatgtcatccatgcttgctcgtccctcactgtgtcccttctttacgtggtaaccatccacgaatagtgtaatccgtggccatggatcgttagccggaccaccgcgcctttaaatagccccgccacccacggcgagatcttcacatcttcactagtgaactcggttgaagcgcaaattcgcggaatcctctccacctctcccaaaattggtagtgcacggtgaaaccatagtcctttgcgaccgtgtagacccaacctcacctcctaattccgcccggacccgtcgcggcaccgtttcccccttttctatcaccggcgagcgaaaatccttcgcgctcagtggccagctactcccaggtctgctcctgctcgttttaatcatgattcagcacctatatacgctcgtgatactcatcggctccaccctccttgcttggccacactcaatcacccggaacacacgaacttgtgttcggtattccccgccaccgtggactgactaagccaggtccataaccattcattctaag

SEQ ID NO: 44404 - DNA, 661 bp, Zea Mays
cgccgactggattccacagcctcctcctgcacaatagcgagagaacaagcagtatccaagttgtgtggtctctaaaccataacaactgttttgatttcgtccctagaccgtctacaaaacgcatcacataataaagtggatcggtatgggactcataagcagctaactcgtccaccagagatgtgaattgttccacatattcagagacagggccattctgcctgatatgaaaaagcttacgaatcagggactcatgttgttctcgtccgaaccgatcatgaactaatccacaaaattcctcccaaccgaactggcgcaaccgcttttctaccgactgcaaccagcgcgacgcacggccactaaagtgcattgaagccactttgacccacattgcaggttctgtttcatacatctcaaaataactctcacactgcctcttccataactgcggttgactaccatcaaattgtggaaaattgattttaggcagccgacccatagaagagtgcatgttttctcgactacaatcggtatcgttcccgaatccagtacaacgatgaaacgaaggaagatacgtacccttgactgggccattcgtctgggtattagcatacccagattcacgaccccggtaacactggtcagagcggtggccaaattg

SEQ ID NO: 44405 - DNA, 839 bp, Zea Mays
cctccgcacccgacccgtttcgtgttcagcagacaccccactgctccccgtcgcctccgcatctcggggaccttgcacctcgctagcgcatccggcgacttcccagaagctgtagcggccgcgccgggcactagtaccggcgcggagcccatcactttccgcctacctcgccgccgccgcttcggccggcggccatggcgaactacctcgcgcagttccagaccatcaagtcctcctgcgaccgcatcgtcatcgccggtacgaacctgtcgcctcccctcttaattgcaaaaacataattctatccccaaggatctgaactgcgctgcgggggcgcgatctgggtagcttggtccacctgatcttgttgccgtgtgatctggaaggttccgaacgagcctagattcgtgcaggaatggcgttaccgtgctttgtctggttgtgtagctgagtgcctgctcgttgcatagtgcctatagtgatagtttcagaatgctcaagtttttttttcctttgccctctttagtttcagattgcttaagctaatgaatacgtgagagatctcgaattaccattttggtagctcaatcttgttcctgcatgacgagttacaatgtcactctgaacgaactcatgtaaatatgttgttccatcacctcctttgtttcggggacataactctgacagtacggacgagtgtgcatccaccggccttactgtgctacaacctgtgtgcacgggtatctagcatggatggactaataaccctctaggggttaattcggatcacaattgaagtagacctattacctatataattcatacttctttgctgtcca

SEQ ID NO: 44406 - DNA, 459 bp, Zea Mays
ccaacatcagcacccaaataaccagcaagcataggtgacaatgtaaacatggcagttgaattagaagaagcattatctaaggtcatagagaacactttatcaatcatgccaaagtattgaatcacacaagcaatgcgttcagcaatgttaacaccattatgagacacttggatcaatttaaatcctaccacagacttctggtgcctaagcacgtgtccagtgccagcatagaactagcactcaactgagccttgcaaaatttgcaaatacctgcaatgcgcaccttcttaccattacgattttctgtgacttcagtgaagtcatcccaaacaacagatcgatgcttactagtgcttgaagaagtcaatgaatcaagttcattagagccagcagcatcactaaccagctcggcaggtgcccctcagggtcgacgacagtatgactgctaccgacaccgaa

SEQ ID NO: 44407 - DNA, 322 bp, Zea Mays
ttagttgattgtgatatagaatttccatagacattgatgcctatgtcatcggttaaacttgtgttggatgcttttgtgtgataaatagaagaactaatgaaaagccgtagcaaattaaataaacgcttgtacttatggggtcgtatttgtgttgcgtaaatatacaaaatgtttgtcgtctttttgtggtgttaacattgtgcgctcgatgatatgtagttagctaacgctagtgtgtgtggttgcttgtgatgtctcgctacttagtgtttaattcgctagcgtgtacttaaagtatcttgtgctatttcattatattcat

SEQ ID NO: 44408 - DNA, 586 bp, Zea Mays
ggaactcctaattttgataatgctttccaggactttcaggcttggttccagaaaccattatctaaggaggcaggggcagctttggaagccctattcaacattcatatgccggacactgaacacattgacaaggcactgatggggattgcaggtgaagctatagaagaaacacaggatgagatggacaatctgcaagcggaagcaaggagcaatgctgcagcacatctggtggttgtctgattccttgctagccggtgtgggtgtattttggtttcgatgttgtactgcaactcagttttagtcccttttgcaatctgctgcgctgagctactggttatgggttttattttggttgagatgttgtactgcatcttagtttcaacttcaattgcgaacagctccagatatgttgcgctgctgctagtttccagccttgttgcagactactattccaaggcaatgatgacccttattaatttaacaattgttttctcgtgtgatgctattagtctggggttcatccatgaattatgtcagattttagcatcctctcttggaatgttagggggctaaatcagcaggcacg

SEQ ID NO: 44409 - DNA, 571 bp, Zea Mays
gtcgggctttttaaatttcgagtatccaaaaatgataccctaatgtagtcttactgaatcaggtacccaataattcgggtacccaattttttcgggttcaagttcgggtagcccattctacccgattactgtttttctattgtggttcactttagtgcattcatgtagtatcacatctaagaaacactaaacaggcaaacctcacatttcacgtagtattagactctcatacagacataaagtcacatttcccagcggcaaggcagtaggctagaaggacgaagcaagctaggcagcaaaagcacacacacgctgcacagtgcacatgatgcacacgtccaggtccagtccatccgagcagcaggccgacaaagtcacccgagcagcaaggcagcaggccagcaaagtcattcgagcagcgaggagcctgaagccgaaggcggcgcgacgaccgacgacttgggttcactgcaatacgctccgccggactccagtaccgattgcgctcaccttggaggctttgcacttgccgatttggtggccagacgccagtactgcaatacgcgaatac

SEQ ID NO: 44410 - DNA, 458 bp, Zea Mays
gtgatagttagagagagaatatcgagaagaagatgagattggcagtgtcccagcagttcagatattccctcaaagaagaataaataatatatatgcgtaagttgcaaaacgcctagagatcgatagaaaacgagagaaatgcataaataatgcgatcatgaccaaaataaatatataaatacgaggaatgtatagagataggaaatctaggtaaagatgacagaggaataaataatgcctagagagagagtatgtgtgtgtgggtattgggtagtaggaatgtaggacagagggctccatcagcaggttgcatgaaatggaaaaagaggagacagagagcgactgagagtgtgacatggtctaacggatttgactgtgagtgtcatgcatctcactgcgcagcgtgcatgcagtatcaaaaagatgaaacggtagtgtattcgtgtcggtcaatttac

SEQ ID NO: 44411 - DNA, 361 bp, Zea Mays
agtgggggatgatctcatgttcgaccaagtaatcttcctgtcgagaagggggagctcaagaaggctaaggtccctgatcaagtaattgaaagcttctgttgtggacaagcaaaaattcccacagtttttctcaccgacaaacgtgatcatgttaaaatcaccacaggtaagccatgggatatcatcgaggaagtcgagggcgcacatgtgagataggaaatcaggacgtggggagttagagggagcataaatgtttgtaacagaaaagcggccctcatctgacaaggaaacgaagctggtggtcaaggagtaggtagaggaggaggaagaaagacatcaaaagtgggaggaggaccaagcc

SEQ ID NO: 44412 - DNA, 390 bp, Zea Mays
cgtacgtttccagtgggatcctgctgatgatgagtagctagatctgcagagagaaggcaagggtcccgctaggaagcggctttgtaatattctttggtctttgtaagatacttttgagtacaatttttcgagcagtattagcacttatttgtatgttatttgtccttgttgtgtgtggcattaccaactcctccctggtacttggcccccctgggatgtagactcgatgtgtcgaggctggataccagtatacctaagaaagagttggtgacccggcccccaggaggtagcctcgactgggacctggacctgtacacagcttcagctaggaagtgttagtagcacacccataggacccatcgtctggtatcagccatcctttgattcatg

SEQ ID NO: 44413 - DNA, 563 bp, Zea Mays
cttgttactagcaccgttaggtttacgagaatgaattcttgacatgtatggacacgataagtgcgccattttttttttctgccgaatcgttcgggcccgttcgccgtacctcgctggctggctgtcgttgcgctcacagggaaaacgtccggcgcgcactgctcggtaggctggcatcatttgtgaagcacggacacggacagcagctggcgcatcgcttccaacgttcacctcctttcattcagtaactgctatcggccattattgttccctaccttggagttcaatcagcggttgctggccggtggtggccgcataggcaaccagccgtgtaagaaaaacgccaaaccgggcacggcgagcatggcagaagagacaggaggctagtactccgtagtacgcctcatcatcggcggcaggtggctcgagggccaggaccaggaccagctcccgacgatcacaggtgcagtacatactgacataatgtacgtggatccgtcgctccccagtcctagctggtagctgctcatggttcatacacgacgatgccgtctcactctccg

SEQ ID NO: 44414 - DNA, 471 bp, Zea Mays
cccgccaccccaaggaccccactcgggctgggctatagggaccaggagcggaaagagccccggctagtgcagagggggcaccgtcggtggttgagcagcgaggaagcccgacgatagggcggtaggacgtggcacagagacacccgcggacgaccccgactaaatagagatggtgccgatccacgggttgtagaaggatggccattgagcgccaccctgcctgctagagcatggccaccaccctgaacacccttgccacatcccttgtggccacgcccgccacgaccaccttcggagctagaaacctaacgaggggctctagaggctggcgaaggtgaagaggggtggtgaggaaccccccgacgttcgaaggagtggtccaagtggcactgtagagggtcgtggcaacgagagtgttggcagtgtactcgagctcctcaagcaggagatcgctgtggacctgctcgaagg

SEQ ID NO: 44415 - DNA, 521 bp, Zea Mays
caaaaagtcacaagctcattcgccttccgcgccaatgattaatatagccgcatagatcagagacccaagatctttccactgcatgttctgaatctaatgaggatcagtgatcagtctgcattgctcactttgatgcatatgcagtatcgaaataatcagggctaacaaggttcttcagcatttttagtttccttctttagaggctgtgtggtgcaggtttgtcagctgatgagttgatggcacaaatgcatgagcacatgaaacaaacaaacaaacaaacgatctagttacggatactgtgcagttagcttgtaggagtaccactagagactagagtcctagtactaggcgctgctacctgaaaatgagcagcgatacagtgttgtagacagagacaggtgagaggagaagagggccggcgagccatggatggagcgaaagaaagctgatcaggtcgctttgtatctgctttgtcagcacatgccatgcccactttttcacaccacaaaatccactttggt

SEQ ID NO: 44416 - DNA, 909 bp, Zea Mays
tcagcaggtagtactgcctccgaaccatagaccatgaagaagggagtatttccatgcaaagctcggctaggttgagttcttaagctccaaaccacatatgacaactctctgatccacttccctgtgaacttttcattcttgtcgaatactttcttcctgagtgcttccaatatcattccattagccctttctacctgaccgttggctcttggttgtgctactgatgcatatttgatatggatgcttctttgttcgcagaaatcaaagaattccgagctagtgaaattggatcccaggtcagttataatgttattcagtattccgaacctgaatattatatcttgtatgaattccacttccttagctgaagtcagagaagcgatgggtttgtactctatccatttagtgaatttgtcaatggcaaccagcacgtttgtgtatcctccttgagctttcttgaatggtccaatcatgtccagtccccagcatgcaaatggccatgttacgggtatggtctgcaattgctgtgctggtaaatgctgctgctttgataagtattggcacgcttcacacctctggactagctcggctgcatcactctttgctgtcggccagtagaaaccagacctgaagaccttcccaactggagtcctggatgctgcgtgtatcccgcattgcccggcgtggatctcatctagtagttgcttcctagtagccgaaagaatgcacttcaagaggactcctgttgtgccccttctgtacagtgcttccccaatgagagtgtagtgagctgactgccttgcattgcgttctgctgttgttttgtcatccggctcctcttcattctttatatatctgatgattggctccctccagtcatcagaatctgactctggctagctcagaaca

SEQ ID NO: 44417 - DNA, 399 bp, Zea Mays
agcgggagacggcgatccctcagacccagaggaaacttcctccgagtaatctgaatcgccgaagtcctccgagggaggacttggggcatgtttccacttatcgccagcacgacgaggcgagcctcgacctctcctgcctttgcccatgattggttggagaagaagagaaagggagaaaaagacacagatgatcgaaggatgagtgaagagaacagcggtgcaagcaggctatttatagaggccgggggtgaccgtccacttcctaccacgctcgccgaatagtcgcaagtattcaataagcaattcaagctgcctgaaaatgagtcaggcaacagacgccgcttcgcgtaacacgacaccgtttggaccaaggtcaactgctcgggcgatatgattaca

SEQ ID NO: 44418 - DNA, 408 bp, Zea Mays
tcgttcagtgaatgtgcgaggagaagaagatggtttcgccgcctgggtgaggatctaccagtagccttccgcgtctggtgtgcgcagcaagccgttggcaatttgagccaggactcccccgactaaacccgacatattcaatgcccgagcgaagtcaagcaacaggttccgagggagaagcgggttctcgcgttggagcctgacgtcctgctccgcttgggcatggcgatgatcatgatgacgggagttgtggcgctcgcagagcgctctgttgtccggggtttccctactttagaggcttcgtcccgggagacaggttgtgcaagatcacgttccccggcctcatggtgacgtcgtatgttacatcgcatgtttcgatgtcgacgtgcgtgacgctaggggactcct

SEQ ID NO: 44419 - DNA, 296 bp, Zea Mays
tggacgcacctcagaaggccacaagtctggtaagcaggctcgcgcacgacgacgacgatctccatctgtctccacatgcagcaggacgctacagtgcgtgcaacagcagcagaggtttgttcatgccaaagccagcaaactacaaaaaggccgttgctagcttggcttacattcacatgctggttcttggtagtagttttaatttgctcggagaaaattaatcaaagagtctgggtagcagaggttaaaagtctgcagtccatcaacaagcacgcacagtgactgatcgactattc

SEQ ID NO: 44420 - DNA, 277 bp, Zea Mays
cactctcaaggtataattattctgatttttacagacatataggctgcagggaaaaatgtacttaataaaacctctctctgcaggtgcttgggctggacatttgtgctgatgttattattggcgatgagatgatcagaggaatttctggcgggcaaaagaaacgtgtgacaactggtatgcatgcattagatatattgcaatcccgccttacgcagacccataatcatgcatcaatttatttatatcctgtttaattttgtgtaggggagatgctaac

SEQ ID NO: 44421 - DNA, 1288 bp, Zea Mays
caaaaaccctaaatggacccctgagaaaccctggactgaaaccctaggggagttgtatgcaaaatgtgcccatttttggacctaagtgcaaaaaccatgaaattagggtatcttaactcatatgattcacatgtatgtggatttgcaacttaaaccctaagttttgggcctatttgcaaaaagccacatttgagctctattgagttaagtctgaaattcagtagaattggctcaactttgaggccctatatcttccaaattatgaagattttgccctaggtcaacacatcaagtttgtagagctataaaaggggaacaactttgctatagagattaagccttggtactatgaaacgttttgagaaaattggacccaaagatgggctgtcagactatcttaagtctgaattcagactaacagtgtgattgagccacctttgagctgggattcgagcatgatccagtaagaatttgggagtgactgctatagtaagcttgaagctggatagtagagcaacaactttcttaaagatggattaggaagtcgctgcatgaaaaattaagatccaggccttgcaagttgggctgtcaggctgactgaagaatgatcccatggtacagtaactgaaatagattacaagtttagcccccccccctcgccatcggtgacctttgcgccgtgatttgcgctgtcgccgcgattcatgctctctggtaagtggataaccacgatggagtaaagatcttggcaccagatcagctctggctcggtcgctgatgagtttcaccgtacccacttgctcgtcgaccgagatagacctcgccgccgttggccgctcaccgctgtgtgccacatgctaaagcgcttgaccacatcggagtgaaacacgtcatgcatgcccggtgatcgctggagaggtaccacggttaaagccactaaccccgagcgccagtaaccttcttcctgtccggccgccagcacatcatcatgaaattggacgccaccgcacaagcctgctataaattgccgaccccgctttctccgctaggtagttgtgcaaccagtgaagcaaaccgtgcctcgaatcatcccctagaactccccaatttggaattcccccaaatcactcaagaacaccgagcggtttgacctcgccgtggccagcgcatctcaggtcatttcatgtcctctgagcccttgtttcagtatccttggatgctcctgatactctctgacccatccaattgagctagagtccctaggatcgtcgagaacgtgttcggttac

SEQ ID NO: 44422 - DNA, 864 bp, Zea Mays
gtgaagaccggtgacgtcagcgttttagaaataacagctgagttatatcgagccacgtcggcgttttagaagtaacagccgagtgaagaccggtgacattagcgttttagaaataacagctgagttatatcgagccacgtcggcattttagaagtaacaactgagtgatgactgggcacttttacaatcggtacttggcccgggaaaaccccatttgtaccatgccgtcgcatgcctctgctttctgagccctagccttactttccgattccagacctcctctgtttccctttgatctcgcttccgctcagttcaccgacgagattgagatggcgcccaagcgaaagagtcagaattccgccgctgcgattaagcctcccatcgatcccaacagtcaattgcgttttgcaggtaatcacatgtctgttgtttccgagtcggaccttcttcatcttgtttctgtcggagttcttcccccaaaggagctttgctcttggcggatctgtcgtggggttactgtcctgactgaggatacccacgagtccgttatttacattccttttctcatccgcggccttgctcttcctatttctcctttctttcgcggtttccttgatttctaccatctgaatctgactcatctgaatcccaactctattctgcaagtttctatttttgttcacttgtgcgaagcctatcttggaattctgcctcattttggcttgtggaagtacttatatcattgtcggcctggaatgtccgaggggcatcaccatctcgtgggtggtgcgagtttggaaatgcgccgtgggaggaagacagagtacctcgacatcccactcaaggacagcatcaaaggatggc

SEQ ID NO: 44423 - DNA, 393 bp, Zea Mays
tgtacattgattgggcaggctgaacaacaccgtttctctaatccgtcgtgttgctgactgctgagcatcaaagcgttcccctttctattgcttggacccacttgacccacatttggcacccaccgttcgtgctccgacaaaccattcccgcgactgctcccaagaaaacaactttgaaggctaccaacctccctagacgacacggcgaaggcggccctcctcgctgagaaaaagggcaaagcagcccttgttggtgacgtccctcttgaagccctcgatgatgaagcagtcaatagcaagcgacacctccaggagaactcgcccaaaccaaagggcaccgttcgcaccttgggacccccacaacttggtagctctgaaagactacttcaggac

SEQ ID NO: 44424 - DNA, 476 bp, Zea Mays
atggggtacctctatcgtgtcttggccaacaccggtggatcaatgggagagagagagtgtactggggatgccacagcgtatgtgcctgggaggcttgaggttgaagaaggatggcgaactgttgatcttttacgcaacggtcgcgattagaacagaggataccggttgggttggatcagcctgtgctgtttgatcaagatccaacaagcgtaggctggtctaggtgttttaaatctgggtcgttggccgaccaatgggtggcacggatccaagcgagtataaccctacgcgggatgtaatcgtgtccgctcatttcgatccgatagcttagatctgagagtaccccttcggctcggtaatcttactaaagagtccccagtgttttgtgttatgaacccgccgtccacagggcagtgcaatgagtcttaggaattcgttcacattagcccctgcacttctcggtatttgaggcccta

SEQ ID NO: 44425 - DNA, 933 bp, Zea Mays
cgcgcccgcggggttggctttgcacagaggaccctaggtttttaaataactaataaagagccctgcacactattcctatgtgtcactgccatttacaccaaggtccctcccctttctgtttcttcacaacttgagatccccgaccacggcggcggagcagtggctctggcgagccaagaccggccagaaaacacaacgactatgcctctctattgctcaacacctaattctacccttggcgacactaatccctcactcaatttcggagttctagcccacaatctctttgtccacggtgatggcgcaaaccgaggacaattcagagtgttcccgatgatctacccaggtctagttcaattggctgggccaatgagtatctacagcacataggcgtattgaaacgagagcgaggagggcgtgaatggacctgtagagagctggccacggcgagctcacacacggcggagttcttgactgatttggggatatcccaaattggggagctgtggggggcgattggaggtgagggctggttcactgggtgcacaactacttagcggagctcactagggcggcaatttataggttccatcggtggtggcggctaattttttagaagacgcgcagcggccggggagagggactgagtcattggcgcgggtgatcgtggctgttaccgtggcaagaccttaggcgatagatgggctgtgtattgtgatcaattgcgacgtggtaaaatggctgacagcatggcataaccgcgaggaaccgcggcacgatggcgatggtcgcgcggcaatgttgccgggcaaaggggcatggcaacagggcggaacagtggcctaagttcatcctcaacgcgatatttcttaccccgggtagttatctgcactccgccgggcacgaatcgcggtgccagcacgaatcagagca

SEQ ID NO: 44426 - DNA, 466 bp, Zea Mays
tggatggatgcgccgcgcccacttcaggatatgaaatcattgtgggggccaaccgcccaaccctacctggtctcccgacattgcccattgcttgcttcatccggcagtttctgttttacctgtccacctgcctttctaatttccttccgttaatttgcatggaggatatgatgtgtgtatcatttggctgatgaagtttacttttatttgtttgcaataatcacgtagctatgaactctcatgtttgcctagtagcatggtgctcacactactaccctcgcccatgctgtactgcccatatatgatcagtctacaacagctggaaaagctcatcaaccaattgttgtgtactgataagccttatgtacctagctaggggaacgaggtcttcttttccggtcgtacgttgtagattgatgagctgatttatgtgaaagtttgactaacatattctgcaactcgaata

SEQ ID NO: 44427 - DNA, 490 bp, Zea Mays
gtacaaggtccggtactaacacacatggtggatggggtgaaccgagaatgacaacctatctgtcgacgaacatggtggatggccgcactgacctggaattgctgcgccaaacaattcgtttttttagaaagttcatatggtaaactattggagggggtaaattaaggttggtgcttattttgttaacttgtctctggtttagcaagtaaattatacaacagagtcctgaagattctctaattactaaaaactactagagaggaagataaaaatagagccctctatttattttgttcatcgatcacttggcataatcatgcattgacttcccaaatgatttttaaggagggttttggagacattctgagtgtatgcatatatagagatagattcggtggaatttagcttttaaactgctacgtggtgcttgcaaaaaaacaaaagaaaacaaaaatggcatgtcctagagctcaggtacatgaacttttac

SEQ ID NO: 44428 - DNA, 937 bp, Zea Mays
ttgtattcaagactctctctccaaggtatgtcatggtgttcttggggagttctttagattccttgaaattcttgtaaatccactcaagatagaggcaatgtgtgttgtatggatttacactctattgggtgagatcgggagaaaacactgttgaacaactcatgttcagctgaacccatcctttggttcggttgaaccattcatgaacgggttcatcgtgtctctctctttgattttgtcactgcaccttgtattagttgtatccccctagtgtgcctttgccacctcgctcccaagatgttcctctgcaacaacccttcgaagacattgaacagtggcaccaacatcattatggtgtccccttttcaactcctgaagatgatgctatttggggacagggtcagtctgttccacctccttcgtgcccagatcagccttcgtcctactaggctcctccgcctccacctagtaatgccccttcatatgatcaggacttcgccatagcctttcctgagcagttcttcgcaccgcctctaggtggtgatccctatagtgggttgtgagatgtttctcttgcctttttggtgcttggtgccaaagggggagatgtttggggaaggagagctggagttatctttcttttcatttggtttatgtctttgaacatgtgtcttgtaataagtatgtcatgaactctatgtgatgcgatggatctttatgtaatggacacatatgtgatttcatgttatgatggatatcagtttagtctttcttgagcatttatttatggtgtaatcttggttgttgagatatttgtgtgcataatatgtcatatgcattctattcacagatattctatgacacgtgtgggcacccctcgaacatgtgtgtgtgtgtgatttttttcactttctctccaaatgtgatgcaaattgac

SEQ ID NO: 44429 - DNA, 472 bp, Zea Mays
ctggaaaagcaacagaacaccttacctgcagtgtcggggaatagataggctcaccagtttccagcaatgttaagttctcagatgactggtcagcaccaagtcgaaggacataatcaccagtattatctcttgcatacatctcgctgtcaggaaacttcgcttctgacaacctgggttctgatttaccaatacttgcctgatttagcaaggaatccagtgactccttagctgcttttcttctttttttcctggcaatgcagcaatttacaacttggatttcctgatgtagtaaacaagaattcaaatctggagcaacctccagtggcatacgaggcacaggttgccaatcagaccatagtttcctcaactgcatgtagaaaaaacaattgtgtttacattttattgattattcgtatctactaaattagtgctgtcatatgtaatgactaatgaccttatacctagtttagta

SEQ ID NO: 44430 - DNA, 467 bp, Zea Mays
aaacaacttagtgacttggtcttcacaaaaacagaaggttgtcgctttgttgtcatgtgaagcagaatatataggagctgcactaggaacatgtcagggtgtgtggctgagcatgctcattgttacagaacctgaagcttgtgattcttcttgctctagctatggtgtttcaggagaatgaggcagtagtggtgatgctggaacaccccctgaatgcccaccaccagttccactgagactgtgtccaatactcccagtgccagaatctgaaataactggtagatggcctacctgagctggtatattatactgaaactgtatttcacaagttttaggtacacttggaatctgttcagtactgttttcactgtcccaattccaactcttatcttcctcaaacagaacatctctgctcacatgtagccactcagtggaaggatcaaaaaacctgtaacccttcgtgcctg

SEQ ID NO: 44431 - DNA, 528 bp, Zea Mays
ttgaagaaaatgtcaaggacttgaggattgccaagaggaaggaacaaaagaagaaaatcaatacctcttccaaaagcctcaaccacgcctccataaaaggtaacatccaaggtaataatcaagtcacacttcacactaagagaagtaagaagtgtagtgaatgctttgaaaaggggcactcgattaggtcatgtccctatattaaaaatgacttgattattaacaaggatgatacagtttgttttaaatgctctaagaagggacacttatttagatcttgtccccatttaaaacaaaaaggcataaggttagaaaagaaaatattcactaaccatgtagcaagcaagaaacaaggaaggaagaaatcttcaaggcttgaagatcgcctaggctacatatgccgaaagaagggacatcaatgcaaagattgtcccattggtaacaatcccactcctagcttgtcaattatatctcatacaactaggcaacccaaaattgcaacttgtgctagaaaggtaatgagtttac

SEQ ID NO: 44432 - DNA, 437 bp, Zea Mays
agtgagtctaaagtgtgaaggtaaaaccgtgatattaccaagtgcctatattagattcttaatatagtaataatagattaatctaaaccattcaaaagaaccttgtactctactactagtagtatttatattttataatcacacaaattaaatgcttggtagtagcttatccatccataccaattggcatactcgtctgggaatcctgtggcctgcagggcgagcttggacgttgtggctggtatcttctttggcatgctctcagcgcatcttgaattgaataaaaaagcattatatggaaaaaaaattatagataagtattattagctgtccttgaaagtaatcttccggtacgaacacggggtgctccttgccgatcctgccctgctttgcggaaaagctctttcgtcatatatatccacccccggccgtctgag

SEQ ID NO: 44433 - DNA, 484 bp, Zea Mays
gtactatgctaccgtcgtcgtcgcgcaggggcctcggcgtataaggggatggagcacgactcgtgctggtgctggtgagcaggcgcgagaggagcggccgagcggggatggagcacggagagaggagcggaatgcgccagggcgggatggagtacgggagaggagtcaccgaccgccagggcgggatgcgcatgaccgctagggcgggagaggagcactgagtgcggcacgaggatggaccacgtgagttagggttgagtacttgagttgggtctataagactgtaagtctgctgggacttggacacttggtagtcgaatacgatccatacgtatgggtgaagactcatggaagcccatgtgtatccagggaacacattactatttcctgaacccaaatatagcacacgaagtgaatgttttcttgtattgttgaagtttttatgatcttcattcttcaagactaaactgtgcacgatactttt

SEQ ID NO: 44434 - DNA, 662 bp, Zea Mays
gagtggattttagaaataatccattcaaaggtcttcatttttatgccttcagaataaccatgtgatgccatctatccctgccttgttaggtctaaaatgaatttgatcgatgacaagtttggacatctggctagttgagacagatagccttcggctggacactgccttgctctgaacttcaatgcttctgttgattggacttgcgcttcagtaaccacatttggacttcctctcgtctcagccgatctcctccttttgtcgtggtacattcattgcgtatattttgttgatattgttccttcacgaaatcttgaaaattctgggcaacacacccaatgagtgtgcccaatgggtgtcttggtgcgcagagtgatcaccctaagtcatgtaagtgtgagcatgtcacaccgacttaaggtgtttccaacttaagccatttccgacttaagccgattgctccgtcagtagagtatggtgatcaccctaagtcatgtaagcgtgagcatgtcgcaccgacttaagccgtttctgacttaagtcgattgctccgtcagtagggtatagtgtccaccctaagtcatgtaagcgtgagcatgtcgcaccgacttaagaagtttctgacaaaagccgattgctccgttagtagggtatagtgatcaccc

SEQ ID NO: 44435 - DNA, 314 bp, Zea Mays
tttaggaaccaccaatctgctttcaaaccataatataccctttccatcttggcagaaacatttatacttcttggtcttctgacggagattctccttaataatttgcactcccttgtcgctgagttgggccatgatgatctggtcttgcaaagatggctcaacggaaatgtgagacaaagcaccagaaggaattacttcagtcttcatcttgctcaactcatcacacaaggtgttaatgcgagaatccatcataacacatttgcattgcaacttccgactcaaggcatctgctaccacattggcttttcctgggc

SEQ ID NO: 44436 - DNA, 769 bp, Zea Mays
aacccgtaaagaatcctctccactatttctctgtctcactgagaactacactaaggcccctccctttctatttcttcgcaaggtgagtccccgatcatggacagcgaagcaacggcttcggcgagcctgtactggctggataacgcaactatcggtgctttggtgtggctgacacctaattccacccctaaggaccatttcccctccattaattccaagattccagctcacaatcgttctgtccatggtggcgatggaaaccaaagataacttaacgtgttctaggtgattcaaggcggtctaattcaatcggatggtgctgtgagcaacagggaacatgagggaggctagaacatcccacagaagaacacaagctaacatgtagatgtctggccacggtgaggtgttcacggtgcggaaaactggtttggggagaatgaagaattagatagctatggtggctaatcggaggcaggagcgggtgctctggcttcgtgataacccaacggagctagcggtatgctcaatttataggacccgagggtggtggctcttgaatttggaatggcacgctggcggacggagaggaggaagagcactggcgcaagagatgcgtggctttcaccgtggtaggcttaccagcgacgaaccagctatctagagcggcttactgcgacgtggtgaagcttcaaggcacgtggcgccccatcggtaggcggccaactccggcgaacttatctggaccggtcgtaaggcaagggggtacggc

SEQ ID NO: 44437 - DNA, 712 bp, Zea Mays
aattgttttacagccatctcactgaaatcggtcctctgacccataaattaatagagaccacatgcctcaaattttggaatcaggtcctccataactgattgtcccagcataaaagtccaatctatcacttgatgcttgtgaatgttggtatccatcagtgtgccccaaaagacatcaaattggagccgagtgtgaaagaatgaatattagtgtctgagcgcaaagcatattgattgacagtcctcctagagcaatatattctgccatagagaacctcctctttggataaggccatcccgtgatctcaatcggatagtcaggatgagcatgtggaacatcttctgtgtccatagagacactacccccagctaaagattgggcctctgagtctgtggttggattatagtctgcatcgtctacacgagggcgctttgatttgaaacgaccggcaagcttcttccgaagaccacctagaccactgcaatatatgtgagaaataaccataggtgaattgttgataacgccacaatcatagagaaagaagtgcaactttctgccaggggccggactgtccgcgctaggggggcggactatccgtgcaagaggtccggacagtccgcgccaacctgacggacggtccgcgaccgtcaaggggcgattttgctagaaccctagtcgccccatccattcaatcgacgattcaacagaaaat

SEQ ID NO: 44438 - DNA, 683 bp, Zea Mays
ctgtgctgggacgtacgcccaagtctccatccaataatttgccagacacgtcccccagtggttggtggcatgtcgcggcgagatccacgttcgcgcgtacgattatccataccctacgccatcacgcgatgaacagagcagacagacacgtacggtacgggtgcttggtccccatctatccccgtctgctgggtcgagcaccacgcactttccggctagctgctgctactactaatcctcagttcttttttattgttgtgttttagttgaaaaaataaactagcgattcataaatattcgagaaccgagttagtgctactctcaatataaactacgagtcgattcaagtcatgacaacaaggcttctctcacttaatatgcgcgaatcttatcttgtttatcattagcttcagtcagttatttgagcgcacttttgacgattcttttactgaaaaatggaactcaaaccctcgacattgagccgtatgtctgataaagagctagtagtgcattttatcggtgtaattaatattgctattacattcaataacaaaggcttagaaattaaaacattagtttataaaaaataatactatgcatcattgcctcttactagggatggtggtgggcaagatatccgatgggcacacaaagccatacttatacctaccagataaaaaaat

SEQ ID NO: 44439 - DNA, 615 bp, Zea Mays
gttttcaacaataccactggtcttgttgaaatagcgatagacgtgacatttgatgaatctaatggctcgcaagggcatgtttccaatgatattgcaggaaatgaagaaccaccttgtgaggccataaagaagcttgcaataggtgaagtgagaccacaagaaaaggatggtgtagaaggaaccttgtggatgacaaatgaggtctttgatgtgggtgcaaaggtggtgggtgataaatcctccactcaagcaaacccatcaacctcaagtcatccaattcttgaagaagttcatcaaccccaagagctgccaaccatggtggaagatgaacctgaagttgttgttgatgaagtgtctcttgatcaagaggatggtgatgaagagcaaattcaacgacaaccatcattgtctcatcctcgagtccatcataccatccaaagagatcatccagtggacaacattcttggaagtatcagaagaggggtaacaactagaaatcgtttagcaaatttttgtgaattttactcgtttgtttcctctcttaagccacttaaggttgaagaagcgttgggttatccggattggataatcgcaatgcaagagaagttaaacaac

SEQ ID NO: 44440 - DNA, 336 bp, Zea Mays
cacaatggccctggtctctagaggcggttcttcttataacccctcacctgctttgtttgctctatcttccttgttgtctatcatagaggagtaggttgggcgccttggagatgttgagctagtgcttgtggctagccactttgcgtggttccataataaccaccaaaatcgatggtgtggtgggtcgaaggatagatgctacaactgtagcgaccccaaccacttcatcacctattgtcctaagaagggcaagtaggaggctagcccgcgcgaccactctagtcagcgcaagggcaagcaagagcacacctctggcaagcataagtccagggggag

SEQ ID NO: 44441 - DNA, 789 bp, Zea Mays
aatagatcctggcacacatatgctatgcacccggctctgccctttggaaacgggtgtgacagaagtggtatcaaaggcaatgtgaccgtaggtcgctagattagttagaaatggaaagcccagtcagtatttcaaaacatggtctattttcctcgataaaaacttagtttatatcaaaactcgtctcttttattttcaactcttgtctgattctttgtctatcagaaagttctaatgagaagcattgcaagattatcaagctaggattgtggaacttgaagcgaagttttcctgaagaattttttttttgaagttatcaacgatgccctattctctgtcttatccccactccgcaagaagttttgttatggatcccttggatctattaccagacttcttggctaggttgataggattgttctttagtattaagattttcgactagatcggtaatggcgatattatattatattatattatagtggttttctaatccataatattgctatataacccttgacttcttatacttttgttttcttgccattatattgccacccttgcgcaatatctaccttgatatactgaattctttgtctccttactcctacttgataatgcctctctattttgtctccttgataatgctttctccctaactcacttcatatccttagttgtatcatttatcctcactttaatagttcatgattagcttatttcactattggccaccgacaaatatgtcttgtctaactccttgataattcttacctgactccttgactt

SEQ ID NO: 44442 - DNA, 490 bp, Zea Mays
gttatctaaacgaatgggtacacaatgtcgtaatgacatctattgatcaacaaatggatgacacatgccaccccacactcatctctctcctcggtcgactcacatagcggcgctgacacctgacgcgacggcgccatggatggcagatccgtaccagggagattttaaagcataggtataagataaacattaatgtaagatgtagaggtgtcaacggtaaagatgataataatgaaaagcataacaaaggatggagttaaggcaagactagcgaagtggcaaggtggagaaacccatcaaggtaagataggtaaggttccaacagaatggttgaagtaaaaattcattaccgagggatgttataagggaacaacgagatcaccaaggatgtacgaaataaaatgattgctcatggattatcaagaaacaagggtggccaagggcatgtaaactgacatgtttataaacaaacattagggtataaagataa

SEQ ID NO: 44443 - DNA, 638 bp, Zea Mays
ctttaatcgggactggtttctagggtagcgtgacgccggtagggggggggatcgcttgactcaggcgagagtgtcgccgtggttggggcctcgttcacgtcgggtcctaggcagggtggagaagactaccgcagatcatcggatgatctttggacggtcaagatcggatctcgacataccggttcgcagagtggccggtgccgtccgatctcctgggaagggctcagattagaaatcgaatacccctttcgccaacattcgatctaaacaatagatctatagatggatggacctagtcgcggtttgccgcgcccttgattcagggcgggggatcacgatccaacggtcggaagcgcatacccattcataaccctcaccaatgtaatcgtggccgtccactcgtgatctggcggccagaaacgaagggtaccccttcggccagtcggattaacaaaagagccctcggattttaatggaatccacccgcagtcctggcagtggaagtctgagtcttagaaatatttgcgcaatggccccgggtgtttgttttaattatgcgcccgatccaggaaatagaaaatccagtaaaagtaattagaaaatgatttttaatgtgaaaacaagtgctagaatttgtt

SEQ ID NO: 44444 - DNA, 292 bp, Zea Mays
cggtgacagcgtgatcaatggacagtatgaagcgttcccggtgatctaccccgatctagtgcaattggtggggtcgatgagcttcaaggacatattagagcgcaaaaacaaaggaaaagagggtaggaatggacctgtaacgcgctggccacggtgggagtctttcacggcggcggaaaaccgatttggggaagtgagcaatttggaggatctggtgaacaattggaggcaagtgttggtgctttggatgggtaattaccctacggagctcatggcgcactcaatttataga

SEQ ID NO: 44445 - DNA, 663 bp, Zea Mays
cagaaatatctgaagtcctggctgtcaaactgtttgccgttgtcgactgtgagctcggacgggacttcgaatcggcaaacaatgttttgccagaagaacttctgggcggtcttcgatgttatcgtggatactgccctagcctcgatccactttgtgaagtattcgacggcgacgaaggtgaacttgaggttcccttgagccgtaggtagtggcccgacaatatccagcccccagcgttgaagtggccatgtgtgggcgatcagcttggtgaattgcgaagggttgcccgagcggggagaaaacttctggcaagcttcgcacgaccgcgtgactcgattcgcggtgcagattatcgcgggccagtaaaatccttgacggatcaccttggcagcgagggccctatgccctgagtgggagccgcaagttccgctgtggacttcgcaaaggatttgaatgcctttgatttcggtaacgcatttaagcatgggttgactggcccccttattgtatagctggcccccaataagtacgaagtcccggcttcggtgcttgaggcgcttggcctcgttgacgtcacttaggtggtattatccttacaggaacagggttattagggcccgccaatcttcagtcataatgaggttgacgatgcgatggccctag

SEQ ID NO: 44446 - DNA, 569 bp, Zea Mays
ctagggacccgcttgaacagtgactcatgggtgcctgcattcccttctgaagctgccaagttggcccacgccgtcaaccgtccaccctttttgtcgaattcgttgcaaaagaagctgcgcgaaccgcgatcaatcgctggaatcgaaccctttcatgaccgggtataagtatggacatccccatccccttgtccatccaattcaggaccgccttgtgccatgccatgggggaggccactagggaactcatcatcgcggggcccatgtggacagaagatccacacctccaatttgtcatcggcgtcgtttagactctagaaagtggactaggagcttcacatgatcgcaaggaacaaacccgaggccttgaccggcagaacctgggctgggagggctggcaattgtttgtcgtcatgcaagcttcgtcgcggagctgcgttcgttgtggctagggtccctacatcgcattaacactcgcgttcgctgtggctagggtccctacattgcatcaacactggtatgtcacctccatctgattcgctagggcctcatgtgcgtgtagagccatc

SEQ ID NO: 44447 - DNA, 508 bp, Zea Mays
cagatttgtagctacgacgacgtgattcagacatggactaggcttagtgaacatgccaggccttcaagtccaagttggcagttaaaaattcccctccatagagtaggctcagccgtgcgtgaaccttggttgccttgcagcggttgttttgtgccactgcatgtcagtcacaccatgaaccttggttgttttgtgccattgcatagagtaggcttagtgaacatggagagtgagttgttcccggacaaaacttcactactcacttcccttagtagctagaggaatcttatactatttatattatattacccccaatagttgtcctccttccttttacttgagctttcactttcctttccagatccaggatgcaaagcacatgtatagacaactaatgcttccatatatgatagatcagtcagtgggcctccagtggttttgcattgagcatgtgcacattagtgcgatctgtggctccttttgcattaagagagtgacaagagcgatt

SEQ ID NO: 44448 - DNA, 293 bp, Zea Mays
tggcgggttgatttgtgaatgtttcagggtctctttagcaataattacacagcgaaggggtatgggtgaatatctgccgttcgatcagattcaacgacacagattagaagttacccataccgaaccgatatgcaatccgagccacccaacgagcgattgatgtcctagatttaaaacaacccagaaacgatctcgttcgtccgcccgcgatcagtggcccagatcttatctcaacgaatcgtttttccctgctaatcacaaccgttcaaactacatctagcggccgcaacatc

SEQ ID NO: 44449 - DNA, 495 bp, Zea Mays
gaaatttatttgatcggtgacagattggacgtctggtagatgactcttggctggtcttcatttcgcttcgtgcttcaatgcttctgttgattagacttgtacttcagcagctatttttggctttcctccgatctctatcaatatcttccttctgtcttgatacattcattgtgtatactgtatggatgtgactgcttgggaaaatctattgaaaattcctggatgtcccccccaatgggtgtagccaggggacggcttggtgcgctaagcatttagcaaactgcccatgaatagtaacttgacatgaccgcggggtgtaatcatatcgtccaagtagttgacttcagtcccaattggtgtcgtgttacgtgaaacagcgtctgctgcctgacttgcttccagacgatttgaatagcttattgaatatttgcgactgttcagtgaccatggtaggagatgagtggttgcctcccgtctctataaatagagtgcttg

SEQ ID NO: 44450 - DNA, 451 bp, Zea Mays
tcttaatcatgtggctacaaactccgtggcggaaggatctcgtctcgcctaggttggaccaaaaaattaggccgttgggtttggtctggtccctgatagaactccgtgctgggctgctggctcttgtttgaaatcagagcgagcgaatgctcctaggcgccctagattggagaatgtctgtttgtgtttgtgtttgtgtttggcgaagacacgtcgaacgaggtcggaacgtgagcgtcgatcgtgcgcgcgcgggagggagagaatgccatgttgatgttggtgacccgtgtgcactgcagtctgctccccaaactcgactgtacatctctgctgctcgagcctgctctctcagctctctcgcagggctcttgaggagatgcacatgacgacggcgatccccaggccaccccgtcctgttcggctgttcctgtcccgcagcatctcgccc

SEQ ID NO: 44451 - DNA, 527 bp, Zea Mays
taaagatacttccagagtccgaaatgggggagaatcccaagaaaagccttgcacagatgtacgaaaatggcaacttgtagaatagagttagggttcaagtgtgtcagatttaattcgtaaaaatcaaggaggccgcggaaaaaggggagatgggaagagcaagcccgcggataagaaacaggacgtaaacaacagattcatgagtgtcctctttcggaacggtgacaccgcggcagattcaccaagaacaaagctcttttggcagcaaaacctcaatctcaacaagatggagaaggtcagattcggaggtaatagacatgtggttaccagcaaacggaagctggctgttggggtcgatgggcgagatgatcgcagcaatggtgctttgcctcttctgcttgggagccatcgcaatcttttgggtaggatgagcgggctcagaatttcagggaagcagaggagcgactgaagggaaaaagtgaagttagggttcggaaatcaaaagggcacgtcagcgcgagtataaa

SEQ ID NO: 44452 - DNA, 367 bp, Zea Mays
tcacgctctccattaatcggatcgctcccgttgagtcagaccgccatcgttgagtcgcgtattttttgcatgccctgtaggcaatgtctgtctgccgcgagccacaattgcgcctgttgcgcacattgtgtggatttatcgtgtaccctaatcaccgagccataattgtgcctgttgcgcttattacgaaggcttgctatactgtcgtagccctgatggctgcacacgcgttgacgtcagatatgctagagcttgtactcgcgtggattgtggtgggttgttaaaggtcctgaagtcacattatatgcaaccttagtaaacaattttgttttcactctatattttgtttgattgtgttgtgtgacat

SEQ ID NO: 44453 - DNA, 298 bp, Zea Mays
gcacttgggaaataacaaaccaaagcaatataccaagcatatgcagcagagagatcacaagttcacaatagaaaaggattggtactctggtattccctaggtctagggtagaggactatacaaagtgattcattatccactaatccggtttaagacagtggtggggttaaatcattacatggttttaagtccctgaacttgggtgtttaagtccataaacttaggtgctccaacttttattaaagtctaccatcttctatttatctcaaatagggttccaataaccctaatcctatcc

SEQ ID NO: 44454 - DNA, 779 bp, Zea Mays
gctgcatcaccaaaccaattctttttggattgtcaaatggtcacttgagtattcgtttgagagaagagaagatgtccactccagtggacaactgggcaatttgtcagtgaaaaagacagtagggttcagtccagatatggtgctcttggctgtagaggaagcatcagcagggggccaagttgccccccagtctataattctatcacaacttgggccatggattaaattccaaaggagggaaagatcatggcagggacaaagagggtgaggaactttatcctatgtttttggatccccagtgcatgcgtgtggctgtatggaaacttttttttattggacaagcacaatttcccccagatattatagccccccaaatggccaactcaaccacaagagaagataacgagattataactggtgtacagcagtacaggtacaatacacataatacttgcagcaattttcaatggtaggtataatggaaccgtttctcagctgtaacgtgtggtcttgtcttgtcttgtgatatggttgctgcgtttttcaattgccagtgcatacagtttaggtacaacaagtacctgttagaatttaggcagcaagttggtgagctctgttcctttaagaacttgctctgcttatgcatcctacgcgactctggatttcagaagaatttgattggtattttatcttatatcaggaggctcctatatccaaaataccacaattcaccaagcttgtttatatcagatggctatatagaagtcatcagtgctcac

SEQ ID NO: 44455 - DNA, 1111 bp, Zea Mays
aggacttcatcagcaataaagttttcgttttccaaaggcattcagactcttgacttacagctgacttcgattgggctggacttgaaatcagcatgcctacctgacttagggtgaccactataccctgctaacggagcaatcggcttaagtcggcgatgacttaagtcggtgcgacatgctcacgcttacttgactaagggtgaccactataccctactaacggagcaatcggcttaagtcggcaatgacttaagtcggtgcgacatgctcatgcttacttgacttagggtgaccactataccctgctaatggagcaatcggcttaagttggcgatgacttatgttggtgcgacatgctcacgcttacttgactaagggtgaccactataccctactaacagagaaatcggcttaagtcggcgatgacttaagtcggcacgacatgctcacgcttacttgacttagggtgaccactataccctgttaatggagcaatcggcttaagtcgacaacgacttaagtcggtgcgacatgctcacgcttacttgacttagggtgaccactataccctgctaacggagcaatcggcttaagtcggcaacgacttaagtcggtgcgacatggtcacgcttacttgacttagggtgaccactataccctgctaacggtgcgatcggcttaagtcggcaacgacttaagtcggtgcaacatactccgacttacttcacttagggtgaccactgcactctaccagcaaggcgattggcttaagtcggaacacgccttaagctagcgttgtatacttgcgttcgcgctatttagggtgaccactataccctaatagcagaacgaccagctaaaattaaaaacacttcagaaaaagagaacatcttacttgctaagtgctaggggtgttttcctgcaccctgttcacagaataatcgggttctaacacaactgtcgtgtgcacatagaattcatattacatccatcctccaaggagattctaactcaataaataaagtgtttttataggacatcactatgttgaaacatctttgcagacagtatccttcacaggagcaacagaagaagagggacgactttcagc

SEQ ID NO: 44456 - DNA, 784 bp, Zea Mays
tagcctatgaccatgtgagccggcgtgaccgagtgaggccttgagcccttgatcagattgaggcggcccactgcccacatatccacatccaagatgtagactccctatccacgtggcccgtgggcgctgtcaggagggaaagggcaggctgccttgtgccttcgttagggtttgtggtggcgggcgacgggtggcggctgcagctggaacaccggtgacacatccttctcgtacggccaggtatcaccttgattcccagcttcttctccctcatccgctcctccatggctcatggcttagtctgttagtcgtcgtcgtcgtcgtcttttagcacatcgcgtccggcctgctcccgtccggtgggttctccataaaaacggttttcacttcctagaagaaaaataaaaggggcattttatggttgatcaacttcaaaaaggtgtttctcggtaaataaaaatctacatatcttttacccatgtttttttgtcgataaggccactaaaacttaatttttagatgttaaaaattaaccacaacttattgtatttgtacacaacattataactatttgaagttttgaaattaaaattcatcctagagtatctacgtttttttgttaagttatttaggtctaaaacttgtttcataaaatcatctaaaacaatggtcagaaaagaagcaattgtagctagtatcttaccatatgcgttcaagcgaaatcttgagttctttaagagatcatatgttcaatattcgtttttattttgaaaataaatttaac

SEQ ID NO: 44457 - DNA, 400 bp, Zea Mays
cttgaatgatatgttttctagtttctatagcacaccattggataatatcattttgtatgtctagaatagttaatgtgcaattactcagagccttctttaaaacataattgtccacctctacattatttgttgcaagccacttcaaaacttcattgaaattccctctattatcattagattcttcactttcatcatgccaacggaatgtcaatccttgctgaaaagaaactttaagcatctaattgaatatgtcaacttgatcttatatagacggtggtcctcattaccaccttcacaatctgttcatcaattgcccccttgtcccttattcacaaatgcgttatatatttcttgtgctgcattgcaaacacttgtaacaccacccatatgtaaatcaact

SEQ ID NO: 44458 - DNA, 476 bp, Zea Mays
ttaggacagataactcatcaattatgtttggtaccaaggccaacttccgcatcaagtgcctacacttcgaggtagtcgacattgatgcaactcatcatgccattatagggagactgggactcacaaaatttatggagatacctcactacacctacttagtactcaaaatgtcgagacctaagggagtgatttctatcaatggaaagttaataagtcctacaactacaccaaggagggatgcagcctagctaagtcccaagtcatacatgcggagtgtgacaacctacaagtggccctagcattacacccctcaagtagaggaacaatagagagctctcatcaccaccaaaaaagattgccaacctacaggcagagtcctccctaacctggcaaatacaacgacccgatggacataaccaaggtcactcacattgggaccaacctgaatccaaaatgggaactatgctcgcttgttt

SEQ ID NO: 44459 - DNA, 364 bp, Zea Mays
atatttgggtattacaaatcctacccccttaaaaataatctcaaccttgagattaagatgaactagggaagaggtgggaacttctattcatagctcatcttctctctccctagtagcttcatcttcaccatgatgactccattgcactttgcacatttttatcactttatttcttgtaacacgagtcaaagtgtcaaggattttgataggatggtcagtgtaggttggatctccttgcacactaagtccttccattggtagctgttcttctaggacacggagacatttcttgagttgagatacgtggaatacatcatgtacattagacagatgatttggtagctcaagttgataggccatctcc

SEQ ID NO: 44460 - DNA, 623 bp, Zea Mays
cttaggacgaaatcagccttaggccttctccatgtctttccgccacttggcggcttcatctctaggtttggtctatcacataacgctgccagatccactcttgcctttacgttatcctttgacttatcaggaatgtccataattgttgccacagtgcctcgacaacatttttttcagtgtgcatcacatcaatgttgtgtggaaggagcaggtcgtcataacaggggagctgagtcaagccagacttatgtgtccacatatgctgctcaccatatcccacaaaaccaccttctgtattggccacgagcccatctatctgttgatgaatttcggcaccagccatcattgtaggtgggcggtctgtcactacgacacctttcgtaaagttcttgatgtctaggcggaatggatggtcaggagggaaaaattgtcgatgtttatcgaaggacgaatatttgccaccctttttcaaccaaatgagcctgagagcttccttgcaaactgggcatgggaacttaccgtgaacacaccaggcgtagaatagcccatacgccggtaagtcatgcatggagtactggtaccaaacatgcattctgaagtttgtctttgtagctcggtcatac

SEQ ID NO: 44461 - DNA, 580 bp, Zea Mays
ttgccatgcgtgtgactgacccgaggctatgagattcctcgtcggagcgttctagagtcaacaatctgcctcccatcgtgtccagcgccatccctacctccacctctgtgagaccatccttagcgtcaccttatccctctcttccggtagtgtcaaacttgtgccgaatggtgcaccgtttagtcacgggttgctcgacggatgtcgggtttgctgctgagccactccacgccatggccttcactcttgtgtcgcagtctcgggtgaagatctcccccgtcgaatcaccatcctcaaggcaccatgttgctctagtcggtttctggtttctgttgaccagggctactatgtgtatctcgccggtgtagtcccgccactgtgcgttagtgctgcgccactaattaatcacctaaaacttgagaaaactatatatttttaaccacaactccaattttagtgatttacaaaactacgatctcgtagcgacgtgaataatactattgtgtggtttgtttccatcatttgtgtaatgttatcatatccattatttgcttgattgtatgtattgctacggtagata

SEQ ID NO: 44462 - DNA, 620 bp, Zea Mays
cgatttgattggttagatcgggtcacataaagacatacagggtaaatagatgtaatttatgagatctagatatggccctcttctaccttccttctctctgtgtgcttctgcggtagtgcctggagttcggcgaaggattctcggcttgaaatcacggtggctccgaacttctttcacgctcgacgatgctgtgtaggcctctatggcatcatcgacatctaggtaccggtgtggacaactagattgcgatggctctctctcaatatcattgttttcctcacagacgctaatggcgagctctccgcgtcctgttgcccctccgacgacttcgatggatatgcgatgtgcttggagctttttatgcccaagcggagtggtccgcacgccgtatcagctggagtttgttactgatacaccgatatgctacaggtgcatgtatccgtgcaaaaaaccagatccatgttgatggacctacaagcaacgacagagaaaaagccaggatgacgtcatgcatgacctgtccctcggctagccaaataaaatagaataaagagaaagaaaacaactacacgtacctatgtgtggaataggctatcccataggaaggagaaagaagtggg

SEQ ID NO: 44463 - DNA, 358 bp, Zea Mays
acaaaatatctcggtttaagagtatatttaggcccacttggcaaacaaagttctttttagttaactctagtaggtgtagagaaggcatgaccagcgacagcgttagtaagggaggggtggaacttgccaaatacatacctcgcacatccatggctccaacaagggttcgaatgggctagaaaaacatgagacgaccatgagctacatcagatggacctagctcaagaatgacttaaaagctaggttaaggcaaaaaaagtcgcatggcctatttgggaaattaagatgcttgaagaatgattgacggatagaattaggaagaattcaaaagatgtgggatcaggctatgacaaacaaa

SEQ ID NO: 44464 - DNA, 904 bp, Zea Mays
cctggccgagtgaccttcgacaccatgaatggcccttcccatagcggcgataatttgtgccgtccttctcccgttagaattcagcgaaggaccaagtctcccactatgaaggatcgatgtcgtatagtcttatcatgatagcgcctcagagtctactgatatctagctgactgaattactgtattcaaccgctcttcttccagtacgtcattatcttcttgcctagtagcttccgcttcagctatgttttcgaagaccagccttggtgccccaaacctgaggtcggcaagtagcactgctttcgaaccattgaccatgaagaagggggtgtttccatgcagagctcgactgggttgagttcttaggctctaaaccacataaggtaattctctgatccacttccctgcgaacttttcattcttgtcaaagactttcttcctgagtgcttccaatatcatttcattaggcctttccacctaatcgttggctcttggatgtgctactgacgcatatttgacctgaatgctccgttgttcgtagaaatcaaagaattcagagctattggaattggatcctaggtcggttatgatgctatttggtatcctaaacctgaatattatatcttgtatgaattccactgccttggctgaagttagagaagcaatgagtttgtattctatccatttggtgaatttgtcaatggcgaccaacacgtgagtgtagcctccctgagcttttttgaagggtccaatcatgtccagtccccagcacacaaatggccacgttacgggtatggtctacagttgctgtgctggtaaatggtactgctttgataagaattggcaagcttcacatctttggactaactcggctgcatcactctttgccatcggctagtaaaaac

SEQ ID NO: 44465 - DNA, 379 bp, Zea Mays
ttgcagctcgcgctacccaccagagctagatcattaccggcgacactctcaggggctgggtaactgccagcaccaccctcgggggctgggttttctgcaacagccacctctaaggctgaaggatcctcagtcacctccatgggagtcgggcaatcctgaccaacttcttgacatcgaagactgccttccaaagtcgacgatgtgcaagacactgcttgggatacctctaatcccacgtctggaatttcagagcaaacatccatcatatcaccaacagttggctccgacagtagatcttcaggaacgacatcctcaagggcctgatcaaaatctgctatggacaactcttgaagactgacaagagcagacagagctggag

SEQ ID NO: 44466 - DNA, 463 bp, Zea Mays
actagctccgttaggttgtcacgaagccagagcacacgcccctgcctccgattagccaccatagcactctaatttctttcttcccccaatccggttctcaacgctgtcgtgaaccaccgcgtcgtgaaccatcgtttctaggtccgttcataccctccttaccctcgttttcagcacccttgtgtgctatggatgcttatcggcccaaccaattgaactagaccacgttggatcaccgggaacacctcgggttgtcctcggtttgcgccatcaccgtggagagagtgattttgagctagaacttcgcaattggtagagggattagggtcgcccgaggtagaattcgttgtcgaccaagtaagaagcttagcctttgcgtatttcggccggtactagttcgccggagcaactgctccgccgtccgtggttgaggacttgatcttgcaaagaaaagaaaagggaa

SEQ ID NO: 44467 - DNA, 826 bp, Zea Mays
cttgagtgcatcgtagaaaccctaacttttgcaaacagctcgcctatcctccttgctctcccgcttcggaaatctggcccgcgtcaagcagaccgtacgccgccatcgacggtacgtagcaatgtcttcttcctcatctgctgcgagtgcgtcgtcgaccgatccgtcgtccgagaataccttgagtgatttggtggcgacggagttgcaatcgggccacaccatggagttcggcacttcgaggatctcctcggttcacgtgcaggagatgcagtagcttggatattttggtgacggtgtcgggcgggttccgggcgctgaggagatccctgagcctgagggcgaattggttgtgtttgaggcatttttcattgctggccttcgtctcccggcacatcgtttcgtggcggaggttttgtggaggttcgaagtgcaggtccaccagttgacgcctaatgccgtggttgcgctggcgaagtatgtttgggcggttgcttcttacggtgggcagtcgtctgtggaggtcttcgccaagaactattgcctgcactagcaaaagaggaaaataggagataagattgcacaatttggatcgtccacctttacgccgaggactggaaagacttcggcggaagtcgtggaaatagttccttgtgccaggaacaagtggggcaactggtgggacttttggttttatgtttcttgtggggaagtcgaagatatgcctgggctcctctggccattatgtgctctcactgctatgtggcgttttcacgattcgaggtggcggaggatgatgaggatgaaggggcccttcggcatgctg

SEQ ID NO: 44468 - DNA, 344 bp, Zea Mays
cttgatcactccacttcagagccttcccaaagatgagaagcagactcacttcgagatgccagccaacactgatgacgctgagatagatgttgtgcttagcctgctggccagggaatcatccgactctacccgcaccgagccaatggccatcacgaccgggcaggaatttgggaagaagtggaaactcagaaaccagaaggtgcttgcccaaagcgttcccaccgagtgagacacccaactgcacctgtcaaggagaagaagaaaaagaacggctttggcgacagtcgtgcttgggtcaggatgctggcccttctgtgccagttcctgatgatgtcccaacagag

SEQ ID NO: 44469 - DNA, 296 bp, Zea Mays
atcttaagggcatgaacaactacagctagatccaaatcatgagttggatagtgctcctcatgccagagtagttgtcttgaagcataagctatgactcggccctcctgcattaggacacatccgagtccactgcctgatgcgtcacaatacacatcaaaaggcttttctatatccggtggagccaataccgaagcagtggtcaataacactttcagttgctcgaaagcttcatagcatttttgaggaccagtcaaacttggtatcattcttcaataaactcgtaataggtttaacaa

SEQ ID NO: 44470 - DNA, 337 bp, Zea Mays
cacagagaaggacaataaaccatgaatacaaattttcaaaacctaaaacctgcctagaaactactacggatcgtcaggactagaccgctagacctaggacgaatggccttaggcatagagggagaaataggtggctaattaattaggccctgtgggccagtacttatgtttttaaggatgccctaaaaaggcaccctactttccttttgagaggcaacgtttctttcagcatgcatgcattataaaacacaaagaggaattaaaatttgagctaacccccttttcttcgaaaccatccgggctctctttttctttttccttccaccataatctttat

SEQ ID NO: 44471 - DNA, 424 bp, Zea Mays
aagttggatggatccagatctgatgctgcttatcctgtctttcagccaaggaaacgtatctcaagggaagctctactcctcctcctcctggatttatgatgtgggtcatgaaaaacgtccatgcaaaaattagggaattcttcaagacaatgtttgggcttacgaatatactcttccaagcgggtgaccatagctatcaagccggtgaacagaactatgatttctatgattgtatagtgaggatgtcattcatgctcacggtgttcgtatttgttatggtaaccgtagctcgtatacgatgagcacaacaattcgtcgtcgacctctagaatttaccttcataagttaccttcttggtggtggaaacttataatttggagtgcagggagtaagactatagaagaaaatttgatcgatgagtttt

SEQ ID NO: 44472 - DNA, 433 bp, Zea Mays
ctatacaagattgctcaagaaacagttagtctcaaaagacacaagttatgtgtgctccccctcaagttgtgcatcaagtattagaatgacttgcactttgcacattctagcttccttagaactagaggggatcacaacatatcttggtcaaggcatactctattactttcatcacacaaagatgccaatttgaataacaaatgaaacgccacttaacacccattgaaggctaaatgaaaggttgactaaatacagcaatgcacgcctcagtgacacctagcccaattgaatactcacggaaatctaacatttacttaacctgtacatgcttcatatttaactatcattgcatataccaattgaagatcaacacaatcatgtatataaagcgaaatatctaagcatgtcatgattaagaaggtttcttaggtgc

SEQ ID NO: 44473 - DNA, 576 bp, Zea Mays
tcttgattgtgacctcattcagagctcgataatcgatgcacatcctcctagtgccatctttcttctccacgaataggataggggcggcccaaggtgaggtgcttggtctgatgtaacctttctctgaaagctcatctatttgcttcttgagttcaacgaactcaggtccagataccctgtaagctcttttagaaatgggggcggtgccaggaagaagctctatagcaaactcaactttccgctcaggtggcatacctggtaaatatttcgggaacacatccgaaaactctggcacaaccttgatagtctcaagtggatctgcttcattgctaccaatagccatctggtgacaacctcctttccttagctctggcgagactaactcagtcaccacttattctcctagtggggacaccaacttaattgtcctcttatcacagctaatgactgcttggtgcttatctagccaatttatccctaggatctattccctaagtacccattattacgaggttagcgggaaactctatcctcccttatctccacacttacatccaagcaaacactatcggctcg

SEQ ID NO: 44474 - DNA, 1125 bp, Zea Mays
cgttccttcggcttcagttatgccttttaacatgggttgacttatccttttcctatatagttgtccgtcgattatagcaaagtcactgcttctgtgttttaaccttttggctttgcttttgccggaaggatggtagtggccttggagataaagggtgatgggtgcccaccagtctttggccattattagatttactattcggtgactatcgatgtcctttgttatttgcaggacctcggggctccttgcggctagtgtgccgattatgtgaaaaatacgttagatggcaagggttcgcccttcgctgctgctttggctaacatgtcagcttcttcgttcttgttccgctcaatgtttatccttttaactttttttctagacttcgtacgacaaagagatattgcatcagtactggctctttggtggagtagtcttttttgatttggccggtgactaccttagaatcagttttgactatgcatgttgtcactctaagagctcgcagcttgcgaaagtctaagatgactgctttgtgttcagcgatgttatttgtttatctgagtctagtgcgaaacggagacgcatgacgtatctgcatttgagtcctgtgggtgatgtaatgattgttgcagcacgggcacctgtgtgacaccatgccccattttagtggatggtccggatagtccctgcacgaaactgatgtggttccgaaggccctgtctagtctaccatgaagtcctatgggatttgattgctgtcctaggttcgaaggtgatgttgtaactagagagttcaatagcccatttagctattctggcggacgcctccgaatttctgaataactctccaagaccacgatctgaagtgactcgtactttgcgtgcctcaaaataatatcttagcttacgtgaagccatgatgacggcatacactatcttttctaactctgtcatgttgcacttggaggtggtaagtaccggcatacactatattttctaactctgtcatgttgcacttggaggcggtaagtacttcagagacaaaatataccgggcattggtgggtcttgccctctctgctcctttcttggaccaaggctgcgctgggtgatgatgcaatgtagag

SEQ ID NO: 44475 - DNA, 300 bp, Zea Mays
gtaaccgcccacacatacttcgccagcgcaaccacggcgtttggcgtcaactggtgaacctgcacttcgaacctttgcaacacctctgccacaaagcgatgtgctgggaggcgaaggccggcgacgaaaaaagactcgaaaacaaccaactcgccttcaggcttggggatctcatctgcacccggcactcgccagacgccatcgccaaagtacccaagccgctgcatctccagcacgcggaccaaggaaatcctcgaggtgccaaactctacggtatggctaggctgcaactccatcacc

SEQ ID NO: 44476 - DNA, 599 bp, Zea Mays
gccaaaccaattcagttcttgaatacgtagaaaattttgatcagttgatacaccaactactagctcacaaaaatcacttgacctctgcaatgatcaccactagatttatagagggattaaaagatgaaatcaaaagtgttgtgattatacaacgtcccaccgatctagatactgcttgttctctcgcgatgttgcaggaggacatgttgctgcacacggggcgtcgtgaaatgcgaagaactgatttcggcaactttaatcggtccccaaccaagccagcgccaatgccctaccattaccacctgttgcaagtcacagaactactagtaatactagagatagtcgaggcagtgtgcagaccaccagtaaaggggatgatggcaggctaacaactttgagggactatcggagagctagaggactatgtttcaaatgtggtgaaaagtggggtcatgcacacagatgttctaccaccgtgccattacacctcgttgaggaaatgtgggaattagcaatggaggggagaagatggtggaagaaacagagaatgccccagaggaaccacatggagagagtgttatagctatctatgttgctgc

SEQ ID NO: 44477 - DNA, 492 bp, Zea Mays
taccaacgataacttataaaggagtcttactttgaagttcgagtaaagtaagctgtcaatgatgtgctgacgtctgtagtagctgatatccttttcaagctttgccaatccaatgctctttgacagagtgcttataatttacccctagcatggtcgcggatgcatcccacaatttcttcatcaaccccaccgaagagcattgatccaagctggtagccgtaggatatggcaaattcctttaactctgatatgtcctcttcgaaaagctattgggcgcctaggtgccgaaggtcaaagttcatacttttagaagcaatttggctgtggcagtagcttcggcatcgacgggtatggtagctttgtctaccgaagctgagggtggggtatgttcaataacttccattatattcatcatatgccactgcttttcccccctcgtttttctcctcggcagccgaagcaatttcccttgactgcaagaggctagtcaga

SEQ ID NO: 44478 - DNA, 676 bp, Zea Mays
taagaagctaacatgttatgttaactttgaagcgcaagctcccatagttgccttaaatgctgttagcacctatattgggacaagggatcttgttcaagagttcttagcgtttaaaacatggctactagcagctgagtgggacatgttgaaggtgtctgaaggggatgcttcggacgctgagcctgggttagttcggcttcggtataagtatagattcaaagatgagttcggagaaccgagtgatggtaggctagattatattgaagtgaagtgcaatgaaattctggagccgaggctctacaacagaccttcggggatgtagggtgaacagtatgaagatgtattgaacacctctttttagctgtgaaggttgagtagctgacgaagcaagctctttctgcatgttaatggtctgatggcatgttcttgtagtgtggactttgtcctcaccacaaaacaaacagaatggtttcctttgaggcgcaccaaatctgccactaaagctttagcctccccttcctcatggagcaggtggtcagaatgtgttttgcaaagattgttgctgagcgcttgcttgttgtcttgattgaccttctgactgggtcattctttcctcaccctgttatgggttatggattctttggacacgtcttggatggaatcttcctcccaagcc

SEQ ID NO: 44479 - DNA, 502 bp, Zea Mays
aatctggttccaaaacaagatatgtgttcctgcgatagacagtctccaagaaaccatactgaaagaagcccatgactcagcatattctattcaccccggtagtacaaagatgtaccaggacctgaagcaggagtattggtggtttggcatgaaaagagatgtagcctcacatgtagcagtatgtgatgtttgatagacggtaaaaattgaacatcagagaccagccggattacttcacccattaaaaattactgaatggaagtggaaagagtttggtatggatttcatcgttggtatacccccacactcctgctgggtatggctctatttgggtaattgtagataggctaaccaaagtagcccactttattccagtgaagaccacttatttggtagcttgattggcagagttgtacatatcacggattgtgtgtctgcatggcataccaaagaagatcgtatcagacagagggtcccagttcacctcccagttttagcagaa

SEQ ID NO: 44480 - DNA, 1034 bp, Zea Mays
cctgccagtacttgtcaaaacagcaacatctaccagcgcaacaactacaaaccatacccgtaacttggccgttcgcatgctggggattggatatgattggacctttcaagaaagctcaaggaggatacactcatgtactggttgctatcgacaaattcactaaatgaatagaattcaaacccattgcttctctaacttcagctaaggcagtggaattcatacaagacataatattcaggtttggaataccgaatagcataataaccgacctgggatcctatttcataagctcatagttcttcgatttctgcgagcaaaagagcattcagatcaaatatgcctcggtggcacacccaagagccaacggacagctagaaagagccaacgggatgatattggaaacactcagaaagaaagtcttcgacaagaatgaaaagttcgcaagaaagtgaatcagagagctgccatatgttgtttggagcctgagaactcaacctagtcgagctttgcatggaaacacacctttctttatggtctatggttcggaagcagtgctacctgctgatctcaagtttggggcaccaaggttaatctttgaaaacatagcagaagctgaggctactaggatggaagatgtcgatgtactagaagaagaacgattgaatatggtgattcagtcggcccggtatgagcaaactctgaggcgctatcatgacagggtcgtacgacattgatccttcgcagtgggagacctcgtcctccgccgaattctaacggaggagggacgacacaaactgtcaccactatgggaaggaccattcatagtagcagaagtcactcggcctggatcatatcgtctcactcagatggatggcacgtaaatcgggaactcaaggaacatagaacatctcaggaagttttacccctagcaatatctcaaaagctattgggatgacaatgtactctgtaaactgggaaatgtatcatcaataaaaaggcttcaaagtccttgaattgttcactgtcaaccggca

SEQ ID NO: 44481 - DNA, 483 bp, Zea Mays
gcagcatgaatgtaaaagaaatttctctacactatgtttgtcagtaggaataaatgagttctgagtcctcttcggatacatataggtcttcaacttcaaaaaccactgggtccacaagtagctcatcttccactagcttgcattcagagggcattgtggaaaaaggttctaatacttctgccaggcatagaacaaaacgaggtcacgccaaatgcaagaagctagaaaaaggaggtcctcgtcgtcttacatttgataaaaatgggattgcctagtcaccggtaaaacatgtcaatgaattctcaagctattgtggttatatagcacacatgcgtgttgatattaggataaaggattggcgaaaagtgcctaaagtggtaaaatcaaacctatgggaggatgtgtcaaagaaatttgtcatgccaagggatgaaacccatacccttaatgtgaagaaggtcgctttgaaatctatgagtaagg

SEQ ID NO: 44482 - DNA, 553 bp, Zea Mays
cggagagagagatagtcaggggcacgtgtgcgttggaccatctgatccgatgcgatccaataggctcgcgacgtttcgtttttactgtacgtagaattggaaaaaggagcatatactgtttgagtatgaataatgaaaagtgaatcgtacgtactattgcatcagtattgaaaagtatttatacatcctgaatagatacattgcgtctgttcggccgaagcgatagccgcttgaccatttaatcacatgtacattatacttaattaggattaaagggagatgtaataactgctactcttctggagacttcttgttactttcggataagatcattgtcgcctttttgttcttcaacactccccttgatcgaatctatcccattacatcatctaggaatacaaaactattcaatatctatcctattctgagtattattatcttacaaaaacattccctgtgttgatattacatcattaaaaactttatatggtaaaacctcttcgagggaaaatctatagaaagaaaagagtataatataatgtcaactaggtta

SEQ ID NO: 44483 - DNA, 618 bp, Zea Mays
gcatttttcaaaccaaatgtcatgacaacccactcaaataaaccaatgaagcctggacatataaaggccgttttagacgcatctttctcgaccataaaaatctgattatatccagtattaccatcaagaaagctaataattctatttcctgacgcattattgattaatgtatcggctatgggcatgggatattcatctttaggagttgctctatttaaattgcgaaaatcaatgcatactctgagcttacctgactccttctctaccagcacaatattggatacccactctgcatatctgcaaggtctaataaaattagcttctagtaaccggtgaatttcgtccttgattcatgggagaaggtctggacgaaatattctagctctctgcttgaaaggtctaaaaccagacttaatgggcagccgatgctctacgatctcacggcttaatcctggcatctcagtgtaattccaagcaaagcaatccaaatattcttttaatagaccgcgatcatttcatctctaggatcggtctccagggtcttgttcacaaaagtcggccttggagttttaccatctcctatgtcaatttcctccaaaggatcggccgatgtaaacc

SEQ ID NO: 44484 - DNA, 416 bp, Zea Mays
ggttgaaaccgcgttttggcgttctaaactataaaacacaatgtttcatgcgctttagaccattagctactctggggctcaatctgttaattacttttgggtccaatccggcccagtctccacatgtataccctactctcctgccctgaagctcaattgctagtagcacaccactctactctctatcgtcgccgccgcttgaaggtgttgttgcaagtcgtctggtacaccttgtgtgccctctccctctgcgacgagtgtgtcctccttccatggcgtgtgtagccgattcttcacgccgtgagccatccatgccgctcctctcccttcgcgctgccctctctccacgcctatgtttgctactccatccgttcacaaatgtttgtcgctatggtattcatgtcggtcaaactttc

SEQ ID NO: 44485 - DNA, 462 bp, Zea Mays
cgtcagatgagccgccacctcagcctcctctccatgagacctctcgtgctgccactaccttgcgtccgatggatcgtggaggtcgaggcagaggttagggccaaggtcgaggtcatggtcggggcctatttgtgcgcctagctaaggggatcgccgaggtcttttccatgtgccacagtcgtgctgttgaggagcatgtgcactggtgccagactcaggcgcttcatgatgacatgtgaagcttcgcggcttccatggaccacccatgccttagcatcctcctcctcctccaactcctgcctatcctaagacactccatgaatggcactagtaggagtatggtgtgcccttcgtgactcctgaggatgaaggtgaggaatttgatgattccttttctagtctactcctgccgtcgctctaggacctatccctggtgaccccaggccttcaggctctggtcac

SEQ ID NO: 44486 - DNA, 602 bp, Zea Mays
cgtagctcgtgaactggcgtcattgagtggttggggcttcgctctggattttgtctcggactcgggtagttctaccgcgattcgctctgatgagaatgaagttggtggttttgtgttgctttgtttagctgtccgttgattgaactgtcagtgtagactgtagacactacgatgcgaaaggttcagctggtagttctcgtgttctgttggataccgggattgattttttttggtggacttatgtattccacgcgtgtaagagtgacaacagatgtgggatgtgttctcactggtcttaagtggtgtcatcaccgtttttacttttctcagtcaagtatacgtggctgtgatagaatcaccacggttcagccttccgactgttcttaatgttctctcatattttgtactctgtacattccaaattataagattttgtcttttctagatacataattttttagatacatatcttttgctatgcactcagacgtagggtctttggtttaaaaaaataactggatatgtaattaaaacaatgtatctagaaaaaccaaaacaacttataatttggaacggagggagtagtagtttttcattctgat

SEQ ID NO: 44487 - DNA, 740 bp, Zea Mays
gttgtctcttatcactatcagctatcaaaggtgtgcggaaagtggtgatgataacagagggacacaaaagagctttactaaaaccaaacacagatgttctctctcaatcatctgcatttcgtattgtccatatttgaagtaaggtaacgccaagtggtgggcatattatcgatcaaatgttcagaagcacatgaattcaatagatattgatatatgtataatctgaagaaaatgaaaggaaagctccgtattatagcagatactagatggtggttcagacacttttttggagtctttggttgaaatggtaaatagtatgtacaactcaactgtgctttgaactgggaaaacaatttcttgttttttttcaagtcggtatattcgtcgagctacacgcctaacaagtgctacatgtatcctcctcattctttgtaccagaaacgagatgcctttgtcagagaatgaacttgaaatcggcttcttgaataattgcagcacggctgttcagagagttggtggacatgtgcatcatgttgcaagctggtaagattgtacaaatagttactgctgaaaattcgatcaggccaggttatttaaatccatagtctctacctagtggtggtggcagaatccttgatcctatcacggttgcaaagtgactagtaatgtggcattgggggtctgggttagaatttctggcttcgggaaggcaccgtggtggtgtgggtgcagagtggcgg

SEQ ID NO: 44488 - DNA, 546 bp, Zea Mays
ctcggggaagctcgactcgggttggcgggcgtcgtcgggaggaattgcggggcggtatacgacctacgcgcagaggattcctcaccggtgtgccatcctcgccgtgcaatccgcacatcaccgtcgacggtgcgcctgcggtcgccaaactaaggtgaggatcatcgtcgagccttcggttacctttgtgaatacagcacacctagaatcgtagagggcagtgctgttgtgggtgtgcgattgctcgtcgtcgcgcgttgtcaccgcagagccgctctgctgcgtgagcaggatccgtgcgtagctaattccattaagtgatagtcctgtgagatttgttagaggatccgctacctaaatctcgagttgagggtgggaatcggagctctggaccgcaattgggtgttcctccggcgatgctccgccgtgtggaggtgtgcgccgccgtcgtcgtccggcagtagaattggggggaatagcacggccgttggatgtcctctgaacggccttgatctgtgcgggcgtatccgttcgcgtgtggtaaat

SEQ ID NO: 44489 - DNA, 908 bp, Zea Mays
attggaaagtggtgtgttgaacctaggcacaaccaggaactagcgtgttagcagtttagagaggttcaagtcacggtgtgtgtaatatcctacgtactcttgctactcatcgattgatgaacataaaggtgaagaagattgcaagctaaataatcaactgagcatcgtgacctcctagtttttccctttatgcttggttcgagtggggtttctagcatgttcgtcgttcttatccacctttatgcttgcccttggttgtcgattgtgttgatctcctcggtgtgatccgagcctctacgtgggtgtgtgccaaagtactgtgtcctatcccctataaggaatagtctttagattatccttaatgttactctgtgtccctttttatagagcaagggaagagagaggtttacataagttggaccatgggtccaattggctaagattccataatcctgatcttatcatattcgtgaaactgtacatacagcgttggattctttagtgcttgtcatacatgttgcagtggcaggtatgttatgttgcttctacaagtgttgaggcctatgccattaggtacgacgtagttggtagctattgtagcattctatatttgataatacttcatggtacattgtccaactcatgtgtggaaacaaggttgatgcacataccgggtagtggtcttgagtaccctattgctctaagtcatggtgatagtatgtatatctagatataaagcaaaacattacacatttattgtgttgtataggaaacttatcctacatacttgcttcatggtcccatcaataggccctagatatgagcccgctttggagttgtaatgccatcgatgggaccaagcacatccttctgtcttgtggacatgttttcacttagtcgtataacat

SEQ ID NO: 44490 - DNA, 859 bp, Zea Mays
cgaaggcccccaacagttgctatagcaaagtcacagctagattatagatcaacaactttgttacagatggattaacacattgtcacataaaaattagagaatgaaggcctctaactagctctgtcaggggttctaatggtacagtactaaagaagatcgcaggttcagtgtatctcaccgtcgatgaccccgcgccgtgatcctcgccgatgctacgattcttgcccggtggcgcacggataatgacccggggtaaaagatcttggtgctgggatgagctcggacccggccactggattattccccgtacccacttgttgtacgactaaccgaggtgtcctcaccggagttcgctgccttcgtagccatgccacgtgcttaggaacgttaccacgtcgcagtgaaccgtaatagggagtctgtccatcaccggaagctttgcctcagtgaaagccacgatagcgctcgcgctagtgacttcctcttctctccggtcgccagcgcttcccttccaaattcagagccgccgctcaaggcctctataaattgattccctagcctgctccgctaggttgttacgcgcccagtgcaccagccctcgcctccgattagccactgtagcgcctcaatttgggattttacccaattcggttctccgtgctgccgtgagccaccgcgccgtggaccgccgtctctaggtccgctctcatcctccttaccctcgtttcagcacccttgcatgctagggatgcttatcggcccaaccaattgaactagaccatgctagatcgtcgggaacacctcgggttgtcctcggttttcgccgtcgcagtgggcagagggatttcgggccagaatc

SEQ ID NO: 44491 - DNA, 414 bp, Zea Mays
aaaagtccaaggtggcaccacagttgcctgaaaaccattcttgttgttggagcattacgaatatgcacccttatatttatcacattgctgttttttttactgttgtgcggaccaatgtttttttaattttttgagaacaacagtgcaacatgcgtaacttagagaaggagcagcaaggtaatccatgtccatcagaagctgttacaaaatatatgaaaccactgaaagcatgcatggaatcaatatgtcatttcaaataaagacgtcaagaagcacctctttgcactacaaaacatggttaaaagcggtttgtaaaaacatataatgcactgcctttgtttatcagtctaggatgtattttcttttgaaaggtcaaatttgtaatcttgcgcaacgaattagttgggttaaaac

SEQ ID NO: 44492 - DNA, 569 bp, Zea Mays
gttcaatttagtgtctgccgcttgggagcaccagtctttgcgccatccggccagtctaacctcgccggtgttcattgctccgtcgtgcgacgtcgtggtcctagcgcggtgaagaattagaagtgcagggggttttctgtgaatgtcagtgagacagtgaatagtggttgtgggttcttaacggaaatccagagcagtggggaactttgtgcaaaatcaacacgggcgcgcgtgggggcgaatccggtctctgctgggacacctcggctgaaatgagcccaatactgttcaagttttcctcttttctttttctatgaaactttggaaatatgtagaaaattgtagaaaaatggtaaaaataccaaaccaattttgctagattcctaattttccatagaatttaataaaaatagttttagaatttttaatccaaacaagaaattatagagtatttaaagcagtccaaaactctgtttctggatttttagaaaatagataataatcccaaaaatccccaaactttttagatgacccttatatattatttagaagctttgggtagagtttgg

SEQ ID NO: 44493 - DNA, 522 bp, Zea Mays
cacacggagacatgtcaatctatatctgatctatcaggtctggagacactaccttgcataggtatctatctatgttgcaaccaaataactcatctacaaactcaaacaaatatgcaggttcacaactgaaactatatatggtaccatcaaaacatgttttcacgatgttatgaggtcagattacaaatagaccatgttagcccaagcatgaaaagaaaggcgagtaagtgatttcttaccatcttagttcaaaagagaaaagaaaaatacaatgtgtcttattagatgtctaccttgtgatttgataatgaaatttgtcatgaagatcctggtaatatgtgttacaccctttcgaacatacctcatgccaaagcacgccaaacttcaaaatatgtggtcagatctaccatcgaatatgatcattattaccaccaattgaaaagcctctaaatttttcagctttatggatatgatactacacatgaagttagcaattgcgtacgctcgttgtctcatgatgat

SEQ ID NO: 44494 - DNA, 477 bp, Zea Mays
agctgatgaaggtaaaccccaaacttcttcaacacagtagcaatcatcccattcagggggaatcttaggccagctttaaagaagcttttgaacaccacaacctcattcttttccggcttcggaatagtttcctctccgccgaaacgaaccagctccttttttgcctcactaaagtagcccagcttcaccatttttggaagatcagcttcagagatggtggactttccaaagtccaaatgactaggtttgcttggcatcccgcagctgtactcatcttcggaaccaacttctttgacatcagcttgcgttgcttcggcagcaggtgtgtcctctgatggaaccagcccagagcgcctcattgcttcagaaatcggaacagcttcggtctcgtctccatcgcgctcaaccctagcagtggagcgtattctggccatttgattttaaattttcttgaaaaattctttggaagtcaataac

SEQ ID NO: 44495 - DNA, 483 bp, Zea Mays
tttctggatctccttttcctgttttctttaattcctggactgcgcctcgaattctacaaaagacaggggctaactcagaagattgtccagacccaggtaatagtcgaacaaggacggcgggttagtttttataaaactcaggggctcatatgaaagacagccagctgaaggggtatcggttcactgccaccgtccgatcgaaataaggtggtccagattaaagagcaaaccagtttgcgctatccaccattgattctgagatctgtggtgaggattcaattaaagcgagatctaatcatgcccgcgcgatgtggatccaacggacaccgatcacccaacgaacctgcacctagttgatctaatctgagccatacaacacagatccaacgaccaacgctcgtcttctacccagagccgagccacggcgacgcgcacccatggcgacggaagcccaccggtaaacacgccctactgtgaaccccg

SEQ ID NO: 44496 - DNA, 640 bp, Zea Mays
cttaaacatggtggaagttgggataagagcttaccatatgcggagttctcttataataatagctaccaggccagtttgaaggtgtcaccatttgaggctctatatggcagaaaatacaggactcctctatattgggatcagactggagaaagacagttcgttgggcctgaacttattcaagaggcagaagagcaagtgtgaatgataagggagaatttgagaattgcacaatcaagacagaagagctatgctgataaccggagaagactactggagtttaaggagggtgatcacgtgtatctgaaggtgtcaccactccagggtatgaggagatttaaagttaaaggaaagttgcccgctcgctttattggacctttcttgatcttaaagcgagttggagaagttgcatatcaacttgaactacccgatcacctggcagatgtacatgatgtattccatgtatcccagctgaagaaatgtctcagggtacctgaggagcagctaccaatggaggaccttagtgttcaagatgacctgacttatgctgagtaccctatcaagattcttgatacactgactcgtgtcacgagaaataaggttataaagatgtgcaaagtgcaatggagtcaccacggagaag

SEQ ID NO: 44497 - DNA, 636 bp, Zea Mays
gccgacgcgttggccaaagcagcagccagaggcgaagccctgccctccgacgtgttctaccacgtcattagcacaccagccgtccgcaacccagaaggcctgcaaataaccaccaatgtcgggggccttcgcattgtcaatctcatcatggctgaagactggagggcccctataaccttgttcttgcaaggatattaccatccaagtgatgtcaacgaggccaagcgcctcaatcaccaaagtcaggacttcacacttattgagggacaactttacaagaaagggatcagtcagcccatgctcaaatgtgtcaccgagactgaaggcctccagatcctgcgcgaagtccatagcggcacttgcggctctcactcggggcctagggccctcgctaccaaggtgatccgtcaaggtttctactggcccactattatctgcgccgcaaatcgagtcacgaggttgtgcgaagcctgccagaagttctctccccgctcgggcaacccctcgcaactcacaaagctgatcgcccacacatggcctcttcaacgctggggcctagacattgtcgggccactacccacggcacaaggaaacctcaagttcaccttcattgccgtcgagtattttaccaagtgg

SEQ ID NO: 44498 - DNA, 521 bp, Zea Mays
ctggcccaagtcagcccatgcccaggcgaaaacacgcgcgcccgcgttgctgactttacacagaagaccctagctttttaaacaaccagaaagagtctgtgacactactgttttgtctcactgacatttgcatcaaggtccctccctttctaattctttacaacctgtggtccttgacaaccaacctcgccaggccgagctccagcgagcctgcaccggccggataactcaacggctagctctcccctttgctggacaccgaattcaaccctacgcgaccatttcccctcacttaattgctggaattgggctctaaatcacctcgtccacggagacagcgcgaactacggatgaacagaagtgttcccggcgatctagcacggtctagcttaattgaacgggtcgaggagcatcaggaggacatatgggtactgaaacaggagggcaaagagcatgaacaggcctggaacgagctagccacgacgaggtcactatgcgcggtgtttcggactgaattgggg

SEQ ID NO: 44499 - DNA, 499 bp, Zea Mays
gtcctacatggctacatgtatgtcttcataggcatgcagttgatttctccacaatttatcgactgtattttctttttttctcgctaactatgggcttttagtttaagacgttgcatgcctcattggaagaggcaagcagacatgtcttatggttgttgccaatgcttcgacttctaggtttatcgagcttagtaataggatacgaagacaaacctaggaataactagaccatgttatcaattcactatgccccgtgttgccctctttggtttgctccgtccaccctttactctcctgctcattctacctctcaacacctaccgtcattaaagcacatagtaagtactaggcacacgatgaatccgttttgtcaggcatcttaacttgtaagaagtttgggtccacctgcaagccttataagccttataggactatggctccatcttgtaaggaagacattttcccaaggatctcgaaagaagaaattgctagggcctgg

SEQ ID NO: 44500 - DNA, 306 bp, Zea Mays
atttacacatcctctctgtggtgactccgtccattcacattacacttatctttagcttctccaatatataatttagcccccatctgatttgtttctgaatccgtcactgcacaagcatattcagttcttcgcttccatagcgtcactggtgctcttcggctcttttgaggcacttcatcttaacaccaatgacgaagccatcccttctttcttcgagttatgaagattctccggacaaagatcataccattaagcctaaaacaaacttgggaataactagaacacactagtctaaggactttcggc

SEQ ID NO: 44501 - DNA, 515 bp, Zea Mays
gattcgtatgtcattctttggggttctttttggtctgtggaatctttgatttttgagcggtccttgtttgagcctggcaaataaaaatgtagaatgttaataatcctactgatcgttacatagtggagtacaaatatacgacctgtaatagcatcagtaggaacaatgaacattgatgatggatacaaggtaactatgtagaaggttaccttttttgaggagactgaagaggagcatcgacttctttacctttaccgcctgtagttttctgtagttgttaagttggaatggtgagttgtgcataaatgtatttaaaggtttattgaaatcacatgatagtggaaaacattaacttatagatgcattgaagctatagattgtgaaaactgtagttttttggatagtgaaaaataggaaactgtaggggatggaaaagcacaaaatagttgtggatgcattgaaggagcaggaactgtagggtatggaaaatggtcaaagaaactgtagtgaagaac

SEQ ID NO: 44502 - DNA, 284 bp, Zea Mays
ctcctactgcaatttttaggccgctatctttgcataatggtagcattgtactgatcaatttccactagtagcatcatcagtcaaggagcacaccaaccgaacaatttgcatgacgtaccatttgtaggcgccaagtcttgcttcatttctttcttgtaactctatgagcacataaacatagcacctttctcatggcctagatacatataaactttcaaaaatacttcatcctctcagacaaataggctaacaatattgtacaaccttaatgtagtttttaactg

SEQ ID NO: 44503 - DNA, 448 bp, Zea Mays
ccgggctcacggttgttggggggatccttagcgtgcggccatgggatcctcgatggagggtctggattagatcggtgtatgggttagatgtgggtgttggtgtgtcatcgtggtcgttggatcctgcgatggacgactgcgatttgatcacatcataccgattcgactgtgtgatcgggaccgtcgacctatgtgagcacggtgaagattaggtcgtaccgtgggaaatgatggaccatcggatctggattgagccggtccggtcggatcgtggggatttcagatctgggccactgatctcgggatcaagggtcgtgggtgtgtaccggtacattacatgacttgatctaatgttggccatcggatcttgatcctgcgacggtcagtgtgtaccggtttggactgtataacaagctaattgcgaccgttaataatagatccatcggtc

SEQ ID NO: 44504 - DNA, 740 bp, Zea Mays
cgggaatcaatctgcaaaatccaggggcctaactgttaagtcttcctatagtggagggatggcaggttagtttgtaataacccgaggggctccactgtaaaatagccacaatgaaggggtactgatcagttctggccgttggatcttacatcaagggccatgattagatcggggaaggttatgaactggtatgcgttcactgccttaggatcaaagatcgatggcccgaaatcgtccacgcattgttgtcatccgaaccacatgtcaggcgatcaacgacacatattctatgcatcgaaggtgtatcgctatcttctgatccgggccgtccacacattgatctagggttgagcgaccgtcttccttctctggcgtgcccgacggcggcgcaaccaccggcaacctagccaatcaacccaattgccctaacctaaacactaaccagtgcaaacggaagagacggagatgcagaaccaaatggagaccatcctacctgaaacagtggtgacagccgtgctgcccacggcacgaggcggattcatggcgacgaaaaatgctccgatgaggaattctccatccacagttggtcatttcccacacgagcgccacgagagtattcccagggattgagtgaagctctcgggcccaacagggagtccctagtgatggcgtcatcgcattcacgacagcaacccgatccccatacgcggtggcccattgcgatgaacccttcgaaccac

SEQ ID NO: 44505 - DNA, 386 bp, Zea Mays
gcatatctgctcaagccgcacggaagaggggaagtactggggggttcaccggagtgccgtccagcgcatggcttttccgagcggtcttatctagtcaccggcgacgtgaatcgcaacggcggcggcgtgaatctcagcggagatcgatcgtcggcggtgagggactgccgcgctggcattctgatcttcagcaggcactgtaccatggtgagggtcatcagacaacctgacaaaccatttttgaacatgattttctcccaaacctgtatggcaacacataccaaactctgcagcaaagttatagagctactaaccagctacaagtttgtcatagatgccatggtcaaattctcactgtatcatggttgaattggcacttaaacttg

SEQ ID NO: 44506 - DNA, 824 bp, Zea Mays
tagcacacatgccctcagcatgtcttccaaaatttgatttaccctttcggtctggccatctgtttgaggatggtatgctgagcctcgtattacatgggtcccaagtgattcttccagctgttcctaaaagcgtgccacaaacagtgctcccctgtcagaaacaatggtcttcgaaatgccatgcaagcgcacgatttgatcaacatagatttctgcatatttttctgtcttatgggtagtatgcactggtaggaaatgagcggtcttggttaatctatccacaatgacccaaatggaatcatggtgccgagaggtattgggcaatcccatgataaagtccatggaaatgtcctcccatttccaagatggtatgggaaggggttgcaaagggcctgctgtcttcaaatgattagccttgatcctttggcaagtgtcacacttggatatgtacttggcaatttccctcttcattctggtccaccaatataaggatctgagatcatgatacatctttgtactgcccgggtgcatggagaattttgaaaggtgagcttcatccaatatcttctttctaagctcagggtccttgggaacaaccaatcgatctccaaaccataggattcctttgctgtcctgccggaagcatttgtacttttctgctttttgcttgatcatttccttgataacctgatacccttgtcttcaattttgtgccctcactatttgctcttgtaatgtgggctccaccgagatataagttaaggcacctgaagaaacaacttctaggttcagcttgcacaactcatcacatagggtggtgactc

SEQ ID NO: 44507 - DNA, 727 bp, Zea Mays
ctggctagcggtatgcattgaactagtccggtatgcaccagactagggcatcgcatttagtacacagagaggatgttctggggctgtggcagctgggtgcaccaaactaggtctagtgtgccaccagacggaatatgtagagagctcgttttggactcaggaaggtgggtgcaccagacctatagaaaagtccggtgtgcaccataccaacagtaaacccaataggcaaaagggtttgtacaatggtctgatgacatgatgctgatgtggtggaggtcagatgaggcaccggacggtccggtcagttctaatagctaacaactttacagaacttcactgacctgacctgctacagtgagagatctggtgtgaccagaatatgcataatttggataatagctagttttgctttggggctatatatgtccctcccacagttgtaaagaagcaagcaagtgtttgatactattgtaactcattcctagcaagttgatagtgcttctaacccctctattagtgagagatagtgcttagtgtgagattttgtgttagagagcaaatagagaagctagaggagtgaactttgagctgatgtgttgcttgtagaagctagagagagcttagaagagcaaagcaatcttgagcaagtgtgtcgggtttcagccattcgctttaggcattcgtcggagagcttccaagttagggagagcctcgagattgttgtaaa

SEQ ID NO: 44508 - DNA, 273 bp, Zea Mays
cagggtgtgaggtatattccattaaatttttaccttagtcttatattttctcttgtagtatgcatcgtaagtacttaggtaaaaatagggttgctctctgtttcccacttttagtctttcttttgatttattttaagtattggcaaaatccaagttttatttgtttagctcacttactgtgatggtttggggtggttatcatttttgcagtggtatattagtggtcaggggcctactagatttttcttgccattattgcatgtgtctttatat

SEQ ID NO: 44509 - DNA, 678 bp, Zea Mays
gcgacatggcagtggcgtggtagaagtagaagcagaggagcctggattgtccggtgccaaagatgccgctgacgaccactcggagtcggagagcggttccgaggaggaaccgccgcttccgcttggcagcaatggcaggctattcggctcgctggaaccgcgtattggcgacgagatcagaattctgggcgcggcggtctcagacgtgtgcgtgctagaactagaagcaaatctgggaagaagtaatggaggcagcgctggttccatcgacgccgcagattcctctcatgtccaaaagcccgtgtcgagcagcgggtcggatgatgcggacgattcagcttccgcaggtaatatggggtcgggttttcttttctttatttttttatttgatatcgattctagctacgcgggtcgtgtctcgtgtgtctgcaatgtttttactcatcatgtaaggccgacaacatgcagatgcaggcaatgcgcgatcggtagtactgcgtcctctatctgaagaagaagaagaagacggcggtgctgaggaacacgtcgtcgttgatgaagaaggagaagaaggctccatgagcgaggccacctcgctgttcaagtgccgcatggagcaagtgctggtgcagtccgtttcggaggccggcgtagggcagcccctggcggttggacccg

SEQ ID NO: 44510 - DNA, 518 bp, Zea Mays
aggcatacgcataaaatgagaacaaagaaaatagcaaagccggaaatagtctcccacgtataccttaagaacaaacaaagagtaatacatctctttagacatcaaacaccagtaatatagaagaaaagaacacaaaaacaataagaaacaaaggagaggatgggtgaaaagacgactaggggcgaaacagaaagattttcattatcatgctttcagctttcagcttaaaatgttgaggcctcctgaaaatctcaagcagatctaaatgttatttggagcaagcctaataaaattgaaatttgcactgccaagcaaaatgacatgaaatttgcactgccaattaaggagcaatcgagagcaagagatatagatcaggagataataagatgaaggtagccaccagatcgagcagaacaggtgtgcgtgggcatgcatgcagcaggattttcatagaagcaggcgctggatcaaaacggaaagaacatactacccctttcccctctcagcagatcacatca

SEQ ID NO: 44511 - DNA, 694 bp, Zea Mays
ttcattttgactttcaaattctttaagtcagcagtaaatcagttaaatgcataacttgaagaatactcatccaaaactagtcaaaccaattttgctggattccaaacattatgaactatcaggcaaaaatattgagccccatgttttttgtacaaatttttagagttttgaattaaataaggaaactgtccaaaccttatttatacagagaaaaataggaatacttctatactaggctgaagaaaaattatagaaatacatacccaacatacacactgtttaaaaatactagacaccccagtatacaagaataacccaagaatgtccattaaaaactatttctgcccaaatcttagaaaaataagaaaggtgatgaaaaataataaccagaggatgaacatatttttcctagaacacctaagtgataaagaacataggaaaaatgcagagaaccctagtccagagataatccaaggttaattattttattaggcactaagaaatcaagaaaaccataattaaaaatataaggaccattgcaaaaatgataagaaaatttcagtagactcctaactgctagaacaccactccaaaaataataaagaccccaacccatcacaataagtgagttgaacaattaaaacttggatttggcccatgttttaattaaatcatgagaaagcctaaatttgtg

SEQ ID NO: 44512 - DNA, 319 bp, Zea Mays
ttatctacaatcctttctctctcacgatatgtttctaactcagatggtcaataccaggaagggtggtggaattgatctacctcgaatcgacacactcggaggatatttagacaaccacaacaacaacctgagatggatcctccacagcctccgccagtcggagctgatcccacagttgcagcccagatgcggataatgcaacagatggcagacaccatgaaggatatgcacgcgcagatgcggcaggaacgccaggagatgcgccaagagcgagaggatatacgccaggagatgcgccaagagcgagaggagatacgcc

SEQ ID NO: 44513 - DNA, 430 bp, Zea Mays
atcaacgcgtgtcaggcaaccgactcaatcaacgtctgtgtagacgatcggctcagaagtcgaagagggccgaataagaagaccataatcgaggataccgtggaggtagcgaagaatccacttcgcagcggtgaggtggggctcccgcgaggtgtgcatgtgaaggcacccgtgctagactgcgtaggggatgtcgggtcgagtgaaggtgagatactgtagagcctcggcgaggctccggtatatcgtcatgtcaccgactggggaggcgtcgttgtcgaagttgcttctgttgttgggtgcagcaaagcttggcagcgatgatacattgtgttcaatttctttggaggacaggcttgttagtgttggatacatagaaaccctaaccctaattgggtaggggctgaattagtatatagccaagtatatg

SEQ ID NO: 44514 - DNA, 324 bp, Zea Mays
cttcccaacttttttatcgttccagccctgcaaacacctagctgttgcctttaactttttagcgaaggtaagtagagggcacgaccctgcaggaacagacgcccaagaatgggctaccacatcaataaatccctccatcttaggccaaaatgcttggaaatgaaatctcccttttcctctgctgaaatcatgaaacccaagcagcaaagggcaatggtcggagtcatctgcggctgaactctggagaagagaatctgggaattgttcctcccaatctgttgtgcagaaaaccctatccaatttgaccagggtaggattagagtg

SEQ ID NO: 44515 - DNA, 313 bp, Zea Mays
gtcgtatcacctcacacttgagtatgacaacacattggcgatgaatagaccggaaagtaccacgacatccctggaggtggatgagcaggtgaccttggctgcaccacttttcgggccggtttagtcagcctttgcctttgcacagatcgcctctttgactgttttattggccggtggtgcaaaacggccttctccttcatatatttggcaagaagttgatcaaaagtagggtcagcactgctgagccaaccaagtgtcttgggggtgttttgcttcccagtgttgaagtgtataggtggacgaactaccttct

SEQ ID NO: 44516 - DNA, 738 bp, Zea Mays
gttgcaggtaaaaatggtggagggtggctttgtacaatccacatggtattttatgggtgagaagatgaagtaaacaaccaggttccggtcagcttgtgttgtctagctatggtattatgatggttaaccccccgttaccatcttcaccttttttaacacattactttctctggactgtccatgaaaactaaaaaatattcctaccagtccagcgtagattcgtgttaaatactacaattgttgttgtgggttctgtgacttgtcacctcttccaccttctcatgcactatgattagcatgcgatctgtatcatgtaattgatcaaaatgcattttatgcacaagtattcatgatttgctaagtgtattcagtgtatgcaatccactgtcctttctaacagcatagaattatgccaaacaaaacagtacttgaatgatatattcaaattaggcagctattgcagcaggaaacctgtcaacatataatactttattgttccttagtggggtcgacaagttgttttggcttcttaaatccatctacatataatgtagtcctgttgtctaaccatgtcttgcttaccacgatgaggaggtaatactgagaaatgaggatacaataaaggatatggaggtatgtacttttttctcccaagtaatcaatttatgaatacaagcaaaccgcctgaaaatggagttatgctagaatatcatttcttgttaaaaagcatccccgaat

SEQ ID NO: 44517 - DNA, 710 bp, Zea Mays
cttcaatgtgaacattctgaactagctttttgatgcacattgtatctggttgattctataattttgctggtggttgcttctccaatttatgtttgcgtttcttggactcttaacatagtgcctgcgccaacactgtgctgctctgttatgccagtatatagcgctggttgagtacattctgcaaacactgtcacatcattcttggttatgatcatcagagttgctgtagacaactggacatgtatatgccagtatatagctctctgcatggtcttgctagtatgatggtgttgccaatttgccctttcctacggattttggtttaccatatcttttctatctttcaggctaatgccatttttactatctgaaatgatttctcctgtgatactgataccttattgttttagatgtcttatatgtatattaatattaagggatttactgtgacaagcattggatatatcctgtttgttgagctagtattacccatataccagacaatcagatttgcacctgagcttccctggacataataatgttacaagttgggtgatctgtgatcttggtgatgccattatcacttgaaactaccaacttgataaaattgtgtaggcagtggaactgggttactagccccctggccttgaagccatattttaattttcgcggaatccatttgaagtacaggggaatcgacttgattaggg

SEQ ID NO: 44518 - DNA, 400 bp, Zea Mays
taaacaaattaataaaaattgttttggcccaaggctgcaaggcacgttaacggatgggctggccgactgggcttgttcgcatgctggtcgactgggcttgatttcttgaacgaatgaaaattgaaacgcgccaagcaggctagcggcttgcaccggagactccacggacacaggaactgaagtcgggtacccgctacccgggtacccgtatcctacccgtactttccgggtatttatcgggtagtggtcatcctgtatcctacccgtatccgactgatgtatatccgggtagtatccgtatccgacccgtatacaaaattacccgtatccggtacccgaaaacccgggtattttaagtacccgtatccggtacccgccgggtaatcccgtcccgttttca

SEQ ID NO: 44519 - DNA, 593 bp, Zea Mays
ttggctctcacaacgaacttcctccgccagcaaaccatgacctccacgccagtcgccagtcttcacgccatctgcaacctccatgccatgtcagtcgccgcgtcccactcgcccactccacaacagactcccgcccgcttctccacccgcaagaaggagggcacccgcctagataaggttgcaccggcttctcctgtagctgccactaccgaatggcgattggttccaataattggtgggagctttcctcactaacctaaccggccaacaactcacggtcgagtattcgagtgtcatcccaccacacgctcttccacaagctcgatgacgcctagatgaagatgacgctgaggttccgcttcgccgccaccccgcaacgccggcatcggcctcaggtccagatttggactcgcaacagtagcagcagccaccgtcgttcccgaccatgaggcaccatcactggcgatggcgtcgccgaccagcggcgagtctccccgtgacgtccaaatgagggtgacgccgaggttctaccttaccacccaagtgatgttttttatttcgtatatatgtttcatactaattttttactcccg

SEQ ID NO: 44520 - DNA, 659 bp, Zea Mays
cctcaaatgacttgcatgcccttcttcgctttgggaataaatcagaatgtcatcaataaataccaccacaaactggtcaagatagtccatgaatacactgttcatcaagttcatgaagaaggccggtgcatttgtcaaaccgaaagacatcacagtgaactcatacaacccatacttggtaatgaatgccgtcttcggaatgtctgaaggtcgaatcctgagctgatgataacccgacctcagatctatcttagagaacacactggctcctctcaactggtcgaacagatcttttattctgggcaaagggtacttgttcttaatggtgacctcattcagagctcgataatcgatacacatccttctggtgccatctttcttctccacaaataggacaggggcggcccaaggcgaggtgcttggccggatgtagcctttctctgacaactcatcgatctacttcttaagctcaactaactctggtcctgatactctgtaagctctcttaaagatgggggcggttccaggaagaagctctatggtaaactcaactttccgctctggtggcatacctggcaggtcctttggaaacacatctggaaactcagacacaaccttgatactctcaattgggtctgcttcactgctatcgacagcca

SEQ ID NO: 44521 - DNA, 653 bp, Zea Mays
tagttgtaatattttttttctttctggccaaagttttttaatgtgcacccacaaaacatcttagttttatttttgtcatatatatatattctatactttttgtttatgtattactgttgtatgtatatgggccggtctggcacattaaggcattctgggctatttagggcggcctaacacacataactaattgtgggtcgtactgtgggccgatgactgggccacgtgctggcacgacacgatctataattgtggatgtgcttttgtaggtcgtgcctttatgggccatgcttttgtgggcctgtgttgtgccgggctaggccgagccacatgtatttatatacctgagcccccactgctgggacctagggccttcagccatcacatctttcgtacacctgtgccgcaatgctatagaccccaccaacatcacaaggtactctaggaattggatccccgcctttagctgtgggactatcaactaacatgccaggcgagaggggcagattgtgtcggcttcataaactagaacctccccttgtatctagtggattcgacataagcatggctcgaaaacctcagacctaggaattgggctgaccttgacgttcgaactcactgacatgtggccaagtgggtccaagcaatgagag

SEQ ID NO: 44522 - DNA, 470 bp, Zea Mays
tgtaatgatcggtctattgaaagaatattctgattgctttgcttggaattacactgagatgccaggattaagccgagagatagtagagcatcgactgcctattaaatccggtttcagacctttcaagcagaaagctagaacatttcgtccagacctactcccatgaataaaggacgaaattcaccggatgctagaagctaattttattagaccttgcagatacgcatagtgggtctccaatattgtgtcggtggagaagaaagaatcaggtaagctcagagtttgattttcgcaatttgaatagagcaactcctaaagatgaatatcccatgcccaaagccgacacgttgatcaataatgcgtcaagaaatagaattattagctttcttgatggtaatgctggatataatcagattttcatggccgaagaagatgcgtctaaaatggcctttatatgtctaggcttcatt

SEQ ID NO: 44523 - DNA, 524 bp, Zea Mays
cttcagtgtgctggttccattgtaccttatagaacttgagggtcctttttcgagtgatcatgtccttctgatccaaaactcgaatgggatgttctgaataagtcaaatattgttccaaagcaacatccaccacatcgatggttcgatcaggaatccgaaggcacttcttcaactgggatacatggaacacattatgtactacagataatgtttcaggcagttgaagtctgtacgccactggtctgcattgttcaagaatggaaaacgggccaatgtatcggggtgccaactttccttttacctcgaatcgattaacacccttcattggtgatactttcaggtatacataatccttgacttaaaagaacaaaggttggtgtcgtttatccacataattgttctgcctagcttgagcctctttcaagtggtgccttatccgctgaactctttcctctgtttctttgactaagtcaggcctaaaatagcaccgttctctgggttctgaccaatttaagggtgtctgg

SEQ ID NO: 44524 - DNA, 749 bp, Zea Mays
cggtgattgaaccaaaggactccttggtcatctgtcctgaggtccaggagttgttccttgcgggctttctccacaagccttgccgtctctgggtctagatgttgagccttgcagatgaggtcttctagcattggcttgacttcgagactgtcgttgtttcctagacatgcatttagttgtgatgattcttccttccagtcttctagaaagttggtcccttttattcccaatggttttcgactgagagcgtcggctaccacattggccttcccggggtgatagtgaatttcgaggtcataatccttgatcagatctaaccatcttcgctgacggaggttgagatcaggttgagtgaatatgtacctcagactcttgtgatcggtgaaaatgtggcatctgtttccgattaggtaatgcctccatatctttaaggcatgcactatggctgccaattccaaatcatgggtggggtaattctgctcgtgcggcttgagtaggcgtgatgcgtaagcaatgactttctcgttctgcattagcacacaccctaagccttgcctcgaggcatcacagaagacgacaaaatcttgatgaatatctggcagtgatagaacgggtgccgttgtgagtttctcttttatgatttggaaactttcttcacatcttggggtccacacaaatttatggtctttcttgagaagttctgtcattggccttgcgatgctggagaaccctttgatgaagcggcggta

SEQ ID NO: 44525 - DNA, 429 bp, Zea Mays
gacgaccaccagactgcagagagcttgctttacggccaggactactggtaggaggaggaacttatcatcctatatgctgaacctcaacgtacggcgggaattttctcctacgatatggtttccgatttcacgacggaaacacagcaggtcgagcacgcgtacgtacgccgtgtagatttgtacgtagcgtgcattatttatttacataaggtttctctgtacgtatgtgcgcggtccttgttctctataggctggctgcaccgatccatccatcatatctttgtacttgatatgaaaaacaaaatatatatgttagcagttaatattggctagatgcatatatacatatttttttgccagcacatcattccgacatccaaacaaagttcaacggaagtgccgcgcgtgctagctgccgccaatcaagtg

SEQ ID NO: 44526 - DNA, 1388 bp, Zea Mays
gctagattggccaacgtgatttaacataagcaaaattacttctcgcctatggtcacttcctctttttttttaaaaaacaaaatttgttggtactcaggaatgggtggtgtgtcttggttttcgtcctgtggtttcagctttacattgaccacttgagttccagctccaatgcaagttccattggttctccatgcaagagggatgccgcgacgcgacgttctccatcaaggaaatccactagccggcgctcgggctgtggcagccggcggcgaaggtcaaaatgttgctgctcaattcgtgcactatcctagagtatgtccctagctgagtagcagttgtcgcatctgttctctattttggtcctaattacttgttcgatattctgtcaatagcagtagtaatcagatcgacttacccaattaatttaattaatttgtccatatgatattgcattttggggaggccttgattggtggtcaggaagtcgctatccaagggctaagtaaagattcagaataaggtattatgcagttcaggaatgaagttattctaactgccaaatcgatcctaatatatatgattgtctagttgtctgcctgacagaagtttggatgctatccttttcggtacgctttggtaatcaatacacactaaaccttaaatctttttgggttattattctcttaacaaataccttacatgcatgtagttcttttatttgaatatgcacacagataattcaaggaaagatttgctatattagccaacgtgatttaacataagcaaaatcacttctcacctatggtcacttcctctttttttaaaaaaacaaaatttgttggtactcaggaatgggttgtgtgtcttggttttcgttttgtggtttcagctttacattgaccacttgagttccatctccaatgcaagttccattggttctccatgcaagagggatgccgcagcgcgacgttctccatcaaggagatccactagctggcgctcgggctgttgcagccggcggcgaaggcctaaatgttgttgctcaattcgtgcactatcccagagtatgtccctagctgagtagcagttttcgcatctgttctctattttggtcctaattacttgttcgatattctgtcaatagcagtagtaatcagatcgacttatccaattaatttaattaatttgtccatatgatattgcattttggggaggccttgattggtggtcaggaagtcgctatccaaagtaaagattcagaataaggtattatggagttcaggaatgaagttattctaactgccaaatcgatcctaatatatatgattgtctagctgtctgcctgacagaagtttggatgctatccttttcggtacgctttggtaatc

SEQ ID NO: 44527 - DNA, 475 bp, Zea Mays
ctggattgccaagcgggtcactgagctaattgggtttgacgtatgtttcagatccacatagaggtagttacatttttattgtttgatatgatactctaaaggcaagagcaagtatgtatttcagtaagcatgttaagcattagaggataaacttgttgtatttggtatttcaagaatgatcttgttgacgtacttatgcttttctatgtcttactaaacttgaagaaaactgttaagccaacaccataaatgaatttgcatgtgttacctatggaatctcaatgatagttttggttagggcatcagatatacacaatcttctcgctcccaagtcctaagtcaaaacattggctataatttaattcgagcatatgtgctctttttcaactcatttttttgttcttttggctaagatcaagtgtaatatttgttttaccagttcaatatctagtatatgaacaacatgttcactttg

SEQ ID NO: 44528 - DNA, 608 bp, Zea Mays
ttcatggtggtccagttcaatcaaaggggtcgaggagcttgaggagagcctagggatgctagaacaagcaacggagaaacttgaactgacctgagttgagctggccgcggtgagggtgttcttgcggtgtttttgagcagatgggggaagttcaaaattcgagctcactggtgatcaactgggagcaatactgggtggtgtggtgcgtgttgctcttgcggagctgacggcgggctcaatttatagaacccatgagtggtggccgggaatttgagcgttgacgcgcggcggccgaggaaacagggagctactagcgcagtggattggtgtccggttaccgtggcaacctctccggcgatcaacgaagagctaaagcatgtcacgacgatgtggtggagatactcaggcacgtggcaccaggccggaaggcggcggtcaccggcgtgcttatcgggttccacatagacgagctctgtacggtggtcggatttgtttaccggctggacttatccacggcgatgatatttgtgtgaccctgagcgctatccaaacaatccgagcacgaatcacaacgacagaagcgcgaatccatgagcggcggtcgtcgg

SEQ ID NO: 44529 - DNA, 434 bp, Zea Mays
ctaagctggcggacatgctgttggtcctgcttcctagatctgattgtcattatcttataaatatgttctatgattgtatgccttctgttgttttggttgtcttccgggctgagtcctgtgtggtcatcacaagggatgggtttcgttgtctaaattttgaagtatctggtgatagaattaatagactaaagaacttatgaaataaagaatgtgttgatctgttctccgacgggatgaatacataaacagagaggtagtcataccttcttgcccttgattaagggcaagattagccaattggttaacgtcctgggtagaaggtgctcctgcatcttatcgtcctagctcctggtcaccaccactctgcacattaggacttcgtggaggagtgttagggatctgtgccgtgggtacaccggaattcactagtgcca

SEQ ID NO: 44530 - DNA, 402 bp, Zea Mays
cccttctctaacatctcatctatctgcttcttgagctccaccaattctggtccagacactcgataggctcttttggagatgggggcggtaccagggataagctctatggcaaattcaacctttctctcgggtggcatgcccgttagctcctcgggaaacacgtccggaaagtccgacacgaccttgatagtctcaagcggtttggcctccttactatcaactaaaatctggtgacagactccttctgatttaggcatccttagctcggccactacttcttctcctgacggggacttcaatgttacggtcctcttgtcacaactaacattcgcctcatacttcattaaccagttcatccctagaataacatctatcccgggggtgtctattactattaagtca

SEQ ID NO: 44531 - DNA, 1529 bp, Zea Mays
tatcttcactactcagccattcttgaatcagcatacggatttctcctatctcatgaaagaaaccgttactggtgacttggagagaagaagatatacgaacagttaggtcatagaagtgttgtagaaattgtgccatcttctttgcattatcccaatcatcttcatcaggatgcccgggaccatctcttacttcagacaaatcaatgacataatttgtgtcatcttcaactaattttaaaaacactttctcataaacaattgcagccttcaacatcaaatatgtgtaattccaccttgttggcacatcaagtttcaaaaatgctttgctgtccacattctcttcctgagcgatttctttgaacttgaccaatcgtgaagtcccatttttgatatatctaacagcagccctaacacacttaatagattggtccacttcttgcaatccatctcttacaataagattcacaatgtgggctgcacacctcatatgcaagtacttgcccttggcaatgttggttttctgcagctgcttcctcaaataatcaacaccactgtcattcgcacttgcgttatccacggttatagtcattactctatccaaaccccaatcagctaagcatcttgtcaagttcttcccaatatcctcccccttgtgaccctttaccatgaaaaaacttatcactttcttgtgcaagttccagttttcatcaatgaaagttgctgtaatagtcatatatccatcttgaacctgagaagtccaagcatctgttgtcaggcacactctctgacaagaatctttgaacaacttcttgagcttggctttctcttcaaagtaatgacgtacaatatcccttgtgcaagttctcctagatggaacttggaaacgaggacaagctttggacataaattttctaaagccaggcttctcaccaaaacaaaagggttgctcatcttctattaccatctcagcaaaggcatatctaagtgcttcttgatcaaacctccaagtggcaggagcttccccatgacatgcttgcaaggtgccttgctttgagtccttgttgaaaacatgaggattgcgtttgcatgtaccaaagtgtttcttcaacgcagatgttccatgcccccttgtgtcagccttgatttcacggtggcaatatttgcaccttccagcccttagagaccctttgtcatccttgatcttgataaaatgttgccacatctcagaccttgaagccatctccctcctctcgactttctctttctccttctcttccacattaattaccatttttttattgacgtcagttttgtcttgtacctgagtctctacttgcaccattgttgtctcctgactttcaaattgagcctcgttagctagtgactcaatattatcctctggttctggcatctacataaatcaaaattgaacactataatcaattaatcattcactaatataaatacaataagaacatatcataaaatacatatcacaggccaaattacaatcttttcatattattaag

SEQ ID NO: 44532 - DNA, 467 bp, Zea Mays
gctttatcttgcagcatgtggaccgagcaaggaacgaggaggccgacgcattggccaaagcagctgccagaggcgaagccttaccctccgatgtgttctaccacgtcatcggcacgccagccgtccgcaatctagagggcctacaaataaccaacgacgccgagggccatcgcatagtcaacctcatcatgaccgaagattggcgagccccaataaccctgttcctgcaaggatattatcatccaagcggcgtcaacgaggccaagcgcctcaagcaccgaagccgggacttcgcaatcattgagggccagttatacaagaagggggtcaaccaacccatgcttaaatgcatcaccgaaaccgaaggcatccagatcctgcgcgaagtccatagcggaacttgtggctctcactcggggcctagggccctcgctgccaaggcgatccatcaaggcttctattggccc

SEQ ID NO: 44533 - DNA, 516 bp, Zea Mays
ctatactccaggctttggccggaatatcaaccagatcagacagtgacaagccgaagtttggcctgtttacagccctcatgtgattgcatccggccttcatgaatgctgcagatgtgccacgagaagccaccagagcacagaaatctttgtgtccagttataacttcatcgagggcctcaacttcattctcaatatactcgagggctctggggatatctttaatagaaggggtgatttcttcggatgcgtctccgaccgagttgaatatccccttcaatcggccaatacattgggtggcaaagccgaagcatttatcccgaagatttttgatagtttcgcttaatttctcgttcttctgaacttctgctttgacttttgcattcagttccctagatttgcggtcgaagcgctctgatctctaatccaaggttgctcgagcttcgtctagctctgtgatcaatttatcattttgagaccgtgcctcggcgagtgagccttcggctgaatgcagtaggc

SEQ ID NO: 44534 - DNA, 902 bp, Zea Mays
ttatgccatgagtcgagatcagacttacccaacctattaagtcgtcgactcctcgggccttgtaagccctagatcgcatgtgtcctaaccgtccctaacagacaatgttcataggcgtgcaacctatgcatcattcaagggccaccatttttaatggttctcaaaacattccatacgtagccacgtaggattgtggcccagcaggcgtctagaaagcaaaatatgttaatttactttggtccatctctacaaggttgtaactctgtcatctcgcccatgcacgcctctacgtcttgtctccagtccactcgtgacgtcgacagcgtcatcaatcccattgtgcccttctcctccgcacttccatcttttacagtcaatcaatccaatgcctagatgtctgcaatatacctgtcgtggttttggaaaccagggaacaataagatttgtgtccagaggggaagctagcatggactcgctccgaatggtgagccacgctggactcaagcgatggattttgtgatggtgggttataccgatttagtcttacgccctagtctaatgtagtgtctattgtagtattgctaagggcatgttataattgatgtgcttgtgtacaattgaaaggatgcttctcccttttatactgcaagagagaagccttacaatggaatttcttcctcaccggagagagagagagatagtcatctgggtcaacgaactaggtctcctttcccgtgtgtggtcgtaccctcgatatgacgttgtccatcatgctggttcttgtagcgagttcgttacttacatcctagtggtagtgtgtggcagatcctgtgagtctatcccgaggtgtggcgtggcttcgcccgctgcatgccccgcgtcaccacccattgtacgcgcag

SEQ ID NO: 44535 - DNA, 528 bp, Zea Mays
tgggaatggaagtagttagccctcaaactcgctctgtcagacagttgaatgggtatttgcatggtacaataactgaaaaaggtttcaggttcagtgaacctcgccactggtgtcgtgcaccgtgatccgcactgggcgccgtgattcgcgcacggctatggatgacgactccacagtaagtaaaaagatcactggagggacgaaaatatcgcgaggaggggattgggttgagccctatgcgctgtacccacttgcacagcgacacggccatcatcgtggtggtcgccatcttccgctgttgagccacgacgaggtcatttcatcacgcatctgtaaccgtggcaagcagccagttactgcctgggaccattaacccatcgtgcgccacggtgaacttgcccagtcaaaaaaatcttgcctccaccgtaatcaccttctccccaaatttgccaagcacatgatcggttcctttaaattgagcactttgttagctccgtctctctattatgcgcccaacccaccctcagc

SEQ ID NO: 44536 - DNA, 300 bp, Zea Mays
cactaaaagatcaactagaaaatttatcacgttaatcttaacacatacccttggacatatgtagttaactaacattttttgtcctagtgcattgatggtcattctcattctcaaggggcacttaaagataccatactttattgcaaactgggaactgataaaggaatgggttgtacaagggtcatataatactgtggtggtagttgagtgaatagcaagtgttccaactattactgcattatcatatggaatggtttctaccattgcatagctcatccttcctgagaaccttttccgttg

SEQ ID NO: 44537 - DNA, 498 bp, Zea Mays
aatgcgccggtgaagtttgaagctagtgatatgacgtctgaaactagtgatgtgtatttaaatatatgtcactaaacagatctgatgtctgaagtcagtgacatgtttatatatacacgtcagatttggcgtctgaagccagtgacacattaatatatacatgtcactaaacaaatcacagtagagacacataaaataaaagatatcaccgagttattatcatattttgctagtgacgtgtttttacaatatatgtcacatgtgcacagtcgttattgatgtgttttttaaaaagatgtcattgtgcaaaattagtgaagtgtttttaacaagtgtcacagatggccacgccctttgagtgtttttgacgtagtgcaaatcaaacatcggaaaaacatttagcaatacaccacacatgaaaacataatatgaaaatagttctagaattattttgtgcaagattaaaatatatttgagaccaaaatcatttaattttca

SEQ ID NO: 44538 - DNA, 427 bp, Zea Mays
agcaaaggacctcgattgcgcatctgtctcttcaaaggacggtacctgtgtttcttaagtgcattatcaatattgctcttaaagttaagtgtcgtgctttctgtccttggagtagttatgctttgaagattgcttgtgttggattcttgttaataattgattaataatttccaagatcgtaatcatgcttgcttaatcatgattgtgtgctttagaggttatgtcttttgaatcatttaatgggtagcttttcattagatatattcaccacaattaactctttttgtgttcgtgaataaacctgcatcccgttgtgagttatgctatatggttttaatgattagcctgtgtgcaaatatgacatattgcttagtttatatgatgaccctattttggcactatgtgttatgcctctactgcattctct

SEQ ID NO: 44539 - DNA, 1444 bp, Zea Mays
gccttgggggtgggtgctgaggtattcttggggccattcaccgagttggattaagcaggtcctgatgcctttcaactgggggcagttgttcttgaagtgactggggtctccgcagtgccaacaggcatttgctggcagttggttggttgcaaccgaggggcctgaaaggagctctgactctgctggctgaaacgtgacggagtgggtccagctggtctattgaagcttggtcccttgggtggaaacccaaaggatcaagttctctggtgccggtcttgctgctgagctcggaggacttggaattttctcttgaggtgacctttttcttcctcccttgctctttccacttgtatagctttgtttgagaggtgcaagaagctgaggaaatcttggctagctaggatggtcttgagttctggtctgagccccttcaaaaagcgggccatcttcttggcttctatgccgacgtcatcaggcgcgtagcgagccaattctgtgaatttgtgcacgtattcactgacagatcttccaccttgagttagttctcgaaattcatcttccttgagctgaacaatcccttggggcacatggtgctctcggaaagcagtttcaaactctgtccaggtagcatctctgacggcagtgctgaaggtatcccaccatgctagggccatcctggaaagttgatgagcagccaattgaacacgctgattctctgggcatccgatggcttctaacttccttttaatcgtgcgcagccagtcatcaacatcgaggggattgctggatccaacgaatgtcggaggcttcagcctcagaaaatctcccatcctgtcctgtggtcttccaccattcgggcgctaattctccagacttctagtgaggacctcaatgagtcgggtttggttggctagaacttgggctaaatctaatggcagctccggaggtgcggggaggtgggtctcactcccttctccaccagcttctccttcagctcctaggggaaaccctgctccaatcccagaggcggtaggcgtggttttatacgaagccatctgccagggggagagagttactattatgcatatgccaattttttcaaccaaattattttattcattacaccagttcattacaagcatatagttaccacaagtcgcactacacgcgagcgctttctaaggtactttcgaactccttttctaaagtgtccccaaattccttgagaaggtcatcaaggctagctagggacatatcctcgatgtcggacaaattctctatcctggagagaggtggtgttggaggggctttcttcttccgctcggtctggcatccttggctcttggtcttcttttggattttctttgtgggggagcttctttagcttcttattgtaatccagcttcagggttcggtaggcttcacgagtgttggcctcttcgcc

SEQ ID NO: 44540 - DNA, 483 bp, Zea Mays
catccattgagtccccaagaccaaatcatagccggcgagcggcatgacgaagaggtcgacgtagaaccgatcgcccttgatgatgaccggggcgcgccggatgacgcccgggcaggagacgcgttccccatttgccaccattgccgtgaggcgggggcggggctggatgggcagcccagtttggcgagctgcggcttcggcgatgaagttgtgcgtggagcccgtatcaaggagcgcgacgacagtagcagcgcccagcgatgcctgcacctgcagcgacttgtaaatgggcaccccggcaatggcttgaagagagaacacaggggcgtcctccccctgattaggagatgtttggtcgtcgtcggcgccctcaatttcaatgccgtccatgaagaagatgcggcagcagacccggttgtgtccccggttgtagggctcattgcaattgaagcaaaggccgaggcgtctccgctcagcttgttc

SEQ ID NO: 44541 - DNA, 522 bp, Zea Mays
cccggtcaaagggggctccacacgcccctagcagagagggctctagacgcgtcacatggccagccgtgcaaactacagttggtcaaggagttagtggagttagaaaacgttccacgcctgtccaacagaacatgcgcgactgtagtaacattgtgcccactccctagctgtcaatcctccaacaatctggggcgtggcactatggtagtgtgcgcgacgtgtgccacgacctaccacgacccctatggagacgtggacggtacgcaccatgtgctgtcacgttctaggtcacccacaccatataccacggtatgcacgaccctagtcatccttggcgtgtgtcacaacctctagggctcgtatagcagcatggagggtctgctcctccgcctgcaacgtcataggaatctagcatcgactacgcgccccaaacatgtcggatcacctagtacgggcagggcatgcatatacaacacctcaaacacttcaatgagaccttggaccgatgtcaacataacttac

SEQ ID NO: 44542 - DNA, 681 bp, Zea Mays
ctcttgctgaagccagtctaaacttcccctgactgcgggttaatttcgtaaaagagcatgggctcttttacaaacacacacgaccgaacaggcatcagtcaaccagatccgtccgatcggcgcccaatgcctagattaggtcatcgagtattgaaccggtattcgatttcagtcgttagatcaaagatccgcgacgcagggaacgtccacgccaactcttaatccaactaatccgattatcggttactggctcggatttgaggagcgaaaggataccctccccggtctaatcctaaccttgccacgccgatcaatgtctttgatttaatgggacgaaaagggggatacacataacctaatctcagccgtgcacgtgggaatcaacagcgctagccaactctcctctcctgatcggacccgagcggcgatgcacagcgctagtgcagcgatggccatggccgggaccgacataactgcgctccagggcccccaactctgatatgattgaccctatacacaggcctagctaccccgaacctgatgtccaccatttcatcaccgttactgctataaaactcttgaccatggcccctgcggctccatgacggagcctgagctccgatgagcattcaccgatccttaggtccgtaatttgtcttggctctaagcgctatgcaatgc

SEQ ID NO: 44543 - DNA, 412 bp, Zea Mays
cttctacccgcgctcctgtttgcgcacacacgcccacaggttggaaactagaaagaagaaatcgtcgtgggcccaccaacatgtcattaattgctccccgcatgatcttctcatcacgtgcacgtgatatgcttgagtaacgtccccacatggccatgtgttgccgtttggttggctcacgagttcatgtttcgtgttctagcgctcatacgagatttaactggccccacactggatcctgggattttctgcggctgaggttcgtgggcgctctgtgtggtccatcgtatgggttagctttcgaccaatcgaatcacgtcacgtactgtaaatcccgagaaacactagttattcaatatatacgttacgttgcgagtccgtctcgactcgtttcattcgtagcgacttcgta

SEQ ID NO: 44544 - DNA, 437 bp, Zea Mays
tatcgtcgttttgcccatatcttgggcgtctctgatgatgacattcatggcagcaacctaaaagtcaatgacattaggttgcctaggcgggaggaacaagaatttgttcacatttccaagaaagggagttttgggtgaccttaaacatgcataggtactataggtaccttaactcattatctaggatgacagttattcctaagggtgggaatcaaatgaatgtccttggggagagtcagattctccttcttctccttgctcccaatagtctcgcccgcatcaatgtgtttcacatgatctgggaagagatacttcgtgcttcctagtctccactcaaggggtgtctccatgcaccctttatcatgaagatgatcgaagtagtcacccagactcacttcgataagcctatcaaacactcccgctacatgccgtattgg

SEQ ID NO: 44545 - DNA, 748 bp, Zea Mays
ccgcctctgcctgaagcgcgtgagctcctcgttgttttgcgcgttcgtccattctcgctggcgactgctctgtctctcttcctccttcccgttgagctatcgcacacagtcctcggtggccgcgtgttcgtcgtccccgacgagtctgctccgtgactgctctgtctctgtttgctccgagtctgctccgtgaccgctctgtctctcttcggcagtgggctcgaggattcgatggatagaggacacacaggaaatcggtaaatgtagcgggcgaaggacgagcgctatattttagcggagagggtagcagacgttgctggacggtttccggacgattggaagcgctatatttagcgtaccgaatcgtttacagtctcctgctggagacagcctaaggagtaccgagtgttccttttttacctcctctctcattttcctcctgtccgcctgacgtttcgtggcgtccgtctacggtttacctttcttcgtcttcctcggtcctacagatccgattttctcactcatgtcgtgtgtcgtccgcaggagatcaaatttggtttactcacgccaggtgccgtctacaggagattgtctagctttgttctcatgccattcgtgaactagatcgtgtggaggcattcatgggtgcatgtttgtttaccattcagtttgcaggtatggcctctttagagaactctagaatcttcatatttttattttgattagtgcccttcttttcaatattcat

SEQ ID NO: 44546 - DNA, 459 bp, Zea Mays
attagttctctatcttcttgcactcctagagatgagattggggcctaaaaatacaacaaagcctcatgtatgtcttttatcatctaggtaacctaccaaatctgcatctgaatatgtactcataataaaaaaggataacttgagtagcttcgacctaacttttgaacttgatttgagttatcgtagaatcctcttgattgcagcctaatgaatagtaataggaacatgtaaaaaccaacagaccttgttgaccgggaaagttatatcgggccttgtcaacatgaggtattattcgaccgtaacaactcttcaagaacaataagttttcacttgtcgactgcggggtgctaactggtttgtaatcaactatcccaatcatttttagaagaccagacacatttttcttgtgtgagcacaatgcctccggaaatccttatcatctcaatatcaaggaaatta

SEQ ID NO: 44547 - DNA, 1005 bp, Zea Mays
ctggagtcgaaaaaaatacaaatttctcctcaggcgctgaagacagtctctcagactgtctttgtcaccacccagaaaaacctgtggccttggttcctctcatgacttccacatatcaaagcagcagctgctagctagctagcaatctactagcgtccagcagcaccatccaactggctcatccgcaagcgaacccgatggatccaatcacaaggccggcagctccatcgttccatcggccagcagtcgcgaccgcgaagcatctccatcaggccgccgccaccttggctcggaggaatggagtcagcaggaggtgccttctgacgctgctgatgtccactgcggccatacctggcggcagcgaatcgaggaaggctctactgcaaggtgagcgggaaactgatcagacctttcctgggcttgaggaattggtattcgtggttcctttgcatgtaaactaatgcgggtccgcgtgcgcacagagtatctgaagaaatcgaaggagaacaaggaaaagaacgacaaggaggtaactggagactcttttcccgtggtttaatagtgccctatcgttgccagtcgattgaggggtaagaatgggtggagtgaactaaccatcccacaaacatggacacttttaagagaggcttgattacgtatttaagcgaacgatatacattgaaggactgaaaacacggcactgatcatgttgatatgctcatgttccagaggctggatgactacaacaagaggaactacagggactacttcgggctcatcgagggccaggtcagagagaagacggaagaggagcgcacggagtcggagaaacggatcctcgagtggctcgacaagaacaggtagtctaatgagcaggatcgaatggtcgatcatggagggccggccggtcgcacggggtgaaaattctcgcaggattcttcgtgttcccgctctagctatggcacgctttgtgtaaacaagtactccgtatatgattgactgagc

SEQ ID NO: 44548 - DNA, 774 bp, Zea Mays
catggagtcgtccaagtcctcggacgatgccatgggggaccctggagcggtcgaccaatcatactcggaggaaacatccttcgagtactccgagccaccaaagtcctccaagggtggaatcggaggacacttgcgtttgccgtcagcactgcgaggccatctcttgccccacttgcctctgcctgtggttgtgcagaaagtggagaagtgaggaagaagaagagagcaagtgatcaagggcgagtgaagaaaacagccaaggcaagtgggctatttaaaggggtcgaggggtgaccatccacttcctaccccgctcaccgaatagtcgcaagaattcaataagcacttcaagccagctaaaaatgagtcaggcaactgacgctgtttcgcgtaacacagcaccggttggactcaagtcaactgcttaggcaaatgattacacccatccgtcacatcaaattactacttcatgacaacgcgataaacaccttacgcggagtaaacaccctttgggcacactcattgggtgtatcgcccgaaatcttcaagattttctgaagtgatgatacctgcaaaatatacacaatgaatgtactgcgacaaaaagaggaggtcagctgaaacaggaggaagtccaaatgtggttactgaagagcaagtccaatcaatacaagcattaaagtatagggctgagtggtgtccagccgaaggtcctctgtttcaaccagccaaacgtcgaacttgtcaccaatcaaattgattccagaccttaca

SEQ ID NO: 44549 - DNA, 612 bp, Zea Mays
gcgaggcagagtttcgcccgaggccaaggtcgacttcgggcgacgcagagtgccgagggccatcccgcgctcttatcgtatcgtgcgtcccatcgggagttggcaaacggcgtgcgagaacagtggtcacatgcgttatcgtagttggtgaagcttgacatgatcatggtcttgttgctcatgttcacctgcaactctgtgtggggttcgtatgcgcattgaatgctcctgtcccctgcggacttcggctgagtcctgcctcagggttgtcttccttacccggctcggacgaggcagagacagcggttcaagggagaggggacctcggctgggacaaggattctcccaagaacacaccctgtccgagggcaagctcgggcaaagcggagctatggtgacccctgagaggggcctcgggtgaagcgcggtttgtgatcctttgtcctcggggaatgtatcttgatggtggccttggggttaagcatgttttaggggcgtaatctaggtacccctaattacgatacccgacagtagcccctgagccctccaagtaagtgttttgacacttgtttgtaggctcttctatctccatgcgggcacacactgcttaac

SEQ ID NO: 44550 - DNA, 477 bp, Zea Mays
tggatggaatcattcatgcatgtcttgtgtttgatttaggtgtttgagtgggatggattgagattttcacaccttcatctgtaattgacatgggccacacgcccacacctgtcataaagggtcatatgctgcaatttgtattagctagactagacagtagcttcttccttgtagccacagcctacggaactgacaatgttgcatcaagcaacgcctatgtcactcgtccactgatcaagctagcctttgtacatggtcaggttgcaacccgttaatcagttgctagttgcagttttgactctgggatgttacaaactgtatttcgagggcacatccggtttggtttacatatcggggtctacaccgctcaatcagtctggcaggtgtggtgtggccgccagtgctaccatgtcgtcgatctcttctgcattttcgccatgatcccttccttccgcactccagcgactcgctgccggg

SEQ ID NO: 44551 - DNA, 480 bp, Zea Mays
gcaatcatggcgctcctgcctccatgattgctcttgtttaatcctccctccctagctattaaccggagcagggcgctaccactagctagcacgttcccgctccatggattccagtgccagctgatcgacgacggtgttcgtttgcatgttcccccaaattaacggaaaaaggacaaggagtcattattctgctccattctagtgcctagtgcctacctacattctagaacacagttctttatgtttttccattgtacctggccattgtttgataaaaaaaaacatgacatatacatatatactgcagagaaatcgtcctgaattatatatatgctgcagtccatgcttgagtttgttttttctgagtttctgcgtaccttagtggagcgtagaaataccattctgcgtatatcggtggtatctgtcgccttcccggcttccgacgaggagaggcgtccggaacaatatctgtcgtcatca

SEQ ID NO: 44552 - DNA, 569 bp, Zea Mays
ggaggttcccctccccccttggctaaccaccaagctatagcaacaggtgacctgtgatcagtggcgtccattagcgtctcttgtccccgattagctagctagctatacgcctatacctagcccacacacacgcctctagcctctctctagctcggcttgtgatctcgcgggcccggctgtgctcgcgggcaggacagcaagagcccttgacggcgatggaagccttgtgtgttgggttgcaatcatgcttgcactacactgtaatctcggctggcggcgacgtcgttcgatcgagatctgcccgattggctttagctgccacgcgcacgatgacactacacaaccaaccaccattatgctcttttcccgcctggggatcgtccgtcgctgaggaagtcaggatcaagtcgtggcatcagctcattaattaatactccggcatgatgtttgatcttgaaataattgttgctagtgctatcattcgatagctgtagcatggaagcttaattaatgcaactggttgtgtacgtgtgcgaaatagtgtttgttttagctctcgggtttttttt

SEQ ID NO: 44553 - DNA, 967 bp, Zea Mays
gttcaaccgaggctaactccgacgccgacgaggtaccagagagggcgttcttcgtggcaacgccaccacgaaacgacaacgacggaggggacaaggaggcccccaaccaagaggaggagtatcaatgccaatgccaagcacgcatcctcgcttgctcgcgaggccgccgtccgccaacagtaggaagagctcgacaccctcatgcaaaagatcgactacgcctatgaggacgtcgagcggaggagtctcgaggctgagaggccctggacgaggaacatacacaacctactcgctgaaagcaacgatgtcgtgcaatacttcctcagtcctaggcagaacatggccgcaacagccatgatgctccgatctatcacaaaactagatgagccagaggcaaaggcaatgtactagaacctccgcaatttagtagagaaggccatcgtgcagcaagccgagatcaatcgatagccccctctcatgatggaaagttgaggcccacgaacggcctcatctcggagcaaaagagcacaaccttcccaatgcacaaggatgcgcgtcccatgaaggaccgcctcggaggcatccacgatgtctggtacatcatcgacaactagcgctgggagcaggaagaagtagagcagtcgcgtgagaaaaggagcgagcggagccctgccctcccaggtcgggaccacgtgctttcaaacacgagatacacaaggctcaataccctgcaaaggtgagagcaccgaccaacatttccaaatacgacgagtgttcaaacctaggtgtacgactggaagattaccgcctcgcgtgttgcgtggtggggataaaggatgactacctcatcatccaattctttcccttccacctcgcggagggagcgagagcctggctcgagcacctgtcagccagcaccattcacgactgggtcgacctacagaaggccttcattgggaatttccaa

SEQ ID NO: 44554 - DNA, 809 bp, Zea Mays
ccatcatggaggaggctgacttcaccataacttcgccactgtctgactcctttttcgccataacttcttatctttttcgttttttagtagctcccctcagcctgtagccttcatgtcgcgcacaaggaaagtggattctaagaggaggaaatcaatgcctactgttggtgagggcggtgggggcggtcgtgtcgtcgagttcctctttgccaatgcctctacaaggcgccactagggtcgatgcctcatgttcgtttctcttaacacctctgagcagttctagcacgagtccggtggggtggttgaggttcacccttctcttttcatttttatagtgggctcggaagttgcctttgctggcacggtggagattgcagccccagagcgggcaacatccctccttaatcgtggggaaccctataccgcgttgccaggccttgatggtcggtcaggtgtccgactcgctccagatcgctctgctacaggtgacgacccttggccttgtgaagggcgttgaatgaggagagcaatgcggctaagaaggcattgtgggatggcctcgatcaacattcaaccgcacaccgaaagcttacggtgagccatgtgtgggtgtctaggtgagggaaacgttcctttcgctaatcaacttgttgtccggtttttgtgctttcagtcgctcgtagggatgctggcgagtaggtcacatcttcgtctcgaccaaagggaggcgtgggagcattccgccagtgatcttctggtggcgagaagtgaggcagccgaagcccatgcctacgtcgtgttgatctaga

SEQ ID NO: 44555 - DNA, 494 bp, Zea Mays
gttgttattgcgtagacaatgttattacgaagctaacgcaactgaaacggtttaaatcagagttaaaatgaattaattacgaatttctgaagtctacttctattccaggggtgtttttctgaatacccggggactaatttgtaatttctagaattctagggtaaagttgtgtatgtggccgaggacggcgggtttaaacaaagaaaagacaaggtcttttatgcataatccctcggcgaagaggaagcatacaatctaagccacacaatcctaaaccaagggctcaaattttatacgtgaaggggtatgtttcattttaatcctggtcgttcaaatccagattgacgtctagacctttatctcctacctccagaagacgccctgcggcggcgccccatgcaccagtggtgatagcacaacggagacacacgacctggcatctataccccaaatgattacccaagtggttcaacgagtagtagggaacaaggcag

SEQ ID NO: 44556 - DNA, 474 bp, Zea Mays
ttctgacacttgggagatttgaaatagtaattttgaatttgaattaaatttggaggaagaagtctgaaataataataataataagaacaaacctatcagcctcttgggccgaatctaccctcctcggcccatctcactcgcgttgccagcccagccaattcccccactgcgccgacatgtggacccgcatcctcagccgctcgaccggccatccatccgcactctacgccgcatttcacacttcgtgtctctattgggtgggccccagttgtcagcacaatcctcaacctcacggatcccgcgctcggactctgtacgcctcgacgtccgccgccaggatcgggcggatcccgctggccgttccaaccgccgccgggaggttcggatctcgaacggagtctgcagtcctgcccatctccataaaacccgactgaatccctcttccctgaaccattggcgcgctgaagaacagag

SEQ ID NO: 44557 - DNA, 306 bp, Zea Mays
ttaagaaattgtatgaaaaaggaatttattcagtaacaaataaggaatttagtaacgtaccggtacaacaaattctgagacgtcgccatcatcaaagtcatagcatcgtatgaagctagtgacaaaaaaccacaatcattggagcctggttgcatggttggacagttgggaagaagcgcaatcttgaacttgccaaactttggtatacaagaatctggtcgagcttcttgtaacgccatgctaagtcttttcatgattaatctggaccatggtagtttcgttccatttatcatcacttgatcattg

SEQ ID NO: 44558 - DNA, 398 bp, Zea Mays
gcgacaatcagtggtgaggacccttccacccaactcgccttcatcttctccacgtgtagccgtctgtgtagcatgttttggccgcctcgcgtgcggattggccggctccggcgatgcgcctccatgggggtcaccggtgccaccatgtctgagcgcgggagtggggaagacacgaggggggccattgaatggctatcataggtttccgatcgcgtggccaggataccgtttcggagttagatatgagccgtccgattagggtctcacgtataggattcaatcggggtattttaaattgggtccgtttatcgccgatctgatggtcacgggcgcataccggttaaggatagttggatctgatctgggccatccagaatagatcggacggtggcagtgaa

SEQ ID NO: 44559 - DNA, 424 bp, Zea Mays
cacaaccccaaatggcaacaaacccatctcccttaatacacattattctccacacatagttctattaacttgttagaatcacccaagaccaagaatgcaaggaccaaaagttacagtgccccaaacttcttccaaactcactgaattttctgcttcagttatctgcaatagcataacaccaaccttgacagcccaacttggaacgcactcttctcccaattccacacagcaacaagactaacaccttatatgaaacttgttgtctttaacatgggctttcatcttgctatagagttcctaactcaattctccctgtactaattaccatagggctccaaaggcagataaaaacacacaaattctctcagctacagtcaactaaatcaacagctctcaaatctgatagaggaactttggagatgct

SEQ ID NO: 44560 - DNA, 417 bp, Zea Mays
ccgactctggtgacgacaacgaccaccgcaagaagttgtacgtgatgtacggcgggagctgggagctcacctcccgtaggaacatcaagtccctgcgtcgagaggtcttttcggcggtcccagggttcccgaaggctgctccacatcagcggtggaggagcaccactatctccttcggggcatccgactgccccgaaaacatggcaggggccggtatactaccgctcatcactgcccctgtcatcgccaacatgcggctgcatcatgtcctgattgacggtgaggctgggctcaacgtcatcagccatgttgcattcaagcagctgcagatcccagggtctcgactgggaccctctcgtccattctctggagtgggcccacagccagtgtatccccttgggagcatcacactcccgg

SEQ ID NO: 44561 - DNA, 830 bp, Zea Mays
gtgggctttaacaagatggtacgttttgttcctcatgtggcttacaatgaattggaaaaggcgagccagttccgtcagggcctgaaaccctctatcaggcatgctttgggcgcctttccgctggtggattttgtactacggtggagcaggcattgggcgtggagatgcagcatcagtacaccatgcttggaatcttagaagaccttgggggttgatcatcctcgtggccaggacgcgaggaggggcaacattgggggtttaacccacaagaggggaaagtcacaacaccagcgccaccactcctatcgtggcaaaccctctgaatcaggtactttaggagggagtactcagaggtatccggctgttcctaagcctgggttggggttggtgtgtttccgttgtggtgaagcgcatcgccgtgccgagtgtcagtggagtggcaggtgctctatctgcagccaggatcacaaggatgtggtgtgtaggaggaatcccaatgggaaacttaaatgggagctagtgactttttcctcttcgcagggcactgtcaacatgatgtcaagcgctgagcaacaattttctgtaccaccctctcagtagcagttctatatgcctaggactcctcagttcgtgcctatgccaggtttccctcagtacctggctgcgcccactcctacaccgaccgctcctgtaccatcccagtttggagctccatgtctgcctcatcctgcgactccgtggggttcttctgttaatttcactctgggagcttcctcttctgcggatgtttctggagcatatgtgataccctctgcggatggtatcgagca

SEQ ID NO: 44562 - DNA, 807 bp, Zea Mays
gacacgtgggggccaacagatcactaatgtatggtcccaatttgatcttgcgtaccgattggctataggagggatgggaaccgttggatccaaatgtggaaggtgttttttgccgccggatcaaaaacggtatgtacgaaggttccacgcttcacaaataaataaattacatcaaatatacatgcaaattgtttataagtgtttcttacaaaaccaggaattatacacaaaaacatgaaactatcgaaaacgcaaaagcttcagtcttcctttagcactttgtcggcaacctcgttcagcagcttgtcgacaacttcgtcaatagcatcattagcaattttgattatatcaagcgcctccttgacagatgggtcaactttagggttatatggctcgggaggcgaagaaagctcagctgcaatgaaacacaaatatctgtcagtgtcgaagctaaaaaacttatgaagctaagttataaagggcacatcgataagtctggcttgctcggtagcttcctcaactctttttgcctcttcaaaggcatcatgagattctttctcattccttttaatggcttcatcagcaatttcctgtccacccttcagccatactttggaataaaatttcccacccaaggtagtagcttcggctgaagggttcctaacatcatcagctgagaggacgaagcctggctgagctacaaccttggcatgatcgcagccaacctgttccaaaatggacgtagctccgcgggcaccggcaaaggcacagaagtcccctctatcgctaataatttcctcgaaagcc

SEQ ID NO: 44563 - DNA, 387 bp, Zea Mays
atcccatatgatctggacccgctggctcaaagacaagagatggacaaggtgtagtctcatcgaatctgacctcacaagtctccataatgcagttagtctccaggttaagaacacgatatgcacgagaatgtaatgcctaacccagaaaaaccccatcagaagaccgacactcaaatttgtccaaattacactgttttagcacaaagcatctacagccaacacaccctgaaatggctaaccttgggtgaccgtccaaatcacagctcataagaagttttgttcaaaaaatcccaaagaaagatgcgattggacacatggcaagcagtgttgatcgcttcggcccaaaaacgcctaggagtcctatgctcatcaagcatcgtcctggcc

SEQ ID NO: 44564 - DNA, 437 bp, Zea Mays
gaagtattttgtgtggggggtcaggtcataatggattgacccttggtgtaaagatgttgaatataagtaatgaaatccttcgtttgtgctctgtttaacttctttgagttcttcatttccagttttgtctgctaacttgcgtgttgagaacgaatgtaattgtgtatgttgtatgagtgaacctctctaactgaacgtccttatccagatgagtgatattttcccaggtgacgtcacgttaattttggggagtttgtctatgtgagttgtatgttcccgctcgaaaccctaactaagtttcactacaattctaacttcccaattcttgttcctgattcctgctggttcccagttgagatttcatgaaggcctcgaagggaaagaaaatttatagccaacacagaaatctagtagatctcattcttccttacgatccc

SEQ ID NO: 44565 - DNA, 295 bp, Zea Mays
gatccccaaacggtccagatcagcgatcaacggcaaggccacctttggaaccccggacctgctaagggcatcagccactacattagccttccccgggtggtaatgaatggacaaatcataatctttaatcaattccagccaccaacgctgcctcaaattcagctccttctaagtaaaaatatacttgagactcttatggtcggtgcaaatgtcacaagcctcgccataaaggtaatgcctccacgactttagagcaaaaaccaccgcggccaattcaagatcatgagttgggtaa

SEQ ID NO: 44566 - DNA, 813 bp, Zea Mays
aaaaatgatatttttatagttatggtggggtataggtggagaatttagagggaactgtcacaggagaaaaaaaagtagtgggttggaattttggtaaagtgggatatagaaggagaaaatttaagagaaaccactgcggatagtcttaagatagccttctcacgtagttgagaaaatgttcgaacctcctacctcacctatacacggtggtagacaccattgttttgtgataattgaggttgagtcttagacctatgctttagaattgatgctacctgaacacctacctcattcatatatagtcgcattattataatgtctcacctatatacagtggcaccgttacatggcaacatatgatgtgcactcatatcaatatgtgcaaccatgcatccagactttcagagtcatcggatttagaaccaaccgccatcattggtgggtattttttttgcagaaaaatgtctggtgatctaacgtacatttaacagaaaccatctccgtcgatgtgtgttcaacgagaatcgaatggctctaaacgttggatgcatagttgcaaaagttggcattggtgcacaggatatgttgtccgttacaaagtgagaatctatgctagtccttagacctatccttggcctcttgttttatctatacacaatgacacggttgcaatatgaatatcgaggttgattattagacctgtggtttagaactagtgctatttgagcctctgtttcacccaatgatattgttaaaacgaggttgattttagacctattatttaggatccgtgcttagactgtctctaacaac

SEQ ID NO: 44567 - DNA, 708 bp, Zea Mays
cgaggaacacgacaagcgcggcctgacgtggcgcttaccatgaagctgacagagaaaaccgtgggtggttctcgaaccagacggcgccggcagcgcacattttgtaaatactctgcttcctcttatatacgtttggttgccgatggatactatataaaggttagggtcgttgatatgtaaatactctgcttcctcttatatacgtcggattgattagatgtagaggtggggatggttacatgctcaatatttactgagctcaatgatctattgatcttttagctctcttttttcttttggttctagtgaggggtttagatctcctcgccaatgaagtcctccaaactatctcgtgaatggtgaatcttatagatatcctcctttttctaggttgctctccttctcctctttatagcataaagtatggaagagttaccgtcggagtcggaaaatcctccggccgggtggcggggtgttgcctgacctaatggatggacacaagaatgctagggtttagagtggttcagaccaccggagcgtaatactctacaaccactgtgagttgtattacttgagagcttaagagtcatgtatctgaatgtggatcgccctcccctgcgtcgcaagtgcccttccttttatagcctaagtggggcacattacaagggagttgggcctcgacaggtgggcccaagagttactataatg

SEQ ID NO: 44568 - DNA, 643 bp, Zea Mays
atttagtcagccttcccagaactccagctttctctcgagcagaacaggtactcctttgcaatcacacccacgctcgttggacagtcacaccggtcactgtttgccacctgcagtgctggtaagaacgttgtaagagcggggtaagacgcttcataatttgtattccaccaccaccaccaccaccctgagagatagttgtagggttcacattgtttgttgcctttttgtctctgttttgtgctaacaatgataggaccaatgaatcaaatggacaaggggcctaagcttaacgacgatgagtgtgtctctcagctggaattgaaggagatgatgcacgcgatgactgaagcttaaaataccaggactatgcggcgacatcctatgagcagcttgatcgatgagttgataaacttgttacacgcatggacgtactggaggctcgtccccaaccaacaactccagccccatctcactctcctgtggatgacgacaacgatgacaacgatgtttatgcaccgctgccacaacgcttcgcacataatcgacaaggtatgggaggtaatggtagacgtcgtcatcataatcctcaaccagaccatgatccatttgctaaaattaagttctctattccaccgttcatggg

SEQ ID NO: 44569 - DNA, 692 bp, Zea Mays
ctcctacgaggagctacgatactgttatcctcaatgtgatgttcaaaataagcaggaggtaaagaaactggattagattcaggtgtataactagtagatgcctcgctacatgctgcaactctatccttcatagggaatatatcttcaaaaaaggaggcatcacgagattcagtcacggtgttaacatgcacatctgaaaaatcaaatttaatcaccagaaatctataggctgcactattatgtgcatatcctagaaagacacaatcaacgatttttggtcccaatttatgtttcttgcacacaggcgcattaactttggctaaacagccccatgcacgaaaaaattcaagagcaggctttctacctttccatgcttcaaagggtggtttatcacccttagttgatggaactcggtttagaacaaagcacgcggccaaaatagcttcgcccacgataacttaggtaaactagaactatccaacatggcattaaccaagtctgtcaaagtttgttttttccattcagccaccccatttgattgaggcgagtagggagttgttgtctcatggatgattccatgttccgcacagtattcaccgaattcattagaaagatactcccctcctctatcagacctaatccgtctaattttctttttagttggttttctacctctaccttatagatcttaa

SEQ ID NO: 44570 - DNA, 293 bp, Zea Mays
cgttaatctcggcgttttggagacgtgaccgctttggtcatcggggccttgacgctttctctccttaatttctgtccgcgcgcgcggcacgcttggtcaagtcggtccagatccggcgcatgcagctagcagcaggtgttgccaagaaattcaaattcttcgcacgccattcaaataaatgaaacatgggcatagatattaattatactagaagttgcggttttagaaacatgtgcacgtacgaagaatgttcccgtgttaagaggagaaaacagatgaaatagcagttccgt

SEQ ID NO: 44571 - DNA, 489 bp, Zea Mays
ggagattggagattttagataatatacataatgtaatcacaaggtaggatagagtgatgagaatggtaaaggaaataacaaataagagcacaacaaaggatagagttaaaaactctcaggtgacaaagaagaggacacgaccaagagaaaagtaggcaaagtacaacactcagattgagatgaaaagatgagatttcaaagggccggtataagataaacatcaaggtaaaatatagaggtgataagggtaaaggtgataatgatgaaaagcataaccatggacagagttaaggcaagactgacgaagtggagaaaacaatcaaggtaagataggtgatgtttcaatagaatggttgaagtaagaattcattaccgagggaagttataaggaagcaacgagattaccacgggcgtgcaaaataaaattaccgctcatggatcatcaagaaacaagggtggtcaaggacaagtaaaataaaatatcttaac

SEQ ID NO: 44572 - DNA, 390 bp, Zea Mays
cagggacttgagcttcagggggggttccttccttcaagctgagcttcgagggctgcaatccttgcatgtgcgtcctcaagctcttcatgtacccttgataggtccagggtagcactgtccaggtcggtgttaagacctgccaccacacctacaagagtattgaggcgatcttctccagcttcacctggaacaacacctgtctagctctctccacgaggacataggggaagttgcatgtacgccatgtcgtgcagctgctaccgataggtgtggctgagggaccacaaagctctccgagtagcattgctgaccgaagcagcgtatgtggaaagcggcgtcaaagactcatggaatgatagaatcctgaaacctctgtctcctgcatcctac

SEQ ID NO: 44573 - DNA, 383 bp, Zea Mays
gaaatgatgtgggattgagtcgatacttcacagataggtatatatgtgtgaagtgtgagcttggtttgaaattttgcggagaaaacgaatttttggcactcggctcagaaacgatcgctataaataggaaacagtggtgtattcggtgtctgggatatcggataggcgtgaaatttggcgtggaagttattggaggtgtcatgagggtgctggaaaaatctggggttgatttgagcaattttgagtggtttgggcatttcaccgagcacctggtgcgcaggtttgagtaataacggtgaaacgactattctaggtcatgaaccctcctaaagggagcacaacacctgcaggagagctgcttgaacatacatctagggaccctc

SEQ ID NO: 44574 - DNA, 538 bp, Zea Mays
taggcttggccatccttctttttcttgtagaatttcttcttatcttccacaaccttgtccttcttgtttgggcaattcatggcaatgtgaccgagctccccctttggcattttctattattgaaagcatttcttcttgaaaattgatctcttcttggttgacctttcttcttcttcatgaacttgttcaatcttttcacaaagagagccatttctttatcactttcactcccactcttttcatcatcactttcttccttttcaatgacctttgatgctttagctttgagaactattgattcacctttcactttctttgcaaaacttgttgccttgcatgagatttcttgaaaatgtctctcccaaaacctcggttggtgcagtgttgttcaaatcactccactagcatagtgacaattgtgtcatacttttctggaagtgacctaagaaacttgtgagaaaaatccacatccggcacatccaaaccaaaacccttgagctaattaacaatttcattcaaccggttgaacatatcggat

SEQ ID NO: 44575 - DNA, 807 bp, Zea Mays
aaaaatcattaattcccttggttttcatactgctatggtccacgcacattaatactcaggagtttgggggctaattcataattgttccaagactcagagctaacccacagccatgctcatcggaccgcgggttcatttcgcggttcaccagggactcatgtgctaattgccagggccgaagaggtacggggcaatcacagccgttggattgagaacgtgagcaccagattagatcggtctcccccaaagcggtacactccatcggccacacgattaggatccaacagctaggatttgcgtaaaccggagcccttggatcgttgatcggcgcacacgatttaattcatcgaagagttacgatcggtctaatcgcgactgttggtcaaagatccaacggttcccatgccacgggggcatcagcggcctagatccaatcccagccatacatctccgtttcaacggcccacgtcctttcccccaaactctcctctccctgtcaacaaagcggcggcgccactcacgagcacggcggaggccctcgccggccacagcattccccgcatccccgttctaaactccgatccgaggtgttcactacgcagcagatacatgggcgaactggatggggaatttcttaccgcgaattgccgcgacgactgacccagtcacggtacgatgtgggccgcacggcggtggcgccctccggtgaggaattctgccatgccaaccgcccgtcctgcccgaacaagcagcggatacccatcggtgaccccgcgcgagcccccggagtccccaagcacgcttcga

SEQ ID NO: 44576 - DNA, 847 bp, Zea Mays
attccatgaattccctatttccgtgccattcatttgagtaagccgatatgatcctggccgagtgacctccgctactacaaatggcccttcccatagtggtgacaatttgtgtcgtccttcccccgttagaattcggcgaatgaccaagtctcccactacaaaggatcgatgttgtacagccttatcgtgatagcgtctcagggtttgatggtatctagatgactgaatcactgtattcaatcgctcttcctctagtacgtcaatatcctctagtctggtagcctctgcctcagctatgttttcgaagaccagccttggtgccccaaacctgaggtcggcaggtagcaatgcctccgaaccatagaccatgaagaaaggggtgtttccatgcagagctcgactaggttgagttcttaggctccaaactacatacgacaactctctgatccattttcccgcgaacttttcattcttgtcgaagactttcttcctgagcgcttccagtatcattccattagccctttctacctgaccattggcccttggatgtgccactgatgcatatttgatctggatgcttcgttgttcacagaaatcaaagaattcagagctggtgaaattggatcccaggtcagttattatgttattcggtatcccaaacctgaatattatatcttgtacgaacttaactgtcgtggctgaagtcagagaagcaatgggtttgtattccatccatttggtgaatttgtcaatggcgaccagcacgtgagtgtatcctccctgagctttcttgaagggtccaatcatgtccagtccccagcatgcaaatgaccatgttacgggtgtg

SEQ ID NO: 44577 - DNA, 450 bp, Zea Mays
atatgtaatattttcttctcatggttgtttcttcaatattgtggaggtgccttcaaaatttatgggttaacgaaacactttaccatgctttattttttctttctttcacatcatcagtgctacatatgagaagtcaacaccttcatgtaccagtgaaagattttccttttcttttcagcaatcagaaaaaatattctcttttggttgggtcttcagttatgtactgttttgtttccaaaatgacaggatggataacttgaaatttggacagtgcccacttttgttgcacttcatgacattgtgtattgtttaaaacttcaattttagtcacactttagctgacctagcaaaattcagcggttgtgcaccaagagacgccttcaattctagcggctgatgctgtgtttctggtaactgactttgtttactgctggtattcctggccgttta

SEQ ID NO: 44578 - DNA, 1075 bp, Zea Mays
ctcatatttgcttgcaggacttgccaccgactacgatgcctttgtgacctcgatcaccactcgaagtgatcgcctttccctggatgaggtttattctcatctcatggtgtttgaggctcgactccaacgcaaccaggcggagatgcagatgcatctcaattcctcggccaactacgctcgtcgcggcggcaacaacttgcgtggtcgcggtggccctcgtggtcgcggcggtcgcggaaactactcgcatggtggttcttcgtcgcgtcctacagatccgcctggtgctcgacgtcctgccaccaccaacaacaacagccggcccctttgccagatctgtggcaaaataggccacactgcggtacgctgctggtaccgtcatgatgactcctacaacgaagatccaccgatggccaatgtcgcctctacgttgccttcatacaagcttgacaactggtacggggacacaggcgccacagaccacatcaccaacgaacttgatcgccttgcggtccgagaacgctacaacggcaatgaacaagtccaagtgggcaatggtgcaggtttgaaaatttcacatatcggtcactctactattaatactgctgcacgtcctttatttcttcgtaatattcttcacgttctggggattaccaaaaatctattatccattcatcgtttcactcgtgataatgactgttattttgaatatcacccttggaattttttcataaaggaccggcaaacgaggagatgccttctggaagggcaatgtgaaggtggtctctatcccctgacgatctctagcgcacaagacctgacgcatgcattggctgcccgcaaaataaatcgtgatcaatggcatgctcgcttaggtcatccagcttcgcaaacagtccagtccatcttacgtattaataatattatgtgttctagtgagtctttttcatcagtttgtaatgcttgtcagatggctaaaagccaccaacttccatattctaggtctatgaataatgcttcagctcctcttgaattaattcactccgatgtttggggtcctgccgctacatctgtt

SEQ ID NO: 44579 - DNA, 347 bp, Zea Mays
ggtgggaattaggaccctgtcatgctggaggtcaaggagttggtgcccgccgtactaagaagaagtcaagtgcttgcttgatctagctagtaaaacgtgtacgacacatgttggtttggtggaactgacacatattatattccacaagacgaacaagcaaaaatgctgtcaaaagaaaagccatagtggttgaaggacgaacctgcctggtgagttgaaggaacctgcccagtgcacaactcaaaagaaaagccatagttttcactatgtcgatgtcgacaagtaaatagagattagattatattaaactggacgtggttctaccacagtagcatagtggttgatcg

SEQ ID NO: 44580 - DNA, 1160 bp, Zea Mays
ctccatataaccttaccaaatctcgcatacatagagctatctaaatgtcacattagctagtcaatccatattctttaataaggtcattcaaatgccacttctgcatatttgtatattttattgtgcttaagctagtttgtttataaatttgacataataacatacatagttgggttaaaatatctagccataaatagcctcatcttgctttgcatcaaacctattgactctagcaaccccttaaccccaacccagcactaaacaaccttacctctgcactattatgatagccaaccatcacaaacctcctcccataaacttctatatataacaacatgccataatggagtacaacgccccaaaatacaggcatcacatagtttctcggggattttgacgaatatcgccacggtgccacctcacaaccctccaacgccacccctcaaccccacccactcacataccaccaacaaccacccccataaatctcattatataaatcaatatgcatcgttagatcaaaatgtccaaccctaatagtctcacatttttcctaccaaactcattgatcgctgctgccccacaaattcccttccaaaaaagaactaatcgaccaaatctcgtagtccaccacatccatcgtccatatactcatttccatagatcaacttacaccgttggattaaagtcatgtgtcgttagattaaaatgtgcaaccctaaatagctttatctttcttttctagtccatttattcgccgccgccgccgcaactctcacctctcctacatctctacttataaccacgacacccacagacacccttcttcatcccacgccttcatagatcatcgccggatctcattcgattctttcttgtctccatatctaactagttctagagtccgccatggcccccactacctccacccccttcaaatctagggtttgaggctacaagcggagagggataagtggtggaaacttgatgtccaaatcaatcatgagcccggggtacgggccatggaatcacttcatcgatcgaacacacgacgaatcaggtaaatatacatgctcaatcatatctcacaccgaaaactctcgagatatgcatcgcccaagaccaagaatagtgctcatgactttagcgtggtctaaaat

SEQ ID NO: 44581 - DNA, 274 bp, Zea Mays
actgtgacagaatgactgaaactgcaatagaatgtcaaaagcggtaatggaatgactgaaattgtgacggaacgactgaagcagtaatggaataatagaaactgtaatagaatgactgaaaactctaaaaaacattggtatgactaaaactgtatttaataacataaaaggggcccacataataaaataacggacgttaaaacgtcgcccaacagaactgacaccgctgactcaacaaaaaacgcgggttaagcgaatccgttcttgtggtctg

SEQ ID NO: 44582 - DNA, 319 bp, Zea Mays
tccataattattgacctataaactactagtgatgataatttgtgatagaaatatgaagatcttgtagagacttgttgtatcctctctactcctgatgatttcttcgtatgagagcagtaatatctgttgttgaagatggatcctaggcggatactagtcttgtttcgttcttgccaagcagttatcatcatttgcttcatcaaaagctagtaatatggtgattttcccagataaaatgaattcttggccttgtttgttctattccaaagcttctctttttgccgaacaacgaagagatcgaaataatgctttatagaac

SEQ ID NO: 44583 - DNA, 457 bp, Zea Mays
gaattctgggacgccagatctaaatcctatggacgcgattagatcaatcataacacgaagcggtattcatgcgcactggtccttggatagcgaacaagcggtcaggattaacccgcaccagagaccactgtctgacccttggattcgaaatcgacgttctggattcaaaagacctgaaaggattcctatgcctcagatctaaatcggacggtgcatttcttgcacccgaagggatacgttggcttctaatcacgaccgcccattgttagatcgacggacgatgtgcatcccccatctccggctgtccatccggtggcgccgctcggcttcccccgccggaaacccgccggggttctcccatctggtgaaccaaagctccatacctcgagctaataggtgcaacacgatgccctcactaccctgaatctacaagttgagcacaggcacccgatattta

SEQ ID NO: 44584 - DNA, 590 bp, Zea Mays
ctcgagcacagtgctattaactgtttgagcttcagactgctcctgaagatcacgttgttgttgaggcccaaggtgccattctggctgttgatcatggtttggggcagttgccattggtgggggtggtggtaattgaggccaggaggcttgggagtgacttgttgaagctacagaagccgtaggctgttgattgcctacatattctgcgatgtatggagaataacacgaagtagtatggaggacttgcttcggctgactatgtcgcgcctcggcttcagcaatatctttttgcttctggattgtgacctggcacgtccttgttgtgtggcctttgtctttgccacagaagaggcaatacaacttcctgggttgattaccaaacctccctccattgaagcttcttcctcttctacctctcggagctggtgatctataagaagtctgctgcatgctcgaagaatgtgagttatgatggctggtctgagcattattggccctttcatccctgcattagagttatggattaacctgacatgcctaagatgaagtcttcctcttaatccccttgtcatttcagaaaacatgtatgc

SEQ ID NO: 44585 - DNA, 1629 bp, Zea Mays
attggatatataagcttgccatcagaattcagaagcaagaaatggcagccaagccataataataatataataatagtaatcgatggggtctcacctcctcttgccgttcctcctgctactgtcctcaccatatgtgcaagctcaacagagaatcaccttgggctcctccttaacaacccaagggcctaacagcttttggctctccccttctggtgactttgcctttggcttccggtccatcgagggcaacacctcctcctacttgctcgctgtctggttcaacaagatcagcgacaagacagtggcatggtatgccaagaccgctgatccagatccagcgctggtacaagtttcatccggttcatgcctcgagctcacgtccagtggagcgctctcgctccaggaccctactggcaaagaggtatggaatccagaagttgtgagtgcaacctatgcttccatgctcgatactggaaacttcgtactggctgctgcagatggctcttccaagtgggggaccttcgataacccagcagacactattctgctcactcaggtgctcacccctgaaaccaagctccacagccggaccattgccacagactactccaatggacggttccaccttaacctgcaaaataatggtgttttcttctatgctactgctgtgcaatccgatcctcaacatgaatataattggtccatgcctgggaacgccacaaatttggtattcaatgcgactggcatgatatacatcaccttggataatggaacacaagtaaaaatcacatctgggaagacaagctccatagcggactactaccatcgtgccacacttgatccagatggcgttttccggcaatatatgtatccaaagaagttcagcaaccacctgtacactcaggcatggtcagttgtcgacttcaaagctccaaatatctatatcccaagaaggtcaatagcagagacacaggtcagcagtggaacatgcggtttcaacagttacagcaaggtggatgtcataaacaaccagactacctgcgtgtgcgtcccacagtacacatttaaaggtggaagtaaaggctgcacgcctgacttccagcaaccaagttgtgacttggatgaagcaggtgccacgaagcagtttcagttagtaacaatgagcaatgtggattggcctcaatgtgactatgaacagcatgacaacatacctaacaaccagtgccagcagctctgcctgacggattgtttatgtgctgtcgctgtgtttcgtgatagtgacaatacatgttggaagaagaagttgcctttaacaaataatgttgtaggggatagtgtgcagaggacagtttacatcaaggtaccaaaaaacaacagtcaacaacctgagcttcttgattccaacagatggaagaaagataagaagcactggatccttggaagttcattgtttctaggaagctctatcttgctgaacattgtcctgatctctgttatactcttcggtacttactgtactataaccataaatgaaagcccgtctgtgcagtcatcaaacaatctaggattgcccctgaaagccttcaattacactgagcttgagaaggcaaccagtggattcacggaggt

SEQ ID NO: 44586 - DNA, 547 bp, Zea Mays
gttttgcgtgaagtcaaggagttgtattcaagatcacggtggatgtgacaagcaaatgaagcaatgattcaaatattacaattctggatggtgacttagaagcaatgattcaaatggagcgtaggaaacagatatcgaactaacaagtaataatctcacttaagggtgtttcactttgtgttgaactgtagacatagaaagaagaattaagacaagcgaagaagaatgaagagaagcaggtgagagaaaaagttgtgcaggtgcaagtgcaccgtacagaaagcatactaccatctaatcctttcaactatcattttagcatcaacctctatataccggaagcatgcgtgtatataaacttcataccccaataaatacccccaatacacacaagtttgtcatgtccatatatattagtttgaattttaattttaatttgtcttcaatataattcatttgcttttacaatttggtaatagacatgacataacaagacatgttcaaactgtaatagtagaacatgtcattcaaatattcaatataaaag

SEQ ID NO: 44587 - DNA, 339 bp, Zea Mays
gggcattcaaccaccaaaattatttataggaaaaggttaaaccctatttccctttcacatataacaatataaaaatggaaaatcacatataggaacttatatacctatgactgtgacttacatgagtatatatttttctccatagacatgttacctttaaaagtaggtatcacatgtatctactcgtatataacatatgcatcagaaatcctcatgtttattaatcttggtagtcactttcatctgctcatataatctagcatctgagaagaaacacctcatgcttattaatcttagcaatctagtctagtctagtaggagtatttccaattgatcttg

SEQ ID NO: 44588 - DNA, 492 bp, Zea Mays
aagaatcatatgttctcacgccttcaacaaacatatctagcagatcatcaattagtggctcaaaataatcatctatatcactactaggagatctacggcctggaatcaacaatgagataatgaaattcgtttgcttcatacataaccatggtgcaaagttatatgggatgagaataacatgccaaatgctacagctaacattcatggacctaaacggattaaaccaactgtagctaaagcaagtctaatgttgcgactgtcagaagcaaacactgagtgcttttggtcaaaatccttccagagaggtgaatctacaggatgccttagtaatccatattatatacgctcctcatcatgccaccttgtgtcacttgctgtcttagatgacacaaataacctctgaagccttctttttattggaaaataacgaacaactttgcatggaaccttgtctacacgttttccatttaaacttgtcctttttgatttcca

SEQ ID NO: 44589 - DNA, 381 bp, Zea Mays
gtttattatgtctttccccagggtctcttttggaaatcggatggccgaaagggtacgcgcaaatcgcggtcgtcggattagaatccgaaggcacagatcaaacctatctctttaagtgaacgggtacgttcagttgaccgtaggattcaagatctacgatcagggttttattaacgtgtgatctaaccgtacccgatcacatccaaatcgacggaccaaaaacagtatgccgcagcagccctcagatctaatatcaagggcagtgatttaaataactgaaatcgtcttggattcgttcgatcataaatgcgcgaccgagatccaaccagccgaaaggataccaggaatcctaatcacgaccatccatcggccgatcgacgg

SEQ ID NO: 44590 - DNA, 660 bp, Zea Mays
attgaatcatagccatcccgagtacggggtagtccaactataaaatccatactgatttcttcccatttccattctggtaccctgagaggttgtagtaatactgttggtctttggtgttcagctttaactcgctgacacacgtcacacaatgcaacatgagtagcaacatctcttttcaaaccgtaccaccaatacttttccttcaaatcctggtacatctttgtacttatagggtgaatagagtaagccgaatcatgagcttctctcaaaataagttggcgtaggtgttcgatttccggtacacagattctctttttaaaccatagtgtgccttgttcatcttccgtgaaatctagggctttacccaaaccaatttgtgtcttaatttctttgattttctcatcaaactcttgtcctttacgaatctcttcttccaaagtagattcaacttccataatcgttgcttccatattattgagcattccaaggttgagttgctccatttcccagcacaattcctgtgatatcaattgagtagtgatgttgttcatttgacccttacgactcaaagcatcagccactatatttgctttacctaggtgatattgtatttccaaatcatagtctttaatcaactcaagccatcttctttgtcttagg

SEQ ID NO: 44591 - DNA, 312 bp, Zea Mays
ggccgccgtacctccttgccttacggccggtccagataacctcaccagagttggtcgcctgcctctcgggtgccacgtgccttggtgctctaacacgtcgcagtgacttgccttagcatgtccggtcatcgccggtggtcaggccacggtgaaagccacgaatcacttgcgccagtgaccacccctctctccggccgccgcacgttttctcaaaattaacagccaccgccgatggaacctataaattgccgccccagtgagctccgctaagtagttgtgcacccaatgaactagccctcacctccaatcatc

SEQ ID NO: 44592 - DNA, 534 bp, Zea Mays
tcgaagtctgtagggatccttgcttctttgtcgtcgcctgccatcgaaacacaaaaacaagaaacaaacggtgaacgttatccctaataatctcactacacgctcctctgaggtgaaacacaggaacacgctctaatgtttcttaccaagctcttacaagtgtctatcgaaatacaagcaaaggatggtacaatcggaggctggttcgtgatacttaccaagaggtagtgaaaccgcgattacaaggtcacagctgtattgatcagaagaaagtatgtggagtttgggaggccaaaaattaatatcaaggattaacaaaaatcgagtgcagattagcgaagtccaataagtgtccaaagcacaagtcacaattgctggctaagacgtgtcctatcgaagcacaacaaggtaaaggtaacaaggaatggtggacaaaaacttaaataaccagcagaatggcagttctgtaaatagcgcagatttttcagcactagtagaaatcaaaggcgcgtttctaaaggagtaccagcaaaa

SEQ ID NO: 44593 - DNA, 514 bp, Zea Mays
aagcaattggtttgatgaattttgcttccagtaagcgatggactgctgccttcgcggcttctattttttcatcagacattttttgcagcttttgtttcttggggcgcatggtgggatcaatgcccaagctatgttcaatgatggtgcggctgacgccgacgaggtctatggcagaccacgcgaagacgtccttgttgcggttgagacaagagagaagtctttcttcttctgctggtagaaggtcttcgctgactagaactgtttgcttgggggtgacgagtccagggggactgttttgactccctcattactctgtagttgtgccttgatctttttgcctttgtttgtgcgagggctgctggtgtcctctcattctattgtgagacaatgtacattacgctggccaagaacaaagtctctttctatgttcctggctgcctgtcgatctccatatatggtgattgcgccctagggcctaggattttcatgcacaggtacaacccgtgtattgctg

SEQ ID NO: 44594 - DNA, 566 bp, Zea Mays
gttagtacaagtatcaacaacaagatcatcatcaggattggccgtgggagtagagcgaggacgacgaatgtaagtctgagtaacaagtggtttggaagagtaagactgagatggtgtggaagtggaaggtggtgtgatgggaataagaacatctggggtagaaacagtaggtggtaatactaatgaagtttcagaaatgggaggaaggctcatgaaggaggtagactctgtggaattaaaagaagaatgagtggaagagttgtaaaagaagggtcgattttcattaaagctcacatctcgagaaatacacatgcgacgagaagatgaatcataacaccgatagcctttatgttcagggttgtatccaagaaaaacacactcaacagattgagcagtcaatttagtacgttcacgaggtgataatagtacataacacgtacatccaaaaactcgaaggtggtcatatcgtggaggagttccgaaaaggacttcaccaggtgttttgccagagagtttggatgacggttgtctattgatgaggtaaaccgcagtagaaactgcttcac

SEQ ID NO: 44595 - DNA, 504 bp, Zea Mays
tgtgttacttaattctttagatgtgattatttccatgatgtaatgagtgaatggtaaaacacgtaacgagagcaactcttatataagtttgggtattacagaaagtcatcagagtcttcatagctcccgcctcggtagtgtcgtccgacctgaatccaatagtctcagagtcaagggagtgccagcccggctacagggggtgagcctctagagtcagccaaactcggcaacgtagtaccgaatgctcctcgtacaactgcaccgtgtacaaagggggcgtagggtaaccggcagtgttgagcacctcccacaagatgtaagggaaaccctcatgggaaaggaaatcagaactgaaacgagtgtctcctccattggcgggggtgggtgaagtcatctgtggaagaggatcagatgtaaaggttacggtagtgaaaaggaaaaacatgtgcccgggtcgttaaaaggaggtgggttagatttgattttactccttatgttatttat

SEQ ID NO: 44596 - DNA, 319 bp, Zea Mays
caggaagaaagaagaaaagagacggagaggcacagatgcaggggaaacaagagatctaagaacaaatcatcatactaagatcaacatgacaagcagaataggtagatctaggaaaataacagcatcagacttcacaataaccagccggagcctagagatacaccacaatggaaaagtcgcaggagcaagagcaccgaaaagtcaccggcgactcagcgaggaccaacacttaccagtttaggtttagggttaggagaagtagtcgaaattacagacgaatggagccacagagaaccagggctacgtcggctcaccggag

SEQ ID NO: 44597 - DNA, 614 bp, Zea Mays
ctagattcactcttttttgtctactatatggatcggaggccatgacctcgcaggaaataaagcacggatcacctcgaacaagtgcatcagccgtcctcgactaagatgaaccaacatccaaagacctcatcgacggagaccgcgtcttcgccctgcaggccctcaacaaataccaagctcaaacgaaggcctggcgtgaccacgcagtcatcccaagagaattcaacgaaggagacctcgtactcgtccgaaccacacggatagagtcacggggcaagctggagccaaaatgggagggtccattcatcgtcaagtcgaaggcgtcccccagcacatacaggctaacaacgccatccggtgaagacctagaccattcctggaatattgacaaactccgcaaattttttgtttaaatcctcagggcctacgcgcccttgtaattcaccaaacaatattatcctagcccacactcttttcctcccgggggttgaggtttttaacgaggcggagcctttaatatatctgcaaaaatcccccgcaaaaactaagatacaacatgtcgaaaaagcccgcatcgacggtcttcggcattcgaccactctgaagtcaccgcg

SEQ ID NO: 44598 - DNA, 443 bp, Zea Mays
cggacgacaaggatggagatagccgcgggtctgtcgaggcaagcaactgagcacgtccaaggcgtgagaagcgtggcaacgtctatattactgggccgagttggtcgtgtaagggttagctagaccgagccgagaaagtataaaggatacaactgaggcaattgtaaggacatcgaaaaatagagaacaaaatatcagctcgttgccatcacgtgaccttcttccccatgtctccaatctccgctgcttcccctgtttcctgctctatagacttctagaaggtgctaataccttccccgcacgccctccgcctccccgctgtacttcccggcgctcgagctcgtcgacgtctacaacaataacctgtccggccgctcccgcccctgagcgcgccgcacgcgcgctccctccgctacctccacctcggcgggaactacttcaac

SEQ ID NO: 44599 - DNA, 566 bp, Zea Mays
aaaatgtagaacacttgctcgctcgcctcactgggcggggctggcatgttgaatggttcaacaattttcttctccatccggttgacgacgtgccatcatggttcactgagcggggcgagcaatgggcgcgggcgcacgacacacacgtgtgaatggttcagcgatttattgcctgtgcatataacggggcaagacatcgtccctagcacgtgaatggttcagcaatttcttctccatccggttaccaatgtgccatcgtggttgggagagcaggatcttcgatcgtcccctcgtgcagggacacggggtagaggccgtataaggtcgatcagcttcgtctagggtcattctagcgccgacaaccccattgtaaacatgtgtatatctgtatttcttaaatcactagcactagtttatgaactactagtggattatagatatatgaaacatgatgttgtttcttttattattgtcgaaatcaatttgttcctattattttcaataacttgtacatggtacactgttggcggctgctatagcttcacatatttagtctggcaaaattg

SEQ ID NO: 44600 - DNA, 637 bp, Zea Mays
caagggccttcagatgccgaagcgtgattgtattggacgctaaattatatcttttacgtcctccttctcaaccaaatcattcttaacataaaaccattgtctcatccaagatcctggccatttcttctgaaacgtggggatagggcgtctcgcatcagagcggtatatgaaggaataacaaccaaatttgttatgatattgctccttccccatcgcattcgtttggtaagataattcaagtatattgcagaaggagtcgacgtccgtctccaacccttggctcctcattgcccagatgaaaacctcgattttaatcaaagcttcaggggcgagctgatgaagatgtatctcgaatcgtttaagtacatcgaccagcatcttatgcaaaggagactgaagcccagtatttataaagcccttgaaaactaccacttcgtcaggtttaggaagaggaacattgttctctctggccctcactatagttgtatcacggaaatatttgcctttcattgcctcaatctgccctctcttaatagtggatttcccaaatacaacatgacttggcctccatggccgatcttcgacccatcgttgttactctccatatcaaaatcctcgttgtcactagaatctccgg

SEQ ID NO: 44601 - DNA, 598 bp, Zea Mays
tgttaatacatagtaaatatttatatgaaactaatccaacttgaatgggccaaattagagttaaaatggagaatctataaactatacaagtttttggatttatttttctactaaaatcattttcggattaaacttctggtgttcctaggactatgaccataatttcttgaaaggacagggttcaatctgtaagaagaatgatctatgcgtagtgatctttatgtgagagtggatggtgggttgattgtgttagaatctaggggcttttctgtaaaacgtgcacggatgcggcagtgtggacgcgccataaccgtccgatccagaatctaggaaccgaattagatcaaagccccacgaaccagtatgtcatgaggaccgttgattccaggatctatggcccgaaagtcgttctacctatgatccaagtcgagtcgcacgatcccgattcagtggcctggattttattaaactggatctaatcctaatcgctcattcctcatccgacgcacctgattatatcacctgaattgttacctgatcccctaatctgagccctttgttgatgataccactgtttgcacccattctacctatccga

SEQ ID NO: 44602 - DNA, 660 bp, Zea Mays
gaagcattggaccggtctgggaatatataagaatatcatcaatgaacactactatgaacttgttgaggtagtccatgaaaacactgttcatcaagtacatgaagtaagctggcgcattcgtcaaaccgaatgacatgatcgtgaactcatacaatccatacttggtgatgaatgccatcttcggtatatctgagggtcggattctgagctgatggtagcctgacctcagatctatcttcgagaacacactggctcctctcaattgatcgaataaatcttcaattctgggcaggggtacttgttcttgatagtaacctcattcaaggctcgataatcgatgcacatcctcttcatgccatccttcttctccacaaatagcactggggctgcccaaggcgaggtactcggtctgatgtagcctttctctaacaactcatcattctgcttcttgagttccaccaactctggcctagacactcggtaggctctcttggaaatgggggcggtgcctggtataagctctatggcaaattcaaccttcctttcaggtggcatacccggtaactcctcgggaaacacatctgggaattctgatactatattgatagcctctgatggtttaatctcctcaatatgggcgatgacttggtgacagcttcc

SEQ ID NO: 44603 - DNA, 772 bp, Zea Mays
caaaattgtccctaaccggattcagagtaaccgtagttagcaagtttaacaagttgtgccattcgaccattttaattcccctaattgttacgcactatattaaaaaggttcaggaattgttcactaagaggtcgactggttaaccatatatccttccagaatatggtagcatgaccatccctcacttgaaagtgaccccatctaagaaattgatccttaatatttattagacctgaccagaagtgtgaatcattcggtcttctagatatttgagtaagagatttatctcctatgtatttgtttttaagtaactgttgccatctcccctcctcattgagtaatttaaatagccatttgctgagtaagctaatattttttacagccagattagagacacctaaactcctaacgctttgggttgataaacaatatgccacctgaccagcctatatctcgttttactgcttcctccctgccaaaagaatctggatcaaatagcattaagtttcttcaagatgcctgccggaatctcaaagaaagacatcataaagataggcagactacttaacaccgaattaagtaagaccaaccgtccacctgaagatagaaatttggccttccatgtactaagcctcttttcaaatcggtctataacaccctgccagtcactatttctcaatcttctatgagtcataggaattccaaggtatttgaaaggcattgacccaattccacatccaaatataagtgagtaatgcaaatcatattcctt

SEQ ID NO: 44604 - DNA, 666 bp, Zea Mays
tttagactgaagcagttttagttggtagaaatcctgtagcacttacaagtgtgttctggcaaagatatgttctttgttaaattatcagccgacttgtagtatctggcaaagatctgttatttgatatcaaagaacagatatacatgtgttcttgtattaacagaaatcttgtagcacttacaagtgtgttctggcaaagatcagttttttgttaaattatcagccgacttgtatttctactagtaaggtataggcagtagcacttacaagtgtgtcctatattacttgcatccagttatacatgtgcccaccaaacacgtgcccaccaaatcctggctagttacgtgcagtcaaccaaacaaccacacaaattattacttgcatccactaatacaggcttggcttggcctgcatgagcttatgaaccaggctctgcctagcatcggaaccaaacacatggacagagactgagctttgatcgagccaggacgcaggacgccgggtcgtccgtcgttgacctcggatcggaggacggagggaggagagtcaacgcctgcttgtcggatcggaggacgttcatgaacggaggcacggagctgctgtgctatacaacaaccatccatatcaacaggtgccgccgccgtggttcgccgcactagcaccgct

SEQ ID NO: 44605 - DNA, 387 bp, Zea Mays
atcctacccccttaaaaagaatctcgtcctcgagattaggatggactagggaagaggtggggaaaatctactcgcagctcttcttctctctcccaagtagcttcatcttgtccatgatgactccattgcactttgcacattttgatcaccttactcctcgtgacatgagtcaaagtatcaagaatcttgatagtatactctgtataagtcagatcatattgaacactaagatcctccataggtagctgttccttgggtactctgaggcacttcttcagttggaacacatggaagacatcatgtacatccgcaagatggtcgggtaattctagttgataggcaacttctcccacttgctttaggatcaagaagggtacaataaagcga

SEQ ID NO: 44606 - DNA, 553 bp, Zea Mays
caagatgccaaaggacatgtaccagtccaagaagttgctctctggtctcggtatggactacgaaaaaatcgacgtctgtgacaataattgtatgcttttctgtaaggagaccacgagtgagaagaagtgtatagtatgtggtgagcgtaggttcatagaggttgaaaacggcgatggtttgaccgtgatgaccgaggtagcatgtaagcagcttcgttacatacctcttataccttggttgaaacgtttgttcatctccaagaatacagcctgacacatgaggtggcacaaagaaggcgtacgtgagaatccagatgtcatggcgcacccagctgatacagatgcatggaaggcactagatgcctttgattccagctttgctaatgaagtgtgtaatgtctgcatcgatttggcaacagatggtttctcacctttcaatctaactgcaccatcctactcatgctggcccgtctttgctgttccatacaacatttcgctagctctttgcatgaaatatgaatttattttcttgtgtcttgtaatacctggtccg

SEQ ID NO: 44607 - DNA, 323 bp, Zea Mays
tttgtagtaccagcagggaagttggtcggattcattgtcagccaccgaggaattgaggctaacacggaaaaaattgaggctatcatgaggatggaagcaccacggtcacaaaagaaagtgcaaaggcttactggatgcatggcagctttaagcaggttcatatcaaggttaggtgaaaaaggcctaccattctacaaattgctcaagaaggtggacaaattccagtggacctcagaagctcaggaagcccttgatgcactaaagaaattcttgaccacatcgccagttctaaagccgccacaccgagtcatgcccaaccagcc

SEQ ID NO: 44608 - DNA, 296 bp, Zea Mays
caagatggtatggggagaggttgtaaggtacctgccaccttcaaatgactagatttgattctttggcaagtgtcacactcagatacatacttagcattttcccttttcattctggtccaccaatacaaggatctgaggtcatgatacatcttgttactgccggggtgcatggaaaacttggaaagatgagcttcgtccaatattttcttcctgagttctgggtttttaggaacaaccaatcggtcttcaaaccatagaactcccttgctgtcctgacgaaaacatttgtacttatc

SEQ ID NO: 44609 - DNA, 441 bp, Zea Mays
aatttatgcgagcacaatgatttataagtgctgttgtaaattttactatccatcttcctgtttgtcttttgggccatatgatgagactttgtgcaactcacgacggtcgtctgagacactttgtgtgtaatgttgcagtcctattttctctgatgctcccttcgtctttgtttctgatgcatttagcatttttgtgtttcttcatctgtttacattttacactttcctgtgaggcgcagactcagctgttatatttggtggcacagtgaggaactaattttgctaatgtatctatgaggtcagaaggccagtgaatcgaatgtccttttcattctgagtgccaatgtttctgtttttttcctttttgctgcaaacagttcttatgtgagaaactgagaactaggcagctgacttagggacgctgttaacatgttggtttac

SEQ ID NO: 44610 - DNA, 278 bp, Zea Mays
gtttctgatttacagtttgtcaatggattatcatgatttacagtttgtcaatggtttcatcaatataaagacttttatattgatttttagttcactacgtatatatttctattttaattatagtttttagggctgataatagagggctgcaactgatggtaggaggtgaccagttttatgcttcccttaatagcaggaggtggcagataggaggtgagtcctgtgtcagcagctcctgatgccaatttgacctaaccatatatggtcaccttcgagtc

SEQ ID NO: 44611 - DNA, 345 bp, Zea Mays
aaagactaggcgaagagatgacttcatcgccacaaatcttaacaccaagctccaccatatcagcactatagattatggtgtcgtgatcacacaatctcaccacatcatttcgggtacatcggcgtcatgaccggtgacactcagctacaacctcaacgtaatcaactcgatgctgacccctagagggtctaaaactagttatagttccaccggaaggctacctatgaccctgtttggaaacgtttttaagaatatagtttctatctctagttttttgaaactggtttatgaaaaaaatgatagtagtgtttggagccatcttaatttccataaactagttttagc

SEQ ID NO: 44612 - DNA, 635 bp, Zea Mays
agggttgactatgacgagactttcagccccatggtgaagcttgccaccgtccggatcgttctgactctagctctctcaccggcttggccgatacatcaggtcgacgtcaaaaatgtcttcctccatgggactctggcggagacgatgtattgcactcagccggttggttttgtgtacttcgctcaccccaacatggtctgcaagctcaaccaatccctctacggcctcaagtaggcgcctcgagctttgtacagtcattccttgctcgcacaaggtttagtcgaggtcaaggcggacacctccctgttcatctttcgttgtggcctgaacacggtgcacctcctttacgtcaacgatatcgttctcacggctttctccctgagctcttgcgacacatcatctcctctctccagcaggagttcacgatgaaggaggagctgcggttgggagagaagctgctccgctgctaggagagagggatcagtagtagggagagagggaggcggctaggagtgggatgggagggagtgaaaagtgggtaacctaattttaatgggccaagtgggttgatttgggctggctagactattctttttcttttctttatctcttttctcttctttattaatattttt

SEQ ID NO: 44613 - DNA, 325 bp, Zea Mays
aaacagacccaaacatgttaataaaaatccagtggacttgtgaccactagaaccccactacaaaaatgataaccaccccagcccatcattttaagtagggtaaataaataaaacttgatattgggtcctattccaaataaatcatgagcaaccctaaagtaatgcaattttgggcaaacaaaattttactaggtcaataatgagataggccaccagagaaaaatgcaaatccatttgaaagatgtagaataataactattgccaacacttcatgaaaaaggccatttaatccaaataaatcctactaccattcccttaagcaaaa

SEQ ID NO: 44614 - DNA, 488 bp, Zea Mays
ctcattcagagctcgataatcgatacacatcctcttagtgccatctttcttctccacgaataggacaggggcggcctaaggcgaggtgcttggcctgatataacctttctctgacagctcatcaatctgcttcttgagttcaaccaactctggtccagataccctataagctcttttagaaatgggggcggttccaggaagaagctctatggcaaactcaactttccgctcaggtggcatacctggtatgtcttccgggaacacatctggaaattctgacacaaccttgataatttcgagtgaatctggctccttgctatcaatagccatatgatgacaacctcctttccttggctcaggtgagactaactcagctaccacttcttctcctagtggggacaccaacttaattgtcctcttatcgcagctgataattgcttggtacttatctagccaattcatccctaggatgacatgtattcactgag

SEQ ID NO: 44615 - DNA, 503 bp, Zea Mays
atgggagtcagagagagataggccattgtttgccgtgatgacgccgaggccagtacgatggcctagactgactggcttatgtagttatgttggctccccactcctacttcaactatggacgttatcgatcgctataggtcggtatctatctctatttttaaagtatttagatctcgtttggtttctttagttgactaaactttaatttatcactaaaagtgcacttgagccacgaagggttatggttggaaaacactatttttagtcccttttagtcaccccatttagtcacgttgtttggttctttagtgctaaaaataactaaaatttagtcactaaaaactttagtcaccatgaaccaaacggtttcgcaattttcttttggcggcgagtatcattccgtacggttctcagatcaaggcgtggggccgtcactaggctcgacgagctgatgagagtcagagagagataggccattgtttgctgtgatgacgccgaggcca

SEQ ID NO: 44616 - DNA, 983 bp, Zea Mays
gcgcaaaccaattatgatgcagtcctaataaacagactataaatacttgatagataagggaatgcatagaagtcgagatcacaaaggaaaatagatgaaaactgaaagatgcgtgcgttgaatttgttctccgcttacttgattccttatgtgtaaaaattgttttacaaactaatcaaaaggaaactcacaaaaaggtatttcacaacaaaccaattactcttggaagtttgagtatgaagaaagtggtgcttacttcttattgttgcgcggttgaaaaatagttttaaacaaaatgagaaatctgtggcagcgcgatagtttgtatgatttttttaaatgtatgtagaaaggagatattgtaatacatctaagtgggccattatccaaaataattataagctagacaacatcaactgatcttagtatccagtactacggttgaatggttatttatatgtgcgggcagtatatttagttacaaaaggataagtatgatcgataacaaaagatgacaaaatgtagaagagtgctaaaactaatcagtttcgtatggctccatatatgattcctggtggttctttttgatccgtggaatctctgtttttaagtggtctttatttgagcatgttaaatgaaaggtagaactgtaataatcttattgtccgttacgtaatgaagtacaaatatgtggtttgtgtaaaagtacatgtaagaatagttaacattttatggatatgaggaaactatattgaagcttacctctttggaggagattgaagcggaggttcgacctttttgtttttatcagtggaagtttgctgcagctgttaaaatggaatgagtgagttgtaaataaatgcatttaagagtttactgaaatcacattatgttagttgtaatatgagttatatgaactaagatgtgagacattacaattccagtgttagtcatgcagtatacaatagtgcaataagttgttg

SEQ ID NO: 44617 - DNA, 756 bp, Zea Mays
accagcaaaaaggcctagcattgcccagcaagaggcacctgccatccaaaaagcgtagctactgcagcaatatggctacttgagagctcattttcgaatagccttgcatatccgttggcatcctcaagagagatgttctccatttcatcatagaaacagaattgtctacagacctgggcagcagaactagaacccaactctggaggaaacttagccactcttctgtacgcctcggaatgatattggtgattcgaggaggtggcagtaaactattaatcgatttagttacaacactcttgaactcttgcagcggtgatgaaagcacactctcctcatcctgaactggctctagaacaagtttctttctcctggaataaaccttgaggctgggaggatcatccttccatccatgaatcaactggctgagaaaaaacgaagacaatctgtttagaggttcaatagtccaaatctttccttgcacagaaaccccaaactgagtattcacattcactctgaccggaaggacctcagtcacctgattcccagaaccaggtggtgcagctgacacagataaaacagtagatcccagctgaacagcaggctcactagtagcagtacaaacaggaaacccaggagcctccaccccatcaaccgagaccaacgggagagaatgggcgtcaactgaatccccgaccacgtccggagcagtggagtcaggagatccaggagctaccacctcattaaccgctaaacccg

SEQ ID NO: 44618 - DNA, 700 bp, Zea Mays
gcccggcccgatttatgcccgggcacggcaatggcccagtagccagggaaaagacctaggccagcccccatcccacgcggccactccctcagccccctcacatttttgcgctagccgccccagacaatgactcgacacagtggattcaaatccgatcagcgattctgttaccctagccccagtcccgtcgtcgcccgccgcatcgcgctcggtcatcgccttatcggtgtggagccatcaccggtggctcacagaatctccctcttctctccctcctgtcatccacggcgggtacgatatggactagctctctccttcctcccttcctgacttcccgtgcattgtcggtggtctgctcagctcggctccgtcgtcggtgtgctccctgcgcgtcttgtggttgtggatctacctcttctctcccacctctactatctactcccaagcagctaaccctaatccctaagtccctaacctaaatcgcactcggcttctcctaatcctccgtcgttttggtcaagtcacaaggtctgttggccagatctccatctccctctcttctccggtgctccggttgcgcaggtattctccatcttcttctctactgctcgactggtaatccctctctaatcctctcttttttctactaaggtcaccgaccgattaggttggtgccgcgttcgccattgaggaaccgaag

SEQ ID NO: 44619 - DNA, 302 bp, Zea Mays
caccgaatcggacggtcgaaggcgcgtcttcaacctccgatcagaccccgggcagcagcgcataaccccacggcggagaccttcctccgatgccccgatcgtcgcctagtgagctaatctcggattggagacatgctacacgaagcacaatgcgaaacgaagagaatgaatgggttattacccttgatggtggtgcagagacccgcgcccacgacgaagcgacaaaggggatctccagcgacgaatccttggagttgcagaggatagtcccgcacgcgatgctatggtggaccttcccccgg

SEQ ID NO: 44620 - DNA, 312 bp, Zea Mays
ttcagcgactgcgcgatcatcgtttatatgctaagttgtctaaatgtgaattctggctgagggaaattaaatttttgggtcacacaatttctcaggatgggatatcagttgatcctgagaaggtacaagaattaatagattggaaacctcctaccacagtgcgacagattcggagttttgtgggattggcagggtattatcgacgattcattccggatttctccagaattgccaagccaatgactgaattgttgaagaaaggagtcaagtatgattggagccagaagtgtgaggatgcctttcatacactaa

SEQ ID NO: 44621 - DNA, 271 bp, Zea Mays
cagtaactgcggcagaggaatagggcgaaggggcttaccagcggcgagattgctccggtgaagtggtcgatggtgtaggggaggccttgacggtcatgccgatgtgcggatcgtctctggcgattgtcgaagtaggtcggtccacgtgcgcaggcgggcgagctcgtcggcagcgaggactccggcctatccagggtggtatagttcaattgaacgggtcagagagcttcaccagaggtcggggaagacataggcgcgaggaatgtgtgag

SEQ ID NO: 44622 - DNA, 626 bp, Zea Mays
tccgtctcgtaattgttcctagaccctatagaatccccgcgaccccccttgacccagccatcgaaacccggctgtagcaaccctctcattcccttagtcgagcagaccagagggactcatcgccagggctgcggacgtcgaaggcaaattaggagggcgtttcgtccgcgacgcctatcaatggatcatcaccagatcacgctcaacctgtacgctttggtggcgggtcgagaaactagtcgagttgaccagagttcatcgccagggttggatacggcggctgggctatattacgtcgtgggcggatgctaccatcgctccgatcgccggtaaggatactatccatcacttcgcctttcttcccccaatgcttagcaccgttcacgtttggattttgacgccagtgcgctgggcggaggaaatccggcgagctcccagggtggagctctgcttcgtcgccgcgccctgtcttcaggaggtggaagagggagttttggtcattgatcggccaatgcatggtctagattagatccacatcgtaccggttcaatggttgatcttagcccttggatcgagattgtgcgcaccggaacagatcgtgacgttttaaacccggggccatcgga

SEQ ID NO: 44623 - DNA, 470 bp, Zea Mays
cttcggctataaaggagaagattggaggccagaagagacgaataattgttaatgttatgcacgctattgagcggacaccatctccagctttggcttctagaatgatgcatgttgcaagtaccgatgctgagaccactgccgaagctgaaactattgctgaagctgcaactgctgccgaagctgctaatcttatgagcccaatgtcaggaattgacaagctgatatcagatatggtcgcagaggaggcagttgcgaccgtagaggaaattatggccgcagtgcctgacaaagataaagaagttgctgatacttcgtcaaaaggaaaggaatttgaccttcggcacctgggggatcaagaattgtctaaggcagagaaagatgagctggaagaatatgcaaaatcttgtgggtaccagccgggatccatgctcttcggtggagttgatgaggaaatcctggggtgtatccgc

SEQ ID NO: 44624 - DNA, 468 bp, Zea Mays
gtgggagcagtggaagcggggaggagtgcgagaaagaggcggagcacgacgggagaatcgacgacgggggtggatttagggtcgtgaaggcgtgaccgcgcggtgaggacgggggtgagccagtgaagggagggcggtggtggagggagagttggtggatgacaggctcagacattttgtttcatagcgactggcgctttactggaagtctagaagtctctagacgcacgtagcgacggaagcacacaggcctgtctatcgatgcactatcatgtggatgtgttttttggctgacgtggacggacggtggcgctctttttgaaccggctttgtatataagaaaatgatagttgacattatatcatcatgcatggcccatagaatgctccatcgttttgctgtttgtggtagttgggtgcccaagtaggtttagggttgaagtgaacgatgccattaggtgggtgtgtg

SEQ ID NO: 44625 - DNA, 803 bp, Zea Mays
agggtcaacggcaggaggggcagcactggaactccctgcctcgtgatcatgtgagcgtggaggcacaggaggcggtggcgggatcccaaaatcatcatcatcatcatcagggacagctgtgccctgggtctcgaactggtggaatgccgcatcctcagcctgagtgtctggcactggatctggtactaacactaggtcctcaggggctggacgataggatccaaactggaggcatgaggcctcgagggtgccctggaactgaggcggccagatcagctacgcgaagatgcagcaaagatagtgcgcatacggcagctgtcggcgagcacgaagaccatccaacatcgtgtcctcgatctcacagataagaaaataaaccacatcaaactctgaatgtgagatcaaggcaccaagtagccagagctgaatgtgggtggtggcctctctataacccatccagggcagtagtgtccgtctcatcacctgatataagtactttgctgcagaggtgaaatcagctggtgagcgccacgacccatctgtgaaaggcggtctgaacagggccacgacgtgagcagtggctggagcaactccgccatgagggcatcgaggaggatctgaagtaccatagcacagactgtgaaggcgagtcaacgactcgggaaatccaaacagctagcgtatctggctggcatgaatagtgacatcctatcgctcaaaatagaaccccatccactgatggtccgggtctttccacactaaagcttgaaatactccgacccacttctcaacatatctgtcgc

SEQ ID NO: 44626 - DNA, 577 bp, Zea Mays
atcttccttgctaacccgtaggggcaaaatagaacgcgtgcgtagggtctagacctcactggcgatgtgcacggtgggaggcgctcagagtggagtgcattcgccgcgcggtgcacggacggtgttatggcgtttgaccgtagaagatcagtcgtggaaggaaagaagaagagagagagggagccaggggttgaagacgatgtgctggccgtagattgggaaatcaagggtgtagattagatcggggggcagattaggccagggtaaatgcgaaccgttcgatcgtgatcgggcgagccgaggcgatcgcaaaggtttttaaatccgagccgtagaattctaatcgggcgattcctattgattatcggttcatatcccttcgccatctaatctcatccgctgtaattcgatcgtgcggctaggattgacggtcatcgcttcagccgagcgcttttacaaatagaacctccaaattaatgggtatcaacccgctgtccatgggagcagtgcattgagtcatagggattcttacacgcttgcccctgcacttctctgtatttggcgtccagtccagagg

SEQ ID NO: 44627 - DNA, 653 bp, Zea Mays
gaagctgaggatgataaggccaaagagccacaggtagaaaaaattgtgaaaatgccagaaattttaagtcctccaacagaggcaaaattgccgaaagtgcagaaagctcctgccgcaactcccaagaggagaaggatggccaatgtgctagacgttgtcttggagaccgcaaaggccttgagccctagtcctattaagaaaattgctgaagctgctaaagtccaagccgaggccaaaagctgagcctgcagcgcctattgagacgaaggccgtcgtgcctaaagataaaactgatcaacaggcttcagatgctggcatggcagaagggcaagacacgacagaaagggcaaaatctcctgcccccgaagccgctgtcgaggatactgattacatttatcgtcatgcctcggggaaaaagttgtccgaagaagaagttctggaagccagacactatgcgcgaaaattgaaatatccgaagggagctttagtgtttaacgacactaacaatgacgacttcctatactgtctcccggacaacaaagaaatatccgtttgccgggagatagctaagagtatgggatttccgaaacttgaagaaggtctttcggttctgtcgaaagatgaacttgctgatagcctcgcgtacaatagca

SEQ ID NO: 44628 - DNA, 511 bp, Zea Mays
cctccatgccgttcggcctcaaaaacgctgaagcgacttatcagagagccatccaaacgtgcttagccgatcactggggcaagtgtgtggaggcctacgtagatgatgtggtaatcaaaacggagaattcggaaaacttcatcgaagacttatagctggttttcaatagtctgagacgatatagatggaagcttaatcccgaaaagtgtgtttttggggtgccagcaggaaagttactcgggtttattgtcagccaccggggaattgaggctaatccggataagattgaagctatcatgaagatggaagcacctcgatcacaaaagaaggttcaacgacttactggatgtatggcagctctgagcagatttatatccaggctgggggaaaaaggtttgccattttacaaactactcaagaaggtggataagtttcagtggacttcagaagcacagggggctctagatgcactgaagaaattcttgacaacaccaccagtactgaagccacc

SEQ ID NO: 44629 - DNA, 1015 bp, Zea Mays
taaaaatccaatttctaattcatttaatcgatttaaaacagttctggatcgggcctcatttactggtaagttcaggggctaacccgcaagatctccaagacacagcgcgccactagtctggactgcgggtttaattctaaaaaccagaggggctcttttgaaagacgcgctggccgaagggttacggttaactctcatccactcgatctgctacggacggcccagattagattggatcacatctgaaccggtatctaacctccaccattcgatctaaaatctacggcgctaggtgtaccactccaacttctaatctggagcacccggacacgatccaacggtcgaaacgaatcggtcagccacttctaatcacgtccgcacagttcaagatcggtggctagcgcgcatcttcctcactaggacacacacccggcggcgccgtacacccggctcgacagagcgccatcgccggcaactcccaaatcggtgcccgaacgcataatacacgaattaaataggtgctacgcagggagaaggtaagtgcaaacgctagggacgatctcttaccggctaatgatgcgctaaaattcccgtccgcggtgacccgtggatctacgacggtgatggagctacggtgagtaatttctgctccacccgttgcccatagctctaggaaccgaagctcgcgcatcaggtactcctcgccgacctccccgaagcgccctggtcaagctccgcggtcaccaaccggaatcgcacgatgcagatggtccaaaatatctccctcacggtgacgagcacactgttgtatcaatggtcaccagccctagcatgcatttgcgctctatcccgcagcagatgaagacttcgcacacgagctcctatttatccgtcgcgaggtgaggcagagtggccggtaacgagaatcgtggcaatctccacggagctagtggcaacggttttgcgcatctgtgggaaggtgaagacgacaccagaggctgggacccacccacca

SEQ ID NO: 44630 - DNA, 391 bp, Zea Mays
gtcgaagttgatccactaatctgcccgggtgaaggtgatcgggtgctcagaccatcggtacggggcgggaggaccggtagccgctaccagtatctgacaatcgttgagcttttgttgtctcttgctttcctgtgacccgtgtccgccgaaaatgacgttgacttctctgtcaacgcgcgagaaggctccacctcctccctcctcctactgctggggctgtcgcggttctcctggccctcctcgcggcgggggaggaggtagaggttggaagggtcgactgtgcccgacagaatgcttgaaatccctgtagttacggagggtgtggcgcatgtccttgtggtacggacactgggcgtcgaggatgtcgtccagcgtgcgttcgcctcctcga

SEQ ID NO: 44631 - DNA, 556 bp, Zea Mays
gttccacaggaaatatgtcaaggtcacatcagaagttatgtttctgattcttatcaattttacttctagacctatgccataggtgtgatttcatggttgacactagacctcttcaaatgttaggtcggatcaagtttgggatgattcaaggtcggatcgtgggttgtttgccacgatctcgactcatgaatagtgtcgagtcgggtcagattaggttggtccgtgactccctgtcagacgcatcgggtcggattttttcgagttggtaggattttttgtctttaagtcaggttttgggtcaaaaattataaccagtacctaactcgtagattgttgcaagtcaaactatagtctatgttcgctcgtcatattggtcgtgtcaggacgggtcagattttttcaaacggactctgtcgaaagcattcaggtctttttacaaacaaattggcacaaatatacacttcacatctgtcaggcatccagagtctaatgggctagtcaaaagggcaaatgtcattatattattaggaatcatgagatcacttttgaatctacc

SEQ ID NO: 44632 - DNA, 525 bp, Zea Mays
acagagacctattgtttggttcttacagaaaactaaagctaaatacatcctcaaatatacaaagattcagtcttccttcaacaccttttcaacagcttcatgtaatagtctgtcgacgacttcgttagcaattttcattatatccaaagcttcttttatggccaggtcgacttcgggattatacggttccagtggtggtgaatggtcagttgtaataaagaatatgttggttaattttgaagctaaaaatgaacaacgaagctaaacctcaataaaagtacctataatcctggcgcgttcagcagcttcttcagctcgtttagcctcttctcgagcgtcgtgagattctttctcagtatttttaatcgcttcatcagccatctcacgacccccttcatccaaacatcggaataaaacctcccgcccagcaaagaggcttcggccaaagggtccttggtgtcatttgctaagaaaatgcattccggttgggctgcggccttaacatgttcataaccgatcttctct

SEQ ID NO: 44633 - DNA, 375 bp, Zea Mays
tcccgagcagcatccacatgctgcgctcgatcctgccctcgagtcgttgcctctcggcagtgaactccgaagtcagggcgcccgacgcaacatggtcggtgaaggcggccgcctgccacgaaaaaaccatcagattcgcaaccacataaaaacaacgaacaaacaaagtccaagacgacttacatgcttcagctgctcggatgcatgcctcagttgctgggacacagagcccgccacgtatttagcagcggcgaccgatgaaatctcgccgctggtgcagaacttggaccatgagtcatgcaaagtacccttcgctccaaccgccatcgtaggcaaagtggctaccaccgaacctgtgacaacagccagctgcct

SEQ ID NO: 44634 - DNA, 341 bp, Zea Mays
gtggtggaggaggggctgcttgacgggggagcgggacatgggatccaggctgcgagcgccacctaaggttttggatccgaacaggggaggcaaaacggggatcaggggaggcagaatggggatcgtgggcaggggtgcgtcgagagagagagcacgtgcatcggacgggggagaggcttcatggcgtatcagacggttgagattgatggaaggcagaatgacaagctacccttcctatcttaataagtagtataaagatgcatccactatttgtaacctagagtaaaacttcacccagatcggtcctgtcctgtcgtcctgggcgtgtctgacccggtcac

SEQ ID NO: 44635 - DNA, 338 bp, Zea Mays
attgaaacggccacagtgccgaagcttggtgaagggacaccttccactgctgaggcagaacaacctgctcctgtcatccccaaggaagaactgactgaattgccgaaggctcctgcagctgggccagttgaaacaccaaaacatggtgccgaagccaaagaaaaggcggccgcagagccagagctagggaaaacagtaggactgcaaaaaatcttgagcccactagcagagccaaagttgccgaaggtatcaaaagcttatgcaataacccccaagaggaggaggatggcaagcgtgctggatgctgtcatggagtcgacaagggcattaactcctgc

SEQ ID NO: 44636 - DNA, 723 bp, Zea Mays
acgcatcgagatcgatgcgaccaagtgcttgggtccggagcagggagcactacgctatcgagctagctggagcacgaagcaagacaaaggggtagagatgacaacggataattcctcgccgccggggaatagttccccgtccctacgacgaaaaaatttcaccgcggaaaacgcttgcagggaatattcttggtggatatatcacatgaagggtgcaagctaaaaggtatgtctcttggcggaataaatgtcgcacccttcgagagatttgatcacatgtcatattttttaacactccccctatatcaattccaatttcacttgttcatccttcagctgttttcaaaatattgttgtccttaaaaaccctatagaaaaaataaggagtataccattctcttggattatgagtaaaactcacacgaacttccaaaaaaatatgtctgtaatcaccattcctaaaaaaaaatcaccgtgagaaaataaataaatgataaagcatacaacttagttgatattacctcgttaaaaactttggatgagaaaacctcaacaagtcaaaaactcatacaaataaaagagtgtaatatgatggttcaaaacatgttaaagatcacggagaattaccccttgatccttgcaagtttttaaatcttctcataccaatccactcaacacatttctaaaacgtggagtatggtagagattttttgtgaataaatc

SEQ ID NO: 44637 - DNA, 523 bp, Zea Mays
ctccggtgagacttcctccctactctctgcgctgctctcctatgcgtgtagcacctagtggatttgagtttcgggcacaggagctcggtgtccaccttctccggtgagggcgccgccgcgggagggtagcgccgccgcgcggctctgctgggaaggggggtgttgctctgggccgttgatctccctgtgttcggcttagattaaatggtcgatgttactttggcccgattcgatctgaatcgtggatatgaaattgagtggctgagattagatcctgaaataccggtttgtccaattagatccgagccatcgatccttgatcctatggttctgagagcttaccggttcgagtgagactgatttaatttgagcccttggtttagatcggacggccaccattcaacgataccctttcggctgcgtgtttttcaaaagagtccctggactatataagaatcaacccgccatcctacgtgactatgctctgtgtcttaggagttttaccccgagccccctgctgttc

SEQ ID NO: 44638 - DNA, 761 bp, Zea Mays
agctaaaacatcaacagcaagcttcccccctaccagaagaatccccaaaaccaagcccaccaaaatcaatttttcgtaatggtggtacttgccatttgattaagagaaaattctatgtatgttgttagtttgtctaatactttatttgcatattgcaattgttataatctctctatatcaatcggctgcaattcattactcttctatgatatcaccagtgacataaaagataagaaaatgatatcttaatcatttttaatttaacattttaaaaaaccacatttgcgtggttgctcggctttggaatctagtaatcgacattgtagcctatgaccctaagctaaaatagccattaccaataatcatggcgacaaggttgcattactcatggttattagttaatgatgtaccgttgatgtagaaactgagctcgacaccacacatcttgacgccgaggtcaactcctatgccacaaccacgacttcttcctctcatgctctctatttctccctagctcgcactctctttctctcaacatcgcccctgcggccctgcccctgccccttcatcgtcgacaattgaccctacaccttgtcgtggttgtcatcctactcctcctcgttagtcgttgtcctctctcccactagcattgtttgtcagttctatgtggttgtcttccccaaccaccactaacccacatatgaatacgggttgtggtgccagctttcctgtgatggtcgacaggccgtcgcccatcctcc

SEQ ID NO: 44639 - DNA, 715 bp, Zea Mays
ctcggtacattttggtttcgctaggatggacggtgtaaggcattttatgagcttctctcaagatatccatcttcacctctgatttctgaggcacacaaagacggcccctgaaacgaaccaaatcattctcatcaatggtgaaccctcgtggtttaccatcaccaaccctctttcgagcttcctgcaatagacgatcctgctgctgagccgcacgcactctctccatgagagaggattgaataagcatctgagtctcctcgctagcggtaccgacataacacaaagcgattcccaaacggtccagatcagcgatcaatggcaaggccacctttggaaccccggacctgctaagggcatcagccactacattagccttccccgggtgataatgaatggacaaatcataatctttaatcaattccaaccaccgacgctgcgtcaaattcagctccttctgagtaaaaatatatttgagacttttatgatcggtgtaaatgtcacaagcctcgccataaaggtaatgcctccacgactttagagcaaaaaccaccgcggccaattcaagatcatgagttgggtaattcccctcatgcttcctcaactgccttgagccataagcaatcacgctgccttcctgcatcaacacacagccaagaccaatacgcgaagcatccgtataaactgtgaaacgcttaccgctctcaggcaaagctag

SEQ ID NO: 44640 - DNA, 539 bp, Zea Mays
aaaaggattcaccccacgtgcagcagttaccttttcgcattctctcccaactggttgtgcccctttgccttcatgctcctctgttccacacccgcgccgccgcaccgccatggcttcgcttggtcatcctgaccactttcagcctgaggaagcgcttaatctggtgcatggcctgcttgggtggagcgagccagggctcaccggaagaatctgtgccggcgctgccccccttggcaatcccgccgccggggagtttgtgctgttcacctcctacatctcttgagggttggcactgctgatttcgcccttcttcctactactgctggaggagttcgggcttttgcttcaacacctcacgccccactccatcctccaggaagcaatctttgtccacctctgcgagatgttcgctggtgtggccccctgcacttccccctttcgctacttcttcgtgctggtcaagttcgggaagactagggaccacatcggtgcctactacttccagatgaggccagatccggccgtagtctacatcccca

SEQ ID NO: 44641 - DNA, 975 bp, Zea Mays
cgattccatgtccgcactcgatctcctctcctccccaactctagcctctcggtacaacgctctgaggccgttgctggcggccgaaccaagctagcaccgccgccctcactgtcgtgccgcgattccgtgaaccaaccatagcacaatttcgcgtgaagcacacgatagcggacacacaatgaaccgctaagaatagcgtgcgcgagcatcatccgctattttagcgaacattttatagttcactgctggagcacatagcggacgtttctaccgctaaatttagcgtacatggccatatagcggcccttgctggagccagtttaaagtggcatgaaggctgcagaagagtggttgcgaaattaaagagcaattaggacaagccctaacaataagacatgcttgtgttagggacaagcaaaaattccagatctaatatcctgtgattgagggtgatgcccatatccttcaggttacagttaggaaaaggctacacacttgcaaagtagagtggtgctaatgttgtgatgggcaaaaagtagttgtagatccaaaattcattccacatagatgaatgctttgatacacacacacggtagtgctatttcgcaccacacccgcgcgcagcctcgcagatgcagcaacagccctacccccctcggcatgcaccaggtccccacccaccagagcatgcatgcaacccaaaaatagcgcacacatgcatgtggcatgcaacataagacatttttcttttttcttttatatctttcaattaaaagatttaaccactgaaccaatttcatatttgtattcctgagttttttgtgaacaaaactaaaaccactcgtgctatatatttcatttttttattacgtagttactctcatgaatgactgagcctaaaaggatggaattactgagtatattcataaaatgcctaagtttgttcattttctttcatgtaacgtctgtttttta

SEQ ID NO: 44642 - DNA, 513 bp, Zea Mays
tggtaattcatttgtattgacatagcgagcagaaatgaacaaatctgtagctccagaatcaaataatatagctgcaggaactgaattaatataaaacataccgatagcaatatcaacaccatcagcagtagcatcaacactgactttgttgactctggcaatgctaaaccccttgccagaagccgaagtttgttgcttgccctgaacattgcttcgagctggtgtgttggggttcctcttcgaacaagcattggcgtagtgcccaacctcaccacacttgaagcaggtggtgtattattaccatggccagcaggtctcgtctaggtgttagtgggggcagcctgacaagtatgcggagtctacagagtcgcctgtggtgtataccgagcaggtcgttgataggactgttgccctcctccaggatgagctggtgtaccctggggtggaacatagcgaggacgaatgctactgctccccaacccctgggtgatagacttcctcttcatctcacac

SEQ ID NO: 44643 - DNA, 411 bp, Zea Mays
taaatccaaaccctaggggcttatgtgcaaaattagtccacttttggactaaagtgcaaaaaccaagtcaaataagtatcttaagtcatttgggtcactcttatgtgaatttacaagccaaaccctaagttttggactcatttgcaaaaggaccccaattgtgattcctatgctaagtctgaaatcagggttataggcccaactttagagctgtgtagctttcaaaatagtgagaatccatattaggtcaccacatcaaaattgtagcccaatcataggagaacaattttgctgaagagggcaagccatgttcttgtgagaaatttggagataatcatgctctaaacttgactgtcaggttgtttaagttctgaacctcaaacaagcagtgcaactgcaggcactttgggc

SEQ ID NO: 44644 - DNA, 605 bp, Zea Mays
catccgtcgttgaatccgattcagatgacagttccccagaaattcatgaggagactccccctcggcccagatccaagcgtgggcgaggatcaggtattgtcatgatgggtggtgaggcctctgggtctcaaggaactcgcgtacgaatgacttgaaacccttctagtcgttctcgtcccgcgacaaatcctcaggcctgggagtctataagtgatgacgaaggaggcaaagatgatgttgttgacctccctcctgctcatgccctcatcatccaaggattggtgcttcacaaagctcaggctcgccgttccccaaacgaagaaattattgatttcagtgccagcggaggatccgctcttctacaagacatgcgctttcaaaatcctaccctccgtgtacctgatgtcaggattgaaggtaatcgcttttggattctacttcatgtagatttctacaattcggttttcttccaaagaagcaccagcccattctccatcaacgctttatcaactggagtgggtgtgaaggtattggggattcagagatgacattggcactaagggcctgtgagcaaaagaaaatgaagaatatcatgactttccaat

SEQ ID NO: 44645 - DNA, 436 bp, Zea Mays
ttacgagcgatattctgacttcctttgtgtccaaaatgacagagtaacttgcacacgaacctcaaccttactgagagcatgttctgtgggacccatatggtacggcgacatgagaatagagcaagctagaggaactcgcacgacagaaggatgggatagagcgtcgtgcgaggaatacggaagcacatgacctgtcagaaggagccataccgtgtagtaggcacgccccaaggttgaccctagagaggtccactgcgcactatagctgagggcgtaagctgaagaactctatgtcttttctctctttctctctctcacttgtaaggaccgtcccttaaagtataaaagggaatccctctcctattgtacgcacacaagcacaccggctgtaacatgcctcaaagcaacactacgatcagcactacactggactagg

SEQ ID NO: 44646 - DNA, 714 bp, Zea Mays
agatgatcatttgtctctccgacgtggtggatctctcacgaccacatacaatctctgagttaggtcactaacaaagcctccggggtgatcaccgagctccaattgccactgagtcgtctaagtgatgctgatcaccaagagtaataagccatagactttcacttaaacaagagaagcctaatgcatgcggtgtgtgctataggtggctctcatgtgcactaaggaggttctaacacgagattatgactttgttaatcacctcactatgcaatgtggacttgcaagtctcaagcaatgaatgcttggtggttggggcagcaagacaatgaatatgggtgttggaaggggtataaatagccaaccaacataaactaattgttactctgtcttttagaggctgaatattcttgaaaacaaagtcgatcaccgcagcttcagtagtcagacatctgtcttttaaacccgcactcttagccaacaagaccttcgccttagcaacttcagattcagttggggcctctatccaacttggcacgcgaacatccggctgtcttccagaatgagcatgcaaggacttgttataattctccatagtgaactactcaaagtgccatcatttcatgttatcctttagggggatatctaggtattcaactttcctaccccgccgaagttcaaggctagccccaccaactacttgatgttgtccaccat

SEQ ID NO: 44647 - DNA, 636 bp, Zea Mays
gttcccccctcccctcatcacctgtgcttacgcgaaacaacgctctgaattcaacagtgcctaaattaagtgacacaaccctaaactttcatatgactactatatagcatgtgttacacacgatctcgaggagatgatcgatgatggcggtggcgcaagtcaggagagggggaagggaagggaagggaagggaagggatgaaggatgattcaaataaagtagttcgtgggtaagggagatgagttatccaactatctagaccgttgattttgatagtgtgagaagtttgagtacaatatgtttggtgaatttagtgggataatgagtatggggtgatttggttgtgtgacttttgcaaagtttaaacttatggattatatagtggtaagagcataactcttttctattatataaatatatgtaactttctatctttaacgtatacaactttatatctaactttctatctttaacgtacataccattctatatttaaagcatgtttttattattattattttcccggccggtccccccctcccctcatcacctatggttccgcgaaacaacgctctgaattcaatagtgcctaaattaagtgacacaaccctaaacttccatatgactactatatag

SEQ ID NO: 44648 - DNA, 743 bp, Zea Mays
cttcatggaaagaaactttgactacattttcttagtcttcaattcttttatccatcacaataagtaattggctagtcaggtctgaccttagaggactcaaagcagtaatagacaaatgctttgtcattacctctagtatctgggttgcccccagcgacgaagcctaagcacttcctccactttccttttcctctcatcctttttacctttagtgttttttctttctttatctactctagcagtcggccttttcttgcttttatttaaacaatatactaccgtagtatctgagtgggatgaccctttgtcaccacttgcgattacctttggctttttggattgctatgcactcactttcttttgctttatcattctaatagccgctccaagctgctaaccttccactttcttttcactctagcctcggcctcctgagcaagattgttgtaatgtgaatattcaaagccaagagcgtccattactatatttatccttcatttttcatgatttccaaaggacgctgccataagatgaaccactttgatggtgaagttacctaagatttcgttgctcatagtcttgatggtccctagccattttgggcatggtcccttaaacaatgagtgtttcttgagctgatatggcaacgtgatcagtataccagcttttacctcttcatctttctttgtctttggcattgcccatctagatctcacaagaaaacctggtaggcaaggaattcc

SEQ ID NO: 44649 - DNA, 370 bp, Zea Mays
cgaggatgttggggtcacttgtgacttacttgatagtcctacaagtgaaccacaacctactaactctatttgtgataaatgcaaattttatcttataaatgataacattgctcatgatgaatcacaaatcattgttgagaatgaagtattagtagatagagtgaatgctctaacccatgatcttgaaaaggcatatggtggaagggctaaattggatttcatattggggagtcaacggtgctcacttaatcgtgagggtcttggatatattcccaagaaaggaaagaatgcttttgtaaagcaaaagacattgtttgtgaaagaatgtgacaaagtgtgtcacaagtgtcacaagaagggacatatcaag

SEQ ID NO: 44650 - DNA, 484 bp, Zea Mays
atgagcaaagtcctttgatgaatattttaatgggtctttttctgggcacaatagggggatatactctctgttacctgtggtgacgatttatgcaaattactgatggtgcattgcatagatcaattgtgtattgcatgttgggggtggcgggatcactctggtactataattggggatatggaagtgtagcagttttcagtgtgtgcataacttttaaatgtttggaggatgaattatgacatgtgatttattcttgtcgtttcttgttctgaatgtagaacatgatatcaatagaagattcaatgtatatggttgagtatgtgttactattatgaatggctatcaagggaaaatgttaagtttaaccttcctattgttgaaatactgcatgtcagtatatcgctggcccaaatttgtttgtgccttcattctcttactataattattttgtatggacaatctacgggcagtgggtcaacattac

SEQ ID NO: 44651 - DNA, 777 bp, Zea Mays
gttattagaagacattttatctcaaatcttttggaggattctttaaatcatcaaaatgtgatttttggtgttacagatttacttgtagcaatggttggaggcgaatgtaggggggactccaggttgatttgtccttgctgggtgatcttctggtgtcgatctaccctgaaatgtgatagaaacctctcttttgccgcttcacaattatggttcatgttgcgtgtcaattgacaaattctccttagttggtttaaggatattgtttggggagatagtagtaaagtcatcgcgactgatctaatggatccgaaacgcactcgtccccaacgaagatgctaaaatgtatgttggtgtctttttgggctaaatactaataaaccctaatgctttcatgcgacgtatagaaccttggggtcgactctgagaggtgccggatggtctgcagtaggtcgctggacaatgcgcagtagggcaacggacggtccgcggttgggcaacagaccgttcgcgatggcacagagagcttcactcctctatagacgtgtggaccgtctacgtgtaggcggtggaccatttgcgatacgtgcagagggcttcgtgtagaacctatatctcgcctctcaagagggaccctatcgggaaggagatcgtagggttgctttggaatcggcaggtcacccaaagtacctctagacgacgtagagctaaagagaggcgaagattgagattggggactgcaattaaagttacgctacatcttaacataagacatgaaaa

SEQ ID NO: 44652 - DNA, 527 bp, Zea Mays
agatgttgtctatggtggtgtggatgttgtaggctgtgttgatgttgagagcagcgtgtcagcgatgttgtgaaagctgtcactccttctgataatgacgagtcgtatcccttatatttggaagcatattgggtcaccttgtttgttgtgaaggctgtctctcaatctgggacttggttgatggtgtagtgttgcagccaggagtccctgaccgacatgtttggaaattatcatctaatggaacatattcctgcaaatcagcctaccaagcgatgttcatagggaccattcagtttgcccctggagaaaagtctggaagagttgggctccagctaactgtaaattctttgtttggctggccatcaacaataggtgttggacctcaggccggctggctaggcgagggttaccacatcaagcagcatgcccattttgtgaccaggcggaggaaaccatacatcacatcctagtctcctgtgtgctgtccagagaaatatgggaagggattttgaggaaacttaagcttg

SEQ ID NO: 44653 - DNA, 342 bp, Zea Mays
cacttattacatctgcaacaagtgtttgaactgctcaacagagatcattggaaagtcaagatttccaagtgctcattcgcccagtcccaggtggcatacctcggccacgtggttagcagtaaaggcatggctaccaacccctctaaaattcaagccattgctgattggcgtgttccttcttccatcaaagaattgcatagttttttagggttggcgggatattacaggaaatttattcgtcactttggaatcatatgtcagccccttcatgccttgttgaaaaaaggtgtactctttgtgtggacatctgatcagtccctggcatttcagacactgaaaaaa

SEQ ID NO: 44654 - DNA, 814 bp, Zea Mays
tttgattccttgcacacccacactccctaccacccagtgacgctcctcgtgcagtctaattaaactctaccatcgtggtttggccggtacagacgtcgctactgagctccgcctgagtccagggctagatcgactccggtcatccccgacaccgacccgcacatcgacgtgacctctagaggctccccaatcttacccgaacctttgccagagctctaccatcgccggtaagccgctccaccatcttttttgccatggttactgtttaccttaaccgagaccgcgggttagatgttagaaaagcctagggggtcaagtgtaaaggcctagactcagataaaatttgcacgggttagatgttagaaaagcctagggggtcaagtgtaaaggcctagacttagttgaatagtgcaccagggcctaattcgtaagggagaaggggaaggaaaatcgaggactcatttagaagaatgttttcctttttctttttgaaaatctacttcattacatctgtagaaaactttagaaatgcataacttgaacaaaatttatccaaatttagtcaaactagttttgttaggttctggacaagctaaactttagaataaaaatagaaaactcattagtccggtactgtttctggaagtttggatttttattaggatttcaagtaatatgcaaaaatagaagtaaaaatagtagaactaaagtactgtggctaagaaaatgttagtagatacccactcaacaatagagtcatacaaaaatgttgtgcaccatagtttcctcagttaagtagagatcataattataa

SEQ ID NO: 44655 - DNA, 351 bp, Zea Mays
gacgtctctagcgagttagggttcgttggttcgccaatttcgctggcgcatggggatgggtcacatcgttacgacaagcgagatccgacttgtcagactgtccgatgtcacgatgacgatggagtgggggacagaggcgccatgaagggacatggtcaagcggcctcatgttgggaaggggttggcgacagaaacaaggcatcagggcagactgatttgggtggtgttagaaagaatagggtcaaacagatagatatgagtactagactaaagaagaggacgagagtcaggaggactaggccgatccgccaaggaggctcatgatagggttgtttaggccctgctccaaac

SEQ ID NO: 44656 - DNA, 904 bp, Zea Mays
ctatagtccacacacattcttcttgaaccatctttcttgttcacaaatagaactggggctccccatggtgatgaactggggcgaataaaacccttttccagtaattcttctatttgtttctttagttcaattaaatatttgacatccattcggtaagctctttttgaaatcggtgcggttccgggtaatagttcaatagaaaactctatatcacaatcaggtggcatacctggtaattcttctggaaatacgtctcggtattcacacactattcggatgtgctccaaagatgtctcttccaactgatttaccattgcttctgttgttgctggcatactggcattgacttcaattctttctccttgtggactggttaatgtaaccattcttttggcacaggatattactccatcatacttggtcaagtagtctattccaagtatcacatcgattccacttgactccaaaattatcagctctactagaaagcttaggcctctaattccaatcttagtctgagggcatgagtgagtggctctaagttcacctcctggtgatcgaattaatagtttcttcttcaagggatagtttggtatatcatgtttttctacaaatgactttgttacgaaggagtgagatgctccagaatcaaataaaactgatgcaggtatgtagttaataagaaacataccatacaccactgtcaaatgatttactcttcctctactctggtctacggagtcttgtctgtgcagatccacgagcaggtgtgttctggtcagtcctctggttgctattcttcttgggtgtctgttgattacgccttgggcagttgttgtcatagtggcaaagttcgccacacttgaaacatccattaggttgaactagggaagttgtattgttg

SEQ ID NO: 44657 - DNA, 410 bp, Zea Mays
aacaccagcaaccgcccataccaaatgaaattaaactgaaagctcatgttttgcttgccactaaatctgattttgatgatgtacgtgctaataatctgccttgctatgcgcttgtctactctcatatgatgttttcactagatgatgcaccatctttggatataccccctgttgttactaagcttttgcaggactatgccaatgtgtttccaaaggagttaccaccaggtgttcctcccattcacgacattgaacaccagatcgacctcatcccaggtggtcagcttcccaaccacgacctgtatcgtaccaatcctgatgaaacaaaggaaattcagaaccaagtctaagcgttacttgataagggctacattcatgagtctcttagccattgctctgttcatgtttta

SEQ ID NO: 44658 - DNA, 664 bp, Zea Mays
ccaaaatctcattgcacatagtttcaatcatttccagtcattcttggcaaggttgcttgaactgtttttcaaatttgaagcgataagataattgaacaagttcatatttcttctttgttcccttcatcttctgcatcatccagtcacttgacgttgggtatgttcggttggctaggtattcttgcaccaagtccctagtgctgatttgctcagcaaccaccctgaattctaccttggccaattggcatactgaccctatctgcatgttacacaggggcctcatcattccgaagtttaaagtcagcgggcacatgaccatcgtcatcagtttccccctcttctcctcatcggccttaatataaaaccactcacccttccagccggttggccatttggtgcggtagctgtgaactggagccttcgtatctttgcggtacgcaaaatggtagcagccaaaattttcatgcagaccgtctaccctggccttcgtctggtagtgtaactcgtgcactcggcagaatgcttcggcacctgggctcatcccctggcttcggagggcccatatgaaaacactaagcctaacaatggcgttaagggtcagctgatgaagatatatttcgaaatttttcaaaacttccccaatcatctcattcaaaggaagtcg

SEQ ID NO: 44659 - DNA, 388 bp, Zea Mays
tttttgcgagggcgtccgatgtttcgttgtctcgccgagggatgttgttcagttcaaggccatcaaatcgttcctccagccactgtacctcccaacagtatgccgccatcttgggatcgcagcattctaactctttcatctcttgccatacgatgagccaacagtcccctcggccgtccagacgtcggacacccagctccacgacgatgcgtagcccatttatgagggcttcatacttggccacattattagaagcttgaaagtggagtcgcacaatgtaccgcagttgttccctcgatggtgacataaaaatgagaccacctctggctccctcttttgtcatcgacccagcaaaatgcatgatccaacatttcttggtcgtttgtgc

SEQ ID NO: 44660 - DNA, 849 bp, Zea Mays
aaggaccaccgcgcacgcaggccatctacgacctcactgcggccataatggcttgccggtgaatcaccaaaactcgtgtacctgggctctgcgtgggcgatcacggttgggtatccaggcagggtggctaccttgtcagactccatctttgccgccatggttcgacctctatcgcggttagggaatagagccaccggattcacggtacggattactccatcttcaactgcctttgtactggatcacgttgcactggttggcttgcgtcggggctagtggaattgctcgccgtgaagcctggcgctgccgcgggccgcgccattccgttgctgggatcgtcgagaatttaatagcaaaaattggttccacgttcgagttctactctgttccctcatcgtgtggcacttaatcacccatggattagagcatcagggcgccgaattggcctatgccggtgggatcgccgctgcgacttgccctgcgccgccacctggttggtatggtgtaggtgatcgtcccagtattgtcgatctgatgaagaatggttgcgattagaatacgtaaaccccttcgcgtgatttgatctgagtcatcgatctagatcgtgcggctccgatttgatgaaggatacattaaatctatgccagcaatcctcgatctaatggttgtgccagcgtaccggttcggattgggctagatttaatctgagccctagatccttaaatgggtggccctggttgattcctacgcgatctgctgagcagttttacaaaagagaccttgtacttttctataactaacctgccatcctacgcggcgattactgagtctcaggaaatcttatagttt

SEQ ID NO: 44661 - DNA, 822 bp, Zea Mays
cgcatctaaaaattaaaaatgttttttattcgtgtgctgattttcttatttggtcgttagaaccgtcttcctcgagttctatgaggactttgttccttgtacgtgcacactaccggtgtttagtcccgacggcgcaccacggggtaacccacgtagagcttttggaaggacgacaatgtcgattgctactcgatgatatgtgtaggggcacgtcggaacacgagggatttatataggttcaggatgcgcaagtgcgtattaccctacgtgctgtgtggtgctgagtattggattcctctgagtttgaagattacaagtgattgtgggaggtggaagatgaagttgcctatcaatttaatggagtgttctcactttcttgtaggggtacctctacaaccttatatagctgactggatagatatcccctttatagatcattgagtccactcgagtctacttcctgttgctacacgtattcctattctttcggtgcttggttattatctgaatgatccggcgctcgaccatgcttgggatgcgtcttcagagttcaggcgatccctccgagggacacacaaggtgatccctccgtgggacacgcgcaccaccggtatacccgtgcagtacccttcgagattttcagctatcccacacaccatagcttcagttagtttttgtcctgcccaggcgaggcccattgtgtgccctactggacgacttatcacgggcctctcaggcgaccgaaggaatgtatgggtgacttagtggcccatgggatatctatctcccataagcccccaaggctcaagaaaattttcgagg

SEQ ID NO: 44662 - DNA, 471 bp, Zea Mays
gaaatgcgcagattgatcttggctaggaagtataaattcagattagatatgtgcccatgcgttgcgacaatgtatactatttgataaatgttaatgcacaacgatcttaagttacactacgaaaattggccccagttgatagtgtaattttaccattttcaacagatagaagtttaaaagcagatccaactattacaataaacatatgctttacaatgtatcgtaacagattttagtagcattttgaagtaaagaaactttgagtgcgtgccaaaaaacaaattatttttccgaaacaacgatggtgccgcaaactatgagataggtaacccgacttcatctacaatccttgactgcatgggcataaaatagcaaacctgcaagcaaaattttagtcaaaactgaggatatgtgaccatgatcttaagtagcactaagaaaattggtctcagttgacaatgtagtaactta

SEQ ID NO: 44663 - DNA, 510 bp, Zea Mays
caattattgtgttacaaggacccatgaaagctccaagtcagaacaacatacattcgactctcttatgtagtcttcagcacatattcaaataatatttgcagaacttgtcatggtcatattttacttctaaacatggaactgttcaatcatacacatagtatttgtgagttacgacttacccaagagaaattccccttggtcgtctaaaaagtgaaagaacactattctgggctgttagctttcatcattgaagctaaacaaagagcagtaacagcttttgtttgctgacacattaccaaaggatgatgaaagtgcagaaaaaaaattgagtacctctcaaaaagtacaaacagtgtgggtgtaggaaattgcttataaatggtaaggtgaaaaaaaatcgttgtctgcctatatgatatggtaccacacaatttgctgttacagtttcatgtgttgggatgagtaattgagtgcatctgtatttatgaaataacagatattacaattgtc

SEQ ID NO: 44664 - DNA, 524 bp, Zea Mays
tcttgatcgtgacctcattcagagctcaataatcgatgcacatcctcctggtgccatccttcttctccacgaacaggacaggggcggcccaaggcgaggtgcttggcctgatataacctttctctgatagctcatctatctgcttcttgagttcaaccaactctggtccagataccctataggctcttttagaaatgggagctgtgccaggaagaagctctatggcaaactcaaattttcgctcaggtggcatacctggtaagtctttcgggaacacatccggaaactcggacacaaccttgatagtctcgagtgaatctgcctccttgctatcaattgccatatgatgacaacctcctttccttggctcaggtgagactaactcagctaccacttcttctcctagtgaggacaccaacttaattgtcctcctatcatagctgataattgcatggtacttatctagccaattcatccctaggatgacttctattccatgagcacccattactatgagattagtg

SEQ ID NO: 44665 - DNA, 285 bp, Zea Mays
agaacagggactcttttgcatttgtttgcgaccgaaggggtacgttgcattatgagccatcagatcatcaatctagagctcagattagatcaggactcaattgaacaggtacgcaaccatcgccgatggagacagatccaacggcgtggatttcatcctgccctatctaacaacaaccgcccgatcgagatttaacagtcgcgggcaaaatgttacccagatctaatctccatcgcctaccaccaaatcaatggccccaggactctctcctacctcccgacacct

SEQ ID NO: 44666 - DNA, 599 bp, Zea Mays
ttagagatggcaacatatcagatttgaatcagatattgtaattatccacctgcaaccatatctgtggttgcaaccaatatcctcccgcgaccatattcgctgatagaaatttatatacatgcacgtgcccatcgggtttcagacagttaggatatccatcggatatgatagacataatcattttcaacaattcaatagcataattagtcaaatttcttctcaattcaccatcatacacaattaaaacttaataaaagaattattattggcctgcgggccgtggttagggacactagagcttggaagggttcgtcgccagtggtgctgtggcctatgggacttggaaggggccaagaggcacaacgcaagacgccaacaaggctagaaggggaggcgaatagtggggaattaggagcgttaggcatgaggttcatggtgttaaggtttgttctttgttacgtaatatgggctaggccaaaaaatacactacgtctattttggatatccaaaggataacccgtgggtggaaggtaatatcctaatatgtgcccgcctgagttcaaatcggatttgggtctgacccacaagccaaaaacatg

SEQ ID NO: 44667 - DNA, 309 bp, Zea Mays
ctcaacttagggtgaccactataccctactagcggagcaatcggcttaagtcggcagtaacttaagaaggtgcaacatgctcacacttactcgacttagggtgaccactataccctactaacggcagtaagttaagacggtgcaacatgctcacgcttactcaacttagggtgaccactataccctactaacggagcaatcgacttaagtcggcaatgacttaagacggtgcaacatgctcacgcctactcgacctagtataacatgcttacgatcactcatcttagggcgatctctatgcctcattag

SEQ ID NO: 44668 - DNA, 585 bp, Zea Mays
aaaaaagaagagggtgagaaaaatgatagattatcttatttctcaaactgaacatgccatagtcttcctcgacttaatacgccaggataaataacttaaacttggtgttgtgttttgttacaattattaggcttgctctaataaagatttcaattttattgttcctcccagcatcacagctggaccattaatgtcagagagacagagacaagtatagtatcagtctctggagaaagacaaatgccacaaacacaatgtaggtctacagcctagcctaatggagaggagctgtttgacccgcgtgtcgcacagggctaactccaaagctcaggtcaacgagctgctgctggtctggaggacagcaactgatgcctttgccgtgccatggaaagaattgaaaaggtatcaaccatctgctggcctggaaaaagcttggagcaggaagagagaaatggtggcatggcaatatggcatgcattcccatgcgcagtgcacaacacaatgcctggactggattcaattcaacggccgaggcgctgcctccgcttccctccaaatgttgcgctcccgagctctcctcggcag

SEQ ID NO: 44669 - DNA, 538 bp, Zea Mays
tttcatcgcaacaacagggttttccccttccctgcagaactgatgcctttcaagtatgttccaagaaaacgacgttgtttgaaagccaagacttagatatcatagctgaacatgattccctctgggatccccaaactgtttatgttacttcataagtcacttatgccaggtgttgctcatgtgtatgatactccccatgacacttatgttcgctgtgtccagtgtttatgctacttcgtatcagtttttatttcaattgtgtaaaacagaagtggtaccagagtgcctagttatgttatctgttatgaacttctatgcttttcatttccagattgtgagatggttaatcgtttccgtccaatgtttgccgtatttctattatcatattatccttaatattcaagttttatgcaacatatatacttccttattttatatacattaggttccttttacacatttaccatgctaattatgctaactgtgtccagtgcctatgctacaacctttctggtgtagatgtagtgtgaaacccgaa

SEQ ID NO: 44670 - DNA, 987 bp, Zea Mays
atatattgtaaaattgtttatatcctattggtttcactagaacgccaatcttattgtgccgtgatttataaattttaggtatgataatagttcaagataaaaatatttgcgttaggacaataaagttagataaagttgtactctatattgagtagagtaaaatacatcagcagttctcgaacttagcatgctatatcacttaggtttccaaactcccaaaaccatcaaaacaagtgctatagtttggcggtccatccaaatccgggtttgctcaaactggatgccaacatggtgtgcgaaactggagcacactataatgaaagttttaggatctaagtgacacaatatgacaagttcggggacctaataccattcttaatgggggttgcattctcattaaataacatgccatataagcaaataagatgacatgacatgcaatttaatgtagaacgatgagagagtttcatgtgagatgagagagtttcatgaggataaaactctacatgcactacttcctagataaatgctgacatgacatccttggaaataatgtgatgaaactatccattgagaatgtcctaagtgacacagcatgccaagttcgagaacccaagtaactccaacgtgacacgacacatcagcatccagtttgagcaaatctagttttggatctgccgaccaagttacaacatttgttttcctgatttatttgagagtttggggacccaagtaatacttcatgtcaagtttgaactgccaatacattttactctatagagtactacattggagaaagcatgtggttggtgttgtccgatccatttctttttatttgtattgtatatgttgttgttaaactattcgtagcgtatcacctaaagccgtttgtaaaaactttaggggcaccctaaaaccgcagcagttgtccctaaagaacaccctaaatttagggtatgtcctattgccttaaatctagggcgttct

SEQ ID NO: 44671 - DNA, 315 bp, Zea Mays
atgggatccatgtgtctattgtgcggcgaacgcggaagccagcagcatcatccgggaagccatagcaagacaggaagttcagtaagcagttcgtcaccaagaccgacgcaagcaaagtcggtattggggttgtaatgatgcaatctaggcatcctccgtccgttggccaggccatctaagtagagatggcaataggtaaataaccatcgggtattactatcccatatccatacacacgatgaaaaatagctccgccaggtcacctatattcactggtgaatataaatttaccctaatgtccacaaagattaaaca

SEQ ID NO: 44672 - DNA, 590 bp, Zea Mays
tactatttgaccatctctattccattttgttattgacatgctcgtaccctagattcttaaatactcttgtttcaaatacttacatatgaatttctactgcctacttaaacatttcagtttatatgtccatcatcatcctgtctttcgagaccctttcctattatgttgctaagtcgctatctttcggtaattcgtactcccttggtcttggtatgctcgcaccttcgtaatcttgcatacttttactttttatataaatgcttacctttgtaccccaatgtctgtttaaaacctttcagtttacatactcttaaccacctttgtttcttcatgatccatgagcggtcattttattttgcatatccttggtaatcttgttgtctccttgtaactccacttggtaattaattttctttacttcaaccattatgttgcaaccttacctatcttacccttgactgttttctccacttcgccacctagcgagtcttgcctaaactctatccttatgcttttcattattatcaccttaacctttgacacctatatatcttacttgatgtttgtctcatacctgccctttaaaatca

SEQ ID NO: 44673 - DNA, 483 bp, Zea Mays
gaaacatcacacgactctagcaaagaaacaccttagatctaaccattaaaaatctatgggcaatactatgatgagcataacccaaaaagatacaatccacagttttaggtcccaacttacactttttgtttattgctacattcactttggccaaacaaccccatgtgcttaagtaagagagtgaaggtcttctcctaatccactcctcatagggttgtttctcattattctttagggtaactctatttaggacatgagatgtagtcaatactgtctcccccaccatgccttagataatacattagtgtctaacatgttgttaaccaggtcactcaatgtgtgattcttcctttcggtgaccccgtttgattagagcaaatagggaggcatatcatgtataataccatgtttcacatagcataagtcaaagttattagataaatattcacctccttgatcatacctaattattttgatattttt

SEQ ID NO: 44674 - DNA, 433 bp, Zea Mays
tgtaccggaagtgcgctagtggacgcacgatcccgaatctacgactggtagcttattgccccgaggtcgaatccatcgcccaggaggtatgatcgacggatcggattgcttcttgcgcccaggaaaactataattaacgaaccggatcggatcactattgaacggttgcaccagatcaattttagtcgtcaatcctatgatctgtggttaccctggcatcttcaacctcacgacaccaggcccggccgatcgtgcagtaatcaccccactcaccactaccggccaaccgacactcgcccaagaccctacagggatatcccggtggttcgctggcctcctaggaccgctcgaccatgccatcaatgcccacccagaacatccgatgcatacacggatatcgcagaggaagagtggctcaccggcgagagcgtcc

SEQ ID NO: 44675 - DNA, 953 bp, Zea Mays
tgaattactttttggcacatggcctgcctcgacactattttctattgcatctcatgtttagctgaggcaaatcttctctgttccatctcatgtttcgttgagttatatggtttgttgcatctttctaaatacacctcaccaacccaaatcatctctgctccactcatgtaactggcgtcatgaactctatatggccgtcgctaacacggggtagtaggtctggtctgctgacgctacatgccttggcagctcctacagggtacctctgaaccctccacatgaggcaatcggctcaggcagtgaagtacgaccccattttggtggtacatgcctcatttgactcatgggtgacctctaagcccttacttacacaagggaactggctcgggcggcaaagtctgacccagttcagtgctacatgcctcgtctgactcatgggtgacctctaagaccttacttacacaaggcaatcggctcgggcggcgaagtccaaccccagtttggtgctacatgcctcgtctgactcatgggtgacctctaagcccttacacaaggcaatcggcccgtgcgacgaagtccgaccctagtttggtgctacattcctcgtctagactcatgagtgacctctaagcccttacttacataaggcaatcggctcaggcggcaaactttgaccccattccggtgctacatgcctcgtctaactcatgggtgacctctaagcccttacttacacaaggcaatcggctcaggcggtgaaggttgaccctagttcagtgctacatgcctcacttaacctagggtgcgctcaagccctactttacgaaggcaataactaaaggttgcacttcgacccatgaacaatgttatgcactctcactacacctcgacagcacagactcaattctcacttcataactcaaacaaatctccttcacattttcctacatttt

SEQ ID NO: 44676 - DNA, 677 bp, Zea Mays
caagaagaaggcgatcagtcagaaaatagagaatttactatatctgaggatttagggctcaatgaagtagctagtctcgccatagatttgatgacagaagaaccaggtccttctagggcaaggactcgtaagtcacagagaattcttgaaaaacaacaaagacttgaaataattgagcagcgcgttgctgaagcagattctgatgccgatgatttttgaaaagtatatatatttaaattcttgtatatgcattcctatttcaatactaaaagtatatatatttaaattcttgtaatgaaatttgtgcagatgatgagggtcatggacaagctcaaagggaagaagcgcggagaccgtggtgactcctcgaggtcacggtcgactaggggttcaggtggtggggatacatcttctatgttgttccaggtatttaatttgttttattttcttttcttctacatatacatcgagtacttgatatatctcattgttgattatgtttgtagggctctacagcgtcaaggcaacgactagagcagctccttggttgcatggaggagcaggggcgcgaagtggcaagccatagtgcacctgggcacgagcgcgaggtggcaggccatagtgcacttgagcaagagcgcgatgtggcaggccacaatgcacttgagccagagcgt

SEQ ID NO: 44677 - DNA, 648 bp, Zea Mays
catgaactggacaagaaggacatgcacactggtccaagcatgacagtcgccgaagtcgcctcttcttccttttttcctcaacaggtgcagttgggcggctcactcggcatggacgctttgggcggacaccatcaggtttttgggtctccaccgcctcaccaagttcttgcacagctgtgatagccattggctcggcatgggttgagccagatgattccccagccagcaaactaagcacaacatctatctccgtgttgtcagtgctagctggcatctcaaaatgagtctacctctcatgatccggaagacttcaaagtggagcaatcagagccttaatgtcctcgggagagggtcgcactctaagacctagactaccatcactagcaggagggttggacacaacttggaaaatggcctgattagtggcaggttccaagcagaataggccataggagcaccaacatttgaaactctacccctcaagatcatgtccaatcgtctcatcagatcttgtgtgggaattctcctgttcgtaacccgggtagaatcattgataccactgtacaaataagcaggatacgcgctgtcctttaaaggctggatgttcttgaaaacaaaatcagcgaccacagcctcagcagtcagacc

SEQ ID NO: 44678 - DNA, 592 bp, Zea Mays
atcagcgaccttcggtggtcggaaaaagaagaggctgaatagagtttttgatgctattggattcgtctatcctgattaccgttacccgatatggggtgaaaaaagaaaaggtacagcttctgtgaaggaagttgcttaggccgctcttagtgagccggcgccgaagagaaaaaaggtgaaggttcttacgcactggccacgctacatagagccggccacattgcccgagtttgttgacgaggctccttcggctaccgaagccaaaaaatctatatctgcgcagaaagctgaaaagctgactgcaacaccgaaggctgaaagagctgaagagtcgaaaactgaagggacaaaaatatcagaagttttaagcccttcagcagaagttggagtgccacatactcagaagggtccagctgtgacccccaaaaggaaaaggatggttaatgttttggatgtactggagacaataaagtcttcaagctccacgccgaaaaaagttgccgaagctcaaaaagcacaaattgaaacaaaagcttctggaggtgaagctacaaagcactaggctgaaatcaaaactggaccttcagagtgc

SEQ ID NO: 44679 - DNA, 828 bp, Zea Mays
ttaagttggaaatccatgatgccctccccatagtcgcacaacctctatttataaggtcctatgggccaactagtcgttggaaccaaaatagtgcactcaacgggtcattgtactatctaatgccctcgtgttggaccatatcactaggtcttatgctcttagatgttgccatgtgtactagccatttaaatgatatcattatcgaacaactatgtgatagtatagttggatgctcatagtcaggcaattgtcggaccatgaaccataggttccaacgacctctgaaaatttaatagagagcgaccactagcatcagactaatacgacacccttcgtcagaccaaaacacatggtctcatgctccttctcttagtcacacggattgtctgtcagtccgaccgccatggtgaacgcccattttatcaatcattggactataacaccaatataacactttcctcaaaaccatctagatagcacatagtgcctgtaatactaatctgatgcctgacactataccaagtcacatggtctgacaccctccataaactgactagagagcaactactactattagattggtttgataccctccgtcagaccataacacaggttcctacgatcactttgatcactagctatggttagtcattagactgatactattctagtccaatgcccatgtcagtcatgaactccctgaaataattaatgaatagtagatttcctattgctattctggatcaccaacttagctaacacaatgacaagatcatccctcaagtgctagtctgttgtgttaaagatataatgttatatatgttaaag

SEQ ID NO: 44680 - DNA, 617 bp, Zea Mays
gtaacccaaaaggtaatcaacgacaaggtaaataattgtcaccccttccatgaagttgacttttcggtgcttcgttgtaacttttgccttttgtaccttggatctgatgatggttttcaggtctccttcctcttatttgtcccgccctacactagtcacaggtagtctaggtacacgaagcctatgacattgaatacttgatttaatcttctctttcctcatgcgccaaaggttgccatcaggatttcatcctccttttttgatgaagtttgctagaacttcattacacttcgactcaattgcctctagccatttgtcgcatgactctgctaactagtttcaaaacttgtacgtgtacttcaaatacaaaagagccccttctcatcatctaactttgatgggctagctaccttcggctctggcatatcccattcagcccatagaggctagacactaaacactagatgttcttgaataaggtctcttgttccaatataactacacatgacattaaaggccaccaaagcagcttgagcttcatcattcatctagcacaccgacctctttatgcagaagttagactttataggcctctagatgatatcttcgatgtcttc

SEQ ID NO: 44681 - DNA, 618 bp, Zea Mays
gttcgttgctcccgacttgtactcgacggagaagtcgaaaccgaggagcttgcccacccaatggtgctgaggaatggtggccaggcgctggtcgagaaggtacttgaggctgtagtggtccgttttgacgacgaagcggcacccccataggtatggcctccaatgtcgtacggccaacactagcccaatgagttctcgctcataggccgctagggagcaatggcggggcgccaccggtcggctgaagaaggcgatcgggtgaccctcctgtatgagtacgaccccgaagccataggtagagtgtcgcactccacgacgaagggcttggtgaagtccgacaatgtcagtactggtgctgacgtcacggcccctttgagggcgctgaaagcggtggtcgcctcatcggtccatgtgaacccctctttcttcagaactgtcgtgaggggtgctgcaacggcgccatagttgtggacgaacttgcggtagtagcccgccaagccgaggaagccacgcacggcccgcgccgatcgcggttggggccagacgtggatggcctggacctttgcagggtccatagcgacgccagccgccgagatgacgtggccgaggtaggcgaca

SEQ ID NO: 44682 - DNA, 606 bp, Zea Mays
gaagaaacaagctaagattttgtggttgcgtttaatttgtgttgttttcctactacttacctggtaagctattatattctttacttggttctccatgtaacataatggtgggtgcagctgctgccccaaatgatattatgacggatagctcttaaaagtgttcgaaaatcagagtattcagtctttacgcgaactctacactgtttgttcctgtttgtgaatccctattgcctgagtcactcatcaaataaattgtatgtcgttgctatgaactgagtcctttatcaaataaattatatgtcgtcccaatgcacgagtattgtactatagtagttcaagtgtgcatataattaaatacaatattactgcacttgttctttattcgtgttaattatttttcttgaattttgaatactacatctacacctcgtccaccttgcgctcgccaatctggtgtgtttcgcctcttgctcaccacctattcgagcaaatgctcacatggctcgtttagagctcctcctcatagtgggtagtgattgctcaactatcagatcagaactatgtaagcgctggatgttgtagtgtacaggctgtatgagttcaggt

SEQ ID NO: 44683 - DNA, 779 bp, Zea Mays
ctgatgcatacttgatctggatgctcctctgctcgcagaagtcaaagaattctgaactggtgaagttagatcccaggtccgtaatgatgctattaagtattccaaacctgaacattatctcctgaatgaactccactacctttgctgaggtaaaagaaacgattggcctgtattctatccactttgtaaatttgtcgatggcaaccagtatgtgaatatatcctccttgagctttcttgaagggcccgatcatgtccaacccccagcatgcaaacggccaggtcataggaatagtctgcaactattgtgcgagtagatgttgttgctttgatagaaattggcatgcctcgcatttctggactagctcggtcgcatcattcttcattgtcggccagtagaatctagatctaaaagactttcccactagagtctatgacgctgcatgtacgccacactgcccgacatgaatctcatctaacagttgtctcccagtagtcgagtggatgcacttcatgaggacccctcttgcacctcttctatacaccaggacccctatgatggtatagtgagccgactatctcgtgatgtgttccatcgcagccttgtcatctgattcttcctcgtttcttatgtatctgatgattggctctctccagtcattaggatccgcctctgtctgactcagaacgtggcattcttccatctgatttgtggtgacactcggttgttgtatttcttggacgaaaaccctaggtggaacttgagcccgactggacccc

SEQ ID NO: 44684 - DNA, 744 bp, Zea Mays
taaacatttgcgctacgctgtttattcactaaccgacatccaacgctttttattcactaacctacgaaggaatgttgacaaagatctgccactgccacctccatatcctttgtgcatcattgagcatattggctttcgtcgatttgtgagtgcatgtcagccattattcaagatggttaacaggaatactattaggtaaggaatacactattctttgtatcaagatttgtgatttgaagtgttgtgctatttctaattttgtgatgtggcataaaggacattatggatgcatatacagaagaaaagaaaagagcgttgcagtacatgtgtgcatgtaagtcacgagttgccatcactacagacatgtggacttctgacaaccaaaaaagaggttacatggctgtcacagcccatttcatcgatgattcttggaacttgaggaacattataatgaggtaagaacttttacattgtttttccttatatatttgtctatttttttacaacttttacattgttttccttgtatgtaggttcatatatgtgcctgcaccacatacagctgagattatctatgaggttctatatgatgctttggttgaatggaatattgatgagaagatctccaccttgacactagacaattgcacaactaataatgtggtaatctctgaccttaccaagaagattggtccatctaaacttatgttagaggggtctctgttgcatatgcgttgtgctgca

SEQ ID NO: 44685 - DNA, 585 bp, Zea Mays
cggcctccgaaggccaaaggttgaaattgacgaagccgccgaagcatgtcagaaagcatttggtactgtctgcttctttattggtacaagagacttggttcaagagcacatagcatacagagtatggccgcttatataaatctgggaaatgtcgaaggagaccatcaccgaagctagtgaaggtgaactggtccggctaaaatatactttcagatatggggataagttcgatgaaccaaacgatgactggttaaaatgcatcgaggtgacaagtgatgaactgcttggatcgtattccaaggaagaggataatgcattgtccacagcctttggaagtcgaggaaagaagagattgaaccgagtttttgactttattggcttcgtttatcccgactaccgctacccgctgcgggggcaagggaaaaagaggaaagctactgctgtggtcacctcggccgaacctgtgccgaaggctacaagcaaaaagatgaaggtgcttacccaccgcccacattatattgaatcagccgtggtgcctgagtttggcggggaggcttcttcagctgctgagccaagagaacccat

SEQ ID NO: 44686 - DNA, 447 bp, Zea Mays
gaaagatagggatacggaagctgcttcgttgcaaatgaaccaatcattgcaggaatgcctctctccagtgtaatttgcacttggctacctgatgcttcatagttagcaatgcacatggtcaagagatctctctcaaaaagatgcgccccaaaggtaccaaatccacattctatgtcaaggacagtcctaacctgaaaatggcatagcaagaaacaccatcagaaataaaagttactgtaaacataacaattacccaaagacttacttcagccaatcagagcataaagtgatctacatagtatgtccagatgtattttgtatgatgatctttaaaaacaactgtgctttaataatatatcgtagtggagatcctaaggtcctgccaacatacttttgcaggcacaatagtaagctctgatatacactttccagcacattgggcatgca

SEQ ID NO: 44687 - DNA, 619 bp, Zea Mays
ttctatactaagtctgaaattcagtgttgaaggctcaactttggagctttgcatctttcaaactctagggtttttgccctaggtcaccacatcaaagttgtagaccaatcataggagaacaactttgcttaagaatgtgagctcagttgttaagaagaatttagagataattaagtctaaagttggactgtcaggttactaaggtctgaattttcagacagacagtgcaatcactacaactttgagcataaattcaactatgatccagcaagaatctgcccatggttgctgtgacaaacttgtagctgatctatagctctacaattttgctgcagagcatggagtatgttaccattgaaaattgagagaaaatcgtgctccaagtcgctctatcagttcatctgatgggtgctccccatggtaaagtatcccgatggatcagatcgccagtgcgactgtcctcaccgccggtgacttgccaccgcgattcgtgccattgtcgtcgtgatttgtgctcggctggtttggataacgctcagggtcacacaagtatccccgccgtggataaactccagccgataaagaattccggccaccgtaccgtgttcaccgcggtgga

SEQ ID NO: 44688 - DNA, 420 bp, Zea Mays
gtagttgggtcttagccagtcagacctaaggtccaactgatataacctctctcttcccttgctctataaaaggaggaggaaagtaacatttaagggattacgaaagtcgggtcaaggtagattccaaaaaggttcagttcaaagttagattcggtctatatagaggtcatgcataaaagtgaattaagaccaacaggctagaacttccataagaatcataaggtaaggggatctagaaggttgtgatgctcagtttaattgtgagcttatgatccgtttcgcttttgtatacatcaatcgacgagtaataagaggacgtagtgtactctaacctctctcgcatgatggttctctgtcgggactcgattcaacacgtcgctcgtctacacctcgctctctctaaatctctcttttccatac

SEQ ID NO: 44689 - DNA, 552 bp, Zea Mays
caaaaacctgcagttagagataagggagggggtgtcctgtgccgcttagaccactgtttagcagcagcacgtacgcgcttgagcttacctgcgagccgggcagctgcgtcgggacaggggagctccaggtgccatgcagggaggaaggggggtgatatagccaggtgttttcaaacctgaaaatttgggatttggggatggaggtagacatggaaaccagcagtggtttatggtcggatgtttgcctgggtagagtggtgagggagttggaggggaaggaagaggtgtgggagttgttcacaaaagctcgatccaggcgagctaatgtgggaaccgagcgcatgttagaccaggtgaaaaggtagtcctgtaactggagttcggcaacgccaaggcagtcaattgtgctattgaacagggagcaaaggtggttgtccaggtggccctggtttttgtcagcaacgcctctcaacatgttgaagtcaccgaccaacaaccaggggcctgagatactggggaggaggtctgcaagttcaacaaggaaggttggag

SEQ ID NO: 44690 - DNA, 492 bp, Zea Mays
atttaatctcagtcgttgcggttagatcagatggcatttgtgtattctttcgcttggtgcgatctcgagcttggatatgagatccagtggtcctgagtgcataccatttcgattaaaggtgatctaatgtggaccctcgatcttggatcgggcggctgaggttagtgcataccccttcgcgtggcgtttttggattaagaaccctgaagatttagcaaataaacccacaatcgctccttgtgttcaaagatcataacgcataggtccagattttcatagaaaagacccttccagaaatagaagccgtagcccaaaatttataaagaaatctagaaaatgattactagttttaaaataaatgtagacacttgcaaaaatcatatatttcatgtcttagctccgatttaattcgttcaaattgcattggcttcgtaataaaattccccacacattagtaacattgttttatcatgtaacatgtttcaaaattaa

SEQ ID NO: 44691 - DNA, 1060 bp, Zea Mays
aggctctaccgctggccgctgccaggtccgcccttcttgtttgggggcacgaatggcagtataatttcttggtgattgggggcacaatgcccgggtgtacgatgttcatatgtatgtaccatagaattcaggatcctcatatttcaatatttatttaatggattgttgtttactacaccttaacctagctgtgggcagagatgatgttgaagcttggtattatattgacatgacattgtctctgtcagttaaactaaagattcaaactgaacttaagctttgaagtgatctgttcacagtggtcactctaagctctgactcttttagatctatagcactgagccactgagctgtcatggaccagatttctacagttactagttgtactagtgtaatagcttgtccaatcagtttcttctgaaacaacgctacattttggtgagggatgtggactgtacaatggtatcatcattaagaatgctggttgcagtgggtgcttgtcatcaaaccatgggcaactgctggactggtattaaatagctacagagaaaatgatggaattttatctaattttgctcattatttgtattaaatagcttatttgtttgattggagaatgcacaaaagagcatgttcaacccaccatgtacttgtgtgttcaatgtgggcatctttagattattccactgaatttttaacctattttgtgtctgatccaatcagaaatttcatgtactcatttctcgagcagacttacaaagctgaattctaatgattatctgagtagtgagttagggttagaagttgggatagtaaagcagatcagctttcacatacctgctacttctcacatcctttttcctggaatgcctagtaattagtctcaatttagtttgaatctgaaactataatagcaaaattaaagccaatgtcatgatcattatcatgttcatatcacaggacatagtgtttttggtgtctggaatgccttaaccttttaatttatggtttttcctcttctaatatagtcaacgtgagctataaatcagactgtgacaac

SEQ ID NO: 44692 - DNA, 308 bp, Zea Mays
gtcacattgtaataaaatcagggtattttatagagcaagattcagaaaaacaataaaagatgatcattttacaaaagcagtggaaactttagtagtttttgaacaataaagtaggggaagagatgtaacaaataaaattccatgatcacaataacaaagaaagtcttgttgagcctatcaggaggtatccacacacaacaatggttaacatccacctgctacctccatcagagggaaacaaactctaagtatactgtatactcaataagacttacgtgactaggtgaaagtagtctcctaactcgatc

SEQ ID NO: 44693 - DNA, 398 bp, Zea Mays
tcttcgtatctttgcggtaggcgaaattgtaatcaccaaagttctcatgaagaccgtcttctctggctttcgtctgataatgaagctcgtgcactcggtagaaggcttcgacattcgagtctgttcctttggcttcggagagcccagatgaagacgctgagcctaacaatagcgttaggaatcagccgatgaagataaatctcatagttttccaaaacttctccaatcatttcgtgcaaaggaaacctcaatccagctctaaagaagctcctgaaaactaccacctcatctttttccggtgtcggagtggtttcttctctgccaaaacgaatcagcttcttctcagcctctctgaaatggtacatcagcttcagaaatggtagattttccaaagtcca

SEQ ID NO: 44694 - DNA, 542 bp, Zea Mays
ccggtacatccagccaatccagtgccgccctcgctacctgcttcagattcagtttctagcggctcatgtcgtgcgcgcgcgtctgtcgctggatctaggccgaggtgttagtctttagtctaacgcttggggttcgcccctcaaatgcggtcgcttctgcgtgtctctgctcgcagattttgcctgtccatttcagcgatgcttccgttgcgccgtgtaagtcaccagatcagacatgtcctcctggcaatttctgaactgttcatgctcggtccaattcttcgaacagttgccaaatcgacaataggtaatgatatactgttcatgtttcgctgtcttagagatccagtgaaatggagcctcagattgtttagatccctgtgtttacccatgcctcaacaattccttgtcataattaccatggaccgatggtgaattagatccttctttgccctgctgcagcgtgcctttatttataactactacaccattgaattagttcatcttatgcaaattcgaaattaccttcctggcattttgat

SEQ ID NO: 44695 - DNA, 717 bp, Zea Mays
cctggaaggcttgttccgcttcttcggtccaagagaaagatccggacttctgtagcagcttaaagaaaggcagcgctctctcagccaaccttgaaatgatgcggctaagggcgactagtgatcccgtaagcttctggacgtccttgactcgggctgggggcctcattgcttcgattgctctaatcttttccgggttcgcttcaatgcctcggtacgaaaccaggaatccaagcaacttcccggcggaaatgccaaaaacgcatttgtccgggttcagcttcgtgtgggttgcccgtagcttgtcgaagaccagggctaagtcttccactagggtcgaccctctcttagtattgaccatgatgtcatcgacatagacctctactttgtccctaatcaggtccccgaaagtcttactcatcgcccgcacaaaggttggcagggcatttttcagaccgtacggcattacaacatagtagtacagcccatccactgtcacgaaagcagtatgctttctatcttccctagacatctggatttggtggaaactagagtaagcgtccaggaatgataacagatcgcacccggaggtagaatctacgatttggtctatacgtggcagtggatacgggtccttgggacaggccttattcaggctggtgtagtcgatacacatctgaagttttccattcgctttggggacgatgactgggttggcca

SEQ ID NO: 44696 - DNA, 961 bp, Zea Mays
gccgagaataatattgtttggtggattacaagggcgcgtaggccctgaggtttaaacaaaaaacttgtgtagattgtcgatgttccaggagtactctaagtcttcgccggtgggcgttgatagcctgtaagcgctgggggatgcctttgacttgacgatgaatggaccctcccatttcggttccatcttaccccgtgactctgtccaggtggtccggatgagtacgaggtctcctatgttgaactctcttgggacgaccgcgttgtcacgccaggccttggtttgagctttttatttattgagggcctgtagggtgaagacgcggtttccgttgatgaggtctttagacgttggttcgtcaacgtcgaggattgatgatgtgtttgttcggggcgacccatgctttatttcctgcggcgtcatggcctacgatccatgtaacagacaaaaaggtgtgaatccggttgccccgaaattcggtcgtgtttagggcccagactacttcaggtagttggtcggcccatttgcccttcttgtcgtcgagaagtgttttcttgatagcggtgaaaatcttgccattggtgcgctcgatgacgccgttggattgcgggtggtacaccgaggcaaaggcaagcttggtgccgatggagaggcagaagtccctgaagtcctggttgtcaaactgtttgccgttgtcgaatgtgagctcggacgggactccgaatcggcaaactatgttttgccagaagaacttatgggcagtcttcgacgttattgtggatactgccctagcctcgatccacttggtaaagtattcgacggcgacgaaggtgaacttgaggttcccttgagccataggtagtggcctgacaatgttcagcccccagcgttgaagtggccatgtgtgggcaatcaacttagtgaactgcgaagggtttcccgagcggggagaaaacttctg

SEQ ID NO: 44697 - DNA, 528 bp, Zea Mays
acaaaatcgaggtcttctcaaaaatactctccgtgcaaaagtcgcctacgggtgcagccggaatagcacaataggtgcacaaagtcgaagtcttctccaaaagaccccccgtgcaaaagtctcctacgggtgcagtcgggctagcataacaaagcgtgcaaaatcgaagtattttccaaaaggctcggatcaacgaaggctcgcagtttcatataagttacggttacatacatatagcgagggcatcacactttacattggctcaaccttcgggatgatacccatctccctgtagttgaacaacattatcctcaactcctcaccctcaaaaagatttcgcaactccccctcaccgacacacgccccaaccagcgaggacaacaattcccgcttgctagccccgtccacacgaagacgaccaccctccacctcactcactctccgcttcgccactgcccttcgccacctacgcccagcactcggaccaggaagaacttcagcatccatcacacacggagaagcctccgc

SEQ ID NO: 44698 - DNA, 834 bp, Zea Mays
cttcgggttacttcgggtaaaactttatgcatgaggagagagcaaagaattaacttatctatgtttcattgtattttaatttaatttcccagattattcaagcactatagagtttgatatagttgttatggccacttggcaatataaataaatatatgatgccacacaaaacaatcaaataaaatatagagttaaacaacattgtttacggaggttgcgctatgttgtgacttcaggggctcgaataatccatcacattccacgcgagtacaagctccagcgtatctggcgtcaacgtgtgtgtggccatcaaggctacgacaacgaataagcctccgtaacaagcgcaacaggcgtaattgtggctcgatagtcaggatacaggataagtccacgcaacgtgcgcaacaggcgcaattgtggctcgctgatcatggcggtcgaatcgtgcctgcagggcatgcaaaaaatatgcgactcggtgatggtggttcgactcaacgggagtggtccgactaagtgagagtacaacatagcaatcacatgacgcagccaagttcatacgacacaaataatgtgtcgtgttgctagggcgcaactaatgctcgccaatgccataactcaaccgattaacaacaaagtctgatcgatatgtttgagtacccactatacagtttaatcgctcgatatgagtccaaaagctcaacataatataaatatttagagcgatttaaatatgcacaatatagagtttacatgcattttaatattttctgctaaatatctaccacgataaataaaagcagaaaaataaacaccaaattaatgcatgag

SEQ ID NO: 44699 - DNA, 383 bp, Zea Mays
cagaagagagaggtgggtcagcgtcgccacctagtccgcgctccatctgtaccctctccaacccaatctaggccaaggcgtctactatctagcgccttatcgacaccttgcgccccaaagacgatgctctagtcaaagatggacgccttatgtcgacaagtaaagcgaccacggcgccttgccctgtaccctcgccttactacaaaagcgacgctttagcgatgccttaatagatatgctcgctagtcaaagataaaaatgtaagtgaccctctagagtgcaaacatagaaaaattgttgaagattaaaaatatatgaaattgttttttatataaatgactttttaaataataatttagaaacgaaattttgaaagactatca

SEQ ID NO: 44700 - DNA, 499 bp, Zea Mays
ttctggtggaagcatttgggttgctgagaaatatttgggataaaacttctttttttctgctcatgtacttgtctactgatgttgaatgaataattggacatcctttctaattattggacattgtggtatgtcagatagggcaataatgatgttggaaacttgaatgattcctaaaaaaaggatgttggatacttggacacacctttagctatacgataggcagcaacttcagttcggatggtcttcatttagactatccgcagtcgttccccctatatttttccccctaaatcttactatgcagccacgtcagtaagattccctcccctaaatttactcgtcccgcaaccgttccccctaaatattcctctacatatccctctactcattaaatatacatttccctacaactaacataaccaacttgtttttttatttttattgtttttttcaacacgttttgattactagatgaaactaggttaacaattttttttta

SEQ ID NO: 44701 - DNA, 644 bp, Zea Mays
gttccactcctccggcggccggttttgtgtgccccgcgatgtcctaactctggttgcatccgtcgcctccctcacacaccgtcgtcgccgccgtcaagcactgtctagccgttgccacatctctcattcatggccctaggttgttgtttctctcgtcctcgcctctgctttgtcacccgctgtctgtgccatcaccatctctctcatcctccaccgccaggttgcagacgctgaagaacttgcccttgaacggtgtacgacgacgacaagaagaagtggaggcgatctggtgagcacttcgcttcttttctcccttccgatatatgtttagttgcagttcatggccagtggacgatggcaagttttctcccttctgattcatggccagtggacattgagcctccagcctcctccaccagatttatccatctataggctgaaaatctaattgggttggacactcaaccaccctgagctgtacaagttgtagactatgttgcatttctccttatttttcctctaaatatgttctgattgtaatagttttcattctagattgagtggtagttgtgtttctatgtactcaaaatggattattttactatgtgtgatttgatttgaccctagattatggaaatagtctg

SEQ ID NO: 44702 - DNA, 285 bp, Zea Mays
gtgtggaggaggctggaacaaacacctggttgccatgcattattagtccctcctgtgtatgccatggatcccccaagcttccttctttgatctgtgcactgagctgctgcccttcctcgctttgtgcacattcttcttctagatctttgtacagttggaaagtgggtgctgttagagcataatgattcattggttgtatcacggcgcggtaatgcatccgccactgtgttaagtcttcctgccctatattctaccttgaagtcaaatccaaacagtttactaatc

SEQ ID NO: 44703 - DNA, 768 bp, Zea Mays
ctgtattgattttggcctctacctccttgctggtgaatctggtttcctgccatctcccggagaaactgggtattgtcagaagtagcattaagcaaggcagcaatggcctacaccagagttggaggtacaggtggtgggattggggtctcctccccactacctcgagaaggctctgccccatcatgaccacgagtccttgtcggcatctggagaagaaaatatacttgattattacacagtacaattgcacaacctttattacattattccaagctcgtactcatcatacatactcaacccgtacaactcactttccttatttagactacacaaggaaacaccctgttactatactagtctagtcctccacattccttgtcgctctagatccgctgctagctttaggagggcgatcatccatgatgttcatagaaggaggggctccaaagatgtctagctccccatagggtcctccttcacctgctcctactacgctagcttccacctctgtaacttcaggtggcttgtttgggtgtagctggtcatacaacacatgcacctcctcgtgttggacattgttgtacgcttgcaggttttccaaggccaagctcagctcttccacccaagcttgggcagtcacctcacaatcccaggctatggatcgcgaatttatagcccagtcaatagctcaatcacgttctacaatctcacgctgcaagcgctctacttcttcttatagctcagcgatgcggctactagcacgcatac

SEQ ID NO: 44704 - DNA, 413 bp, Zea Mays
gaggaggggcaacatgggaggtccagcccacaagaggggaaagtttcagcatcagcgtcaccatccctaccgtggcaaatcttctgactcgggtacttcgggagaaagtactcagaggtttcaggctgttcctaagcccgggctggggctggtgtgtttccgttgtggtgatgcgcatcgccatgcagagtgccagtgaaatggcaggtgttcaatatgcagtcaataccacaaggatgtggtgtgtaggaggaatcccaatggaaagctcagatgggagccagtgacttcctcctcttctcagggcactgtcaatatgatgtcaagcgctgagcagcaattttcagttccactccctccgcagcagttttatgtgcctgagacttctcagttcgtgccaatgcagggttttc

SEQ ID NO: 44705 - DNA, 556 bp, Zea Mays
taggctaacaacaaggataataccactacaacaaataatactgacaaaactaatgggaccaaaatttctgaaacatggtagcggtagcgggagaaatagaaactatataatttacaaaaccagaacgaactgtatctgtatatctatctagaaattaggaaggcaccaagtttattcaagtttctacaggtaagaactaatggagtagcagttacattagcatatgatgcaagcacaatgacttggtaaataaataaactaaccaaacaaaaatcgaaacacaagcccgtcggcctagtagaggagtatctaaagcatggcactggtactatactgaaggactactccagtttataacgaagaaatgtgtggatgagagatggtggacggaagcaacaaatcaggacaaggaccctaggtgctccgggctggatcctgctcctgatgctgtggggaggcggaccctccgagcttgcgatggatgaaggccttggcacgctggggctcgatgttggcgtaggagagcctggcggcggcgatgatgagggcggcgccg

SEQ ID NO: 44706 - DNA, 725 bp, Zea Mays
cgggaagatcccgagcggacggagtccccggagcagcgcaaggccaagaagggggtaaacctccgcaagagcttggcttgggacagcgaattttttaccagtgaaggttcatcttcgcttttgttttttcctggtccccacccatgtgaaactctatctgttttctggaattattgcctctcgttatacactctggtaaaccttaattatgcagattgatcgcaactcttaatctttcctggtctatgcaggggttctcgacactgaggaattagccattgtaaacagcacctatcgtaaggcccaaggttccaggctgcctggaatcattgaggaaacgaggagatcaggggagtcaacaacctcaactctggaaagtgaaacctgggcgatggaaagccttgagactgaactatttgataatgtccgtgcttcgatccagagatctcttggcaaacctgataaactttcaggtcggcccgttgctgcctcaaaccccccaaaggccacagcaaatgcacctcgtgttgcaggtaacaagcctcaaatgctgacacaacatgctagttaacatccaaaattttaactctagcgatctttgtctgctgttgataactgatgagcatattccattgttccttccagctagaaaaggtgttgatcggatgccacagtcaaaggtatgctcagttgatcatattgttcaatttcaaatttatgtaatc

SEQ ID NO: 44707 - DNA, 521 bp, Zea Mays
tgtgccatcgcctccaacctagtcgtgtcggccgacttcaccctctccgtcgtcttcttgatttggatagcaagcactgtcatcgtccagcctcttcctcaaccctcccttgatgatccttcgcctctgcgtgccctcgacgctttgtcccaggttttgtgcaaacccaaccacgtcgttgtattcgtgtttggaccactccggtgccaacgtcatatacctcctagtcgtcggcgtcgcgttcacgtcatgcttctcccatctatcgtcgatgacttcacccttgcgtgtgcgtgccttcgctctctatcctaatgccatgcgcgctagagctttcccccatgtaccgtgactgctgctgtgctgccccgtctcgtgctcactattccacgccttgacgctcgtgctcaatgccactgcatgcactgttctgccaagtgtcgtggacgcgcatcaagtgctcgatgaaatacccatgccaaaaataatcatcgatctcatgtcgccatgctccctttgag

SEQ ID NO: 44708 - DNA, 502 bp, Zea Mays
aacgccttaggttgtataatcagacaccaaagcgaaaagaggcaaagatagagtacatgagaaaacgtagagtgctacaggctaacactctgaatgttgcgtccatcgccatggaggacccaacatatacccctgaggttgtgcaccctacaacggaaccttcaacagttaccacctgcgactgggttatccctgaattcgttaggacacctttcctaccagctcaaacacagaccgaggatgtcggttcattcgatatgtctactaaagcaataagacgtaaacatcatgtgccgcgtggggaaagacaagctatcttagcccgtcgaaacaaacaatttctagcatccattgcaaggaacatgactactttgaatggggatactatcagtgacgccaacaacaatggtaattactatccaatcttaaatggatcttgcacgacgacgataccatatagtcagactaatcgtgtgtttccatcagcacaatgtagcgttcc

SEQ ID NO: 44709 - DNA, 401 bp, Zea Mays
ctggtagagctagagtgcgccatgccgagtagtcggtcgacgtcgtcacgccactgcttcatggaccccggtgaggccgtggagcttggaggtgacgcaacaactctctggccacagacaacgcccccggtgcagccctcgacgacgtccgggatgtctgcgcagttgtatgctgctgtgcagcgtgcacagcggtagtgctcggcactgggcggttgggaacctgtggcgcggaagaggcagcttcctcctccaccacgaaatcctccatagtcccagcgcggtgctccacgatttgcaccatcatgctgagcgagaaaacaagcaaaaacctaaagcctagccccctacctggcgcgccaaatggcggagaggaaatctccggccgggtggcggaatgc

SEQ ID NO: 44710 - DNA, 882 bp, Zea Mays
cctgggcttcgggcggatccagtccttgcagttgggcttccagggctgcaatcctggcatgggcattctccaggtccaagtgcaccctagaaagatccagggtggcactgtccaggtcggtgttgaggccggccaccactccagctagggtgttgaggcgctcctcaccagctccacctggaacgatgctggtctggcttcctccactcagacgcagaggaagatgcctgaacctcgtgttctacagctgctgccggtaggtgcggctgagcgaccacagggtccgacgggcagcatcgctgaccgaggcagcataggtggacagtggtgtcagggactcgtgagcagacagagtcctaaatcccctgtcccctgcatccatcaccctgacgtggatgcgagtgatgtagtagaaagcccggggaggctccctcactcgccttgtttcgtacagggggcggacgtaggtgcctagcgcgtgcagcacttcttgcagcaggttggggaagtgccccgtctcaaacattgatgtgtaatgttcgacaactggaccaaaccccatgaagtagtcctgctgggcgtagtcagcttcctcgttgacttgttcgtcttctccttatttgtcgttgtcatcctcgtcatcgtcgtccccagagtcatcggggtcgttgcctccgggtgcaggtgcttggacggctggtgcaggcggtgccgatgtcgatgacctagctgcgaaggccagggactctgccaacgtggtgggggtcggcagctgatcctccgagctgtcctctaggatgactacattctccactcggatgtgagggagatccaccggaacttcctcgactaccactgggtagaccaggatttgccaaggcg

SEQ ID NO: 44711 - DNA, 619 bp, Zea Mays
caacaagttcgcaatgaaagatcttggccccgtccacttcttcctcggcatccaagttaagtgctcgacgaccggcttcttcctctcgcaagaacagtacgccgacgacatccttgatcgcgcgggcatgagtgactgcaagcatgcgaccacgccggtggacacgaaggcgaagcttccaagcgacgcaggagcaccagtcgccgaggcggcatacgcggagccatctcctgtatttatacaccagagatgatcaatacaatacgagttgcatctctcatactctttcaggttcttcgtgataaactgacaatagacggaggatcgtagtgcactgtgtggtctgtggtggacaagtaacggcgtactgaccttttcgcttcacgtttgctgtacgactcttcactgtcttcagtttgcttaatggagataagatagctaggctggccacagcgtcgtcaccagcgctcatcaccgccgtgggttgctctacaccgctgcaggttttgcagtagcgcgtccacaggatcgctgggaaaaaagatgaaccagagacaagagacagagcgtcttctaccgcttcgctcactccgatccggtgctcaccagtcaccactca

SEQ ID NO: 44712 - DNA, 522 bp, Zea Mays
gcagccggatgtaacgatcatgtcgccagagggtagaccctgtggatcttcaaagatatcgttgaatgaagtaaataaagttggcaggagttcatgatcctaggagtgctctacatagaaagctattgttgtgccaatatcatgctaaatcactgtacgaccattcctctagatggtcatagtgagggcatcaaaattccatagaattggcccaagagaacgcaaacattgaagccctaagacaatatcaaagcctgataatggaagtacctaatagatgtgatcaaagtgttcatcaatactgaattgtagtttggacatatcccggtgctgatcactttgtcgccgttggctaccttaataagcattcctaagcgtagatgcacctgcaagtgtatgtggagccagagtccaccaaagccaccaaggtggtgttaccaatatgcactagaagctgcatggtacgtccaatatggatttcagtcaaggcatgaaatgggatccagttcttttcaatagctc

SEQ ID NO: 44713 - DNA, 410 bp, Zea Mays
taactggacatagacagcaactgggtgatctgttttaacagaaagaaaatgtgatatctttgtgagtcaatcaattatgacccagatagaatcaaatactttagcggtcctgggtaatcccacaatgaaatccatactaatatcttcccatttttaggttaggattggcaaagattgtaatggcccaacagtcttcatatgtatggcattgacccgtctgcaaatgtcacacttttccacatagcgtgcaatttcaattttcattttagtccaccaataatgttgctttaagtcttgatacatcttagtactccccggatgaatagaatatcgactaagatgagcttcgtccaggatttgttggcggacttcaacatcttttggcactactatgcgatccttaaaccata

SEQ ID NO: 44714 - DNA, 556 bp, Zea Mays
ataggtgaggaaactcaactcattatcattcggtgtagtatattgttcttgtagtttgcatcatccaaaataaaatcgtgtagttagtgttcattgcaacatggtagcctcacgtttacaccttcacattgtaagtcagtaacacaattcatgctgacaacatatcgtcttcatcaagcctgtggcatcgatgtttgaaacgcttgtacgagaatgaacaaatgttgcacatgctccatgcatcctctgttgcagacgaagaagaaaagccacatgtgcatagaggatcggttccacgtaggcatattatccatcagggttggtcttcaggttatgctaagcttgtgcaagactactttgcaaacatccctatgtacaatgacgatatttcagacgatggtactaccctagttaccattatttcatatccgtgccaatatgatatccatgttcgaacacataacacaagctctacaagtggcgaatccctactccaggcaatcatacaatgcagcacaccaacccagatttcaccccatacaagaggtatttgctg

SEQ ID NO: 44715 - DNA, 306 bp, Zea Mays
gcttccgcgatatttctattgtgagggctggaggagatagcagtgcccctttgcccaaagctcacgaagtggtcgtttacagaagcttcatgaaagcgggacttcggttccctttagataaattgttagttgaagttttgaagacttttaaaatattccttcatcaactcacccccgaggccatcatcagaatggggatttttatttgggccatgaggagccaggggttagaaccgaatgcaagatgtttttgcaatattcacgaattgacgtacgaaacgaagtgtggcagccctcccatgtttc

SEQ ID NO: 44716 - DNA, 953 bp, Zea Mays
tttagatccaagtacgagagcacgcttagggaacttgagtctgctagagcttcatttgaggtgtccgatgagactgaatgtgatgagtgcgctctacacatgtcaaacatcaccactttgcagaccaagtactccaccttgctagatgagcacgacgagttgagatctaggtctatcctgttgggtgcgtgtaccgtttgtcctggcttgcagtctgagctagcagagacagacgctatgatagctttgcttgagaaagctagcttagtgagtgcccctgcacctacacagtgtgcactttgtgagggtttgcaatctgcccttgagtcctgcagacacgacaagacaagaatcgagaaagaaaacacataactttgatctatcttgagttgggtatcatgcagtgagccccagttcggcatgatggtaagtcagttcaagaggggaactggcgaactggggttaggctttgctaataaggatggcagtgtcactcactttgggaaggttggtgagtgcagtggtttgacaccttcagagaaaccttcacccactcccaagcttatcaaacccacctctgctaagcctgtcacccctgtgagagatggtgtgattgatgaacctatgagagatcctcctcagaaacaagtgtggcttccaaaacctaaccatattatcaacacacttgacacctttcccgacatctctagttatccccttcctagagcccctcaaccatccaaaaagaaagcccccttccacaaacaaaatccacccaagagagaggtgaggtaccattgtgaatattgtgagagggatgggcatctagcttcgttttgctttaggagaaagagagatgagtggtgggtttctgagtcgagcaggaaggacatgaaccgcccctctcatggtgttcatgctcagcctgttcagagacgtcctgggaggcctag

SEQ ID NO: 44717 - DNA, 524 bp, Zea Mays
ataattaaaaggaaaactgccgaactaaatgtagaaccacgataaaatcaacgaatcaaatagaatgttagagatttagaacttactgataacagctcctccaatgcgattatttggtgcttccttcaaacgaagttgggcgaacggacgaagtgactcgatgtcacgaatgtggcggagagaatgaaggagatggcgatggaggactgaccggtgtgtggaggggaatgaggatcggccgattttcggtctctctacggtggagaagatgaaggtgatggcacgaatgcggcggagaaaatgaaggagatggcggtggaggactgaccggtgtgtggaggggaatgaggaccgaccgatttccggtctctctgcggtggagaagatgaaggcgacagccgcaggtatgtctagggttccgccgccgcgtgcgttgtgggtgaggtgcgctgaataactgcgagctcatgggtggaatcgtgggcccgatacacgtaatatgcaggtcgaaatctacgcgaagg

SEQ ID NO: 44718 - DNA, 633 bp, Zea Mays
gaagcgcgaacagaaaatcgagaaagggatggggcgatgttcttcaccttagaatgaagcacgagcacagacgacgcagatggcggctcagcggagctccgatgcggcacgccacacgacagcattccgggcgcagcaagacaacgtcccaggtgcacggcgagcacaagaagttgcgatgcgatgagggataggcgaacaggatcgacggtttatatcggactgaggcaagcggttgttgcacttcgcatcgtggccaggacgagtgggactgtgggggaggaggttacgtggggtgacacaggaaggtgataggtgggtcccagggtgcttttgctaggcgacaattgcgactatggagagaagagagcttgctgacgtgtgggcctaggatgacagccagaggaataggtgagagggaaaggcagttgagcgcacaacgcgtggagcgtagcgtgatgaggtgcaagaagatagtcggggatagacaaaggtaggcaccgggggtagatgggagtagacagaggtagacggtcaaagcagacgcaaccaacataccgttcgcgaggagatgttgtttgtctatctcgcgaaaaggacatgagatcagaaataggtcgacgaaacaaagat

SEQ ID NO: 44719 - DNA, 543 bp, Zea Mays
ccgtaacagccattgtttcagtgggggccgagtcagaggattctccagccaacatattgagtaaagcatctatttctacatcatctggactcactggcatctaacgtgcctctcatcattgggaagatcacaaagagaagcatccagggcctcaatatcttcaggagagggtcgcactctaagacccagaccactatcaccagcaggagggtcagacacgaaattgaaaaaggacttaggagatggcagattccaagcagagtaggcaacaggagcaccaacatttgatactttgcctctcaagatcatgtctagccggctcaccagatcctcagcaggaattctcctattggtaacccgagtcgagtcagtaacgccactatacaaataagctgggtatgctctgtccttcaagggctgaatattcttaaaaacaaagtcagcaaccacagcctcagcggtcagacctctctcttttagcagacaaatttcagcaagcagaaccctagcttctgttacctccaaggtagtaggagactcaac

SEQ ID NO: 44720 - DNA, 567 bp, Zea Mays
cccgagtggatcagaacgccagcgtagcttgctcgccgccggtgacccccccccctgcgcaaagattcgtgccgccgccgttaggatttacgctcgctggtaaccggataacgcttcggtagaaagatcttcgccgccgtcaagctggaagccaccccggtcagccacgatactcctcccctggctcaccgcccgcgggtaaagtgctcaccgtcgtcgtgccatcactgttggccactgcgtgtcctaaccgcgccatcgcatcgccatgactccctctaaactccccgtcgaccaccagagttactgccacggcggtgaacacgtgttcactgcactagcattcttcctcaccgccgaccgccgtgtgtctcgtccaaaattcacggccaccgctcgctccgcctataaattgagccctcccctagatgcgtaacatcatcacccacccagccaccaacaaccgttagcaaccgtgcctccgagagcttgaattttggtttctccccaatccgagtttccgccactgcaaaactcacctcaccgcggccagcccctttccggtca

SEQ ID NO: 44721 - DNA, 748 bp, Zea Mays
agacaatttctaccatcgactaagagtcataagcattaaataccttactactttacatgcacaaataaacttcaacttaacacaactgacaccgatggaatttttactaaactcatcatacgcataaccctatctcgcatacaaccatattatggcgtgcactcgagacacttcaatcaatgtggcgcgaccactaatataaatgaactccgacactcatgtcttaacgatacatcctccccgcaaacaagcatttgctaaactactcatcacatcaaccattataactcctatataatcatgaatcccatcacattgcgtagtatttgcacttcaatctcgacttctctgcacgcctcatactcgtttattcaaaaattcttcgcctaaccaatacactacactctacatacgtaggatccatttaacacactcgacgtataaacttaatagaacgtttttcatacgacctataaaatcaagctagccttttcatcgcactacatgtctctttccctatttcgaatgcaaccatactcgggatgcattcaaaatacctcaaaagactctatcacaatcactattataatacatcgacatacatgttcaataatacacctacacacaacctacaatctttaaatttacacatcacgtccaatcaacattactcagttatttccccgattcgcacacgcgttcacgccactacatatgaataataaactttaccaacattcaacgcatt

SEQ ID NO: 44722 - DNA, 623 bp, Zea Mays
ttagcttcggaaaaggcgcttgcaactttgctttgcatgaattttagcgagaaagcgtatgtgtcgtgtgttatggcgcattggtgctcgacttttgttgcgaggaaaaggtgtgaacgatcaagcctcctccactttggacgacagcaggctgaatcaaaaaccagactggtttcagaatccagctagcatggttcgctgcatttgcctattctaaggcggtttgcagcaggccacacatataggtggttcacgcttctcgagagagcaccgtcaacaccaaggtggttcattcccgtgtttggtaccaaatcagtgcgaacatactttttaacgactccactggagacgagagtgtctagatccactaaaaatctaccgataggcaacagctatataaggatctcatgagccaagtggaagaggatgcacaccaccaactcgccaaggttcaggaggagacgaatgagaaattcttagcacacttcacggtggatcaccaccagaagattgccaaacatggagagatcgagatcacatctctcctaccttcatctcaagtccccaatgtaagtaaatctattatagtaatgaaaataacaaaaccaacccaactacaaaag

SEQ ID NO: 44723 - DNA, 592 bp, Zea Mays
ttgctcatgtcgaaagaattggaattcctgaaggtgctcaaggctccttgggacttgcagtaattgatatatcgaggatttgccaacggacccgacttacccacattcggttaggtgatgcaaacactaaattctttcatctcaccgccagctccagagcaaggaataaatttatccaatacctgtagcccaccataggaaatatggtagagacccataatgacaaagaaaaaaattatttatgatcatttcaagtcacatctagggacaaccccacctagagagctcaccctcaactagtcggcgctagccttaccgtgacacgatctctcggctttggaagcgccgttctccctggatgaggtgaaggaaaccatcttctccatgccaagcgataaggccccagggccagacggttttataggaattttcttcaaggagtgctgggacatcatcaaagtggatgtgttggaggccttgaaccaactacatgccatgaatggagctgatttcaagttactcaacttttcgaatatcgtgctcagtccaaagaagccagatgctaagtcagtgggagactaccgccctatcc

SEQ ID NO: 44724 - DNA, 628 bp, Zea Mays
gtcgggatctaagtgcaccggttcttggtgaattctggacttagatgcgctgcgcacgtgggcgtcgggttggtttgacatgtgcgacaaccttggcctggtagcggatgcgaggagggtgttcgacgaaatggctaccacaagcgtggtgctggggaataccatggtggcgtgctacgtcaggtcaggggatatgtaagctagctgctcggatgtgtttcacatgatggcgaaagggacccaatctcttggaacacactgatgatggggtacttgcggcatggggaagcatgtatggcaagggagtcgtttgaagagatgccggagagggatgccgaatgccaatagctagagaatggtgattgttgcatgctcgcagcgttcaatcggatgcgcctcgcaaggttccaacctgatcccgcgatgatggatgtgctgatgtccgcggtccgcctgtgcacaactttgttctttgtccgttccaagacaggtgcatgggattttgagcaaaaactgtgtcaaaatgaattttcatgtgccgaattcattgatcgacattctttactagttttcgaaataaagttgcattgcagaaaatattttatcatttgactgatcagatcagcag

SEQ ID NO: 44725 - DNA, 441 bp, Zea Mays
ctctcagctaaagcaagccaaaacaatcaacatgcgtcgaaatcttctaagtcaattgcatccatgcttcgcaaagcacctgaagatgtggtttgtgagaggcattgcaagggcaacactcaaactacattgcagcgaaagaacaaggaggagaaggaaagaacagatatgtatgttgctgattttatttatgagtgtggcttaccacttaatgtcatcaactcaagggcctttgggatcatgcttgaggcggttgggcaatatggtcctaggtatgtgaaaccttcatataatgatgttagggtgccattgcttgagaagacaaagaatagtgtagataagataaaaaaagactcatgagttggcttggactgaatttggttgcacacttatgtctaatggttggacagataggaggggtcgacacttgatcaatttcct

SEQ ID NO: 44726 - DNA, 544 bp, Zea Mays
agattattgcggtttcctctctagagacactgtttaaaaaaaattgggtcgaccgctcgtccatcgggtccggttttgttagttcagagtgagcctagtgcatcatatcagcttctggcctttgccatatatagatttgggttgtgtatcctcggtctcgattatttagtactacctgactcatgcatacatttcaaattcataacaatgactcgtggatcgcagcagtctatttgttttaccgaatagaacgaccattcccctggtgagaagtggaaactgaataattcaaagtcgtcatcactcatcagcgccagcggcactcttttcaccttgtcagcaatagaaaagaaccctttcagcgttctcgtgcacgttacggctatattcttcgcaaattatcaaataagtctgcagagtcggatccggcactagctaaatttcaaacgcaagcacctttcggtctgaaaaaaaatgggctctccgtgcatcggcatcatgacgttttaaacgcaagacatggcgctgtcgtcttagttctccc

SEQ ID NO: 44727 - DNA, 782 bp, Zea Mays
gcggattgtcgcacgcgagggtagccaacgctgcccctcgcagtgactttgtattgatcgaatgccgaagaccgtcgatgcggtcttttttcgacgtaatttttgcgggggattttttgcgtgtatattacatggctccacctcgttaaaaacctcacccctcgggaggaaaagagtgcgggccggaataaaaaactgtcttgcgaatttacaaggccgagctggccctgaggagtcaaacaaaaaacttgcgaagattgtcaatgttccaagaatgctctaagtcttcgtcggatggcgttgtgagcctgtacgcgctgggggacgccttcgtcttgacgatgaaggggccctcccactttggctctagcttgccctgggacactgtccgagctgtccggacgaggacgaggtctccttcgctgaattccctctggatgactatgtggtcgcgccatgctttttatttgagcttggtatttgttttagagcttgtagggcgaagacgcggtctctgtcgatgaggtccttcgaagtaggctcgtctacgtcggggacggctgacgtgactgtccgtggtgacccatgttttatttcttgcggagtcatggcctccgatccatatagaaggcagaaaggggtaaacccagtcgccctacactcagtcgtgttcagtgcccagaccgcttcaggtaacaggtatgcccacttgccttttttgtcgtcgaggagcattttcttgacggttgtgaaaattttaccattggcgtgttccacaactc

SEQ ID NO: 44728 - DNA, 479 bp, Zea Mays
gcaagatttagcgacattctaggtggcctagcccatactaggatagcctctatgtggtcctcatcgacgggtcttcctaagaggtgttcgagagtctagttgacataggatcaacgttggtttaaccagtctctagatcaattttgttggtcctataggttcttcgctgcattcaaggtcttgtgtcgaccacatacatgatagcctttactgatatgtgaacttcgctgcattcaaggtcttgtgtcgaccacatacatgatagcccttactgatatgtgatccagatctcttctgacataaacacactttttcatgactacactggggaagaagactatcaagttccaatctactagtatatattggatagtgacatatctgaagatggagatgatcacattgaccccttaaatcctaagaacatcaaccacccaacatcgctgaagaatttatttttcgatgagcttcgttagaag

SEQ ID NO: 44729 - DNA, 926 bp, Zea Mays
gattcacctgaattatttgctaattttggtattagtctagagagaagggggcaaatggtgttagtctagagagaaggccggagagaagattaatatttaagcctagcaatccatgtttattctgaagaagtttcgaaaagcaaggggtatatccaattttggtattcaatttcttgccatctcaagatgtgagtaaactatataaagaactgtatgattgtacctctggttgaacttcaaaatcatgttggctatttactcctgctcgttgcttctggtacatatttgtatttatactattttaagttgaggatataaagagacccctgttcctatcctatgtattattctcagtttgtcaggaagagtttctcccccaagtagtttgtcttataaggcgaaccaattcgaaagcactattatccattgaatgctggtcaaaacctgcatttggtgttcttagatgggattgaaaatcaattggacctctgtttgcagttcttagatggggttgagttaacacttgtactggggaacatatatttgttcgcaaccctatgcttggtgaaaagtagatgtaatgcaagtggaatttataagagccgaaagagctcatgtagtagtgtaattagagaatgttgtagtgcaagctcttagttacttgaataacagacctttacacaaaagatactcgaaactatttcactatctgtcatatacaatcttgtttagggtcaagagtttatttagttgtactttttcatacgccatctgtttaatgggatgaatattctatctaatgaggtctctcttttgctctcatgtctggtggatggcgtcatggcttgcctcctacgtgttaccttggttgtatggcgatcggtagtttaagaatatatgttggttgtcctgctctgtagttgttg

SEQ ID NO: 44730 - DNA, 571 bp, Zea Mays
ggctggagcgatgggtagcctcggtgcccacgactcgcggtgagaaaccctccgcgagatcctccctgccattctctttgtgtttgagcgtttggattcctgggccacggcaatggcgccaccgcagggtgacctgcgctgccggcgtgggctcggtaggagagttaaggaggaaggaagtgtgtggaccattgatctgttaccgcacggcggagatcaattgggagcatacctcttcgttctgttgaatctgagccgtagggaatggaatcaaccgtcaagattagactgtggtagagttgtttggttatatgggatccgggccttcggatcttgatccaacggtcctctacccataccgattcattaatgggctagatctaatatgagccattgaatcctgatcgtgtggttgtggcacacccataccctatcgaccatggcataattcataaataaccactgcacttatttgaaataaacccgcagtccgcactgaggggaatcctgagtcttatgatcttttgcgagacagcccctgtagtttctgatatttatgcgcccagtccaa

SEQ ID NO: 44731 - DNA, 450 bp, Zea Mays
cgagaagtgcagagccataccagagtggtccggccacggaagagctatccacggtgacgcggagatccaatttgggggaaaacccgaattgaagcgctatggtggatgattggagacgagagtgggtgctctggcttggggataatctaacggaggtcactgaggcatcaatttatagagatcgaccgtgaatacgatgaatttgagcggcggatggctatcggtaagaaacgagaggagtcaccggaggccgctcaacgtggcatttattgggttaagtctctggtgacaatgaggctagctttagtgatctacagcggggtggtagcaaggctagtagcgtggcggacaccgatgaacggcgatcatcgtggcgatggtcgtgcggccacgtcgcggcgcaagtgggtacggtgacaggccggccacagtaccctgactatatccacg

SEQ ID NO: 44732 - DNA, 597 bp, Zea Mays
agttgcccataacaaatgcctattgcagtcatctttgaacataaaaggagaataacaaatgcctattgcattcatctatgaacccatccaatggcactcctatttcggcttctcacaagagtagaaatattgtaacgatctgcaatacttcccctcaaaacaaaagtaacttaacacttcaacagttggtacgatgaatcatatgaagctataaaagttgatgtgacaatgcagaaagactggcttgggcaagagcactgaacaacctctggtacatgagcatgccttcaacattggtcgccttgaatgaatctacacaaattcttagaacagttaagtatgggtcaggtgcacaaaggcagagtcatgtgttgaatactacctttcatgttcagatccaggacgtcaaaaatccacattcaatatgtgttaaaaaataaatagccattgatgcatgccaccaacaaaagttcaatataattccaccagttataaatatattttggtgaaggacagactttttagacatttcactgatgcatactctttcgtttgcactaatccttcctagcaactaaacaatcgaaaggaggaaat

SEQ ID NO: 44733 - DNA, 662 bp, Zea Mays
tgtgtgccacatatatataattagtcagccttcccatagctccaattttctctcgagcagaacaggtactcctttgcaatcacacccacgctcgttggacagtcacaccggtcaccgtttgccacctgcagtgctggtaagaacattgtaagagcagggtaagacgcttcataatttgtattctaccacctccaccaccaccctaagagatagttgtagggttcacattgtttgttgcctttttgtctctgttttgtgctaacaatgacaggaccaaagaatcaaatggacaaggacaaggggcctaaacttaacgacgatgagtgtgtctctcagatggaattgaaggagatgatgcgcgcgatgactgaagcttttaaaaaataccagaactctgcctcgacatcctatgagcagcttgatcgacgagttgatgaacttgttacacgcatggacgtactggaagctcgtcccccaccaccaactccagccccatctcactctcctgtggacgatgacgacgatgatgacgatgtttatgcactgctgccacaacgcttcgtacataatcgacaaggtatgagaggtaatggtagacgtcgtcatcataatcctcaaccagaccatgatccatttgctaagattaagttctctattccacc

SEQ ID NO: 44734 - DNA, 676 bp, Zea Mays
ctcgaggagggtgctcctcatacatgaactcagcacagctagtgctcatagaaactcatcatgctggacattagcacattatctgttacaacctatgggactaagcttgtgaaatgtatctcaagttattgattcgttatgccagtcacctataataaaggtacaaagtcttaaaagccatgctcaaattggatatcactgtttaggtctaattaaagggtgaacatgttggacaatgatatcacagttaggaagcccatcgccaaactacgtaactttagtttaagaattggtcacgaagacgtgaacatgatatatcaaaggaagatcagcaacgaaagtatacaatccaaaaagggcttaatcatcattcaaggattaacaacatattatctaatgtcatatgaacaagtatctgcatttagcatgtacgccaatacaaatgtcgaccaactgatacttgacacctaggcatcaaccatatccaatgtaacatagaattttttttaaatgcatggtctagcatatacatcaccttctggggagaaaattcgtcaggtaataaggcttaatagaatgaaaagaagggatgggcatggattcacacactgtgccaattgccaaacctcctataaattgctactgaaaaggtagcacattccgtaaaaaacagaag

SEQ ID NO: 44735 - DNA, 474 bp, Zea Mays
tgggggttcaagatccacaactattccttccacattttgaacttgcatgagggcttccttctaactgtcacattctggccaaataacatgggactcgacaagattgcacccttatccatcgcaagtgtaggattgcttcaagtttcctttgatggcgatgactccattagggcctgccatattgagtactatataggtttagtgtggtattgccataaacttggtgagccctggtcttcgaagtgtgggaactctatccaaaaaatttcttcaaaccttaaggtgacagacaaggtgatttgccctagtggagttgttgactttctcaagataatcccatagaaaggtgccagaattggctttagtgatttctcagagagcccatcttccagtaagtcttatcaaagaggatgttgagatttcctccatcatagatgaggactcgatgcaatcttgtgtagcccactattggat

SEQ ID NO: 44736 - DNA, 532 bp, Zea Mays
acacggctatggcagggacttgggctttaggtggatttcttccttcgagctgagcttcaagggctgcaatcctagcatgtgcttcttcaagttctccatgtacccttgagagatctagggtagcactgaccaggtcagtgttaagacctgccaccacatctacaagggtgttgaggcgatcttctccagcttcacctggaacaacactggtttggctttctccacgaagacgtagaggaagatgtatgtacctcgtgtcatgcagcagctactgataagtgtggctgagagaccacagagctctcctggcagcattgttgaccgaagcagcgtaggtagatagtggcgtcagagcctcatgggctgatagagtcctaaaacctctatctcctgcatccatcaccctgatatgcacgcaagtgatgtagtaacaataccgaggggctcagacacttgtcttgtgtcatatagagatcggacgtaggtacctagcgcatgcagtacatcctgcaacaggtttgggaagtgtcct

SEQ ID NO: 44737 - DNA, 436 bp, Zea Mays
gattaacaactttgctacaaggagctgggtaagttgttacataaaaattgaagaactaagccctctaattcgctctgtgaggcgctctgaagaaaggtttcaatggtacagtactgcaaaagatcagcagatgcaccacacctcgccgctggtgaccttcgcgctcggattcacgccggcgctgcgattcgtgctctctggggtgcggattatgaccaacagtggaaaagatcttaccacggataaggtcgtgtgctggccgccgtacccacatgctcttcagccagccgaaatgatcctcgccggagttggctgcttgccgctcgtgcgccacgtaatcaatggtgttaccacgtcgcagtagaccatcgtaggtagcctatccatcgcctgtgacagtgccccggtgaatgccacgcccttcctcaactaaatt

SEQ ID NO: 44738 - DNA, 666 bp, Zea Mays
caggtcgttcggcgggtgggcgagaggtagaagatgattggccgcctgagtaagcagccgtcgataaccctccgcatttggggtccacgggaggccatcggctatctgcgccagtactcctccaacttcacttggcatgttcaaagctcgggcgaagtcagggtacaggtttcgggcgagaagcggattctcccgtcggagcctagcatcttgttcaactagttcccgctctcgttcttgagcctgacggcgatcacaattcacaatggtgggaattgcgtcgttctcgatgtgttctttcgtcagggtttcccccatctctgaggcttcgtcccgagagacaggttgtgctgggtcccgttctccggcttcgtgatgtcatcgcatgtttcggcgcctgtttctccatcgccgagcatcgcgcggtggaggttcctcccccagcacggtgggttcatcatcagagatgggtgatgactccatgactccagtctcccctaaatgaagaggacgtcagagtagaaaggagcatgtatggtggtgtgcttcttctcaccctcctttgagggcggaggtgttgggaggattgctcgttgtgttctccttcctcggtatggaacattcacttcccttcttcgagtgatccgtgtccactccttagtgggc

SEQ ID NO: 44739 - DNA, 464 bp, Zea Mays
gtagcagtcgtgcgcacgtcgtcccagatctggcgcgaggcaggcttttttactagacgtgcgtgggacaaagaacgtgcgcgcgtgctgcatgcgctgcatctatgcgggagaagcatgcaaaaagctgcaagctagtagctttctctttctccctttttttatcatgtgattaaggaaatacttaattatgtccactcaaaagctatgtgtgtgagaatggaatatagcagcatgcatgcgtacatgcaaatgcatagttgattgatgggaatgcatagttgattgatgggagaccaatccattcaccactattgcacgtatccgtaaaaaaaatttattcatggctagaggctatgacggttgtatgagagtaatacgcatgttctctcttcattatttcatattatttatctaatctgttttattattattataaaacactatcttgtgattacattaaa

SEQ ID NO: 44740 - DNA, 749 bp, Zea Mays
gtcacctgagaaacataaaccttgtagtcgagtagcatctggggcatcttcttcatatgatctaggtcattcaaagcgggctgctagcttctgctacccaacgattgcatgtggcgcatagtgcagacgctagagccgggcgcggttgatggtccaccagtgggaggaggggagcaggaggacgacacgtagagtcgtcagccgatgtgcggatgaccagaggcataggcgtgaggcgattggcgagacaagtgtgagagagccactgaggcagacatggagtctaggactgccctgccattgctgagcgcccaagtatcagtgtcgccgtcattgcgtgtcgagggtgactcagggaagaagcggaagctagtgaggatctaggatgacaatagtgatgtgggatgaagacactatgctccaggaactccttggaaggtccgagcggtgggggagactatcgtcgcctcgagcgttgcccgaataccattcgttgccaacctcggcatgaacgcgggagacagagcgaagttggcgaccgcttggtagagcccaacttcatctggagggagagagaagcctaccgcgatttggcatgcaccatatggggcaccgctgtggcgtgtagcgtgctcctgtagccgctaaagaagtgatggggacacctcgcagtaccgctgcaggtagccttaggttgtctccaacaagagactgtaaacatcatgtaccctaaatatagaggttttaca

SEQ ID NO: 44741 - DNA, 703 bp, Zea Mays
tgaaacttatgggctcggcccctgcacacagggaaaacagcagcacacaggccgccaacgatcgtatatggagtttatactaacatcccctcgtaagatcagttaacagcgcaaaagtctggtgccctagtttcttgtttcactgacatctacgctgagaccctcctctattccttcatttgtgagtcccggtcctctacccacctccggtggtaacccaggtcgagcacctggccatggcacaagcgttcgccacaggtgacctactgtattggaaataaacattcccgcaccaactttggccttagttgactaatcccctcaaccggattgatctgtgctgaccctgaaccccatctacatccgacgacaggaggagcgcaaccttggttaagctacgcccaaggtcatttggcagtagcgtttaatccgatgccgcagctagcatcaacaatacatctaacatgtgattcttacactgattgacttggggaacactggcctcgctggtcgacgcggacatgctagacaacagcattcaccaaagattctataccgttctaagcactgcaccacgagaaactttaaacggcccggccagagagctttacgagtacttaatggctatagaacacaaatagcgcaaaagaaatttacccttgaagcagctaaccacgatgaaaggatgaaaaggctcggcgtg

SEQ ID NO: 44742 - DNA, 806 bp, Zea Mays
tgtaataaagatggtgtactttcgacatgtaataattcagtatattgtttttcctcagattccatcaagaacacgtgctcaagatggggcgggaacttcccatggcggggaggaaactccaaacccaccacctgtacctcctacattggctgaggctatcgctgccttagttaatgctaccgctgacaacacatgtttcctgcgtgaattggcaggaaatcagtttcagcaacatggaggcagaggtcaaccccatgggccacgagacaccacgtacctggagttttctgaaactcgtccatcgctttttatcaaagcagaagaacctttggaagtggatgaatgggtacaggatatggaacaaaaattcggacagatccggtgtactgaaacgcagaagcccctatttgccgcccaacaattgagaggtcctgccagcacctggtgggcaaatttttcagctattcagcctgtaggacatctggtcacatgggcggaattcaaacaagcgtttagggaacattatgttccagaaggggttttacatatgaagttggtggagtttatacgtctaaagcaagggggagactcggtaatgcagtatctcaacaagttcaatcatctctcccagtacgcaataagcacaacactgtcagtggaagccaagaattcaggacaaggaaaaacaaagggatatgggggtgaaggatcatctcaggggtctgaaaagcagacaaggttggtaattcgtcccttcaacccaaatcgttcttctccttgtccacccacatatccgttcaaacaac

SEQ ID NO: 44743 - DNA, 579 bp, Zea Mays
gttttgcgatgatacagtgaccggattgaatcgccagctcagaaacctcgccgctggtgatctcgcgctcagatccgtgccggcgtcgtgattcacgcccgaccgaacaaagataagcgctcctcggtaagaaaaatcatgcgggacataaactccagccactattctactctgaccaccgtacacgagcatgccacggccgctgtggataagttcaccggagttagccgtctgccactcggatgacacgtgcctagacgcagtacttcgtcgtagtgactcgctctagcacgtccggtcctcgccggtgaggttgcaacggtaaatgccactgatcccgagcgccagtaaccccatccatctccggccgccagcgcgtcttcgtgaaattggacgccaccgctgttggagcctataaattgccgcccccgcctgctccgctatgtaattgtgcatccagtaaaccagctctcacctctgatcgtccgccagaactctccaatttgagatttcccccaaatcaaccaagaacaccgtgcattgagccctcaccgtggtcagcgaatcccaggtttgttc

SEQ ID NO: 44744 - DNA, 741 bp, Zea Mays
gggaagttagttacatgccacacctgtcatctgagtttcttgcagtgtaatacatgcagggagtgaagtatcccaacatcttgcttccaggatacttcaccaaactttaagctgtaaacacttctcctaaaagaattgaagttgtatttcatttaagaagagaaagcgcctggtatattctaaattttcttctgtgtgccatttattatatctcgtactgagctaccggcaatcagaaatcaaacgctcgaattctacggacaaatctacgtaacatactaagaaattggctgtatcagatattcagagaatgtgaaggatataattatagacgtgggaaggagatcctggcaagtaggcagtcatgtgtctgctcagagacaagccgtacaaatactacagtaatctagcagaatccatcaaaatcatgggcttaagtgcttaacaacactatgctagtgtaatagtttataagttaaggaaaagaacatactagtcaatgcataattcagaggttatacaattcatcaacataaagatggattatcctggttttactttacttcactggtagtgtaaggaccttccaacctaattccggatatcattaaggtagcctacaaaagaccagatcctgaggttaggttagggcgttagtccactaggtcgtgatggtttattcctcctgtaaacacaaagcatacgctagagattagataatccaagccaataaaatgggct

SEQ ID NO: 44745 - DNA, 631 bp, Zea Mays
cacacacgtttaacaaatgcattcaccacaatactcagaacaactcattcacatttcacatatatctttactaaaacatttcccgcatcgcttgcaacttaaaactaagctttactacgtgaacacatgacttccaatttaatcacgaatatcatcatcacaccacatcgactcgattcaactaaccctacatgatcatctcatgaacggagcgtttcaacaatcattctaaaacgaactaactccattacacaacttgtattacgagcctacttgaccactcgatgtgtctactcgaaatcgagagcacaaccaacactgttcacacaggaatttcagtttgcaagcacgagagcactcaactaaattaccaagcaaaatcatagagaggtactaccaccaatttctcaagtttaaatcattatgatttagttatcaagtttcaatttatatcaagacacttaatcatttcaagaaacatgcacacttttgtttacttctaatttttctctaattcttcttataattataaaatgtgtgtcattttagcaccatatgaaactatctaatttggggctagaatttttatgaggcataggtaataacaaatcatgaccaatgtataaatttc

SEQ ID NO: 44746 - DNA, 374 bp, Zea Mays
gtagcatgcatcgctctaggataaacaatcaaatcaaacatttttaggcaggtttatcttcttcgttggtcagtttcattgcatgattacttttacttatttgcttaggctgactcgaaaaagacgacaatcggctcaagagagccgatcagtgcaaccaatgcaggtcgatccacacgatctggccaaaatttaatgtttaatctgctgttgtgcatttgtagagcgattcaccgatgtcgtcacacccttcctgattatatgtcaaactaggtggcacgcctagaatctccaacaagattcataatcaggaggaatgatcatagcaacacacacctctcggccgctcggccgatcgaccacatatttcctac

SEQ ID NO: 44747 - DNA, 836 bp, Zea Mays
aacgcccaatcgctccgtcgggagtagggcggaaaagagacgccacaagaagcgcaccaccatctccgagcaacgccctagatgacttgtcgccactagcaaatggcggaagggaaagcgtcgtcgacgacgtctaaggccgctgtcagccaccggcaaacactcggcgacaagcgccgtaacgaatcaagcgtccatgaggtgtgcgtggtagagccatccgtcctgcaacacctccaatggatggagatcccgatcatcttcgaccaaagtgatcaccggataggatcccgcatcctgggacctacctctcgtcatcgaatcgattgtgggctcaaagtgcctctctaaggtactcgttgatggggaagcagcctcgatgtcatgtgcgccgagaccttggatgatcttgggatcgcacgctccgtgttgcgtcctagtacaacaccgatccatggcatcacgccccgtcacaacgtccacccgctcggacaaatcgctctacccgttacgctcggaggaccatccaatttccgtaccgagcaattacaattcgaagtggtggatttctcgagggcctacaacgccattttcgtggatgaattaaccattatttaatggcattgcttaaccatttttttttaaaaaaaatcctaggtgctgcacgtggaacaaacggatcaggtataacatcactcagttctcttttgtttgattgcttatgttcttcattaatgtagcccatgctgatgaatttaatattttccatattaaattaatttttaattgcgtataattttatcctgtgaaccgtgcagattatcacatttattggg

SEQ ID NO: 44748 - DNA, 371 bp, Zea Mays
accacttttggaggagccgcccttgcccgaatataccttaaggagatagtcagactccatggcattccgcggaagatagtgtcagacagaggaacacagttcacctcaaaattttggaaaggccttcagcaagcaatgggcaccaagttagatttcagcaccgcttatcacccccagtcagatggccaaacggaaagagtcaacaagatcctcgaagatttactaagagcctgtgtgttaacgttcgacagggattgggagtccagtttgctgtacaccgaattctcatacaacaacagccatcaggccagcatcaaaatgtcaccgttcgaagcattgtatggaagaaaatgccagactcccctaatatg

SEQ ID NO: 44749 - DNA, 322 bp, Zea Mays
ataaagtccttctttcgatcaattgttctccaaatatgctagcaagaaagttgttccatgcgatccatcaacaaataaaccccgatcacctgctaaaacaaaacgaccgaataaaatggccagaaaagcgacgcaacaagcgtcgcctattcgtcctgtgatgccaggatactttccacccgtctactcatcattgatatattgttctgttcaaatatggaatggtacgacgatgagctcatggtacatgcatagtccctttgtctattaaggctaggggcacttccattctataccttttgatctattgatcagatggtca

SEQ ID NO: 44750 - DNA, 397 bp, Zea Mays
attttcagcttcaaataatcctgcacacacatagggggagcttttcttacattctaagttttaattgggatttatctatctctcggacagaacttcaaatcaagataagtcctacgaaactcatctccaaaatccatcttatacctaaggtatgagggagatttggaaaaactaaacttctctttaatatattatgtagtgttgttatcaattaccaaaaagggggagattgtgaatcatctagaccccttggtgatgttttggtaattaatgacaactgcttgtgggctaacgattcttgcagaaataagaatgcagggttggaccacatagaacaggaaatattggagattcataagcattggttgtggatcaagtgaaggcaaaggtataacat

SEQ ID NO: 44751 - DNA, 558 bp, Zea Mays
ttcgaggcactggttgcttcactggttgcacaactacttagcgaagcaggcggggtcggcaatttgtagcaggcttgagcggtggctagtgaatttgagagagacgcgcggcggccggagaagaagaaggttactggtgcgcgtgattggtggcaattaccgtggcaagctccccggcaaccaccggacgagctaacgtgagtcacggtggtaaagttaatgtgccaaggcacgtggtgcaaggctgcgaagtggctatctccggcgaacccatccaaatcgaccgtggtctgctcgggtacggtggccagagtaaaatagtggtcggagtgtatccacggcgtgatatttacttacccccggtgctatccaactgatccgagcgtggaacaccacagcgatagcacgaatccgcgcacggctcgtcggcggcgaggggatcagaacctgatccttcctgttactgtaccatgggattgttcttcagtcagcctgacagaccatgtttggggcggatttcctcctgattttacatggcaacaagaccattgttctgta

SEQ ID NO: 44752 - DNA, 509 bp, Zea Mays
ggtagcgccagtcatcatcctctctgacgatgaagatggggagatcgattggacgacactgatggatgacgacgacgagtagaaattacgatatatgttctaatcttagtatgatggatgacgtactatatctaagaacttagtatgatggactgcgtattatgtaagaacttagtgtgattatatatatatattgtgttctaatcttctgttccaatctttgtgttcaatttttttgaatctttgttgcaatcttatatatatagctcaatgagttctctaaacaaggaccaaggtttaatgcccgaccacatgaacacagggtgtttctcaagaacattcaagtgatgaaggatatgaaacacctagcatagatagggctgctcggcgtcatttgcaacatgaccctaattatgatccacaagagtgtgaggtaaagtacacatctttagtttcgtgtgtgtacctaattagttgatttcacaatgtctattacacatgcatgtttt

SEQ ID NO: 44753 - DNA, 318 bp, Zea Mays
ctcaacaacctccaagaaaccctccaatctggtccaaaaactctcaaaatggaatctcctctttccttgggtgagctcattcagacccaataaaagagggcagtgatctgaaattaaagaggcagagctttgaagaacacaattagggaaatcgtcatcccagtctgctgtacagaagacccgatccaggcgaactagagtagggttaacccgatcatttgaccaagtatattttctacccaacagaggtaactcctttaattgcagatcattaagcagccgcctaaaccttcccatcattgccctgttcagattatc

SEQ ID NO: 44754 - DNA, 516 bp, Zea Mays
tcagtctagtagggctactgttcaacgatttatagggttgggctagtacacatctttatattaaattacaactttgccctccctattatatggtatcccttggtaattgcgggaatattgatgtgtcgtgtatgacttttcttcttcctagggatcttctttggcttccttcgataggtaatttctccaaaggcatcgaagctctgtttctcctttccttgtctcttcgactttgtggctcgtctgaagcttcagctatgcttctcgtctttgaagctctcttacaccctttgggtttgactttgatcattatcctaagtatgttttttgttattagagacctttcgattaagcaatatatatgtacgatggcgctattcatcactcaaggtgacggctcagagatacaacacccgaaccagacccgcctaattaaatcccaccaaaccacctatccacgtcaacccacccaactaattccccgcatgctacaacacgaccaacattggagctgcc

SEQ ID NO: 44755 - DNA, 439 bp, Zea Mays
atttgataaaattatttaccaacaaatactacaattacaaccagagacaggatgtcgttgtcgcagttggccaagctcctttgcggccacagatgggggccacatctcctctcataaactgctgttgcgcataaacagaccccggagcagtgcctgcagtacagacaagaattctgatcatgctctagctaattgcattgttggtcttctcgactctttcagctgaagcaaccagctgcccttcaccagtgaggaaaagaatcagctaacaatggcatccccagcagccttgttgtagcgagtagcgactgcaggagatcgcgtgcagcaaatgtcgtcgccaggcagacatagacaaccactatgcttgccaagccaccgcaataagaagatttggagcgcgagcaagaaaagagaaatgcaagaggcaagaagcagc

SEQ ID NO: 44756 - DNA, 731 bp, Zea Mays
gggttaagtatctattccttgcgtaagagaataactccgggtatgcaagactgaggagccggtctatccatctgtcatgctagaggaatactgagcgatcatctcccacaaacactttcacgatgtttttgaagtatgagagggttttgagaatatctctccactagaacgagcctttcttatgatcaatggggacacccttgtccctgtaatggttgttccaaaacagccgcacccaaggaaggtcttgtctgttaaagaatttatgtaacgatttcgtcagaagtgcctcatttttttgtgatgtccataatgcctaagccaccttttattttaggtttacacgccaacctccaagcaacttgcggtggttttgtcttccatgtctgccccctccagaggcagtgctttttgtatttgtcgatttgtgctatgaccgccttgggaatcttaaggtgcataagaaatatgtgggtaacgacaagaaaactgagttagccatttgtagtttgcctaccagcaatagaaacgtggaagttgatgtcatccttttctcaattttctaaattaacggcatgaaagaagacaagtttggcttggttgtccctaaaggcaatcccaaatgagtgaaaggaagggtctcgatgctgcaactgaaagtgtttgcaagggtaaccatcttgtctggagataagttgattggatatatgctttatttttggtaatttaga

SEQ ID NO: 44757 - DNA, 324 bp, Zea Mays
cagacggataattctttgttgtccgggagacagtacaagaaatcatcttcgtctgtaccgttaaacactaaggcccctttggatacttcagctcccgggcatagtgtttggcttcaaaaatttcttcttcagataatctttttcccgcagcatatcgaatgatatattcaagatcttcggagagtgcttcgggagtaaggattcggcttctttggccacacttttctcaaaagctatattagtatctggagttattccttcggccccctgctcggttgtggcaagcttcgtctcggcaggcactgtgggtcctgcctcgatttc

SEQ ID NO: 44758 - DNA, 588 bp, Zea Mays
tcccaagtgattcctgcaattgttcccaaaatcatgccacaaatggtgctcctctgtctgatactatagtccttggtatcccatgcaaccgaactatctggtcaatgtaaatctctgcatacttctcggtcctgtgggtggtatgcactggtaagaaatgagccgtcttggtcaatctatccacaataacccaaatggaatcatggtgcctggaagtattgggcaatcccacgataaagtccatgcaaatgtcctcccatttccaagatggtatgggaaggggttgcaaagggcctgttgccttcaaatgactagctttgatcctctggcaggtgtcacactcggatatgtacttggcaatttccctcttcattctggtccaccaatataaagatctgagatcatgatacattttgttgctaccagggtgcatggagaatttggaaaggtgagcttcatccaatatcttctttctgagctcagggtccttgggaacaaccaatcgatctccaaaccatagaattcccttgctgtcctgacagaagcacttgtatttatctgccttctgcttgatcatttctttgataa

SEQ ID NO: 44759 - DNA, 793 bp, Zea Mays
gctagtagcttcaatgcatttcaaccaatcatcatttggttcgttgaacttctcttcgtatctgaaggtatatttcaatcgaattaatccaccttctatggattcagcagtagtctccttcggcatttcccagctatccacaagtggccacactctgtaggctatgtgctcttgaattatgtcccttgtgccaatgaaagcacaaacattgctaaaagccttctgacatgctttggcgtcactttcaatagccaccttcggtcttcggaggccgaagcgagaccagatggggcgctagataatttccttaatatcctccctttcaatcagattatttttaacataaaaccattcctccatccaggccccgggccatcttttccggtatgttggcactgggtagcttgcattagagcgagcaatgaatccataacaaccgaagttgttgtgatactgttctttgccggtggccttcgtctcgtacaaaagttcatgcatactgcaaaaacacttcacgctcggttccagtccttggcttcttacagcccaaacaaacaagctcatcctaattatagcttcaggggtaagctgatgaagaaagatctggaatatcttcagcacttcaaacacaaatttgctcaacgggaaccgaaggcctgccttcaaaaagcttcgataaacaacaacctcattttccttaggagcaggggcagtgctgtctcctccaaccctcacaatagacatgtcgcgaaagtatcttcctctcatggtgtcaatatgactttgtttaatg

SEQ ID NO: 44760 - DNA, 791 bp, Zea Mays
catgtacgtatgttgttgattaatcgatgcatgtatgatgtttgttgtccacttgggagttgggaccggtagcatgtgtgggaaaggcgagcatgttgtgtactgttttatcttggctcgctatgccctgtgacccaggctaggcctgtcagcccatcaatgtccctagaccccaagacttgtactttattttgcttagatgaaaaaaactcattttttgctaccttcttggatggcataacaagggataatgcacaccgctgatctttacatgcaatatacacttacttacactacaacgtacaacatgctctatgtatctagagggggtagatcatgtcattttttcgtaagccaactaccaagtcttgggcctaatatctgtgtggttttcttctttttttaaatggaatatttgtgttgtgtttctagacttctagtcattatgttgttgacataggcatgatccatgtgatccatatattcctagtacctctgtctcttttgagggttgggtgggagatctagcaagaggagagccattgtgagccaatgcctcttgtgatgtatgtcgttgtcgtcacaagttccaagcaaatattggatgtgcatgacatttcagattattgggaacttagttgtaaattcatagagagtctggtgatgcgaataaagaaaagatggagcaggccccagggtgtggacctgaccagatgatgcttccatgttcgttgttatctctattcgttttaaaatcttcaaaacaacattccccgtacccaggacaccag

SEQ ID NO: 44761 - DNA, 603 bp, Zea Mays
cttgcttgccaagctattgaggtcaggactcaggagataagttctaggtcagaagataagtactagcagtcgttcaattgttaagttactagataaagagttatctctagagtttgtgctagctgatcattgaataaaggaagcaaggatacgcctatctcatcttgtgaggaggattacttgtctcatgtcttctccataatcccagccataacatctttggtatctagagccagttttcatcaccactccgcccttcccctgctccctccatcctgttgatcctatggcagccgacaaggaatagatccctatatcgaagagggagaactctcgactaacagtagcggtgaaccatctctaatccaacaaactcgacaacggctccacctccaactccaacgtaccaccaccgccaccaaactagcaaccccttgccttgatcaagtgccgtttgccgcccaacgagtccacaagctagtatttccatcccatgatggcaggcactgatgagtgatgacccactgttgtggctgaatgtctgccagcaaattttaggcacctagcagacacgtgtatactacatggtgggcgacacacaac

SEQ ID NO: 44762 - DNA, 432 bp, Zea Mays
ggcgccagcagacttctctggcagagtcacggacagtccggcctcctggcccggacgatccgccgaccacagagttgatatttttacgctttttcgaaagaatttgcattttgaaaaccaaagcgttgttagccctcatgcaaatgcaaccgtttatgctctacgaggcactaagttttacaccaatcaagttcattgacccctcttaatagtacgactgtctaccctattaatctagtcaatttcttctataaacacctgctgaccgacagaaaacaaaacctatattttacctttgccctcacttgatccacaatcaatggttataagtctcaaaaactttactgttacctgtggtccaatcctgcattcttatttctccaagaattgttagtccacaatcagttgtcattaattaccaaaacaccactt

SEQ ID NO: 44763 - DNA, 716 bp, Zea Mays
ggaacctcaaagaaagacaacataaacatagccaagctggtaagtaccgaattaattagaacaagacgaccccctacagacatcagctttcctttccaaccactgagtttcttttcaaacttttcctctatcatttttcaatcagtatttcttaacctcttgtagtgcatcgggatacctaggtatttaaacgggtaccccctttcttacagccaaaaaactgttgatattgatgttcctcctctactgccttaccgaaacaaaatagctcacttttatggtaaataattttcaaatcggagacttgctcaaaggctacaagaagcgactttaggtttgctgctttctctacatcattatcaaaaaacaacaaggtgtcatccgcgtattgcaaaatagagagccttccatctactaaatgtggcactagaccatcaacttgaccatctgctttagctctattaatcagaatggcaagcatatccactaccacattaaaaagaatgtgagagagcgggtctccttgcctcaaccccttatgagtctgaaagtaaggcccaatttggtcatttaccttgatacccacatgaccccctgtcataatagagtctattcactcacaccaagtattagaaaagcccttcatccttaaggtttgtaggataaatgaccatttcaccttatcataggctttttcaaagtcaatcttgaaaatt

SEQ ID NO: 44764 - DNA, 378 bp, Zea Mays
gcaggaattccgcgcagtcaacgtctttttctgcgtgctttaactgttcacactgcagcaaaaccggttgaaccggttttataaccggttgaaccggttttggtccactgaccagccgccgccgcctcctttttctcctccccttccttctttcacttcttacccgttcatttcttccagccgccgtcgcctacacttttcctctctctccctcacactctcaccacactccaaagcccatttgtgccatcaaaaccttgggagttttttggagatttgttcctctcggcttcctccatcaactccctcacttttgttgggatttctgtggttcaatcgtcagatcgaggtatagccttatttcctcatgtttttact

SEQ ID NO: 44765 - DNA, 510 bp, Zea Mays
ctcccaaagaatcaacctgccaaacgaaccaatagctgcttgcaagtactttgaggaacggtaatccagaggaaaacctagaagcatgagccaacattcacgattgaaaaaagagcccgatgattccagacgtcattatgacgaagagcagtgaaagtagcatccaaatattgttgagggccaagcaaaccagattatcacgctccaaaacactataaaactgcaccaacacctgccccaagtgagagcgctgaatatctctcaccccaacccttcgatgctccactaaatattccctaatcacatctctgaccgcagggaaaaggacctcatgcgcaggtaaaggatggatattaataatcgcccaatcctcatgcattggagggagtctccgcgagactgacctggccatgatttcgcgatgctggaccgccatggcgctgaagcctggcgggaggaaaggctccaggtcgacacgccggtacgccattgcatgattttccgaagatc

SEQ ID NO: 44766 - DNA, 382 bp, Zea Mays
tcttaacttagtgcagagtgaattaagttaaaagcatattttataggagtagagtctcgtttatttcatcagtattatcgttcttgttaagcaacttacattagattagctcaacttgaggttagccttcgttaggttagattaatctgtcacattggatcggatctaggtatgactagcttcgaccagataagatccaattaattttgggttagatcatgatcatggtgggataagtcaagtggttttagtcacgcaaatataacttagatctgatctcattattttggattagatcctggttgttactttaggatgagttaagtaaagtggttaggataagacaaatctttcaagataagatgaatctattaagataaga

SEQ ID NO: 44767 - DNA, 760 bp, Zea Mays
ctcacctacaacggcaggctctacgtccctccgtcatcacctctcctccaggagatcttggctgttgtacatggtgacggccacgaaggcgtacagcgcaccctccaccgcctccggcgtgacatccacttcctcgacatgtgccgcatcgtccaggactttgtccgctcctgctccacctgtcaacgatgcaagaccgagcacctccacccgggcggcctcctgctgccgctaccaattccgtcggatgtctggacaggcatcgtcgtggacttcatcgaggcactaccgtgtgttcgcggaaaatccgtcatcctcaccgtggtggatcgcttcaacaagtattgtcatttcattgccttagctcacccatacattgctgaatcggtggcccacgcattcttctccgacattgtccgcctccatggcatgccccagtcgaacgtctcggaccgggaccccatcttcacgtcgaccttctggagcgagctgatgcgcttaacgggcattaggcagcacatgttctcggcgttccatctgcaatcggatggccagacggagaccgccaaccgtgtcatcggcatgtacttgcgctgcttcaccgtagatcgcccgcgcgagtggcttcgttggctgtcgtgggccgagtacacctacaacaccgcctaccagtcttcactccgcgacactcgttccgggtggtctacggccgcgacccgccatccatccgatcatatgaggcgggcgacactagggtggc

SEQ ID NO: 44768 - DNA, 506 bp, Zea Mays
attttaagacctataaagctaaagttggaaatcaaatcgagagtaaaattaaacggttaaggtctaatcgtggtagagaatatttttcaggtgatttttctgatttttgtgtggaacatggtattattcatgagttgtcatactcaccacaatccaatgggttgctgagagaaagaatcatgctctaattgatttggttaacgtcatgttagagacttcaggactatctaaggaatggtggggtgaggcgatcttgacagtgtgtcatgtctagaataaagttcccacaaagaataaataaatcacaccattcgaggaatgggaaaagaggaaattaaatatctcctatttgcgcacctggggttgtttggataaagtgagtgtgccaattaacaagaagcacaaattaggaccgaaaaccattgattgtgttttccttgggtatgctttccacaacattagatataggttcttaattataaagtctggagtactggacatgttgg

SEQ ID NO: 44769 - DNA, 466 bp, Zea Mays
ccgacttggtgtggtgtgaaaacactatataatgtagttttatggtgttgttgagtttgattgactgttgggttacaacccaacttatcaatgtaatatttccatggatgcaatgctttgtgcctcacccctttttggctagtgtggctacttgctaactcgatcttagtatacaattggtttgcctctatagagcaaaggcaatgttgtactgtctatgaaatcttgatactggtagaactcaagtgaatttgtaggatgatgtggatagataagtccaaccatgtttacctgataggttttcttattatgtgcaactttatttttaacaataaatagggtggtttcaagtggattttatgtctacattatagttgaagaggtgtgcatgtttttcttctatggtttgtttcaattgccataaaggctatgcataatttttagttgttgcaggctagtaatgtgg

SEQ ID NO: 44770 - DNA, 1543 bp, Zea Mays
aatttggtaatcctcactacaatttggtaaagcactaaaggaggtggctcgcgtgcagacatgaaccacgattctagcacctggcatgttacttaaacaaatatgctaaaaggttcctttagttgccattccgcctataatgtaatccaccactcatttctcctttgggggatctcttttaacattgtttccgtacatctggcattagaaatatcgaagggcggacctgatgtagcggtaagagctgtctcagccaccaggttccagacccaattacccactgtaaataaactcttgcgttatccatagcagcaactagcaacctgtaaagctgtcactgtccatcggctaatttatccatctattgatccacaggctttactcaggtgggtgccagcactctcagtgactgaatcctaacggcagtatccaaatccaacggtgagctcatatggcatcatggatttgtatgttccaaatgctgcttatgcctttcaagctttcagatcatgcatgcacatgtgtggagcagaaaccggtttgctggcatttgtgcgcataacatggttgcaacttgcaaacggaggtttgtcgcatccacttatatcaattccaggttaattatcccgttcagagagggagggaaaacgtaatgcttttgtgaaacttcctcgtgctttctggcgcagttgtgcatgccagcttctgaaaaggtgttagctcagtccatgtaagtgagtcaattctagttggctactatttttcttataaccgtgaaagaatttaggtgctgctgatgcagaatgaaaaaaaaactccctactcttagaatcctaaagtgtagtgagcttaatgctgaattagatttgagtaatgcagacggtacgattctccattagttaggagaaaggtgccaccagcatatatggtccaaaaagattgggacccaaccccactgaattagccaagttggttcagtttgaaaacgagtttagttcaaatatcaccaagaacatagttgataaaaaaatcccttcatagagttgatcgactaggaccatttagatccggtgttgtagacacaagaagaactggctgtcattttccacttcgatgctagcatatacaaaacttaagtttaaaggggagaaaaaaaaaaagacagtcagccaaactgcagaataggcagacactgaggctctatcgaccgagtctatcctaatccatcagaacgctcacgatgtcttaatctttaagatcctaatgacatggtcgcgggatcggaaaggctaaagcggagattctacgtctctgggatagcaatgcagaatcggctctggcgcactggcctcaggcaaataaatgcagtctccgtccgcacgcagtgaggcggacagcagatgcatctaggggactttagcgccttttagcggtgtgattttggacctgggacagaatatggttggggagagaatatgagtatcacgtggattaatatggttgcggagagaatatgagtatcatttagattatgtagatcatg

SEQ ID NO: 44771 - DNA, 388 bp, Zea Mays
tgggctacggctttaatgtgatcacatcccaccttctccaagatggctaaaattccccacgcaccgaaaaacgcgcaaacatccccgcgatcactcaaaatttcttcgaaggtttcggcttctccacttatccattcaacaacgccttcggggttgcctcgtatgatgttttcttcagcagagtaggcacccactttggtgaagctagcttttattttcttcacgcaatccaaggatttctcaaaacacctttccttggatgtgtgaagttcttcaacatttttctctagatgatttttccaatattcactaatttcttggttagcttgtgcgagtgcgcagttttccttagcttcggccagttgtctccgaaggtcttcaatttcag

SEQ ID NO: 44772 - DNA, 1194 bp, Zea Mays
aggttgtattgctcttcgttcgggggtttacaagtgattgctaaaggtaggagatgaaggtggtcatttgatctagcgaggtctaacccttttgtaggagtacctcctcagccttatatagccaattgaagaaatctctgtctacatatcatagcacttacatgggtctatccaccacctgctacaagtgtgttgaatcttctagtcgcatgttagcctcccccaaaaaatcgcgcctatctgcatccgcagaccgagtcatgcaacatttagttagccttattgctcccatgcgtgggaatttaagccagctttagttacctcctaccgaggcccatgatgtgtcctttagggccctattggggcctttcaggcagcccatgaagcgagttcgtgtcctaatggcctgggggatatctatcccccacaagcctccaaggctcaagccaattttggtataattggcccgagactcttgaaaatgaacttggggttgtcaaaatattttcgatgaggggatgctcaggaatttcacctatgggcccgaatcctagtgagcatgtcttggacctctttgacatggcttatggcatcgaacccggacatgcacagggacgcgtacaggacttccacatgtcccaacaggggaggtgctctgaagatgcatccgtagatctggacctcatcgatggtactgatgatgtcagacctggactcgtccagggacgggtctagggccggcacgtgtcctggagtgggaggtgcaaaggagttgcattgatgggactgatgacatcagactcggtcccacacaaggtcaggtctggggccgccacatgtccaagagggtgaggcgcttgagagctgcgcccctgggtctagaccccatcgatgggactgatgatgttggacccaatcctgtatagggtcaggtctggggccgccacgtgacccggagggggaggcgcttgggagctgtgctagtgattgttgacccctatttgtgttgtttctaaacttcttgacttctggacctcctgcgagtggggcctaggtcttcggttcctgctgtaattttgatctattgggtgggtgtagcccctcagattcgagccaaattgggtagcaatcgactcgaagatcccagaaaacctcactttggtgcattcatcttgttgacttgacacttagttg

SEQ ID NO: 44773 - DNA, 593 bp, Zea Mays
aacgagtacgagggacactcgactgattggtaggagcgggggcagtagtgggacgaataaagacaggctacttgaatggatatgaaggtgggtgaggcaaagaacgattttgattaaagagtcggatcaccaacctggttctcttctcaggtccttgatatgacctttcacctccaaacccctttgattttccatgtcctgcatttttggcttccacaaccagtgctgtactgatagccatactgtaggtgaggtccaagcatgttgccattttctgctgaagcctgtcattgagccccctcataaaacaattcttttctttaagtcggtatccacctggtcaatggaatactaagagaggtggttgaatttgttgagatactgcatcatcgtatctcctccctgcctcaaccagataaactcttctagcttcatctggattactccctctacaacataatgctcttggaatgccaacttgaactcatcctaggtaatctgatgtccaacaggctggattgctgagaaatttgcccaccaggtaccggcaggccctcttagctgttgtgcggcgaacaaggcttttgcgtctc

SEQ ID NO: 44774 - DNA, 536 bp, Zea Mays
cgcattcaaacgaagctccagctctgtgcctgcttcgtcagaagtagagcttcggaagaaaggttattaatttccaagaaatttttaagaaattcaaaatcaaatggccagagtgcgctctattgctagagttgagcgcgaaggagacgaagccgaagctgctgaaactgttctgatttctgaagcgatgaggcgttctgggctggctccatcagaagacacacctgctgccgaagcaacgcaatctgatgttgaagaagttggttccgaagatgagtacagcttcgggatgccaagcaaacctagtcatttggactttggaaagtccaccatctctgaagctgatcttccaaaaatggtgaagctgggctactttagcgaagcaaaaaagaagctggttcgttttggcggagaggaaactactccgaagccggaaaagaatgaggtggtagtgtttaaaaccttcttcaaagcaggattaagatttcctttgaatgggatgattgctgatgttttgaagaaatttggggtttatc

SEQ ID NO: 44775 - DNA, 756 bp, Zea Mays
acaacaacacgtcgtcatacagaccatagcagaacgacatcgtcgagcagcggaacctgactaatgtcatagtggtgcgtagcctactgaagagttgaaacatgcctacgatgttctagggtggggcggtcaccaccatcgtcttcctgttgaactagacgtataccaaggccatcaacttgtatgagacctgccacagacataagctagatatccatttcatgtgcacattcggatgcatcgtgtatgtcaaggcgacggagccgcacctaaaaaagcttgacaaccatgacactccagttatcttcctttcccataagccgtgaaccaaggcatcacgaatctacaacctagcgacacatcacgctgttgtgtctagggacatggttttcgacgagctgatgttctagagttggaaggatgggaacagggacatataggacaacacatatattatcatggagtaccattcgatggagctaaatatcgggcgtgtcgacaccgacaccactatgggatcatcacagctcttgatgacatcaacctctataacaagctccaacacttgcaaggaaggcacactcgtgatgtctatcacaaaactaaaccttgttcctatgactccaacacgtacatcaactgctcctctgttttcatttaccagaatcaactccattgcttttagccatagttcgtctcaccgcctccaaacgtataaggaaacagagatgctggcaacgacgatgtcatgacgat

SEQ ID NO: 44776 - DNA, 459 bp, Zea Mays
ggattaatatcatatccacatttgacttattggtatttgatctattcttggagacgcctgcgaatatgatccattagccttagtcaaagcatatgttctgattgcagattcacgtggtctataaataactctcctccgatgaactcaccctgctggtgatttgcctcacgaagaggttcatcttgatgatggaattcctagcaatgcgcgcaatatcattgtgctaggaatacagaacaatgaatttttcattttgggaatcggagatcattattaaatgtgagagacaaatatgtcgacacctatcttgcccctctagattgcaaatggatccaaaacaaagtcctaggcatgagtgctttaagctctcttatcgggtcattgataaatgcaatcgaggttgaaccaataatcgcaaaatgaaagtcgcgagcttgaagttcggacatttatgggcac

SEQ ID NO: 44777 - DNA, 446 bp, Zea Mays
atcagttatcctgggcagaattgtcaacacaacagctacagctacatgtgtactttgataacgtcgtgatctcaagggtagggtagagcgcgcgacgaccaccacaattcgacgagaattacgcaccgcagaaaaaagagagtgatcgaaatactagtgatgaactgaaccgggaacaaaaaggaaaggtgccttttctccattctggattggttccggcctgtcacattaagatttattggcttctggctgttgtactctgacaacgacatgaaacagtctggtgctactggtatatgcaaaagcatgatagctacccctgctgcttcacggtttttttcttgtttttttttctctctgtttttttttcttgtgtgtgtgcctgtgtggtgttgggggttcagaaaatgctaagctactagtactaattactgacgtacgattac

SEQ ID NO: 44778 - DNA, 634 bp, Zea Mays
ttaaaggatggcgtcttgagtggttcatcgtggaaaatcattgcaaatctctcccctcggtcagggaggcaaccagatgttcgtaccccagctaggtagagtctcccaccttttcagagataaccgaggccaaagtgctacttgttgagatctgcttgctaaaggataggggtctgactgctgaagctgtggttgctgactttgtcttcaagaacattcaacccttgaagtaaatataccagcatcagtgattccacccaggtcacaaatagaaagattcccaatgaggatttgctgagccgattggatatgattctgagaggaagggtttcaaatgtaggtgctcatttagcttactctgcgtggaacctgcctcccaataggccattctctaaattttcctccaaccctcctgctcgtgaaggtagcttgggccatagagcgtgaccctcccccgaggacattgaggccttgattgctccactttggagtcttcccgaggctgagaggaaaactcattttgagatgctatctagcaccgatgatgctaagatggacgccatgcttagtctgctggccgaggaatcgtctgaatctacccggaccgagccgatggccatcacgactggacaag

SEQ ID NO: 44779 - DNA, 674 bp, Zea Mays
gagaaacgccttgccaacatttgttcaggcgatgagtaagaccttcggggacctgatccgagacaaggtggagatctacgtcgatgacatcatggtcaagactagggagggatcgactatagtggaagacccgaccctggttttcagcaagctgcgggcaacccgcaccaagctaaacccagagaaatgcatcttcggtgtctccgcagggaagttgctggggttcctggtttcatactgggggcattgaagctaacccagagaaaatcaaggctattgaggtaatgaggcctcccgcccatattaaggacatccagaagcttacggggtcactagcagcccttagccgcttcatttcgaggttggctgagagggcgctgccctttttcaagctcctgtggaaatcaagcccgtttgcctggattgaagaggtggaacaagccttcagagaattgaagcagcacctagcttccctgccaatcctggttgctccggagccaggggaaccactatacttgtacattgcggcagctgcagaagcaataagcatggtgttagtcgccgaaagggcggcacaagaagggcagaaacctggaaacttaggaccagctacagagacccggactgtccagaagccggtctactacgtcagcgaggtcctccatgaagcaaag

SEQ ID NO: 44780 - DNA, 334 bp, Zea Mays
ttgatttgtaagtatgatatcttccctttaatgaagaaatgaagttagcttctctgtgatgattgctcttcgatattcataactcaaaagttcttgaatcatttatcttcccgcctttttcgtgaagttgatttccttggaatagtaagtgaataactcgggcatcatatcgatgcttttaggggtagctgtcgagtgacttgaagacgatgtcggcgttttagaggtaacgccgagcgactggagggcaacatcagcgttttagaggtaacgccgagcgactggagggcgacatcagcgttttagaggtaacgccgagcgacttgaaggcgat

SEQ ID NO: 44781 - DNA, 1022 bp, Zea Mays
ggcccaattttattttttgtcattttgcatggttctttccctttgtgtcgctagctacgtttgttgggagcctaggagtatgacagactaagagctttaaaaacaagatcaaaattcaaaaagatgcatggttgcaaattgcattaagtgtttgaagttatcacagggtacaaagcttaaactaaaaagcaaaagccctaaattaatctaaaaaactaaagtaatagtcgtcgtcctcctccttgctgtcctccttcaccaaagacgacgacaactaggcatccttgtcttcgtggaggaggactctagcgatctttcgaaatatcttccggtcctccttactgatgtagtcctcctcctcctttggcgttggggctcctcctccttcttgggcgtcgagggttccatgtccttcttgggcgacgggcggcgcacgttgtcgccgttgtcctcggctgtcatatcctcctagctgctcgccaccgacatttggcgctggtgttggtggttggtccacgccgatggtcgtcatctgatcgggggatggctctacgcatgcgcgtaatctgtgtgctgcctcatcgtcatagactgcgtgtttacggttacctgctggaccttggctactagttcgggtctgggtgatgattggtttcatggatggttgagggtctaggtgatgatcaattttcgatgtattgaacccaacatcgattcagcataccctactctcttataggagtactagatgcatgggcgtgaaaatggagcaaaagaggtagctgttggggttgggaaagtcagacctgtttctttgacatatgctcagtgttggatatgctccgaacgcgggattgcttgaatttgaagtggaaggttcagaatcggtgaactgaacatgatgttacagacccacttgtcactgaagctgaactactatcagatgattaataatgaaactttccctaagatcacacgtctaacagtctttttcatgaaaaccgatcagctacatctcttac

SEQ ID NO: 44782 - DNA, 519 bp, Zea Mays
atggttttatccgaggccatctgctagaggggagaaaggattactactatgcatatgccatatattttgttttctcaaacatgttgttttatttagcactccagttcattacaagcatacaaccaccacatattacactacacacgagcattgtctaaggtgtccataaaatccctgataagatcatcaaggctagccagggacacttcctcgatgtcggaaaagctccctattcctaaggagggtagtgtttgtggggtttcttctctcgggttggtctggcatccctggctcttgaaatgcttttggatcttctttgcaggggcgagcttcttcagcctcctagcatagtccatcttcagggtctggtatgcctcacgagtgttggcttcttcgccttctgccatctcgagattgtcttgaagggtcgccttttcttccttcaattccttgatttgctgctctagactttccacccgagagttcaggtgggtgtagtgggagaaaaggtcgtcaaag

SEQ ID NO: 44783 - DNA, 977 bp, Zea Mays
cgaagatgtgttcgagcccctgtagccggtatggtctttgtacttgttgttgacttgagtcgggaggatgatgtctaatccctgtatttgcatgtttgactaagcaaagggttgaggccagggtctagggctcggtcgcatacccgagcttgtctggtgaacgtgttgtcctagtcatagtggttgaaacagtgataagaatggcaaaaagctcttggcagtccgtaaagtatcctgacgtcagctctgtacttctggtgacgtcgagtgtccttttgtcgatgctatcaaggttgaagccacgctcgggtgagatggaagtcctcccgaggccatggtcgagcctgctctagggcatgtagtcgtgtagggaacagttgaaggagtggcctcattcgggattcgcagggagttgttgctggggcagttggctgaggccgatctcgggcgatccagagttttctacgaggctgacactgactttaggcgaggcggagttccctcccgagggagagaccgtgttctgtcgtatgcacatcccgtctggagttgcttgagtacaacagacgacgtgttcttgcatcgatgcatggcatcacgctccactcgttcccgctcatgctcatgggtgtggcgacgatcgcggcattgggaattgtggcgctcgcggagcgccctatcgtaaggagtcgctcccgtcttggatacctggtcccaagatacggggtgcgctggtcccattctccatcctcatgatgacatcaaacgttacggtgtctgtttcggcgttggcgtgccttgcgctgtggtgctcctcccccggtacagtggacccatcattggatatgggcgtgtcatccactcttccttgcataaagaggatatccgggaagaaagagctcgggggcgcgtcccgtgctccggcaatctcccttgcgggtggagcggctggtatagccgtcagtcttgttcctgcg

SEQ ID NO: 44784 - DNA, 662 bp, Zea Mays
aagattagtgcgtgacttgatcccatccttggtctttgtcttgatgtctagcagtgtgctgataatgctttcaaatacattcttctccagatgcatgcagtcgattgcgtgggggcgcatgtagctccttccagtatgacaagtgtttgaaaaaagatcaattattttttaaaaggaacgaatatggatggtttctccatttcatacaactttctcttgttcccttttgtggtcccatcattcttcttcttctttctaaactaaacctcatccatgcccttcaccatctcaaacaccttttccccatactacgtcttctccagttcctcaagttgtggctcgtcatttttctctaattacctattcatcatagctcttcggtacctatgccctttcatgaggaatcatctatgcctcatgtacacagtcttccaagattgcttgagataagtgtagcaagtattgtcaaaacaaactatgcagctgggtttccctttgatctgccgtaacaacaagaaaagaccagagtagtcaatgatggttacaaagatgatgactttagggtgaacgacttttttgtggatgcatccatcatctcgaccccattttcccatagtgtttgcatgtccgtcatgaatggctccatgaacacatattattac

SEQ ID NO: 44785 - DNA, 456 bp, Zea Mays
gatctctaggcctctgacctacttagtaaaaggtcatagggtgagaaaatggtgcaacaacaggtttagtaaattgcgaaggatactagtatgagtcatttactcaggaaaagtgttaggaaaaacaccagacatcctaggtcccatttgaggatagtgatcatcacaaaagggaaaacatggtccactagacctataggactttaaaaaactcctacgagatccatggtcatattgcccagaaccctgttaagcacgaccattgtgtggtcttgtagcctaaggactagcaccttgagacattgcacctcttggcctaacaactcgcctctaaataggcaatcatgtatatcattgggaggatggtagatgttctatttgttcacctaaaatttgtgtcactcatcactcttctctaaaatagaactcagtgaggtgatcattcctatggcaaca

SEQ ID NO: 44786 - DNA, 581 bp, Zea Mays
cgccgatgaccgtcgcgctgtgattcacgtcgatcgccgggattcgtgcattgtggattagggataatggtgggcgggtaaagatcttggcgtctggattaacttgagtccggccgcggctaagctcgccgtacccctttgccttgcggcggcgcggataagctcaccggcgacggctgcctactgatcctgcgccgtgtgtacaggcactttaccacatcgccgtagctcggcttgcgataattactcactgccggtgaggtcgccacgacggaggacacgaatccactgcgttagtaatctcccctctctccggccgccagcactgctcggccaaattgagcaccaccacgtaagccctctataaattgatggtcgggtcagctgcgctatgtcatcacgaaaccaaagcacccgctcccaccctcaatcattcgccagagctcacgaatttctagttttccccaaatcggttcatcccaccgcaagaacatcctcgtcgtggccagtacaattgaggtcagttcaaaccttctgctcccttgtttgggtgatctcacatacctgtgatactcatcgac

SEQ ID NO: 44787 - DNA, 601 bp, Zea Mays
gccccatctgcccacagttgtagcaaggtcccttcacttgagctataccacccactgaactttcctttctagcttttgcacgcggtagggccaccttgaacgccttcagacccctaaatacttgttgttgattcttcttcgaaggagggggataaaatcttgctccgggtatcattggcctgaaatttggtcgagtcacaatggtggtttgaggttgtgacattcttgattccaaaggcctttttcgcccctttgctaatgcgtagaggttgttgttgttctcttgagtcaagcagtcactgacgaaatgattgaaggaagtgagggaggaaattcccatactttttatcatcttcgaactcaatcctctctaaactagtgatctttttggtctcggtgttcacatagtcaggcgcatagcgtgacagattgttgaaagcatgaagatattctgtcactgattgtgtgccctgagtgaacctcatgaattcggacaccttcattgccaataagcctagtggtatccagttccctctgaaagttgtggtgaattggtgccacgcaatgggagcattttcagggtaagcggtgcggaaatgag

SEQ ID NO: 44788 - DNA, 526 bp, Zea Mays
tttctatttaaacatgtaggcacatcacatactagacaacacaaatcttgccatccacattggcacgagttttttcaacccttacatccagtttttgtcaacgtgcaatcacataataatgaccatatagtgcatgtttagtatgcttccttgaggctagattactcagcggatacaattattttcatgtgttaaatcattatagagtaagtcaaggtgtaggagagggcctttagccagatatgagattctagccaacatattctaccatggaatttaaaacaataagaaaaatattccctttcttcaatattttcaaaccaggtaagtcacgggtcgtggatgagagataggttatgcatagccaataagtataacatgttgtattgtaacttttcatttccatttcagttagcaaaatgtatacaggacttctcaaattctaccatccaccatatcacgcgggtcactaactctatggtcaccatttttctttcaacatgtaggcacattgcatactagaaac

SEQ ID NO: 44789 - DNA, 352 bp, Zea Mays
gtactatatgactgggaataagtgtaacgtcttcatggatcataagggtttgaagtatatattcacacaaaaatatctcaacttaaggcaacaaagatggcttgagttgatcaacgactacgatttggatcttcggtaccatccaggtaaagcaaatgttgtggttgatgcattaagctataaaagtcaggccgacatggttatcgctcacttggtacccaaagagttatgtcgggagatggaacgacttaaccttggtatgatcgcccacacagaagccacaattattgaagtagaatcaactttgaacaagaaatccgcaaaggtcgggaatcaaatgaaaagattaaag

SEQ ID NO: 44790 - DNA, 272 bp, Zea Mays
ttctgaaggatttctagtgaagagttaagatcgcctgatagagtgatagttggttcttagctctaactgacatctagaaagaagaacatctttcccccactttttatgtcgattaatccaagatccgactgtcgactggttaattaaattatcgtaatattagttattagacgagtgaggttgttgggtggaatacttgggctctcggatactgggattgctaagacaagtgtgttcgtagctatccatttggtctcttgtttgtttattgg

SEQ ID NO: 44791 - DNA, 531 bp, Zea Mays
atgagactgaaacgactaagacaactcctatcttagaaatgacgaggcgctttgggctggttgtgcatgaagaaactattgccgaaggtacttctaatgtcgaagctgaacaggccgtagctgaagctgaaagtgataatgaaagtgaggatggcgatagcattcaatctgactaagcctagtcatgttgaatttggaagatccacagttaaagctgaagatctagttctaatgaagaagctaggatactttggagaaaatgatgatgaactggttcgctttgctggaaaggagacaattctagagccaaaagaagatgaagttgtagccttcaagagcttcttctgggcagaacttcggttcccccttttatgagatgataggtgaagttttgaaaaagtttgagatctacctacatcagctaaccctgaacgccattgtcaggctcagcgtgtacatctgggctcttcgaagccaaggaaagagtgccaacgccgaagggttcttccgggtgcatgaacttcattatca

SEQ ID NO: 44792 - DNA, 1213 bp, Zea Mays
ctcacaacatgttccaagatcatttgtctgttggtgtgcatccttttgttcatcagttgtttcatttctagtgacgtttcgacttgccaacacttgctggtatgaggaggtgagttgcgatacattgtgtattacaagagcttgtgcatgtaacagcttttctaagtcaactatcgagggtgatgttggggttgatgtcatatggttatcggtagtctgctcatgtgctataaattctgctaaatcaacttgttggagtctagctaccacttgagatgttgcttgtagaaactgagcatgcgccttcctgaactgttccatctgatccttagctggaggagttgccaacacaatgtattctttgcacttagtgacatcacttgtagttgacattccaaggtctgacatctgtatgggtatggaagaatggaagggatgaaagggttgagcaaagacgaattatagagagcagagaaaacccatctatctaaggtttttcctagctaacttatgtcattgtggacaaaagtcacacaaaaccacaacaatcattacaaagaagcaaatcaaacatagtcacaaatataactaacatgaactcaaacatatcagcacaacacaatccaattctactcattcaaccaaaacaaaaggtgagacaaggtttggaataagaaagatattataaagtcaaggagtcaggtaagaattatcaaggagttagacaagacatatatgtcggtggccaatagtgaaataaaataatcatgaactattaaagttaggataaatgatacaaccaaggatataaagtgagttagggagaaagcattatcaaggagtagagagccaaaggtttcatacatcaagatagatattgcgcaagggtggcaatataatggcacgaaagcaaaagtataagaattcaatagggagaaaacattatcaaggagagaagtagagagacaaagggttcaatatatcaaggtaaatattgtccaaggatgacaatacaatggcaagaaaacaagagtagaagaaatcaagagttatataacaatattatggattagaaaacaactaccatataacatcgtccttaccgatctagtcgaaaacttagcactatagaactatcctatcaacctaaccaagaagaatggtaatagatccaagagatctataacgaaacttcttgtggggcggggataag

SEQ ID NO: 44793 - DNA, 1498 bp, Zea Mays
aaaatatgtaaaaaaatactcttgtaaagaattgaattgaacaagacgccaaaggttccagttaaattgtgtcttccattaggttgcatttgtttttgcctgaacgacccgttccagacctcattctaggcagaaccaatcagcctggtttagaatctgatgtagcttgctagagctgttcgtttgtcttgggccagaaacaaagctaactggttttaactcctctgcctcaattcttagcccagaatgaacttaggtgaccaactatccggattaattcctatgctgaaagtgggctgccgacctagaataagtgatagtctaggatccactcaatcttgggctggtttggttcctggcttggcttcaaccctggcctgccgaacacagccggcaattcgacaaacacatgtcaagtatccctcgtcctctttgctcctcatttttcgtctagctctccactcacgaatataggcggcagttagttagggtttgcccatctgccatccgtccatccgcctgactcctttccaccatctccgaccatcctttcctccatctctggccaacgactttgaccatctccggcggcttcttcttctccggccggcggctggacgcaggtgctagaccaggtgacgaccagtttctgctaccacacgacgttgttcttgttgcctagaacaagacccctgttgctgcttccacacaacgtcgtcctcgctgcaagaagacatcgttcgtgctaaaagatgttgttcctgctgcatgaacaagacgcctcttcgactgttcctgctgccaaacaacacccggttcaggtaaaacaaaattggagttctaaatttattcccctaatactttcaaaactagatacgttagtttattcccctaatgattgaacctataatattaaatcccccataatttggatggtgttaatttactttggcttgcataactgttagattaatatggctatgtgtttgtgcatttttccaatatattagtctacaaatagtagatgaatcaaggagagaagaaaataaaagaaagcaagtgttggataggatatcacctagatgagtagttcgtgttattttaacatctatttagttagtttaagttgaaagaggatataactctgacaacattagcaactattgcagatttgtttattctgagttctatgcattttttactcatttattttcatagctagcattgtctcggtgaacatagataatagactaatgttattcggtttaagcaaataccttcatcatcgttcagtgcaatttatccatatgccattgcttggttatacccgtaagtttgatcagatttgtttcagataaaaaagtgaagcaatttgttgatattgatagtttgatctctgctctgacaatcagtcctgcttgtattgtcacaaacaaagtagtaaaattgagtttggcttgtttgctcttgctaggtgcagaacaagagtatggaaaat

SEQ ID NO: 44794 - DNA, 499 bp, Zea Mays
ttaatccacttttaaataaattaaatttatttaatagacactaattacatgttaatttgtcattaggaaagactaatggttgcaccggcagagcctggctctggagaaacggtcaattcctacgtatctcgagtgtcaggcccaagaggaatctttgcatcctgcgagccaggctgaagaggttgatcagacaaccaaacagaagaaagttgtatctcatgagcctggccagaccatatgcaggtaaccaaacgcacccgttgttcccttcaatattccacccaccacctgcggaaagctgaggctttgctcacagtttccggtgctaaaacgaagataaaaccatcattaaccgcattattctatgcgtagagatgggcccgcccctaagataagaataccgtgacacgccgccgctacacaccctgacacccgatctgactgccgtttgaccgggctcccgacacggcgctctcagcgcatgtctggtagagcgaca

SEQ ID NO: 44795 - DNA, 418 bp, Zea Mays
ctaaaaataaatgttgatggttcttatcggaaggatgcaatcttggaggttggagttttgtggttaggaataatcaaggggaaggtatagctgctgtagcaggtttcatagctgcagttgctagcccctttgaagcgattgcatgtttaaaagctctgaattttgcctcaaacaaggtatgatgactctgaagattgaaacagactgtaagtgtcttcggattgcatgtttaaaagctctgaattttgcctcaaacaaggtatgatgactctgaagattgaaacagactgtaagtgtcttcgagatgccctcacatcgaatgggatgattcgcatgatggagtgattattagggagcttaagttcctgattttgtcatgtttcaatgatgttaaggtgttgtttgcgcctagaatgtg

SEQ ID NO: 44796 - DNA, 491 bp, Zea Mays
ggaaatcttgtcgttgatacggtagttaacctacttgtttaatcatcattaccgcagttgccacaaaatcccattcagatgaatctgaaacctgcgcagtcatctttccattaatcaatctaatgctctgggaccatgtttctctgttctgtatctatatgtagcaaatgaatacctagctctcaggatacttacagtatcccgtggtctttaagctaagaactaacaagtccttgctactgagctacatggaacacttttttgttaagcatattatagacacatcatgcatatatttgtctctatctttgatgtgtttcacaaaccgaagctacagtaacccctttggcttattaccctcggttaagaactaatgtttcgcaagttgattctcctctaggtgtatacttcattttattgactggctgtctaagtaataaactgttgttaggcccgtaccagctatttttttgccccttctttgcataggc

SEQ ID NO: 44797 - DNA, 756 bp, Zea Mays
ggcgtggatggtgatgatgccttgagtcccgagcatcttcagtatcatgtatgggcaagtttgggactcaccggatagtcacccgagatggcctcaggcgagtcgggactacgcttgggtgactcatgactgcgctcgggcgagtcgtgactgcactcaggcgaactatgactgtgtctccccccgaggttggcctcggtaaaatcgaaaccatgtctccctctgaggttggcctcaggcaaatcgataccgcatctccctccgaggttggcttcgggcgaatcagaactgtgtctccaatggtactcaagtttgatatctgaatcacttggaaggggtcgagtgcaaccttcatccattaggacaccacaacctggaggtaggccttggccgaaccatgggataaatcgtcgtgtctcattgtctacttactttcattgcaatttcgttcttcctagacctccacttcactttcaacatttctctagtttcaatacacatctagtgagagcaattaagtgaagaaatccttcttctattcttaattgaacttggttttagatttcactaatcccatttatagaccaagcatgttgtttctagttaagcatttgcatgatcacccattcacctcccccctctaggtgctctcgagcacttcatagttactctttctagcaatcttctccttcttggacttcaacttattattgaattagattaatactagagagtttatgcgttgtaagcctattc

SEQ ID NO: 44798 - DNA, 299 bp, Zea Mays
tgcagaaaatgttttaggtaattggagttgatatgccactggtccacattgcttaagaataggaaaagaaccaatgtaccgaggtgcaagcttcccttttactccaaaacgtgatacacccttcattggtgagactttcaggtagacataatcttcaccttgaaagtacaagggtttgcgtcgcttgtctgcataactcttttggcgagcttgggcttctttcaaattatgtattattcattgaaccttctcttctgtttcttttaccatatcaggcctgaaaaaccatctttcacctg

SEQ ID NO: 44799 - DNA, 347 bp, Zea Mays
gtgaagattatttcaacctctaccgggtccctgattttttgaagtccactgtggcgtctctcgattttgaaggtactgcagcacgatggttacaggtggtcaggttgaagcaagggttgggtgattggaggaatttgtttaggctggtattagacaaatttggagccgagaaatacccaagagcgatgaggaaattattgaatataagacaaaaggggggagtagaagaatatgtgaaggagtttgaagaagcaagatatgctactgttgttcataatcctatgatggatgaaacattttatgtcagtcagtttgtcaaaggactgaagaatgaaattcagtatcca

SEQ ID NO: 44800 - DNA, 431 bp, Zea Mays
ctaaaaccagactagatagcttatgactttcttcagaccagattactgattacctatgcagtactttattttggagatctaggcagctatgctacaaccctttaggcaatgtggtgactgactgaatgaagcgatgcctggtggcatacatgattcgtgtcaagataaccagtaggcgcctcttggttgctggtgaatcatgcttccttagtttcttgagagagcaacaattaggagtcttagataggggtagtggaaagctattgcagtagaggccctacgttatttcatcattcatgtctctcagtcttagaagatctggtgtcaggctgttgtatcttattctgtcttgcacaacacgcaagcatgtcgtggtgatctgtcctccgcccctctgctagttagtgattttgtatttttcttttactctt

SEQ ID NO: 44801 - DNA, 412 bp, Zea Mays
gtccaacggagttgtggaacgtgcaaatggcaaaattttcacagctatcaagaagatgctcctcgacgagaaaaagggcaagtgggccgatttgttacctgaagcggtctgggcgctaaacacgactgagtgcagggcaactgggttcacccctttccgcctcctatatggatcggaggccatgaccccgcaagaaataaaacatgggtccccacggacagtctcgtcagctgtccccgacgtggacgaacccacttcgaaggacctcatcgatggagaccgcgtcttcgccctacaggctctaaataaataccaagcccaaacaaaagcatggcgcgaccacgcagtcatcccaagggaattcagcgaaggggacctcatactcgtccgaacagctcggacagagtccagg

SEQ ID NO: 44802 - DNA, 376 bp, Zea Mays
ctgctctctgccatccgtagagggtagcacatatgctccgggaatacccgcagaagaggaagctcccagagtgaagttaacagaagaaccccactgagtcgtcggatgaggcagacacggagctccaaactgagatggtgttggagtagccggtgcaggagtaagcgcagccagatactgaggaaacccctgcataagcacgaactgaggagtcccgggcacgtagaactgctgcagaggggtggtactaaaaattgctgctccgcacttgacatcatgttgatagtaccctgagaagaggaagaagtcactggctcccatctgagctttccattgggattcctcctacacaccacatccttgtggtcttggctgc

SEQ ID NO: 44803 - DNA, 397 bp, Zea Mays
caaaaggcacgtactctctagcgacaagttcgccggggaggatggcgccggcgcgaatcctttcgccgagcgccggcacatcccatccaagtaggcggcacaccatgtcgagcacccactcagtctgggcatgctcgagatagacttacaaggccatggtaaactatggcgacacaaagcagaaaccttgaaggcaaaggggcatagagagctcgaaggcgaaagggcaccgcgagtgggagagaagcaaggcatggctgctactcgagggatgaacccctttttaaaggcagattaccccgctcgcgccccaaagcgtcacgggcaaggtctcccccgatgtgcaccagggttcccatcctatgacacgggggccaggcctcacatgtcatacaag

SEQ ID NO: 44804 - DNA, 663 bp, Zea Mays
gtggagacaagggtctagagtgatcacggacatagtgaacaagggcctcactgttagccacaatcctaggaccaagcttcattccgtcgctctcgacaccacgccgaccacgtcgacagagttgcaccccaacccagcagcacgagctagcttgcgaatgacgtggacatgaagaagcacctcagtgcggggagaggacaacgttgtcgcgaacgaccttctggacctttggggagcaggagtgcagggcgtcgattatagctttgcgttcaaaggcctttgaagcagcacgagtgaagttgtttgcgttttgggcaacaaggcaattgcttttgcgacttgcgagagggacaatgatttttcccggcacagagatggattgcacgcacgagcgagtgctgggcctggttctgggcatcagaggtttggccacttggtagaggggacgacatggggtggggtggggaagtctagcgagacagtgtacatgtcacagggttgtttcgaggcgttggcaggagcgggctgcacgagagtggtttgcatgacttgcatgggggtagatgcgacttcgtggtgaatatagtttcaatagttgatgattaaggacatcgatgccaaggtcaaatatggatttgtggtagacattactgttaacaacaa

SEQ ID NO: 44805 - DNA, 1034 bp, Zea Mays
gtaatcaaaaaacaatgcatccatgacacggttcaatcttcacttctctcgggtgccgaaggcagcaatcatcaactagtcctccttcttcatataattaccaagaatttcattgcacatcatttcaaccatctccagccattcggtgcaaggaccattgaaggtgtcctggaacttgaatcggtatggcaacctcacaagttcaaatttgttcgcttcacccttgaacttcgacattccccatccactcagtgttggaaaacccctattggcaagatattcttgtaccaggtcccgagtactgatttgctcaacgacaactctaaaatgcacttcagccagttgggacggggagcctattttcataaagcacaaagtccttgttatatcgaagcttaacttcatagggtcaacattatactcttaaccttctctctacccttgtcatcagccttcatgtagaaccacttgttggttcagccagtaagctattttgtaagtaacccatgcactggagccttcgtatccttcctgtatgtaaagttgtagcacccgaagttcttgtgaaaaccatctgctctggcctttgtctgttaatgcagctcgtgaactctacagaaaccttcgaaatttgcgctcatgccttggcttcgaagggcccaaatatagacactaagtctgactattgcattcggcatcatgtggtgaatatatatctcaaactttttcaacactttagcaatcatttcatgcatgggaaaactgaagccctgcacggaagaaactcttgaataccatgacttcgtcgtccttcggttctggaataacttcatcaccagcaaacctaaccaagttatcatcattctttccaacataccaagtttcttcattaagtccaaatcgtcagattttacaatagatctgcaaatttgatatggttgggtttgcttggactcagaacactggcatcaccttcagcatcatccccatcggtctcaccttcggcatcagaattacttttctctagaacgtgc

SEQ ID NO: 44806 - DNA, 532 bp, Zea Mays
gataattcttggacacccggggaataaaatgggcgtgtacatggagtctttgattgatgaattggtccatgcttgggaggaaggggtatggacgtacgaccgagctacgaagacaaacttcaaaatgcatgtttggtaccaatactccatgcatgactttccggcgtatgggctattttgcgcctggtgtgttcacggtaagttcccatgcccagtttgcaaggaagctcttaggttcatttgattgaagaagggtgtcaaatattcgtcattcgataaacatcgacaatttctccctcctgaccatgcattccgactagacatcaagaactttacgaaaggtgtcgtggtgacagaccgcccacctgcaatgatgactggtgtcgaagttcgccaacagatagatggtctcgtggccaacccagaaggtggttttgtgggatatggtgagcaacatatgtggacacataagtcaggcttgactcggctcccctattatgatgacctgctccttccacacaacattgacgtg

SEQ ID NO: 44807 - DNA, 1014 bp, Zea Mays
gtcgtctcatgtatctagaaaactgttttccaaaggctctaagttgcacatgtcctaatgacaatcgtaatcaatagtcataaaaccaaataaggaaggtggtttaggagtgcttcaccagggctaaaaaaatgtggctcttctgattaagaatctccacaagttcttcaacagggctcatataccttgggttcatctcgctggggagaaatattataaaaacaataaattaccatgtcatatcaagagggggtccttctggtgatggaaagactattttgaagcttctggaaaaaaaatcaaaggtactagtacgcgtttacgcctgtcacagatggtccttcatgtcttcttttgggataactgctagcaagaatagccgccgaagctcagtcctaagaagccaagcagatcgtgcaataatgtgcacgtatggccgtgcagatggcattgtaatagagagtttgaaataaaaggtgagatggaaaaaaaaataggatataagagctgttggagatagccttaacatcaagctcgcacaattggctctaataagatcaaatagttcggcagtgtcattgtgtcaagcagtgtgccgatgtgtattgagagcaagcaaattatcgctcaagattgtaattttgttcatgagcagtgaaaaaaatctctccgttaaagaggagaaagaaaatgcaacgctgtagccgacccaatacgatggaaacgcccagagtcaagcaaggtccccagcataggaaatcagagaagaaattaaagaataattattttaacgcaagaacagaagatatactatggtctacatctacacagcgatttggggagctgattgtttggtctcctagctagctttttgaggtcatgagtgatactcttttgtgatctatatatcattctatccgttgtcttgttgtgtagaggccattttgacaggccccgaggctcctcgcatacctccattacccgcgctgtattacgtgatgcatggaccaatgt

SEQ ID NO: 44808 - DNA, 576 bp, Zea Mays
atttgagtcccagaggaccgggacgcttcaggtggtatcaaagctgttaggttggccgcaggacgtaacccttagcctaatccaaaagtttttgagtcaaaactattttcttaaaaaaattcttgctcttatcccttcatttcaaaaatggtttccccatttccttctctcagaagtcaaatggaggtccgttgccaaaccagcttttgccagaatgaagatggtttaaccaagttgctgagagcatgcactgttcgcctcagaatcaggagccagccagagtatgatggtcgtgaattcgttgagcatggcatagagaagtgtcactgctgcggagcacagattcaaagacacctgccaaatcgtcgctcgcaaggcattgagggccctgtgtcaaatctatgaagaagaagtggccgacacaccgctcagattctttccgccctttcagagagaccgtcccgtttggatggccaggatgcgtgccttggaagggcatcagctgcttgaggacgaccccacagtcgtgtacctcactacctacctgctcactctagatgcccagtatgatttatt

SEQ ID NO: 44809 - DNA, 599 bp, Zea Mays
agagtaccccgctcctgctggggctaagggagaatcagatgaagtgtcaaaagcaatggtaatagcggaacattagaaagctgatacggccgaagcgccgaagcgtcctgccgaagctaaggaaaaacggttgaagaaccagaactaaagaagccggtagggcaaccaaaaaccctgagcccaccacaagagtcggagtcaccaaaggtgtccaatattcctgcaataactccaaaggggaggaggatggccagcgttctagatgctgtcatggaatctgcaaaggtacaggctcctgcttcaacgcttgataaagaaggcgacattccaaagaaatctgatgatgctaagataacacaagatactgtcgaagccggtccgccagcttgtactgaagcaaatccttcgagagctactctgatcttggaaaaagaaagcgcacctgagaaggttaaatctcttacccccaaagcgcctactgaaaagctagattttatcatatgacatgcttcggggaaacagttgtcggaagagcagattgccgaagccaagcaatatgccagggatttaaagtacccaaaaggatccttggtgtataa

SEQ ID NO: 44810 - DNA, 827 bp, Zea Mays
ggaaaacaatcaaagacgagataggtgaagcaccactctctaactgagatggtaaagaggaggcttcacgggatagtttcaaagtaagcatcaaggtaaagatataaatattacaagagtcaaaagcgacaataggcaggggcataagagaagtggtgaaggtgcaaaaggaccaagggtacgagtacaataaagaatgaagctaggacaaggcttgcacgcggtaaagaagagaatatggccaagggtgagataagtaaaacacctctctcaaattgagataagagaatggagattttagataacaaacataatgtaatcaccaaggtaaaatcgagagatgagaaagtaaaggaaataacaaacaaaagcataacaaagaatggagttaaaaactcgcaagtgacaaagaagggggtacgaccatggaaaaatagttaaaatacaactctaagattgagatggaagagcggagattttaaagggcatgtataagagaagcatcaaagtaagttatagaggtgacaagggtaaagatgataataatgaaaagcatagccaaggatagagttaaggcaagactcgcggagtggcgaggtggagaaaacaatcaagcacttcaagagaaaagcgtatcaacgaccagaaaatgacgaccacctataatatgtggttgtgaggagtctcggtggcacagtgcaagctctgtccaacccagccgacgaccaaaaaaattgtcattgttagcaagctgacctttatggtcgttaaacatagaatccaactttgcattcacgatgaccatagtgattgacacaaatactgtg

SEQ ID NO: 44811 - DNA, 717 bp, Zea Mays
ggctaataatgactttcggcagagaagggaagaggcctaaagatactccgagatgaatagggcttcagaggaaggctccactctagacatgtcataataatccacaatcctagcacaagcgacgacagaggaaaccacgctcaaggccaacagcaaagctcctagtctttagggatacaacaaagttcataccagccaccagccccaagaggcagaggaggaagaagcttcagaggaaggttcagttcccaacccagaaggttgttctgtttattctgtggggaggaaaagggacatacaacaaggatgtgctaagtcacgatccagaagcaaaaaagaaatagatgaagccaaagcgcggcagaatcacccgaagcaggtcctgtacactgctttgtgctattgtccatacattccccagtatgtgggcaaccagcagcccacatcatcagttgctttggaaagtcattctcaagctgcatgggctccgctaccaccaccaccaccaccacctatggtaccaactttgacccataatcagcagccagaagggcaccaccaagtgcagcaacagcgtgacacatgtgaagagcctgcagctcgcacagtcaacaacactgtgcccaagtcaaggcacatttactgaagcaatacagaggcacgatcagagaattttcatacttaatgtactctttacttttctgtctttatattttt

SEQ ID NO: 44812 - DNA, 332 bp, Zea Mays
gcggcgcacagcacattatggcggcacgccatgctggagaggcggtcccaaggcgcgccgattcgccattccctaatccgaagacttctacacgacgcccgaacgatagcgcatcgattaggggcacataccattgattgaagatggcagggagactcggctgcagtgcacagcgacatcgcggcggcaatcgtgttccatcgagcaattatcggagctcaggcgaccctcctcccatacggacgccacaaccatcttcctagctacactgcaaaactcacgacctatcccgaaggctctacgatggtgtgagtgcaatttttggactacga

SEQ ID NO: 44813 - DNA, 527 bp, Zea Mays
gaactttacttcatgaatgcaatttacctacttattgttggggtcatgccgttttacacgctgctgatcttattcaacttcacccaactgcatatcgtaccacatctccgttacacctagtacgacaaaatcctccaaatatatcccatatgcggaaatttggatgtgcggtctacacccctgtaccaccgcctgagcgaacaactatgggaccttataggaaattgggtatctatgtgggatatcaatccccatcgatcatcaaatacctagagccccttacagaggatttgtacacaactcgtttcgttgattgcatctttaatgagaaccatttctcggcattagggggagaattcaagtttcctaacgaatgccaggaaatcaattgggatgacaaatccatcctgtcctcagatcctcgaacccaggaatctaaacttcaagttcagaaaattatagaattgcaacattttgctaataatctgcctgatgcgtttactgactataatggtgtcacaaaatcc

SEQ ID NO: 44814 - DNA, 444 bp, Zea Mays
tgtgtccaaaatttacatttactaaacttagcacaacgttgttatcctgaagattttgtagcaccaaccttagatgtttgttatgttcctcctcactcttggagtagatcgagatattgtcaatgaatactacgacaaacttgtcaaggtattccaactccatgaacacgttgttcgttaggtacataaagaatgatggggctttggtgagcccgaaggacatgcccatatactcatagagaccataccttgagatgaaggtgatctaaggtatattagatggtctaatagttacttgatggaaccctatatgaagatctatcttagagaagacacatgattctattagctgatcaaataggtcatccatctatggcactggtatttgttcttaatggttactgcattgagcgctcagtagtctatacacatctgttgtgtatc

SEQ ID NO: 44815 - DNA, 301 bp, Zea Mays
gaaagattatggcaaggacaagacttcatccagaactgtggatcttgattccccttcgattcaacttgatctatgaataattgagttgaagcttatccttctttgacgtggttggtcttctttggcctttcttcttggagttgccatccgagttaaggacatatagttaggatagccgggatacacgaggtgggtaggtttgaacagagttttactttgctttttgaacaaatggattagacaacctatgatgtaggttaggttgttgtttacggacgagttagtccaaggtattaattta

SEQ ID NO: 44816 - DNA, 283 bp, Zea Mays
atcgagttcttcaattgacctatccaatacctttactttgcatccttcccttcatcatacgccttctgaatttctatctttgattgtcaagtctgcagagcttgtctatttgtgaataccaaaagttggtccaaacccatcacatgtgttgcaatgtaaaagtctggtgtcctttttaggtgcgctcttttaatttgccctttttactctttttatccaggtaaaattcttgggttgtttcatgtcattcaaatattgatgtattcggtatagaaaaggttag

SEQ ID NO: 44817 - DNA, 947 bp, Zea Mays
gctagatccaactgtgctttcacttgatgtacttgtcccaatgacagatctgcctcctcccgcaccatcccctgtatcaccttgccagcagcttgatagaccatgttaaaatccccagccaatagccatggttcactactgagagctctgaaatctagaagttcccgaaggaattgaattttactctcatcttcttgcgggccataaacaccagtgaaccaccaattaccatccatcccagcaaactgaactgaaaccgagaaattatcaatacgagaggagatgacttgacatactgctcccttccaagcaatcaggatgccaccacgagtaccattggcaggcagggtcaagaacttatcaaagtctgaaccacacacggagaggagcagatgggtggaaagcgatgccattttagtctcttggagacaaataatatcagccttggaggatagaattgtgtctcttacataatctcgcctagccttattattaaggcaacgggcgttccagacaagaatgtttgatagattcattgtaaacaaataaaacatgaccaaggaccgcaggaattagcagccagccaggagctccggacctctaaaatcatcaaagcgctccgcctgccagccaaaaatggcagcaagagcaacgaggtgagagtccgtcagttgcccctcgaacaacttgcagtagttgtcttgagctttttgatcaatggcttcatccttggctgcaagacccaggctcctgatgactttcctttgggctccagtgatgaccggacccagagaacagggtttgacaccggccaccctcctgctacgacgaggcgcaacagcagacgtcttacaacttcttttcttggcaaccggcataggcagcagctgcaccactggcttggttattttctccaggtcattgagaggggcagcaggctcatccag

SEQ ID NO: 44818 - DNA, 708 bp, Zea Mays
ggaaaagatgtcttaattgatgctaaggtcataacttctatagtttaagaatgacttcgggggaggaagaggtcgaagatcatggcatgctcacctatggctcaaatcgatggtgagggcttgtcctctagtttgaagagtaaggcacacgttgttcggatgtgagggtgacaatgagatggtggctgtactgtgaggttccgcggcaagggcatcgatatttataggcggaggaacgatagtttataatggagggagtctcgaccggcgtactgtgattggcgatgttgccacagtgcagtcgcaacatcccgaggttggcagggtaacttggctcatggtggggcattcatttaattatgattgcgacaagtgactggcgtgtgttcaggcgggtgcacgaggtcttgtcggagtgactttctgcactgaggtatcacttcaaggtctgcaacccggtccctttaatatagcagtttggcgtgcatgacaaggctgccttagggcagagggtgtaggtggggcttgccaggacgcacaaatgccaaggcagctagaggcaggcttacgatttatttacgcatgtgttttgccataggtggttgtgggctccctctgtctattatgggcgggcattagacgttttcaataatttaccacggtgaaagacaagcttagcctataatttagaagaatatcgaggaataa

SEQ ID NO: 44819 - DNA, 509 bp, Zea Mays
aaagctaatcatatcgaacatttcacttgtccttctttgtatgtttttcaacaatagggtcaacttcaagaaggggagcaaggttggatgatatgaagcactacatcaataccttatgcaggaaccaacgactttcagtcgaggacgactcaaaaccaagaaggggagaatgatgagtacatggacttcaactatatggttaaggtccaatcaatcattgattcccaagctcaagagaagtttaagtccagtttattcgcgaatccggttcggactacaggagtgggcctcatgaaaacagacgcccaggccacatacggactccattttcaatgttttagatactgttggaaatctaagaagataagctttccaacccatctagtaccacgtcaaaatatgctaggagctgatggaaatcgttgtaacaagatgacgtctagaatctaccagaaatcagcgacgcctatttcttggcctaaaggccttgtacatcctaaagtttctca

SEQ ID NO: 44820 - DNA, 403 bp, Zea Mays
caaatttaaaaaacacaaaaactaaactttacacgagtggttaatacatggaacaaaaactgaaaatactaaccttacaagaaaagctcactcttgtttctctagaatattttccatgaagtggggcaaatgaggagtagtctcctgcttgtaagttcgtaaacagttaaaccaaaaagagaaaagaaccaaactgagaatatattaaacaatgaaggaccatcgcagactcacctggacgttggtgggtgcagaatggagtcaacggtcgatggtgggcgctggatggaatggcgacctttttaatgagggcgagcgcgaaatttgggggatagttgttgtgattgcttgaccgagatcgtgctttccaatttggtgacgtagattgtgctttccaaatttg

SEQ ID NO: 44821 - DNA, 296 bp, Zea Mays
ggaagttgaagatcgaccgtggaggcctagccatgttgtttttggaaagtcatatgttaagcaagggcagatcaaagcaatgaatgacacatactttcgtgatatttctattgtgagggtcggaggggagaataccgttcctcttcccgaagctaatgtggtggtagttttcagaagcttcatgaaagctagacttgtttcccactacataagatgttggtcgaagttctgaaaacttttgaaatatacttgttggtcacttgttctcaaatactaagaattaagaataaggcaac

SEQ ID NO: 44822 - DNA, 539 bp, Zea Mays
attttggacttgtattgagccatattgaaaatcctggtgaaaccatggagaagaggtaagtttcccacacttagtcaattgaattacatgatatttatgtttgtctaagtcgtagggaagacctcaaaaaaagtccaaaaggattagcggagataggctcaaaagagccttatctggtctagtctggaccgggtccgttcgtcctggccaaactacttggtctcaggattttttattaaaaatatccggacctctattgttcacggtccggtgtgccgccagaccgcctccaatggtcggcttctctgcgcactggtgagccaacggataggctcggtccgatgcctgccagatgaagaaggcacccaatcagatcccaaactggggcacgtggcggactagagcacgtggacctggtccgatggtgtaccggaccggtccggtgtgcccgcaaacagcccagatctgcagctttctaaggaaggaggcaacggctcctaggccacttggggctataaaaggagcccctaggcgcctcc

SEQ ID NO: 44823 - DNA, 366 bp, Zea Mays
gctgtatcgggtatctcttctcgtccttgatgaggtaggtgctcatcggagtcaccacgctcatgacattggttgatgtctggcacacgctagataagatgtacgccaatcgtactcgtgctcgctctgtcagcacgcgcatcgcgctcgccacaacaaagaaaggcgcgtccaccatgacagaattttattccaagatgaagagctacgcagatgagatgaccgtgtttggtcaacccctcagagatgaggagtttgttgcgtatgtgctcactggccttgatgaagagatctataattcttttgtgtcctctattgttacctgggtcgagccaattgcacccgctgagttatattcatagatgc

SEQ ID NO: 44824 - DNA, 699 bp, Zea Mays
cttttcccagggttcgaccatggaggtccctaattacgttgtcctgagacctcgtgcctgtcgagggtgccccaggaaagaaagtgtggtgtggtgttgcgtttcactaaagaaccctccaatgaaaggtaagtaaaacttgaagcacttaatttcagaagagaaaaaagtgacatagctggttttgcgatggcggttgccgctcgttactctcccgagtttgtcgttgtttgctctgtctcgtttggctcttggtacgcttcctatcctgaaagttaccgaaggaaaatgataaaggcggggagaaaagagggagagaagggagagaaaggatcagatccttagctgaggctccctctatttattgtgtttggcatcaggagcagttccaaaagcatgctttattcataactattcgagggttttacaagaagggcacagatccgctccggtcaagcatctaccatgggttctcattggaagcattacgttcgacgagccctccatttcctaccacgcatagccccctactatgcgtgtcttgtcaatggggccacatcagtcgagcaatctttgttctccttgccacccgagggttcttcctcgctgctctcaaggggactctaaaagtagcttagagaggagctaaataggctacacctgaaatttctcaccaaaaactttgagatagagtctgtc

SEQ ID NO: 44825 - DNA, 276 bp, Zea Mays
cagagtatggtcatgcaggatgaagtttatccatggccaaaagagagggcggtgaagataggatggcactgttctggatatttgcacaggtgatatttcagtgatgagcaaatctgaatacccctaccagcacaccatcccaatcttcatcctattccaaagttggtcacgacaaggagggtaaatatcaagggtagatatttcagtgcttctgaatcttcaacagataactgatccccccatcttcagctagctatttctctcattttctgagta

SEQ ID NO: 44826 - DNA, 367 bp, Zea Mays
atcctccgaggatggggaatcagatatccgccttgcccaaggtaacgtcgggggcctcccccaaagaggctccgttccgaccgagccccccgcagggacctttcaaaatctctggctcgcccgagctcgatctcgaataggtcacgtactcgggtagatcttcgcctcgcccgagcatcccacaccctggggctcccatctctgcctcgctcgaggaccgccatgtctgcctcgcctgaacccatctcaggcaacgaagacaaagcgaatccgaaggccaataggggacaaccacattcagtgcacatacctaccctacacgacgctacaggtgcactacagcaacaagactgcggtcttgtccaag

SEQ ID NO: 44827 - DNA, 418 bp, Zea Mays
aagggtgtaacccatttcggtgtaaaaggaaagcttgcacctcggtacattggtctgtttcctattcttgaaagatgtggaccagtggcataccgactccaactacccaaaacattgtctacagtgcacaatgtgttccatgtatcccaattgaagaagtgcctttgggttcctgatcgaaccattgatatggtggatgttacattggaactagacttaacatattcagagaatcccattcgagtcctggatcaaaaggacagggtcacccgaagaagaattctcaaattctataagatacaatggaaccaacatactgaagatgaagctacatgggaaacccaagacttcttagaaaagaatttccctggctttttagcttcatgtaatttgtgagatatgtacaattgttgtaaag

SEQ ID NO: 44828 - DNA, 870 bp, Zea Mays
gagagatgtgtggtcatacgaccatgaacatctcgcacaggtgaacaaaattcaccacctggaggatggagagaggcgtgcaaggagcaaggatgcgcgaagacgaaggggcacatgagcttgggagagaaggcgaatgcaaaatggtaaccactatctgcggcggaagcctttattaagtttgactcacccatgtgccccgaagcattgggcagaagaccaagagacactcacaccaagtgctggcgacccataccatgacatggggggccaaaccacccattcatgtgtagtgggtggcaggcataggtgtcaaaaggcgggatttgaacagccgatcgcgcagggacacgggcaaaaatcaccttttcgggaactgctacggtggtaaaagtcatttttactaccacaatggtgttgaatgttatgcgcataactgggcataccaacaggcgcggggccacttgttagtgagctatagaagaatgagtgacattaggtgatctgatggatggtacgatgtagggcaacattctcgtagaacgaaccactatgcactagtcacaacttggttgctcaaaatgagatcgcggttgtggccctacttgcgggttcgtaacctctcccaaggtgggcttgagggccactgttggtaccctgtaactgggtaccttctcctactgtttcaaggccaaatacttgtgtggttgcttgtaaccatgtactaaggaactgagcggtcggccccaggggtctggacccttctgacgggggcattggcttccggacccgcaccccgctcatggacaggttcggtgtcgtcacgtgtcctaggggtgaaaatgctcagggactactaccttgaattca

SEQ ID NO: 44829 - DNA, 502 bp, Zea Mays
cgggggttcgagttgtgcgtacagcggtccggcgcttcctcgtggaggtctggtccaactaattgcgtcttgggatatatcatcttttctggtcacgtggtgccccttgagccgtccacgtggtggagttgggtgctgttcaccgtgcggctagagatcgccgcacgggcaccgtgtcttcacactatagtaaggggtacccctgattcagggtaccgatagtggcccccgggcccgcctcaggggaggatacgagcctgcaggtggggccaaagtttgattggcgattggctcgctactcctgcacgcccgttgatgcaattactgctggtctgcccatagtcacgccgactgccatgcctatccccgcgactgactgacccgtgacctccgcacttaatggctttgttgggccatgcgtggggtgtaacaccccaggtgttactcatggtgtccacccagggctacaccagtttgagctatcacatgtgggttagtttga

SEQ ID NO: 44830 - DNA, 525 bp, Zea Mays
gatcaatactctaagtcttcttctgatgtgctgggcgtctagtggtaacgatcttgatctcttacttgcaagtttcttaggtgacatggtagatgtggctagcccgttcccttacacatataggataattgtcaggaggagctggtagcatctaaaaatttcataggtgtagtggcacccatgcacaaagtatgtagtatcccatccctaagatttcctaatataatcctgcatcaatcgcaaggaccactgtatctagaccgttcatggtagagctataataatacaacaacaatggacttttccaagacactacgcctataggccatgtggatccacattgctagtcagttagtacaagttaccgaagattaccttccctcaccacctgttggagtcgatgatgatgtgttgcttgctggggatcccatggtcgctgatgctgtccatcgtgcatgcttcgaccttgattgcctaccactcgcacttgtcgtctgtcatcccttccgttgcactgccttggta

SEQ ID NO: 44831 - DNA, 711 bp, Zea Mays
tgttgaataagttgttggacacttagtgtagtgttagggcctttatttatttttagttgtactataaatagaggtaatagatgagtaacttgacctaggcatatcaagtatagtgtggtggtgcacactctcataaagctaatgctagataacctatatatggtttatgcatgcaccagactcgtcatagagaccttgtttctatgcataatctggcacaactctcaccagaccggtctagcgtgcaccaaactcatcacacagagagggtgtatttgtgcacatggcctttgggttcactggacacctatgtggtaacgactagttggtcaaaactagccgttagtgacatcattgggaggttcggtggcacacctatggtgcactagattggtctggtgcacacgaattctgagtggaacagtaacgactagcttgggttgttgtgttatttaaccccctcccataagccatactcaatgtcttgccttctccaacaaccataacatttattgagagagtttaggacacccattgtatagtgaggtgattagcgaagccataatctcatgattaggaacctcattaactgcaagagagagccatcatgtgcatccaccgctcacaataggcttgtcatagtcaagtgagagcctatagcttattattcatgacgattgcatcacttagacggctcggtgacgattggag

SEQ ID NO: 44832 - DNA, 339 bp, Zea Mays
caatgatccacatcatttgttgcactaactcaaccttggtgatgtgctctcgaggatatggagatcagcgccaagcccattgatgtggttcatgaaatctttcttgttatctgtctccttccacaccaaggttctaaactcatggtgaagctatggcgcattggcctcacgcacccgttggaccccgatgtcaggcggtatggagcatatgattgtggcaagcgccaggtgatcgtggcagtagacaatatcctcgccttcctctggctcagcagtgcaccaccatcatgtgacctccaagttcacgtatcaacatcgtccacacatggtagttggtgc

SEQ ID NO: 44833 - DNA, 303 bp, Zea Mays
ctgctcaatctccattgctcgcccccaggttcgtttacctccaaagctgatcgagcactacggcgcgactcatcaatggcagtcgcccagccggaacgacgaccagcgcaccaatagcccaaacaccatccacaccccacaaccaccatgattaataggacagtttgattaagttaacttactggcaatcgatggtgcctgagagcagacgagtgcccgcggccgcttggtcgtgaccacggcgtcgttgagcccctctcgcccaaggcgaggaataaggttctgttactttcgacggtgacg

SEQ ID NO: 44834 - DNA, 435 bp, Zea Mays
gaaaatcatcatgacaaccctcggagtgggagcccgacgggacaggcgacatcctgtctggcgctagttcgtgtgagtggcttgacaggacggttgacgtctcgcctagcgcatgtttgtccctcgttcggcgtgttctcccggtgctctgcccgaggctatgaaccacctacaaaacgggcagttccccactcggggttcgaggcggtctgaagctagaacgacggatcctcccacgctgcggaactatcatggtgggcccacttggcaggcgccgaatggttgggttcgcctttggagtttgaggtgattgggagcagaagcgatagatcctcccatgtagtggctatggtgggcccattctccgggcgccgttctacctccctgcgtctacatacatataatagagggaaggggttcctagggccagttagc

SEQ ID NO: 44835 - DNA, 907 bp, Zea Mays
gctcacgcttacatgacttagggtgatcactatgccctactaacggagcaatcggcttaagtcggaaacaccttaagtcggtgcgacatgctcacgcttacatgacttagggtgatcactatgtcctactaacggagcaatcagcttaagtcggaaacgccttaagttggtgcgacatgctcacgcttacatgacttagggtgatcactatgccctactaacggagcaatcggcctaagtcagaaatgccttaagtcggtgcgacatgcttatgcgaacacaaattagggtgatcactataccctagtagcaaaatagtcaactcaaatcgggagtacttcgaaaaaagaaatatctcgcttacagtgtcagggatgtttttgagcacgctgccgccggaacaatcagttcgaacataactgttgcacacatacggaactcacattacacttttctctaaaaggtgctgactcaataaacaagtgttttttaggtaaatcattgcgctggagtattcttgcaggaagcatcgtttgcaggaccaacagaagaagatggacggcttgcagcatcaggcacggccacgacatcggcgacaatgtcttcaggcaccacgacgtcaggtctcctcatcaggatccacccggcgcgaacagccttatccatggccttgtcgcacattgccttcatgatgacgtggtcatcctccaaggccttgatagtgaggcgggtagcctccagcttatgcgtgacaagcttcttggaggcacgcagctccttgatggtagaatctttggtggacaatagcttgccgagtcgggacacctcatcctaggacgccctcagttcgtcgcgatggtggtccaaatccgacatggtaaaacgatgaatcctctccagaatggtc

SEQ ID NO: 44836 - DNA, 1168 bp, Zea Mays
tttgatggatgggaatgcaacatttcttagtggcaatgtgtcggagggatctgattttgggtcgtggtcttcggaggagaggtaattggggagtcctttctcgtgggttaacgaatcttctgatgacgacttagattattttaccgcgttggatctggctgtggcggagtttccattgtgatccgtccctctcgaggtgctggcaacctcgactgatgcaggagtcgaagactcacgacggcgaaggatgggcgtgtcgaaatagggcatcgatgagtcttcgcaaagtggaagaagacatcgccaaatgggtatggagaggacccatcttcgaagtcggccacgactggatcgaggtactcagcgtgagctactttcatcgacgtctaggtcattcatcggagaaggggacctatgggacctgtttgagggggaagagttgaggttgatgttgttcaattttcgggaggcaggtcttattcggaaggaggagcctatgtgacaatttgttgcccttgctgttctgttgcgatattgagtgaaaacactgccctccccctcttcgcaatagaactgcgatggccatgtttgtggggtaaatgttgtatagtgtatgctattgtgttgtgggatggtgcctttgagcccttcgcttgtttgttcatttgtgattgtgccatgtaatttgttgtgcctattgcgagtttgctgcaaatttaggcgactttggtgtggattggcgtgtacgtgctttagatgacttcacgtttgataggtgaccgtgcatctgttgtgcttgtccagctgacccttaggcaacttttgctcggatgatgacttatgtagagatcgggccctgtgagtgttgttacgtacttttgtttttctggctgcaccattgggcgactattgctcggaatgtcttcgtggaagacttcacaccctgtcggtggtgtcgcgcacttattgtgtctttttctgctgcacccttaggcgacttttgcttgggcggtgtcttcgtagaagacttcacaccctgtgggtggtgtcacacacttattgtgctttttccagctgcacccttgggcgacttttgctcagacggtgtctttgtagaagacttcgcaccctgtgggtggtgtcatgcacttattgtgctttctccggc

SEQ ID NO: 44837 - DNA, 661 bp, Zea Mays
acatccgcggtcgcattgccatcttgaatttttgttttttgggggatttttgcggtaatttattacatggctccgcctcgttaaaaacctcacctcctacgaggaaaagagtgcgagcctgactgagatattgtttgcgaagattacaaaggtgcaaaggccttgggactagatgaagaattttcgtaagttatccacattccatgagtgctctaggtcttcgccggatggtgaagcgagcctgtaggcgttgggggatgttttggtcttgacaatgaagggcccttcccatttgggttcgagcttgtccgagattttgttttggtggttctggtgaggactaggtctccttcctcaaattctttggggatgacagtattgtcgcgccatgccttcatctgcgcttggtatttgttcagtgcagctagggcaagaacacggtctccatcgataaggtccttggaggttgactcgtcaacatcaggagtggctgtggggctcgctcatggagatccatgctttagctcttgcggcgtcattgcttcggatccgtacatcaagcggaaaggtgtaaatccggtcgctctagattttgttgtgtttagtgcctatgtgacttcggcaagctggtctgcccatttgcctttcttgtcgtcgagta

SEQ ID NO: 44838 - DNA, 538 bp, Zea Mays
gctagatccctaacttaccctgacttcccatctgagtggagatgggatgaaaagaaaagattatgggagcacatacaacgccatggtaaaataggccgcatacattttgtgcatccatctgcaggagaaagatattatgttaggatgcttctgatggttgtcaagggagctcagaactatgaatcattacgaacatacgatcatattttacatccaacctttaaagaagcttgtagagcacgtgggctcctagaagatgatcaagaatggtacaatgccttcgatgaggctgcgtcttgggccacatcgaatcagcttcgccaactctttgtcacaatgcttcttttctgtgaagtgggtgatgaattgtctttctttgaaaaagtttggagattacttgctgatgatattcaatataacactagacagatgcttaatcacccagagtaccagattcctgatgaaacacttaaaaaccagctgatagaggagcttgaaactttattcagcaaaagaggaagtcgaattcaagatttca

SEQ ID NO: 44839 - DNA, 333 bp, Zea Mays
tcacgcctgcgatgcacgtgtctctctgtgaccgcacatcgtgtcgtgtggcgggtgcaaatctgtgtgtggcaacgcatggcttctcgcctacgtgaatgacacctatcgtccccgtaaaaatttgtggatataccttatttccctaccgctatccttcccgtttatctgaatcggccaccgctccaactcctcaccacgtgtcgtgccttccgtcactccactgccgcgtgtccgacatgttagcgtcgtggtggttcttgggctcgcgggctgttgttgtgcttattttctagagttttcagttatacctcgtttagatcttagttttgg

SEQ ID NO: 44840 - DNA, 299 bp, Zea Mays
accaaccttttccaatcccagctcttctttcattttgtctcccacatttctggcttttttgccagttttttcacaagaaggatcatccagaccttgcctatccactgaagctctcttaccaaggttaatagaatcatcattccaaccctcttcagttatatcatcaatcttaaagaaaatatcataaaggtaaggtttcacacccacctcaatgataggaggaatcatagccacactcttgacatggactttgaacctaaccatatctttagaatctaaagataggatatcaacttctt

SEQ ID NO: 44841 - DNA, 661 bp, Zea Mays
atgaatttcctaagttttctgttcattaaaaagaatattcagaaatggttaaatggaaaactaacttgcatcggggtccctggcaaaagtttctaagtttccttacagcctagtccttgggtgactattcacatgagtctctggctacgcagaaaaccatctagggtgattttaaattaaacttgcggtccttctcccaatcaaacagtggtcgctgtggaagaaagggtgaaggggcttaccggcggtgagattgctccggtgaagtggtcgagggcgtaggggaggtcttgacggtcacgccgatgtgcggatcatttccggggatggttggagtaggccggtcaacatgcgcaggcgagcaagctcgtcggcggcgagggctccggcctatccagggtggtagagttcaatcaaattggtcagtgagcttcactaggtgctagggaaggtgtaggcgcgagtaattggactatggcttaccggttagtcgtggccacgcgcgccggcggggagaacaactccggcgagggtggaacggcttctccggtgaagtagcgcccggtttcttgcttcggggaactctacggggctctggggaagctaaccgaggcatgggatttagtggggatgggcgggagtggtttggccatggcggccg

SEQ ID NO: 44842 - DNA, 679 bp, Zea Mays
caaggatcaggtcgtcgcatccttagtggcacgctacatcggcacccggttgtagtggaaaatgagcaagggtctttgcatcttcctcgacgggtgcgaagggtaaggaagctagtcgatccaactagggtccgtgtaggtagttggaacgtaggttccttaacaggtaagttacaagaaatagtcgacgttgcggtgaggagatgggtaaatattttatgcgttcaagagaccaagtggaaaggacagaaggcaaaggaagtggaaggtataggcttcaagttgtggtacacggggaatgctgcaaacaagaatggagtaggcgtcttgatcgacaagagccttaaagatggagtagtagatgttaagaggctaggagatagaatcatcctagttaaactagtcattggggacttggttctcaatgttatcagtgtgtatgctcctcaagtgggccttaatgagaactcaaagagggagttctgggaaggcctggaggacatggttagtagtgtgccagttggcgagaagctcttcataggaggagatctcaatggccatgtgggtacatctagcactagtttcaagggtgtgcatggaggcttcgactttggactaggattcaagaaggagaggaaatcctgaacttttccctagcctatgacatgtttatagcaaa

SEQ ID NO: 44843 - DNA, 760 bp, Zea Mays
gacagcaccgaggtgacgctgggaagaagaacggtggtgtcgaggaccggctaactttgacggcgcaacacatgagcatgagcgcggcgtcgacaaacgacacactccgatgatcagggactgacgacgtccgcggcgagcagtaagcagggcgaggctgtgccagcaagttcatggccgatgaaagggacttggctacgacgacatgggagcagctggcagtggagaactccgagaagaccaaatcaagcactgcgcagaggagtgtggcggtggaggtgagacgagtagctgggacagggtggggagtgtggccagcatcgacttatatagccacaggagagggaggggagaagacgtcgatggggagagggacggacaccattgatggtgtggaatagaaactgccgacgttaatggtgggagctgaaacggacaaagttagggaatggaagaaattatcgtcgcagtaccacagtgggggagaggaagggccggttcgagccttccatgagtggccgtggagagctctggtgctgagcgtggcgtgcggctggacatggagcggcggcggctgcgcttccgttcgtagagtcaacaggagaaggagccacaaggaagaaacatcgagtggggcccatcggtcaatggcacaaacgagaaaaaaatgagaaggctgggcgtcgggcattgagctggaatggccaagcggctgagcgtacagagtagttaggttttcaaatttattattattattttt

SEQ ID NO: 44844 - DNA, 803 bp, Zea Mays
gcttggtatgagttaccattgaaaattgagagaaaaattcagctccaagattgcttgtgaggcgctctgaatcggttctcaatggtacagtaactgaaatggatgagatcgccagcgcgactgtcctcaccgccgacgactccctccgccgtgattcgtgctgccgacgtcgcgattcgtgcccagggtggatggatagcgtcgcggggtgaaagatcttcgccgtcggtgagctggacgccactccggctagccgcggtacctcttccctttctcaccgcccctcggattagaatctcaccgccattgtgctgtcgccgttgtccgccgcgtgtccaagccttgccatcgcaccgccatgattcactttagctccccgttgctcaccggaatagctgccacagcgttgaacacgtattcactgcgccggtattcttccttatctccggccgcctgcgttgctcggccaaattgcacgccaccgtcaaagctccctataaattgagcccgcggttagctacgctacatcatcacgaaaccagagccccaatcccaccctcaatcattcgccagagctcgtgaatttcgaattctccccaaactggtctccgccaccgcatgatcaagctcgccgtgaccagctcgattcaggttagctcgagtccctctgctgcttgttctagcatccttaggtaccccgcaaacccctcgacccctctaattaaaccgaaccgccagggatcaccaggaacgcgtaccattgtcctcatcgttcgcggttcacgtggacagagcatgatagc

SEQ ID NO: 44845 - DNA, 865 bp, Zea Mays
cctccgggttcatggacgacggcgaggaggccccaacacccgactctgaggctatcctcgacgcgctggtcctcaagaccgacccctgaggacgtgtcggacgcgctgggactcattatcgatgttttgattcgcattatacgcttaaatttacccggccagaatccactcactatcgtacgcgcgctattttcacgctgtaattcgggctccattcgtcgtacgaaatagatcgatgatatacacttaaatttgtacctatttatgttgttttggttcacattttatgctaaaatcttctcgagccagaacacacacacggtcggatgtgcgcaattttcacgccttaattttcggcctcattcgccgtacaaaacatatctacgatttacgctaaaatttgtactcgaatacactatcgtacaggaaaggctactacaaagtaacgtcaaagtctcaaaagaatatttccttattttaatgctcctcaaaccgcaacattgagaataaaaaggtatttgtcgcacatttatcgcgattttacagcactactttcctaatctcaaaccaaaccagatctacgcacacactggtcacgtatatacaatagcataaatggtctggtgtcgcgatattgcatgatttatgctgtttcttttaatgttcttatgcagtcgtaaacactgaacaaacttgtaaagtcgtcccacatgatttgcgcgtgagtagattctttttgcatgatttatacacattattcaatctgtttatcccggtataaatgctgacgcatgcatagatgaactgccttcccagattcgttgcatggtatatgcatattactcaatatgtatatgcattcgta

SEQ ID NO: 44846 - DNA, 409 bp, Zea Mays
gcgctctctgctctttcaggcttcccttcctacttactactggttcgaggccctcaccactgctacctacctcctcaaccatctgcccaccaaggcggttgcccaccccactccttacttcgctcttttcggcacccacccctcctacgatcatcttcatgtcttcgggtgcgcctgctaccctaatatcgcctccactgctcctcataaattagcgccccgctccactcgttgtgtcttcctcagatactcccccgaccataaggggtaccagtgtctcgagctcacctcacaaagagtcctcaactgtcgtcacgtcgttttcgacaagctggatttcccctttttcctcttcttcttccactgcctctctcaccgagctcgacgtgttcctcgatctcgaccttgt

SEQ ID NO: 44847 - DNA, 294 bp, Zea Mays
cacacagccccaaagtagagccaaatgctgaaactcaaatctgttcactattcctaatctgaaaactccaagaacctgacagcccatctttaggcacccttttctgtgatttttatatagaaccaagccatcctcccttaaggaaacttgcacacaaatatattttcttcaactttgctataaaaggtatggcttaatactccaaggaccaagcactagagagctccaaagttgagccaaacacgcaatgtctgtgtgctgaaataagactaagtctgaattcagatttagcac

SEQ ID NO: 44848 - DNA, 585 bp, Zea Mays
caccattcaaaacatgggtccattattggtcttaattaacacaagaacttctacctcggactaattgtctaaggaaactacacaacttgatatccagcatgaaacaacatgcaatgaagctcaaagtaagtcatagatgcaatcaaaacacgatttcacaccatcgaatttggatgcttacatcgacatcaatgtcctaaaacaacactcttttatgaaggggtaatatgcacgaagcacaacccttactagcttcaacaattcattttaattcaatggggaaacatccacaccagatgaatgtataagaagatcaaacacctcacctcaaagcaccacaaaacaagtagttctattgaaacaaaactcttaatcttcctaaaccttattctttccatcatgaaaagataatcatgtaatctcacattctttgcaccccacaaaagggagaaagcctacagaactaatggagcaataaagccgacaagaagccaataacattctacgcggcacagttcatcgaagaaatgccaaaaactccacaaagagcactgacagcacaacaacaacacaatacttgcttat

SEQ ID NO: 44849 - DNA, 998 bp, Zea Mays
ctagggttcaaactgcaaatgccagggacctgaattgaactctttactacagctctatgacaacgggtttatttattataacctgaggggttcttttgcaaacggtgttgcccgaaagggcactgatgcacttgggttgttagattaaataagtacggcccggactagatcggcatggttactaaccagcaagcgatcacgaccgttagatcttaattcgacgcttcggattttaatacccaaaatcatccctcgcctgcacgatctgaatcagacggcacacgaggcatccacctgaaacggtattcctcatctaatcgtggtcgttacactctagatcaacggtcaccgcgttctctccccacaccaacgatgcacgggcggcaccgcccaaagacacaacggcgaccatggccgtggatgaccaattcaaaaccccaggccgcaaactctaacctaaaacgtgttatgcgataagcagacgaaggcaaacttcatgggtttagtactcaccgaagacaaggtcgcgcacgggctgtccacggcgggcgcgagcacgacagaaatcccaactccggcgaaggattcccacgactttagttaggtccctttcgattactccctcacacagcttctatgcgatcagcccaagccttgggtgaccacgatgggggccgaacctcactacagatggctatccgcggtggcggtgatgtatctccgtgtgggacgcggcggcacaatgagtggtgtggagtagcggcggcggtaaaaagggcacgtgtaacaccctgattttgggggtataaaatttctttctaattatcacccaaaatcatgtgttactcttccttttctcactctaggttttctctccctctagattcattctccctttttcctttttattagggatagcttaaactagtggatgttaattatttatttttgccaaaaccctatgggtcatgacatgttgcatcatgctgagcttaaaa

SEQ ID NO: 44850 - DNA, 1255 bp, Zea Mays
tccgacttaagcagattgctccgttagtatggtatagtaatcaccctaagtcatgtaagcgtgagcatgtcgcaccgacttaaggcgtttctgacttaagccgattgctccgtcagtagggtatagtaatcaccctaagtcatgtaagtgtgaaggtatgttgcgtcggttttaagtcgtttccgacttaagccgattgttgatcgagagtttatatgcggtagaacatagaagctttattaataatgaaaccttttgcttacgaagtacatcttgtccaccagagtttcgaggtactgctacgggtagaatttcctgagttgttcaatattccatgaattcctcactttagttccgtccatttgggtaagtcgatatgatcctgaccgggtatcttctgcaacgatgaatggcccttcccatgggtgtgacagtttgtgttgtccttctcctgtcagtactcgatggaggactaggtatcccactgcgaaggattgatatcacactgctttgttgtggtagcacctcagggtttggtggtatctggccgactgaaagaccatattcaaacgttcttcctctaatatatcaacatcttccagcctggttgcttctgccttagctatgcttttaaatgttagcctgggtgctccaaagatcaaatctgctggtaatactgcctccgatccatataccatgaagaatgtggtgtttccatgcaaagcccggcttggctgggttcgcaagctccagaccacatatggtagttctctgatccattttcctgcgtgcttcaagtatcattctgttggctctttccacctgcccattagctcttgggtgtgccactgatgcatacttgatctggatgctcctttgctcgcagaaatcaaagaactctgagctagtgaagttagatcacaggtctgtgataatgctcttaggtatcccaaacctaaacattatttcttgaatgaattccaccccctttgctaaggtcaaagaggcgatgggctcgtattctatccattttgtgaacttatcaatggcgaccagtatgtgagtatatcccccttgagcttttttgaatgacccaatccacccccaacatgtgaaaggccaggttacaagaatagtcttcaactgttgggtaggcagatgttgttgttttgataagaactggcatgcttcgcacttctgaactaactctgcttcatcattcttcgttattggccagtagaacccggacctgaaa

SEQ ID NO: 44851 - DNA, 438 bp, Zea Mays
gtctttatatgtccaggcttcattggtttatttgaatgggttgtcatgacatttggtcttaaaaatgctggtgctacttatcagagggctatgaatttgattttccatgagttgttaggaaacactgtggaagtctacattaatgatattgtagtcaaatcggctgagtttagttctcatatagctgatttgcgcaaagcctttgataaaatgtgtcggtatggtttgaaaatgaacccacgtaaatgtacttttggggtgtcggttggtaagtttttaggatttatcatccatgaacatggcatagagatagaccctgaccgaattaagtctattcggaatgtgggacctccgacctgtaaggtcgaagtacagaagtttctcagcaaggtgaattatttacgaaggtttatttctaacctagctgggaagattgat

SEQ ID NO: 44852 - DNA, 484 bp, Zea Mays
gaaatgtagaagcaaactttatgagaaacttattctcatacttgagactatgtgagattactaagatgaagaattagtctcaatataatcaagatataaaaataggctccccctaaagatatgcatcaaagtttgaaagaattggacaaatgcactcacttttaaagacaaatagggagaagcattattcatcttgatcaaggcttataagatttgcaatgaacaacttatgcctagtattctcgtaatgaaggagatttagaatgcttacaaccacaccatgattgttttgaagatcttattgtcccagtaggtgttgttgttcttgatgtcttcctctttcatttgagtgtcctccctttgtagttgtctctttttccttccaaacttattgaaaatactcaagggagatgttaatagcataagagagtatatgatgaaggatgatttccttagataagaaatataaacaattcatcaccca

SEQ ID NO: 44853 - DNA, 774 bp, Zea Mays
attattcacagtgatgatttcaacattcaagtaaggtacctctttcatgtaccaaattttgaaaaatagtaaaaatcatgccagtgtgcatctagagcacacataagatcatctttcaaattataagtaaatttcatgtaactaatactatagtcatgtatcagataactacaactattgacactggataccacgtaactaaagctattctcatagtattagtcaagtatcaaaggtgctgtattttcatggcgccaaaagggaattaattgtagttctatgatacatgtcaaaacagttgtaattgtgtacttcttatgcaaaaaatacttgtacttctctgaaatttgtttaaacctgctgctacattttgtcctacctggcaggatttgcttaggggtatgttcggttccagggaacggcctcgatcgattccagaccagattgcttgcctaattaatataagcattgatgaactagaatgaatcctggttgaattccggaacaacccaacaggtcaaacgatgacattcagcttaggtttttgggtattccagctttattctgacgactcaatcatccagccttgcaagttaactgtcgagacgattaaaccttcattccgatccagcaccagagccctgctgagcggctgcaccacggtaggctgcagactcttctgcatagcgttgcttgtcgacctgagactgctccacatatggctgcctctcctccgctacaaaatttaaatgggtggaaatggttagaccagat

SEQ ID NO: 44854 - DNA, 471 bp, Zea Mays
gacacctgccaagtcgtcgctcgcaaggcattgagggccctgtgtcagatctatgaagaagaagtgaccgacaccccgctcagattctttccgccctttcagagagaccgtcccgcttggatggccaggatgcgtgcattggaagagtagcagctgcttgaagacgaccccacagtcgtgtacctcactgcatacctgctcacccttgatgcacaatatgatttcttggctcgacaccaccgtcagatgattgctcgagcagaaaatgaagagaagctcaactgtaagctccatgtggatctcacctcagctcaagcccgtgtagctgccttggaaagtcgtgaagccattgctgttgaagccctgaagcaagccaaggatgagcacgtccagaagttgatggaggcctacttggtaacccataaccaacgtagagccctgcggatccaagagcccgcttcatccaaccta

SEQ ID NO: 44855 - DNA, 486 bp, Zea Mays
atttaattcaagaacatatagccttcagggtatggccgcttgtagatagctgggaaatgccgaaggagaccaccaccgactctagcgaaggtggtctggtccggctgaagtataccttcagattcagggagaagtttgatgagccaaacgacgactggctgaagtgtatcgaagctacaagtggtgaactacttggagcatattccaaggcgaaagataatgctttgtccgcagccttcggaggttggggaaagaaaaggctgaacagagtttttgacgccatcggcttcgtataccccgattaccgctacctagtgcggggataggggaaaaagatgaaaactgctgcttcgaccaccccagttgagcctgtgccgaagggcaaaaaggtgaaggttcttacccaccggccgcgttacattgaaccagccgtggtgcctgagtttggcgcagggaccacttctgctaccgaaataaaagaaattg

SEQ ID NO: 44856 - DNA, 410 bp, Zea Mays
gtttcatgcatcgtaaagaaataaattacaataatttacatattcgatccaaagttacacacatcaaatattacaccttcgttacaataaaagcacaatgtccattctagtgtctcttacattgaccatttaaaaatgtttttacaataagtgctagtcttctttcaggattttctccgcaacttcatttagcaatttattgacgacttcatcaacaatagattcagccatattaatgatctccagtgcttcttcgtttctggatcagccaggggatcgaatggttccagtggaggagataattcagttgtaggaaaaattaattagtctgaatccataaaaacaaatgccgaagctgaacatcaaaaagatattacctatacgtttttcgcgctctgcaggttctccag

SEQ ID NO: 44857 - DNA, 300 bp, Zea Mays
tgaagttttggtactgggcttcactctggtttttaacccatctacagtagcccgcccctccaaaaaacctcccagccgccagaacccttcccagccgccataaaccctactcctctcctctgtcaattctttggtttctgccaacgtctctgctccagcctccaagtgctccagccgtccagcggcgtccagtactccagtgctccggcgtctgtcagctagtcaagaattgaagatgagctcgtcatatgaaggtagcacttgctctcccttctctgattatctcccggtctcccttcc

SEQ ID NO: 44858 - DNA, 454 bp, Zea Mays
ggaaaaaattgttttgtttttggtagcttcaacaagtaatcctgctcatgttggatgaatttgcaagcacgccagagtagatctagatacataacacaagtactgagctagtggcctagatataagacaaaatacaccaatagcagcaacactaccattttttgcatcaacagaagaagctggaagaaacattctgttctagttaacatttggcaagaaaggcttagaggtgaaataattttaccaaggaatatgtggtgatggcaattatgagtaggccaacatacctaattttctgaatggagcaacaaatgcaggtagtaactgaattatatccatgcagttttgtgccacacacaatgctttagaaatctgaattgcagatacattatgaagtatatgttcaaagaatgacaaagcgtcaccaaaatttggccatgaaattggacaaaaa

SEQ ID NO: 44859 - DNA, 334 bp, Zea Mays
ccgaggcggaggtccggaggctcgacgacgtcgtcgaagggctaggctcctcactggctcaccactttgaggaagaggtggttctactagtctccccactcggcactgggtcctactcggccgtgacgcctctagatgatgctgagggtactgcctcccccaccttctgttgcttgagctattcatcctgcgggattgtaataaactcttaagcccattatgtgtgtaatgtcctgagactttcatatttgttctggggttttgttgtgcactttttctcgtgttttgtgtttatcgtcctatccttttgcagagttcctgtcaaaacgcgagt

SEQ ID NO: 44860 - DNA, 1664 bp, Zea Mays
gtgtgtgttaagctcgcaggaggttcggctgggggaagagatcgcttggtacgcggatggggacaccattgtgcggagcgagcagaatcacagcatcgcttacgcgtacggtatgtgccagatacctgttcctggttttccggggatggatggatcacacttgtgtatcgaagcattataatagttactcgtatggatgtttggtttgagatttgatgggttccatcaactttcatgtgaaatgcgagtttgtattatcacacgatgctacacttccagtataatgcgtaatttgtcacattttctttacttctttctttcttcttttggttgagaagagtgatttgtgagtctgactagtggagatgtggcacgtgaagtcgtgaatgcattgcttgagaccgagaattaactccactagtcaacacggttcacctagctgttgttttcagcataaatacttcaggaatgtattcgatcgggtggatcatgatgttactggactttatgattttagtatggaagacagtacttagatttcacatacggatgaaaaaaaatcatgctgcttcttgttttcagttaatttttgttcatctgggtgtaatatgaaattcatatgcagatcgggtcttcggaccaactacaacaacccgacacgtatatgatgctgcagctctgcatgttattagtggtgccatggagggaataaatggtatttgaaattctcctctcttgtccatatagtattttttttgtttgaataacagtctaatatgcttatgaggatcattaatattattttctgggcaactttagagtaaactacagtgcacaatgtcaatccatgtgaaatcattgattgaaaatgcttttagtacagagtttatgcgatcatggcacacttgttttgttatttttcatgaatagtttcatttttttgttgataattttcagttctctgtcataggtacaatatttgcatatggagttacaagcagtgggaagacacatacgatgcatgtgggaaaacttattccaatatttttcctttactatgttttacttctgtagagtgtatgtttctagtcctgtgctttgaagtatgcctcatgctaccaattaacatgcaaaaacttggagaaaatagatacagtttaaaccttttgttaagtcgctttcttgtagactccccatgggcgcaatataatgttttgcctccatttcacatatagatctgttaaagttttcagccttttgttttgtttgtgacaccatatgttctcactgctcctgtatatgatctgtgatatgtccctttcctgaaacaagaaagctgctgtctttgccttcaacgtatttgttgacagcatttctctttcccaactttgaattaactgtagtgtgtacaaggttgaaacatttcttatggtgccattcgatggcttatatttggactgcttttattcttaatacaatgacactcaactctcttgcatgtccgagagaacaattcattttttttactttctcagtatactctgttttttacgagcagggagatcaaagatccccggggatcatacctttggctgtgaaagatgcatttagtataatacaggaggtatggtttggcatcaacatattcagtcaagtcattggtt

SEQ ID NO: 44861 - DNA, 466 bp, Zea Mays
tttagtgatgacatgcacaaggacgtgacatgctaactagcccctaaggtgagcatgagtttaggggaggacaaaccaagctaggaagagtgacctagaaagatagagcaaattcttaccataatttaactattcctagggtactatctctaaaccttgttgctttgcttgatgtggggccgattgttagtcaccatttcaatttactaaaaagttgaagatcctataacagccatgtcttcatgtctcttcatcttttgatggggcacatgatgctttgggcccaaagcctagcaattagagagagaaaaaagagaaatatcgaccgaaaaatcatgggaaaaatcaattgtaggcctatggagacctacaagtggggcatgtttctccaaattgcctaatagaattgttctaccatgcatgtcaagaattttgaatgcattaaccacactagtgggcagtcaaa

SEQ ID NO: 44862 - DNA, 303 bp, Zea Mays
cgacatcctcgacgccccgttcctgtaccacaaggacatgcgccacactcttcggaactgcagagacttcaagcactccgtcgggcacggccgacccttccaacctctacctcctcccccgctgcgaggaggaccaggagaaccgcgacaaccccagcagcaggaggagggaggaggtggagccttccctcgcgtcgacagagaggtcaatgtcatcttcggtggacacggatcgcaagagaacaagagacaacaaaagctcaacgatcgtcagatactggtggcagctaccggacctcccgc

SEQ ID NO: 44863 - DNA, 634 bp, Zea Mays
tcaggacggtggcacatctcttgaggtgacgtttctccgccttagtttgagtgaaatgcctaggccctaggcctatggcgttggcctcatcgtggctgacatggccaagtttgtcggtcttctaggcgaggaagttgagggagccgaaggtgatctagctctcgggagcgaaggtgtcactcccggcggatgctgagtagctgccaccaaaatgaaaaaaatgtcgctttggcaggcttgcggttccctacctagcgcactaactatcggagtttcgagaactgaaggacaatagatttgctttgctgctttggcagttcgcctagttagagtccggccagacgtgcgtgctcgatgcagctgctagccgaccgccgatgtaacgactcactccctcagatcctcccgtggagtggacacgtccctaaggctagtccctcacggttacggtcacagttacgcgcaggcagagccacatgcgaagacgctacgagaccttgccacgtcccaccctcattgcctggcatccgcctgccgttgcgcaacgcatagctttcatcgccatatcgtaaggacctacaaccttcaccagttatcaccgcttgagaagctttccacgctcctagtatttgca

SEQ ID NO: 44864 - DNA, 922 bp, Zea Mays
cgccttctcctcagccaccggatgcggcctctcctgcgcagccgccgcttctcgtctcatcgccgctgccgcggaggcctcgcgcctacgttccgccactgacgctgcgcagtggatgcgcctacactacggcgacatccgcgacgccgccgcgcagctcctgaacgggcttctcctcgccttctccgaagaggtaactgacctattcactcgtggtgcctctgattcacacattgctctgtcgatttgtgacatttgttgcggtttaggggccattgagagaggtgttcatggatattaagtgggaggtggaggaaggggaattgctgaaggattgcctggaagtgggagctaaggacttaaagggtttgcttgtcattgccaaagacctcttcgctggtgtttcaaggacttctacgcagcatagcgagctctgaggtttggtgactttaagttgccttttctgatcgtttcaggaactcacgcatgcttgtgtaatttagtttactttagaaacctgatgttgatccgtacagaaactaaacccttgtgatatcactgttgtgtctgctactaatgggctttgaattttgagctgtgcataattttgctaatctgaattcatttgtgatcatggcactaccaataactttggtcctttttttctcaatgcacatgctattttattgatttagtggaaatgttgcgcacgaaactgtcctatgcaaacattggatagagataatattagatgtagttattctccatttgggtatttaaataaaagctgcagatatttgcattgtggtttgtggattttgaatgtaagagcttaggatatgccgttttttggtattaggagctcatactttttatccagaaatggatgattctgttgccaagaatttaatatatataaaag

SEQ ID NO: 44865 - DNA, 449 bp, Zea Mays
ctcttctgtgtgtgagctctttgtttccgactcttttgctggaccaacactagctttgaccatcacaacaggaattgtctccgaagccaaggggatagcttcgcctgttcagcaatctctatcctctttgtatcaagtattgtagttgtcctttctaaagaatgaggcttcaacctatgagtcaaaaccttagctctctttggcttaggtgcggtagaggaagataaagttgccatctttctcttcgacctttgttttcggacaggaaagcagtaatcaggataaaaaatccaatcacatcaaagactctattcaacctcctctttccgcgagcgccgaaggctatggtcatggattcatcttctgccttcgtgtaaactcccaacagctcgtcactggtagcttagacagcctcaagccagtcatcattcggctcatcaaaccgattt

SEQ ID NO: 44866 - DNA, 865 bp, Zea Mays
tacagactccagagaacatgaactctgaatatatagactaaaatttattcaaaagttaagctacaaatgataaactatgaatctagcaccatggcggcagcgcgcaggtgcgcgcgacagctactatatatataaggcaggtataacgggagctctgggcttcggatattaaagagtgcccgggtcggttacaggatctggtccgctgaaccaagtgcgcatgagtataatggagacgagacagagagcatggaggacagacggcgccgtgacgcagttggttaatggaaaggcggtaaacatatggtagtgggcggaattatagggattagattccacatgcaaacatgcttactctgatacgtgggcgtggaatttatgaatcttacatggggtataatggcgggagttaaagacaatatcgaataagatgttgaaagatatggcataaaacagatacgctataaatgttgcatatatagtatatacagtttggcgtaaaacattgagtcatttagcgtaagtagtgtgttagggttatttgtattacatgtacattgctataatatcggtatggttttggaaattattgaaaatgccctagaaacgtggatgtggttacttgtttagtatagcatctgtgatttcctttcattcgaaaaaaacccatactgcataactagttggcggtggagatggccggctctggacaatcgccagcgatggtaggagatgacgttcgtcttgatccagagacagagagagtagttgatggtaacttactggttacaccacctcctgctctactggggcctgtaatcgacgagatgagcataggggaggaaggagaacaaagggttcgacc

SEQ ID NO: 44867 - DNA, 789 bp, Zea Mays
ccccctccaccaacgtccctgtaatgtcaaagcgcggtacggtgctagtatgtatcttttttcgcatgcctactgccaatccccgattacctacaatgtcatattgtgacacaatcttttttctcctagctagtagtatattatgtgcctaccatcaacgtatgtaaccccctcatattatccgggccagcttaattctattggttctccatttatgctaccacacgacgggcacttgtcgcccatagtagtatagcacatttatggcctgttttgtttggatctaattttagcacttcacgggctccaaacggactaactaataaattggctaatttgtcagccttagagctagcaaaattgtctgtacattagccatttgaccatgcatgtaatactcatttatgtagcttgggtcgatttgacctaaaatcatactacactgtagtactcctagttgtaacacgttgctaattaatgctagaacttttttttttgaggacacggaatttgaggaaaagagaggacgtggaccagtgcatacgtagacggtaggcttttcctccctgcatctgctgcattgcgtatgcatggtccgacgaccgatgatcatcagcagttaagtagccattaaatgacatacgacgtactacgcgtggaagaatgtgcgtgcgtgcgtccatgtccagtgaagtccatggtggcgcgctgtggatgagtggcacagagcatcatgtccagccgtcgtacgtacgtagcagtagtagtgagtactagtactccctcaac

SEQ ID NO: 44868 - DNA, 422 bp, Zea Mays
attaattcggtcggtggtaaagtgcaagcagataagatatgctcaaatataagggtggaaataagggggatagggttccccagcgacctaatagtaatagacacccctgggggtagatgtcatcctaggaatgaattggttaatgaagtatgaagcgaatgttagctgtgacaagaggaccataacattgaagtccccgtccggagaggaggtagtggctgagctaaggatgcctaaaacagcgaagggagattgtcaccaaatttcggttgatagtaaggaggccaacccgcttgaggctatcagggttgtgtcggacttttcagatgtgtttcctgaagaattaacgggcatgccacccgagagaaaggtcgaatttgccatagagcttatccctggtaccgcccccatttctaaaagag

SEQ ID NO: 44869 - DNA, 797 bp, Zea Mays
gtaacatatataacgtcaaattagtttaaccaaatctaccttaaaaaaatgtttgttcgataccttaacgtcaattgataaaatataggggcagtgcattttggaccagcagaaccaccttcatattaaagcaacatatatgtgcctttaaaacttatgacatcattaaattttgacgcgttaattgccttccaatcacataatggagaggacgtggaaaaagagaatatgagatgtgggaattggatatatcacaagtgcctgttcctgttgagtgccgcagatgagatcgtcctagtacttagtgtaagatcaagtctagtgcatgatagaccatcttctaaggatggttagacacaaagatgagataaacgagtttggaaatggttatgcggtctgtacaatatggcatgacggtatgacatctctagcgcacggtggttcatagtagcctttggtttctgtgatgtttttcatccaattaccactaaggatgttgtgcttcctagccggtggtgccagccatcaacttctaatgtcatgttatgaaggtaccctgtgtatcattgtgctactgctgatcttaaaaaatgacacaagtatgaagtgtgcatatatgatgatgactgcattggaaaagggagattatagtaattttttggagcatgattactatgagtattatgttaactggtaactccaacaaaatagaagataggtgttggcatctttccgggctaaatactaatgatccctagggcctgcacacggtgtgcaggaccttggggacctctctg

SEQ ID NO: 44870 - DNA, 700 bp, Zea Mays
cccatggctacgccggtttgtcggagagggattggaagttcgtgacaaaccggcggctgaaatctccccaatcgttgatgcagtgtcaaggcagatgtcgaagccattgcaacgcgtcatgccctaggacaatgggtaggtacgctatcatgacgtcttctgtttccccagcggcccgggcgacggtcgtgtagatggccaactagcccctcgggtcttgcttgggctcgtatttgtcgacgttggagactttgaagtttggatgtcattggattgctcggagttgggggtgagcgcggagaccccgcacttttccctttcctcctgtcgatgatcatgtcgccggttccggggaggtgagcgagtctcatgtcgcctcgaccgttccaggaccggactgttggtggaggttgtcgccgacttgatcctggtcgcacgtctgcgtgccggtgcaccatgatctcggtcgtactcttctcggcgccttatttcattttcatgtcggtgatcacgcaaagcgctgatgttgcttcgtgcgtcttgtcaactgttgatggcgtgacgtagatcatttggcaggtaggcgagaggtagaagatgattggctgcctaagtgcgtactcgccgatatccctccgcgtctcgggttcgcgggaggccattggctatctgcgctaggacccttccaaccttgcttagc

SEQ ID NO: 44871 - DNA, 503 bp, Zea Mays
gtcaaacacgtggaggattgcttctgcccgaatttaggcacctgtttagctacccttgcgtgcctatctcagccaaggtcccatgtaggatctcttccttgcgccaagatcttgcttttccatgtgagtcctgagccatgagacacatcaggcgaggagctacgccagtgtcaagtcaggtttgtcacagcgcccgggtcacgacaaaagcgtgcgccaagcgtgtcaaacatgctcggttcaatgtcaactttttccaagacgcgcctgaggtaattaggcgccattttgtccattggatcatttggatttgagttgagaagctaggtgaacacgacaagtttttgaattcgggttgggggacttagagagaatctgggttttcccctagggttcttttggttggtgatcaatttgtggctgattaatgtctgttttgaggaaactttcttactatctttgatagatatttttatgatcatcaattgtttaattagcccaac

SEQ ID NO: 44872 - DNA, 624 bp, Zea Mays
aagaaattcgcccgagtcatagccaaaaaagaagaataaaaatccaccaaataggtcataaatcacattaaaagaaaagacggatattacaggagggagaaaaatcttgcacaaacctgctaggaaattggagaggtactcaactctctatactaatacctccttcttaagtgtttggcatgattagggttggcaggatcgcaagatacaatctcccaaccagccacttcaatgtacatgtgtctatgacaaaagacaaatactcgtagaaactaaaattagatatactctccagagaagcaaaaatcagagacttgaagcgaagaaggcactaattgtaattacacatgtctcgtgtctacattaaggggaggcaactaactaagagtcaggcttgtacatgtagaagggaaaaagtgactgttttacatatggaaagtcatcttgataggtgcaacaacctgcattacaaataatagaaaaacaaaacccatcagctctaggaaagtaaatcacattagcagaaaacctaacaatctaaaccgaagacgacatcatactctacagaaaagcagaagaatttagaactgatagaagtaagagcacgttgaaatgcaatgaaaa

SEQ ID NO: 44873 - DNA, 380 bp, Zea Mays
atagaatcgtggtgtcgagaggtgttgggcaaacccacaataaaatccatgcaaatatcctcccatttccaagatggtatgggaagaggttgtaaggtacctgctaccttcaaatgactagccttgattctttggcaagtgtcgcattcagatacatacttagcaatttccctcttcattctggtccaccaatacaaggatctgagatcatgatacatcttgttactaccggggtgcatggaaaatttggaaaggtgagcttcatccaatatattatgcctgagttctgggttcttaggaacaaccaatcggtcttcaaaccatagaactcccttgctgtcctgacaaaagcatttgtacttatccaccctttgttcgag

SEQ ID NO: 44874 - DNA, 1203 bp, Zea Mays
agcagtcaatgccccagcaagacaaggagcgccacagcaagcaccaggagtccgtggtcaggcctacaaccgtggaaaggtgaaccacctgtaggccgaagcaatccaggatgtggtagtaggtatgtttccagtcgaatcctacccaacaaaagtattatttgatactggtgccacgcattcttttgtttctacatcttgggtagaatcacataacatccccatagaacccaatgatcccacctttaacagttaattcagttgggggaaaagttcagtctgataggatttgtccgaatctatggattgaaataagggggatagatttccccactagcctagtagtaatgggaactcaaggggtagatgtcatcctagggaattagaattctgattgaggcaattagaattgtgtcagaattctccgatgtattccgtgaggagttacccggcatgccacccgaatggaaagttgaatttgccatagagcttatcccaggcaccgcccctaattccaagagagcttatcgagtgtccggaccagagttggtggaactcaagaagcaaattgatgagttgttagagaaaggctacattagaccaagtacatcaccttgggcggccccagtgctatttgtggaaaagaaggatgacactaagaggatgtgcatcgattacagagcttttaatgaagtcactttcaagaataattaccccttgcctcaaattgaagacttatttgattagttgagaggatctagtgtgttctcaaagatagatctgaggtcaggttaccatcggcatagaatccgacctgcagatataccgaagaccgcattcatcactaagtatggactatatgagttcatggttatgtcattcggattgacgaacgcgcctacttacttcatgtatttgatgaacagtgtgttcatggactacctcgacaagtttgtactggtgttcattgatgatattctcgtatattcccagaataagcaagagcatgaggaacatttgaggaaggtatttcagaggctatgagattgccagttgtatgccaagcttagcaagtgcgagttctagatcgagcgaagttctattcttgggccatattataaaccgaggtggactagatgtggatccgaagaaggtagcagcgattctagactggaaagcaccaaaaggtgtccgaggaatgaa

SEQ ID NO: 44875 - DNA, 285 bp, Zea Mays
tgctgcgtttatgaaggcgggatgtactcacgccaaggtggttaacaagccaacttttaatctttcggcgtaagatataattgatatcccggtcgaagcccgaagcatagtgaacaaatttattactaaaatttgggctaagggcgggcgcgagctggctggggatgaagctcgaaaattgcttgattcggtatgagacttttacttatcttttacatttgttttcctttatttctgattaccttatactttcatttgtgtgcaggatggtggcaccgaaggttg

SEQ ID NO: 44876 - DNA, 389 bp, Zea Mays
cacaacatgaactcattgtaatcctcaacgatcatcagccaagaggagtgacaacaggaaaagaggagcaaaacaaggagagggctacaccatggccctgctgttgttgcgctcatttgagcaaggcttcagtggacacacatagagtgctgctaatacaagcaagattgagtggacaacaactacaattgaggaaaaagaaacatgctaacactaagtattccactcattttagtaaatcaacaacattggaacatctatgttaaaattcccaatcttgggagtaatatcaacatgattgcaaatcctcccactaatgcttcatctaaaattcattgaagttttttttatcttttccctctcaatattcatggcctctagtgcttctc

SEQ ID NO: 44877 - DNA, 466 bp, Zea Mays
gcactgtttaaaagggggctcattctagcctcgcgaaggcgccctcgttggctcggacagttctgaacgacgacagtcctggcaaggttgaaggttgggcttcatagggcaaagggtaccacgcgcgggtgaaggcagcatcgcccaatggcggggcctaggccgcggtctaccgtcatttgggcccatttgtaagcccctccatggggtaggattcatagtacgtttaattagactatacttaacatcgttgtaatgaccctgcaagggggaatattctggagcagtaataggtaaccgggggcataacagtatttagatgggcacacccacctactcgattaactataaataccctcacactgtacatggatgagacacgcttaataagacgctacatttccctgcttactgttttgttgagcacatgtgctccctctttctcgagtgattgggaccacctaac

SEQ ID NO: 44878 - DNA, 446 bp, Zea Mays
gacggagcaaaccctcggcaacgagggcctgcagatcctccacagtgacggtggagaagggccacgggtcgcgtgacggaatgacggtcgccttgtcagccatcgccgagcggaagcggtggaagcggaggggatgaggtgcgcagttttctcttctctctgtctactctctcaggttgcgaaagcaaaagcggaaggcaagcgcaagtggcagggtaaagaaccactgtcggcccctcttccaggaatataaaggcccgggcgaaatccacccaaaacttcgcccgaacccttcgtgaattttaaattcgagggcaaaacggtttttccgttcctcgaacgactcgcgcacgcacaactgataccccgcgagtcgcccgtcccatcgcattaactctctggcatgacacacgtcacctctggcaggcgggcgggcgccgtttcgc

SEQ ID NO: 44879 - DNA, 723 bp, Zea Mays
tggggcgttgccgtggtgccgcatgcaggccgctgttggggcctaattgggtggtccgggtggctccctcaagtccactggtggtgtacgggagcttgccaagcataatcggtggctgaccctcgacgaattgctcgccggaggacgccgtgccgcgcaccatcacagaccgagccgcatccatcggcattgtaagtgagactcttccctccgagtttgctttcactcgacgcttagctagtgctcgggtcgctaattcgtagccgccggcgggagctccgccgtggagaggagcgcggccgtgtgggtcatggcgctgtaggagtgctgtgtcccgagattggggacggacgcgtaccgtcgatctagccaccgacggtctcgattaaacctggcataccgattcggccttgcgacttggtgatcgtcggatgtgaaatggagggacctggttgatggttgagagaacagacccaagccgtagcatttagatccaacgcttgtgtaagctttccgggttgtgttacgttagatctaatcgtagccgtagggtgaaatcggacggccagggtctcgcggtaccccttcgaccgtggaatcattcaaaagagcccctggaaaatgaaatattcaacccaccgttcatgcagatgctgttctaagtcttgaaactatttgcatagtagaccctgtgctctcttaattcacagccgaagtccagac

SEQ ID NO: 44880 - DNA, 578 bp, Zea Mays
cttcttctctacatcgacgacatgatcctatctgcctcgacgcgtcgtctggtccagcatgtcatcgcgccgctacatgatgccttcgccgtgaaggatatggggcttgttcaccattttctcggcatcgatgttcaacagaaccgcaccgacttcttcctctctcaaggatagtatgctgaagatctcctcgagcgtgcaggaatgacgaactgcaagcctgttgccacccctgccgacacccaacagaaggcgtccgctggcgatggcatactcctcgacgacgccacttcataccgtagtatcgtcggcgccctgcagtacttgacgatcacccgtccggacattgcctacgcgcgtgcaacaggtgtgtctacacatgcacgcgccgcgggacgtgtatctcaccatggtcaagcgtattctccggtacatcaagggaaccatccacttcggcatctagctgcgcactgcctggccttcgacgatcactgcatactccaacgccgactgggcaggatgccccgacacacggcgctctacatcgggtttttgcatcttcttcggcaactcccttg

SEQ ID NO: 44881 - DNA, 2036 bp, Zea Mays
cttgcaaccatctccaaatttgcttctggaccacacatatggatgattttcatctagccaggctatcgcattaggactcttctcctctatctttctcatgtggtagtcgaacttgtcacttgtacaagccttagcagctgcccacatattctgagaaaacaaagggccaaaatacttcttcttcatattcttccatagatgtctcatacactctctgtgttccactcctgggtacacaacatctatagcagcccctatccccttgcctgaaacatattaagtgttagcttcataaaacattgtagtaaactgaagttacaaatgaatgaactcaaatttacctgcatctgtactaataaccaatcccataggagtaccaattgattgcttcaagttttggacaaaccatgtccaactttcaatcgattccgtctcaatcactccaaaagccactggaaaaagccagttatggccgtccactgcaacagcagctgctagttgccctcttgatcttcctgtcaagtgagtggaatccatagcaatgtacggtctacatccttgtaaaaatccatcaatacatggtttcaaagcaacaaagaatcttttaaaacacatgtctcccttatgatcttctgtatctaactcaacaacactgccaggcattgctctacaaagctcatctctatatgtaggaagtaagtcatagctatcatcccatgctccatatatcatgtcaagagccttctctttacctctaaaaactctatcgtatgggatatccatcttgtacttctttagaagttcctgctgcaacattttaggcccaagtgtaggtgtctcccttaaccaatcaactattctttcggctacccatgtatgtgatgccattgtatcaccacatttattaactgaaccacaagtgtgttttggtccatttagcttcacctacaacacaacaatacaaggatcatcattagacaaaagtatgttatgctaatgaactcaaaaatatataagatgcataagaagagttaaattaccatgcacccaatgtattttttgctagttgatgcaaaaaactgccatttacaacccttatctgctctcttgcacttggctctaaaccttttcttgcacttcttaactgtctcataagcataatcatgtaaaataacatgatgagttactgcagacttgcatgcatccacatctgggaacatcacatccttatcaatacaaggattatccacatcatatgcaaaggtagggatatcatcatcttcatcttcatccaatatttcagcatcaggatcatattcagagtcagaaaaatcaagatcagagtcggaggatgcggctaaatcactatcatagctgctatcacttagtgccttcagtgattccgtgtcagagtcatcatgtgcaactctcctctttgatcttaacgggtcactgatgtttaatgtaggctccccatttaccactctactcctcacttttgggtggaacctacgttttgtaggtgaaaacaacaaaggtccctcaaaatcatgaacctccccttcaatacgcactactcccttttgcatagtgacttcaaaccattgtaacaagtcctcgtcagtttttatctctacgaaatcatcatccaaacaacgccacaactttaaatattgcttagaaccccatatgaatgtctcacctataaagtctaccaattgtaatagtctaaatttggtgtcaacagcaagtggtcttaatgttctacgtgggtaatatctctttggctccccatccggcgtggcaaaatatgagcgaattgtgacaacaagtttcaatttaatgcaaaatgtcctacaacacaagataaggcagtgacaaactgacaatacatatagggaatgttagctgtagcctaagtacaaatgctattcactgtgaacaaactagaatacttaccgagggatccctttgttcctctgctcacctccattactgagaaccatcatggagtgttcgctgctcattaagccgcc

SEQ ID NO: 44882 - DNA, 375 bp, Zea Mays
acacactacaccctaccccatgaaaaagggccatatattccaagaatttctaccaccctttcccctaagcaaaaagttgccaaattctagaataattactcttgcacaaagaagaagatagaaaaaattagaaatctgttgtttgacatttttcaagtatagtggtagtaggaagcacccctatggccaagaactttagaaaatcacagtaaaataacaaataagtatcagtggctaaaacttggtacaaagtcatattatagcacctaaataccagcaaaaataaaccttagggaataatccactgttagaatagagttgtagttcaaagcaccccctctgccctaaaacttcatatttttgtacagagtgaac

SEQ ID NO: 44883 - DNA, 619 bp, Zea Mays
gttcatgtgagtcattggatccaaagtcaagggctcggattagatcaatctttaatcgaaccggtaccagatatggatcgctagatcatgatcctacgcaccagattagacgagacctatccgaagcggtacacaatcctgaccgctagatcccgatccaatggtacctgttttaaataaacgtgatccagtcacatccacagatctcgaaatcaacgacccacagcccgagccgaattagtatgcgataatggaatcctagctcactatccttctcttaagaaggtagctcacgttctgacaggaactccgcaaaaggacaggacaatgagcgtgaaacacaagaaaaagtgtacaacaaaacactagaataaatacaaaagcctcggagcgttacacacataacaaacttaagagtttattacaaccccgcaaggtaaatagctcaagcaacagaagggggaggcagcaccctcggcatcatttagaggcgtcacagccgagtaggacccagcgcccaggtggagacactggcggaaccacctcttcctcgaagtggcgagccagtgccgagcctggccctttgacaacgtcaacaagctttcggacctctgcgttg

SEQ ID NO: 44884 - DNA, 1078 bp, Zea Mays
gttgttatatgcttccttgcaacatataaaaccatgcgttgctagacatgcgtagctacagggttgttctgttgtagtggttgtgcatcaaaatcaatgacttggcgtaaggaagctcccacaagccacatatgtgagtccagttatgctcctcaccaaaaccttgatacattttcccactctcgtctaggacaagtttactatgctcttctgtaatttctatcccactatgtcgcttgggcggtcccttcgtgaggatggtgcccttcctaaaatcctttctctgccttctgaaggagtgattaaagggtaaaaacatctatggcaatcaaagtaacatatcttgccaccagcactaagacgaaaacaatctgtatctttagcacaataaggacacgtcaatctaccatgcacgctccatccaagaaaataccatacgccataaaatcatgaaccgagaacagatacgcaacacgaagattgaatttttgcttcttgaagcagtcataggcttccactccttgccatagcttctttaactcttcaatcagtggttgaagcatcacattgaggcatacgccaggatgctcaggcctaggcataacaagacatagaaacataaactcatatttcatgcaaagagcaggtggaaggttgtacggtatggcaatgataggccaacatgaatacgacgcaacggtcatattgaatggtgtgaaaccatcagttgccaagccgatatgaacgtttcttgcatcgctggcaaaatatggatcaaagttgtcaagagccttccatgcatcaccatctaacggtgcaccattaacccatcttgtctgtccatacaatctttatgccacctcatgtgcatagcggtcttcctcgatagaaacaaacgtttcactctaggagtgagaggcatgtaccgaagctatttatgtgcaacctttgtcaccaccttctccccttcttcatttacaagctccacgtacctcgacttcccacattttaagcatttatgctcactgtcatgttccttccaaaaaagcatacagttgtcccagcaaacatcaatctt

SEQ ID NO: 44885 - DNA, 869 bp, Zea Mays
aaataatgattcatacatttcttgagactcgaacacaatctagacgtgcccttggcgctcgtgtgctgggtcctagccgctaggtgcccaccacctgaccacccctcgctctgtggtttcaggagcgactatgaacccttcgcgagctgaccttcgaactccgaatttgtggctctggtccgaccttgtcatggttgttagtcggcgcaggcctatcagtcccttctctatataagaaaaaataacgagaatggacaaggcaggatgagccatcttactcgagagtagtcgcgcaacggttgatcgtgccagcgtcatgcggccatcgtcagtttgcctgggttaggtctaggatcgcctcatcacaggcctagtggccatctctggtacccggccggggcctgctcgcaaaggccagcgatacgttagcccaaacgttaaccgcttaacggggtgtgtcttcgatccatgcacgctggtgggttggcctttttttattcggaggcgttgctcggtccaagcttctcgttcacctttcaagatcctatgtgtctcttcctcttcttgtccccaccgccctctgtcaccgcttctcgcccgccatgaaccccttcttctgccttccgtccttgggattcatggggttttggagccgttccttggtcgagcaagctcgtcttgatgccctcatctctcgaggggtcctccatgagggggattacaagctcctcggctccgaggacattcctaagctgccgacaggcttcgtggttttgttcgtccacatctacaagcatggcttcgcgatgccccctcactaggggtgtaatcggatcgaatacagacgaatatcaatgaaatcatatttg

SEQ ID NO: 44886 - DNA, 355 bp, Zea Mays
aaacctacttagtataacctgcgtggcaagacaactgcacctactcagtacaacctacgcagaagcgtgccaaaacaactcccacgacaagttcttatgtgcataacttatcttgtttcttatgtcctctgttttagaaattgttaaatgcgcctttgtattcattgacctacaacaagttcttatcttgtttctttgaccacgacaaggtcttgtttcttttactacatgtcctctattccaaatagttacatgcatgtgcaacttgcccacagatgagtttgaaccgtgccagctgggatgtgatgacaactaaaatattcattgacctatgcatcagttagaagaaccttaa

SEQ ID NO: 44887 - DNA, 355 bp, Zea Mays
ctcgtcctcgtcgtcgagctagggcatgagatcctcagggtggacctattgttagtggtcacgatggcgctgatgacccataaggcgtcatcgagacagaggcgcacgaggtaccaactcagcgactggaagacgaatggcacaacaacaacggctaaggcgagcgatggagtgaggggagccatgacgtagagtagacgccaggagcgcgggaagagcgccacaacacccaagagctccatgataccgtcggtgaagaagtagaaggtggacatcttgtgcttgagctctctaaacttcttgggtctgccattgatctatacccagcaccaccgactccacggccgtcatcgag

SEQ ID NO: 44888 - DNA, 648 bp, Zea Mays
tagcatatgtgtatttttctttttcaaaatcatttatttttcaaactgtatgttcccactgtttgcactcgcatgtatactctccagcttatatgtccgctgcaactttgaattggtgttatccccacacaattttattagacctttttgtgtgttgtacgacccaatcattatcaccaccatctgggtcagtcactatttttgtatgtagtggtatatttagttgattcttcaaatctattcataacagctctagtgtatgcccttgagacactgacttcgaacctatacaacgtgtcggttgttcttggtccctataagttgttaccatcattattacataaaataaatctcattgattattgaactacaaaacgaaataccttgctcatcaatgtctcctttgattcttccatcttcctgttatgcaacattttcatcatttgtttagcaaactcatgcagaggggtgttcgcatctacatgtgattttcttcactaaactgttcatgctctcactgcgttgcgtagacaccattaccctacagaagtcatttttaaaaaagcctggtatccatttttcctaatttcatataacttcccaagagtcacatcttcatgcagattgtattcttctagcatcactgcc

SEQ ID NO: 44889 - DNA, 625 bp, Zea Mays
aattattggcttgcttgtactatattttaggttggagggttgattgctggctcatgggcgttctgctcactgttgtattgctattgtggtgttttgttgtcgcctgctgttgctggtgtggcagtgtggtggtctactgtattgctgctattgctggagcatggagggcttgctattgctgccaaataatactgttatcatgtgactgagttatgttgttggctgctagttgttcatagaactatttgtgaactctaggctattgtgattgctattgggtgttggcaatttggcatgtaaatcctttgcttgttgttgtgtgctattagcatgttgcttgctgctgttacctgttagtggttgatattgcgaagatgacgttctgctggtggttgaacacaaccaattttcattgtttagatatttacttatgcgcttctttggcagttctgagtcagtatcaactaccttttatctgtttatataatatgaacttgtggattatgcctaaatagattgtatgctacagtttttttcttctaaaaatgggttgtttgatgtaattacataaagcttggttgtttcggtcagaaccgcaaccgaaccgaaataaccaaaattgtcg

SEQ ID NO: 44890 - DNA, 717 bp, Zea Mays
ggatcataaatgtgttagccttgcataggttgtttacggtatcttcagacagtaatgccatagagtcttatcaagactataagacctaagatggcttagcttagattgattgatgtcaagccctacctaataggggtgacaaggctaggggatgcttaaggcgaccgaggtcagggctaacctggttagggtgattacttgggatgagaaaggttgtggctgacctagttagggcactcggtcgagggccgacctagtcgggttgactaggctgagatcgttatggtgggttcggcttagtcagggagcccaattcaagttagtttacgtcggggatgatatggtcaaggggtcaacctagtcaaagccatgttcagcggtgctcttatcttagggtgagctttcgaagccatattggggtgtccctagtatgggtacacgtcattagcccctagacctgtggttgagttgtaaagactcagcctagggtttaccttgcaaagttctattggatctaggttttatctatgtctagattatctctagtgatcgttgttgttctttatgttggttcgagttcatcctagtcgcctgatcgagcacgcacaacatatccaatggatgtagccctgagccctcgagtaatttcgtgaaattggttgaggtgttgccaattagtaggacttggggttttcaaaattgacccatcatgcgcat

SEQ ID NO: 44891 - DNA, 539 bp, Zea Mays
tggcatcccaaagcagcacttcaaccactttaggtgaaggttgtgtgcgcggagggcatcaaggacgagatgaacatgttgtacgtgctcagaccatgatgaattatagatcaaaatgttatcaaagaaaacaagcatgaagttgcagatggaagggctagaggacttcgttcataagcgcctagaatgtggtcaacacattagagaggccaaagagcatgatgaagaacttgaagtgactatggtgtgtcatcttctcgatatcatcgggatgcatccgcacctcgtgatagtcgaatcgcaagtctagcttggtgaagtacttggcagcatggagctcatcgatcaaagggatggggaacttgtccttgtacgtcttgtttagtgtggtgtagttgatacaaaacctctaggatccctcctccttaaccaatagccaatgtcgagaatgaagaagtgcttgaccagatgatgctgctccaccatggcagcacactagcgcttgagctcattctattgcaacgatgagtagcaataag

SEQ ID NO: 44892 - DNA, 756 bp, Zea Mays
gctcggggaaagaatccccagacacagagaacagtcgcataggacggggggttatttttcagaaaggttatggactctttagcaaaatggcctggcgaaggggtacgtgtgatttctggtcgtccgatcagaaacggttggcctggattagatgcgaacgattcaaattagatcagcgcggctgtgaatcggtatgccaccatggcccctggatcccgatccgacgatcgtagtttaatgaaatctagatcagatctccatcgctcgattcccccgcaacgacccagattcgctcacgtgaaagggtatcccactgtctaatctcagtcgttcagagatcaatcaacggccgaagtgtttctcccccaaccgaaacagacgacggcggcgccgccatgacttcacggcggagagtccaccggagaatcccgcaagcggtgtggatgcacagattcccatgccctctagcgtacgggttaccccatgccatagccaatgcggtggggaccctcacaccaccagcaacccgtcggctgcacccatccacggcacgcgacagatttctagcccccggcgaacaattaacggagcacaggagttcgattcggagctaagacgagcgcaaaagaaagagtacacctagagaggttaatggagggactcaccagccgacttgaggtatcggggatggccgaccacgaggtagcgacggtgaggaccccgcggcggtggaattcttccgccaggcggctcccg

SEQ ID NO: 44893 - DNA, 1644 bp, Zea Mays
ttcttcttcaagatgactggaggagcaggaagcaatttagaaggttgccgagtaacagatttgatgaactcttctctctacatagactgggaagcctcctgctcgccagaatgagaagaaataagactgggaaccaccccagctggagacatcagaatgtctgccacagccgcagtaggctcaaccaaactcaaattaggaacagaatgtgtaaaagttattgctgtgactggagacaccaaaccatctgccacatccccgataatgactgggccctgaccaacgtgatctgtcccatcagcagcaaaaccagtcgccgatgctggagaaatgatagcatctgctgcagccccaacattgccattctcaacgataccgtcaatcagctgtagcttttgatgtcttttcatggaataaactaacaaacttggcgacataagatgcttccttgttaaggaagactccatagggtgaatgttctgcaattcagattcaaccatgggaagacccactcccccggagaagacattaacgtcctgcaattcagattcagccatgggaattcgggatggagcatcagaaataataacagcttccgaacaagttccaccatccactggaataacctcttgacttaagactatcgggggagagccagtcaaagtatcttcagtaacgacagtagaactagtagcttccaaaaatgcatcatcaaccgcaaccgggagtggagacacaagagcagacgatgtcttaggaatccaaatagacacagatgacttcaacttcctcttgggaatccaaacttgcttcatcttcttgattgcacctttctcagcgttgaatacctccagggggcctagccgattaaggaccggtaggcgaggcatcctgactccttccttcacaaaggcctgcacgcgcggcccaagtcgctaatgaaccgacacccgaggtaggaccgctgtcatcgaactttttccgggagcattaatactaaaggacgacctcctagatcgacgccgcctccgccgcctgccctgatcgggatcgtccttcgccagaggaggtgacggctggagggactgcagcaagttcggtcggtcaaggaccttcaccaacacccggataggtagactaatgaacggctcagcattccaccatcggtcatgaccggatcaacaatttcaagcttaaactccctgggaatggagctcgggctagaacaccaggcgataatcttgaacacctcacgctgtcgctcacaatctgggtgaagatcagcaatccagcaccactcattgaggagagcttgcacagattccaactcctaagcataggaagggatgccagacacttcaatctccacttgaaaaggcagagacaccgccgcagatgagttgaggattctgcttcatcgcataacatggattttagttgtgggagacaaattcacaattctgcccccatcataggcatggtccgccatttctaaacttggaaggataagaagaaaacttgcaggacccaatcgacacatagacagtgagacagtgagtcatgtacaagctccagcctccgcgcaaaaagtttcgtgacattgaactacaactccaaagtttgagctacatttcttactttttt

SEQ ID NO: 44894 - DNA, 399 bp, Zea Mays
atgacatactagtgtatggcacgtggattattccttcccgcggtgcacggtggcatggccaacaacaccagatcgtcgacaagaaaacgtccggcaaaccaggcctttccatgcctgtcactgccactatcatggttaggacgcacatttgattcgccccagtcaccacctgccatccgatcggccgagcggatcagaagcattgacggctccgagagcatccatggcaatacctggccaatccctcaacatgagccggtctcactttctgcatggcgacagcagtaatttccttgtgatggattcagctcagagcgcagggtattcggccagctcgggatccttggcggcgctctatatctctctttctctctcctccattgacgcacgtctaacgtc

SEQ ID NO: 44895 - DNA, 1048 bp, Zea Mays
caatctaaattgttccagcataatgaagaagcaattaaattcatttatagatgcccacggtaagtaaatttaaaagacataataaactcacccaaaacgatgaccacactgcgtcttggtgagtacggtcgggtccatatggtttgaggccccagtgagcccaatgatatgcccctatctctaccccgttgaattgtaccacccctggatagtgaaaaacgagctatagatcccagcactgtgttaactattgtccggtgacctttgccactccatgccacctccacccagctcctctctcctacagggtttatgaccctatgttggtccaagggttgtgtcggtggaactctaagggaccgccgaaacctacaaaattgtaaattgtgcactggtaatagtatcaatccaacaaaaaatagaactcatcgtcaaaataaaaatacctgaagttcgttgcctgtgtcgttgtaacaacctcgtcatcggcctctccatcggcctctccatcgtagtcctccccatagtcatcatcatcacgcatcgatgaaccttggcctgccagctcgtcctcctgcctaggtgcattgtggtctgccgcctcgcgctcttgctcaaatgcattgtggtcctgctctagcataagtccacttgagcctatcgcctcacgctcctgctcaagtgcattgtggcctgccacctcgcgctcttgcccaggtgcactatggcctgccacctcacgctcttgcccaggtgcactatggcttgccacttcgctcccctgctcctccatgcaaccaaggagctgctctagccattgccttaacgctgtagagccctacaaacataatcaacaatgagatatatcaagtactcaaaaataaggtgataatagtattacatgtgtagaagaaaagaaaataaaacaaattaaatacctggaacaacatagaggatgtatccccaccacctgaacccctagtcgatcgtgacctcgaggagtcaccacggtctccgcgcttcttccctttgagcttgtccatgaccc

SEQ ID NO: 44896 - DNA, 487 bp, Zea Mays
tcaccatcagagcgtctgacaaagcaagttttagggcccagatctcaaatttttatgtgataacttgtttatcctcctgtgacaaagttgttgatctataattcaactttgatcttgctattgtaaccacgctcagatactcactggatcattctcaaaagagctcccaaagttcatcccaagttactgtcagtaaatattcagacactgagttgactaacagccagatttttggtctatttatctccaaattttgtatgacatcaaggtttaatcacttaagcaaagttgtactcctattttagctctaaagatttgatgtattgacctcaaccaaaactcttgtagatttggagatataaagctccaaagttgaccatattcactgtatttcagacttagggatatatggtttatgtggtgctttttgcaaataggtccaaattccactattccacttgtaaaccctccaatatgaaaaatagtg

SEQ ID NO: 44897 - DNA, 378 bp, Zea Mays
tcccagcttctatgctttagtcgtttggcctcgctgctatcgcttggatggtagtggccttgcagatacagagttattggggcccgccaatcttcgaccatgatgaggttgacgatacggtggccttcggcgtcctgagttatttgtaaaccttctgggttgcggacaactggtgtgccgatgatgtggtagaacacgtcggagggcaaggcgtcgcccttggccgctgctttagccaacgcgtcggcctcttcgttcttggcgcggtcaacatgctgtaaggtgaaacccttgaattgtctctcgagactgcggacggctatgagatattgcatgatcgtggggtcttttgctgagtattccttttcgacctggccg

SEQ ID NO: 44898 - DNA, 760 bp, Zea Mays
ttttgttttgaagtttaactggatatgcaatcaacatgtgttgctatttactaatgtagatagatgctatatgtttcaaataatacgaagagcacaaaaaatgaaagagatatggccaacaaaaaatattattatagcaagaagcaatttttaatacctaatagtaatattatgttgtacatagtatggtaaggattataatgtttataaagttgtgctactaaagcgtgaaaatatttccttgtagactatattttttgtttcattgcttggttttccatcgtcatcttcaatcaatatttttaatccttgctttgatgttactcgtgatatagcaacatataattggccatgagtgaaaactggtcttctgagatatatcccaacgtttgtaagtgtctgtccttggcttttattaattgtcatagcataacatactttaacaggaaattgtcttctttccaaaacaaatggaagtttgtagttcttcaatggtaaacatattcttggaatgagaacaattttcccagagtgaattcccgttattatctttgcctctaataccagatctcccaataaagtaataatcagtcttgtgccattgcatagtccttcggattggttaagatttctaaggagcattattggcacacccttctttaacacaagtagatgctgtggaaagttgttaccatgtagcgagtttaggaactccactggatacaataagtcgtattcatcatttgtgtttggacccttg

SEQ ID NO: 44899 - DNA, 532 bp, Zea Mays
gattgctccgttagtagggtatattggtcaccctaagctgagttagcatgttgatttcaagtccaatcaaatcgaagtcaaccgatagtcaagagtctgaatgcctttgaaaacaaaaactttattgatgatggagtccccgattacagagtacaatgttgcttcgagagctttttgaggccttgctaagggtaaaactttctaagatgctctatgttccatgagttccgcacttctgtgccatccatttgagtaagccggttttatcccggccaagtgacctctgatacaatgaatggcccttcccatagtggtgacaacttgtgccgtccttcccccgttagaattcggcgaaggaccaagtctccactgcaaaggatcggtgtcgtacgacgttatcatggtagcgcctcaaggtctgctggtatctagccgactgaattaatgtgttcaatcgctcttcctccagcacgccaatatcctctagcctggtagcttctgcttcaactatgttttcaaagaccaatctcgg

SEQ ID NO: 44900 - DNA, 428 bp, Zea Mays
ccacattgttgttggacctagagcaggattaggaaaatttaggtttcccatcatgttgcaatccataggttgcttgtgcatgaagcccataggccataacagggtgcagggggaaattgctgaccaattgaattatttgacatcggctgcgaagatgtgacattgtttgctgggtccattctattatttgtgcacatggcagaaatgaagtgaaatggtgtaaactgaatgcagtgcacattataatgtacaatcagatgtcacataaaaaggtaaacatgagaacagacaaagaatttatataagcacaataataatcaaaggttctgatgaactgtttcagtaggaacatcacaacttgaagacataagagtcatcatactagacagattagagaattacttacatcatactagcttatggtaact

SEQ ID NO: 44901 - DNA, 381 bp, Zea Mays
atttaataagatttcaatgcataaaggttgtttatgattgcatctttcttggccatagctatttgattaatgggtcaataggcacaaaattctggtgccctagtccgaataagcaaagggattatgcatgtaatacaggtccatcgctgcactactctatgtcggaacaggacaatatatcagcgatgagtagactggtgaaaattactctatcatcactgaagatggatgaataggcgacactgttgtgctaccttttgggtcatttttatcagttgtgtttctttcgcgggtgaccggggttgctttgttagcccaccacgtgggacaaccttcttactaacatatttggagagtaattgtctaattgatcaaaagtag

SEQ ID NO: 44902 - DNA, 490 bp, Zea Mays
gctttgctgaggtcaaagaggcaatgggcttgtactctatccattttgtgaacttgtcaatggcgacgagtatgtgagtataccccccttgagattttttgaatggctcaatcatgcccagccccagcacgcgaaaggccaggttacaggaatagtttgcaaatgttgggcaggcaagtgttgctgctttgataggaattggcatgcttcgcacttctgaaccaactctactgcatcattctttgttgttggccagtagaacccggacctgaaagcttttcccaccaatgtccttgatgttgcgtgtacgccacattgccccgcatgaatttcatccaggagttgccttcctgtagctaagtgaacacacttcatgaggactcctcttgcacctcttctatacagcagaccccctatgatggtatattgggccgactgtcttgcgatgcgttctatcgtggccttgtcatctggttcttcctcgtttttt

SEQ ID NO: 44903 - DNA, 303 bp, Zea Mays
ttggcctacaagttgttgttcatatggtgtgggtcctgatataaagggtggatgcattgcctagtgacttgatgatggacttgtcgaagcaatggggcccaaaggttgtggttttgattgttgatgatggacgtactctagaatgtagagagaatagtatgaagatgtacgaaaaacctcctctggttggttctgcgtgtttcggcaatttccttctgctttggtatggttacttggcagctcttcgtagtgtggcccttgttctccctacagaaaagacaaaacaactttcttggttgagag

SEQ ID NO: 44904 - DNA, 481 bp, Zea Mays
caaaatcttgaagtgaattgggtgccttgatctgacacgattctcttgggtactccatgcagcctcacgatgcagtcgatatatagcttggccaacttatctcctccatatgttgtgcgtacagggatgaaatgtgccactttagtgagtcggtcaactattacccaaattgaatcatgaccatttctagtccttggtaggccgacgatgaaatccatactgacttcatcccatccacacagggattggcagtggctgaagtaagccgctaggcttctggtgctcagctttgattcggctgcacacatcacaatgggagacgaatcgagcaatatcacccttcataccattccaccaatatctctccttgaggtccaagtacatcttggtagtaccagggtggatagagtaagctgaattgtgggcttcatccagaatggttttacggaaatggccttgcttgggtacacatagtcttctt

SEQ ID NO: 44905 - DNA, 341 bp, Zea Mays
attattcgaccatccgaccgtccgaagagcctaattattcggttggatagttttttccggatatccacagaatttttggatttcggattcgaattcggatagtacagttcggatatcggatacgaatatgatatgaccgatatccgtcggatttcggatatccgaatatcttctcggataactgtccggatttcatatttcggatatccggacatctacccagatatcttaccagatttcagatttcagatattcggatagttacatgtggaatcgccctaaatatccaagtttcaacataatcaatacttcaatttatcgttttcatatggggatttgag

SEQ ID NO: 44906 - DNA, 1071 bp, Zea Mays
ggaactttagtgtcagctttatttccatgtcatgcattggaattgtcagtgttatggccaggttcactgcagaaagggtccactgctgtttcattctacctttcagagacttggtgcagttttgattgtgaaggttcattgaaacaatacaattgcattcacattgtgtaatggccaaattgtcatatggattgttacaatccagatatagatgcttctccatgttatggttactgtgatgaactagttgtcccagtcacagattcatcgtatgttgtgttccggtaactagagttattatgaattttgagtttcgatatataaggtcctttgcaatgtaaagtcattacacatatccatccacctactttttctaggacgttgtagaaataatatgatatgtcattgatgccatgttttcattccttctatggtgcttacctatgctaaatttgtcaatttttttcacatgtgcataaggtaatattatgatctgtctggtttttctttgaaatgaggtgggaaaggaagaatagctggatcttgctcaaatgacggatgatcaattaagaaacatattttttagttaatagttaatgcatatttgatcgtcaataagagaacagctctgcaactgcagctttcaatcagcctagtcttcgaatccattatccatgtctggtgtagtgttatcatgttgtagacttgtacaaggagctacccagacaatttacaagtgtggaataatgtagaaaaggtcgttcactccaatatatatatatatatatatattcagaatatgaacagaagaagctagtgatagatcacttggtagaccgcgctaaggagacatccaccacccacccattctcaaaccattcaacccagacactttcaaatttgggtacctccctgagatttattagttcttactagtgtctaccttcaggatcgccctaccctaggagcaactacaagggggcgtatctccctgcggtcagtgctcatctgtgttttagactacaatagtaaaagcctctatctataaactcctcaacacagcttattttg

SEQ ID NO: 44907 - DNA, 550 bp, Zea Mays
gagatgagaagctaagaagaagagagggaagaaaccgaaaatagagagaaaacagggcactcaccagggacacgtagccctgctcagggcgcatcgacaccatgacggagtaatccaccttccccactgtccccttcacccgccggagaagttcatcagtgaggagggtggccgaagccatccgagagctttccacggagtccttaggtgtcatctcgttgaggcgaagccggaggttggtcagcagcaaaacctgccgcgggtggaatgctgcgacaacttcggtcacagtgagaccatgatcctaaagcttccggagggcctccaacatcgacttcatgtgggtctggagctctcaaggcaggccccacctccatcgctcctccactctaaggacgacatggtgtgtgaacaccagcaaccgcttgtcatcgttgtggaggtagaaccatcgactctaccaccccttattcgacgaggtgagtgtggcagggatgtacagatgcgctcggttcgagcacagctgaagcgtgcaaccatcggcccaaac

SEQ ID NO: 44908 - DNA, 513 bp, Zea Mays
gggtggcgcacggtgtgactaccactacctacgtgcttcggcggtgtcgatcggcgtcatcgatcggtctacgtttctttgggagcagtgtggtggctcagctaggtgtgcgtggagatgttttgccgatggctcctactcgtactcagcatcttccaccgcgtaccgggcgttcttcatgcatgggatgggacgatcctctcagttgctgcagggagcagggggcggccaaatagttgtgggaaactaaaggcatgaatctcgccaaggggcttggctttgcgatcttccagttccagtttcagtagggaggaggaggaggaagaagaagagcaggaggaggacgtgaggggccttttgttgtttcgcattaatgccgagtaaagagaagcattgacctctcccctattccttgatacacagtggcaccccttcccctataaaactcggttcctagccgctcaaccgaacgcatcaaggctcacctccttccctctgttcccgtctcccccg

SEQ ID NO: 44909 - DNA, 522 bp, Zea Mays
aacttcacacagttggctggagagaccattgattctatgttctccaggttccagtcaattgtgaacaagatgcgtgtcaacaaggcacagctaccctatagtgatcacgagagagcgttgaaattactacatgctctagattggagggtttgggaggtgaaggtcttggcgatcatcgattcgcccaactacgagactctcaccgtggacgagctcttcagcaagctcaagtccatagagattgatcaccaggcttggcccaagattaagaaccctggtgcacccaccatggccttgatctctggaggtggttctgcttctaactcctcacctgctatgtttgctctatcttctttgttgtctagtacagaggagcaggtggagagccttggggatgaggagctggcacttgtggccagccggttcaagcggttccacaacaaccgtatgagccgacggcatggcgggtccaaggacgaatgctacaactgtggagatctcgaccacttcgttgccagctgc

SEQ ID NO: 44910 - DNA, 801 bp, Zea Mays
cttgcagagctaaaagtactttggataagattcaacaaaaaaatgaagctgtgtaaacagtacctcaaaggttgggattggaatctcaaaggtatgaaaaaaagaagcgatcagattgcctctgagttgaaaaaattagaagaaattgaagaatctgaccttttgaacagtaatcagattgattatagatgttctcttatgactgaaattttgatgatgcttgatgaggaagaaatattctggaagcagagggctcatgaaaactggctccttcatggtgatgggaataatgagtattttcaccgtattgcgaatggtcgtagaaggaaaaacaacatattttttcttgaagatggagataggaaaatctttggggatgagaacatttttcttcatgcaacagaatactattctggcttgtttggtcctgctcctggaaatatgttccaaattgatagggaggtttgggatggacttgagcagttgaatgggttagacaataatgtcctatgtgatcatttctctgagaaagagattaaagaggccctctttcagatggagaaaaataaagctgctggtcctgacagtattcctgctgaattttatcagatttgttgggacattgttaaaaatgatattgttagtctttttcaggactttcatgctgggcatttggatgttagtagacttaattatggcatcattactctgcttcctaagatcaaagaagctaccaaaattcaacagtatagacctatatgtcttcttaactgcttatataagttgattaccaaggtcttg

SEQ ID NO: 44911 - DNA, 458 bp, Zea Mays
tccggtgtgtttaagtgggcattacacatgctcataattttcattgatttggagggcaacatctttagcaaaagaagccatgtgattgtttttgttgacagacatgttgttttgcgttactataaactaaatgccatggtcatatgtggatgtctcaactacaattgttgctttttgctgtggtgctactgctactaaattgggattgacatgacttgagttagttgcgtagcaatagccacaggaacatatggtcaattagaattagctgcttagcatggttacgtctgttccttccctagtatcattctgcatgcttttgatcgggacacaaaactgtttactaatgggacatgttcctattatatcatacaatgcgtgacagaggaagtatttatgcataaaattgctacacctctgtttctcattgtttgcagattgaattgcttcatggtttg

SEQ ID NO: 44912 - DNA, 673 bp, Zea Mays
actttggaccactagctataggtattccctaactagttccacaatatccttgaaatgcagaacatgatccggtaaagggtttatggaaacgatggcccattcctcatggattggtggttgattgcaagtgacagcatgcaccataacctgccaatgttgaatgggcacatcaatgaggccatgtagaagaaatggcgtggggtcaacacgatgatacatgattgaagcagttgtcgctggcggtgggatgctcgtcaaagcctctaagttaagcaatcatgacaagaagaaggcgattagagagatttgggtgcagcagcgggggtttgggtgaacaatgtaagttgtagaaggactgtagaggtggaagacgaagggacatccctcgagttgatcaccttcgcaaaatcagagaagtgaaccgaggcggcgagaatagcccacatggcaaggaaaagagcttggtccggaaccaagtatcaggagaagaaacccacaatacactagaaaacttatatgtacaagaatacatgattggaaaagtcagttggaaaccaatcctcgactgtctttgattgcaaactaccgcataatgattcgatttttcctaagaaacgtgcagtagttcgatccgggctcagcttgtagcaaccataccttgagtatgctggcc

SEQ ID NO: 44913 - DNA, 278 bp, Zea Mays
gacgatgccaggtagtagaaggtgtagtggcagcaaaaacaatagctttgtcaggcgacaaaaacgaagaagaggtggcgtgcagaagccgaagggtgtagagggggtcggtgctgtcacatctgaggagggggcgccgagttgccgagtccttcacagtaagaccagaagagtcaaactcgatagaacaagaattatcagtggtaaaacgatgaatagaaagaagattgtggaccaaagaaggagcgacaagaacatcgggaatgcgaaaagagccg

SEQ ID NO: 44914 - DNA, 471 bp, Zea Mays
ccctaattcaaggtaccgacaatgtggtatcaaagccttggtggctattgaacgcgagcctagagtacaacttgtccaacacaaaaccctattttactctaaactcaatctttcctctaacccaaaacttcttatgctactcttacataaaaccctgagcattgctaccgctcaaaccttgattgagatgatggcgaataattatggatggaaagaagagaggtctagtgcccatacctgtggactccatcaacttgatggctctaacatgatagccatgaagatggacctccttttgaaaagttggatgacacaatagcataggaagtgaacctgactaggccctagacgcccatatgacgtgtgaggtctatgggaactcacgttactctgggaacagttgccctaagatgcacccagagaaggcaagcttgagcactagaggcaacttcaataacaggtatcatccac

SEQ ID NO: 44915 - DNA, 344 bp, Zea Mays
gttcctattgtagtgtcgataagctctcttggaaataggggcggtgctagggataagatctatggcaaattcaacctttctctcgggtggcatgcctggtaaatcttcgggaaacacatttgggaattatgatactactttggtagcttttgatggcttgattttatcaatatggatggtgatctggtgacagcttcctttccttggtccagacaagaccaagtccactaacacttcctctcctagtaaggacgctaactttatagtcctcttgtcacagctaaggcttgcttgatatttggttagtcaattcatccctaggatgacatctatggttacatctc

SEQ ID NO: 44916 - DNA, 273 bp, Zea Mays
ggcacactggacctatccggtggtgcaccaaaccgagtaccctagagagccctgtaaatgggcattggtcggttggtgcacaagaccaatatcatggtgtggtggactactttttctagagaggaattttgaagagttgaagatgctggcgcaccggaccttttcagggttcaatgattgaagttgcatatccaacgcctagttgacgtggtgactgaggtggcagggtccgatggtgaactagaccggtcatgtgagtctgataagactgct

SEQ ID NO: 44917 - DNA, 840 bp, Zea Mays
gcttatgcgagtacagtgattatggaggagaacactccactgccagcaagtttggagtcatgacctcgaactcgaatcaagcaactcgcaaagaagccatcccttttgacgcgaaagatgccagtggtgacaccatcattggtgtccaacaatcgatctaatgtttctatatctgtggtgagtatccaaaattccaaatgctaagcttttgttgtcttcacattatttgttgtatgctaggatgtaatattgtcatcttgaatcgacatcttgataagtgcacttcctaccaaatcaagttggctgaggcaaaatcaaagcttgctcaaggtactctcagcttcgctcttgatgatggttctcttgttgttaatcccactgaatatgattatgaacacactagaattttgattgccaagatgattattgttcatgagtattcactacaaatggtagagcatagatggtttaatatcttgatgaaatggatgaacaacagctatgaaagtataggtagaaagacgataaaaaatgagtgcatgaaagtgtatgaatctgaaaaggaccttctaaagaaaactcttagagatgctgaatccataagtttgactactgatctgtggacatctaaccaaaatgtccaatacatgagtttggttgcacactacatagatgtcaattgggaattgcaatgttgtgtactgaactttgtggagttggatcctccccacactggtgtagtgatatatcaagctatttttgagtgcctagttgaatggaacattgaagataaacttatcacaatcacacttgacaatgcttcaaacaacgatactgcaa

SEQ ID NO: 44918 - DNA, 320 bp, Zea Mays
atttcttcttgatgtttggcctcttctaggttgacccctctttttcttcatgaatttgttgaatttctttacaaatagagccatatctccatcactctcactttcattttcttcatcatcactatcttctttttcaattgccttagaagatttagctttgagagcgattgattcattcttcactttctttgccaaacttatagcatcggcttgagatttctttaatatatcttgagtaagaatttctcccaatacttcggttggagaagttgtagatagatcacttcttactaacatggtcacaatagtctcatacttct

SEQ ID NO: 44919 - DNA, 606 bp, Zea Mays
aataaccgtcaccgtttgtttcctgtttttgtgtttcgatggcaggcgatgacgaagaagcaaggatccctacagacttcgatgaatgtgttagcctccaagatcttgaggcaaacaacaagctcctgaaggagcaaatggaggagacgatccacaagtcagtgcatgatgccttcattgacatgaaccttggcaagacttacgagaggctggatcgacgattgtcccagatcgtcaacagacttgctgtgttggagacgcaacaacaagcaccgccaccaccacctcctcgtccacatcttcccgatgatgcggtgtttgatgaagaaggtaattatgatgaagcggccaccagagatttgcgcctacatcgtcgtcttcatcaaaacacagaaggtatgccacaccaacaccgccagcaaggtaataacaatcgtgctcctaacgacccttatgctaagattaatttttctataccatctttttcgggtcattatgatgttgagggatatcttgattgggagatgacgatagaacataaattcgttgcccaccttgtacctgaacgacatcaagttagacaagccactagtgaatttaaagatt

SEQ ID NO: 44920 - DNA, 545 bp, Zea Mays
tcggagtagaatttcccacccatcagagtagcctcagccgagggatccttcatgttctctacagtgaagaaagccaccgtttgggttgcagctttaacatgttcacaaccagatttttctaaaattgttgtagcccctctggcaccggcaaaggcgcagaaatcaccacggtcgctaaggatctcgtcaaaggcttcggcttcttcaccgatccattcgatgattccttcgagatctcctctaataaaattttgctcaaatgagtaagcacccacctttgcaaaactatctttcagcttcttagcacaatccaaggatttttcgtaatatctttccttcgattcccgaagctcatctacattcttttttagtcttgcgctagtccattcacttctttcttgttttgctttagccacttcaaaatcctcgctcttttccgcaagctttttctttaagttttcaattttagctctatgagcttcggactgtgcaacaagattggcttcgctaacctttactcagtctaccaaagaatgcaaaatttt

SEQ ID NO: 44921 - DNA, 550 bp, Zea Mays
ctaatacagagaaggtcggggtttattctgtaaaatataccagactcagcctactcccgcgaggacgacgggtttgtttctgtattctgtaggggctcatctgcaaatgtacgtgatcgaaggggtatcgtggagtttggatcgtccgatcaaattcgaacggccacgattacaacgaactaattctgaatcggtaagctacgcaggtccttggatcaagatctgatggccagaagcgcgcgttacccagcaccgccagatcgacgatcaacggtacatattaaaatagaccgaaagggtaaacgccatctaatcctagccacacgcgcatagatcaacggctgctggccttcttctaccccacggcgtccagacggagttccagagcttgccgccgatccccaccactaccgatttgcaaagtaaaaagattatccctagaatgcttcacagggaaagggaaactgagctcaccggaggttagtgcgccagggagatgggatgctcgccacaggtgacaagcgacccggcgccgggacgaacgccgccg

SEQ ID NO: 44922 - DNA, 736 bp, Zea Mays
acctctgcaccgaaagaccagcccgcgacacaaagtcctccgaaacaaacgaatagctagcgccagagtcaaaaagagcatgggccacaaacaaatcaactgaaatcgtacctgtcaccacgtctccttgctctctgccatccgcagcgggtagcacataagctccggaaatacccgttgaagaggaagctcccggagtgaaattaacagaagaatcccactgagcagccgggtgaggcagacacggagctccaaactgagatggcataggggtagtcggtgcaggagtaggcgcaaccagatactgaggaaaaccctgcaccggcacgaactgagaagtcccaggcacacaaaactgctgcggaggaagtggaactgaaaattgctgctcagcgcttgacatcatgttgacagtgccctgagaagaggaggaagtcactggctcccatgtgagcttcccactgggattcctcctacacaccacatccttatggtcttgactgcagattgaacacctgccgttccactggcactctgcacggcgatgcgcatcaccacaacggaaacacaccagccccagcccaggcttaggaacagcccgaaacctctgagtacttcctcctgaagtacccgagtcaaaggatttgacacgatagggatggtggcactgatgctgagacttgcccctcttgtgggctggacctccagtgttgcccctcctcgcgtcctggccacg

SEQ ID NO: 44923 - DNA, 562 bp, Zea Mays
ggggaagggagatgagttatccaactatctggaccgttgattttgatagtgtgttaagtttgagtacaatatgtttggtgaatttagtgagataatgagtatggggtgatttggttgtgtgacttttgcaaagtttaaactgatggattatatagtggtaagagcataactcttttctattatataaatatatgtaactttctatctttaacgtatacaactttatatctaactttctatctttaacgtacataccattctatatttaacgcaagtttattactattattttcccggtcggtcccccctcccctcatcacctatgcttccgcgaaacaacgctctgaattcaacagtgcctaaattaagtgacacaaccctaaactttcatatgactactatatatgatgtgttacacacgatcccgaggagatgaacgatgctggcggtggcgcaagtgaggagagggggaagggaagggatgagggatgattcaaataaagtagttcatgaggaagggagatgagttatcgaactatctggaccgttgattttgatagtg

SEQ ID NO: 44924 - DNA, 321 bp, Zea Mays
caggggcttctaaggaaggcttcatccaaggcatgtcaggacaatacacaatcccagtcaaagtgaggacaggaataatcataaccaagggcaccagcacagttcccagtcaacatgggcccaacaaatctccttcagaccgccgaccctaagaggtagaggaggacgtagcttcggagggagattcaactctcaaccaagaagactgttttgcttattctgcggagaggacaaggggcatacaacaagaacctgccaagttacgatacaaaaacagaaggagatagctgaggctgaagcacgtcagaaccaatcgaagca

SEQ ID NO: 44925 - DNA, 296 bp, Zea Mays
cgcatacagtaatgaatttaccatggttagaaagaggcggggaaaggtctcgcgagagttaaagcttatgcccaagacgcgctacgggttggtgaataattagacgctacgtgccttggttctacttaattccaactagttctaacaaacggattagctacatgcataattcgaatcatgactaactccagtcgatcgacattaggtgaggtagatgattacttacatgaattaactaacgtaaccgatttctaatttgggttcccatttattgattacatcatacgatcactacg

SEQ ID NO: 44926 - DNA, 1131 bp, Zea Mays
catttccattgaactacaggtgttggcccgtgacaggctcctgggatcttacaaggtactaatgcaaagccttttggcacccgcccccaaacaaagcacgctctgtggtatgtctcaccaacgacaaactgagaagaatttgagttcttaatggcacacaagcataaggaacagcaagaacaaaggaacacaaaatcagagaaaaaacaagagtttatatattcacttttctctctttgtttctggagttacatctgatcttttcgttttggagttacatctcatctttttgtttcttgagtttcatctgtagtctgtagagagtgaccttttatttacagcaaaggacgcaagggtgaatacacattaccgtgtgtacttctcagtttctcccctctaactaatcttgccaccctcggagtcatctgttcacattttttttatatactgattttacaacactctcagatagggttgtggttagaatgtttcaagagaattaaacaaagggatgtggtttagtcagtaaatcaactgaaagcttaaagaaatcagacagtggttcaaatggctacatgtttgctcaaaacaatgcaagtcccatctggagcacaagctatgacgatgctaaataagtaagcactatttttgtttggtgtcctcatctagcacttggtgatctcctcatgtccaccatatttggcatcaaggagccaaggacagagccctccagtgcgagccagctaatgacactggcctgcttccaagtgccagtctagctggggagtgacattgatgaaagttactgggtgatctggatgtggacgctgctaagcaaggggattgtagccttgaaggccaggctggcatacaatgttgtccatggactcttactgctagtgagtaagcagaccagctatgtgcaaatgtaacggtgcagtggcagcagtagaattaaacaaagggatgtggtttattcagtaaatcaactgaaagcttaaagaaatcagacagtggttcaaatggctacatgtttgctcaaaacaatgcaagtcccatctggagcacaagctatgacgatgctaaataagtaagcactactcttgatcatgtcattacttaggaattcca

SEQ ID NO: 44927 - DNA, 449 bp, Zea Mays
tattgagttaggtctgaatttcagtggtattgggtcaactttgaagccctctatcttccaaattatgaagattttgccctaggtcgacacatcaagtttgtagacctataaaaggagaataactttgccatagagattaaaccatggtcacatgaaaaatttggagaaaaatgtgcccaaagtcgagctgtcagactgccttaagtgtgaattcagactgacagtgtaattgagcaatctttgagctgggattcgagcatgatctagtaagaatttgggagcgattgctatagcaagattgaagctagatagtagaacaacaactttgttactggtggattagtaagtcaccacatggaaaattgagatccaggccttgcaagttgggctgtcaggcacactaaatagagactccattgtacagtgactgaataagatcccaagttcac

SEQ ID NO: 44928 - DNA, 480 bp, Zea Mays
agcttggtaagatacattacagcgtgttcctgtgttccacctgagaggagcgtgtagtgaaattattagggataaccatcaccgtttgtttcctatttttgtgtttcgatggcaggcgacgaagaagaagcaaggatccctacagactttgatgaatgtgttagccaccaagatcttgaggcaaacaacaagctcctaaaggagcaaatggaggagacggtccacaagtcagtgcatgatgccttcattgatatgaaccttggcaagacttacgagaggttggatcgacgattgtcccagatcgtcgacagacttgctgtgttggagacgcaacaacaagcactgccaccaccacctcctcatccacgtcttcctgatgatgcggtgtttgatgaagaaggtaattatgatgaagcggccaccagagatttgcgtctacgtcaccgtcttcatcaaaacaaagaaggtatgccacaccgc

SEQ ID NO: 44929 - DNA, 412 bp, Zea Mays
ccttgcaccacacgcacacctagggagctccgccgctgttcgctgtggtctcgtgtccattctgcagtcgccgtcgagccctcactgggtttgttgcctcggtaagcttcgccccgcctcgtgcgacccgggacacctctcggttcgctccctccccttatgtttttctcggtccacgctcaccgaccctctctctgccctaccgtcgtcgacccgtgtcctcgtcgtgcctcggacaccattcgtgagaccccgagccttctctcaaggtaactgatctaatcccgcccctaatttcccctgggctacccttagttgcgcgcgattgctcgccggagtatcccccggtccgccaaggactccctctccgtcgtctggtcgactcacccccattcctgcaaccctgaccccg

SEQ ID NO: 44930 - DNA, 475 bp, Zea Mays
tatccaacccttttaccggcactagcattgggatttgtaccgtaaaggatctcttgttggtcatattgcattcttcaagactcccgtgcatgtcagacattgaaaatttatacaaatcactaataataacacatatatgtggaagtatgaatgacactgacaatggaaacaccgttacgagttgcacgtcgagtctttgaaggtcatcattaaccacatgttcttgaatgtaacaaaggccttttgccttaaaccaccaaaagcatggcctgggatttatatattgatggtgtcgatgccaactgaaggtgcccacatatactagtcatgcaaccttttaataccagccgagaccttccttaggttctccaaagtgagtagaggtctgcccgacacatttttataatccgccttagttggcttctttatctttacggtcattttcttagtcttttttctggacttctcatgctcg

SEQ ID NO: 44931 - DNA, 887 bp, Zea Mays
ggaaggggtaaaccctattgttgcgatgaaaggtcatgtaatgcagaacaaacacacattggtccaatggttcatcctgtaatagtcataatagttgaattaatgataagaagatgtatgaaaaagtattttatgcattaacaaaaagtaatttagtaacgtaccggtacaacaaattctgatatgtcgccatcatcaaagtcgtagcatcggaagaagttagcgacaaaaaaaccacaatcattggagcctggtaacatggttggacagttgggaagaagcccaatcttgtagttgccaaacattggtaaactagaatctggtcgagcttcatgtaaggcaatgctaagtcttctcattattaatctggaccaaggtattttcattccatttatcaacaattgatcattgtggatttgtttacagaaagtgccaccaagcaatggtccataaggatttgaatctaaaatgtctattcgacgaagctggaagttgattgcataaagggtctagtgactacggcgtagcataggaaccatgatctgttaacatatatgtataaggttatgaattaataataatatggctatggaaaaataaaaatatagtaaaatataacttataagcaaatgaacattaaaatctccttacaaataatactgattggggctcagtttaatttggtttagaacttcatctggaggaaggatcgggactattaaatctttaagaactgatgttgagaagggctgcggatttgtactgtgttgttcgagctcctcgatattcaaaatagtctgcacaaaaaacatattgattatttttatatatttctacactaagaattgaaacatgataaatatttgaagagtaaaatacaaaaaatt

SEQ ID NO: 44932 - DNA, 948 bp, Zea Mays
aaagaagataatcgtcatgctggaacagcagaacccccatgaaaaggaatcacttcagctgatcatatttgcaatgctgatcacctgagtaagatgtcatccctgcatctcaaaatccactattccctctggaaatacaaggcatattttgttttgttagggtaaatcttcgactgacaaataatctattaatgccactaacatgacataaaatcagtagtaactttcaatatgaatctgatagcattcttacttttattgcgaagattaggctatctcgagcagcttatccatcctcatgcccatatttaagcttcactgtgttcactctatgaatagtgtcatgtacagcgcactgctagacatggtcttatggagtaattgttggtcaaagctgtccaaataaaactaaatatgtttgtagagagctaaccgagtcactgggtggcacataaatcagatccaaatttcgacaagtcacaaaatttcgagagctggcgacatagatgataacatttggcaataataaaatcattcacagctccatttgatttattagcacaaacttaaaccacaaaaactgaggtcaaatcacattgcatttaggacaatacaacaaaacacagtgaaagacaagcttctaggcagagatcactcaaaataaatggaaatattttatcaggggcattctcctactgccaagccttcataagccttatgtccacataaggattccccagagctcacttagccagcttggttgtggccaacgagacaagacagacagacagacagatgagccccaagaaagcagtagtactggtactagcagtagcagcaggccatcaaccagagcggccaagcagacttcaatgggagaaatacactcggatttccattcttgatgcaaaaaacatcataatcatcaggctggtataccagaattca

SEQ ID NO: 44933 - DNA, 271 bp, Zea Mays
cttggtggagctggcggtggttaggaaagcatggatgtatatatgtatgtccactttattatgtagggtagaagatgcctttaaagcatagatatgtttgggcaagaaaggatagggtaagaaaatactccatccaagattatggatcttgattcctttgaagatctggcttgaatcttatccttccttgatttgatgaggtcgatcatcttcaatcttctttcttgaagttgtcatccgaatttgggacatgtagtgaaggtagattctt

SEQ ID NO: 44934 - DNA, 628 bp, Zea Mays
cgacaccaggaacgccgaatcaaagatctgtagtcccaaaacgcctacaccctgatgaaacccaagccctcggatctgatccaacgacatagatcccatcgcccgaagcggtatgcttaaactaattcgggccgcccaaatttgatccgtcgccccggatctaatttgtcaggatctaatcctatacgttcgtcataggatcagcggctcatatcacaacctgtgaagtggtacatcactcctctaatcctagccgcaccccaccggatccacggccagcatcgcttcattctccttgaggccagacgtggcggcgaaacgcgcagcgtgcggcgacaccacaccggagacacacatccactagcccgacgatctatccgcccccgcgaaaacacgcaaaatgaaattcatatactcatgaatttgatagagggtgccttaccgccgatggggatgtcgaaggtgcatggccccgacgctaggtgatccggtggtggaaagaatactttggtgagcaattcgtggcgacgccaatggtacaatggcacggggaggtcacagacatgcacagatggccccggtgatacgtcgcgaccacccgcaacacccggagcagcgacgtcgacga

SEQ ID NO: 44935 - DNA, 513 bp, Zea Mays
taaggttgtgatggtcatcaagtaccaaaaccaatatagaaatagtcaaggcacatttccctttcatggatcccactaatgccagcccctagaactaggggcaactatgtgacccatcagacccatattacgcgtacctcggtgcacctgcaactagggaaggcctatgacacatgtgctaccctcaacacgtgttaccctaagcaaacaatctagggcgcatgcccaggcaaaaacgatgaccatgggaatgggaaaaagttcttagggcccagggtgtttggccacaccatccaaaacaccgagttcctccacattttcaacccccgaccaacattgccaagtacaatgggaacaccaagtcatccatttgactcaaagattatcaccttgcttgacgcatgggagggacaagggatgacaagatgttcatctagcaaaactagcttgagcttggctcaaatatctcttggaaggatgcttcctggggtggcccaacctagaaaagttttt

SEQ ID NO: 44936 - DNA, 944 bp, Zea Mays
gttacagactcgagacagacgccctggcagaactctcgctctgtaggcagcaagagaaagaaacccttcgagaatattacaaaaaagattctcttattgaaatcacagttgctttcggccgatgaccatatagccatccactatgcaatcagcggccttcgagtaggcattttatacagccaatgcataagggatccaccaaataacttgcaggagttgtaccagctctttgaaaagtatgcccggtcagaagagctccactagaggaaagttgagtcttagtgaaaacataaggagaccccgcaatctagtagaacatggatcaagacttagcacgccaagaccgtgttgagccctaggtacacaatattgcaaatcagtagcaactaggagataaccccctcatcgtcaagattacccccacaacaaggtcgcggtggcaacgcggccagggtcagagacaggggtcagggaccacaacaacagagaagattctattgtcttttccacgacgaagactcaacatacccaaccagagactgcctagagactaaagcaacaaaagaccgaatggctagggtcgtgccagctgacaaccaaagagtcgtcgctcacacctatcaaccccaacaatacaaccaacatcaatttcaaaacgaacaccactattacccccaacatcaaaaccccaacctctttccacatcaatggcgccttcaacaccaagaaattatagtgctgccacctccaccacctcagcatccaaactaacccctaccacccccaccactacctaagtaagaagacttcaccgatcaacccttcaggggagtaatccatatgatctttggagggtccagctccgagttcgaaaccaaacgacaaaagaaagaccactatcgaagggtaaaccatgtagccctcaccgggcccgtcgtctaaac

SEQ ID NO: 44937 - DNA, 329 bp, Zea Mays
cgctatgatctccatgttgaagagccgacgtctattggtgaagatggatcctgcttccctcgcacattgatttactccgtttcggtgaaggtgactactccggttgcattgccggttgaggagcagcctctgttttcctccccggatgatgatgaagatcgggatagcaagcatcagcgtcagaggaagcaccttccaaatcatcagttctctgcggtccggacctccgttcatgcacggttgggaccacgtatcactccttatgggggaggtggaacagttgatgccgctcctcttccaaattcctcggttgatgagttgcaggcgcc

SEQ ID NO: 44938 - DNA, 295 bp, Zea Mays
cttgggttaggaagaagcttattttcttcctttttggaaataattattaatctcgattcaagatcaaagacatatagttttctgattgtggtatgtacaagggccaatcatgtatgggccagatattgatccgagaaggattaaatcttaatgagctttcagcatgatggcacattagcatagtctatataacaaaggacggggttgtgggcaaaatcattcgactagccttagccttcgtcgcttctctctctcttcataaaaccctagttgaacgcgcagtcactgccttgta

SEQ ID NO: 44939 - DNA, 450 bp, Zea Mays
gcaacgtgtccaaccacgtgcggcacacacagttagctgccatgatgtcggaggtgcacacaaccatgatgtcttggaggaggagatctggcaggagtgtggagaagtccgtgctctgcgacatcggcgcgggtcagagcctatgtttcttggagtgccggcggtgcatgccagcgatgcatgggaccaagaggagaagattagtggaaaggggtggctaggtttggcccctgtccatcagatgaggggaagatcccacactgagccgtgttagaccaagtgctacaaagccaccgctagcgaaagcaaaagagcaacgggcgagaagctgggcaccctgagcaaagtgcctcaaggttgctgctgatacggaggcgagcaagtgggggcaggtggaggcgaggggtcagtaggaggtgggaggagacaggggttgagcacgacaaccgc

SEQ ID NO: 44940 - DNA, 732 bp, Zea Mays
atgacttccatttggagtcttgtgggtgtgtagcttctcaggcccgaggtaccgatatcttggggagttggtcctagacccaaaactcggacttgaaatccttccatttccttccagtagtggttaaaaaccagttaaaggcagcagcatctacatcgtagattttttgatttcccaaacaaaaaaagataatcagaacttaggctaatggtctaatgttcagaaacaaattcaacataagaaacgataataatgcacttagtcaaataccttcaggtctctccagacttcatacttcttctcaccatccaccagcctctagtcaaacactgctaactgacaacttttttctcacatgacaccctatagcactagaaaacttctttgaattgtttccaaaaggttgaccaaattcattcagttgtatcttaattttttccatcccagatccccttgcaaatatgtcctccaattttgtaatacctcttccttttctcttcttttgtgggctatgggattctattaatttaagcacatgagttgtgctatagcaagggtaaaaagtatatgcaacaacaaaataattaccatcattgtcacatataaaatctccatttgattcacaaccaatatctgcatcaatttggtcatttgcattctcaaataaattcctttgtgtccttgggcgcaaattatgacattcagttgcagcaacactggtgttatgagttc

SEQ ID NO: 44941 - DNA, 638 bp, Zea Mays
ctccgttattagccttatataccttaacatgctccttgcgggacattggggttgtacctctttttagatatttactttaggcaacctttttccatgcaaatcttcaacaaaatatgcattaccatgcacaatgcctaccatctccagcggaccctcccaatttggtgaccactagccaaacttattatccctagaccctataggtaaaatcgttttccatacacctgtcccagccaaaccttccgttacaccccacgacacctcagtttcataatacgatagcccagacacgtgggggcgagtacttttcgacacccctagaaggtcggaaagagatgaccagacatatgaaccaccagggcaagcattaatgccccacagaatccaaacccgtgggcaggaagacgacataatacctaaacacccacacctatgctggaccgaagggcatatggacgaccatcggccgctattgatatagtaagggaagagatagctaagacgttcggagataagcttgtagttagcatgatcctgggggcagtcatatcggaaaccctatgacaactgatttgatttccacatgtaccgccagggaacaaggatacccgaatttgcaaaaaatttgattgagcaag

SEQ ID NO: 44942 - DNA, 709 bp, Zea Mays
ggattttctatgatttaatcaagttctagcataaatttttgtattaaaaatctatttttccaattcaattatttaatttaaaacagctctagaccgggcctcaattaaacagggacataggggctggcgcgtaaaataacccagactcaggaaacagtataggtggatggcaggttctatttcaaagaaacctagggtttcttatgctaaagtgcacggcgaaggggcatggagcaccaggaaccgtccgattagacctcggccgccaggattagacgcgactacgaccgaataggtatggcacaacagtcgtcagatccaaattttgtggcctagattttaaaagctccgatccaacacgtaccgcccgatcccgatccaacgaccctcgatcaatcacccgagaggctatccccgctctaatctcaaccgcccaaaggggatcaaacggtgaccacccgtattctacccccgtccaccaacccgcggcagcaccggatctccacggcggagcgatctccggcgaatcgcaaaccggcattccactggcccaaaacctaattcctttaagctacacgacgcggaataccaaagcgaattcgaaggcgaggttctcacccacaatgctgatgaaggtggagcagcccgcaatgatgtgcggcacgacgtgttcctcgccgctcgatgagaaattattggtgccgcgaag

SEQ ID NO: 44943 - DNA, 802 bp, Zea Mays
cacatatgctccagaaatacccgcagaagaggaagctcccagagtgaagttaacagaagaaccccactgagtcgtcgggtgaggcaaacgcggagctccaaactgagacggtatagaagtagtcggtgcaggagtaggcgcggccagatactgaggaaaaccctgcatcgacacgaactgagaagtcctgggcacatagaactgctgcggagggagtggaactaaaaattgctgctcagcgcttgacatcaagttgaccgtgccctaagaagaggaggaagtcactgactcccatctgagcttcccattgggattcctcctacacatcacatccttatgatcttggctgtagatagagcatctgccactccactgacactcggcacggcgatgtgcatcaccacaacgaaaacacaccagccctagcccgggcttaggaacagcccgatacctctgagtacttcctcccaaagtacccgattcagaggatttgccacggtagggatggtggcgctggtgctgaggcttgcccctcttgtgggctggacccccagtgttgcccctccttgcgtcctggccacgaggctgatcaacacccgaagacttctttgactccatggtgtactggtgttgcatctccacacccaatgcctactccactgtagtacggaaatccaccaacggaaaggctcccagggcatgcctgatagaaggtttcaggccctgacgaaaattgctcgccttctccatttcattgtaagccacatgaggaacaaagcggaccatcttgttgaagcccact

SEQ ID NO: 44944 - DNA, 407 bp, Zea Mays
ggctctatgctcgaggtagaagatgtagataattggtgtcctgtgtttgttgggtattttgattggtgtagtgaatatatagtaagacaagttttagacatatataccccctatatcttaactggtcttgtgtttggagtaccgtacaagagttttagggttgcacatactctaagggccgcggataaagccttaaggtttggacaatatatactaggtgtgaagttaagtagtacggcaagctagctcatattactactcgctagctagctatagctagtgacacaattgagagaggtagcatagctagcatgggatcagcgtattattgttgtcacaagctcgccgtggcatgcatgggaggacacatatacagctaggtactgcattggtaatgccaaagcatc

SEQ ID NO: 44945 - DNA, 995 bp, Zea Mays
cggggtcgcagcactattccccgagtcactgatagtttacaaaaacatcctcctagttctatttcttcaccgcccgcagtccacgacggcggacaacgcatggccaagctccggtgagcttacaccggccgatttatgcaacgactggtgctctactttggcagagaccgaattcaagtcctaacaaacgtttcccctcaacaaatttcatgaacagcgctctaacctgctctgtccacggtgactgtatgatcaacggacattctaaagcgttcccggaaatctaaggtagcttagctcaatcgagttggtcgaggaggatcaagggcaggtatgggtgctgaaacaagagggcagggagcatgaacggacctggaatacgctgaccacggtgagccagcaccgctcagtgttcttgggtgatttgggggaaatcccaaattggggagttctagtggatgattcgaggcacgggttgcttcactggttgcacaactacttagcagagcaggcggggtcggcaatttataggctcccacagtggtggccggtgaatttgagggagacgcacgacgaccgaagatgaaaggggttagtggcgctcgggatcagtggcatttatcgtggcaacctcaccggcaatgaccagacgtgctagagcgagtcactacgacgaagtactgcgtctaggcacgtgtcatccgagtggcagacggctaactccggtgaacttatccacagcggccgtggcatgctcgtgtacggtggccggagtagaatagtggccggagtttatctcccgcgcgatatttcttacctaggagcgcttatctgagttcggtcgggtgtgaatcgcgacgccgacgcggatctgagcgcaagatcaccggcggcgaggtctctaagctggcgatccaatccggtcattgtaccatcgcgaagttcattcagtcggcctgacagaccattttgtagagcccggatctcgaattttc

SEQ ID NO: 44946 - DNA, 424 bp, Zea Mays
caatttttgggcatagtgttgcgcctttaacatttcttgggataatacctttcctgaagcatgacaaataatgtagtcaatacttttgttcgacgcttcgggaccaggagcttcgagtttctcagtcgcaatttgctctgttgatttctcctcagggtcagcacgttccatctcggtgggcactgaaggcccagcttcactttcagcctgaactgttgcggcttcgacttccacctgcttagtatcagcttcgagttgcactttggaaacttcgacaactttccttgtaggagcaggactcaaggttttttgttgtttctaacacaacatccagcacatttgccatccttctcctcttgggagttactgcagaacccatttgtaccttcaacactgttgcctccgttggagggcttaaaatctc

SEQ ID NO: 44947 - DNA, 527 bp, Zea Mays
ggtctacgagcaacaagagacttaagggatgctagatcaccaagcagagaggcatgaaccaacctgtagatggctggccacggtgagaagctcacggcggcgcggaaaaccgatttgggggaaatcccgaattaaggcgctatggtggacgattggaggcaaggagcgatgcactgggcgcgtaacaacctagaggagctagctatgcactcaatttatagagactaacaacggtggcacccaatttgaggaagacacgctggcggtcggagagaggggtaagttactggtgcgagctaccgtggcagtcactggctaatgagctatgatggtcactggttactctccatgactaatgacgacgtggtaaaacagtctaaggcatggcgtaaccgagtgaacaacggcagccacgtcgagagccgcacagccacgtcaccgacaagtgggtacggtgaacagtctggtgatagggtccaagatcatcccagcgccaagatcttttaccccgagtcattatccacgcg

SEQ ID NO: 44948 - DNA, 652 bp, Zea Mays
cgaacttgttcttctgcttcttgaatcagttcaggcccaaagaactatctttctccagtctgatcccaatacaaaggagtcctacatttcctaccatatagggtctcgaacagtgacatcttcagaccggcctggtaactattattatatgagaactcaacacaaggtagactcttgtcccaactactaccatgctgaagggcacaagctctcaacgtgtcttccaatacttgattagtcctttcagtctatccatcaatatgaggtaggccgaactaaaattcaactttgcatccgtattctcatgaaaacttttccaaaatctgggggtaaactgtgatcctctatccaaaatgatcttccttggtacaccgtgtagagactcaatccgagacatgtataacttagccaattgtgatcccttataagtagtcttaaccgggatgaaatgagtcattttggtcagtctatccacaataacccatatagaatcatatcctttcagggtgtgaggcagtccagtaatgaaatccataccaattacttcccacttccactcgggtatctttagtgggtgcagtagtccagctggcctctggtgttcagccttaactctttgacacacatcgcacatagccacatgtgcagccac

SEQ ID NO: 44949 - DNA, 637 bp, Zea Mays
taatcccctacctccctcgccgaagcacggtggcgccgtcctgaacgcgacggagcgacaccggcgaactccaatccggaaaacccgagcgccagactcaaattcgctcggcccccgcgagattgacgactcactgaactcaattccccatcaaattttggttgacctcgagtgtaggacccagtacacggtgtaccgcggcggcgccatggtcggccagtgctcccggggattcggctataccataccacaagtcgctagggaataacatggaggaagggaagacgaacacgatggggactcacttgtgactggccgaggtgcggtgatgcccgaccacggaagcacgcgagtacggcggagaaatcgagggagccacagggctcaatcccaaccagggcgactatgaatagctccctggcgaccacccgaagctccatggcccgagatgaacggctgtgaactaccttcccctctcaatttgtctttgcggcggcgatggacatcactggcggcgctactagggttctggcggcgagagagggcttgtgggctgggttctgcgaaggacggttgcagcacggatattatgcgacgcacgtcgggtccaggcgcggttcgatggccggagatcgcg

SEQ ID NO: 44950 - DNA, 569 bp, Zea Mays
cacatatgctgctcaccatatcccacaaaaccaccttctgtattggccacgagcccatctatctgttgatgaatttcggcaccagtcatcattgcaggtgggcggtctgtcactacgacaccttttgtaaagttattgatgtctaggcggaatggatggtcaggagggagaaattgttgatgtttatcgaaggacgaatatttgccacctttttcaaccaaatgaacctaagagcttccttgcaaactgggcatgagaacttaccgtgaacacaccaggcgcaaaatagcccatacgtcggtaagtcatgcatggagtactggtaccaaacatgcattctgaagtttgtcttcgtagctcggtcatacgtccataccccttcctcccaggtacgtaccaattcatcgatcaaaggctccatgtacatgctcattttattccccgggtgtccgggaattatcaatgacacgggtatattctaccttttaaagcacacactagggggagattgattgggtaataaacacgagccaacatgtgtacgtgacagcgctcattccatagggatt

SEQ ID NO: 44951 - DNA, 826 bp, Zea Mays
cccagctcagctcagctcagctcgctgatccatccaggccaggggaatgtgccgccaaaagctatattacccgtccggcccccgtcatcgcgtcaggtgggggtggcgacgagagctacgacccggcatctcggcgcggcagtggacggacccggacccccacaagcatctggtgcgcctgacgctgacgcccctcagatccgctctgctagcctaaaccatactacatactagcggcttgccttggcagtcgcggccaatcattcccaccccgagcctacacggactatttaaaagcatcatgcgtttacatttttgctcatctactagcgttgtagtaggtagcatcagcgcgcggacagggaagctgcggccacaatctaccagtagcgttagcttagcggggcagcagccacttgtggagccatccccccggtttttttttgttagcgaaccatgtgcatctaaaacgggcgagatctccccccgtccggacgattattggagcacctaacgtagtgacactagatgggcctggttcggtaatgacgcaatcaagctaatgctttgcaaatggcatgacgaaccagaccaggttgcggatcctcccaaagttgttcaagcctttatgccgctttgtgattgaaaacagaaaactctgccccctgcgcgctgacaacctcacctgccatttgcaaatcgctctcttcctactattcggttcacatatttttttttgttctaaatagataaatcacatcatgagcaataatagcaagggtttacaatctgcatagcaatgctactatatatatatatatactcc

SEQ ID NO: 44952 - DNA, 399 bp, Zea Mays
ctacaaacttagacatcattggttggtggaatgtggcaggggtgaagtatcccactttgagaaagattgcccgagatatcatgtttattcctgtgacaaccgtggcttctgagtctgtctttagtactggtgggagggtcattagcccaagtcatagtagactagccccaaaaatggtggaagccttgatgtgtatgcaagcttgggctcacgctgacatgcttggtatgaatactagtggatcaataatgttgttttattttcattcctttcactgcgatagcactaatctttcaaacttctctttgattaggtcatggatctcatgtactcaatgcactcatgacttgccttgatgatgaagatgaagcaacggtatattgaaatttagccattcta

SEQ ID NO: 44953 - DNA, 1195 bp, Zea Mays
tccggtcctggcaatgtagggctccggggggcatttggccgcggttttacggtgtttcggtgcgtttcatcggcggcctcgctgttttccagcaccgcgtggtggctgattgctataacctctagggctttgttgtggcgggcaggggttttggtgattatttttttgtgtgcgaggtttgggttttcagttttcaccccaccgcttggccgtggccgcgatcactcctgcggacttgatggcggtggaatgctttggcggctactcccttttctggtgtttatttcactatttagggctagtacgggagtcggctttggctgcaatatctgcgaatttattaggcttgtctgttgttaatcagctattgttttgttttgtctgcaaattgatgcttctcagtgagaatgtctcggttgtcttgagttttggtattttagtgagaggttttcgtgggattggtaactgctattcctttttactatctgataagtctgtgactcggccactcgggggtattgaagagtaatttaatttgagtgtaagattacttgttttttgtcattacttaactcgcattacggtctggttaagagatcgttactaggttttagagcttcagacctccagtttaggtgtacttttgctgcatgcacctctcagagttcaggatttgcatgtggacccctgattttgttgagggctcgatggtagataagcatgcgtcatttttttagtcaacgcagcctacaaagttctggaacttaatgtgctgtgtaggagattctgtgagcgggaaagtacaacacacaactagcgcatttggattatggtttgtacccatgtggccatgtgcactatgatgatgtagcctagtgcatcttccgttcaggcttctggagctcaggaactgatgctgtactgccattaatagtccgatcaacaaaattctattggtgccagctaacaaatagaagcgttctgtgtgtactgattttggtacacagtagaaattgctcgtttgatttattgatggaatgtagtgcagagatgatttggcgcaatatttcccttggcgtgataatgattacgtcaagaatagatacatgtgacatgttgattctaacagtacaacaacttgttagttttcatagttgctgactaagagcatgtttggttcgctgcttaacttgcc

SEQ ID NO: 44954 - DNA, 501 bp, Zea Mays
cagtgatgctgtagctatcaaggactttagtacaataacacataggttcttccgaagttacagtagtttatcaactgttgattcgcgctactcatagaaacaagtatcgtttcatgttatgtagaggaattgttcagttctcttttatctttcttgtgataagtgcagagcatattccttggttatggatatgtgtattgggtaactgggcattcacgttttgtatttgttgttgcaaggtccatatggatagtccgactgatctcggtatctctgatatgctgtcgttcattgctgaaaacttttgtgcctgttgttatctctgatagcctgttgttcattgcctgatatttgtttcatatattaaaaggtatctgttgtttccgctattttcattctgtgatatatacttactttttcggtggcgacgatagctctttcttgccaagctaatttgtgtagtggtcatcagcctgtcattaagaggacaaaacatttaaa

SEQ ID NO: 44955 - DNA, 492 bp, Zea Mays
atccaagtcagtttcctgaccctcaagaccgcgctctaaggtcgatgaggcacgggacgctgcccgggataaccccaacccggcgtcgagcacatcagcacaaacatccatcgtaccatcatccgctggctctgataacagatcctctggaaccatatcttcaagagtctgatcaaagttcgctagggacaattcttgtagaccaatgagggcagacagggcaggagaaggaactccactactttccccactagcgacatactgccgactgttcttccgagtcaaagggacctcatcttcttcctccccatcgttttcatcagcaacacaaacaatacccccattgggatcagcagcagatggagcacccccattgggattagcagcagatggagcacacccattggggtcagcgtcagtaaactcgggcacaagcacttcctcagcagcaggaaccgaaggaccaacgtctcgatccaaactagatactcg

SEQ ID NO: 44956 - DNA, 377 bp, Zea Mays
gcttaccggtccatcgatcagccagtacgcgcgtcggttcgccttcttcacctgtgaggctatataaacagacgagctagtgaggagttaccacagcattcattgctactgcgccgttgtgctgctgaaaaatttcactaaagccgaagcttcctgcttgtgatcttgttgtataagcttcggacaatcgttccatcgtctaagtgtagctttgtcttataaaactgaaatggctagagtgaggtatactgctagagtaacacgcgaaggagaagtggctggagcttctgagacggtccccatctcagaaatgttgaaatgttctgggttagttgttcatgaagaaaaagagtcagttccaacagaatatattgctg

SEQ ID NO: 44957 - DNA, 835 bp, Zea Mays
gaagtctgaaaatggcggagcaccagaccagtcaagtctcaatggtcggagttctagatccaacatctagttgacgtggcaaggtctggtggcacgatggatctgtccgatgagcctgacaacactgcttcccattagaacggtcacctgtaacgacagtctaacaaggtccgatggcacactggattgtcactttgcaaggtgcaatgaccggtgcgcccacaaaatgtgtagttttaagtctaatggctatttgagtggttgtgggctataagtacaccccaacaagttcattcaatacacaactgctcaacatttaagtccattcactagagcaacacttccaattgtccaaaagcctgagaagttccacatccaagtgaatagagttagagaaagtgatagtgccttgtgtgagagatagacaagagtgtgttgcttctttcttgtgcttttgtgattgattttttgacccccatccgttgtaaaggatagcagaggcttaaacgtgtgaagtgtctcgcgaagacttaggtctcttgattgagagaagagaggactcaagctcgatctttggaatcacttgagaggattgaaagatacccggtccttagggacacctcaacggatacgtaagtgttgtttggaaaccgaactctgtaaacaaatcatcgtgttcgtttgtgttgttttgcttgtgatttgttttcccctctccctctctaaggtatcttgcttgatcgtcactcgaatcaaatttgtgttgctcacaagttaattccacaatcataagaggaacactagtaagaacttctctctcatactccgattccat

SEQ ID NO: 44958 - DNA, 324 bp, Zea Mays
gtgaattagtagttacgaaggtcatagctaagcaacttcgtcggttgcccatcattccttggctttcaaggttgttcctcaatacgaaaatagctctgcatatgacgtggccaaagaatggtgtacgtctcgtcactgatccagacataatggtccatccgtcggacggtgatgcgtggaaggcatttgacgagtttgatcccaaatttgcaaacgaccctaggagtgtacggcttggtctattgacgggcggattcacacctttcaatagcagtgcaagcccttactcatgttggcatgtcttcattgtgccatataatcttc

SEQ ID NO: 44959 - DNA, 323 bp, Zea Mays
cataagttggtcagttgggcctaatcagaacagaatcgttagcgtagtacctgttcccatctgtcgttctgttaacaggtgttcccagccaccattctgcgatctgcatggttgttctgcttctgccttctgcgatctgcgcttctatgttctacgattgacgatctcagtctcgaccctcaggttacggcacacaacgacgccggcgtcggtcgtccgcttaagctatggaagggtgtcaagacctatgatgcatgtactggtaggaagttcgaccttcgtgctgctgtactgtgggcactgtcatgtggcccagcttggca

SEQ ID NO: 44960 - DNA, 516 bp, Zea Mays
agaataattaactcatccgaaattacaaatctttacgtttattaaaagattttcaactttgacttttagttttgagactccaatctatatttgataaaataataaaaagaatatatataatattgccacttacttatttccaagaaatatttactaacctaataaagttcttattcatttgttttctcgtttcaagttgaatcctagttccaatctttaactcaaatattttggacaaactttttatgaaattccaaagttaggattttgggatgttacaaatcctacccccttaaaagaaatcttgtcctcgagatttgtaagagaagggatacagaaggattggtttgtaattcaacttttagtctatggttgtttcaaaagtccagagtctcaattttttatagtcaatagtgggtgattaggagagcgtaggtatccagctacctattatgtaggatataagtgatgggtaggttagggcaagaatagtcagggtaagaaagcttatggtaa

SEQ ID NO: 44961 - DNA, 717 bp, Zea Mays
tgctaagggttgatcgcgttcccggcgattaagggggacttagttcaattgggttggccggtgagcatcacaggtacacgagagcattcaaacgagggagcaatcggtatgaactaacctgagctgagctagccgcagcgaggtgtgtttcacggtggcggagaccgaaattgggggaagttggaaattggttagctcggatgaacgatcacgggtgggagtggatgcgttggcttcgcaatgacctagcgcaactgcccgggtgctcaatttatagaaagagcgagcggtggccgggaattttacgaaggacgcgcgacagtcggaggtggaagaaagcactggcgcacgtgaatccgtggctaacggcgtggcaacctccccggcgacgataggacggccctaggaagtcacggcgatgcggtggcgaggttggtacacgcggtggacaacggcgagggcacgacgacggtgagtagctttatccacggcggtgagcaaggggaggagtatcgcggctgaccggggtggcttctagctcgacggcgacgatgatctttctaccctgcagcgttatccggttaccagcgagcgttaatcttaacggcggcggcgcgaatcctcgcgcaggggggtcaccggcggcgagcacgtgatgctggcatttttctgatccccttttggctactgtaccatcagagcccctcattcagtcgc

SEQ ID NO: 44962 - DNA, 456 bp, Zea Mays
tgggtgctctcaaattatctccgtgtttagcctccttttaaaagagagctaaggttaacgaaacatgtggttgtgctatgtctccgcaatggccatgtctgatgagtgatggtcaaaaagttaattgactttggtttagtgttggttaacctcagcgtgaatgtggtgttgtatatatgtctcttggcttgtggtgtggatatgtggaacacagagacagtgggcgatggccaaagtaaatgtcaagtggcttcatgcagatggactgtgaatggcggaggatggatgcggcagaggatggacactaatgcttggactgtgggactagagaaatcggaggattgaccctgatggctgacaccaaggaatgttgataagtgtatgaataaatgctgagaagtagaccatgttgactatatcaaggcaacagtcaacaaagtcaatcggagatgctgg

SEQ ID NO: 44963 - DNA, 489 bp, Zea Mays
agatggctgtagtggatagggtagcgggcgtaggccgtaggggcatcagaggcatggatttcgcgagacatgttccgccaccagaaatggcgtgccactacaaactgtttgctggcggggccggggcgcctcgatcgatccacatggatcaatagacggacgcagccatctgacaggacgttgcaggcgtgggtgcggaaacagggcgtaccgcgtacgacgattgacgacgcagctcgtgactttcgttccgcccttgttcctcctgcaaaggctgcaaagtgccgcaagttcgttgggtttgggtggcagtatcagtcaccactccccagaggcaccagaatatcagtaactcgatgaataagatgggagtatgggacaaacatttctttctattaaacggatgcagccccgcgaccataagcagcatccacgtcgcttaaaaaatctcctccgcacacgtgtccccttcgtcaccttggcgatcca

SEQ ID NO: 44964 - DNA, 808 bp, Zea Mays
ccgatgtgagattccactaaatagtatgacagatagtgcccctagaaaaacactcagaaacaaattaacatcattttacaaaagtacaaagtgctggtaccaactaaccgcactacttatggatagaaaggggttggttacaaaagattaaaaaaaggggcatagtcaggacgatttgtcttttcctgaacaattctactgtcaaattttatatacttgtcaaccatttcactatcgaaatatcaatttcatactaaaaggtcgcctccctgtttgtcaggttgttacggtgtaggtaagcacaaatagcctcactccagaattatcttatcttcacccctgtccctccaatccaagcaaagcataaaggttttcactttaatgtgaagatcagttagcctaacaactcctacagcctacttcacggatagaaagaacaaccaagtaaccaacaaaggaacaatgatgtgggacatacaatttcaactgaaaaaaaatgtgttcaaacaaataaaaattcggcacttcaaagaaagatcaaaccaagaacccgacaagtatcttgcaaacacatatacgccggacttttactccttttttccgtttgatcaattcagttttaaaatcaaggattcttatagcagagattactagtaccatgcagtggttagggggcagatcctccaccgacagctcaagaaatgaacatctgagacagccggacaaggatacattgcagacataaatttgtttaagctggactggacgaaatgccttgggttatccgaggacagagtttactacactg

SEQ ID NO: 44965 - DNA, 546 bp, Zea Mays
tttcttggtcatatcttgtcagctgaaggggtagccatggatcctagtaaagtgaaggatattttggaatggaaactgcctaccacggttcatcttgttcgaagttttcttggtatggctggatattatcgtaggttcattcctgatttttcaaaaatttccaagcctattaccgaactattgaagaacaatgtgaagtttaattggacgccagaatgtaatgaagcttttgaaaagctaaagaaattgctaactatggcaccggtgttagcccaacctgacattgagaagtccttcgacgtttattgtgatgcttcaggtacgagcattgggtgtgtattaatgcaagaaggccgtataatagcatatgcctcgcggaagttgaagagacatgaagaacactatactactcatgatttagagcttgccacagtggttcatgctttgaagatctggcgccactatcttctgggaaatacttgccatatttatacagatcacaaaagtctcaagtacatcttcactcaagctaaattaaatatgaga

SEQ ID NO: 44966 - DNA, 706 bp, Zea Mays
ttcgggcggttctgccatatattgccatttcatcgccaaggtaagaagggtaagtgtaagaccatgtagactaaggctagtcggttgtcctcatgtgtgggtcaccatgcatgttgtatagggacaggtagcatttcttaccgcaacttaggagggatagtggtagcttgtccttacttttcaattatcgttgtcacatcatggtgatgggctagaatgaacttttctgcaggtacactaacctcgatacgagtagatcgtgtagttgcgcaataacgagtgaactggtacgccaccgctaatgacgttaacattaataggtcatgaggtcgtaagttacgtgcatgcatttggcataaacatcatcttgatcattattgcatcgctctcctttagcttgggtaggagttttgtctgcacttataaccaattaaaaatttcttctgctatttctcatccaatataaccttgtaacagatggctcgccgcaggctcactgcccataagtccacgggaggacaggctccacgtcaccaacttgatgtgagtgtttctcgttgtcgcaacacctttctttcggagtacagtatacccaccctactgtggcgcattctttttgctttaggttacctagagggagaggaaccacattacttttgggaagggaggttgtgctgaaggtatctaggtgacagccgtggttaag

SEQ ID NO: 44967 - DNA, 436 bp, Zea Mays
tccagtgctgaagcagagtatcgtgcggtggcaaatacagttgctcagaccacctggctccgacagctccttcaggaaatgcatatttccctaaagcgcgccactgttgtcttctgtgataatgttagtgcagtctacctctcctcgaacccagtgaatcatcagcgtatgaagcacattgagatcgatctacattttgttcgagaacgagttgcggccggtgcagttcgagttttacatgttcctacttcctcccagtatactgatatcttcactaagggattgccttggtcggtgttcacagagttcaggtccagtctgaatgtttttccttgtggctgaccacgttactactggggtgttggattaccataattagattgattactttccttgctttaggcctgccttgtacacgcatggctatagttggaga

SEQ ID NO: 44968 - DNA, 601 bp, Zea Mays
aaaatgggcagttaacctcgacactggtaaactcgttgggttgaagagtcatgactatcacattttgattgaaagactagtgccagtaatgttccgtggatacttcagtcccgatgtgtggaagatatttgcagaactcggttatttttataagcagatatgtgctaatgaaatttcaaaaaaattgatgttgaggtttgagaaggaaatcgttgtccttgtatgtaagatggaaaaagtattcccacctggatttttttaattgtatgcaacatttgcttgtgcatctaccttgggaagcattggtaggaggacctgcacagtttaggtggatttatagtcaagaaagagaattgaaaaaacttagaggaatggtgcggaataaggcaagggttgaggggtgtattgcagaggcgttcacagcctaagagatcacattattctcaagtaagtagttttcagacacaaacaacgtgaatgcgcaaacgacacgataccatgttgccgagcaagctccaatcactgatctaagtgcttttaagtgggacggtaaaggtgtcggagcttacacatcacatcttgtgggaacgatagagcgtaa

SEQ ID NO: 44969 - DNA, 1359 bp, Zea Mays
aattcagaatggctcctcctaagcagacaccccatatgcgggttggaccacgaggcgtgcccaagcatcagatggcctcctgtatagtggagaccggcaatagcagtcatgtacctccattgtaggtggagcagttacagcagaatctaaatgtgtccttcaatgagcggtgccttgatgcaactcatattctggatctgctggcgaaaaagaagcagcttcagaaggagttagctgagcagaagaaacaactggtcgtgacaatgcgatccagggaggcagcttttggccgtgagaatcatctaagggggccatttctaggatttggtcctagcttacaatgatctggaggattactctaatgagctgcatgaagaagttcaccagctttactaccagctgcacccccaatgatgcgccaggagccgcagaagcagagggtggtgtggtgctagcagatgggggtgaactcgacgcagacctagacctagaagcagctcctatgcttgtaccaggtggtgagtccccaggaggtagtgatgtttctaagatagctagtgatacagaagattaatgtggcatgtgtatggtgtcgtgacctctattgtaggcataggataataatctatgtcaattttggtattgtaatggataatactccatgtacctgtctcatgtaatatatttcatggttatggatgtttattcatgagtttgttttactctagatgcttatgcgtactcgtgggtcggatggggctggcacatcgcgtggtggtagaagctgatatcaaccctccaccaccaccagttccacctcactggcagatgtcattgctaccctagtgaatgccaccgctgataatgctagggttttgcatgagattgctcatcatcaaaacaatcagggcgggcctcatattccccagaatcagcaaaggaatacaacatacatggaatttatggagactaggacgccagtgtttgctaaaggagaagagcctcttgatgcaattgagtgtctgcaagtgattgagcagaagtttggccttattcagtgcactgaggtacaaaagtctctatttgctgcacaacaacttcgcggagctgccagcacttggtggtccaattttgtcgccatacaacttccagatcaccatgttacttgggttgaatttaaagaagcttttcgtgttcatcatgttcctgatggggttttgcaaatgaagcttgaggagtttctaagacttaggcaaggggcagatactgtgatgcagtatattgggaaatttaaccacctttctgtgtatgctatagagcatgtgaacacggatatcaagaaaagggattgctttatga

SEQ ID NO: 44970 - DNA, 299 bp, Zea Mays
attaatgacactgttcgctcctcttatttcaggctagtgttccaccttcctactgggccgaagctcttaacacaaccactcgtcttcttaaccgcctaccaaccaaaaccctgaaattttccacccccatcatgccctttttggctccacaccatcctacgatcatctccgggtttttggttgcctgtgttaccccaatatgtcaactacggctccccacaaactttctccccgctccaccccttgcatttttcttggctactccgatcaccacaaagggtaccgatgtcttgatcttc

SEQ ID NO: 44971 - DNA, 394 bp, Zea Mays
gttcctgagcatgacggcgatcacggcgatgggagttgcttcattctcgatgtgttctttcgtcgggggtttcccccatctctaaggattcgtcccgagagacgggttgtgttgggtcctgttctctggcttcgtgatgtcatcgcacatttcagcgcctgtttatctgtctcgcactggggaggttcctcccccagcatgatgggctcatcatcaaagatgggcgatgactccagtctcccctgaatgaagaggatgtcggggtagaaaggagcatgtgtagcggtgtgcttcttctcatcctcctttgagggcggaggtgttaggaggatttcccattgtgctttccttccttggtatggaatacccatttcccttctctgggtgatccgtg

SEQ ID NO: 44972 - DNA, 1222 bp, Zea Mays
tgcatgttgatcacatccacctttctattctaatttgtacaattagatggaacgggacccaacaccattacatcgagcagcaaaagtattgattaatatgcaactggagacaggagactatgctcaacaagtgagttttctaaacattttatgatgcaaaaatgtactttctcttatgtaaatataaatttatcttattttttttctgaagtcacttttctaatgttgaccaacattgtgaataagagtttgcatgtatcacgattgcagaaatattgtgctgccaaaatcatgtagtttcacaatgtataatgctctttatttgatgttatttatttttgttgacatagtagtataattttgatttagcacaaacttagatagacttatatttatgatcattaaaagtatgagtaatctatttgttatgtctgaccctagttgtgttcccctcttgattttgaaaactctacttattgattccatatgacctagacaaggtggtgtttgctcttatattggtgatccaatgcataagttatgtattttcatgttcattattgaattatcttatgatcatattcctatgtactagcattttagatagatgtattagtcaagtttcaaggatgggtgccttggatagttcaatcaattgcattgtgtgttcttcacatatagtagacatgtcatatttttagttagtaagtcctcatagtttcatttgtgcttatattttattggaggtatctcaccctagagttattattttgtaataaacatgtgtttctatttcatttcccataatccaccatcattgaccattttcttgtattttgagtataggaacatgttggtagcaccaactgctctgtatacttcaactaccccaactatcgtattttgttccctgtttgggctcttggagagtatcatcgcaaagtatgtaccaaaagtaattgaaaggaacccatggaatgcaaaaatgtcatatgtagtactatgttacatactaaaggaaaatcatagcggagtcgatataatcaattgtactttatataatgaaatgtaaatgggtagccacatacatgatttcaatggaccatgtagtgatgtctaacatttgattatgatgtatgtacactagtatgaatacgccaaatcgcaaataagtaacaattcagtttatgtgtaatcaaattgtctagacattgaaattttt

SEQ ID NO: 44973 - DNA, 472 bp, Zea Mays
agaaaaaactgcgtgtcgacgttgtgatgacagaacaacaaaatcacgcgggtgggtgagcgcatgcagaagggggatgggcgggtgatgacgacgttggtgcggcgttagagcgggtgagcacaaaaggggaactgtgtgcagtagtgcgttggggtgagcaagcgtataaaggggctagcgacaaagtcagggcgagcacagcaaggggctggcaatggcggagtcgagcgctcctaccttgtgtcgatcggatacatacagtaacagaacaaaagtggagttggctgttttagcagggatggagttgaattgttaggcgggatggtggatgtgtgctatagttttgccctcatatacttactagtttttcaatttgtatcatattcaacatttatataagaagacaaaaaaattgaggtggggccacgaccccctttgcccatctcgtggctccgccactacgtgtgtg

SEQ ID NO: 44974 - DNA, 727 bp, Zea Mays
gcttgcgagccttgtggtaggctctgtatgactccagactgtccagcgtgaggtgacagacggtctattggagggtcggacggtccgtgatcgtgcgtggactatccgaccatgtgcagagccgatctaccgtgtagtgaggatggtgacagcatttgccccggatacgagttcatcggcaataccataatatggctaggacagagaagccccatttgttgccgatgtatttaactcagttatttcagtgcccaattcatgtgacaaaaaatcaggagtatgagttttttctaatacatgtgtcatattctctatatcctccattatacttttaatcctattgtcaaaagaaattttaacagattgaatatcggctaatggtgtggtgttacttacagtggggagctgatgcaacaaggctgactgtgaatcgtactttactttcctctccttgatgaccttctagtggcgatctaccttgaagtgcgagaggtaccactttccgtcatcttgcttatttgagccttctgtcgctggaaatcctcgtctagcatcttcatgtggtcttctaatttctcatcctcagcggccaacgagttagtcagccttgtgatgatatctagggcaacattattgtgatttttgtgatcgatcattatggccgatctaataggtataacttaataggtctaatctattagatcatatatgatagattcaatctttt

SEQ ID NO: 44975 - DNA, 321 bp, Zea Mays
cctaactgacccttctatggaaaatcattgttgttctcttgtgttgaaccttgtatgccttttactaagacatatgctttgtacttagtttaatgttcaacgcttgacaaattgattagtcctttaatagtgttgccattcaatccaccaaaacccacaaaggtgttgatacactttaagtttcccccttttcgatgattgatgacaacactattaaaacacacataaagcttgacaattattattttgaatcctatgatatagattgctcctcctaaatatgtgcatagagaggaatacaagctttggcctcaaattcca

SEQ ID NO: 44976 - DNA, 1189 bp, Zea Mays
tttaactctggcagaaaaagaaaaggaaaaaaatcatgaatagtgttggaccaaatctagcccaggtcggctcaacaactggtgaaactgtgcccgcgcgcgcctgcatgtgttgattttgcaaaaagggacttgtcttatgggataacctgaagcggggtcgcgacactatttgactgagtcgctgacatttgtagaaaagcccctacgtttctattcctttacactccgaagccctcgacggtggacgacgacgtgcagagctccgacgagctcgcataccggccaattcgctcaatgactggcgtccaacttttgtcgaagccaaattcaagatctagcgagcgtttcccctcacctaattccaagaatggctacccggtttgctctggccacggtgacagcacggataatcaaaggaacaacgtgttcccggtgatccatggcggtctagttcaatcagaggggtcgaggagcttgaggaggacctaaggatgctagaacaatcgactagagcacttgaacgaacctggaataagctggccgcggtgaagatgtctctgcggtggtggaaactcagtttgggggaaatccaaaattagaggtctcgggtatacgattggaggcaatacttggtggcttggtgcgtgattatcctacggaccaggcgatgtgctcaatttgaagaaggcaagagcggtggccggtgaatttgggagagacgcgcggcagccggagaaacgaaaagttattggcgcagtggattcgtgtcttccgtcgtggcgaactcaccggcgatgagcaaatatcgcaagtcgagtcactgcgacgtggtaaagtgctttagcacgtggcgcacggcggcaatcggccaacggcggtgaggtcttatcccgatcgatcgatgagcaaggggtacggtgagcttagccgcggccggactcaagttgatccaggcgccaagatctttacccgcccacagttatccacaatccacagtgcacgaatcccagcgatcgacgtgaatcaaggcgcaacggtcatcggcggtgaagttcactgaacctgatccgatcaggctactgtaccatgagagtcatcttcagagtgcctaacagatgatgtttagggtagattatctctaaattttctatggcaatatcatcacccttctgcaccaaagttgtag

SEQ ID NO: 44977 - DNA, 319 bp, Zea Mays
gttgcgcagtgataattccgtcgcatttgttttcttcacggtaatgcaaatcagtcggcgagcacgtagatattttgggcaaagttctgcactactagtttctccacttcacagaagttttctaatagcatgtctgcatatgtggcgttcccgtctactaattatctaaccaagatactgatttgggggaaaacgatatgtagccttgtggcatttttacggctttttcaatttgatgactgggccaccatcccatccatttggtactctaattaagagactagttcagggaaaacgacaggtagctttgtggctcttg

SEQ ID NO: 44978 - DNA, 422 bp, Zea Mays
cgaccaattcacgcccgccctttgcccaaatttgggtaataaatatatttcctaagcttagggcctcagttggaatgtcaaccaagtctgatgatgaaagattgaaatttggcttgttgatggccctcgcgtgattgcacccggacttcataaaagctgcagctgtgccgcgtgaagccaccagagcacagaaatctccatgcccggttataacttcatcaagggcttcaacttcattttcgatatgatcgaaggccccggggatgtcttcggcagaaggggtgatctcttcagaagtggctccgaccgagttaaatatttccttcaatcgattgatgcatcgggtggcaaagccagagcatgtgtcccaaagattatcaacagttttgtttaacttcgcattcctttcagcttcgacttcg

SEQ ID NO: 44979 - DNA, 293 bp, Zea Mays
cgtattgggatggagcgagaccgtcttcgtgtagaccggattggtaaacgtgaactgttgttcctaccgattgggacgagcataggtgagggggatctacgaaatctttttgagggtgaggaattgagaataatgttgtttaattatagggagttgggtatcatcccgaaggttgagccgatgtagtatatggtgccctcgctgtgtgtatgtaactgcaacttgtattgtaatgtggcttgttggccgttttcgcacgcctgtgctgatctggccgcacccgtaggcgactt

SEQ ID NO: 44980 - DNA, 471 bp, Zea Mays
cacagattgaggataagggtgttcaaataattaaggaaatggtcaagcaaaaggcaaagaaatacaagtgtttccgtcaggacagcaagggaattctatggtttgaagatagattggttgttcccaaggaccctgagctcagaaagaagatactggatgaagctcacctttccaaattctccatgcaccctggtagtaacaaaatgtaccatgacctcagatctttatattggtggaccagaatgaagagagaaattgccaagtacatatccgagtgcgatacctgtcagagagttaaagctagtcatttgaaggcagcaggccccttgcaaccccttcccataccatcttggaaatgggaggatatttgcatggacttcatagtgggattacccaatacctccaagcaccatgattctatttgggttatcatggacagattgaccaagactgctcatttcttgccagtgc

SEQ ID NO: 44981 - DNA, 824 bp, Zea Mays
agagtttgtaatttgtcgatctaacggccacattcccttcacgaagttgtcttgccttgatgcaccctccacaatgcgtccgtgtgccacctttgttccctctagaactatgccgccaggttttgaggccaaactcgtgaaaccgtcatcggagggttttgaggatcaaccacccaacctccaaaggtagcatactccatagagtccccaacatcctagacacatgtcctaccagtcctcaaccgcatcaacaacacggtatactctgtcatgtcctcgctcctactaatgaccctaggtgttagccactgcatgtggtcacctggcttctctagtccctcagtcaagaactagcgctcatccttcatcatttctgatccatcgacataaactcacatgaactttacctacactgttgatcatttcctttagactcccacacatgtgcatcataagcctagaggcacgttgcacacacacacacacacacacacgccccggttagtccaaacaactcaacccaagattctactccgttgataatcacaaacacgaaccacaagggcacatatcaaccttgtgttcgtaactttaatactatcctctaaagcctcattgaaatatagaggacattccttcaccctctctatatagagactctctcttctcttctccatcgatttttatactttatacaacagagtagtcaagcctaaaatatgatcagacatttgagggtatgaccaatatgtagatacatctctaatatgggtctttgacatatagagaacaatatatagaggacactattaaagggaactgag

SEQ ID NO: 44982 - DNA, 406 bp, Zea Mays
ccaaaacttggttcagatgcaacttgttcttttttaccttcattttcatcttctccaccttgttcatccacatgcacaaccaaagacctttcattcttccttaggtaagcaagcatctcttttgaaatcaattcaggcacactagcacattttcttgtatcaccaagacctccagcgagatgttgcttgaacctttttatcctagaagggatgaccttcctacaaaaaatgcactacacaaagtccttctttgtagcatctggccaccaaccatatttcaacccctactcttgtgatttggctttcctcttcacgtcaatagcttggaatacaagctctggtggaagtgctgctatatcctttttaacaagagcaacagagccttgagcagtagaagccactgaac

SEQ ID NO: 44983 - DNA, 519 bp, Zea Mays
aagaggtaacaattagattttaagtcggggctataaatagactccttagtcgtttttggctaatatcgcttcacgtcttacacaccttttaaaactaaagaaatacgctccactcgattgcatctcatagatcatcatttgtttgagatctagtgcattacatcttgtgtcactagttgagcggattgagccggctttatacttgttacttctagtgattgtcatcacctagaccaccagcagttcatgagattattgagtggttattatagattgttgttagcttcgctcatcagttgtaaagggctattatgatcattctccatgggagattcgtaaagagcaactttaacaaaattgtggcttgttagaatttgtgatcattctccacgagagattcataaagagcaactttaacaaaattgtggcttgttgccttttttagtgtggttcttatgacattattattgtgggtttggtgtatgatgccaattagtatataaaccacctatcttgaat

SEQ ID NO: 44984 - DNA, 352 bp, Zea Mays
cgagtgtaggaacagagttgttagtaattgttgagcagctggatttgttgcatacccattgaccacatcttgtaaccaagccggagaacagtgtgacattgcaagacagtccgcagtttgatgaggcagcctagatagggcatcggctgcagtattgtcagaacccttgcgataaactatcttgtattgaagaccaatcaatttggtgtaaactttttgttgccacggagtatgcaaactttgctcattcaattgcgtaagactgatgtggtcggtgtaaataataaactccgccaattgcaggtaagaacgccaccgattaactgctagaagtatggccatatactctttc

SEQ ID NO: 44985 - DNA, 306 bp, Zea Mays
gtaacaccaatacccattatccttgatgataacaccaaacttgaccgatataacaggttacataacttatccaaccaatctaaaagcaaaacaacgagacagactttgcttaaacttatttaactcataaccacctattaacctattttgtttacctaagaatttgccttcactacatgtcccaaattcagataacaacttcaagaacgaaaattgaagatgattgacctcatcaaatcaaggaaggataagattcaagccagatccttaaaggaatcaagatcctcaatcgtggatagagtattt

SEQ ID NO: 44986 - DNA, 426 bp, Zea Mays
taagctaaatggtaaaggtcggtcctgaatggagacatacacgtggtttatgtagccgaactacactgatttccacccattggcatgcttaccattatctacctctgttctaccagaagtgagaagagtagacaaataactataaaatcccacatcaccacagagcttgaagtgtaattgggcattaatatgtcattggtccttggcgccggtagatccataattattgacctataaactactagtgatgataatttgtgatagaaatatgaagatcttctagagacttgttgtatcctctctactcctgatgatttcttcgtatgagagcagtaatatctgttgttgaagatggatcctaggcggataccagtattgtttcgtccttgccaagcagttatcatcatttgcttcatcaaaagctag

SEQ ID NO: 44987 - DNA, 421 bp, Zea Mays
cacaatttgatcaactgggtgatccttcacaatagaatgatggattcttgataccatttgagaatgactagttgaagcatgaggagggaccgaatgacttgaagtatcttgatcatgagtatccatactttcatcattttgttggctttggtgattttcttcatttagggttgaagaggatggaatgacaaccacactattatcatcatcatcttctcttggctttatttcaccaatagccattgttttcatagcatttctcaattgagttccaccaacatcatcaagattatcgttttcatcttgagacccatttgtttcatcaaactcaacatcatatgcttcttcaataataccatgagtcttgttgaaaactctataagccttgctatttgatgaatatccaagtagaaaaccctca

SEQ ID NO: 44988 - DNA, 763 bp, Zea Mays
agatctcaaattggggagctgtgggggacgattgaaggtgagggctggttctctaggtgcacaactacttagcagagcaggcttgggcaccaatttaaagaatccaaggtctgtggctcctaatttgggcatggcgtgctggcggccagagaggaagaaggtcattggtggctcagtcgtggcgttcaccgatgcagcggttctgagatggtaagcctaggtgtgccacggttactactgcgcagtaaagagacacggcgtagcatacttgaggtcatcggagcttccatgacgacaccggcggtccgaccacgtcgcacggttacagacacggttgataagcttcaccccgcgaccaaatccgctccccctccgatcttttcacccgcccggtactttcctgcctaagtccaacacgaattgtcgcgatcagcgcaaatccttgcgcagaggtcaccggcggtgagggggactgaacctgagatctttctacgggcactgtaccatcagaacgacatttagagcaccttatagagcggtttgcagtgcccggatctccaattttcatgttataacttgctaatccacctttaacaaagttgtggtccgataatccagctttaatcttgctatatctaccatacttcaattctcactaaatcacactcaaaatagctctcaaacttggtcctagttcactgtcagtccagtttcagagctgtactcgactgacaagccaacttcaggtctgtttttctcccac

SEQ ID NO: 44989 - DNA, 676 bp, Zea Mays
ctttgatgcattcctgcataaattttagacctcagcctctcacggggtcattctttagaggtagctgatcacatacaaaatctggtcgtaaagatacgcaatactactgtgtacatccgtatgatctgctttctcatggtcattgaactagagtgagagctaggtatggaggagagagatagtgagagagagagaggagggaaagctaaggcgcctttgtatctgctttgtcagcacatgcattctacctctacccactttgtctttcccaccacaaaatccactttggatctgaaaaaaaaaactaatagtatacccagccagcagcagacctctctaacaagaaaagcacaaacccaaacacccaaataatcatctatccttcacctcaagacatcactgccggccctgcagctcaaaagatgagcaacactcaccaacatacaaagcagcagccacctgcagctacagtgatcgaccccctctatatctacgcacacatctccctgatctcgtcttcagttcagcctcgcaactgccaccggatctttcagcactgactgccgtcgttgctgcatcaaatctgtcttggcaggtgtagctaccagctagctataggtggctcgctggagagatgagggccggggggtgcacggtgcagcagtcgctgacggcg

SEQ ID NO: 44990 - DNA, 628 bp, Zea Mays
gcccctgaaaagtcaggaacgaccctggatcagagatctccctttggcttgattctttgtagctgctctgtcttctcccttttctttttcttttctttccttttttttcttcttttgcatgtctaatgcttgttctctagtctttgtgttttcctgcggtttctttatagtttccagccttctacgctctcagtctgtcactacggggtcaatctcatgggcttgcaatcactttcactagaaggcttgtattcattggtcagccaatgctcgtgagattgtatcatacaaatcaaggtgctggtgagattgtggataagtccaaacaactaatatgcagttttgtgtataatatgtgtgtcctcctagaagggtaaagaaagcatagatacatgatccatcattccacttatgtgatgtggttcatgcatcttgttcatgcattctatcctcacaatatactgctctttaaatatcactcactgttcattacaaaattccctcctacttaaatattcctaaaagcaatgacaactcatgttcatcccctcccacccaaatatttgtatctgcactgaaatactcttatataccatgacaattcatattcatcccctcccaataaaat

SEQ ID NO: 44991 - DNA, 452 bp, Zea Mays
gttggttcccaagagtgtgctcaacgccattgatcgttgtaggcatgccttcttctggtcagggaatgatgccttgttgcctcgaatgaggtttgtcgttgcaaaaattgtggtagccttggccttcctacagaatctggtgattcaacaaggttctcagtggctctcatgttcgttgggtaaaatggtgcttcggtggttctgatcccaatcagtttccttgccctgttgctcccatatacattgagcgtgtcttcaattccctcgtcgatctccttaggtcatgcaccttcgttgttgtgacttctttctggcttgatagttggattgttagcgacccttgtgtgtctccttctcgtccctcttttctcattctgtcgagcgtaaactatcggacaaaggtgtccttagtaataatcttgatttgcgcctgcggcctcggccaagctcgt

SEQ ID NO: 44992 - DNA, 274 bp, Zea Mays
atttattgatgtggggagtagtttagagaatgctagtttgcgtggaggatgtattgttaagacatgagtgtcggagttcatatactagtaggttacgctacgttgatcggagtgtctcgagtgcacgccacaatatggttgtatgcgagactgggtaaaataaagtgtgctcgacatgaatgtttagtcgtaatagttaataattggattggcttaattagagaggtggtgacatgccaaagtagtcatcgctttctctatatttataagtcga

SEQ ID NO: 44993 - DNA, 623 bp, Zea Mays
cggtggcttggtatttacgctcataactgagggtttttacgcttaggtctgtagacgcgtccaccagtgtaccacatactagatttttacgcctaccataaaaccagtgtagcggtggtggaggatcgtcttccttgtccatttgacatccttgatttctgaaatgcttccgtagtcttttgatgggagcctgactgaacctcttcaacttcctggcgaagtccttcatgcttctgtatgcctcgcgggtgttcccttactcgatttctgctatctcaaggctgttctggatggagatgctttcttccttcaactttttaacctatagctccatgctctctacccgagagtttaggtggtcgcagtgtgagaagaggttgtcataatgggtattaagggtatggaggtatccgtccatgtagactggtcgtgtgaaccctagctcaccatttccatgttttcggctacgcttatacacttctctcgagcatgtcgcagttctttattacaatattgattataggctaaaaacacaatcatgatgtataaaaacgtcaatgagtagttagagtagagtctcattagaaggggtaggtggttcatgtgctacaagtgatagacac

SEQ ID NO: 44994 - DNA, 619 bp, Zea Mays
ggccagagcgcaaggttccctagactcagcgaatagtgagcggggacggcgggttgattagctaatttatcaggggcgttttagcaaagttgcggcaccgaagggggtacggggctggctgggccgtctgatctgagatggaaggctcagattaaatcgagcaccaccccaaaccggtatccagtattggcccttagatccgagatcagtggccgtggtttaatgaaacgagatcccctcgattaccacacgatttcagatcaacggtggtaattcaaccctggtgatcggttcacaacctttaatctcgtgcgttgggaacaatccgatggtcatcgtatatcttcaacctcacgtgctcctgcctcccctttctctctcccatctctcacgctgagaaccgaggcagcgccgatggttctgaccacccccagaccacgagtttagagtgtcgatgctttaatccaacccatgaaatacacagcgggtagaacgacgaaggtattatgcggctccttacctttatccgagcagtggagtaccctgccccattgccttcccatgcgtgcggacagcataagcacgaacaccagggcggcgttggcgagcgtgaacatgg

SEQ ID NO: 44995 - DNA, 410 bp, Zea Mays
ctgggagatgccaaaagaaaccatcagcaaccccaatgaaggtggtttggttcgactgaaatataccttcaggtttggagaccaatttgtcgaaccagacgatgactggctgaagtgcatcgaagctacaagtgatgaactgcttgggccgtactccaaagcggaagataatgcgctatctgtggccttcgaaagccggaagaagaaaagactaaatagagtttttgatgctattgggttcatgtaccctgactaccgctacacgtcacgagggcagaaaagaaaaagtgcaacttccgggaaggatgatgcttcagctgctccaagcaagcccgcgccgaagaggaaaaaggtgaaggttcttactcaccggtcgcgatatattgaaccggccgtagtgcccgaatttg

SEQ ID NO: 44996 - DNA, 322 bp, Zea Mays
cagggacgtaggataaatggagtagctccccaatggctaggcgaaggactcgttgaagcaatggaggctaaaggttgtggctttggctcctgatggtagatgtgttgtggaatgtatagtgaaaaatatgatgatgtgtgaaggatctctttggttgacttatctacacttttgcttttgaattgttacctgataggtcttcatagtgtggccctgataggtcttttgaaacacaatacaactttcatagttatgagttgaatcatccttcaacgctttgacccctcgtcctcctcttggaggtaatggtctaaaattcatt

SEQ ID NO: 44997 - DNA, 756 bp, Zea Mays
ttctgagaggcgcttggcgctagcactcaatgagtacaccaatcattgccggcaaggcccatgcatccgcccgcctccgtcgctccaccaccactaccagaccagagtcgtccagatcgagcatggatgaacggacggggctccggctttaggcccggtgtggcgcccgccattgacgcacgtcactcaacaaccatcgtccgttccttcgttcgttgcagcaaccagctcaagactgaacaacaccgttaggcggccggggattagggataaacctcacccgggcccggctctccgctttaattgactgagctggcatgcacgatcgatcgatgctgcggcgtgtctgcgtgtatatgaatgtcttgctttgcctttaataacgatttcatttcattcccgcaagggattttcagggtttttctgtactccggaggagggagagtagatatatagatatagctagctctcatgctcttttcagttttcgtttggggggaaaaagcgcggcaaagtataaaggttcctcattgcaggagcaatggatttgacgtaaagatgggcacgtacaatgtgtttcgtctccgtctctctctctctctcaatcaaacgtctccagaccactcaacaacgcactgccttatctgaaactccgagggacgcttggttagtttattcccccacgaacgaatcagcgaggtacacgtacgtagacgactggagagaggtacgtactgcgtatacataccatggacc

SEQ ID NO: 44998 - DNA, 425 bp, Zea Mays
catcgtcggacgtcccgttcgtctttccgcactacaggaatccaattaattcccgtcggctaagaaccgacgggaataagctctaaactgacggggataaactcatatttcatgcaaagagcagctggaaggttgtacggtatggcaatgacaggccaacatgaatacgacgcagcggtcatattgaaaggcgtgaaaccatcagttgccaagccgatacgaacgtttcttgcatcgctgacaaactctggaccaaagttgtcaagagccttccatgcatcaccatctgatgggtgcaccattaacccatcttgtctgtccgtacaatctttatgccacctcatgtgcatagcggtcttcctcgagagaaacaaatgtttcactctaggagtgagaggcatgtaccgaagctgtttatgtgcaac

SEQ ID NO: 44999 - DNA, 1251 bp, Zea Mays
tctagcccagccggcccaacaaacacaggaaaagggcacgtgcccgtgcccgcgttggcaatcttgcagaagggccctcggggttttgactaactagagatgggttcggttactattcttatgagtcactgacgatttgcacagaggtccttcggtttctaattcttcacaggggtacgtccccgatgtcgcacggcggaggtccgatcaccggtgaggttagaccggtcggattacacaaggactggtgcactcgagcggcagacaccgaattagacctcctccgagcatttcccctaagttaattgcatgattggtgacctatttcgctctgcccaagaggacagcgaaggctatggacagttgctcgtgttcccggcgatgggtggctgtctagtttgattgggcgggtgggtgagcatcaccagcatacaaagatgctaaaacgagaacaaagagggcatgatcagacctgtggagggctggccacggcgagggtgcgctttgcggtggcggagaccagtttgggggaaaactaaaattcaagctctctgacgaacgattgctagtgatttttggtggctgggtgtgtgatgaccttgcggggctggtggggggcttcaatttataggtatcaacggcggtggctaggaatttcagtggggacgcgcggcggtcggaggaggaagaagagtactggcgcagtggcttggtgtccagcgccgtggcaattgctccggcgatcaacggggagctagagtgagtcacggtgctgcggtagataggaagagacacgcggcggacaacggcgacggcttaacggcggtgagaatccttatccgagggcggtgagtaaggggagaggtaccgcggctagccggagtggtgtccagctcaccggcggcgaagattctcttacccgcaatgttagccatctaccacgagcacgaatccttacgccggtgacacgaatcgcggcggaggagcgatcgtcggcggtgaggtttactgaacctgatcgagttactgtaccatggcaatcatcattcagacgacttgacagtcattctttgagcttgattttctcccagattcatatggcaacacaaccagtgatctgcagcaatattgtagtgctataaaccagctacaactttgatatattgtgctcccacaaaaagtcaatggatcttgcttgaaattgagcttgaagttcatgtcattccactgttagtctgatttcagacttta

SEQ ID NO: 45000 - DNA, 505 bp, Zea Mays
aaaaaaaaaaaaacgggggaggcaagaagcatcagggcaggcaggaggatcctagtacatatcctacttactggcttgcagcaaggctagctgatggctgcgtgcgtgcttacatgatgatgatcatgcgtgtcgttcgtactcgtacgaggatcgaggaaagacaccataactcaccttcaacagacacccttcgttaggagcatgcacggatagatggcgtctagcatatcgataggacatgacaagtggtacgatccccgtcacatgtccatggaggcatctgatatggacacggcgtgtatctatcgcggctggaacagaaccagcgctcgcgcggcggtcggcgggagggacagaccttggctccgtgcgttcaggttgtgcttgtgccgcgcgccacgcacggtctccgccgcctgcagctgaaattttagatttacatcctacccctttattttttttatttgtcacagttcagttcaaaaatgaagaacggaggtag

SEQ ID NO: 45001 - DNA, 610 bp, Zea Mays
cccagccacaaagtattgcctccaatcgtgtacccgagagctccaatttcacacttcccccaatctgctcaaaaacatcgcacggttaccctcgtcgtggacagtttgctccaggtcagttccaacgccttggtcatttgttctagcatccttaggctctcctcaaactcctcgacccctcggattgaactagactgccatgaatcgccgggaacacgttattcctttgattttccccgctgtcaccgtggctagagacatgtgggtagccgttcttggaattaggttgggggaaacgttcattagatcccgaatttggtttaggccaaaggagggcgccagtctttgagcaatttggccagtgcgcgtgctcgtcggagctctgcgcgacgccgtccgccgttgaggatgtcggcgtgtaaaggaatagaaacgcaggggctcttttgaaactgtcagtgactcattgcaatagtgcagtgaactcggctcataatagtcaaaacagcgggggcctctgtgtaagtttgccagcgcgggcgcgggcgcgcgctttccacttaagttgggccgcctgggctagatttggcccagggctcttcattctttt

SEQ ID NO: 45002 - DNA, 524 bp, Zea Mays
gtgtgaaaaatcccccgcaaaaacatgcgtcgaaaaaagaccgcgacgacggtcttcgacattcgaccaattcaaggtcaccgcgaggctaagcgctagccaccctcgcgtgcgacaaatccgcgcagaagtcgcctaagggtgcagccggactagcacaacaagtgcgaaaaaaacacgaagtctatcgcgaagactatccgcgcagaagtcgcctaagggtgcagccggactagcacaacaagtgcgaaaaaaacacgaagtctgtcgcgaagactatccgcgcagaagtcgcctaagggtgcagtcggactagcacaacaagtgcgggggaaaaaaaaccccccgaagtttaccgcgaagactatccacgcagaagccgcctaagggcgcagccgaactagtacaacaaaagcagaaacgacagcatcaaaccatccgcgctaagaccgactataaccacaccagcacagcataaccaaccataccagacaaagtacacaacgccctcgcaggcacaggcg

SEQ ID NO: 45003 - DNA, 908 bp, Zea Mays
attccaacctttcaacgttttttcaatcttttaattttttctttccaaatatcgatattagaacgacttctaaccggaagggaccaacttttccaaacaatgtctttgaaatccggtcgaaatttccagcacaactcatatctgaagtctctcttaggagacaccctagaatccgttttaagatagagaggaacatgatcggataaagttctatcaagaccagtaaccaccacatatttgaattgaaggacccattctgggctcgccagaaatctatccagcttttcaaaagtgggaggctccctattattagaccaagtatacattctaccactcaaatcaagctcaatcaaactgttaacatcaatgatggaattaaacagagaactccagcaattcgtacctccaggcttgtttttatcagattcttttctcaaaatattgaaatcacctcctatcagcataggataattgcaatttgaacagaaggaagccagctcagttaaaaaaatttgcttatgattattttgggcagcaccatagacattaataaaattccaaataaaaccactttctttatgagccaagagaaccttaatcataaaatcccctttatcaacttgtctgatatcaaaaacatcagcatctaaaccaacaagcagcccaccagatctccccttggctggagaccagaaccaggcaaaatttctattactgctaatagactgcaaccaagaatcttcaaaggattttttattggtctcttggatcccaataaagtcaattctctcttttctaattaactctttcaagaattcaatttttatacctttgcccaacccctgacaattccaaatgagacctatcattctgaatagttagggtttgggacagaagggatatttttc

SEQ ID NO: 45004 - DNA, 680 bp, Zea Mays
cgagaccaggctaagcggttacctagctctaaaccagcctggagaatgtggactcttcccttagaccgagcacttagtaatccattccacactcatcgtcaaagggacactcaaaataggtgcaaggcaaattacataattcagtttccatgattacaacaaaagcatagatccataggggtacatgtatttgttaaaataaaaagaacccaatgaatgagaatgtcatcttctttcataactggacaccaaagatctgtgtactagaggtcgggtttacaagggtagctcctatcattccggaccatagatggcaccaaaggctatgtttacatgagcgaatcttactggactagatcatagataaattctatcctattacaaaggaagagtttgttctcatgctaccgtacgaggccaacctaaactgcccgagctccgttgtgcatctgacttgaatggtaagcggtgccccatcctgccttggcgatgaccaaaggcagagctcggcggaggtcactggctgctaccctgaacgccatggagcttgtgggagttgagttgggtattggcgccgtattgagccctttcagagcgcgtggaatgtcccttgtgaggatctcccatggtcgatgggccacctttgtcatggcaaggttgatgtcgttgtaacatctgtt

SEQ ID NO: 45005 - DNA, 442 bp, Zea Mays
gtacctcacctctctgttgggttgattttgtttgtgggagggggctttcattttggatggctgaggcttgaggggctctaggaaggggatcgctagagatgtcgggaaaggtttcaagtgtgttcctaagatggttaggttttggaagccacacttgtttctgaggaggagctctcataggttcatcaatcacaccatctctcacaggggtgacaagcttagcagaggtggttttgataagcttgggagtgggtgaagggttctctgaaggtgtcaaaccactgcactcaccaaccttccctaagcgagcaacactcccatccttagtagcaaagcctaactctggtccgccagttcccctcttgaattgactaaccatcatgcccaactgcggctcactgcacgacacccaactcaagatatatcgaaggtatgtgttttc

SEQ ID NO: 45006 - DNA, 642 bp, Zea Mays
gttggaccacatcagaggggtctgacactttcgtccatacaaggcttcaaacggtgacattttgatactggcctagtagctgttgttatacgagaactctgcatatggcaaactggactcccaattcctgtcaaaagtcaacacacaggctctcaacaaatcctcgaggactttgttgaccctttctgtctgaccatctgactgagggtgataggcggtgttgaagtctagcttggtgcccatagcttgctgaaggctcatccagaattttgaggtgaactgtgttcccctgtctgacaatatcttccgtggaataccatggagtctgactatttctttaagatatatctgggcaagggtggctcctctgaaggtagtttttactgggatgaaatgagctaccttggtaagacggtcgattataacctagatagaatcgttccctttttgggtccaaagcagtccggttacgaaatccatgcctatttcttcccacttccatttgggtactgggaggggttgcagtagacctgcaagcttctgatgctctgccttagttcgctggcaagtgtcgcacgaggccacatactgtgctatctcctttttcattcctctccaccagtatctggtcttgaggtccag

SEQ ID NO: 45007 - DNA, 397 bp, Zea Mays
accgttcggctaaaaactccggacggtctgtagtgtaaggacacaaaaacacatcgtccctgcccaaactcaattcagcttatgcagacggtctgacctcctggcccggacggtccgtgaagggagacagagacagactgccagcaggcttctctggcagagtcgcggacggtccgaccttctggcccggacggtccgccggccacagagaaaatgtttttgcgctagttcaaaagaatttgtattttgaaacccgaaacgctgttagccctcatgcaaatgctaccgtttatgctctacgaggcactaagttttacaccgatcaagttcatttgacctctcttaatagtacgactgtctatccaattaatccggtcaatttcttctctaaacacct

SEQ ID NO: 45008 - DNA, 344 bp, Zea Mays
ccctgactcatcactgatgaaacatcgacccaaatgagacgatgccgatcattaggacattcgacgtacgtttgagactccttgtccttgcacgaaagtcgctgccatcggatctactatgatcaacacgctctcctatccggcacgcaaattgttgagaatttcttgatagtgaatttgtatgcagggatttcgtgtgatcaagaacagaaggtaaggtaaaggcacagggacacaaatatttatattggtccaggttctcgtttgagataacaccccacgtccagttcactgatggcaattcccttcgatgtctcccccgcggggtgcctcctttatagtct

SEQ ID NO: 45009 - DNA, 396 bp, Zea Mays
gtttcatcgtctatggcctcgcatcgaacaccgctgttttgtgatatgcttcttttgtccttggacttggtagaaaatgtaaatccactaatgtcatatgtttgccatgtcgtgacttagcgtgatggtccagatgccaaccccttaatggtttgttcttctattgtatctccgtgtggaatgtccttcacaattagccatgtgttgaaccgcggcttatgttgcttcattacccaatcatctgtttgcccaggattttgctcgcgaagctcattgatgtgttgttggataaatggctccattatctctagctgatgtaggatgctgtgatgtgcctcaagtactgtattgtattctggtgggatgaaggatttctgtcccatcctaccgcttcca

SEQ ID NO: 45010 - DNA, 675 bp, Zea Mays
ctaggatgctggtatggtggggtctggtggtgcactggactggtctagtgccagcgccaaaggaaggcttcaatcaggttcctggtgattcctctatagttagaggtttggtggtgcatcagactagttcgatgtactcaaggaaagctgaatttcagtaatcaatccaatggctcttttagaggtttatgactacaaataatacctgccaaatagtccatttgacagaacaatcaccactagagctgtgcttcattcccaaacacttgtgcaacactatctaggcattctaggagatccgagcacctaatttgagttgagagagtcattctagagaaagtttgctcttgtgatctacatttgtggtgttgtgttgttgtgttcttgatcttgtattggtgattctttgtgtaaaggctagcgagaggctccaggttgtgtagtgcgttgcagagattctgtctctcatcactgaagatccgagggctcaagcttgatcattgggatcacatgagagggttaaaagagaccctgtccttagggacatctgctatcgcagaggtaggttctttggaaccaaactctggtcaaacaaatcatgtgtctctctttgtgtgttttgcatttgcttatgatttgttcgtctctatccctctctaagttctcttgcttgca

SEQ ID NO: 45011 - DNA, 455 bp, Zea Mays
caccaattgtgaatatgtatccacttgttgtcctgatctcagctgcatctgagatccagttggaatcactatacccttcaagtacaacagggtacctagtatagtgaagtccatacgcaggagtacctctgaagtatctcattacacgttctagtgcacaccagtgatcgcctcctggattagaggtgaatctgctcaatttgctcgtgcaccagcaaggtacatgagggaaccaataatttgggagtatctcaactgattaactccttgtcctctgttcttgcgaagctttagactaggattaaaaggtgttggagaatctttggagtcaaaatacccaaagcggtttagaatgttctccacataatgagattgtttcagaataatcccattctcacccttaatcagttttatgtttaatataacatctgcctctcccaaatccttcatatcaa

SEQ ID NO: 45012 - DNA, 327 bp, Zea Mays
cgactacagtttgacaggtcgtgttgctgcggcaccgatacacttattccatggttgcagacttattggttgctaacccctcctgttgagcaaggtaagaattggtaagagcttgtgtcgcaggttgagagtgagcgccttgcagtagctacatcctaatagttgtagagtttttattccttcacttttttatcttgttgcctctattcgtctaaccatggcaggattggaggttgatgatgcttctcgtaatatgccacactctcctcgcaccaagggcatcatacaacactttgtaaggctggtgaagacgcacacggaaggtct

SEQ ID NO: 45013 - DNA, 465 bp, Zea Mays
attcatgccactacattaatctaagtccaaagctcattgcataaaaccccgatctgtaatgtgcgtaagatttcccaaataaatcaccacaatagcatacattggccacaactggatgattgtggttggggattttatctgtatgcttttagaacatctcgtcattagggggaggatgcccatatagtgtaatgcctcaatattctattaaacgcacaaaagccaaacttgaacctgtcgttcggtgtgtactcctgtgtatatggagtttgccagaaatcgttgaggagtaaccatattggtttgaatgcttctacctggtgtagatgtggatatacccgggattaatatcatatccacatttgacttattggcatttgatgtattctcggggacgcttgcgaatatgatccatcggccttagtcaaagcatatgttctgattgcagattcacgtggtctgtaa

SEQ ID NO: 45014 - DNA, 411 bp, Zea Mays
ttcgtctatggaaacattggacttaggaatatttgcatgccatccaagttcacctttaggaaagaacattaggtatgatagtgcatcatagcatccatgatatgaacagatgtcgtggcttgacctatccttcccatgcatcataacactattactgaattgaccacgtcgttcactcccctcaatccaaactgtagtgacctccaaagtgataggtgcattatatagtttctggttcagcgtctggtcaaggttcaaggcgatatggtagtcttcaacgttatcaatgtgccccatatacctaaggtgctcagagtatgggtttcccttaagtatttcaaccaactgtgtaatagctgccttgtctttctcaagatgatcttgacgacatttattatatctatgctcgag

SEQ ID NO: 45015 - DNA, 420 bp, Zea Mays
ttctgtaattaattttgtattaaaaatcatttctaaaacgaatttatctgtctctggtccgcgcacactaataaacagaaatccagggggctcagcgcaagaaaccttaagacatatcgcacaacagtatgggacggcgggttgatttattactttctagggggctcttaagaaaaatatccttgcgaaggggtatggagcgataaaggccgtagggtcgaagatcgacggtcccgattaaatcccaccgaagcggtattctctaccctaatcagagccactcgatcaaatatgaacgactctgattttattaaagagcgatttgtcccacaccaccagatccggctacacggcacagatcatatctaggttcaatcatgaccgcccattcgttatctaagggccagagccacactcgtc

SEQ ID NO: 45016 - DNA, 815 bp, Zea Mays
aaagctcaacaaaggatgaagttaaggtaagacaagacttgcaaagcgacaaagggaaaggaaacgaaccagagcgggatagggaaaacaacactctcggattgaaatggaataagtgaggcaaaaaaaaggtaaacatcatggtaaatatggagagaggtcaaggggcaaaggtgataataggcaaggatataaaggaagaggtaaatgtgcataaaaaaaaccaagaatctaggtacaaccaagaatagagttcagataagtcttacaagtggtaaagtataggctataaccatgggtgagataagtaagagaccacgtttgaactaaggtgggagattggaggttgtagataacgaacatagcgtaatcactaaggtaagattgagagatgagaagggtaaaggcagtaagaaacaaaagcacaacaaaggatgaggttacaaactcatgagccaaataataggatacaaccaagataaagaaagtataagacggaagaggggcgattttaaagggcaggtatgagacaaacatcaatgtaggatatataggtgtcaagggtgcatatgataataattaaaagcataccgaaggatatagttaaggcaagactcgcgaaacgacaaagtggagaaaacaatcaagggtaagataggtaaggttccaacagaagggttgaagtaaagattcattaccgagtggagttacaaggagacaacgagatcactaaggatatgcaaaataaaatgaccgctcatggatcattaagaaacaagggtggtcaagggcatgttaactgaaatgtcttaaac

SEQ ID NO: 45017 - DNA, 870 bp, Zea Mays
gaagtacttataaaatatccaaattaaagtaaccattattgatgaatgttatatgataactttccctaaagtagaaaacaatgaatattaattcaagagtatgttataagtttggctacacattcacataatattttcctaatatgaatgagttctgaaatattctttattaatttatatgtttcgaagcatggataaaagaattaatataaaaatatgaatataattaatccttgcactcatgctggttttgcccgtgcgcatataatgtaaccactaatacaaactcaactttgaattcaaatttgaaattagaattgaaataagaaaagaaacaaagtaggaaatagaaaagaaaaataaaatggaaaagaaaacctgggctaacaacccctttctcgacccataccctcatccctattcgacctgacaccccgctcagcccacctctcccttccctatttctcttttctccatgacactaccgggtgggcccccttgtcagccaccctagaacaacacgtgccatcccttcaccgcacgaggacaatgacgcgtgggaccctgtagtcatcacataccttgatgccgaatcaagctcatgttgtggccgccgcagtagatcccaggacgttgcaaccattcgaggtttgcgtggccgtgcttgccatgcacacctgggcattgcccctcgcccttggtataaactccatggccagcgcctcctggaacccaaaccaagccaccgtcgccgggggtgggtgtgatggccgccgcggtcgggatcgggcagggttgtggcgcagacctcgatagaaaccgaagaatgtcatcgggaagagtacggcatgtacgggagcattgccgagc

SEQ ID NO: 45018 - DNA, 704 bp, Zea Mays
aaacgatggctggctagatgctatagaggcaactagtgatgagctacttggagcctactcgaaggctgaagacgaagctatgacgatcgccttcgacgctcaagggaaaaagaggctaaacagggcttttgatgctatcgggtttgtctaccctgattactgttttcctgttcggaaacaagggagaaaaaggaaaattgctgcttcggcatcctctagtgcgtcgaaggcgaagaaagtgaaggtcttgacacgtagaccgagacgcattaagacggctaatgtgccaaagcttattgaaggtgtagaaattgccctttccgccatagaattaggtcctatcatgccactcaaaactcatacagatccgggcgaagagtcaaaatcagagaaggcagcagaacagctgaaggtactgagcctagcaactacaacagaactaccgaagccatcaagtgtttctgcagcgaccctaagaaaaaggagaatggctagtgtattagacgctattttggaatccacaaagatgtcagctcccgcttttgccgaagcttctagcgaaaaaactaaggatgcaaaagaagacgttgctgcgagcgcggctatcgctcctaccgaagctgggccaatagaactggtggaagaaagtgctcctaagggatctaaacatcatgcccccgaaccacctcataaagagctagaat

SEQ ID NO: 45019 - DNA, 746 bp, Zea Mays
gcttaacaacctcttcgactcgcttggcttcttctcaggcatcatgggattctttttcatttttctttatagcttcgtcggctatctcccagccgcccttcatccaaacgttggaatagaatttcccgcccatcatagtagcttcagccgaagggatccttcgtgttgtctacggagaaggcggtttctgtctcggttgcagctttaacatgtccacagacagttttctctaaaattactgcaacccctctggcataggcgaaagcgcaaaaaaccccacggttgctaagaatttcttcaaaagcttcagcttcttcgctgatccattcaataatcaccttgggatcgcctctaataaatttttgctccgatgagtatgcacccacctttgcaaaactatctttcaattttttagcacaacccaaggatttctcattatatctctccttcaattcgcgaagctcatccacattcttttgtaatcttgaactagtccattcgcttatttcttgtttggctttcgccacttcgaaatcctcattcttttcggcaagctttttctttaggtcttcaacttcggtcttatgagcttcggactgtgcagcaagtttggcttcgctggcctttaccctgtctaccaaggaaagcataattttatccttttctagggcttcattcctcagtctgataacctctgtccgaaggttcccaagggctatttggcagcttttgtcttcaacattctt

SEQ ID NO: 45020 - DNA, 1284 bp, Zea Mays
cacgatgtactgcctccgttccccgttcttgaatatctgtcactcgttttaaactaaaaacacggtaaataaaaaagaatggaggaaataaatgcagaggaagtttataatcatcatatatttataagtgatttaatgcatttgcaaccctaatgataaaaacttcacatacgactattacctacttcatctgggttcgtggtgtatctttcggtctgtccaataaacttacacacagatacactgacaacacacacaaactttatccgctcctaactgacaacatcagtttacgactgacaagttaaccaacgactacactggtcatcaaacggcaagaaaccatcctcgacttcatcacataccacatgccagagcccagagcacatctacttggagtttggttacactgcagcaagcacacggagaccactagactacatctgctcaacaagagtttctttatattcctcacattttcctctagtagcttccagaattggtgtagcacatgataatattttgtgtgtgaacgacgaatcatcgcaagtggcaatacgcctctatgttctacaatggcttggagagttggagtgaggttcttaacaattgagtgatatgtgacaaagctcgaactgaagttcttcgtttcccaatcagccactagggacaacgacgtcggatcttcaggtaaccaaacttcccagctcctggagacgacccgtcgaaaagaatgggcagatacccggtctcagccttgtatctgtgctgaatctggaagtgcaggtaattatcggtctctgtcatcgtgataaaacccaaacaccaaatgaacaaaggctagtccgtggagctacctctgcaatctcttcactgctcctggcgcagttcttcccaacaacacatactgtgccgccggagcctccgccggtgatctttgcgccaaacagactagggcttccgccttcggatgtcctcctgtgttgcacttctcgtaccaggttgactagtctgtcagtcccatcagaaccgaggccacatgcgctgtagctgttgtggcactgccagaaacatgtgaatcaaagagaaacatcaaacacgtcaaaggtatgcaagtagcagtacaaagagaagaatgttaataccagcaaagcacaatttcctcaacttaatgtttgcacagtgaaccttgttgtgcaataagagtagagaaagatacatcatgatgagcagagagccagagacccaaattaattcacctggtacataagttctccaagggct

SEQ ID NO: 45021 - DNA, 409 bp, Zea Mays
ggatggttggttagtctagtatcacttggctgccatttgttttggcttagggttttagctctcatattttccatctctagacagctctagctttagccaaggatccacaataattttgtacttcgactgtatttgtgttcttcaagtttaatctgaggaagggtcgctggtacggcccacaggttttggtcacttctcaatctcaattttgcatccttgctgaaattctaaagttttgtgttcttggtttcccatttccccttctcttgtggattgacgaagaacccttgagttcttgcgatatgggtatggttggagattaatttgggtggagatagactctttggatcactgtgtatgccctcacggtacagttcttgatcgtgatccgagtttattctcatttgag

SEQ ID NO: 45022 - DNA, 775 bp, Zea Mays
gactcgtgggccctggcccccgtgccagaggctgggtcaccttggcgcgcgtcgggcgagatcatctgcggcgtctcagggcgtcagtgggggaatctttctttaaaaagaggactcctccgagtgcggtagccattctcatcactcgcagcgccctttcgcccttgagttctccgcgctcttctgccgtcgtagccgccatggccttgctagacccccctcgagcgcctccagcccgaggtggtactcaacttggtgcgcaacctgctcggatggggtgtgccagcgtttgccggaaggatccgtgctggcgcctctccttatggcgacctcgccgccggggagttcgttcaagatgtcgcagagatggcggccgcgcgcttccaacgcgatcctactgatgtcgagtaggtcatacctgtagacataaggctagagccccgcttgaaggcggatgcaataactttgcttttgtaaggtacttttgagtactacttatcgagcagtattagcacttatctgcatactatttgcccttgttgtgtgtggcgttgccgactcctccctggtacctggcccccctgggatgtgggctcaacatgtcgaggctggataccagcatacctaaaaaagttggcagcggcccccaagaggtagcctcgactgggacctggacctgggcacagcttcggctagggagcgttagtagcacacccataggatccatcgcctgatactagccatcctttgatacaagcacaagacctacaagatt

SEQ ID NO: 45023 - DNA, 406 bp, Zea Mays
ggccctacttttgatcaattggtcttcaaatatgctagcaagaaggatgttctatgtgatcggccaacaaagaaaccctggtcacccgctaaaacaaaacggccgaataaaacggcccgaaaggaacgcaacaagcatcacctattcatcctatgacaccaggattctttccacccacctactcatcgtcgatgcattgtcatattcaaatatggaatggtagtacgataaacccatggtacatgcatagtccctttgtctattcaggctgggggcacctccattctataccttttgattcattgatcaagtggtcatggccgagaaagatgcaatccgaaatggcctttatgcattagagctctattgaatgatcaccctattggattataaagccagtgacttg

SEQ ID NO: 45024 - DNA, 480 bp, Zea Mays
cgttcagcgggtgcgggcgatttggcagtttacattcccacctgcagcactatataaacagacgggttggtgcagagttaccacagtattcattgttgttgcactgttgtgctgttaaaaaaattaaccatagccgaaactttttcactgcgctcttaagcgaacacttcatcatttagagttaacttcgtcaaaagagtgagcttcgtcagaactgcaaaaaagaaacgtcaacttcgtaagaaccgcaaaaaatccatcagatggccagagtacgttcgactgcaagggtgactcgtgaaggagaggagactgaggccaccgagacagctcctatttctgaagtcatgagacagtcaggtctagttgtgacagagggaactactaacgaaggtgcccctgctgctgaagctgaacagaccgttgctgaagaagatgttgaagaagaagattatagtattttgatcccatcaaaaccga

SEQ ID NO: 45025 - DNA, 386 bp, Zea Mays
gtttggtgtagctcttatgtcttcaatgtgctggttggggtgtatttatagccccaaacgccccacatagctgttggagatgagtggagaaatttgtatatttttgcgtcacatcggatctcctacaatactggttgggtggtgcactagaccactgttagactgttccagcaggtgaccattctaacagtttgcagttttgttaggcgcaccagattgggcccatattcactagacctccaccacatcagcaagaccattagaagttgaggtagccattgagcttgttagatggtccggtgtgccaccagaccgggtccgtgcgccagcctccaatcagtcaaaaaacaacctttctggaactttggttcgatgccacaccggat

SEQ ID NO: 45026 - DNA, 478 bp, Zea Mays
taccaacttaaaccgaccgctctgttagtagggtatagtggtcaccccgagttaagtaagcgtgagcatgtcgcaccgccttaagttattgccgacttaagtcgattgctccgttagtagggtatagtggtcaccccgggttaagtaagcatgagcttgtcgcaccgccttaagtcattgccgacttaagccgatttctccgttagtagggtatagtggtcaccccgagttaagtaagcgtgagcatgtcgcaccaccttaagtcattgctgacttaagtcaattgctccgttagtagggtatagtggtcaccccgagttaagtaagcgtgagcatgtcgcatcgccttaagtcattgccgacttaagccgattgctccgttagtagggtatagtggtcaccccgagttaagtaagcatgagcatgtccaccgccttaagtcattgccgacttaagctgattgctccgttagtagggt

SEQ ID NO: 45027 - DNA, 869 bp, Zea Mays
tttgcaaaactatctttcagtttctttgggcaatccaaggatttctcataacatctctctttcgactcacgaagctcatccacattcttttgcaatcttgaactagtccattcgcttatttcttgctttgctttcgccacttcaaaatcttcattcatttcggcaagttttttctttaggccttcgactacggctttatgaacttcggattgtgcattaagttttgtttcgctgctcttcagcctatccactaaggaaagcagaattttatctttttcaagtgcctcgttctttagcgtaataacctctgaccgaagattcccaagggctatttggcagctttcgtcttccgcattcttttgtgcccttaaagccttgcttaggattaagccctacaaaaaatgaaggatcagcacacaataataaggaaagacataaaaaataacctgtttataagccaaaacatcctcaccttcagactgttataagcaaggctgtctgcaaggtcatccttcgatatcgcagataggccaagctctagtttcaggaatcctatattccttgccatctcccggcaaacagatatctccttgttgtttgaaaggcagtatagaaagtcatcttcaacagtgccattatacaccaaggatccttttgggtactttaaatccctggcatattgctcagcttcggcaatctgctcttccgatagctgtttccccgaagcgtgtcgtatgataaaatctagctcttcagcaggtgcttcgggggcaagagatttaaccttctcgggtgcgctttctttttccaagatcagggtagctaccgaaggatttgcttcagtagaagctgatggtccggcttcagca

SEQ ID NO: 45028 - DNA, 707 bp, Zea Mays
tcccttttttcctctgtcgtaactgaagggaggaagaacacaaagggtagaaatggctattccaccaaaaatcatctccactagatctgaagtgagagttagccacacaattttagcagtgaatctcagatctattgaatatgtcctcggactaggaccaagcaaatctctcacacgcgccttgattggggacgtaaacctccaatggttatggccccccccagttcacatgcgctatataaattgaggcagtgtcggcacggaatcaaacgttttcgctaaccctagctgccacactagaaatgatgtgagctcctactagcgccctagtgatcaaaaatcgcccaacctctccatggcatccgtagaccctaatggttctatgccactggccaccgacgctcctcccaacggacaagaggggaaacaaatccagagggagggactcaactcctatagtcgtctatgaccccacctactactgcggcgagtctccacctagccccgaagatatggtttccctatctatcttctcccttcgctctcactagcgctcaagttgtttacctcttactctatatgcaagaaccgataagggctctagagggatcggctagcccctagatgaaaagaggccgacatattcaacaatggtatcggaaccagaatgacaattcccctaacactagtctacaagaccgttagca

SEQ ID NO: 45029 - DNA, 558 bp, Zea Mays
gttcaccaaactgatttcgataactatatgtgtattttagatacactaaaccaccttttctggcactttggcttgacctagcatcaacttccttcggcatcgcccacttgttgacaagggccatactttgaaagctatgtgcttctaaaccaagtctctggtgctaatgtaactgcaaacaacgttaaatgctaccaggcaagcttgggccttttaagtgtgtgcaatagctggcctcttaatactgaatcacacatatgatatcctccctcttattcaagtcatttttaacataaaaccattgcttcatccatgaacctagccatttttgtcgaaaagttgggacagggcacctgacatctgatcgatacacaaaggtgtagcaaccaaagttattatgatactgctcttttctagtagccttggtctgatacgagagctcgtgaatattgcaaaaaacagtcatcatctagttccaagccctggcccctcactgcccaaatgaagatcccaaccttaactagggctttgggagtaagctgaagaaggtatatctcg

SEQ ID NO: 45030 - DNA, 496 bp, Zea Mays
gtatatggatatggcataggtagatatgggagtggaggtgtccatgcaggcacgttaggtctcaactggacagtatgaccttccgtcttttccgattggtgaggtggtccaatctgtcttatctgttgtcgctcctgagtaggtgagcgaggttgcttcgctggttggtcacttgggccggccttcttttttacatatttggattataattgatcaaaagtcaggccagatttgaccggccgaccatctgccttaaatgtattagtctttcatgtacctatctctggtcgtcgtggtttgaaggtacgcggtcgttgcgggtcttggatgttgccagactgtccgctggaattcctcggaccgtccggcgtaattccaggtcgtccgcgcctgggtgtcagactgtccgagatgcgtagtacgggttcctgcgcccaccccctggtctgcgcttgcccccagtgccggaggttgagatggtcaccttaagggtctc

SEQ ID NO: 45031 - DNA, 403 bp, Zea Mays
aagaaatgctcaagcagaaggcggagaaatacaagtgctttcgtcaggacagcaagggaattctatggtttggagatcgattggttgttcccaaggaccctgagctcagaaagaagatattggatgaagctcacctttcaaaattctccatgcaccccggcagcaacaagatgtatcacgatctcagatccttatactggtggaccagaatgaagagggagattgccaagtacatatccgagtgtgacacctgccagaggatcaagcccagtcatttgaaggcagcaggccctttgcaaccccttcccataccctgttggaaatgggaggacatctgcatggattttatcgtgggattgcccaatacctccaggcaccatgattccatttgggttattgtaga

SEQ ID NO: 45032 - DNA, 641 bp, Zea Mays
gtaggttttgcagaaaggccctgactgtttgaataatctgaagcggggtcgcagtactgtttcggtgagtcgctgacacttgcagtaaaacccctgaacttctaattcttcacagcgatacgtccacgacgtcgcacggcgagggtccgagcaccggtgagtctagactagctggatcacgcaaagaccggtgctctccatcgactggtacctaattcaaacctcaacagaagtttcccctaaattaatttcactaatggcgcactaaaacgccctaaccacggtgatcgtatggacaacggatgaacacgggtgttcacggcgacctagggcggtctagttcaatcagaggggtcgtgaagcttgaggaggacttagggatgctagaacaaacgatcaaagcgcttgaactaacccggagcaagctggccacggcgaggtcttttctgcggtgttcttgaccaatttggggtaaatcccaaattggagttctctggtgactaattggaggcacgggtgggtgcgttgagcgcttgactacatggtggagccgagggcacgctcaatttataggctctgggggtggtggcgcttaattcggctacggcgtgctggcggccggagatagggaagaacacggg

SEQ ID NO: 45033 - DNA, 378 bp, Zea Mays
cgttacgagccgagttccctagtctctttagtaattagctgaatctcgaggacgtgatttgacctaagtggggtaggtttgtaacaccctgattttcgtcgctaagtaaaatcttgttttatttcgcaatcatcttaatacattaattttacacgcatgatgttagtaaacacgtgactaggcaaactatttacaagtatttcacctcctttctcactagctataaattaatccatctcaagtactaacgtcaacactctactccaatgcaacttttgcacaaggatcccaccttcgtaacattacacttgctagcaaactatctcctcttcccaggagcaacacacgccttgacacagtgattccagaagataagct

SEQ ID NO: 45034 - DNA, 544 bp, Zea Mays
ttttgagtgcatggtcgcaagaaacgaattagtgcgcatatagacgaggaatgagtgggatgaaatggtgacatgccttcgtagtcatcatgtcgtgtgttcgtgacctaactgaaggtcgtagagaaaggtcgattacatgtgtgttattattgtcaccttgtggttctgtatgaattgcaaggtgaagtagtaggctctctgtgtgatgctagatgtctaggtagacgttcgtgaattgtggtgctcggaccgtcgagatgaaggttaagtcggtcgatgcctattaagtagttaaaatgattaatggaataatcttggggttaaaactagaaactagtgttctcgcacccgtttgggatgttgtagcccaattgcgcatggttatgatcgcgggtaaaatctgtagtgctcatgtggtgtctaaactaaaatgcaaactagtgggtgaaaagcgctttgatatacatgtatgccgaaattgatgattgtggtgaatgcgttgattaaatgtgtatgttagttctagcgcgcgaaataactt

SEQ ID NO: 45035 - DNA, 485 bp, Zea Mays
tcgaaaatccaatgggaaaataaaaaagaagtgcataatgtcgtttcatatattgtatttgttgccacgttaaaaagtatttatacgaaaataaaaagtacgatggttatcttcaggacaactacagctttcatagataggttactcgaacacgatctaaagctacatggagccctttctatgctaagctccctagatccaactactctcatagcttagggttcaaaggactaggagccatgggatgaataaggccaatccctaacgtggtgaggcgtcggggatacttcaatagaaagaaacgaagcaaatgaataattgttgaatgaaatatattgtatatatcacaaatatattatagaacgactataaacgtgtggcacaagatacaaaaggaagcttagggctactgcttgtcaccatggtctggcgctcttgcttcatcatagatctaatcatgggccacccgatccgaccaacccgac

SEQ ID NO: 45036 - DNA, 406 bp, Zea Mays
tttctatcgatcgatcggccggatggaaagcaattagcagcttatgaatccatgccttttttttgtgaatatgattcgtatcagcaaacgatcattgctttcttatttgaaagagggagagagagagataaatgagggacacacaaatgcattcagcgatttaattagcagtagtaacggtaagaatcaatgggcactaaatatccatccaccaaagaaccatatatatatacatcgaattcacgcaccatgtgcatataccaaaaacaaaaagaaagaagagtccaagcacaagcactactactatcatcatcatctatggcttcatcatcctgctcccccgtcttcaagatccttatcgtcgtcgctctcgtcgctgctgccctttcgtcctacggtatgtgcg

SEQ ID NO: 45037 - DNA, 851 bp, Zea Mays
tgcaagtctgactaagcgagaggttcgattgacaaaaatgggagtatgtatgtcagagcgcgtatgtaatccaccacgacctattggtggacagtggctcaaccacttcgtagctattaagtcaacaaaggacactggataaaccgctgtaggacatgactgagtgtaacggcgggctccagggtggcctaggtgtgcctacagtaccctgacggaggaagaaggcgtcatccatggcgttccttgactgatgggaacccaagaggacaacgaactacacgacaatgcgtgacctttattctcttgaccgttaggctcttgtaacagtgttggtctttgaccttggcctataaaggaagggaaagggacacgattccgaggacaagcaatcacacacacacatcactagcacaagtcaaagcacatagcacttataaccgcacacatattcacacactagagacttgggagctcgatccctctctcgcccgtttgtaaccactactacaaaccagtgcaaggtaacatgagcaggtcaactggatttatggatgttatgcccaaactagaataaacccttgtgtcctctttgtacaccatccgctcgaagacacacacagcacaataattactagccagtggtttcgaaacaccaacagttgacacgccaggcatgagcatttttgcccgtctcgcaacatgtttccatcacacaatagcggatgaccaactagttagctgggtgcaacaccccaaaatcctaatttggctttagtaaatgttttccaaaagtattaaattaaagtgccttcaaatgagggattacaccttggtagtgcccttcctaaaat

SEQ ID NO: 45038 - DNA, 609 bp, Zea Mays
cacagctgtatgctgctgcgcaacgtccacagtagcagtgcctggcattgggcggttgacaacctatggcgtggaagaagcagcttcttcctgcaccaggaaatccactaaagtctcggcgcggtgctcaacgatttgcaccatcatgctgagcaagtaaacaagcaaaaacctaaagcttagccccctacctggcgcgccaaatggtagagaggaaatatccggccgggtggtggagtgcaccttccctaaatcctaagatgaggaggggcctaagcgttttgcttgttgcgagatttggggatgaacacaagaacgcgcaagagtttagagtggtacgggccgctagagcgtaataccctactccactatgtgttgtattgctcgtgagcttgagttgtgtcttagatgacttgggtcttttttccgaactgtgttgtaacgttgcatgcctccccttttatagctcaagggggcacgtacaagggtactgagccccgacatgtgggcccagggacaaaatggagggaaataactaacgcctgcaacgttcgggcccaccccgagtgtagtaatgtccgtagtgtttatagcattggcttctcttgg

SEQ ID NO: 45039 - DNA, 643 bp, Zea Mays
tcccttctcatcctggatgcgccgccacctcccccacccggataatgctggcgacaggtgagtttttggatccctcgcctctggcaccttctctctcatttccgcaagtccagtcaggcccggtcgagcggtgagcgcgttagtggcgacgacccattattcagatgtcacggtgccatttgaaagggagaggatggggtggatggggatgttggcgacgtgtagctcgatgagaagaaccaatggcatggtcatgctatggaagtcgcagatggaggggaagagacgattggatatcgtagaacggcggatgatggttcgaaccaccaaaaaactgtaaggatcctaggcagacgggcgaggtccaatgtcaccgccgtcaaggtctcgaggggggtcggctgggagcaggagtaagacgcgttatttttattttttttctcctcacgacatctgaaagtatcgtgtctccgcagggtgacgaggtgtcgtctggaagctagaggaagaagtgccagtaatgggaaactggttcgtcaacgttcgatgccaatcatgcggctgatgatagaaaggatgacgtggacgaacgtggagacagattttctaccgtctttaatatatggtaatgagaagcttattg

SEQ ID NO: 45040 - DNA, 401 bp, Zea Mays
gtggaccacaaaagcacaagaagctctcaatgcattgaagaagttctcgaccacgccaccagtgctaaagccgccacgccgagccacaccagatcagccgacagaagacctattattatacatctcctgcacgactcacgtggtgagcaccgcgttattagtcgagcgggcagaggaagggcacacatatccagtacagcatccggtctacttcatcagcgaagttctagggccctctaaaaagaaatatccccaagttcaaaaactattgtacgtagtacttctaactgctcgctagctccgtcactactttgacgaccacaaagtcatagtagtcaccgggtttccaataggggatattcttcacaacaaagaagccatcagaagaatagccaagtggg

SEQ ID NO: 45041 - DNA, 472 bp, Zea Mays
cgaataagcaaacagactaagtatgtaatatggatacatcaccacactttcccacatgtgagcaggacaaaacatcaatgatgagtagacaggtgaaaagtaccacgacattcctagagacaaatgagtggatgacatttgtcatgccacttatcgggccagtttaattggtcttagccactatacagttcacttccttcttatggacgatccagatcgttctactgactggttgtgtgaaacaaccttcttgttcatatacttataaagaagctggtcaaaagtagggctgacactaacaagccagccaaatgctttagatgtatcttgtttgcacgtacctacttctagacatcgtggtttgaaggtccgaggttgctggtgtttgtggttgtccccagagcgtttggacttcacagctggaccgtccccgtctggtctagaccatcaagcattaatgcctagatcatcc

SEQ ID NO: 45042 - DNA, 530 bp, Zea Mays
gaaaaactcctctagaagatggacgaatacatcagggtcaacaatgagttccggtagagaagggaagaggccttcagatactcagagatgattagggggcttcagaggaaggctccaccctagacatgttagaacaatccacaatcccatctcaagtgacgatagaggaggaaacctcgctcaagggcaccagcaaatctcctagtcttcaggaatgcaacaaagttcttacaggccactagctccgagaggcatagggggaagaagcttcggaggaaggttcaactcccaacccaggaggttgttctgtttattctgcggggaggataaaggacatacaacaaggatgtgccaagtcacgattcaaaatcagaaagagatagtttaagctgaagcaagacagaattagcagaagcaggtcctgcatactgcttcgtgctattctccatacattcccgagtatgtgggtaatcagcagcccacaacatcggttgcttcgacaagtcacactcaagcagcatggaccccac

SEQ ID NO: 45043 - DNA, 423 bp, Zea Mays
tggatatcaatcaagaggggctccctctgagggaggcccgaaactagaaaagaaaggccattagcccgacaccacaggaagaagagttggatcaagaaatcataaatctagaggctatccactaacaagtggagagaagaagggagaaaatgcttcggctgtctgaactccagaagaagattgatgaagctcccgaagagatgtgccacatcacacaagacaatgaacaattacgaaggccacaacatagggagcttcgtaaggaaatcccaagctatgatgatgtatggtatgacaatttccatcatgataacattgcttttgatgatgcttccccctagccacagaattgcaggctaccccatgtccacgttcgtacaaaccaccacagcttcccatgtatgatgggcattcggacccgaa

SEQ ID NO: 45044 - DNA, 680 bp, Zea Mays
ggatgcttgatggcttcggcagttctattgcgcatggtggactcagtgcctttaatggttctgctgtcttctccagcttcggctcttcagtcacatttgtcttagctttgactggcatagagcgacttggctctgtgataggagcggccccctaacttagcttcggcacgttgggcgcttcaatgcgtctaggttggcgcgttaaaactttaaccttttttgaccttgacacactagaagttgccgaggtagcagctttcctcttcttcccgtgctttcgcatgagatagcagtaatccgggtacacaaacccgataacatcaaacaccctattcaatctctttttgcctcgagtaccaaaggcagttgtcatagcttcatctttggccttcgagtatgctccaagcatctcatcgctagttgcctctatagcatctagccagtcatcattcggctcatcgagctggctccagtatcgaaaagtatacttcagatagaccaaaccattttggctggagccagcgacagcctcctttggcatctcccatccgcttgaaagtggccacactcggtaagcgatatgctcttggaccaagtctcttgtgccgatgtaagtacacactgtattgaaagctgcctgccacgcttgcacgtcgtttccaagtgcaatgaccagcctc

SEQ ID NO: 45045 - DNA, 996 bp, Zea Mays
cttttgggaggacgacgacgtcgatcgtagctcaatggttgtttgtgtagggcacgatggaacacaacaatttatacaggttcgggccaccacgaggcgtagtgccctacatcctgtggggttctggagattgtattgctctgagttcaagggtttacaggtgattgccagaggtgggagatgaaggtccctttgtgatctagcgtggtctaaccgttttgtagggatacctcctcatccttatatatccatctaagtagatatccctatacatatcagagcacttgcatgagtctatccactacctgctacaattgcgccaagtctttcgacattaagttgacctcttccacaacgcccgtgcccatctgcatgcgtggactgagtcttgcggcatttagttggcctccccgaatcggcgtgtgagagcttaagtcagctacggttaccttctgtcgaggcccacgatttaacccttgaatgacttatcgagagtcctttaggcagcccatgaagcgagtccatgtcttgatgacctgggggatatccatctcccacaaatactgctttgaactgatctcctcgcattggagctccacaattccaccaacaaatggactgaacgaagatggaggaagacaaaggttaaaagggtgataagtgcacatatgtgtttcaaggccacacttttttaggtcacatcagttttaaaatttatgtttttatgttcacatgtggggcactacacttggtagacactattgatggcaatagtaagaagggatcaaagtttggggggatatcaacacctacgactccatcacataagctcctcgccattactttgggctcctttggatagacggatttttataggaaaagtgaaggattccaattcatataggaaaacaatccctattcatgcctttggaatgcagtaacgaagcaagggaaaagtgaaggaaaatttcctatcctgcggatttcataggaaaa

SEQ ID NO: 45046 - DNA, 1253 bp, Zea Mays
gagctggtgaagttggatcccaggtcggttataatgctatttggtatcccaaacctgaatattatgtcttgtatgaattccactgctttggttgaggtcaaagaggcaatgggcttgtactctatccattttgtgaattttgtcaatggcaactagcacgtgagtatagcctccctgagctttcttgaaaggttcgatcatgtccagcccccagcatgcaaatggccatgttacaggaatggtctgcaactgctgtgcaggtaaatgttgttgctttgataagaattggcaagcttcacatctctggactaactcggtagcatcactcttcgctgttggccaatagaaaccagatctgaaagccttcccgaccagagttctggatgctgcatgtactccgcactgcccggcatggatttcatctaacagctgcttcccaataaccgagtgaatgcatttcatgagaactcccgtcgcacctcttctgtacagtgtgccccctatgagggtgtagtgggctgactgccttgcgatgcgttctgctgcggccttgtcatccggttcttcttcatttttatgtacctgatgataggctctctccagtcattggggtttgactctggttggctcaaggtgttgcactcttccgtctgatctgagaggatactcggttgtgatatttcttggatgaagatcccgggtggagcctgagcctgactggatcctagcttcgacaatgcgtctgctgccgtgttacggtctctttccacgtgatggagctccaacccttcgaatttgtcctccaatttccggacggctgcacagtgcttgcccatggaattagtcgagcaatcccagtctttgtttatttggcttatgaccactagtgaatctccatataccatcagcttcttgatgctgagtgatacggcgatgtttaatccgtggatcagtgcttcatattctgccgcattatttgatgctggaaataatagctgaagcgcatacttgagttgttcacctccaggagcaatgaagagaatccctgcacctgctccctgcaacttcaacgagccatcaaagtacattctccatacttcggtagtctccgggttgtctgggacctgatgctcagtccactctgatacgaagtcaaccagtgcttgagtctttattgtcgtgcgaggtcggaactctatgtcgtgagctcccagctcacatgcccacttgactatccttccgatagcttcttt

SEQ ID NO: 45047 - DNA, 568 bp, Zea Mays
gttcgatagaaaatgtttgagccggagattggtcgcctcagaccactatatcaacagcaacagcaacaaccatcacatgctcctgttctaggtcatagcaacattagataccttgattcccagttcgccaaattgtctataaaacataaataccccaacacagggcgggacactcactctgagcctctttgtacttagttattttcatgtggctcatatgcatcaagaaaagagaagtgcacaaacttggttgttctttgtgtgcaaagtctaaaagtctacaatacaataagtgtggctgacaggctgacactatgctcaagtattttaactttaccgcacagaccacgcaattgtacgagctttaaattgtatgatgtatcccatcccatgactttactaactaagtctcgtgttaattctcaatatttaggctcagacaatccatcggtatgtaaagttgcatggctccataaactgctaactggaggtgaaagtttgagaagacactaagataacattttaggaagaaaacaggaagatgcagtttaactaagttgattttagg

SEQ ID NO: 45048 - DNA, 509 bp, Zea Mays
gtccgaattgatccacctttgcctggattgtcttcaacgcctctgccacctccgtgaccttcatctccacctctggtcgccatttccggaattcaccttgttccttcatcatgcctttcatcgtcgcctcaactgttgccagggaggcttggacggtctccatacgccgatgggtctccttgttaccttcctcaattttagccatgatctgcgccatcgggtcttcgttccgcggcggcgccattgctccgcccttcgcctgagctcgggtgaagtagtcgtgcgtgggctccagcctcgctccgaataccaaatgttagactcacgatgtcacgctcatagtttcactccggccagcgtcaaaactgatcgccgccgccgtcacagccgtgttctggttctcagttctgttcgtggtctgaggtctttcccctcggccaagtcaccttattacacgtatgtgtttacagggccacttgggctccaaattcacttggaccactcttctc

SEQ ID NO: 45049 - DNA, 481 bp, Zea Mays
tggtaatgttgaatacagaatgcaaactgaaaatgacatggatacactagctgacctacttttgcatacagggtgtgttgaaactgaaattggcaatttatggtgaattatacaggagtgttgcatacaactgaggttatatggtctaccctgctacaacatttaagcatgcatttgactacaagccagcaaatatatacatagagctgcatataacagtaacatgaaggggaacaatttagcacaataaagcctacctaaggagcatgatcctagcagcagctcttcactaatttgtatagaatgaaacaataaaaaacaagttaagaaataatatagtttcctttccaatcagttgtcgtcccaaatctgcagacacgtaaacaacccattgaatcctacagtagcaatgcaaacaaagagatgcctgaatcgtatatcctataataacactcttgctaggtttcacactcatcttctg

SEQ ID NO: 45050 - DNA, 589 bp, Zea Mays
agagatgcgagcaaggcatacgatgatgttgatgagatcaagcagtatagagatgcaaggtgggtgactcctccagaagccttatggaggatatacgactttgggcttagtcagatatatccacctgtgatgcagctgcaacaccatcttccaaacatgcacatggtggcgtttcacgagcggcaaatggtcgagcgagtcgtcaaccgtccaggtgttgataggtcgatgctcacagcatattttgaggcgaatagtcttcacgaggaggctcgtggcatcctatatcgtgacttccctgagtggtacacttggcagagtggtaagggtaaagtatggcaatggaggaaacgagatacaggtggacaagtcggtaggatagtctctgctcatccggctgagggggagcgctactatcttcgtgttctactaaaccacgtgactggtgccgcctcctatgtggatctaatgacagttgatggtgtcaccctaccgacttttcgtgaggcagcagagagaaggggactgcttgagtcggacaacacactggatgagtgtctcactgaacgtgctcttttccagatgccat

SEQ ID NO: 45051 - DNA, 315 bp, Zea Mays
gaccatatggcatggagcaaaggtgtgtcactccatgaactattgtattgcttttttgtatctaggctcttacatgctagtgtgtgcatgtatatgcaatatcttaagtcacaccataaggttgcacttgtggtgacgattaaagaatctctagatatttgattaatacctcttgtggtgatgtcataagttagttttaagtcatcttagtgaggtatgactcaaacatgctaacttctcaagaatcttggtttaaaatattgcatatcatgtctattagtataccttttgattatgagtaattccttcaattgg

SEQ ID NO: 45052 - DNA, 352 bp, Zea Mays
ccagttggtggtggtaacatcaagagaacaatctttcacacctttccatgaaacaagcgcttcactccccataaattatttagatgtaccagtaaagaacttctcaaccagtctggtccatgctgattttttggtatggagaatttcaactgaggtttcttcacctcatgaacaaatatcctacagattagatccagacactgaagggctgatagcaatgcttcacttgactgaacatcaagagctgactttgcacagagctctgaagctgaaacctctacagaattagtgaggatttggacaaggttctgaagcttcgttaataaattggacattgaaaatgcccctgcag

SEQ ID NO: 45053 - DNA, 284 bp, Zea Mays
cttggacgcgatcgggaataaaagtgcctgcatcatacaaaaagacaccgtaacaatgataagctaccaatggcgtagcagcaagatgccttttctaattccaccacatccttctgctttcgtatgcatgtctgtatataatggtactatggtagcagttctaaagctgcaccttcagagatcctttgctaaaatcagaaaccagataatataatctcctcctaacaatccacgctaccaatcttataagccgaaagcaacactgcatgttttctttatgtgcg

SEQ ID NO: 45054 - DNA, 329 bp, Zea Mays
ggctagccgtacatcacattataggccgcgtttggtttgctgaagattatagaaaaatctgcatcttgcatgttaccacccagaaaatacagcccacacgtaatttttggattttatttctttggatacagattgtatttttaaaaccggattcccagtatgtgccgtgagcggcttatatctatcactcggacatacgacagttacgcgtcaaacttattgacaaataaaacgtcgcccgctactatacattatgcgtcgtatgtatcgtgtcagcctgctgccatgagacgtgaccacaaagaatatctcgcaacaacccattccgg

SEQ ID NO: 45055 - DNA, 692 bp, Zea Mays
cgagtatggcttaaagccgaattcctgtaaggaactcactattccgaatctaaaaacaaaaaacaagggttttagggttctagccctacccctacatgatcatacctggcgttggctactaacgtcgttgtggattagcaacgggggtcgacatgacatgtggtatcaaaaatatcgatcctcggtggcggttctggtggcatgtggtgtcggggacactctgttcattgggcttgtccatcatgttgttcctgacatcctcccttctagatttggtgtgattgcttgcggatttcttaccggagttgttgggggtggttgcgatctgtccctgctattccattggattatgtgtggttcttcatcacgccgccaccaaatacctcctcgcaaacccattttcttctagatcaaatggctgactaccaacatcttgtggttaagcgctttgatcgtctcctctccaaagtggaccatctaactgctcgggtggatcagttataggtttaagttcttctctacttagatgtgttggatcaagttgtccatgaccaacaagtgctggctactctagttgatgccatagggaaggtagtgacatacctagaatctagagcagatagcccgtgagctcgatgattcacaagatttggtgtcagatttgtcatctccatatgagccctcacatcctc

SEQ ID NO: 45056 - DNA, 782 bp, Zea Mays
gtaattataaaaatagtcaggtcataattagatcctaacatggcagtttgagatagaaaggcatgatgtggcagagtctatttgcaaacagaggcaagcaacatacgtgaggaggtgagtatggacaagcaacgacgggccattttgagtctatagagcaaaaagtggtgggaaaatataattacaacaatgacaggtgtaggcgtagaagatatgtgggaaccatggaagtggaaactaaaataaaattagaactatgacaagtgaagacgtagatgatatgtgggaaccgttgaagtcttgctaacagaggttgtccgtagcggacgccccttccttccccctcccctatgttggaggctacatgacacctctaagcgatgtagtggttgcctcttcgatgccctctatcgtattgcaatcgtctctcccctctctccccctcaatcgagtgtgaccctgctctatcttctcgcgtcccacagctaaggcctccaagcttgttcgccttcgctgaaccacccactgctgctcgacacaaggaagaggccaagtgggagttgtagatgggtatgcgcgacgaaaggaagcaaatagaagcgggggtgtcgacgctcgccatggatttagcagcgagaacagaagcgtaggagagcgtgccatatccattatcggagcgaaagctcaacctactcgaacttggattcacttgaactcaccccatggccacttcatagagggctgcccacggggacatggcaacaatgtctgacgacggttcg

SEQ ID NO: 45057 - DNA, 343 bp, Zea Mays
agaggggcaggctggctccacagcagaagaaggcccttcagcaagcttcggcactttggccgtttcaatatacctgggccggtgcgtcaaaactttaaccttttttcccttcgtcatggtagaaatagccaaagcagcagcctttcttttctttccctgctttcgcgagggataacaatagtctgggtacacaaaaccaatgacatcaaagaccctgttcaatctcttcttgcctcgccctccaaaggccatgtcagggcatcatcttcggccctcgtgtaggcaccaagcaactcgtcgctagttgcctcaatgcaatctagccagtcatcattcggctcat

SEQ ID NO: 45058 - DNA, 764 bp, Zea Mays
cttggagacaaaaggagaagaagccctgacaagcaaaggacgggttaatactcgtcaacacggtaactagaccgatggggtaatgagaaggggtacacttacttggggccctggaccttccaatgaccttcgaagcaagacgtccactggctttgctgctgttcccgttgtcgatgctgctgcccctgtggcggtggcaggccagatgatggtggtggtggcggcgggactgatgatggtattggaggagggctaacgcacctctgcgagccctgggccggggagccagcctccccgaccccgccagctgttttctggcgtttctgagagaggtccgaatcaaggggcgggtccccaatgaaagatccgtcggcacgacgcagtcggtgtcgcctctccccctccgatctcccggaaccaccaggggcggaagaactgctcgtagctcccttgcccttgcccgagggactgagagttgctgggcgagatctggagtcggcatcggcgggccgagagcctccgcccgatatggcggggatctgaatcccgcgatgggggtcctggccgccggtctagcgaaccgctacgccgctctcgtcaagggtcggcagcgaatccaaggtcgctgtcctcaaccctggatcatcacaaagcgggggaatgccttcaggaaggatcaaggactcagcaacgaaggactcaccagtgatccccttcaccaagagttctagctcctcccaagataggttggtgcctgggctgcg

SEQ ID NO: 45059 - DNA, 589 bp, Zea Mays
gacttccagtgcacagcggcaaacccggagggccttctgcagttgcccttccaagtggccgtgtcgtagtcgtagcttccatttgtttttcctcctcttggttctggaaccccggccctgtatttttacaagctgtacatattcgagcggccgagttcttccatgctgctgtaatttttttgggcgatctctgactctctgtatatactcgcctttctttttatttcccggaaataatgtgcatccgtggctcgaatcgaatcggatcacttcccggaaatgctcttcatacgaaattattgccttcgtccttgtgtatttatgtgctgaaactggagcatggtaggcacccaccactcttgttacttcttccccgttggggaacgggtttgaccggtacctcgtcgaccacgaatgcttacgtcatgcactcttcctcgtcgtgcaggtgcagaacaggacacaaacaagtttcgtcgttcatgtatctgcgcgccttcgtcatcctcactctgctcggtcaatggcagacgcgcaccacacgagctgttttacttctgtgcatgctattgctaagggaaggcgagcg

SEQ ID NO: 45060 - DNA, 694 bp, Zea Mays
aagaagaatgggaaactgtcggggttatttcttgcccgacacgaatgctagctgagggaatgtcatccaggacctctgcacggatgacaacactcctgcaatatcaatcctctaaagatgcaataaaagaccttctaggataatctcctgcaatatcaggaagttccaataaaagaccttctaggataatctcctgcaatgcatgatcaatggcagacatcgtcatcctctaaagattaaccaaccctgacagagcctgaattgggacatcattgctagttttgctacgacgattcttgcgaaccaaaggggggacttcttcttcatcctcttcctcctcgtcagacacacgtccaccgactctagtgccaccacagctctcaatatcatcctcgagattggcactcgctgggtcaccaccgaggtctagggcagcagagtcagcccccagctccaagtcggatgaacgtcgaagttttctttttcttttcttcccctcggcagacacgactagataacccgttcaacatgatcgtttgcgatgggcacctccaggactgcaagctccttgaccccgccgaaggcacgcctagctacaacactcattgactcagtatgggcagattcggatgattcgccagctagcatactaagaacagcgttcacttcagcctcatcaacagtcgtgtgcatc

SEQ ID NO: 45061 - DNA, 697 bp, Zea Mays
caaagatctactgatataggcaatgggatgtcctccttgctgcagaactgctcccactccacccccactagcatcagtttcaatgataaatggcttagtaaagtctagaatagctaaaatcggagcttgtgctaaggctatcttcagtgccttgaaagactggtctgccagctcggtccagacaaatagggtgtccttccttagcagcgttgtgaggggcttgctgattataccaaagtgtgccacaaagtttctataataaccggccatgcctagaaaactcctcacctccttcacacatgtaggtgtaggccaattctggattacttccacttttttgggatctgtagttactccagcagcacttacaatatgtcccaaaaattccagttgcgtttgagcaaacaagcatttggattgtttcagatataactgttgttgactgagcaactcaaatacttgccttagatgcttaacatggtcatctaggttggcactatacaccaaaacatcgtctaggaataccacaacacacttccgaagtagtggtgccaacagtttgttcatgaagttctgaaaagttgcatgtgctccagtcaaagcaaatggcattacgcgatactcgaagtgaccatggtgcgtttgaaacgttgtcttgtactcatcgccttccttcagacgtatctgatgatacccc

SEQ ID NO: 45062 - DNA, 584 bp, Zea Mays
aacacacatggtcggctggtcaaaactagtcctacttttgaccaattactctccaaatatgctagcaagaaggttgttctacgcgattggccaactaaaataaccaaataaaacgccccaaaaggtgacgcaacaagcatcgcctattcatcatgtgatgccaagatactttccacccgccaacttatcatcgatatattgtcctgtttaaatatggaatgctacgacgataaacccatggtacatgcatagtctctttatctatttaggctgggggcacctccattctataccttttgatccattgatcagatggtcatggccgagaaaggtgcaatccgaaatggacttatgcattagagctctattgaatgatcaccctattggtttgaaaaaccggtgacttacattaggcttagttcttacttcggaaacaaaataatttgtgagatctattgtatcccgaagggtgctggcagtgcatatgcttttggttcgttaacctccaccaaaaggcagagggcatacattgagcaccaaaaatgatgggcggatggtccggtcctgaggccagatggtccgca

SEQ ID NO: 45063 - DNA, 284 bp, Zea Mays
atctttattggcttttcccggtactggagatctttttgaatctgaattgtctctgcctcgatgtggttctctggtacttgcaggcacttacggagctgggacacatgaaacacattgtgaatatctgacatggattctggtaattcaaggcggtatgttgtgggtcccactctgccaatgacggaataggggccgacgaaacgcggtgctagctttcctttcatttggaaccttttgatcccacacatcggggagaccttgaggtatacaaagtctccttcctc

SEQ ID NO: 45064 - DNA, 483 bp, Zea Mays
agttccagtcatggcgccgctgactgtgcttgggcgcagccgcgtgtggctggtgaagtgggaagatgagtcgtgggctgtccgatacgaatcgtgaggataggattggatctagtagtgggcaggtgtctggccgttaggttaggatcgtgtggatcagggcgcataccggaagggtgatgtggttttctgatccgagccgtagatcgcggatccatcgactctggtagcctactggttggatttaatggcagatcaaatttggagcattggtttttaatcgtgcggctatcatgcgcacataccccttcgtcgtggctggatttctaaagagcccctcggtttttcttaaatcaacccgccatccaatatcactgttggctgagtctcgacttacttacaaggaaccccttgcactcctttggtttaatgtgcgcagtccaagggaatagaaaattcagtaaaatgaaatagaaattgatt

SEQ ID NO: 45065 - DNA, 566 bp, Zea Mays
acatacgcagacatggcaaaagagcataaaaaaccagagagaagcaaccttaccacaacagtagacacaacttttactggccctgcccatgctcgatttcttggtgttaaaatcagatcccagcttcatttttgataatctcgtacaatatcggatcagggaacacaacacacacgtatcagatcagggcccatcagggcacatagccgatgggaggtggccccgcttgcgcatccgtgtatgcctgctcgcccgcccacgcttgtggccccgctggcgcgtcgcgatggaggcgaggagccgcttgacggttgcgccctacagcacgagctttagcggtggggcatctgccactggtccgacgttgggtctagtgctggagccgctgccgtggaggtggatggaagtgaggccgtctattggtggggagggagtgggagatgaagaggcagagaaggaggggcggtggagggaggaggttgggaggcggagaaggatggacggtggaaggaggagacacgaggcgaagggcaagcagcagtgcaccggcaccgcttcgctgcgtg

SEQ ID NO: 45066 - DNA, 1167 bp, Zea Mays
cgctcagatggcctggtttttggactaaggatcggtgctaccactaaccggactctattggggatttcatacgagaacaagaaagtttttagagaggttcatgccggcggaaggtaattataatagcttacgtcctctttaaattgtattgcttgggcttgtgttacttgccttagccagtctaattctgtcctgcttgccctttttactgagaccgtgcttttccttttatagaccaagggaaaggataggtacattagttaggtgtgagtcaagccataactcccctactttactatttgtcgatgtcatatgaattgttgtagttgtacattctggtttttagatgatcatatctagcaccccggaggctgtacaaagagatctagagaggtgatagtcgaagaagtacgccttccatactactataggtgtccttgaacaaagtggagcacactgtagatatttggggtcacacacgccatggaggtttggagaagtggcatgactggtacgcgatcattaatattgtctttgactacgtagctaggtgtgtgagcaccgaccaaaatgccactgagatatttttggagcatgtagtaatggatcctggtaacgaggagacggttatgggcgtctatagttgtgcccgcccagtcaggtacaacccgcatgtcttctaactctgccatccccttgatcgggtacgcagcatggtcagaagggcgtgtggctttcctggaccccattgggggcgtagggcctgacggagccaggtggcattatcagagccctccagtctatggacgagtggtcctccattgaccacagttttcacgatgatctaggggacatttggtgtgcctagaccccattttgcatcggtggcctctagcgttcaggtgcctaggggctcctagtcttgcccaatatttatgggagcaggtccggatcccattagaggggtccggagccttccatttcttatttatgtacatgtggcactcggctggtaccctatggaggtccaagtgggaccaggccaggctaggctatgtgtcgcattcagagctcttcatttggctggtaagtgtcgttgtggaagggtgcccacttatgtcctaagtggtggagggcgccctagctactatgtggtcagggcctcag

SEQ ID NO: 45067 - DNA, 577 bp, Zea Mays
gccagccaacggtgaggggcgattccgccacccgccatgctccgatgagcaaactggatcagtgccccacacacatccggttcaccgatgccacacaaagcatcagagggcaccatcgaacatccccaggtctctttcagaggtcgggtcggtggcctgggcatgaatcgaccacgacgacgccattagcttcgaggaggcacacgacggcgcgctgggttgagaggagggcactgtccgtatatatatgcgcgatagaggtccgaggcgactagttcgtaactctgtggaagtcgcgggggagaacaacccaacctgtcgcacggcatcggtgtccgatgaacacggaagtagcgttcggccgcggttgcgaggttgaggaccagcctgacagagaggtccaccagtcaacgaccagatgaacatgctaatgccctggcagcccggccccacacatcagagagtaagcgagcgagtatggctcacgcaggtaggggaagccgacggctggggcccatctgtcagcacggcgctcaactggtggctggtgcagggaagtgagtcgcgtgcgtaagag

SEQ ID NO: 45068 - DNA, 417 bp, Zea Mays
ccccgactctacaaggtgggatcaaccaagcttcactacggaaagtctcatcatctgattctctatagtaacccgcatacatgacaggacggagcgaccaccatattggatgtgcgcgtgtatcagaagacgacgtcatgagagctacgttagaagaggtcccatagacaacaagtcccactttgcctcagaccacccaaatgctttgtagaaggccgcccccttgaactataaaagggggtggctgaacacgaacaagggagaggagagctaggagaattctgctagagttctccccttcatctcattctcacacttgcatcctttgtaatagtttccaagagtaatacaacaatcaacactacattggacgtagggtgtgagcctggtccagtataaaccctctcgaatcacttc

SEQ ID NO: 45069 - DNA, 389 bp, Zea Mays
ggagcaaggttctcagccatctttagggagtgggagatcttctgaaaacatatttgggtcacagcaggacaggggcgtcaaaacccaagaaggtttgatcaaggagattaggtgcttccgttgttcccagtctggccaccatcaagtggacttccctaatgattctctctgctacaagtgtaaagaagctggacatatggcagcagaatgtcataatcacaagaagcttcgcctgtttggctttggtataccggagcagggtttctttggtctagacatccccgaacacaaaatgcaggtggttgggctgaatgctgtcatccacatccttgagggagaacctacagaaggaaaactagaggaggagcttaagaatcttgcgcaagcca

SEQ ID NO: 45070 - DNA, 636 bp, Zea Mays
gttgggtatctgagatctgcatggacatgggtttgggcaaaattttatacccgtcatgggtacatgcgtgctttttcttatatgggtatgggtttggacaagagataccagcgagtttttaccccattatcatctccacgtgcaattctcaattgatgctatctgtctccgactgcactcccatgttgttgaggtcgaagttaagggcgactacaggtgaccagataggccggactatatgaactagcacaaggcatgagcattttagtccaacacgagcacaacacgacagtaattgtgccggtgccgatccgaggtccatcataggtcgtgcttgggcttgtggacaagtccattgggtggcacaggcatggctcgttcactgtcgacccatttagcccgatatgaggcacgtatagtccatcaggacgaccacaacccgacacgctctatttgtgttctgaccttacttgcttcaatctagctcatcatatatacaccaatgaccgacatgaccctattttgagtcatttaaaaaaatggagaaaatgacatataaaaatagagtaaaataagttatttctgaccgctcgacacgatagcacgacatagtacggtagcctgacataacccgtt

SEQ ID NO: 45071 - DNA, 389 bp, Zea Mays
gacgaaggtctttaaccaataacaattttgttgccttgttcttgatctgtagcatttgagaacaagtgaccaacatcaatgtagctcagtttcgacgacatatccttggatagctcttctgcaagcttcgatgatgatgaagccctcatagcttcggaaattggcacaatatcttggagtgcctttgaagaagtaggagtgattagcctagcagtcgaatggattctagccatccaagggaattatacccgaagatgctttttgccgaagctagtttccgatgtgtcggggaatgaaaagctgaggagtgacagaaatatttggcaacaggtggttgcaggtagtaaatgtgactcgccttcacctgatccaacaccttctccctgtcg

SEQ ID NO: 45072 - DNA, 773 bp, Zea Mays
cttgattctgcttttgcgttgcatgaaggtggatgcagggatggaaggtgggcttgtagtgcaagcagtctgtagccatgcacatgcaagtgttttttcatgacaatacataaaggttattagaaagggtgtcaaggtgcgcacatttacttaggattgatccaaaattacgacttaaatatgtctaaattcacgaggctacccttgtattgcctttcaaaaattctttatgcaatatcagtaaaattttattaggatgttggattgttagcacatgacttacttggccaagggtgaaaaaggagaaacctttactttgcacccaaaaaaagtccatttctttcaatatttcaactaagaggactttgcagcaagattatcatagagaagtcaaacttcatgaattgaaatgtaagaaaacaaggcatgttagtcagggttttacatatgatctgctgatttaatatttaggtccatcactgttatggatattaggatatgtacccttctaggtcatacttaagttacataaccaaacccctgaaatcgttttacatgtatatggtatacttaagtagacatgagctcttgaagaggtattcctatccttttgtaaacgtggacatccttgcattgggttttcattttctactagttttcttctatcctatcactgagtttttagtctgaccgatccaaaatttggtgtgtattgtttacgctatccttcaacagatccatggcgtgaccttaggcacgtgcacactctctaa

SEQ ID NO: 45073 - DNA, 580 bp, Zea Mays
atcgcacgcctatatgggtgacatgtgggaccaggctaccaggaccttcgtcccgagttcattacgcatcgctcgggagcacaccgggattcatgggatttctcgattgaaatcttggcagactcagcacctaggtataaatccaacacccctcgaaccccctttcttcaccaacctcgttgccataccgaattgagggccaagaatcatgtgccagcaccaacgtagggaagagataggagaagcatgccaccgtggttgattcgagcttatggcgatgtcgtgttctcggaatcgggcgcaatacatatgtggcttcacttgagtggattcgtgctcgaattgtggggaattgctcatcagcattcaagatttgccgccgactgccctccgccgtggtaggccccgctgctacccctaccatcagtaaaaatactccaatgtgatttgcgaccatcccctctacgtttgtgcaccttagtacttgggtttggtgcatcaggtgccagaatagctgtcgccggcgtggatccgccgtggggttggggcagcgccgtcgtttggtgaccatggggtgagg

SEQ ID NO: 45074 - DNA, 587 bp, Zea Mays
ctcttgtgtcccctcattttccaatatgacaaatcgattaagcttggccattaagagatcaattttggactatcgaaccttgtcaactccttcatgagaaatgtgtagagcatcccaaatatctttatccacttccatctcaatcaccatgttgtactcatctccactaagtgcactcaacaatgcactagtagcttgagcatttagatggattcttcggtactcaagaggagtggcactactaggatcttgtagttcttctatcccacttctcacaatttcctaacgctccggatgtagctcaatgagataagttttcatcctatgcttccactttgcaaagtttgttccatcaaactaaggtagcttttctgcaggaacattaataatagatctatggtcaaggttaggcatagaagcattgtaatttaggggagcctttacatagtcattcttgttgcccttgttgtctttcttgttgccactcttgtttgtttgataagatttgtcatcatctccatcatcactgctgctagactcatccaacttcaatattttctttcatttactcaaatacgctttcattt

SEQ ID NO: 45075 - DNA, 907 bp, Zea Mays
catcaagccaatggagtccgagtgtagtgggatatccccacgatgcctactgtgttcgtgtatgtagagtgcaaggatgggtatggagatgagtgtggtgggacctgaattttggtggcgacaattgtaatacgacaaagttagtaactgaaagtaataatttgtaggtatagaagcacataaaggtaggacttgtgagaaaaatataatttgtaatctttggaaaagcacattagggagtatctaaaaacactaacagaaaccaattttgaatatagaaggtttaactgagtagcaaacaggtagtgagatggtgtagaggaggcttaagtgggtttacttctgattttgccggtcaaagtttaagagtctaaccaagagtgtactaatgtatagacattgcatctcggtaccgaaaatgaaatcattagtaaacacattgcaacataggaaaaagtatcactatactaatgaacaaatgagtatggaaacacagatcttaaccaaattgattaagtgtgtacccgggtgactaaaaaataaagtgtgcatgcatgaactatcaaccaggcgaaagaaaacccatgtcgtagcctgcaatgagcaccagaaatttgcatcctcaaaacatgaggggagtctaatcttaacctaattgattaagtgtataaccggggtgactaaaaaataaagtgtgcatgcatgaactgtcaaccaggcaaaagaaaaccaatactatagcctgcaatgagcaccagaattttcatcctcaaaccatgagaggagtttggatgcgcacatacaaattccatccatatgtacttgaaggtaatcaggtagtttatattattatataattgttatattgcttacattaaaaaaccgagaaaacccaaatgaatgttgg

SEQ ID NO: 45076 - DNA, 360 bp, Zea Mays
gaaatggttgcgttcgttttcagcgatggcctgggagaccgatccaccgtgccgacttcctcttcattgcgtcggggatgatggttcctccggcgcttgtcagggtgttcccgacgctcattttcactgcttggttcgccggcattgcatgggccttttcccttgcaaaagatggtccctacggcgtcctccccgtcagcgatcttggtcgctatgtcgagaagatcggcagtggtatttggtcaccctcactcaagcttgtagaagagcgcctcgttggtggtgtcgtaagtgaaggcacttgctacatgggtgtcggtagcgtcagggagttcatttcttttctaggagaacctccga

SEQ ID NO: 45077 - DNA, 311 bp, Zea Mays
ctcggggataagaagggaaggtttcattatgtaaccttgtttccttgttatggttcctcaaaggggcattaataggtgaccaacaattgactagtgggttaataacgttgaggctccaaagcaattagaccaccaaaggcaacccagagccaccgcacacccccaacagatccatccttggtgtgtcgagttttgacttttaatgaactcggtctatgtgtcatgtgtatcttactcctaacgaagcttcactggtgatgcatcttacatatacgaattgttagaggcatgaggtgaattgcaatagtttg

SEQ ID NO: 45078 - DNA, 514 bp, Zea Mays
gctgctgaagcacctgtaataattaatttcttagtttttaatgggaccccagttaaccaggcaccaaaaatatttctcacagatcttggtttagataacccaaagcaccactgtaccaacctccaaacaaactttgcgaaatggcaatcgataaataagtgttgtatactctcattggctgtacagaaaacacatttcttattaccatgccagtttcgctttgctaagttgtccttagttagtaccaccccttttataagataccacatgaagatcttaattttcaaaggaacctttaacttccacaaagctttattgtaaaaaacttgtggattgtttagaagggcaccatacatggattttacagagaacaagcccgaactagtcaagttccatttgagtacatctttctcattagttagctggatgttaactaagcgggaaaccaaagaatgccatgaaacaagattgtgtcctactaatgctcttcggaaagaaatgtttaatggtatag

SEQ ID NO: 45079 - DNA, 424 bp, Zea Mays
taataaggtagagcttaatcttactactggaaattctagtggcacacttagtcatttagggtcaagtttggttaagttaattggtcagattatttttgtgttccactgatttccttttaatgttttggtgaaagtttattaagagtcctagctgaattcattgggggtgagattcattattcttcccaatttatctcgtctttccttcttcttctttgcttttaaggtgggcttgaactacaacctacttttataaatttccaaaacttctgtaaaaattacagaagcttctcactggtgtgtaactctctgtctcaaaaattggatcttaaaaagttaagggttctctctgcaccaaattatcaagttgtagggcagagggatgctttgaactacaactctcctttcacagtgaatttttcct

SEQ ID NO: 45080 - DNA, 360 bp, Zea Mays
ctctatcaaggcccttcacaggaagaagatcgctagcctgtttctaaagctagatattacaaaagcttttgactcagtgtcctgggcctttctcttagaagtgttatctcatcttggcttcgggcccaggtggtgcggccttgtgtccaatatgttatccacttcttccacacaagtgttattgaacggaactccgggcgattatattcgacaccggagggggctgcgccaaggcgaccccttatctcctatgcttttcataatcgtgatggatgtgcttagtagcttattcaagcatgctgaggacagaggattgctgcatgacttggccatcagaaacgtgaaatctaggctctccat

SEQ ID NO: 45081 - DNA, 445 bp, Zea Mays
ggagcaggaagtatagcttggaactattaacccataggaatgttcgtcagatgcaacaaggctcacatcatcggtcttcagttcttgggcaagagatagtgtccaagacatgcatgtttcacttgtgatcaataaatgcaagatgacatagcactgctcagaaattgtactgaccatgtccagagtgtcatggactccagtagaaaaatttacaaactcgatcagcaccagcgactcagagctagtgttatggtactgccaaggtggcttccagacaacatttctctcaagctgaaatgtagataatgatgaatttgcatccgtcagcacacatgctactccactgtgatagcactgcaataacataggcatacttgaaataactgtcaccacagccacaacaattgcatctccaaccaaatacataggcacaaatggtggccag

SEQ ID NO: 45082 - DNA, 1193 bp, Zea Mays
gctgcttcatagtcgggcttgcgaccacaccattccactgatactcggagcctgacccatgtcaatttgaccataccattatcctcctacgctgaaaattgagatagagacccaagtgcaagccatgctatcaacaacatcattcaacacagtacaagcgagttcaactcacctgtcctaatggtcaagaaaaaagataactcatgacgattttgtgttgatttttgtcacctcaatgtcatgactatcaagcgccaatttccaattccaatcttctaagaattagcaggcgccaattggttcaccaaactagatttatggtccgggttccaccagattctgttacaactaggtgaagaacacaagacaacattttctattcatcaatgccactttgaattcagagttcttgcctctggaatcactagtgctctaacaacattctagggtgctattaacgccacactcaagcctcccctccgtcgatgagttctagtattcttcgacgatatccttgtctgtagtccagacttccactcccatttcgactacctgcatcaagtgctgactttactagcagccaaaaactagaagatcaaactcaacaaatgcttctttgcccaatagtagacaacttacctgggacatttaatcagctgcaaaggtattgctaccgatccatccaagatttctaccatcgtgtcgtggccaactcccagttcagtcaaggaactttgcagtttccttggtgtagcgggttattataggaagttcgttcgtaattttggggttaccagtcggcctctcactaacctgctcaagaaaagtacagtattcctctggactctagagcacacctcgactttcaacacgttgaagacaactctctactcagcacttgtgttggccctccttgacttctctcagcagttttgtatagaaactgatgcgagcgggtccaacttaggtgtagtcctcatgcaaaatgggaaccccgtcacctatgtcggcaaggctttgggtctcaatacctgaggattatccacttacggaaagaatacctcgccatccaccttgcagtacaacagtggtgccgattctagtagtttagcgaattcattttgaagaccgaccaacacaaccttgcacacctttctgacaaacatctgtacacattgtggcagcaatgagtg

SEQ ID NO: 45083 - DNA, 506 bp, Zea Mays
aaggattataaaaggctagtacatgcatttgataaatccactgttgcaaattttccttcgcacgaggttgaattgggggaaaatacacgtaattcatcggctataggttgtcacgaccagtcacaacccctttatgggatgccgatggacaagtaccctgagcaaccacaaatcggtagtaaattagccgatctgcacatgtccaaaccgttcgcacatgagcgcggaccgtccgggccagcaacgattggccctatttttaatgagttaccaagatatgcgtccaagctgtcacatgttacacaagccctaaaccacccagacagactatccgcatatgatcacggatggtccgcatatccgaccggacggtccacgtatctgacaagatggttctgcacagggatgtttgaggaggattgttatctaaatcctcatccgtctcaccaacacttcccgtcgcaatatacaatgcaccagcccattaatacaacatcccaaacccg

SEQ ID NO: 45084 - DNA, 1076 bp, Zea Mays
gccaccgatgattagaagtagggacattttgttcgaaccagcataaatcttgcgcccaccgcacacaccgtccggagctcagaacatgcacaataaatttacttgtcggagcgaggttcgaaacaccgacaattggtgactatagatgacaatatagtcgcataactagaacataggattgcatatcgtcaacatcatgtagcatagtatagttgtagagaagtagaggatgcttgccaattagctctatagagaggctaagactagatacgagcaaagacgctaggctgaggcatagcaacgtctgactgatcggatgctcactttgtttgacaccatctagggtcggtaggactagttccagtagaactttctaacacactgtgtgagtacctttccattcttcaagcacatcctttaatagaaagagattcaatgcatccaccaccatttagatggcacctcctaccaccctatagactctcgtgaccccaactatatagtttgatagatttcaattttatagtctgtatctgtttgtgtcatctatgtaccctactacacttgacttctattcaccagtccaggtatgaccactggttttgatggtatgtcacaagcgatgccaatttcagctctattgacatcgtccgtcactatcatgattgtcactacaccatctaccttgacagtcttattcggtttggtcactagagccactccttagacaattgccttgaatgtatcactagagccttcaattctagttgctcccttaactggtataatagggacactaccctcattagtggcatcatcaaatcctcccaagcctatcacaactcttccaactagtcagtctaagcctacaacaagagctccaccgttagtacttacttcctagacaaattgctcttccaactcagatgtggaggccctccttatgcaatttgatataacacttcacatctcagtgcctaacatgactgtgttggtccctcctcacaacccttaaggttttgtagattttagtgattgaggctaaagggcgagaggggctaggagtatgtgagtta

SEQ ID NO: 45085 - DNA, 758 bp, Zea Mays
ctaaaacttattaggtattttattttgattttctaaagtttctagccaaatgggtgctttctactaggatgaggacatcctccactattacccgttggcaaagacgcaattggcccagttggcccaattgtagtcggacggtgaccgtgtgagccttagaattatcccacctcgcttaacttgggaggaggaagccactttaaaagggagagccacccttcccccattggactagtcttttgggggcaattgggcctttccctgagttgggtgtgcttaatgaactgttgggctccgggcaaccctaatttgttgggcctcggccaaccccacctgggctgggtgtatcatctggtatcaaagctagggcccattttaagaaggtgggaatgatgaggacatcctccactattacccgttggcaaagacgcaataggcccagttggcccaattgtagtcggacggtgaccgtgtgagccttagaattatcccacctcgcttaacttgggaggaggaagccactttaaaagggagagccacccttcccccattggactagtcttttgggggcaattgggcctttccctgagttgggtgtgcttaatgaactgttgagctccgggcaaccctaatttgttgggcctcggccaaccccacctgggctgggtgtatcatactaccactatacttgaaaaatatcaaacaacagaattccaatttttcttatcttcttctttgcgcaagagaaatcattctaa

SEQ ID NO: 45086 - DNA, 1355 bp, Zea Mays
cttctctgctccactgaacgttacagagtttcacttctgaggtacgtgtcttctagactgctgaatcaaggatctttactggcttctcatggtactgaagatgtttctgaatctgcactgcctcttcttcgatgtgagtttctggtgcttgcaggcatttgcggagctgggatacgtgaaacacattgtggatgtcagacatggattctggtagttcaagatggtatgctgcgggtcccactatgccaatgatgggatagggacgacgaatcgcggtgctagctttccttttacttggaaccttctgacaccacgcatcggggagaccttgaggtagacgaagtctccttcctcaaatctgagttctctccgcctattgtccgcataactcttctaccgactctgagcttcaagtaatctcctgcggatcagggcaactttctcctcagcctctttgacaaaggcaggtccttccagtgccttttcccctacgttggaccacatgagaggggtctggcattttagtccatacaatgcttcgaacggtgacatcttgatgctggcctgatagctgttattatacgagaactccgcatagggcaaactagattcccaacttctatcgaatgctagcacataggctcttaatagatcttcgaggaccttgttgactctttctgtctgcccgtctgtctgagggtgataggcggtgctgaaatctagcttggtgcccatagctttctggaggcttgtccagaatttggaggtgaactgggttcctctgtctgacactatctttcttggaatgccatggagtctgactatctctttgagataaattcgggcaagggtggctcctccaaaggtagttttcactgggatgaaatgggctaccttggtgaggcgatctattatcacccagatagagtcattccctttttgcgtccggggtagtccggttacaaaatccatgcctatttcttcccatttccattccggccttcgttcgttggcaggtgtcacaccgggccacatactgtgctatctctttcttcatccctctccaccagtatctggttttgaggtctaggtacatcttggtagttcctgggtggatggagtaggctgagttgtgagcttcctcgagcaggacttctcgtgcctctccttttggtacacacagacggttcttgaaccaaagggctccttgttcatctgtcctgaggtccgggagttgttccttgcgagctttttccacaagtcttgttgtctctgagtctaggcgttgagctttgcgtatgaggtcttctagcattggtttgacgtcgagactgccgttgtttcccaaacatgca

SEQ ID NO: 45087 - DNA, 474 bp, Zea Mays
gtggtcagagggccggattcgccgttcgtcggcgagcaaacagccacgaagagagagaaagggggatggtagggcgcggggaggaagaagacgaccatggttcgttgggtgagagatagacggtggagattagacggtgtctgggccgttggattcacatggggtggcggtgatctggttggtgcgtatcatttctgggcgcccatccgagccgttgattgagtgacgggtggtagagattagatcccgggggtgtccgcaccgcatccgtagatctgggatcggccggtccacaatgcataccggttcgtagttatgccgatctaatcaggaacgttcatccgcgatccatcggccgaagctaaaccataccgtttcgacccccactttggagaagaacccctgggtttattgagattcaacccgcagtccatatagcagtaatatgagtctcgggaaatcttataagttagc

SEQ ID NO: 45088 - DNA, 509 bp, Zea Mays
tacctttgctttccttaaccaggacatatcgagtatcagatctatattgctttcttctaatactataggtgtagaccagaattcccttcccataattgttagtgttaatctgtgtgtcatataatttgcttcaataggccctttaggggtaattactatcagtggtttttgcatagtttgaagtggtagttcatttgtggtggcatagcaagcagaaataaatgaatgcgtagctctagaatcaaataatatggctgctggaattgaattaatgtaaaacataccgatagcaatgttagctccattagaaatagcttcggcactgacttggttgaccctggcaatgctgaatcctttgccagaggtgggactctgttgtttgttctaagctggtgtgttggaattccccatcagacaagcatttgcatattgcccaacctgactacacttgaagcatgtggggcctgttctttgttctgcgggcctcgccggggtgctagtgagggtag

SEQ ID NO: 45089 - DNA, 677 bp, Zea Mays
ttgagttatggcattagctgagcattggttgcgccctggcaacacgacgcaatatttgtgtcgtatgaacttggctgcgtcatgtgattgctatgtagcactctcgtttaatcggacaactcctgttgagttggaccgacgtcgccgagtcacgtatttttcgcatgccctgtaggcactgttcgtctgtcgttatcatcgagccacaattgcgtctgttgcgcacgttgtgtggacttgtcgcgtaccccaattactgagccacaactgcgcctgttgcgcttgtcatagaggcttgttgcgttgtcgtagcctagctggccacacacgcattgacgcaagatacgatagagcttgtattcgcgtggattgtggtgggtcgttcaagccctaaagtcagattatgtgcaaccttcataaataattttgtttagctctatattttatttgattgtgttgtgtggcatcatatatttatatatatcgccaagtggccataacaactatatcaagctctatagtgcttggaaatctgggaaattaaattgaattacaataaaacacacataagttaattccgtgctctctcctcatgcataaagttttacccaaagtaacctgaagaaattcaatattaatgcatgaaagcttttttggcacagaagacatcacaaatt

SEQ ID NO: 45090 - DNA, 499 bp, Zea Mays
ttttcctctgtatgcaaaacataactggtttggtgtttgtgtatacggttacctgaactctgtttccgtcccattgcatgatgtgcattggtacccagtagatgtttgggatgaagacttattgcacttgatacaggatgggaaccaccatctaccattttgtacgaggcgtgatatagtgacagtgcatctgaaaccttgttcctgcattttggaaaagaagtttgttgtcaataactatattgcactttatatactgatgtaatgtaataatagagaaatccgtggttattacggggaacatatctggatctagctgaagtagttcttcaatggtttttatcttcgatgttgagtgtttgagaagcctgtaattgttccgcagttgcttgggggcgtatcatttggagcttagtgtttagcaacctttaaatgatatggtaagaatgatgagatataatcaaacagttgtgtaattaggaaggaaagtaagcattta

SEQ ID NO: 45091 - DNA, 1020 bp, Zea Mays
gtccgaactcactgtcgacaacagcaaacagttcgacatccaagacttcagggaattatgtagttccatcggcaccaagtctgtcttcgcctctgtataccacccacaatccaacgacatcgttgaacacaccaatggcaagatcttcagttccatcaagaaaaggctccttgacgacaaaaagggcaaatgggccgaccaattacctgaagttgtatgggccctgaatacgacagagtgccgagcaaccgggttcacactcttgatgtatggatccgaagcaatgacgccgcaagaattaaagcacgggtccccctgaacaaacaagttagccatccccgaagtcgacgaaccaacctccaaagatctcatcaacggagaccacgttctcgccctgcaggccctcaacaagtaccaggtccagatcaaagcatggcgtgacaacacagtcgtcccaagagaattcagcgaaagggacctcgtacttgtaaggaccacccggacagagtcccggggcaagctcgagccgaagtgggaagggccatacatagtcaagacaaaggcgtccccagtgcttacaggctagcaacatcatccggcgaagacctagaacattcatggaacatcgatagtcttcgcaaattttttatttaagatccaagtcccaagcgcctttgtaattctccaaactatgttatttgggcccactctcttttcctcccggggtgaggtttttaacgaggcggcgccatgtaatataccaacgaaaagcccatgcaaaaaaactccatgcatcatcactagaagtgtcgaaaaagaccgctacgacagtctttgacattcgacatatacgaggtcaccgcgacaggcagcatagactaccctcacgtgcgacaaatccgtgcaaaagccacctaagggtgcagccggacaagcacaacaagtgcacaatacaaagtctttactaaaagacatccgttcaaaagccgcctaagggtgtagccggacaagcacaacaag

SEQ ID NO: 45092 - DNA, 302 bp, Zea Mays
cgcgaatttgcgctctcgtttccgcagtcagtggttgttgccggctcctgcggggctgattcgaacaagtttctccctttcgtgccgtgttcgcggcccttctctgctgttctcttcgcaagctcttcgaggcgccgtttgatctgcgggcaggccagttgttctcgcgtctcgcagcctgtgtctcacccgcccacctgtgctggttggttcttcgctggtctcggttcggttctccatagattgcaggttttcgttctgaattatccgctcggctttctgggatgattatttctctgcac

SEQ ID NO: 45093 - DNA, 435 bp, Zea Mays
caagtcccagccacctgattctgaatcgacgcactagatttaaaactgtgaagtgtccgttcaattcgatctcaaactctaccacgtttctcctcactcttagctaactccggcgaccagactgaggaatgcggcggctccattaccggcgcacccagtcttccctttcctgatcactattctccgaggaagtaagtgctactctctgtggggaaggccccaatgcagatgggatgagtactaaccaacaacgacgattaaggcgaggcggccacggcaaccagcggaagaactcgacggtgaacgctccggtgatgaattcgtcgcacgccaaccaccgattccgctcacggaggcttctattactcttgatgcacccagacgaagctcctcagccgcactatcacgagccgaagcgtgaatggtggaaacagc

SEQ ID NO: 45094 - DNA, 710 bp, Zea Mays
acgcaataggggctcgacgacggccacgaaacggctggcggaccacgacagagctccatgggtgtgcgtgcggtgcgagagagagcgagggggtttgatgataatggccgatccaaatgttgaacaccagggagatcaacaacgactaagcatcaacaattccttgccattgagtgaacaagacaggcggaatgttgatgtagcagactttagagacactgctacagttgacatgagattcatgaactgttctgaagtgtcttcgaactcggcttcaggcttaggtggcactggtgtaagcaaatcccacaattcttgcatggcatggagttgaatagtaagcgcacttgtgaccttggcccatttctcagcacaatactggcatactagtgtatgtcgcgcgccctgcgcgcaatttcaaaactcggttgtgtggtaacattgtatgaaagtgagattgttacaatataagtattagaagtttatgtagaagaaggaaatctgacgggttaggaaaagtggaatagattgtaccttctttttcttcattggtatcatcttttaatgagctcgtaatcatgtctttgtatgatgtagcacaatttagtacatagagataaattggaaagctataacagagactctttagttgttgtccttgtactcgatgttacaactaatctctctctatttgttatagacaaatccat

SEQ ID NO: 45095 - DNA, 999 bp, Zea Mays
ctcccaaaattgttgataaaattcaactggaaaaccatccagacctgtagccttattgtgattcattgaaaagatggcctcctttatttcattttttgaaaaatctgccgtgagtaagctattttcctgactagagacctgtgggatatcttgattaaaggattcatctaaagtgaaggagttttcctctggctcaccaaataaacctttgtaaaactcagtgataaaccttttaagattgtcgtgaccttctactttagaattgccattctcaagcgagaagattctcttttttctgtgtttcccattggcaatcatatggaagtattttgtgttgttatctcctaggagaacatcctttgtttttgcccgttgaaaatatttgatctcttcctctctgagaagtttggtcagctggtcacgcgagtgagtcaagcagacaagctcagactcattcagatctcttgtttcagcttcagtatccaacatgcagataatattttggaggtctgatttccttttcttataatctccatttgtttgagccgcccaacctcggaggaacctccgtaatgcgctcagcttattattccatctttggaccgagttccgacccttacatgtattagcccaatttccttgatatggtcctgaaaaccttccctttgtagccaattcagttcaaacttgaatttcttcttacttccaacgaaggcaggatagccagtgttaagaagcaagggggtatggtcggatacgcctctatctaaggcttggagtgttaccaaaggaaacttaaattcccattctgtagacatgagtgctctatcgagcttttcataagtaggtatggggagggaatttgcccaggtatattgtctacctgttaggtctatttatcttaaatccaaggtatctatcacaacattgaagagaaaaggccaacgaccattaaacctgtcattgtttttctccttactgcttctcattatattaaaa

SEQ ID NO: 45096 - DNA, 423 bp, Zea Mays
gaataaatgaattgagaagagacgtccgccatctgcgagatcagctcgcggaccgagatttggcactcgactgggttgttcaatctcgttcgcttgcatgggccaaggaggaaacagctcaagctcgagtagcagagctcaacttggccgttgataacctgcagacatattgcaatacctagcagtcataggatcagagtttcggacttaggattgatgggtggcgaggtccggccatggcctccaccgtgggcgcaccatctccgccgctctggtggtcgtgaggtggaaggccgcccagggttgttggatcctcgatgaagggtggaggtgtggcgatagttttggccgttggatcaggattgcgcgatcgcgattagctatagggcgacgtctcggccatagttcatccttgccgtggat

SEQ ID NO: 45097 - DNA, 345 bp, Zea Mays
ttcttttctttgtcttaacgaaggcccaagctttaggcttaggatgggctttgtcagtgtgacttgcatcgcaatggaagcaaagacagccatgattagagaacaagaacgggggagcgaggtgacgaggccagctggcaggcgtccgcgcccaccttgcagtgcatgcctgcatagagtctgcatcctgcacgcatgacgcatgtgacctgcgtcccatccacgcagtggagcgtcagcgcttttttctttatcctcaaaaagaacgttataccgtggtgtactcaaatttagagaacgtccgctatcgggccaacgagcccggacaacaccactagacatcgc

SEQ ID NO: 45098 - DNA, 272 bp, Zea Mays
attgtcccctcgctatattggaccattcttgatctttaggcgagttggggagatggcataccaacttgagttaccgaatagcctatcggatgtgcataacgtgttccacgtatctcaactaaagaagtgtctccgtgttcccgaggaacagttacccatggaagagctcagtgttcaaggtgatttgacttacacggagtacccgatcaagattttggatactttgactcgagttacaagaaataaggtgataaagatgtgcaaagttcaat

SEQ ID NO: 45099 - DNA, 488 bp, Zea Mays
ggctcacgaccatctgatcagaaacgcacgatgccgattagattggctgcataaacgaaccgctacttaatatcagccgcatgatcaatcacagacgcttcagattttataacgccgagatctatttccgcgcgtccgatcccgatcaaacggtccagatctaccctagtcgaattggtacgcttgccctaatgtcgcccatccaaagagcatctaacaatccgcggttgtcttcccaatctgaccacggatgtggcgtgcgcaactgcactccgcggcggtgtaggtcaccgacgcacaacgattagctgacacacggtcccatcccgcaatctactgacgctaaaccacctgcggatgatgacgaacatgcataggtaacacttaccgatgatagaggcgcgcagacgctggaccgtggcgaggtgcggacgcgcgagtattcccagctccgacgagcaattgggaagcccccagccaatactgag

SEQ ID NO: 45100 - DNA, 837 bp, Zea Mays
tctaacattcgcagaaaagcccctacatttctattcctttacacgccgagatccttgacagcgaacggcgtcgcgcagagctccggcgagcccgtataccggccgactcacgcagcgactgccgccatacttcgaccgagaccgaattcaaggtctaatgagcgtttccccccacttaatttcaacaatggctacctagtttgctctagccacggtgatcgtggacatcgcggatagctgaacgcgttcccggtgattaagggggttctagttcaattggacgggtcgatgagcatcaagggtacataagaacactcaaatgagggagcagaaggtatgagcagacctgaatcgagctagccacggtgaggctaaaccgagcgggattcttgagcgttttggggagaatccaaaattggagctcactggtgatcgattgagagcaatacttggtggctgggtgcgtaatgaccctatggagctcatggtggcctcaatttataataggcaagagcggtggctgggaattcgagcgatgacgcgcggtggttggagaaggagaggagcactggcgcagtggattggtgtcctattaccgtggcaatctctccggtgatcaacggagagttacaacgggtcacggtgatgcggtggagataccagggcacatggcgcaaggtcagcaggcgaccgtcgccggtgaacttatctgcgccgaccgcaagacaagggggtacgacaaacctcatccgtgtttgaatccgagttaatccagtgcccagatctttaccttatcatcgttatccctttgccagcgaacacggaccgcggcgacgg

SEQ ID NO: 45101 - DNA, 324 bp, Zea Mays
gtcgtctggcatccaaaaatcgggctgggggtgtgcgcatcagctcaggggtgttctccggtgagacattttgtgccgtggggtatggttcaactgcgatttctcgccggacatgggattccgccgcagaaccactccttaccgtggccggtgcgtctgggggcatggactgcgtcatgggtccccttgactcgatcgccttgtcactctcgtcgtgttgcaccatccacgtcgaggtttgggcggttgtgcggggatcctgtgggttgcggccatggcaccaccgcgatggcgacggcgtcaccgcctggtctcggcgtgggg

SEQ ID NO: 45102 - DNA, 435 bp, Zea Mays
gtgatgttaaaagtctaccgcttgtattgagccaaattgtactagtgcaagcactaatgcagccggcaagacatatacaatcaatcacattttgcaaggaaaatggtacttactctcaacttaaccagagcataacatgccatacaaaaattgatttgcaacatacaccattagaacaaacaaaaaaatgaaaatgttggcttaccttgagatccaactgtttgtttagttaacgtggatgcctctccggcgagcaaagcggttgtggttttaagaagaaagataacaaggccatggggtcaattagagggccaactaaataaatattgtattgcaactactttcaagctgctctgcaaactaatgtacacaacagtaaacgacacaacttccgacggccaaagtcgtcagacataaggggtaaaccgtcagaca

SEQ ID NO: 45103 - DNA, 453 bp, Zea Mays
caagactgccattataagctccagcctggatgacaaagaggaaggcgtgctcctccagtttctgcaagataaccgagacgtattcgcatggcagcctgtggatatgccgggagccccgagagaaatggccgagcacaaactgaaggtctatccccaggcgaggccgatccgacaaaagttgcatcgtttcacacccgacaagagagaagctattcgtgccgaactagctcgattagtcgcggcaggattcattagagaagtactgcatcctgagtggtttgcaaatcctgttcttgtactcaaaaagaataaagtggattggcgcatgtgcgtcgactatacagatctcaacaaacactgtccaaaggatcccttcggacttcctagaatagatcaggtggtagattcgatcgtcggatgctctatgttgtcattcctagactgctactctgg

SEQ ID NO: 45104 - DNA, 2732 bp, Zea Mays
aaatttaaagcctgaaagttccaagcttcattgtgccttataacagtgatgaaagtaaagcctagagcctgctgcgggtctagattaaccaagttatctctttcaatcacaaaactgaagtgggttattgcttgacctagatgagagcattgaatcttctgaatgtgcacatgacactgacccacattatattctataatgaagtcggttgtgtcttcaaagtttagatctcgctcgagcaaatgatgaatcgagacaatcctctagtcctcatgaatgggaggttgagaacgtgcgactgcatgtaccatgatttcacgatgctgaacttgctcccggacgaagccatgtggaatgattggtgcaggatcaacccgatgatatgccattgttgtttggggaactggggttgaaagcaatgatcgtgaagcactcgacgatgggtgctagtattgagattgctcaacgacgcttctcgccaagggggttttgttgaacattggagtttgctttgtgactattgaagacgaaggggccttcctagagttgatcgcccagagtaattcttaaaggtagagaatgccagtggcccaccagctagagaggcgtgcaaaactataaatttggagatgaaacccatttgacattcttgaatttatttgtaaatgaatcaagtgttgaattttaaacatggaaaccaatctttaaatgatgccatttgcaggtcgattgatagtggccatattgtttacataataagcatcgaatcagttgattgcacgaagaaatatcatgcctcacatccacgtgtgtaggccacacactaacttgggctcaaaggcctcttgggcctccaaataaaacgagaattctgagccaatttcagagaaagcccatgatacctacccattaattggggtgaaagagatccaccagaaggatgggagtttgaaatttgaaaattacaattttggcttgattataggaagttgactccttgattaacgccacattgttctttgcccgagttgaaggatgaacaacttcacgatgattactaagaaacctgagataaatcttggactttctaggtgccaaagaagattacatgcctaattgcttggatgaacgagagacaaaattttctctcatatcattaatagggatagaattggccctagttaaaactttttatctaacaacatcagcatatggaagttttctcggattcttgctcaccaacattccaagaagaatcttcttcggagcaataggcatcaaattcatgagcccaattaggtccaccagaattccagagatgaaaataagctttgaagttatcacaggcaaatgatttcaaattatagtctgagaaacccatttgcttagagaacatagagaaacggaagaccctatcagataattgtaaaaccttgaaggcattcacataaccaccaataaccgattagagaatataacccacattttgaatagaaagccgaagtttgcatcttccaatcgataaatcaagatagaactctgacagatttttacccgagagacagttgattggaagtcccaaatcgaaccagatggaagcttagaggtgaagacttgattgagaatccggttttccaatggcctcatcaactgccgccatcttccttccacactcgtcgtcctcagttttatggatttggaattgctgtgtagccaaacaattcaatatggcctatgataaacctcaccactagtgaaattgttccactccatagtaactccattcacttttttagtgccaaataggctcaaaatcgcctagatgaggttagacttatatgccataaaacgaaatgtaaggaatcgctcaaaataggctcaaagtaacctcatcatgaaaactagtttgatcatcttggctcaaatcatcacatgaggttgctacatcaatcttaataatagggttaatagcctcatgtgtattgcaagataaaagttcattttcaacaagaagattatcatgatcaaatttaatcttagtatagtcttccttaatttttactagtctatgtttcaactccctatttgcttcatttaacttgtcatacttatccttagcatcttttaggaaggatgtaagctcatttacagtggatgataaagttttgttttcttctttcatttcatcactagctttcataactatgtcatatttggcatttaaaaattcattttcatctttcaacttatcacatttagcttttgacttcctaatgatttgagtgtattccttgagcaagtcagctagttcatcataggaaggtgaagcaaattcatcatcactatcactatcactatcactatcatcaataatatcattatcattttgtaccttccgttcacctctagccatgaggcataggtgagaagtcgatgagggtgttggtggtggtgaagagaagtccccagcgatggcggcaactttttcatcatttttcttcttcacttgaagaagacccacttgatgactcaatgtcagtgagccagtcaccaacaatgtatgccttcccatttttctttttgtggaacctcttgtgcttcccatccttcctcttgaagaatctcttttcctttttctcatcatcactgccatattctttcttgtccttgaacttgttcttcttgggcttgttgcattgatgagcaagatgaacaagctctccacagttgta

SEQ ID NO: 45105 - DNA, 414 bp, Zea Mays
cgacggtgagatcttttctgctggcgatctgatcctcaacggtcactgtaccatgggctgcagcattcagtcaacctgacagccatagtttaggcttgatttgctcacaaattttcatagcaacatacccaatgatctgcagcaaagttgttgtctattataccatcttcatctttggtacagcagccatgggcaaattcttactagattagtcataaactgtttctaaagatgatccaatgtcactgtcagtctgaaaattcagaccataacagcctgacagtccaactttgattgggtttttctccaaatttctcagaagatcatggcttgaatccttaaacaaagttgttctcctataattgggctacaaacttgttgtggtcactttgggcaaaaaccctagaatttgaa

SEQ ID NO: 45106 - DNA, 792 bp, Zea Mays
aatgggcaagcattactgacccaatatggacctagaacaagctttaattgggttattatgaccccggctaagcctgaccatggtgacggcggatacaagatacaatttcaagcgttccggttgattgagtgtggttaagcgtaaagggttgaaccgataagtatcatgagtatgcactggtgctaaaacacgattaaaaagagcaggagtggacctaggatcggctggccacggagcacgatggattctgctcaccggtgtctgagaagggggaaatttggtgccgcgacgggatctagtgaaattaggaggtgagattggggctacatggtcgcaaagtgctactgattcaccgggtacacttaatttggggagaggaggaggcagtgcgaattttggcttcaatcgtgctcactgatgaagttgtgagtgcctcgccgtggttcatggtgctatttataagcacggtgatccggctaacgatccatagccgcggattgcattgttcacgcatggttaccacgtaaagaagaggcacagtaagggggaagcgaggcatgagcgacaccgcggcggaagtgatcgagccacggcgatcactggtggaatatctccggacacgcatggctaggttcgcgggatggtgccacgtttgaagttatctccccgtgatcgattcccttcaccagatcactcgaacacatccagttctacagtgcctcaaatctttatctgcgttcttcagatatttacagtgttttgatcttcagtgttttactgaaccgaccacct

SEQ ID NO: 45107 - DNA, 878 bp, Zea Mays
actgaagtattccacagcgacgaaggtgaattttaggttgtcttgagcagtgggcagtggtccgacaatgtctaatccccaatgttgaagtggctaggtatgtgcaataaacttttggagatgcgaaggggcgcctgatcgaggtgagaatttctggcatgcttcgcacgaccaggttacacggttggccgtgcacacaattgccagccactagaaaccctggcgtatgactttaggagcaagggccctcagtcctaaatgtgatccacatatacccctgtggacttcacggagaagctctattccttcggcttcaggtatgcatttcaacataggttggcttattcctttcttgtagagattgtcgttgactatagcaaagtctttgcttctgtgttttaaccttttggcttcgctgtgattagatgggtgctagtggccctgaaggtatagggtgattggagcccgctagtcttcggccattatcaggttgactatcctatgcccgttagtgtcttgcgttatttggagaccctcggggtttcttatggctggtgtgccaactatgtgatagaatacatcggaaggcatgggttcaccctttgctgctcctttagctaatgtgtctgcttctttgttcttgttgcgctcgatatgttgtaatgtgaagcctttgaattgtttttcgaggcttcaaatggcggcaagatactgcattaatatgggccctttggcggagtaatctttttcaatctggccgacgacgaccttggaatcagttttgataatgcaggtggtcgcggcaagggctcgtagtttgcgaagtcctaggatgactgcttcgtactcggcgatgttgtttgtgcacttatctgact

SEQ ID NO: 45108 - DNA, 922 bp, Zea Mays
cttaagtcgttgccgacttaagccgattgctccgttagcagggcatagtggtcaccccgagttaagtaagaataccggtcaatcatgaacaaactgagtattcttgaagcccttttttattgatgacatatttcccctttttacagagtacattatcgtcctgatagcttttgaaatacagctaggggtaaaacttcctgaggtgttctatattccaggagttcccaatttctgtgtcgtccgtttgagtgagacgatatgatcccggtcgagtgacttctgctactatgaatggtccttcccatgagggcgacaacttgtgtcgtccctcccccgttagaattcggcgaaggacgagatctcccactgaaaaggatcgttatcgcacggccttgtcgtgatagcgtcttagagtctgctggtatcgtgctgattgaattactgcattcagccgttcttcctcgagtacatcaatgtcctccagcctagtagcttcggcttctgctatgctttcgaagatcaacctcggcgccccaaacttgagatcagcgggtaataccgcctctgacccgtagaccatgaagaaaggagtgtttccatgcagagctcggctagcttgggttcttaggctccaaacgacgtagggcaattcccttatccactttcctgcgaacttttcattcttatcgaagacctttttcctgagtgcctccaatatcatcccgttagctcgttcaacctgcctgttggctcttgggtgtgctactgaggcatatttgatctgaatgcttttttgctcgcagaaatcgaagaactctgaacttgtgaagttggatcctaggtcagttatgatattgttcggtatcccaaacctgaatattatgtcttgtatgaattccacggccttagctgaggttaaaga

SEQ ID NO: 45109 - DNA, 435 bp, Zea Mays
tgaaaaggaacccaaacccaataactgggtgggcaaaagtgtatctgttagaatggaacatagcactaccagaaaccacagagttcttcaacacaacaagcaaacaaagacgccagggccgaaacagccaaaaagcctggcgaaattgagacctgcaaaataaccccacccgaagcagcatcaacagatcagttgtcatcatctgaagagtcttgtttcttatcccccttgtcttttttccctgacttattagggccaacacagccaggggggttcttctttttcttcagagctttgtcagccagctccacttctgacagattgcaaaagctctcccctaagcgtctgatagtcttagcagatagggaggggggaccctcaaacttgtgttgacacatcaaacagttcttcttctggcaggaaccctgtctgaac

SEQ ID NO: 45110 - DNA, 728 bp, Zea Mays
gaaaatatataaataaagatattatttcatactaacattttgatctaagtatttagtataaagtacaaaaattcacaacaaaggttgggattcaaattttatattcaaaattaaaaggaaaaagaaaagaaaagaaaaaaaggaaaagaaattctctcgcgctggaccttaaccccgtgtgcggcccacttcttgtgctcgttcgcggcccacccggcctagccggaccgccgctcacaacgattccaacacctaggccccacgagtcatctgcaccgtgcgtatcccgcgtatgacttcgccaacgccgctgaccgattgggcccatttgtcaactgactgccgcacacctcggctgagtaactccgcgccatctctgctggtcactgcgggtgggacaactgggtcagtgtcgcggttgtcttcctccctcacggtcaatttgcagcgaactcctaacagctccactgagatcctcgtgtggatggagtagaggaaactgcctccgaggcaacgtttggtgctatttgagccgcacctccctgcccctttcgcttacccgcaaactcccaaccatactagccatactcgcgtccaggggatcgggcacaccattgttgtaaagtaggggtgaggggcgtgtccgtggaagcgcacatccgtcgatatagtggtccagcgaggtgtcagacgggcgcgggggaccaagtcgtagatctttgccaccc

SEQ ID NO: 45111 - DNA, 754 bp, Zea Mays
cactattttgacaaagtctagggtgctctgcacaagatttccgggccaaactgtaatagttttcaacaagcgagggatggcgggttattttcaagcttcctcgaggactctttagcaaaaagacccggccgaaggggtatccaacgatcctggccgttggatcagagatccatgacccagatcaaaagttatcgtggctgattcttaatggtctagatctagatcgagggtctggattcaatctcgaaggggtatgcccacagtccaatcccagccgtacactctacatcctatggctcgcgcgaatttcccccaaccctctcttcttccccaatcagcagggcagcgacgaagcagagctccaccctgggagctcgctggatttcctccgcccaacgcactggcgtcaaaatccaaacacgaacgatgctaaacattgggggaagaaaggcgaagtgatggatagtatccttaccggcgaacacgacgcagagggcactatccttggatttcagcgaacccaggcataggctgttccacggcaagaaattccccgccaccaggttggccatcgactctggcgccgcatcgaacacatcccacgataaccgacgaagcccccagacccactgtcgagccactagcgacggcgtacccgtggttcgttcgcggcggaccttcttctccacatcaggtaagccgagcggtggccaaaatctctcactgctcggcgatacctcactctctatcgttg

SEQ ID NO: 45112 - DNA, 494 bp, Zea Mays
ctccccccagaagcgtcagaagacagctggtgggactaaggaggccgaacctcaggtccagggcgggcagaggggcatgagccctccgccgccaccaccttcggatctgacaccaccgccaccgccaccagcgtcacaccgaccatcgtcaccgcgggggcagccgcagcaacaacagcaggagcggcagcagcagcaacaacgatagcgggcgccccgcttccagggtcactggaaggttcagggccccaagtaagtttaggctcttccaatgttcttgcgagtgtagcttttatgccgacaggtcttgacccgtcctttgcccgtcagggcctcctcctcttctgcttccaaggacgctcctcccccgccggtcactatgcccgccagtgggtctggttctcagcagcacacatctgctgggaatgtcgctcgtaatccatcagcggctatcgcagcctcatcagcgtcggcacccagcgcaccaccggcag

SEQ ID NO: 45113 - DNA, 663 bp, Zea Mays
gtcaagcatggtagaaattgtcttggcttaaatagagaggtggtgacatgccaaagtagtcatcacttcccctatgttataagtcgagtcaatgtgctttatgcattcgttaaattaggcttctcatatagcgtatggttgtgctcacgatttcgagtagacgcttcaagtaatcaagtaggctcgtaatacaagttgggtaatgaagttagtttgctttagaataattattaaaatgccctgttcatatggtaaacatgtatgtgttcacgatttaagaagtaaatgcatggtgattgtgagttagagattggtggtttacggttcgtatgatttagtcgatgtgcggatatacgtgtgaatatgtatgtttacaaaaatgttgtagtgagtgtatgtctcggatttcgataataataggcaagccgacgtgtgtgttgtatagcgggctatgtcgttgctctagttaatcgacttgttagatggatgtggctaagctcgtaatcacggtgatctgctcgttgtggtctaaatgcgcatggttatggtcgcgagtaaaaattagtagtgttcatgtgatgtctaagttaaaatgcaaattattgggtgaaaacgcttcgatattgattatcgtggacaatgcgttgttaattgagtatggta

SEQ ID NO: 45114 - DNA, 670 bp, Zea Mays
ctcaattttgacccaagtatcctatagtaagtttgaagatggttgttaggtgaacaaactttattaatgaagtttgctctatccttaacaagaatcaagagatcgagaggctggaaggtggtcagttcaggaaaaagctgaagatcaaactttgcaaatatctgaagaacactggtaaaagatctacggcactgttgaatcagatgagctcgagcgatccagtggggggaatcgatccgggggaggatagcttcgaacgtggcaccatctcgtgagttcagccgggcgtggccagagttattcaccggtggccgtcgtggctcggtcaattccaccacagtgtcatccatgccttgctcctcccttactgtacctcttctatacatggtttccatgcgtgagcaaagccttctgcggtcactgatcgttagccggaccgtcgtagctataaatagcgccatggaccacggcgaggtattcacatctccaccagtgatctcagttgaagtccaaattcacggaatcctctccacctctcccaaaattggtagtgcacggtaaaactatagttccttacggccgtgtagccccaatctcacctcccaattccacccagaaccgtcgcagcgccattttcccccttttctgtcaccagcgagcacaacttctc

SEQ ID NO: 45115 - DNA, 470 bp, Zea Mays
atttctagttatggcatttgggttgtgtaatgccccttctacctttcaggccttaatgaatgacgtgatatctaagttccttcataaattcgtgttggttttctttgatgatattcttgtatacagtccctcctaggaggaccatctgcaacatctttcttcagttttggatcaactccgtcatcatcaattatatctgaaatagtccaagtgtgtttttgctcaatcaacagtgggttatctaggacatgtcatttccgcaaaaggggtggaagttgatccaaacaagattcaggatgtggatcgatggcctactcccatgtcaatggcagatatgcagagtttcttaggtttaacgtggtattatcggtgcttcattcatcattatgcatcgatcgcagaacctctcactactcttcttcgctgtcaacaattccactggtctgatgaagcggcaatagccttccaac

SEQ ID NO: 45116 - DNA, 525 bp, Zea Mays
cattcacaggataattcatatcctctaggtgtccaccaacactaggttggttaccaacgaataattggtctgcatttactatctcaagaggtctagccttttagctgcttgcaagcattttaatcctaatttgtgaccatacttctccccctcttatttacaacatcattgtaatagggagtttagtggtgttccatttaaccactctttctggcacttccacataggattaatttgagtgacacctcatagtaaatgcacatggcagttaatttgcaacttcttgcaaatcattcaaacccaaaggttcagttttagtacgtgaacttgagcttgaatgcttactgcattcattataatttcttggcattctttttggtactcaaaatctccccctaatgcctggaaaagttcatgattcaagcaagcgtacgggtcgtaaatagattctcatgaagagatcctaaaacttaatgatcgacagggaatgaattctcacatagatccccagctttctgtgtgccc

SEQ ID NO: 45117 - DNA, 629 bp, Zea Mays
cacaccttccccctcttcagattgtgcatgtccccatgcattaagctcaggaaacattttggccaccacattccagtcctcccaggaagtagcttcatctttcttggtagtccactgaatcataacctgaacaatggcctgattccctttcttcacaagacgtctgtctagaatcttaacgggcttcaactctccttgctccaaattcaatgtagtaggcaattcagagaagactggttggtaattaggcgtaaacagttttaactgtgatacatgaaaaactggatgaatcgcaaccccttcaggcaattccaattcataagccacggacccaataaccttcacgatcttgaagggaccaaaatacagaaaatacaatttaggacatgatcgaaacacaactgaatgctgcacatatggttgtaacttgagcaacaccaactctcccacttgaaactttcgatcagtcctcaatttatcagcttgttgtttcatcctgttctgggctttagccagttgtactttcagcatctccatatgacgtagtcgagtctccagaaattcagacacctgagtcccactggaagtgtctaaagctggggcagcatccactagaggctcataaccat

SEQ ID NO: 45118 - DNA, 479 bp, Zea Mays
ctttccttcagcgcaagttttcctgcgtgacattatcgctccctagcactatcagcctactgtgcggcactaccgctccctctgatttgttattttgcctttgattttctccagatagtcgagcaagttcttctctagcattttggtgtagtcaattgacactagattgatctgcacaatgcttttatgctttttgtgtcctatggggtttgtgtttgaatttgggattaagtcacggtgttatcaagcaaagaatttttagtggctcccattcaccccctctaatcgtctcaccggtccttcatatagagatagtgcaggtccatgggttatagaaggaaggctaaccaaaggtgcaccctacacctgtacgcattttagagagaacctaagctgcctctgtcgcctttcccttgccttgttttttattgctggtgatcagaagtcagaatagagggatgaggagggtcatgaaaggg

SEQ ID NO: 45119 - DNA, 367 bp, Zea Mays
cagccgttggatcgttgtgtggcggttcagatttaatcgcgtgctccccttcgcgcgatccgttcctgaccgtcgatctcgagttagtcggccgggatttaatgatgtgtggagcgagcgattgccgtagattctagatccggtggctccagttgaataccgtttcgtctcacgccggtttgatcctggccctagaattctaatcggacggcccacgtttggccataccccttcgcgggttcattttgcttaagagcccctcgggtttcagtgaatgaacccgccgtccactggcactgtgctctgggtctctggaattttatccccgaggcccctgtgcttctcagatattgaggcctagtccgga

SEQ ID NO: 45120 - DNA, 328 bp, Zea Mays
gcacaacatagttttagcgagtatggcacgacccgttgtctaccaggcacaacaaaggtttagggaaatgtaccattgggccatttctattttgtttttgtgattaaatgctcaacacattgtttttggactaacatcatcctgtatgagcatgagtacatgtagttaaagcaaattgagaaaaaaggcacttttaggcttgaaaatgggcatactacaaatctatgtggttcaaagtgaaaaaggtatgttcctagcacttggtcaattgttttaggtacaaaccatatttgtctaattgttaggtgctatgagaaatcgagtcaaa

SEQ ID NO: 45121 - DNA, 426 bp, Zea Mays
atacttttagctatctcccgacacacggatatttctttgttgttcgggagacagtataggtaatcatcttcgtcggtaccattgaacactaaagcccccttcggatattttaatttctgggcgtagtgtttagcttctaagatttcttctttagataattttttccctggagcatgtcgaataatgtaatcaacatcttcggctagagcatcgggggcaggagattttgttttttctgtcataccttgccctgctgccatgccggtatctaaagtttattgatcagttttatcttcaggcgcgacagccttcgtctcaatggacaccgaaggcccagcttcggcttcagcctggtctatgacagcttcggcaacttttttggtaggagcagggctcaaggcctttgttgtttccacaacggcgtct

SEQ ID NO: 45122 - DNA, 354 bp, Zea Mays
catcgatgatattttagtatactcaagaaatgaagaagagcacgctggtcatttgcatgtagtgctccaatgtctgagagaacaccgcctatatgccaaattgtcaaagtgtgatttctggctaaaggggattaaattcttagggcacactatctctcaaaagggaatagcagtggatccggataaggtgcaagaagtaatgaactggaagccacccaccactgttcgccagattcagagttttctaggattggtcgggtattatcgacgattcattccatatttctctcgaattgcgaaacccatgacagaattgttgaagaaggagaaaaatttgaatggggtcagaaatgc

SEQ ID NO: 45123 - DNA, 474 bp, Zea Mays
aggttgaagaccataaacccctgtgaggtcccacaccacgtcgctcagacgggagcagattctgacagataacgagtatactgatggatagggaatagcaattatgtcaaaaagatccgcatcacatgcaattagaatcccacctggcgctccaagagatggtaaatgaatcgtttgagcagctaacttgtaacccagtgtttcctttagaaggttattattccaactcattatctttgtctcttgaagacagacaatagttgccccagaagagagaatcgtatgtttcacacttgcccttttagctgggtcatttagccccctcacattccatgacagaatacaacagttggcattcattaatcaaaagtagttcccctacataaccaagtagagccacacaagaggaacactgatgaagaaacaggacctgaccagacaaccagcgtcagcagcacgctaccagctgggaac

SEQ ID NO: 45124 - DNA, 612 bp, Zea Mays
cccaatcactcggggaatgagagagctcaggtgcacaacaagacaagaggtagggactatagcgtcttattattcgtgtcccatccatgtacaaaagcgggggtatttataggtaaccgggcgggtaggtgggtcccaagtacagttatacccgtggttacctgctacattcccggaatattcccctcaacagggtcattacagtgtagtaaggtacagtaacctagacatactctaggatgtaccccacgaaggggcttacaggtgggcccagattgcgacagggtggggcctgggcaccacggtaatctggcgtggcctttgcttgcgagttggacccttgactttgtcggggcttagacttcgctagcgagggagaagttgagcctttgggacatgtggggggagaggcagcgaccccctcttcttgtgtggccctttgctccgcttactccgaaggtcgtagtcgaggacctcgacgctggtgtaggttgaagtcccccttcgctgttgaccctatgctaaaacatggttagttgtggccggataagtttgatcgaggtcgtgttcgaccttcactccaacaattctttttgcaggatacatccaaaa

SEQ ID NO: 45125 - DNA, 697 bp, Zea Mays
gctagaggcatctcatttactccttccttattcaatcatgtctcgaccctttggtcggtctgtccaaccaaagaggggccccgtggccaccctgacagctgagttttagtaggagaatgtgaggttcggccttagacatggatgtgagcaaatgacctatgggtcggtcatgtagcgtgcgcctcattaggagcttgcttggtccagccctcgctttgcgtgataattttaggtgagttcaagtttttacttggttggtatggtgtagttactgctgtagcatggtgaagggggtgatcatcatgacaccgctcgacgcaggcggcttgagaggacacgaaatggcctgcctgcccccatcacgctggggtggcatggtggcttggttaaccacctgacctgttgctggggtatcttctgtagcgtgccctattggcgctctgtcctaggcggtgagtctagcgaggtctaatctttttatagggttacctcttcagccttatatggtcgactaaagagataacactgtataaatcagaatccaatacatatatactcacttctgctatagatctgtcacgtccttcggagttcagccagcttcttgtgagcatgtgcagggctacatgcccgggacatgccttccgggatccccttgactcgacacgtgaccgcttaagtcggcttaggttacatc

SEQ ID NO: 45126 - DNA, 460 bp, Zea Mays
gcaaaactcataatgaaacctcacctctctcttaggtggaatttatttgtgggagtggatctttttgggtggttgaggagctcttggagggggaactctagagatgttgagaagggtgtcaagtgtgtttctaagggggagctctcacaggctccaaaggcactccatctctcacaattgcggtgtcatatttgggtggagtgagcttgacaagtttggggtggcaaaaggtttttctgaaggtttcaggccattgcacttaccaaccataccaaaacaagtgacactcgcatccttagaagcaaaagcctaaccctagtctgccagttcccctcttgaacttactgaccatcatgcacaattagggctcactgcatgagacccaactcaagactgatcgaaggtaatgtgttttcctcctcgatcctagtcttgttttatctgcaggactcaaaagcag

SEQ ID NO: 45127 - DNA, 984 bp, Zea Mays
atagacacgataggttatcttactcggtgataacttggacatcgacacattaaatgcgaagatatgcgcatgccaccaccctaacacgagcgacggggcacagagctgccacatatgcatgtattgactataatataacatgacatgacatgtagataggaactcacaccggttggaagattgagagaatccacctcgttaggataggatggtatggagaatagcacccatggtaagaggtcaaggagcattaatacatgagaatagaacaatgtgattgcatgaaaggacgtcctcataagatacaccatgtagatcctctgatatgacatgggtagttggtcctatgataggccagagccataaaaagagtatacacgcaacactaccgcaccctatgaactataaaagggatggtagaacaacattcaattttaggttcacacaactaataattagacaagagactcaaaagcaactcatccaaactggtaataagaggaaataattagcttgtcttagctttacactcctcgcggtagattttcttcctccttgcttaaagcccataaccttatacaccccttccttatagagatccaccataaaaaaagaggacgtaggttactacacactccatggtctaaacctttagaaaaatctttatgtcattatgctcgtgacatcacaacctattatacatactcaatggcatcaagactcgctttctgctcccctgagcaatccttcctatggttctttgagcctagtgtattcactatgacaatttgttagatctcgagtaagagcacttcacgtgggaaagtgtgacttatgagtcatcactagcaagagaattgatgataagtttgggtctgcctcaaccgagagtaggcgactagcagatcaccaaacatcgggagaaaaattatcgtatcaacatttgtcttctcatttatttgaaacttagtaacactagtttgt

SEQ ID NO: 45128 - DNA, 465 bp, Zea Mays
ggtgaccaagggcaaaatccttatggtttggaagttacaaggccccaaagttgagccaattctctaaaattcagacttagccattagagtataagtgtggctcttttgcaaataagtccaaaactcaaggtttaacttgcaaatccacatatttgtgaaccatatgacttaaggtgccttactttcatggtttttgcactttagtccaaaggtgcactagttttgcacttagcccctacggtttaaggctagggcttctagggttctttttagggtttttggcacttctagggtttggatgttacttaggtccattcctagtgacattttatgactatttcaattgagttttaaagttttcccttcttaagccttgtctactctattatgcccaatctagggttaaatactgtaccctagggtttcactagtaacatgtcacttcaatacaacttgtttgaaatt

SEQ ID NO: 45129 - DNA, 367 bp, Zea Mays
cgttcctcgatgcatttctttcttgtgctgcaagtaaggtgtttgacgaaatgccttggcatagctattacggcatatgctgtgctgtttaggaggcctaattttagacacagtgcagagttcaccaatgaagttttcattcttgctcactggtttctagcagccccatctatctgcactgcattccagttgtaaatgttgttttgtgcttgtcatattgtaattctatttgtttcttaacataagggttaccatggcactcagattaattgtcgctggctgagttctttttagtaactttccaaattattagctggttaggttccacacatgctgcaaaatgttggctctaactgagaaatgaaat

SEQ ID NO: 45130 - DNA, 513 bp, Zea Mays
cgagtaggggtgttctggtcatttctctggttattgatttatggggtgtctgctggttgcgccttgggcagttgttggcatagtggcctagctcaccgcacttgaagcagccattgggttggacaggtgcgttgtttctggcctgcgtgttactggcgccaccttgatgattctgggaattcccaccagacctctggttggtctgagagttgctcctttgttggttctgattctgattatttctctggctttgctgtccagagcgttgcacttgataattatttccgccttgatttccagagcggaactgcgaaccttgagcgttgttagggcgagtgttcctacttgactgaccttgaaacttccttttatggtcagatagctcctttcttttactctcaaggccaatttccttgttcaacagtgtctggaagttgggaaaagtgtgactctgaagttgatagttcagaggtccaattagtccttccaggaaacgctcttggcgcttctcat

SEQ ID NO: 45131 - DNA, 365 bp, Zea Mays
ttttttatatatattcccttatatgtttgctcatttatttttttagagtccgcttcccttcattcctggcctcctcagtcatctagtttcaccagtgttttggttggagggaataaagatgccatgttgtcagttgatgctcgatgcaattatgtctatgaatcatactgccaccagcacaccatcatggttgcgtcgtttgcatgcgaaaaaaggaatatctgtgccatccaacctacaaattgatgacttcatcaatggagatggatcccaaccttcactatgcttgcctgtaccaacttcttcctaccaccaccataaaaatcttcttgacatttccaaaaaccaacatcaaaaggctactg

SEQ ID NO: 45132 - DNA, 549 bp, Zea Mays
ccaccacgaccctatgtgcctggaaatagtggcacaacttcctgtacacaacaagcacagcatagagaagtttgtgtgtctcaaggtaccttgtcttcgcctcgtggaggacctcgctgacgtagtagaccggcctctgaacagtccagaccccggcagccggtcccgagtcctcaggttcctggccttcttgtgctgtcctttcgacgaccagcaccatgctcaccgcttccgcaaccgccgtgatgtataaatacaacgactccctaggctctggggctaccattattggtagggacaccaggtgctgcttcaactcttggaaggcttgtttgcctcttcggtccaagagaatgggctagacttccactacagcttgaagaagggtagtgccctcccagccagccttgaaatgaagcggctaagggcggctaatgaccccgtaagcttctggacatccttgatacgggtcggaggcctcattgcctcaatcgccttgattttctccgggtttgcttcaatgccccggtacgaaaccaggaaccccaa

SEQ ID NO: 45133 - DNA, 491 bp, Zea Mays
gtacaagcgagacatcgcgacggcaataggtgtcgggcacaggagagcggcggtaggtagcggctccaaacagggcacagtgactcgttgaggcgtgtcatgactacgatggcacgagtttttgaggtgtcggctagaaacagaatcgacgacgagcagctggggcagcaggctatggctagcagctgcttagcggcgcgttgcagtggctgtgggtgagagagcgcacgaatctagcaagtaagggaaaaggggaagggctcacgggcacagaggaagaagagaacgagtgcaacaccatttataggctaggcatgggagctaggacgacgccgaggatagtcaaggaggtggcacgaacggcagacattaatggctagagaagaaacaataggaaacggctgctgcgatgggaggagaagcgacgtgatgatgctctacttgaatgacgcaatatggagaggcgagggggttgcaggcgtgaagcggtg

SEQ ID NO: 45134 - DNA, 631 bp, Zea Mays
cgtcggctgcttcttcctccatgactggtgaatgtttgccatgctgcagagagcccaggtcctcggtaaggtagggggtagcgcaatgtgattgtggatcgaagtcgctcgtggggaacgacaggtccatgacggggaactcaaagctctcggctggaccgagcaaagtggtaacgctagaactatggcctggctgaggccagcattgtggggggacgtcgtcgttgaagcagctagaggaggagttggagtcagtgtcaagggtgggcaagagcagagctgctatcgcttccatggactcatccacgtcatgctcgtaatcgtaggtgaagcagtggtcatcatctgctccaagaaactgagccatcatgtcgatttccatcggtagcgcagatgaaggcatgaagcgtgggatctctctgctctagtaatgcgggagggctcaagggaaggagaggagagactacagctcaaagacaaagaaatgctgcaatgcctgagtgctcctgccgtgtgctcccccgagagggtatttgtagggtgcgggcggcccagccgtgcaggtggcccccattgctgaccaaggatggtatggtagcttcacaatcagcatcaaattgtctggcttttc

SEQ ID NO: 45135 - DNA, 2668 bp, Zea Mays
actctacctctaaaaagaattcgtcctcgaattctgacgcttctatcggaacgacaaaatggaaaaaattaattaatcaacaacacttactcacaacaaaaagttccggatatttctgccgcatcagctcctcaagttcccacgtagcctcgcgctcagactgattagtccataagaccttgacatacttaattgatctcttcctcaaaacacgctccgagaattccaagatacgcaccggacgacactccaaggtcagattctgctgcaccgcaattggttccatctcaatctgatggtccagatcccacaagaacttcctcagcatagagacatgaaatactgggtgtacccctgccatggaatctagcaattgcaagcgataagccaagctgcacacctgggccaagatagtgaacggtccaatatatctcaggctaagctttccggagacaccgaaccgaacaactcctttagtgggtgataccctgagaaggacttggtcacccactgcaaattccaaatcccgcctcctcacatcagcataactcttctgacggctctgagcggccaaaatattctgacgaatttcccaaaccttttcagaagtatgctgtacccaatcaggaccaactagggatctctctcccaaggtctcccagcaaagaggggagacacaccgcctgccatacaaagcctcaaatggtgccatcttgatgctagcctggtagctgttgttataagcaaactctgccaatgcaagatgatcttcccagctacccttccaagacagaacacaagcgcacaacatatcttccaaggtttggatcgttcgctctgactgaccatcagtctgaggatgaaaagcgacactaagagaaagcttggtgcccaatgcactatgaagactctcccagaatttggatacaaatttggagtctcgatcagaaacaatggacttaggtaccccgtgaagcctgattacttccttcatatacaaggggaccaaatctgaagctgaatttgtggtcttcttgggaataaaatgcgcagacttagtcaagcgatccactaccacccatatagcatctctgccccgaggagaacgaggtaaacccaccacaaaatccatggtgatatgctcccatttccactccggaatttccaatggcttcagtaaacctgcaggccgcttatgctcggccttcacgcgctgacatacttcacatgtggccacatacttagaaacgtcaaccttcattcgcttccaccagaagttttgcttcagatctcggtacatcttggtttcgccagggtgaacggtgtaaggcgttttatgagcttctctcaatatattcatcttctcctctgatttctgaggcacacaaaggcgacccctgaaatgaaccaaatcattctcatcgatgcagaactcccagggtttaccatcgccaaccctctttcgagcttcctgcaataaacgatcctgctactgagccacacgcactctctccatgagggaagattgaataagcatacgagtctcctcactagcggtgccgacatagcacaaggcgatcccaaaacggtccagatcagcaatcaactgcaaggccacttttggaaccctggacctgctaagggcatcagacaccacatttgccttccccggttgataatgaatagacaaatcataatctttaatcaattcgagccaccgacgctgcctcaaattcagctccttctgagtaaaaaatatacttgagacttttatgatcggtgtaaatgtcacaagcctcgccataaagataatgcctccacgactttagagcaaaaaccatcgcggccaattcaagatcatgagttaggtaattcccctcatgcttcctcaactgccttgagccataagcaatcactctaccttccggcatcaacacacaaccaagaccaatacgcgaagcatccgtataaactatgaaacgcttacctctctcaggcaaagctaggataggggcgtccaccaacttgttctttaatgtctgataactgacctcgcaatcgctgaaccagatgaagagaacacccttctccaagagtatagtcaagggcttagtaatgctggaaaaatttggtacgaaacaccgataatatccagcgagccccaagaaacttcgaatttcagagacactagagggtctcttccactccaccacagccgcaacattcttgggatcaaccgcaatgccttgctgattaatcacatgccccaggaaagcgacttcggacagccaaaatgcacacttcttcaacttgccatagaactgattctcccttagggcacccagaacgagacggagatgctgctcatgctcagcctcgatcatagaataaatcagaatgtcatccaggaacacgaccacaaagtcgtccaagaactcatgcaacatcctattcattgcttccataaaagcagtaggggcattagttaagcgaaaagacatgactatgaactcataatgccaatacctggtgcaaaaagcggtcttctcaatatcctcctcacgaatcctcagttgatgataaccagagttcaaatcaattttggagaacacctgggcacccctcaactattcaaagagaacctcaatacgggggagtggatatttat

SEQ ID NO: 45136 - DNA, 342 bp, Zea Mays
caagatcaaaggtcaagttgaacgtgatgaagccctggattgccaagtgagtcactgatctacttgggtgacgtatgtttctgatccatgcagaggtagttacatttttattgtttgatatgatactctaaaggtaagagtaagtatgcatttcagtaagcatgttaagcattagaggataaatttgttgtatttggtatttcaggaatgatcttgttggcgtacttgcgtttttctgtcttactaaacttggataaaattgttaagccatcaccataaatgcatttgcatgtgttacctatggaatctcaataatgattttggttagggcatcagatctac

SEQ ID NO: 45137 - DNA, 712 bp, Zea Mays
ggatactcaaaattaggtggtggtctataaggtcctctagttaaatatcttctcctaatctcatcttgcttcttaggatttttagtgtactctgtaattctcttccgaccagctgggtcataaggcaattcatctaaatcaatttctctttgatattgggcagaagactttggaacgctagcagcaacattttcttgcttcaatctaaggatcgatcttgaagtatctgttgtattatcatctaaatctgatgatctatttcttttctgaaaataacgttccatgagatgccctagattattcaaagtttacatggaaaaaataagagtatcaaactcagaccaatttcaaacttaaagccctaatctagaatgagtctacgagagctgattagtagataaggtgatttaaacaattaaacagagggatcacacctgattttaggaaatcagaagcagctaggtggtactggcaagtggcaacagtcggcggcggaaggaagaaaataagcggcgtccgacgatgaaccagaaccaagaagttgaagcgacgaaaactggagaggagcgagactgcgagagggtgcggtcacctccggctgaaatactgaatttacttgggctgcataactagtggcctattaacctattaaattatatgaatgcacgtcggagtggccgagtgggcttagcttttgcagcccaaacaggac

SEQ ID NO: 45138 - DNA, 651 bp, Zea Mays
gttggagttgtgtcgtcatcatgcgcggtggtggtgcagtggatgaccaatagcatgcagtatatcacgatggccggaggcggcggcggcggcagcgctaaaactctaatgcattaatggggagagtacaggtctaggcgaacgcatgcagtggtgcttcatgcttgcagagatgattgtggcagagtggatgatgctcgggaatggggctgtggttctccaagttctctagagcagatccatagcggtgggcgcatgcccaagcatgagcatgagcagggaatgacgaaggaagctatgacggggctggatctgcgcttggccatgacgatcgagaggcgtcatgcagcagggggaacacgaccaggaccagcgataatgatgagtgagcgtcggtgacgagaatagagcgcgtgtgagaggtagaagaaaggacgtacgtgcatacatatatgtggggagcgagggcatgcgtggcaccatgcacgtgacgtgccaaccgacaaccgtaatgaccagagctacagagcacggtcaactagttatgcatgcatggagccctatggtcttgctaccctgcacgtgaggccacatgtgacaatgtggataagcggccaggctcgatcgagtcgacaacatgttgagtcagtc

SEQ ID NO: 45139 - DNA, 544 bp, Zea Mays
gaacccaatagtctcggagtcaagggaacgccaactcggttgcagagggtgagcctccaaggtcagccaaaccctgcaacgtggcacccgatgctcgtcatatagctgcaccatatatagagggggtgtggggtaaccggcggagcagagcacctcccacaagatggagggaaaaccctcgtgggaaaggtagtcggaactgaaacgagtgtctcctccattgatgggggtgggtgaagtcatatgtgaaagagggttatacgtaaatgttatggtagtggaaaggaaaaacatgtacccgggttgttaaaaggaggtgggttagattagattgatctactcatttcgttattcatcatttgttaccttcatgcttagatgcatatttccttagtttctaatttcttcacatcgataatgcatgcatgctggaaagaacatcgcctcactgatcagaagggtgcttctaaggcatccctacaatttcaaggctggcctatatggcctacttatttagccacctgttttccccactattcctaag

SEQ ID NO: 45140 - DNA, 494 bp, Zea Mays
atgcagtgtcggtggaccacaactcaggaccttgtcttgtcggtggaccacaacctgtttttatttcagcagcgggcccccgagcgtgacggtggtggtgactggtgagaggttactgaaaattattccgccattctccatgattaatctccaacatggttgcttatagcttgcttgtggcttgtgcgtgctagggccagtttagaacacctaaagatagtcagctaataaattattagttaggttaagccagctaataaactaattatgagttgtgaggtcgttaacaattagttacagtattagttggggtgtttgatagccagctaacaaggcgtgttctctctaatcatacatacctcgatgcagtagtatagagaaaaataaatacattttttagtctttgaacaacttacgtcttatattgagtgtcttgtacattgagttttagaggttcctaacggatctttaatcgattcctatttttgtttcta

SEQ ID NO: 45141 - DNA, 892 bp, Zea Mays
tgggggtacctagcaggtctaatcatggctgtctaaaaacagataaacggtcagggacttatccccttcccagccgatcacgacggccgagcagagtaccccatcgacgatagtgttatcggagtaaggctcttcccccgcccatggtgaacaagacggaccaaaacaagccccaaccagtgcgagggcgagtgcaaactagatagagaggaactcacaagctatccgggccgtgatgtcgtctgcccacagcttaccgctgatccaaggcgaagcgtccactccgacgagcaatttgtgtgcccccggtgaatattctcatctggaaagaccccaatggcgcgtggttagcaccagcgactctccctgaccacccatcggggactcgacgccacctttcatgaatcaccccatggcggtaccggcgcacaaggatccccaacgcgccgcccctctcgatatttcgaagatggctgctgtggttgagggccctggtatatatgcctagagccacatgacccgcataggaacgccagtacagggattgtcacgagatcggcgcgagcaagcgatagattcggatgtattcggttggtggagacggagctgaccgtttgaccccacatggtggtgggagcaggacacacaagcgctagcggtgaagaggatggcaagtggggcccgattatcggtgagagtacgggggagggttggctgctgggccggtgggagtgggtttagtgggccaaaaggggagaaccggcccaggcacaggtaaccttctttttctatttagatttcggatttcagtttcaaattcaaattcaaagagaagttaactttcaaattgcacaagcaaaaactccatcatggatgctttattatacatttt

SEQ ID NO: 45142 - DNA, 343 bp, Zea Mays
cccaagcctcccgcgcgacattggttgtttggtgatcggtgtgctagggtttcctgccggcgcacagatgtcgacgacaatgaagtacgatcttccactgttggatctcgacacacgtttcttgctgtggcaggtgaagatgcgggcgattctctcgcagtgtgatcgcaacctggatgatgccctagatggatttggcaacaaggacgccaggacatggactgatgaggagaggtgcaaggatcgtaaggtgctcgcacatattcaccttcatctgtctaacaatatcctgcaggaggttctggcggagaaaaccgccgctgctctctggttgaagctggag

SEQ ID NO: 45143 - DNA, 276 bp, Zea Mays
ataaaacatttttctagtaattcttctatttgcttcttcaattcaattaaatctttgacatccattcggtaagctctttttgaaattggtgcagttccgggtaatagttcaatagaaaactctatatcatgattaggtggcatacctggtaattcttccggaaatatgtctaggtattcacacactattctgatgtgctccaaagatttcttctccaattgatttaccattgcttctgctattactggcatactgacattgacttcaattctttct

SEQ ID NO: 45144 - DNA, 492 bp, Zea Mays
caaggaccaaaagaaaacacatacttcgatctgccctgagatgggtgtcatgcagtgagctccagttgggcatgatggttagctagttcaagaggggaactggtggaccaaggttaggctttgctgctaaggatgggagtgtcgcttgctttggaaaggttggtgagtgcagtggccagaaaccttaagagaaaccttcagccaccacaaacttgtctagatcactccaccaaaatctgccaccgctatttgcctgtgtagcctataacgcctcaagatcctgtttttggtttagttcaacttttccaaaaaagaaacaaattaaagtgtcatctgatgaaacatgaagccttgaccctttaaaaaaacaattataatgataatcatgaataaataagtaatatttgcttggtacttcaaaacatagacacaaattttgaaactaaaatttaagttaaaacttggaataataaataaaagaaaggctccaat

SEQ ID NO: 45145 - DNA, 551 bp, Zea Mays
ggcactatagcagttttctctaaagagtgcaacttcggccgatgagtcaaaactttagccctctttggcttcgacgcggcgaaagaggtcgaagttgcgattttcctcttcattccttgtttttgagcgggaaagaagtagtcaggataaataaatccaatcacatcaaaaactatgtttagtctccttttgccttgagcactgaatgcagtgttcatggcttcatcctctgccttcgtaaaagtccccagaagctcatcactggtcgcctcaatggcttcaagccattcatcattcagctcgtcaaactgacttctatagcgataggtgtattttaggtaaactaggccaccttcactggaactagcagtggtctccttcatcccctcctgagaaatggtgtgacccaaaaatttaatttcccttagccagaaatcacatttggagagtttggcatacaagtgatgatcgcgtagtcgctgaagtactatatgcaagtgctttgcatgttcatcttcattctttgagtagaccaagatgtcatcaatgaa

SEQ ID NO: 45146 - DNA, 625 bp, Zea Mays
ctacaactttggtgcagaagggtgatgatattgccatagaaaatttagaaataatctaccctaaacatcctctgtcaggcactctaaagatgactctcatggtacagtagcctgatcggatcaggttcagtgaacttcaccgccgatgaccgtcgcgccatgattcacgtcgatcgctgggattcgtgcgctatggattgtggataactgtgggcgggtaaagatttggtgcctggatcaacttgagtctggccgcggctaagctcagcgtaccccttgctcatcgatcgatcgggataagacctcgccgccgttggccgattgccgccgtgcaccacgtgctaaagcactttaccatgtcacagtggcttggcttgcgatatttgctcatcgccagtgagttcaccacgatggaagacacgaatccactgcgctagtaactttctgttttctccgactgccgcacgtctctcccaaattcaccggccaccgctcttgccttctataaattgagcacatcgcctggttcgtattataatcacgcaccaagccaccaagtatttcctccaatcgtatacccgagagctctaattttggattccccccaaactgagtttccgccacc

SEQ ID NO: 45147 - DNA, 609 bp, Zea Mays
cgaggagataggaacgttaggaacacgagcaatttattgtgggactagttttgtctctggtgagaagccatatcgaggggaggatgataaccatacgcgtttcacacgtaacgcacgatgacacatgaaactcaagctttataggagtagtacaatatcatcattttcattcattaaaattatccactagcgaatatcattgataataatttaaaccattttagaacaaaccatactaatttagattacatcattatagaccaattgttcaagtacacaccatagtttatacgaacataagtaaatcaccaatatttactatgttgtatgatgtactctaaggtcatttgattttgtatggtagaatattattagtccaaactaacatatttactagctaatgcactctcccatatttagactgtctcgagcagctatcctaactcatcatctgtctcatccctcatttcaatcctcactctgcaaataagtataatctacaatgtaaatcctcattttacatgatctgctgtgaacaaccttacatgcatgagcacaagatctactaacgaccattagcaatggtcgagaaaaaatcgatttgttccc

SEQ ID NO: 45148 - DNA, 355 bp, Zea Mays
tgggcgatcagctttgtgaattgcgaagggctgcctgatcgaggggaaaacttctggcaggcttcgcaggaccttgtgacccgatttgcggcgcagatcattgcgagccagtagaagccttggcagatcaccttagcagctagggcccttggccctgcgtgagagccgcaggtaccactgtggacttcgcgtaggatctagacaccttcggtttcggtgacgcatttgagcattggctgactgacccccttcttgtagagttggccctcaatcagtgcgaagtcccggctgcgatgtttgaggcgcttggcctcattgatgtcggttggatgataatacccctgtaggaacagag

SEQ ID NO: 45149 - DNA, 405 bp, Zea Mays
ggaggaatgatataatgaaaaaagctaatttacctgaagattagaaaagaatgaaggcaatcccaagtcatgagaagttgtgttataactcgacgaaggaagatcaactggaacaatctgaaaagcatcatcgggggttgattcagctccaccagcagatatcaaaatcctgtcatccggtgcgctgacctctaaggtgactccctcacttgaagctaaagaagtatgcatcactatcactccatcagaatgtggtggagacgacccggcgtggacatccatggaggtatgggaagcagagctcgctcggacacccacgggggctgggttgcagttcgcactgcccatcggagccggatcactaccggcaacaccctcgggggctgggttgcagcttgcgatacc

SEQ ID NO: 45150 - DNA, 356 bp, Zea Mays
caaaaaaggaaagggaaggatactgactttctcagccttgaggaaaataaaaattcacgagagatcatgtttgctttggcttaaagaaggagatgcaaacactaaactttttcacgtcgaagcaaatgcaagaaggaaaaacttcatccgctccttggaaaatgaggggacagtggctactgcacatgaggacaaggcatgccttcttagacaattctattgcaatttatttggccattacagataaagggatattgccctaaactgggaggaacttgggattgtttcacatgacctaaattccttagaatatgtgttttctctctatacttctctcccccaacaagcgatgtcgg

SEQ ID NO: 45151 - DNA, 580 bp, Zea Mays
gtcactttggtaccaagaaaactgagcaagtgctagctgatcatttcttttggccaaagatgcggcgagatatggaaagacatgttctttgctgcgtcacatgccacaaagctaagtcgtgctcgaaccctcatggtttatacacccctttgcttattcctagtgctccttgggaagacatttctatggactttgttcttgggttaccttgaacaaagaggggaagggattctatctttgttgtggttgattgtttcagtaaaatggcacactttattccatgtcacaaaaacgacgatgcttgccacattgctaaattatttttcagggaaattgtaaactacatggagtgccacgtaccattgtgtcggattgtgacaccaagttcttgagctacttttggaagacattgtggggaaaacttggaaaaagactgttgttctccacaacgtgtcaccctcaaactgatgggcaaaccgaagttgtgaaccgcaccctatcaaccttgttgcaagctatcctaaagaagaatctgaaaatatgggaagaaagcttacctcatgtggaatttgcatacaac

SEQ ID NO: 45152 - DNA, 866 bp, Zea Mays
gttcctaatgacattgttgctgacgtcaaggctgcgcctgatgcctcgagtcacccttcttcctcgatcacccctgcgaaagacattgccaaatagagatgttttgtcgtagcgacgtgtttagaaaatgcatttgtgaattatatgtgtgtgtgatcagtgcgctcggatactcggtggatagggtactagaatgtgttcttggtgctgaaaactatagcattttgtttcagttgtttagaattcagcagtcgtcctgaacgattgcggaagtaagcacggtgtgctagttttggcgtcttttcctgatttacgcccattgatcggccgctaaggcatagaggtcgccctaagataagcatattgcactgtcttaagtcactgccgacttaagccgattgctccgttagtagggtatagtggtcaccctaagtcgagtaagcatgagcatgttgcaccgtcttaagttactgtcgacttaagccgattgctccgttagtagggtatagtggtcaccctaagtcgagtaagcgcgagcatgttgcaccatcttaagtcattgccgacttaagtcgattgctccgttagtagggtatagtggtcaccctaagtcgagtaagcgcgagcatgttgcaccgtcttaagtcactgcctacttaagccgattgctccgttagtagggtatagtggtcatcctaagtcgagtaagcgtgggcatgttgcaccgtcttaagtcactgtcgacttaagccgattgctccgttagtagggtatagtggtcaccctaagtcgagtaagtgcgagcatgttgcaccgtcttaagtcactgacgacttaagtcgattgctccgttagtagggtataat

SEQ ID NO: 45153 - DNA, 698 bp, Zea Mays
gttgtgccaaagcttattgaaggtgcagaaacagtcccttctgccatagaatcaggtcctatcatgccaatcgaaacttgtacagatctgaccgaagagccaaaatcagagaaggcagcagaacagctgaaggtactgagcccagcaactacaacagaactgtcgaagccatcaagtgtttctgcaacgaccccaagaaaaaggagaatggctagtgtattagacgttgttttggaatctgcgaagatgtcagctcctgcttctgccgaagcttctagcgaaaagaaggtgttgctacgagcgcggccatcgctcctaccgaagctgggccaatagaactggcgaaagagagtgctcccgagggatctaaacatcctgcctccaaagcacctcataaagagctggaattcatcattcgacatgctttgggaaagcagctgtcttcagagcagattgctgaagtagagcattatgccagggacctaaagtacccccgagggtccttggtatacggaggggatgacgaagaggacttcctctattgccttcctgataataaggaaatcaacgtctgccgcgagatgatgaacaacatgggatttccgaagctcgagctcggtttatctactatgtcaaaggatcaacttgtgaatatccttgctttcaatagcttgaaggtttgcaaattttggcttcat

SEQ ID NO: 45154 - DNA, 348 bp, Zea Mays
tggaagttcggtatatgtacttgtgtaggaacttaccgaagaggggtagcctggggatcaaatctacgggagagaggtctgagtggtggcagaggtctgggtgcccctcctctagccaggggagcaagcatggtcgtgctctccctggctgcgagagacggtagtcgggtccgtgtggtgtctaggcaggaggagcaccatgtcataatcgaagtgaagggacatgaactcgagactcccaaaccatatcaccgtgccaagttacaaagagtgttcaagattggccatccagatccttaatgggaatgtgttgtcaacacgcagtgaacccctacatggcacgccaac

SEQ ID NO: 45155 - DNA, 524 bp, Zea Mays
acatccacgaaaagtgtgtgtgcctgttcaaccccagcgtgagtggaagactccgtcctttcgcggcggccgtgcatattcttcatctccagctctaggtcggtagtgcgcttgtgggcagctcgagcctttgcgcgggcagcctgagcctccgcacgacctttttccgcatcctccttctcatcagtaagtcggcggccgaggtcctccttttccttctgcaatgccgttaacttcttgaggaggttccggctcttattttcggccgccgacttatccctgaccgccttagtgtgctgtgtttgaaggcgctcagtccttccctcgagccgtctcttctcggaaacaaactgtgaggttagcgcccccgaggcaacttgctcggcgaaggcagtcacctgacatcaaccatcgaaactcagtacaacagaacaaaattattatatatatgaataaataattacacaaactcacaaatcatagttgctgcacggcagacgtagccacgctagcagcggcgacgg

SEQ ID NO: 45156 - DNA, 350 bp, Zea Mays
tatccatcaaagtcgctctctcccccgctcgcattgaaccgcctttggccctcctcttccctttgtagcagcgatggtgtggatattatcgtcgtcgtagccttgtcgccctatttggacatctatgactatgctcactagctcttgcgtcttctttctactcttatcccgagattcctaatcctaaccctaaccccctcttgtcaatcctaggctagaccgtacgacgctcctcgttggtggctctggtgctctggttgcacaggtgagttggtgctccgtctcagccccttctcttttctctttgtccccaccatctaggtcgatgtaacacattatcttgtttttta

SEQ ID NO: 45157 - DNA, 699 bp, Zea Mays
caggtttattgaagaatgataccaagtttgaatggtcctaaaaatgcaatgaatccttcaagtagctgaaggtgttattgaccactgctctggtattggctcaaccggatatagaaaagccttttgatgtgtattttgacgcatcaggcagtggactcggatgtgttctaatgcaggagggctgagtcatagcttatgcttcaagacaactacgccggcatgaggagcactttccaactcatggtttggaactagatgcatttgttcatgccctcaagatatggcgtcattaactactgggaaatacttgccatttatatacagatcataaaagtctgaaatatatctttacacagtcagaactaaacatgaggcagagaagatggcttgagctgattaaagattatgattcagaaatccactatcatccaggaaaggccaatgtggtggcagatgcactgagtcctaaagcttcatgtcattgtcttacaataaggacccctgacaccacactatgtcaagaaatggaaaagttaaacctgggtatcatacaacacggaactttgacacaattaaggcttgagtcagttcttctacagagaattattgatgcccaaagaaccgacaagggtatgaaacatattcatgagaaaatagaagccgacaaagctaattgcttcagaaaagatgatcaaggaa

SEQ ID NO: 45158 - DNA, 394 bp, Zea Mays
ggctttctcgatgtcgtctaggtgatgtggaagagttagagtgaaggaggcgttgatggagagagatagaaagtttaagggttaatatatgacgacaacggcgaggagaagaaagtgatcgtgatataaaacttattttatctgattgttaggtgagatgtgggaggaaacagatctacacgcttccgcgtgacagagacaacatagaacgaccgctgaaattggtgttttatagaaatagaaaaatagaatgagtcgatcaatcgtcatgtcattctttgcaagctaataattagtggagcatgagaaatatgaataaatttttgtgcattactagagcgagcaattctcccgcacggaataaccaaaaaatggggtgtgagggagatccaaa

SEQ ID NO: 45159 - DNA, 393 bp, Zea Mays
tctaggtgctcccatttttgttgtgaatttatagttctaggtgtgcgcaatagcatgcgctagatgtagccttcgagccctcgagtaattcatgtggattgcttggaggtttgttcggtgtaaatgtagtttttggacggacccttcctacgatggtcgtcatctgctgagtgtgcatccatggttgctggctcttgttaggatcgaacacccgggtgcgtgcaagcgcatctcctagattgcttgagggtttatttggtgtatgtgcagtttgggtatggacccttcgtgtgatggtcataagcgctaagtgtacatccatctaataccgaaaccgagcgtaccctaggagatgggcccttgagctagttgacattgaacgcttgatcctcg

SEQ ID NO: 45160 - DNA, 361 bp, Zea Mays
gtcataaatatacttaaaggacagatgtgtagtggctcgatcagtcttaatcaacgcattttacagagagaaaggctggtctcggtttatctcttcttcttcagacctagctatttatatggaagctagcctccaacactactacaccttccgttttagtcataatatactttaaacaatacttcctccgtttgtttttatgtgacatcagccgtcaaattagaaagtgaacgtacacttgaagtaaacagtcttgaacggggaaattaaagtcaaactattttctcaacaatcgaattaataaatgcagtcttacaatccattttacaagccctaaccagcagatcatcctgggaatgaa

SEQ ID NO: 45161 - DNA, 1028 bp, Zea Mays
cagctttagacgttagctcaaacaacttcactagttccttgaaccttacacaattttggaatgtgtgagctcaccatgttggatatttccaatagtgggttgtatgtcatggatgtagatgatggtaatctagatcaaagttttctccacagctaacaaaaaggtaaaacatggtgctcatatgatatctgcttaaggaaacatgcatatatgacctcaagtgatcatagatactagtgaaggccaagaaatgaatccaaaccacacacatcaactggagcaccaacacagaaaacaagtgaaaactaggcattcgaaggaaaagatcaatcaaaactcatcaaacaagacaagatctagagccaccatgaactagtaggttagggtatccaatcccacaaaatccataggctacaagactaaattacatagatgaacaaatagttcagtgtttaaatcatttgtggttctcaagagcatactagagcatggggaacatacttgagatatgaaataatgacaactcaagagataatttggacagattagcctcccctttatttatagggctattaaacattcccaacttgctcctagataattagaaccgaaccactcaacctcagggcgttatagtataattaagatctatagatctaacgaccatgtattcttcttgagacggcttcttctcaatgctaaatccttgatgctaccacctacagttcgagccaaactccactcgagttttgaggccaaaacatgaaaactatctgctatgcggttttgaggctcaaacaaccaaaagccttatgagtagcatatctgagatgccacttccataatatcgacatatgtcactactagtcctcaatcacccaatgatcaagtcctccagtgctactacttggtgtggtaaactattatccttatttggtcaacatggtctactcctccatgtactcttgcacgtgtcgatgtccttaggtgtccaccacacataatcggtcatctagcttatgtggtcc

SEQ ID NO: 45162 - DNA, 788 bp, Zea Mays
caggcagcatcagaatggccaaaaagagccaatgatcttgatgcaattagaaactctgctgttcagcggccattgctgaaactgaactgaacagcagtcaccgcgcgccgtcgtccataactgccattctgtttgttccctaccagtaattctcagcctcgttcaggtggatcaaatgattgtatcctctccagctctgtaaaagtgatgtagctgaacacagtaacctttgacatgaaaaaaatcgtcttcgataacacttcgtttactctcgcacaaaagggcatatagctgaattggttaggtggtttgaatagcacttctcaggtcttaaggtcgacttatttatgtgtcacaagccaaagtataggtctaaggacggccccagtcacgattgtttcacacatgggctaagctgccgctacatatgggtggagcatggttaagggttttctccatctatttgaggtctttttgttgatataatgttctcaagggttgtcttaccctataggttgagtttttttatttacacccaccaaacaaccattttactacgcctactgtttgatttgtccaccagacccatacgaaatttgaactcattgaactaccgcgcctactagattatttaaactggtgcatctgcccatattatgattttttctgtttattccttttgttttactactaccactctttgtgaatggttgttgggattcttattgttgttaatgctcacaatcaaattgtcggccacttgttgaagaagaatcgtgaagccgaac

SEQ ID NO: 45163 - DNA, 403 bp, Zea Mays
ggtcctttgtgtatagcggcagtgatgaggatgattttctctattgcataccagataataaagagatttatgtctgctgggaaatgatgaagaacatggggtatccgaagctcgaactcggcctatctgcaatgtcaaaggatgatcttgcagatagccttgcttataatagcttgaaggtatataaatttttattgcaaaataaactatatttgtagcttttcttgctatctttatgttctcatatatttttgttattagggtttaattctaagtaaggctttaagggctcaaaaggaagcaaaagacgagagctatcagatagctcttgggaatcttcggtcagaggtcattacactaaggaatgaagctctcgagaaagataaaatgttgttttccttag

SEQ ID NO: 45164 - DNA, 335 bp, Zea Mays
cactagactaccaattgctttaacttgactactaggaactgtccctagcacctatcataaaatcgaccactccaactattcatagcttttagagataccattggaatattccactaatatcttaggattggtgattgtattcctagtgtctaacatacaatcagccacaacatctattcatcaatttaagagataccattggaatattcctctaatttctcaagattggtgactgtcattcatagagtatagaacttcaatttagcatattcgtcctagttagagttggggatgggactcatgtccgcattaatcctaggtccaagtttcatcag

SEQ ID NO: 45165 - DNA, 439 bp, Zea Mays
ccgacgaggaattgtctaggttccggccaccgagttggcttggtgacggtgcgaacctcttccgtgtgtcccagggagagtccatggccggttgacggtgcctcaatgccgatagacaagtaggtccacggcggcgcgccgtgagtatgcgactccggtgagaaatccctgtggcggcatggcattcccccagccgtagatgccccacacaaccttcttgagctccgcgctttcccccgagtgggtccccatggccggaccgacagccaaggcgagaatccatcaccactcacatctctctctcaggcagaactctccgcgctctctgcaggtttcgggccatcaccacgacaagagctactcccaccggcgagtatcacagcggcttataggcacgagctccgccccgtggtctcgcccacgcgaaccacgctgccgc

SEQ ID NO: 45166 - DNA, 851 bp, Zea Mays
attggatcacctttggagacaaattgtggctaatccagtaagaatttgtcttggaatactataacaaagatgaagatggtatattggactacaactttgctgtggagcatcggtcatgttgccatggaaatttgagagaaaattaagcccaaacattgactgtcaggtgcacttatgggggctcgcgatggtacagtaacctgaattggatcaggctgccagtgcagaactctcaccgtcgacgaaccctctgccacgattcgtgccatcgacgtcccgattcgtgcccagagtggatagataacgtcgcggggtgacaggtgtcgccgtcggtgaactggacgccactccggctagccgccgtgcctctccccttgttcaccgatcccttggatgagattctcaccaccgttgagccaccaccgtcggccgtcacgtgtcctgacgctttaccacgtcgcagttaaccgtgcgttgcctgtccgatgatcaccgaagtggatgacacggggtttgccaccaatcacgtgcgccagtaaactcccctcctccgaccgtcgcgcgtctcgccccaaattcattagccaccgcttaacaaccctataaattgatggtcgggtctgttgcgccatgtaatcacgaagccgaagcacccgctcccacccttaatcaatcaccagagctcacgaatttctgatttcccccaattcggtttccgccaccgtgaaacacaccccgtcgtggtcggcccaatttaggtcagctcctcccctctgcttccttgtttaagcactcttatacgtatgtgatactcgccaacccacctaattgaactaggaaaccactggtca

SEQ ID NO: 45167 - DNA, 704 bp, Zea Mays
ggcagaggagatggttagaattgatcaaggattatgatctagaagtacattaccatccaggcaaggcaaatgttgtggtagatgcattgagtcgaaaggcacagtgcaactgtctaaccatcgaatctaaggtcacatctttgtgcgacgaattacgcaagctgaacatggaagtggtttccccaggtaccttggattatatcttagttgagccgtccttacaggagcagataatcatggcacaacctagtgacaagggtgttcaaatcatcaaggaaatgctcaatcaaaaggtggataagtataaatgctttcgtcaggacagcaagggtactttatggttcgaagaccgactggttgttcccaaggatctagaactcaggaagaaagttttggatgagtcccatctctcaaaattttccatgcaccccggaagtaacaaaatgtatcatgacctcagatccttatattggtggaccaggatgaagagagagattgctaagtacatatctaagtgcgacacttgtcaaagaatcaaagctagtcatttaaaggtagtgggtaccttacaacctctccccataccatcttgtaaatgggaggacatttgcatggactttattgtgggattgcccaacacctcccggcaccacgattctatttgggtcattgtggataggctaaccaagacaactcatttcttg

SEQ ID NO: 45168 - DNA, 507 bp, Zea Mays
attttctcaggttgtctacattccacgaatgctcgatgtcttctttggattgtgttgtgagtctgtaggtgttcggagacaatttttctcttgacgatgaaaggcccctgccatttaggctcgagtttacctcgggattatgttttgttggttctgatgaggacgaggtccccttcatcaacctctttaggagtaacagtgttgtcccgccaggcctttgtttgtgcttgatatctatttaatgcttcaagggcggtcacacgatccccatcgaggtcctttgttgttgactcgtcgatatctggtgtagctgtggtgcttgttcgtggtgatccgaactttagctcttgcggagtcatggcttcggattcgtacattaatctgaaaggggtgaatccggtggcccgggattctgttgtgttgagtgcccagatgacttcgggtagttgctcggcccacttgccctttttgttatccagaagtctattctttataacactgaaaatt

SEQ ID NO: 45169 - DNA, 488 bp, Zea Mays
ggggatggaccgccaattggcggcactgggcagcgccgcaacgtcacaccaacgcccataggccggggcatctaacacggctgatggaagttatgttaacttccatcaatgtctgacaccagtggcggatcaagaaattatcgaaacctggggccacaatcttaatatgagaaaaggaattaccacacctttctctttctctatttgttcttcttcaacactctgcagaactgatgcctgctggttgcctactccttcgctcttcactggttcggtgacgcggggactcagcaattgtctagtggggaaggaccgccaatggccagtactaggcagcactgcgacgacacaccaacgccccataggtcggggcttctaacatggctaatggaagttatgttaacatccatcggtgtctaacaccaatgtcggatcaagaaattatcgaaccctaaggccataatcttaatatgagaaaatgaattacc

SEQ ID NO: 45170 - DNA, 509 bp, Zea Mays
gtatggttggataactgatgaagtaggtgctctttgagatgctagtataacattttgctcgattcattaggcatcatttatgaaggcatgtgtggaagggactgagcaacaaaaggtaaaggcaggtacacaatggccgctcgaccgctcgtagacattgtatttttttcagggggaacgcaccaaaggtttgcaatatcctagaaaaaggaaaaaaggatgtgtttttgccgctttagattgagagcaaactgcaaaacggaatggaacactcagtatcggaaggcgacgacgtaacgaatgctgaagctacaatgagcaacgtgtgtcgagaagcgaagaaaacatgtaaagcctatctttaacctggaagagcgacagtgaccggaggtagacaactagcggaggaagccgcgtgcagcgtcattgcttccctgcgtggctgattcgaaacggatgaggaagctatagcgagcactgagcaacgtacggcggaaagcgaagggaag

SEQ ID NO: 45171 - DNA, 492 bp, Zea Mays
gtaaagactgtggtaacccatcgtgccctccacgtccttccatgtgaggggcaatatgaaattgagtgttgagcaccccaaatgctctctccacgtccttccatgcccctcctagcacacaacaaacttttgctactttggagtctgtgggagtggaatggtcttcactaacaccgatcaccaagggtatatgccactagttaggtagtgtccctagttgtactctatgaccactcattgtgaagttcacatttggtgcttccacctttaagcacgttagtgaacaacggtgattgcttgaccacattcacatcattgtttgatcttgccacccaaaaaagcatgtcagatccacaagtcatacttgcaacaaccttgagcatgatagtcggagatccagtgtcccctcttgtgaactgtcctctcgatccaatgggacaattcctccactttcaatgcataaaatctatactccctatcatattagaaaac

SEQ ID NO: 45172 - DNA, 385 bp, Zea Mays
aatggcttgtatgatgaagttgtgtgccctcgcacatttggctatgttagcgaaggcgttacgtacttggtcaggtgtaattgttatgctggactggtgtgcgtgtagtcggtctttgcgcggactgttgcgcggacaggtgtaattgttattgtgcaagcccggctacggccgtaggtgacttctgtacggatagtctccgcggtagacttcggtttttcgcacttgttgtgctagtccggctgcacccttaggcgacttctgcatggagttgtcgcacgcgagggtggctagcgctgagcctcgcggtgacttcgtattggtcgaatgtcgaagaccatcgtcgcggtcttttttcgacgcatgtttttgcgggggatttttc

SEQ ID NO: 45173 - DNA, 422 bp, Zea Mays
ttttggaaacacatctcggaactcggacacaaccttgatactctcaattgggtctgcttcactgctatcagcagccatctgataacaacttcctttcttcggctcaggcgggactaattcggtcaccacttcctctcctagtagggacaccaacttgattgtcctcttatcacaactgataattgcctgatacttatctagccaattcatccctagaatgacatctattccctgagtacccattactatgagattagcgggaaacgctatcccccttatttccacacttacattcaaacaaatgctatcagctcgaattctaccaccggctgagtcaatttgaatgggggttgacatggtagttattggaagattacgtgcttttacccatgatgcagtaatgaatgaatgtgttgctccag

SEQ ID NO: 45174 - DNA, 406 bp, Zea Mays
ttcagctcccaacccagaaggttgttctgtttattctgcggggaggataaaggacatacaacaaggacgtgccaagtcacaatccaaaagcaaaaagaaatagctgaagccgaagcgcggcagaatcaatcgaagcaggtctacatactgcttcatgctattctccatacattctagagtacgtgggcaaccagcagcccacaacatcagttgcttcagcaagtcattctcaagctgcatgggccccgctaccatcaccaccacctatggcaccaactttgacccacaatcagcagtcagaagggcaccgccaagcacagcaacatctcgacacacgtgaagactctgaagctcacatggtcaacaacactgtgcccgagtcgaggcacatttactgaaattacac

SEQ ID NO: 45175 - DNA, 500 bp, Zea Mays
atactgttcagttttatataggtactaaatgttgtttataaacaaattttatatttctttacaatagcaatcaatagattagtgatgttatgttactgtgttcttattgttgtttttgagagttatactacctataattttatgaattctattgcataatttgtttatgcacactgtgaactgctttatttaaatgtgttttttcacatctctgttgttatgcattccttcttcacatttatgttgcctacatctattgttattcttacctgaagttctttttcatttacgaaggtagttctatcgcaacatgaagttcgtggatcgtcctccggctaatcctaaacgtataaccatcgagtcaagccaagaattcttcagtgttgagataccgcgttcgacctctactcgagatcctccaaacacaaagcattctgttcatcgtcctgcacccatcgagagaccatctgttattcatgaagccaatgaccaaactggat

SEQ ID NO: 45176 - DNA, 1062 bp, Zea Mays
ctatacacttaatacaaaaggaactacaatgtgtacgccgtggaaccgatttcagattcataagtaaatacagaaggaaaaaaatacagaacgatgtgggtgtgcatgttcacacttatacagatcattacaataacaagaagttatccatcggaaagtaaacaaaagcctcccctgcccctacactaattaagtaaacaaggcccaataaacagttacaatcctgagttaaaataagggcaccaactactatgggcacacaacaaagtagcgtaagtagtaacactaaaactaaaacctcagtaagccttaatacaatcgggaaatactaaagtgtttgctctaagaattagtcaatactaaaaaatcttgtttcagccagtgagactcattccggggtgagtcttagagcgcggagtctgcaatttggatagtagagagcagtctaatgagtggactaagagcagctctagtgttggtaggaatctaacctcgcagaaggaaactgaactatcaacactgcagcagtcaaccgctcactgtcagtagcagaattcgacctccaaacatggctctgtgcgagggagtaaaatattcagccttcgctgctctggcctctttagtgcagtacaatttcctctttctcttggctgttttggagattgaactcgatgagaaaggagtagattacactattttatttggttgtaggctccaccaaatcgaactcagcagtggaggcggcgaactcagcagtggaggcacaggtcgaaggaagggggagacgccatctagccacggagatgccatctagcttgaccttctcgacttgttcttcggcggtggcttttgcgaaggaagaaattagaaccattaagtagattgaagggcgaggaaaaacaatgaagcaagaagagacggtcgtacaatacctaggggtggagacggtggcgaattggggctagggttagggttttgggcggggcgctggaggctgcgggtgaagcggaggaggtggttgttgtggccgttcggcgtaggggcggcagcagggagacgacg

SEQ ID NO: 45177 - DNA, 321 bp, Zea Mays
aagatctggaatatctttaatacttcaaccaccaatttgctcaacagaaaccgaaggcctgccttcaaaaagcttcggtaaacaacaacttcattttcctcgggcgcaggagcggtgctgtctcctccaaccctcacaatagacatgtcacaaaagtatcttcccctcatggtgtcaatatgactttgtttaatggtcgatttttcgaagatggtatggcttggccgccagggccggtcctcagaatcttcatctccgctttccacatcataatcatcgctgtcgtcggagtcttcagacaaatatgccattatttccctt

SEQ ID NO: 45178 - DNA, 408 bp, Zea Mays
atatacagtagcagatcttcagctggttgagttgacgtggctcgtcgtggcggcttcagcactggtggtgtcgtcaagaatttctttagtgcatctagagcttcctgtgcttctgaagtccactgaaacttatccactttcttgagtagcttgtaaaatggtaaacctttttctcccagcctggatatgaatctgctcagagctgccatacatccagtaagtcgctgaaccttcttttgtgatcgtggtgcttccaatttcatgatagcttcgatcttatcaggattagcctcaattccccggtggctgacaataaatccgagtaactttcctgctggtaccccgaaaacacatttttcgggattaagcttccatcggtaccgccgtagactgttgaaaaccagctgt

SEQ ID NO: 45179 - DNA, 383 bp, Zea Mays
gaagaaacaattcagtactgtctggccacatgtgtgtttgctagagaggcctggaccctcctcttattcatcaaattgagatggctgactctctcacctcatccaaatgacagaatcctacgctggtggagtcaatctgttaaggtagtagctaaagaacttcaaaaagggcttaactctcattatgttggtcgcatgggagatatggaaacaccgaaatgccttgtgtgtttgagggaagaaggcattctgttcctgctgctcttcaggaggttggttttgaaggtgctctttggtgcagggctggtgctagtgcccttcacgagctcttgtctcgccttgacattaagatggggtgctagttatagaatggtagctgtgtg

SEQ ID NO: 45180 - DNA, 416 bp, Zea Mays
gttgaacacgctgattttccgggcaaccaatggcttccagctttcttttaatcgtgcgcatccaatcgtctgcatcgagggggttgctagacccggcgaacgtgggaggcttgagcctcaggaaatcccccattctgtcttgcggtcttccaccatttggtcgttgattctccagacttcgagtgaggacctcgatgagtcgggtttgattggctagaacttgggctaggtctaaaggtagttgcggaggtgcggggaggtgggtttcactttcctctctaatggcttccccttcagctctcaggggaaaccctgctccaatcccggaggtggtaggcgtggttttatccgaagccatctaccagggaagagagtcattatcatgcacatgcaaattgttttcaaccaagttattt

SEQ ID NO: 45181 - DNA, 480 bp, Zea Mays
gcaaaaagtgatgcagccgagttagtccagaggtgtgaagcttgctaattcttatcaaagcagcagcatttatcagcacaacaactgcagaccatacccgtaacatagccatttgcgtgttggggactggacatgattggacccttcaagaaagctcagggaggatacactcacgtgttggttgccattgacaaattcactaaatggatagagtacaaacacattgcttttctgacttcagctaaggcagtggaattcatacaagatataatattcaggttcggaataccgaatagcattataactgacttgggatccaatttcactagctctgaattctttgatttatgcgaacaaagaagcatccagatcaaatatgtgtcagtagcacacccaagagccaacggtcaggtagaaagggctaatggaatgatattggaagcactcaggaagaaaatcttcgataagaatgaaaagttc

SEQ ID NO: 45182 - DNA, 980 bp, Zea Mays
caggatttgccaagattgcttttgttatagtgggacatgtttattcaatggatgatttgttggtgactcattcatgagttgtaagtgcatgcaatcaaattgtgcaacttctcttttaccagagaatataaagcagtaggaaatagagaagaaaaccggtgtttctttggctacccaagtgatcttgctatggaaattgttatagctagaagtaggaagcatcaggaacacctacattactactctaccacatgcaagatgggtagaggtagcaagtgacgtcaaatcatagacaccccctctcccctaattggtggatcggagacggctagatctagatggcgttgaatggataactggaacaatatgttctctcacaaccacacatttgtgctagcaacccagaccataggattgtacatatggtcgatgataattttttgctagctaatgaaatcagtcaagacgacacacaccaatgatcattaatgtcttgtcctgtagagcggaggagccatgggggtatggacatcagagtgtgtggtgcaacaaacaacatcctggtcatctagaagagactagcgcgactcccaaattgcatggcttgggctcttatgtactagtaaacaacagaagaaacaaaactgactattattcttgtgtatagttttatcatatactaggaatgtagccaaacacttctttgtctttggatcatacactcaaggtgtcgaggtgaatacaagaggagcagtgagattaatttgtggcagtagttccgctgatgcttggcttgttgtgatttgggattagaaaaaacaaatatgctactagtacttcaatttaggtgcaggcgcaacatcaccactatcctaggagcaaaggattagagatggtgttctttgcagtgagctcttatgtttcatgtggatctgcctatcgcacgaatgccattgtttcatggtagaccaaagctcaaa

SEQ ID NO: 45183 - DNA, 410 bp, Zea Mays
ctcgggggagttatgactgtgtctcccgcccatagccgaccttgggcgagttggaacagcatctcccatccgagctgccctcggacgagttagaatgcatctcccatctgaggttggccttgggcgagtcggaactgcatctcccatccgaggttggcatcggttgagtcagaattgtgtttctgtgctcataaggacccaggggatatccatctcccacatccaccgcccgttgttctccccatagcctgagctccccacactgctccatcctcgaccaagaccatcaccatgaccctagcagctcaatgaagcttcacaagcccttcaccagagctctactcccctccagcagcatgccatcgctcgacggagcccatgactccgccaatgaacatggctagagccac

SEQ ID NO: 45184 - DNA, 373 bp, Zea Mays
catccagaactctggttggaaagttttcaggtctggtttctattggccaacaacaaagaatgacgcagccgagttagtccagagatgtgaagcctgccaattcttgtcaaagcaactacatttaccagcacagcaactgcagaccatacctgtaacatggccatttgcgtgctggggattggacatgattggacccttcaagaaagctcagggaggctatactcacgtactggtcgccatcgacaaattcaccaaatagatagagtacaaacctatcacttctttaacttcagccaaggcagtggagttcatacaagacataatattcaggtttgggataccgaatagcatcataactgacctgggatccaac

SEQ ID NO: 45185 - DNA, 496 bp, Zea Mays
actgaatcttgaaatatgaattacaatggtgcacatatatctaggtatatgatttatcaactcagatgtaaaagcttgaatgagagcagttggtacacagaaagctaaagctccctatcagcagccaagaactatacatatggagatcataggtaaaactaagataataagatctgaacaaagatttgctcaaagttgagtaggttcaaaccctttcgcttccatatacataaaataactaaaaacattgtaaccaaaaatcaaataaagcagagtccaaatattcagccacaaagcatgataaagaagtattattaatggagcaggtaactaagaccaaagtatggaaccacacaccatatataactcctaaggctatcagatacatggacaaacacggttaccacacacagaaaataactaaataaataaagctcagaatctaaatcaactgcatattatgtacaattcaagacacatctaaataccaatggtc

SEQ ID NO: 45186 - DNA, 516 bp, Zea Mays
cttgtactcatctaaggattgcccaagttaaaatttaagaaagatcttgtctatcacccttgtcgtcatggcaagatggttgctacttcccattccccagtcaccaaagtgatggcctcacaacccggcaaattgctccatatgaacattgtaggtccagctctagtttgctcttttgggggatgtggtatgtgcttgtgattatcgatgatttttctcgctattcttgggtgttattcatgaaggtgaaggatgaggatttttctcatactcgagatttgatccttaggttacaaaatgagtttcccaaaaatgccatgagagcgatttatagtgacaatggcacataatttaagaatactcattttgagacattttgtgcttctttgggactcgagcatcagtattcctcttagtatgtgcctcaacaaaatggcattattgaatgcaagaatcagtcccttgttgatggttagaacgatgctcgatgaacataggactcctaggcgtttttgg

SEQ ID NO: 45187 - DNA, 327 bp, Zea Mays
acctagttagcacaaaactgttggatgtaccaataaaaataattatagctatccatctattcttgtgttgactgttgcatggcctcacaccctcatacaaggaatatcatttgttcttcgtaactaacaagtgaattcacaggcctccaaatgggaagaaaacaataaacaacaagtgaaactgaaatgaaaagggaacagaaatcgagagccgtcctcaccccggagatacctcccacgactggcatggtagcggtagcggagcacacgcggacggacctgcacgatgaaacatagctacccagaacaatatggcacaggaatacg

SEQ ID NO: 45188 - DNA, 809 bp, Zea Mays
gccagtaatgaccaaacgaccaccacggtgaacttcaccaacgctcacggatgctcaaacaccaaatcaaaggcgtagaaccataccgggttcgcctggccacggggacgcggaaatgagtatgcactgtgcggtccgatgggaataggcagtcacgctagagctatatggccgtaaggtactacaagttcaccatgcactaccaatttgggacgagggcgtgagtacaccatgaattttggcatatactgaccacaccagaagatagtgaaggtctcacggtggttcatggctcaatttaaagggatggcgacctagctggctacccgcggtcactaagggacgacgttagtgcatggagaccacgtaacaaggaagcacagtgtggtagaatttgggtgcgggcgacaccgtgtcagaagtaccgagccacggtggccgtcggtgagatattcctgccccgtccctggcctaatccgcatgatggtgaatcggctcagagttatcctgccccggccatccctatctcctctttgtttggacacattcggattccacaatgatgtggatcttttcttcagatatttctcagtgtcgttgatcttccgtgctcgactaaactggctccctttaatcccctttttctcttgattcttgttaagaacatgttaatctccattaacaagaattgttcaccaaacaatggtcttcaaacttactataggattctaagacctaaactgaatagattccaagatatggtgctcacaaatcggtcacatttcattgcgaccattactgttctaaag

SEQ ID NO: 45189 - DNA, 345 bp, Zea Mays
gcgagttaggcgaatccggtgaactcgccgccacgggcagggcggtgccaccatgttcggtagcagagggaaggaggagggcaagagggtcgttgatcttgtgtcatgcagtggagattagaaggtagcatatcccttcggccagagggtcgtccgattgtatcagggcgagtcagattaggcaggtggagtggcgtatcctcggccgtcgatcacgaatccaacggaacccgacacataccggttcaaggagattagcgatctaatctgaactgctagattagatcgtgtggctcacgtgtgtcgatacccttttagccggattctttcgtatatgagtccctg

SEQ ID NO: 45190 - DNA, 1938 bp, Zea Mays
ttgctcaatttgatagaaatactcaattaattgttgttttttgacagaaatactccatattatttgacagaaatacataatactcaactagtacttttttggtttttgaatatagtgtcatcatcaatttacaagttgaagtgtccaagttcggtcatgcttttatagggctgggcacttttagaccgaaaaccgatcaccgaactgaactgaaccgaaccgaaccgaaatatcggtttttttagttgttcggttcggtgtcggttctcaaattttacgaaccgaagggttcagcttgacttcggtttatatgtgctgaaaaccgatataccgaggaaccgattaggactattgtctgttgtgcgcgtttaacttctgagcagcccatatagcttacaggcccattaaacaattccaagtcacaaattctcaggccttatgccctcacgacaagctcatggcacgaagccaaccttatcccttccatgtttgtccctgtattgagaacccgagcaagacgcagaaccaacaacaacgaagacaacaagcagcagaggtacgaagactcaaaacttcggtacaaaccgaacaccccgatcaaaccgaagccgaaatcgtcggttgttcatatttgtttccaccgatcggttcctatttcttcccaaaccgaagttctactgcaccgaagaaccgaaccgaactgtcggttaaaaccgattgcccaccccttgagtacttttaagccagcttaaacttagttcctaaatattccattgcttggcagcacgccctaactccattccgggatccgccatggggtatgcctgccccttatcttctatttctcctgtcctgtgcaaaactgagcacccgaaccctcatctaagctatttggtcatctgtattcaaatcagatctaaagcgcatacatgttacatatagtatgcctactaacttgattattttccccaaaaattatcgggtgtacatgtgtacacccatgcctttattggatccgcgcctggtagccacgggtgaggaccgatttactgagctgccgagagaatttctaatttcaactttttgtctggttctagcataattgatattgtcgtttagctaatcagtgtgcatgtactaccgtagagagtagagctatgcaaatgaactagaagtcgattaatttgaagacttagtgggcaagatacttttggattggacatttttttaaaggttggattggacattttattttggcttgggaatggcaatacccatattttgttctcactggacgccactacaaatattgtttataactttggtttcatcatacttactgaacagaaattgtactttacccatttattttgctagcatatgtcttttattatcaactcttttcttgtttcagcacgttttgaggaaatgcagaccataaagcgcttgccaaagagtgtccatagttccttgcgctcaggtgttattctgtctgacctgccaagggttattgaggagttgatatataatagcattgatgcaaatgcgagtaaggtattgctttacgtgtggaaaaagggaaaaagcagcgtataatgtcttctatgccatcaattatcatcaacatacatttattctatttgaatttcagattgacattgcagtaaacatcagagcttgttatgtaaaagtggaagatgatggtacgtacctatcctttttctttttgtgtaaaaaaatattatagatgttatctttcaaaaacattattgccatacatcgtacgaatttcaggttgtggtattacacgagatgaactggttctcttgggagaaaaatatagtaagccagaacttattattatttatttgctatctttctcagttttccttcatttcatgagactgtttctcatgttaaattctatgcagtaaatga

SEQ ID NO: 45191 - DNA, 343 bp, Zea Mays
gcatgagtactacgaccaccttcactttgacgccatgcacaagctcaataagcggggcatagtgcatggactggcccacatcgagcacatccactagccctacgccaattgtgtaaccacaaagcggaagaggagttcattcccatcataagcaaagcgatagatgaaggggctactagacttgttttttggcgacatgtgcggttccttcatgtcggcgacacacgatggtaagcagtacttccttctattagttgatgatcggaacaggtacatgtaggtggtattgctcactgccaagagtgacacactcattgctgccaaaaaattccaagcaaaagtg

SEQ ID NO: 45192 - DNA, 432 bp, Zea Mays
caaagagtgaattccacttgttagacttttctctcatccctcttcttctggtccatgcatggggaggagcctacgacctaggttcgtcggatgagaaatccgcgacaaagctgtgaacacttgctcgctcgctcgccatgatggaatcctgctcagttagcctaagttgtctaattaaactcgcctcttaaaagtatgactgtctattttaaatctgatcacacaccctatttcatcttgatcggtaaaaaaacgaaaggtcctactttatgcctttgtcttgagtcattttatttcggttttcttcttcctgtttcaatgttgagtatttgatcatcctttctagcaatcatcatccttttctatggttgctaaccttgctcaaatttttgtttgtgggtttaatcatctatcttagtcaaaatacttaag

SEQ ID NO: 45193 - DNA, 1036 bp, Zea Mays
gaagagagtcactattatgcacatgcaaattgttttcaaccaagttattttattcattacaccagcacattacaagcataagactactactggtggaactacacgagagcgttccccgaggtactaccgaactccttctctaaggtgtccccaaattccttgagaagatcatcaaggcttgctagggatatatcctcggcgtcggaccaatcatctattctggggggaggtggggctggaggggtcttcttcttcttctctgtttggcatcctcggttggtggtcttcttctggattttcttcttgggagcgagcttccttagcttcttgtcatagtccatctttaaggtccgataggcctcacgggtgttggcttcctcgccttctgctatgtcaagactctcctggagagatgccttctcttgcttaagctctttgacctgctgctctaggctttccactcgggaatttaggtgggtacagtgggaggagagctcatcgtagtggttgtcgagggtgtggaggtatccggccatgtagacgatagtggggtcatcttctgtgggatctcctcctgacagagcctggagtcttttcctccaggtgggggtgtttttgttgctgggtggaaagtatcgaagggggtctcggagatctctcggctgtagttttggcacagttgtttaagggcttttcgggcaacgccctggcaagggtctgggaagcggtgcccgatgaaggtaattttgaagggagggtggtttgggtagttccggctttctcccaagtagactgccatagagcacttttctattccattttcacggtactccttccagacatattcgggcttcttgtggatccccatgcgtagcgcgcaactccgaagaaggtgaggaaagccttcctcctctgagcaataggatgtcctaatcacccaggggttttccatctggtagacgaaaagaaaggtatattaatttcggggaaaaggggaaagagtgtttcttgggggtaagaggtgttttcttgttta

SEQ ID NO: 45194 - DNA, 495 bp, Zea Mays
aaaatcacagcaatcctgaaccaaagttgactactttaaattaagaggaaagatgcataaaacacaactattggaacatgtcatttacaagtcttataaagccatgcaagttaaaccattgaaacagagcatgctatatgttgacatatagaacctacaaggtatgcaggcaagacaagcttctcaaatatgtggatagaatcaatttatgggcatcatttttagcctgaccttatgtgcttattaaagaaaatagtatttttaatgtctaacttgttcaaacttgatcctttgttctcctgtcaattttcactgttatattaaaagcaaacacatagtagaatagttgaaattggctagtaagatctgtgaaacagagagacaagcatattagtgaaacctcttcgctccaaatcttcactaaatttaaagaataaaacttagaactaacttgcagtaaagaaatcaacaaaaggacaatatattcaaataaat

SEQ ID NO: 45195 - DNA, 366 bp, Zea Mays
gcggccgtggtggtggaggtgattgaggtggccatagcgccccttggccgtcgccccttggcatgctggacgaaaggcatcagagctttgtgtggtctgttcaatgtgtgtgatgtgccgcgctatgctggttgctggctgccatttgtcaattcagacagagacatcttagctttgaatgggtggatggacaatataatccctccgatgttcctgcttcctagacagcttcatttagctagcatggccccgattaagctcctcaaacgctagctttgacttgtttctttcacactgctcaacgacatactactgcttctgtgtcctttcttgatccaacaaaagagcagctctggtaaacaaatt

SEQ ID NO: 45196 - DNA, 794 bp, Zea Mays
ctataaggcctcttggagataggtgcagtacccggttgcaattatatggcaaactcaatgtctcggtctaggacattccaagcaactcgtttggaaagacattaacatactcacaaaccattgagattttctcgaagggcaattcgatcatagaaaaggcacaagatcgtgtactcccttggcttggtagatacatggtaagctctccatagatcggggaatggatttcgatggctcgggccgcgacatcaattagggcttggtgtccggtcatccaatccattcctaaaatgatatccactgagtctaaccctagaatgagaagggtggtgctaaatattctacttcccaacaagatgggtacgtcacggttaacctggtatgttgcaaccttgcctcctgcgttgcaatcatatagccccctttggtctggtagaatggaaatcaacacttgacactaaacctttgggcgataaaactgtgtgatgcactagaatcaaagagaataactgcaggttggttaagaatggtgttgtatacttgatttcaatcccctggagaatttgagaatcaaggaaacacaagttagaaataaagacctttgtcctaagtttaacacttcctttagagtgttaattcgaaggacgaagggccacaggtagaattgtaaatgcaaaggacgcatgatgaaacaatatagtgatgtgtgagaacttatctccttttgccttagcattttttattatgtcttcattacaatagataaatttataggcatgcctttggctcttgga

SEQ ID NO: 45197 - DNA, 353 bp, Zea Mays
aaaaaagggtaaaaaaaccccaaaatgagaaatcggactcggtatctcacggacttacgtcccagcgaagtctcaccattacactaggcgaggattgctgacaaaacatccaatcgatattatattatctgtagacttcttctcttcaaaagacaacaaaatctacatcagttcagcagcacacacgacaacaatctctgctgtttccacaagtttcagcaagttatttccaccaagtttccagcaaggtattcatgaccaaaaacaacacacatgcatgaccacatttcaccaaacatcaatgaccagaatagcttacattacagcaagtttcagcagcactgaggacatca

SEQ ID NO: 45198 - DNA, 634 bp, Zea Mays
gtaaccagagccggaaggcctagggtgactaggaataggtcccagacctgggtagggaggaggaggaaagtggccagagccaaacggcctagggtcaccaggaatgggtccctgacccgggtagggaggaggaggagcagatgtatagaaggagtcgtcaaactcctcagtctcatcctcaggggtaacaaatggcctcttttatctagcttctccattagtttagtgattacattatatccatttaaaccaaattctttaatcattttatttttcatagcaagttgatcatcaagatcatcatctgtaaaaccaacattaaataaatgtaccttatctccttttgccatgaggcaagtaggagtgttggaatcgtcggagaggttggtgaagagtcgtgaggtcaatgtggattgaatgacgatgtttgccacctcttcctcttcttctgagctagaactctcctcgttggagttccactcttcaccgatgtgagcttggctatacttcttcttctcttgaagtatcccttgctcttgcctctcttcttgaacttgtcctttttgtggtccttcttagcttcttgttcctttttatctgtataatccactatgaaatgaccggtttggccaca

SEQ ID NO: 45199 - DNA, 872 bp, Zea Mays
gtatgcgctcggttctgccccctggaaccgggtgtgacagaagtggtatcaaagctatgctgaccctaggtcgttatactaatagctaatttcattcttataaattattttatcagccttacctctttaaaatttcaattgagttgacatttctcttgtagatggtttgtactctccaaactacccaggtcaacaccaactatgcccctctgccacggcaaattcctgtctacccagtggtagtagaggaagttccagtggatctccctcacattcgagtggagcatggagtcatcctggaggacagctcggaggaacttctgtcgacgcccaccccgttggcagagtcactagccttcgcagctaggtcatcgacctcgacattgcttgcaccagccgttcaagctcctgcacccggaggcgacgacccagacgactctggggacgacgatgatgtggatgacaacgacaacgaggacgaagaagaacaagtcaacgaggaagccaactacgcccagcaggactacttcatggggtttggtcctgtcgtcaaacattacacatcaatgttcgagacggggcacttccccaacctgctgcaggatgtgctgcgtgcgttaggaacctacgtccgccccttgtacaaaacaaggcgagtgagcgagcctctccgggcttgctactacatcactcgcgtccacgtcatggtgatggatgcaggggataggggattcaggactctgtctgctcatgagtccctgacaccgctatccacctacgatgcctcggtcagcaatgctgccaaacggaccctgtggtctctcaaccacacctaccggcagcagctgcatgacacaaggttcaggcatctt

SEQ ID NO: 45200 - DNA, 1839 bp, Zea Mays
atcatttcaccaaaggtttcagatagttcaatctgcttcgaaacaatcatctgatggctcagctaaagagaatcacaatacttatccacctccttgtcatgagcatcaaacattgattcaaacattggtcgatgcggggagggcaaacatttcagcttgttgccaatcaaatgcttgatacgtggcacatatatgttgaaaacgtcagaaacgggccgttctggtgcaatgacgtaacacgtttctgaacggctacgaaactgtataaagcccagttacaactgttagcagtaattaaaattgtaacatctgcataacaggacaaaaaatgtttatgtctaacctctgcatggccgaatggttcaccagttttacggggggcgggggacgtctgtcacccctagccaaatctcttatggtctcattatcaaaaaacttaatgcggggagtaccatatttgttatcaggagatgcagggtgatgtaagtgatcaagatagtaaatctaaaaaaaagaatgcaaaaaatatataattagtacaaaacaaatatttgcatatcatatgtatgcacagtaaacaaaagaattacttactagaacaaaacatccatatattgttgctgtaatgtttgttttgttccttttgtgccaacgtgtggcagcatcacacaaatccgtgtaaactagttgacaccagtcaatatcagccatccgggccatgtttgaagtcattagtacctcattgtttgtaatgccccatgaagcagatggaaaaagaagtcgattgaatagaatcagaaaaaagcatctgattgataactcatcatcattgccaagcactatcttgtcctgaagcttgataacatcaaattcttctttacaaattttgagatcacgtctcagttttgcagcagcatccacttcaccataccaatcagtaaactccctgccccctccagcacatggcaaacccaaaataagacgaaccgtctcttttgttatcttcagttccttgccagcccctgggcgtatggtcatgtcatgtggatccaatttatccatcaaccacctgatgagagatctgctctctaagacatcagttcgcaaatcaaatatactagaaaatcccaacctagcgactgcatcgcgctgccgatcgctcattatccaagttgagacaataacatcataaggaatgcagcggatattcaatttctgaaagcataaatgaatatgcattaatacacgaagtatatatattgttataactaaggatactatacatacatacaagtgatatttattagaagcttgtaaataactagtctacaacactaacaaaaataaacagcataccaaaaataataatatacaaaaatgtaacgtggggggaaatacaaaatagattgtgcaccaaaattaacacataaataaacagaaatatatacatagtcactgggattttctaggagtcttctgtttaggagagctttttttgtaatgatatttgacttgacatctatatcaaactttgaactgcttttcacactcggaacttatggggaagggacttttatcttctttgcactgtttttttctgaaggggaaggtgatgctgatctgaattggcgcttcaaagatggagtatccatgaaatcatcatcggacagtgtggatggagctgaaggaggatttctttttacacgacgagcttgtgcctttctgcgaaaacgatgaactggtgctggttgtggctcagtctgctgctggttatgtggattatcatcttgatgtgctgagctgctagatcaagttcgtctggatatgtcaacggaaaaa

SEQ ID NO: 45201 - DNA, 591 bp, Zea Mays
gtccaagaaagttgagtttgactagtatgacagctgacagtaacactaacacacaccaaccaatcttgtagagaatcgtatcctcgatcttggagcaatcatgaggcagtaacataccaagacaatgaagcatgtgagcacgatcgatggtgaagctgacaaagcaactaattaccactcacaaaccacgtcgcatttttgcatatgctgattggctgcttctgatcccttccacttcgaacagtgagcagagctcgcaactccgacccacaagctttgcctgctttcgaggatgcatggcgcgccccaggtcagctgcctccaacgatgattgtctcgttagttgcatttcctggaatgtctaatcttgctaaactgcaggttcagagtcttatgttttctttctgtcttagttttctcacgaaaagatcgttttcatatgtgactgtctccactatccaggaagcaaaagaatgttctgccacaggcacactgggagtctgggacgattctgattgttgacaagtataaaagtgaattagccataagtgcacccttttttttattccatcgacttaagctacatgcaat

SEQ ID NO: 45202 - DNA, 328 bp, Zea Mays
gagtagtggttgttcacgtcagtgttggggttgtgtgtaggagcggtgttgattattagcaaatgctatgtgaatgtttgtactaagtttaattcccacaacaggtggtggggctccggatcgtacctagtgccattccgaattctcggcgaaggcaagtaaaatgcagtggtggtttgctatcgcttgattcgtatcttattccctgtcattgagtattcatatgtattgcatgtgttgaacatggaattctatgatgatgttttattttatcgaaagtattgatggtatatgttaataatgttgatgaacatgatttgagaatgat

SEQ ID NO: 45203 - DNA, 418 bp, Zea Mays
gtatattgccatagtgttgagatcgtcttgtacatgtactcatgctgtaggggttgatacgtactttcatagtggcaggacctatgacctaagatcacaccatgggtacaacgtagttgataaacggtgtagctgcttgcactttataatgcttgcaggtatgttggcaaattcaggcgtgactacaaggacaatggcacgcactgtacaatgatcccaggtacccttgctatccattgttgtgcctacagggacaatgtacagtggtcatgggtacacctgctacctccgttacggcaacagtgcacctctttgagcataatgtctcatgtcacatttaatatgatggaggaagccttatcttaacagctcagcacccggtggttgtcctaggtaggggtatacatggcaccagggt

SEQ ID NO: 45204 - DNA, 592 bp, Zea Mays
agacaaccgagtgaccaacacgcatacaaacaacgcgtcttcaccgaggtaaaacaattggttttaccgcgacatagtagctccttctcgaggaagctaccgacggccaacccccaccttggcctataaaaggagtaggtcagtcatgagatgaaagggggacaccagaagaggaatgaccaacataggcaatgtatgctcgatgagaccagaaggcttagaggccggagccaaggcttattttaggaccctagtctcatagtcttaggtgcactgtaacaccccaagtgttactagggttctgcttggcaccttcactagctttaccctcacaagtagggtaagactacaataagtgaagccatgctcaggaactaagaccttaagtaaataccaagttatcatgagtcgtcaccaaacaaatcttcttatgatcagtagaaaggtaaggtgacccaaaaaccctaaaatgccataccttgagcgaaagaaaatcagataaggaaactaaatgaaccctactatcaggacatggaccagtgagttaataaggtaatacaccaagttgtttcctacaagttagactataaat

SEQ ID NO: 45205 - DNA, 622 bp, Zea Mays
gtgcgtggtggattactattgtcctggggtgggcggtggcaggaatttcttgctaggggacctccctcaccgccggcttgccactcatcgacgccatgcccctacactacttaactggtggtaagagagctccagccgtattcacctcgtccttctcatcacgaatcactagcttgttaggggagggggtgccttggcgccgttttggtgtgtcaccggtgtgggctcgccgtaggactgggcggcgccgccgcgacaggccacgcagggaggtgatggctgccgtacgtggatctatgaatgtgctgccaggattaggtcatgcataccgtttcacacatatcaaatctcagtcgtaagattctagatgaacgggtggcgttgcatcgggcttaataatatctggctcatcgattgctgatccgacaaccaactttgcataacggttcgtagcgcccggggttttaatccgaaccattcacttttgatcgttcgaccagaatttcccggtacccccatcggtcatgctaaattgctaaagagccccttaagtttttcataatcaacccgtcatccacacaagtatggaattgttataaaagtcctcggatttcacaactcg

SEQ ID NO: 45206 - DNA, 811 bp, Zea Mays
atttgaggagaacgtaccgagtcgagttgatttgatgctgaggggtaaaacttcgaacgttggtgcttctccttcatactctgcctggaatcttcccccaatggtaagtgtcggtatgtaagagtttttgtattgccacatgtagtgcttttagcgtttcatcttgttattgcagaggcccatttcaaagttcgtgtccaacccacctgctcaagacgggagcccaggccatagagtgcgaccttcttcagatgagattgaggccctcatgcgcataggggttttcctaaataggagaaatagactcacttccggatgcagccagttgccgatgatgttgaggtgaacgtcgttctaaatgtattggctggagagttgtccgagtccgctcaagatgagtcggtagttctattatcaagcgtgtgtgtggtggggaaaaagaacctacaaccctagtagtgctcgtcgcaagcgaacacgccaggtaggctcccctgtcgtgtccaccgatatgaagaggtggaaaataaaactttggtgctcatccggcttagagctggatgctgactccactgctctagattctggtgatgaaccgacgagcgtcgatcttgaagatgacattgaaagttgcggtggcaccagagctagtaggtatgtttcagaggaggaagaggatgaagcagatgtgccttctttggttcgtaggaatcgtcgtagcaaggccagcaattatgtcccagtccaagctctctcggggctagttagccttcaggggatgacaatgtccgccattgaccatgcgttggag

SEQ ID NO: 45207 - DNA, 315 bp, Zea Mays
gaagggggaaaaaagacctacctttcgccaaaaatgttctcgggacgtttacaatcatcggactgcgctccccggtccagcgcattgagtttcatcatgatatgggaccaaggaaacagagcgttagagcagtcccaacccatgaagcccataagtagagtctatgctatcacatcatcaagaaatgagttgtagaaactacatcttccaacccaaacggcgaaactcacacatgccgaggggtcgcaagctgcgtgcatggtatccgaggctttactacggtcccataaaacatgtggtagaagtggtgtcttg

SEQ ID NO: 45208 - DNA, 348 bp, Zea Mays
ctaaatggtacttctacatgtggcgcttttaatacgagggccgaagataaatattttctaatgagatcaaatgcttcctgttgctctgccccccatgtgaattcagcatcatttttaagccgaaggatgggagtgaaggcatcaattttaccggccaggttagaaatgaacctccgtaaataatttaccttaccgaggaacttttgcatttcaagcttataggtcggaggtctcacattccaaattgatttaattcgatcagggtctatctctataccatgttcatgaatgatgaatcctaagaacttaccagccgacattgcaaaagcacatttacgtgggttcatt

SEQ ID NO: 45209 - DNA, 481 bp, Zea Mays
cattgtctatgcttcacctattcattctattagatcttatctcactcttgtgcttgcgacatctttgtagatgacccctgactatagcctttagtcttttgggattctttcctcttccattattaaattgctatcattttgtaatctctattccattagtattgacatgctcgtatccttgcatttttagtacccttatcccttaattcaaagtacttacccttgtacctctattgcctatttacatagttcaatttatatgaccatgaccttcttgtcttctaagatcccttccgattctatggttaagtcgttattctttggcgttttctattcccttctctaggtatgctcgtatccttggagtcttgcatactattgtattttcatgtatgcttatcttcatacccttgtttgtttaagacatttcagttaacatgtccttgaccacccttgtttcttagggatcattttattttgc

SEQ ID NO: 45210 - DNA, 742 bp, Zea Mays
gagaaggcttcgaagaagagaaaaaccactcctgaaccgaaggtggcagctttgaaaaagagaaaagctgcaactccagagttgaaaacgactgagcccactgaggaaattccctcaacgccttctgctgtcaacgtggaagaaatcctaaaggtaatgactgaaaccctgcctaccaagctaagtcctctggggccgcatctgacaaaactttttcagaagggaaaggagcctttaattacgaataaggcagctgggccgaagaagcgaagaatcattacagtaacagaagctatccaaggaacgccattattagcctcggcttcaaaaactccagccattgaggaagctacagccgttgaaggtgcacttgctgaagctgcgactgccgaagatgcaactctggaaagcacgctctctgacattgatagagtacttcaggacatagctgcagaagaagctgccacagccgccgaagagaccatggccgcagtgcctagaaaggaaatagctgaagatacttcggaagaagaagatttcaacttccaaaacttagtaggacaagaattgacaaaggctgaaaaagaggacttaagagagtatgccatctcctgcgggtatcggccgggagcactaatcttcggcggtgtcgacgatgaaaagttaggctgtgttagagatcaaactggagcgaaggttatcgatactctatcgaagagtattggtttcccgaagcttgaaa

SEQ ID NO: 45211 - DNA, 325 bp, Zea Mays
cgacctccatcacatccaaggcttcttttatgatggggtcagcctcagggttgaatggctccggaggtggcgaaaggtcggctgtagcaaagcatatggtaattagggttcgaagccataaacaaataataaagcaaaagagcattaaatagaagtacctataatcaatgcacgtatgacaacttcttcagcttcttttgcctctactcgggcatcttgggattctttttcatttttctttattgcttcgtcggctatctcgcgaccgcccttcatccaaacaccggaataaaatttcccacccattagagtagcttcgactaaa

SEQ ID NO: 45212 - DNA, 320 bp, Zea Mays
gacaaagtcagcaaccacaccctctgcagtcaaacctctctccttcaacaatccaacttcagccaacagagcccttgcctcggccacctcctggtctgtgggggattcggtccagctcggagtacgaacatccggctgtctccctgaccgtggtgggagggaattcccatgattctccacgataaaccactctaagcgccatcctttgatgctgtctttgagcgggatgtcaaggtaatcagtcttcctcccacggcgcatctccaagctcgcgccccctaccagttggtgctgccctccggccatcccaggccgacaat

SEQ ID NO: 45213 - DNA, 1378 bp, Zea Mays
cattcataaggatagggagaaaaagaacaacccacataatattcaattttcatcaatatgttagtaaaactgtaactaaagcagtataaaagcagaacaataagtgtctatatatgtagaaatacaaattagatatattgtttatatattattaatcaagtccacagatatttaattatcaccttaaatgatcctggcaattgggtaaagcatcaaaccaagcaaaaaatgcatagataaaattcagggaactttatagaatgtcagacaacttgtagagttcatcaactaaaactaattcaactgaactttcaactagcatatcatccataaatgggagcataccatcaaaatgacaacatgtaaaggtattctcccagcatcaatcacattattgacgtttgttttgttgtcatgcatgcatggtttcagatgagtaagttgtcttgatgctttttcaccactaagccacaagatacttgcagattttatggataaaacttagtttctccaaactaagtgactctacgactcacgttttttcagggttactggagtatcccagtccagatatcatcaaacaaccgatactttctgtaaatttgaaatatagtgaaaaatgccaaggaagttctttattcagcacagcatgttcactccactcatcaaattcaatgatatttcggctggtggtaaaagttcattttgaaatgtttttttctcagaaaccagtacatacttgaatgctcaatggaatatagcaggtttaaggagagagagggggggaggggaggagtaacatatttgactggacctagagtatcgctcaacgctcatcctcctttttcatgtttatttgcacctaatgcctaatagtatagcgctcttgatttccatgtatgatcagaggaatagagaagtaatatctgtttgacaaccaaatgcacattcaaatgcagtgtaacaagcattgagacctaagttgcgataagacgacactacgacagtacatgcagatagcacagaaaaaaatactagtgttcacgtatttctcacttccaaactactcacaaccaatcagagaaaagctaccaacaaaaaacaggatcaagctgaagctcagtccagttcaagcagtaagcgagttcaggacttcagatgcagcaagatgaaaccgaacactgaccgaggaagtgtgcgagcccttccagcccatcggggtcgcagaagtaccccaccgaaacattcattgacgccgccgcctgcaaaacaaagcacaattcacaacctcgaaatctcgcaccaaaatccaaaacccgtcgccaaaacccccgttcggtccatcctagcacgatcggtgtagcagaccttatcggtg

SEQ ID NO: 45214 - DNA, 316 bp, Zea Mays
cgtaaagtctacaatcgatttagatgtaattgatatggggttaggaaaaacaaggatggtccccattccgcaccatgccgtggtaactattgcgatagtggaggctaggtatggagcggtcagactttgtactgtcgacctttgggtcatgtccgattcacccgactctcgaaaccatgttcgattcggctaacccctaggtacgcctccgtcttgccctaccttcggacgttctcatctcgcaccaaggttccaccctcggacggggcggagattatctcatggggttagctaaggttcgtccatgccttagggg

SEQ ID NO: 45215 - DNA, 305 bp, Zea Mays
tagatgtcatcctagggatgaattggctagataagtatcaggcaattatcaattgtgataagaggacaatcaagttgatgtccccactaggagaggaagtggtgaccgagttagtcctgcctgagccaaagaaaggaagttgttatcagatggctgttgatagtggtgaaacagacccacttgagattatcaaggttgtatccgagttcccagacgtgttcccaaaggacttaccaggtatgccaccagagcgaaaagttgagtttgccatagagcttcttcctggcaccgcccccatctttaag

SEQ ID NO: 45216 - DNA, 629 bp, Zea Mays
gttttgaagccaaaacccaaaaaaaatcgttcatattgggtccaaaatcactgaagtcctcatgattagtctatttgatatgttttctccacgatcttgagttgttgacacgtggcatctttggtcctcaaatgttcgatcataaagttccctaatgtctttgctggactttggtcaaccgtcgtcttgacttagtcaacacatttcctactcctcatatacttttgcaccccatttagatgtaggcaataaaaattatagctggaattaaagtttattttcttagtattggactataactagaagttgtcactcacaattcatagcctagacccactgttttggctgaaattataattccaattacatctaaacaacagtacccttgtacttgacgatgttcctaattgtcgctcgtatacggtcagcgtgtcgggctctttgatttctcgctttaatcctcatagcgtatgagctcctagttatcgacatgaacatgtttcgtcgtctttttgtactccgcacccatgagccataaaatcaaaaggcatattacatgtatcacaaataccattaaggttagtcaatactaagcatagatcaattatcttatttgacgatcacctatg

SEQ ID NO: 45217 - DNA, 397 bp, Zea Mays
agtggggaaaagaaatacacaacagctggattgttaaaacaaatggatagttttgagtttgttcttgtattgcatcttatgatcagactattgggcaaaactaataatttgtcacagtgtttgcaaaggaaggatcaaaatattgttcgtgctatagggttgattgggacaacactgcagaaaatgaatgacatacgggagaatggttgggacgagttatttgcagaggtagaaaacttttgtcttctacatcacaccattgtgccaaagatggatgatacattaactgttcgaggtcgctcaagaggtcatgttggacagttggtaacatattttcatcacttcaaaaatgaaatctttaatgatgtccatgaccaaataattgtggaattaaata

SEQ ID NO: 45218 - DNA, 294 bp, Zea Mays
gacagagtgcaggcactacttgctacaagtgtgggaagactggacattatgcaaatgtttgcccacagaggattgctactaccccagttcaaaacaagcagcaaactctgggatctggcatgggattctctattgccagggttaatcaagtcagcactgatgctactcctgatggggatgacatcgcacttggtatgttttacattaatgcaattcctgcaacaatattatttgattctggtgctacacattcatttatgtctgctcgatatgccaacacaaatgagttaccac

SEQ ID NO: 45219 - DNA, 765 bp, Zea Mays
gaataattagggcggttccgccacagctggtatcagagcaaatacaaccacagagaaatcaataattcgtgaataccaacttttcaaaaataaaatctttcttagaaaccagtgttggaatcatcaggactagaacgctagacttaggacgaaaggccttaggaatagtgggaaaaataggtggctaattaagtaggccatatgggccagttttacaattgcaaggatgccctaaaagcacccttctgatcggtgaggagacgttcttttcagcaaataggaataataataagtaacataaggagtagaatcaaatctaacccacctccttttaacaacccgggcacatgtggtttttcctttccactaccgtaacgtttacgtctaatcctcttccacagatgacttcacccacccccgccaatggagaagacactcgtttcagttccgattttctttcccacatgggtttgccttccatcttgtgggaggcgttcagctccgccggttaccctacaccccctttgtacacggtgcagctgtatgaggagcatcgggtgccacgttgctgagtctggctgactctggaggctcaccccctttagcttggttggtgttcccttgactccgagactattggattcaggttggacgacaccaccgaggctgcagctatgaagactctgacgactttctgtggctaccatcccttggagatggtaatgcacccactgggactcatccccgttgaaaagagtgatgacc

SEQ ID NO: 45220 - DNA, 837 bp, Zea Mays
ataattcaaggaactctgagcaaaggaacgcttgctgagtttcatgtatagctaatcagtctggagttgagtgaggactgtagcaagatgttggacatgttgttccaaggaaggactgtatatgagaattttcatagaaatggagccaaaatgtcgttcatcaggcactgaaatgtagccggagcattcgtcaagccaaatggcatgacccaaaactggaaatgtccatgatgtgttttgaaagcggttttgaattcatcctctgggtgcatcctcacttgatgataactggagcacatatccaatttggtaaaatactgagtacccgctaactcatctaggatctcatctataataggtaaaggaaatatgttcttgatggtgaggttgttcaacttgcggcaatctacgcagaagcgctaggtaccatcttttttttgcaccaagagaataggataggcgaaagggttgttgcttggaacaattttacctgaagataatagctccttgacttgtttctctatctcatctttgtgtaagggggaatatctgtatggcctagaattgacaggaacgacattggggatgaggggaatatgatggtcataaaacctattgagtgggagaccactaggttctgtgaacacatcagcataatcatgtaaaagtgcctacactaggggtggaggtgaagaactgactaggggttccaacatatccataatagccatggcaccaatgtcatcacctctgacccacttagccaactgaattggtgtgatactatgaaaatcctagaattgaggtgtgatgccttgcaactcgatcaattcatcg

SEQ ID NO: 45221 - DNA, 439 bp, Zea Mays
ggggctttcgaccgcggatcgatgatcttgcggctaggattaaatgggcgataccggttcggtggggtggatttgcgccgttcgatctggattgggcgcgccgaaatcaacccgactgttttaaatcctaggcgttggtcattgatcggatgacacacactgcatgccgtttcagatgtgaggacttctaatctgaaccttggattcgcgatctgacggcccagataataagataccccttcgctgcgcgcactttctaaaagaggccctggggtttcatctattcaacccgccgtccacgcggggtgaatatgggtcttgggaaattttgcgagttaacccctgcgttcctctgcttttgacgcccggtctagtgaaccaagaaaatagtaaaaataatatagtaaatactttttagtacataaataaacctagaaac

SEQ ID NO: 45222 - DNA, 439 bp, Zea Mays
gttgtgatgccttttatgtaaccgcgtagaagaagagagagagatagctatgcttatgataaagaagatgtgtgttattgtttgtatatgataatttttatttaccatgtgggtattgatagtgatgcctacatgatgaatcattttgaggagcaatgcttgttttcattattggccccaatgttttccaagattggacattatggaaggccttgacctcccaccggtttattaggtaggtctcctttatcttgcactaagacttctcatgttcatatccttaggcattggacatatggaccatacaaaggtgaaaggaccatcaagatcctatttaggtccattaaatatatatgtagttagaagtagaagtggcaagtcaagaggactggtatgtcatacgtcacatgggtgcatgtcacatcggagtgagctagcg

SEQ ID NO: 45223 - DNA, 940 bp, Zea Mays
ttcccctttccttgatttgagttcccagaaatctgctgaaagttggatttgttttgcttcgaatatgggcagtccttgttgaaatgcccagactttacacaattgaagcaaccactggaggaactgggaagggcagggaaatgagtaccagggtcactcggctgattggtcggagcgggggcaggagtgggacaaataaatatgggttgtctgaatggatatgtaggtgggcgaggagaagaacgatttggattaaaaggtcggattaccaaccttgttctcttttcaggtctttgagttgatctttcacccgcatatccctttgactctccttgtcccgcatttttggcttcaactgacagtgttgttctgacagccctgctgtatgtgaggtctaggcacgttgccatcttacgctggagtctgtcatttagtcccctcataaagcaattcttctttttcaagtctgtatccacttagtcaatggcgtactgggagaggtgattgaatttattgagatactgcatcacagaatctccccgttgctttagtcggatgaactcttctagtttcatttgtagcactccttccggaacataatgttccctaaatgccagtttgaattcttcccaagtgacttgatgtcccgcaggttggatggcggaaaagtttgcccaccaggtgctagcggggcctcttaactgctgagcggcaaataggggcttttgtacctcggtgcatcggattagcccgaatttttgttccatcacccgcacccattcattagcttccaagggtttctctgccttgacgaagagcgatgggtaggttttggagaactctagataggtagtgtcgcgtggtccttgtgggtgacctctccctccgtgttgttgaaattggtttcccgccatttcacgcagaaagcgcgtgttgtcgg

SEQ ID NO: 45224 - DNA, 616 bp, Zea Mays
ggaaatctgactggttcgagatgcccacctttttgtttgacaaaacaaacttgtatacttgaacctctgttgtgggagtctgacttacgagtactgcaaatatattaccatgggtttcctttcctcggcagcgcatggttattgaacatggtataatcaggtgttgttccatcactggttttccagaacgaacagtggactgctgcaccttttcgtttgtcctgtgggatggaagtacttgaagtgtgcaagttgtgcatgtatacattgttcttgcgtgtggcttaaggttcctcctgggctactgcttttgctctttgcgacatgtggatcacattttgtttggaatcaatgtctctattattttgtgctgaagttcattcttgtgcatagtcggttattgccttgttggaacagcaaagaaggtgaaatcaaggtgagctgtttactgaagctatgactacgaagtgtccactgcatccttcatccagtgtatctcagataagtttgcgtctgtcaggtcttgcacttccagtttcaactacgcttgattctgtgaatttttttcacatctctgcagcagctaatcgttttctgaacctgggcttgttcgttt

SEQ ID NO: 45225 - DNA, 665 bp, Zea Mays
gttgccagagcatgggggtgatgtttgtggcatcgtcgagtgagcagtgagctcaaactattggcaaattctcgtcggcgttgttgccgcacggcggacccgccccgcttcgtcgctagggctcgctacttcgtgatacacgatgagaatcccctcggtcgactcctctctacatctgcattccgtaatacttttgggatcgtattttgaggcgcggttgcgtagcattgtggtctccggcgatgtgtgccactgtggagtgggggtggcgccaccctagattgaccgaaagggggtgtgtgttcgggagatgcccaggtgccgtcggattccaagcctgtggccgagactaaaaccagtagttaccgattcgggctttgaaccttggatgttgatcggcgatcggtcgacccttgtgatcgtgggcctccgacatctgagggctcctgttgaatgtggcccatgatctaatccgaaccattgacttttgatcagtggccgagatctgtccatacctcttcgccggggtctttttatttaagagccccggagaattatattattaacctgccagccatctccagtgcaaatttaatcacaaactagtccttttttcttttaatttgaaccagagcattataattgtcggcgttccgagatcgggg

SEQ ID NO: 45226 - DNA, 844 bp, Zea Mays
tgaagatagaagctttttgagtcctccgtatcaacaaggttgtcaattcgttgtgccatctgatagccacctaaagtgaccacagccagtgactgtatggtcgaacaaaaggaataagtgaaaaaaatatataagatatcaaacctaatatgcatttgactctagctgaaacagactataaataaaccagcagaaagtataatgctctaaagtacagttaatggttgcgttatgtattatttagaaatgaactccacaataaaacacaccaaattaagttttgcaacagttaatgtttgatgtaataaagtaggattcttacaaataaaagtgggatggatataaatagaacacacacgcaaatttctgtaaacatcatcaggtatcgaacagatcagcaagacaccaacagcagcatatgtgacaaataaaaccacgagacatgccatactatgacaatcagagatgacagatacaacatactctcaaatgaggtgtattaccttacctgtgtttctcccctcgtgaacagagcactaccatgagctcttggaagtaagccacattgagaattgatgggccgaagttcccaaggactccgtccatcacttcgctttcctcgctgaaatttgaggcattgatattccatacaaaaatttccatattaaatcacatgaaagtcccaaggaactgtgattaccagacagaatgatgtagctcactagaaaaatcaataatcagtcacaatagaagaacaaagccatgtatcgcaggcattggcgcacatacacaatgctagactgtgagaggacccctattctaaactgaccttattagtttcatt

SEQ ID NO: 45227 - DNA, 379 bp, Zea Mays
attatctctagggcgtatttctaacaatttcgtcttcaacttcgagagataacttgtaaccagagagacaacgaacaattccatagccagaaaccacagaacctagggtattatgctcacgagcgacccgaacctgcataatctcttgtgtccccgatgtgctctacacataccatcaagctatgatcgacgttgtcgtcctctcgaaagcgctacgcggtactcctcgtagcatgttgccggtactcgacaccgatagctagcgcgccaggtaggggacgcgatgtcgatttccattagctccatggttgtcgtcttcaacatctgagagcgcctagagggggtgaataggtgaccccgcaaaaacttaactaaaaac

SEQ ID NO: 45228 - DNA, 420 bp, Zea Mays
gcaagatgatccggtaactccaattgatatgccaactctccaactcgcctaaaaactctgaatggtccaataacgcgaggggacaatttgcccttgactttaaatctcctcattccacaaagtggtgacatcttgaggtacacatgatcaccttcctcaaactccagtggtcttcttctattatcagcgtagctcttttgcctggtctgagctaccctcaagttctccgtgattacacagacttgttcttttgcctcttgaataagttcagatccgaagaactgtcttcctctagtcttatcccaatatagaggagttctgcatttcctgccacatagagtctcgaatagtgacatctttagactggcctgttaactattattatatgagaactcagcataaggtagactcttgtcccaa

SEQ ID NO: 45229 - DNA, 445 bp, Zea Mays
ctcgcaagccaaagaagaggatatgaccaagggaaagataggtaaagtacaaatctcagaatgagacggaagaggggcgattttaaagggcaggtatgagataaaaatcaatgtagaatatagaggtgtcaatggtaaagatgatattaatgaaaagtataacaaaggatagagttaaggcaagactcgcgaagtgacaaagtgaagataacaatcaaggataagataggtaaggttccaacagaaggattgatgtaaatattcccttatcgggggaagttataaggaagcaacgagatcactaaggatgtgcgagataaaatgatcgaccatggatcgttaagaaataagggtggtcaagggcatgttaacttaaatgtcttaaacagacattagggtatgaagataagcatatataaagatataggagtatacaagactctaa

SEQ ID NO: 45230 - DNA, 1087 bp, Zea Mays
gttgttcctaagatgaaaggggaggctttgggtaccattagtgaacctgtgactgaggtatccagggtagttgctgaagatgttttggtcgacccggctaaggggtcaaaagacgacaatgaatacatatagattgaggaagatagcaacgatatctggtccacaaaagcaagccatgtggactttgaaaaatcaacgatcaaggaggtgtcatattcaggtattgactgagtcccattatatcagtgatgctagcttggtttgatttggtggtgaagacaccacaccgatgccaaaggaggacgaagttgttgtttttcaaagctttctgaaggctaggcttcggtttctactgcataaaatggtggtggctgtcctgaatagattcaatatatatttgcaccaggttaccccaaacgccatcaagaggcttggggtcttcatctaggctgtgtgaagccaaggcatatagcctaatgcagagtgcttctgccagatccatgagttgcactaccagacgaagacggttggaacggaccatcttcacaataacttcaaatgttattacttcgcttaccgaaagaagcacagttcccggctcttgtatatcgtagcaagtggctgaatgtctgggagaaggaatggttttacatgaagaatggcttagagaagagggaggatatcaagggcataatttgaaatcctattcaacctagcttcaggttcaaaaaccaacttgttacatgaacttcgaagcccaggattccctgattgctttcaacgtcgtctgcacccacattggaacaagggatcttgtgcaagagcattcggcgttcaacacatggtcgttggtagctggatggagtacgctagagttgacaaaggatagtgctttggtgacagagcatgtactggtaggttgaaatttacatacaaatttgaatttgggtttggagaaccatgtgatgagtggttagaggctatagaggagatgtgtaacaaaatcctcgggaattataacaagaaggaggacgaagctctgagtatggtatttggagccttaaaaaacgtcggttaaaccgcgttt

SEQ ID NO: 45231 - DNA, 1146 bp, Zea Mays
cttgcatggactcacatacatgtgaggctcattaccccaagatttccaagccacccgagactgagccaatagacgctacaatcactaagtctacatctgtgatcaccatgcctgcaagatcgaaaccacttctctacttcctcgacatcctcgtcattaatggcagggcagacgatgactttgcctccgatgacaaacccacctaagcgagagaagacccccaacaacgcgatgcgcgtgaatgctagaatcgttgtcacaacatccagtgccaccacatcaccgacaaacgagactcgactcaactagtctcccgtgacaaagaatccaaggctggtgagaccccaaatgacaaggagtttcgccgatgaaggaatgtctggcgataggaccactgcaacattcaagagtctgtacgcggacaagaggtcgccgagcatggccacgggtacacgcatggacaacaacccatcctacacaacttgatgcttgtctttgctcggctcttgcagaccccaagccaagctagaggcatgctcgctcatattgccaatggcatcaccaactcgccagaaggggacgtttatcgacaaatccttactcaggcggcaaatcatttcgtgtcgatggctcctactgaggaagacgcacgtaaccacatcaacagtcattgtagggcatggaacaacatcgaggtatcactcacatgacaacacgacaaagagctaaggtgccgagaagaatacgatcggaaccacatcatcccacaacagaggcgcaacccagactcattctatcatagcttcaatgaacatccctacaaatactcgctcggtccatgatcacttgggcaaccgctttccacgatcattgccatgatgcctagaacgtcctgagcatgctcgaggtgtgcataggcccctcgaggcgtgttcggggtctcggccttcaccgatagacctcacgcgtacaatggccacaaaatccaaggtctcaaaagtcgacaagtatgaaactaagcaggacccgagcagttggttgactgtctactccactaccgcccgagctaccagagtaactgaaggcttggtggcagcataccttcccattgtgctgggacaggacgcactccagtggcattgccac

SEQ ID NO: 45232 - DNA, 625 bp, Zea Mays
caagtctcccactgcgaaggatcgatgtcgtatggccttatcatgatagcgcctccagaactgtatttaatcgttcttcctccagtatatcaatatcctccagtctagtagcttctgcctcagctatgttttcaaagatcagccttggtgccccaaacctgatatcagcaggtagtactgcctccgaaccattgaccatgaagaagggagtatttccatataaagctcggctaggttgagttcttaagctccaaaccacatactgcaactctctgatccacttccctgcgaacttttcattcttgtcgaagactttcttcctgagtgcttccaatatcattccattagccctttctacctgaccgttggctcttgggtgtgctactgatgtatatttgatctggatgcttctttgttcgcagaaatcaaagaattccaagctagtgaaattggatcccatgtcagttataatgctattcggtattccgaacctgaatattatatcttgtatgaattccactgccttagctgaagtcagagaagcgatgggtttgtactctatccatttagtgaatttgtcaatggcaaccagcacatgagtgtatactccctgagctttcttgaa

SEQ ID NO: 45233 - DNA, 378 bp, Zea Mays
ataccgtctagcgaaatggaacattctgtgccaacccaaagaccaaggaggcttaggaattagggatctagatattcaaaacaaggctttgctcagcaaatggctttatagacttttgacaactgatggaacttggcaacaactgatccacaacaaatacttgaatgtgaaaactatctcccaaaccttttggaaattaggggattcccatttttgggctgggctaataaaagtgaaacacgactttttgaggtttgggactttcacaataagaaatggttctcaggttaggttctgggaggacatctggctgggtacgtcgacccttcgtgaccaatacccttgtttgtaccatattgccagatataaacatctgag

SEQ ID NO: 45234 - DNA, 659 bp, Zea Mays
ctgtttaaaaataatgggaaccccagcattgaaaaatatgatgtagttattcctttaaagctaaattgtctaaaacttagagaaaatcagaaaggccttagaaattaatgaacagtgattaagattatttttcctagtttacttatgcaacagagaacctaggaaaaataaagagaccattaattggaccagttttaaattaaaatgttttatttagccttatttagactgaaaatcaattattagagtagcaaaactataaccaaaatgattaataaaaatccagtgaacttgtaaccaccaaagccccactacaaaaatacagagcacctcggcccaactttttaagtaaggaaaataaatatgaaatgctaatgaggtattttccaaataaatcatgaacaacccctaatgatgtgataatgggcaaccaaaaatttgctaagtccatgatgagataaaccaccagataaaaatgcgaacccatgaaaaagaagtaaacccataccttttgctaatgatttaagagagagaccacttaattcaaataatgcaaaccaccccttcccttaagcaaaaagagaccaaacttcagaatgattgctcttgcacaaaaaactaactatgaaaaatgagaactctattgtttgatgtttttc

SEQ ID NO: 45235 - DNA, 811 bp, Zea Mays
ccacaagcagttgtcattaattaccaaaacattaccaaaggggcctagatgattcacacctgccgagtaagaccgcgaggcgaagcagccgactaggtccccgtcgagcaagtctgtgaagcagaacgaccacccaggtcccaaccaagatagagaagcaaggtggaaaccaagtcaaacgtcgcaaagtccacgccaactaagacaagacatgacatcccgggtcatggcgagtcatcggaaaggtaggccgcgcgcacgcgcgagtgtccgctatcgtcatgacagcacctccccaagtacgttcctcaaacgcgctcccatagcctcaagggaccgaacaaccctatacataaagtacctcagcatcggagcttctacattgacccgaatatcgggtagtgcgcaatagatacaccataccgagtgtacgcctacacacgccaacgagtgacgcaggcttgtgacgactgacaaggctgcacagtgcatggctactctatacgactgacctacaggacccccacgcactaccacaagaatgtcattagaagatcgcacggacaggacaacacaccatgatgggagtacggctacgcacgaccccgcgaacaacatcagagaaaacacgctacccaaaggccatcgaccgagctccacagcaggatacatgtcctcactataaaatccagcccttgaactataaaagggaatgacccactctttttgaacacacaagcacaccggttgtaacacgtcccagagcaatactacgatcaacactacattgggctaaggcgtaagcctgaac

SEQ ID NO: 45236 - DNA, 1096 bp, Zea Mays
gcgacaaaccggtggctgaagtcttcctagtcatcgatgtagtggtgagggagatatcagatccattgtagcgtgtcttgcccaagaacaatgagcaagtacgctatcatgacgtcctctgttgccccggcgacccaggtggtagtcatgtagacgaccaaccagctgtctaggtcctgcttgggctcgtacttgtcgacgttggagaccttgaagttcggcgaccattgatattgctcttcctatcacctcatctcttccacatgtcggtgatcgcgcaaagcgttgatattgctccgtgcatctcaccgactgttgatggcgtggcttagatcattcggtggatgggccaggggaagaatatggttcgtcgcctaggtgaggatctgccggtaaccttccacgtccggggtgtgcgacaagccgttggtgatttgagctaggactcccccgacttcactcggcgtgttcaatgcccgagcgaagttagaaaacatgttccgagggagaagcgggttctcgcgttagagcctggtgtcctgctcagcttgttctcgttcgtgctcctaggcgtggtgacgatcacgacgttgggagttacaacgttcacggaatggtatatcgtcatgggtttcccctacttcagaggcatcatcccaggagacggattgtgtaggatcctgtccccggtctcgtggtgatgtcgtatgttacggcgcctattatgacgtcagcgtgcatcgtgctgagggggctcctcccccagtacagtgagctcgtcgtcggagataggcacgtcctctactcttccctagatgaagaggatgtccgtgaagaaagagctttatgcgatgcttcgtgctctgaccatctcctttgagggcagaatgctcagagtgattgtcggtcgtgtccccacggctacgctagtgctgggggcacctgcttctctttgctgagtgattcgagtccatgcccgagtgggtgacgaggataaggggtccgccacaacagaggtgcaaccttagtcggccgagccacagatgtcacaacgactctgggcccacccgacatagacataattctgcgcgaggcg

SEQ ID NO: 45237 - DNA, 1549 bp, Zea Mays
caatcgtggctcacggctttggctggtgctcaatcactgaattgtggttcccacatgtcatccctttcttctttcctcctcaccgaaacaagcgggcagtgccatgaacctcagacgactgtggaaacctgattctgggagatggggctccgcaccgcgcggcctcgccaccaaccgtgcctggggcccagggatttatccgcctggtgtatttccctcgcgaaaactctcccagagccatgcacagagttcgttatgaactaatcccgtgaataaagcatctgtctggccaactcggaatcatccgccgaactctgcgcgggttgttacaagcgtggtcgacgggctacataaatatggccgcgcttctcctttgggccatggctcagctgggagaacgcggcaccaagagagatcagtagagagggggatctagtgcaaggttggtcaccactggcgtccctcggtcgttggggacttacagcgcggtctgtgatcatcacttggtggtgggggagctccgcctagtctccaggaataagttcttggccacatcggcgcgattgggtggcgtcaacgctagaatccctcatcagagtatgggcgcggctgcaaatccgccctgcgccatggctgaccctgctcctgccttcttcatcggtgaggatctactccgttgactcagctcatcctctatacgtgtagcgccggtctacgaccgatttggggtgccataacctcgggtcaccggttcacaggaatgcatcgccggcttcaccgccatggttctcgcgcgctgccatctggggactatcgcggggaagaaaaccccctggccgtccgattgactatgggtggctggttggagaagatggcgtgggatggaaacggtgaccgttagatcggtaaggtacgatcaagattagaacaacagataacccttcggcactttgaatccgcgtcattgatcgtcgatccggtggtccggggtgatctcatttgtatgcacgtgtgtgtggtggtggggatcttgtgcggatcggatcccgtgcgcctcaccatgtgcaccggggtgtggcacgatctcagccagtcgtaggacgccacgtgtccttgtgcaggaatccgagattggttttgcagagaggcccctgtctttaaaggaaagtaactcggtgtgcgtgtatgtgcaaagtaattacatcaaagtccctagactttttaaatatacccctagaaacctttacagagttaaaataaataattaggaaacctagaaacttgtttatggcataacttactcgttttaattctgttttactccgttccagttgcgttaggttcataaaaatattctctacatactaaaaacattaatcataccatatctcatacttttatagttagatatttatttaacctatgtttagtagattaacctcactaaatcaaagttaatctgtttataattatagtttggctaaaatatgatccctaattatattatgatttaacttaaagttgaattaattattcatttaggttattt

SEQ ID NO: 45238 - DNA, 843 bp, Zea Mays
atcaatccttgcgcaaatattacattattaagcattttccatcaatgcttgcgcaatggcatcacgtacacctcccatatcttcttcatccacaagatcacttgtactagcacccatgtatccatcgacataagtctcatccgatgcaattctatcaaaatcttcatcacttgaattactatctctaataaaattatgcaacgccatacaagcaattatgatctttttttgcttctccattgagtaccttggcacatttagaagaatacgccatttcattttcaaaactccaaatgaacgttcgatgatgtttctaagtgatgagtgagcatggttgaacacctccttcaatccaatcggttggctgctattttgaaattctagaacgtggtacctttgacctttgtacggtgctagataaccctttcgatttggataacctgaatcaacaagataatactttccttgaggaggatgtggaaaatcatccttgtacttgttccacaaagtgtctctccatatccgtgtgtcatgagcagacccaggccatcctgccaccacaaatgtgaacctcatatcgaaatcacaaacaaccataacattctgactactatatccatgtcgattcatatgcactgcctgctctgatgatggtacaattactggaatatgggtgccatctattgctccaatgcaatttttaaaatgaggccaagatctatgctctcggatttttggatgcactacagcaaaggtaggatctttaggtttgatgatgtcagcagccaactggtttacacactccaaaacatcagtgaaccttcgactaatagtttctgtaga

SEQ ID NO: 45239 - DNA, 346 bp, Zea Mays
gctaggaactgacatatttgctcgtgcgtgctcttgccttggtcacctgaaaattttgcaaattagggtatccttgttccatggggtacgggtgataatcaaatcagctatcatagggtttccgatatgactgcccctagggatcatgctaactctgagattatctcggaataccctatctatctcctcccttactatgtcaatggcggtcgatggtagtccaccgaccctttgatctagtataggtgtggtttgaatattatgctgtctccccacccactagtttggttttgtggggtattagtgcttgccctatgtaactcatatggctggtcatccctttccg

SEQ ID NO: 45240 - DNA, 610 bp, Zea Mays
attttagagtcttgggttacgaaaatgctacactctcaagaaaagtacaagattaagcaagtttgagaaaaatgtgatgaagattttctatgtggatactccacatcaattagagcttatagagtttataacaaaactcaaagtacagttgaagaggtgcgtgatgatgagtttgatgaataaaatggatctcaagataagatgacaacttagacaatgtgtgaaatatctatcatatcaatgcaatgaataacatggaaattggcgattttaagtcaagaaaggtgatatatgtggaagatgacaaagatcaagtgatccctccatcaattatgcaaacaaataaccaacacagcacaagtagctttcatgatcaagattaatgtcaacaagtgcaatatcaataattggttggttcaactcaaataacacaaccaagtgactatccaagctcaagtcctcaaggccaagttctccaactgatcactattgtaatagatcatctagtggaccaaacagttagtgatttgagaagtggtgtgcaaacaagatcagaactatcatcattttatgaacactgctcattactatcatccattgagccaacaag

SEQ ID NO: 45241 - DNA, 362 bp, Zea Mays
catatatttctctgagaagattgctgaagacctttaaaatgatctagatcctaagaccatggcagagtgcactaagcgctcggattggatcaagtggaaagcaacaattgaagcggagttagcctcgctttacaaaagagaagttttctcagctgtaatgcctacaccacgtgatatcttccctgtgggatataagtgggttttcattcggaaacgaaatagaaatggtgaggtagtgagatataaagcaaggctagtagcacaagggtttacgcaaagaccaggcgttgatttcaacaaaacttattcaccagttatgagtgcaataacattccgatatttaatatctttggcagtacaaa

SEQ ID NO: 45242 - DNA, 800 bp, Zea Mays
atcagtatacgagttcttagttcttacactcgtttagagtgggctcaatggtttatagtgtgaattaaacggtcagaattactagttttggtacgtagctgtaatcagtgaaacatggataggtttagtttcgcaaatgactgctttgggcttgatcccttctgcagttctgttattctcagtgttgcctagtgacaattttcttacatagcactagctctcagttcattttagcttctaggagcaactggttctgtggcttgttgctgagaaactcactcaaaatatcttgtgtaccatttgtatcagcacgatgcatgatttactagttctgcccaaccaatatattcctatcaagagcaagagattttggcatgatgcaagaaatcgctttttactacaaagttcatagtctaacacaagattgagatcatggaaacaaggattatgcaacaaaccttgtttcttgggtagtaacatgttgatctcgctttgcattctcttttataaactattcaacattatgctcttgatttcagtgattcataaatgcatctacactgaagtagaattgatggcttaatcaagctatcactgatttgtactttaattattaaagtttgagtttgactgtgtttgaccattatcgatgcacaatgaccgaacacctccatagagtacatagctgtgttttgtttcatcttgcaataatttgtatgtaatcaagtgcatccttttgtttgcctccttttttattcaggatgtcaaaaaaaatccatttgtctacccagtcccagaat

SEQ ID NO: 45243 - DNA, 1999 bp, Zea Mays
caatcataacttagataatagatgggttgtgccacataatttatatctcctaaagaagtatcaagcacatataaatgtagaatatgtaaataagagtaaattgctcaaatacttatgcaaatatgttaacaaaggaccagataaagcaaccattatctttgaacatataaaaaagggagacaatgaaaatactgataaagagaaaaaagatattgatgaaatcaaggaatatttagactgcagatatatatgcgaactagacgcaatatggagattgctaggttttgagatacactaccattggccaccagtcgagagactaccagtacatttacctctacagaatatagtaaaattacataaaaatacgagattaaaaaacataatagaagatcctaaatataaatcaacaaaattaactcaatggtttgaggcaaacaatctatatgaaaatgctagaaatgtgacatattgtgactttccaaaattttggacatggaatacaacaaagaaaaaatgggtcaaaagagaacaagggttaaaaattggacgtctgtattatgtcaatcctatagaaggtgagcgtttttatcttagaatgctactaatgataataaaaggcgcaacgagttatgaggatataaaaacattcaatgggataatatatcatacttttaaagaaacatgtgcagcacgtggtttactaaaagaggacaatgaatggtataaaacttttgatgaagctacgcattgggctacagctttacaattacgatacctctttacaactatactactattcactgacttgcaagatgaaagaaaattctatgaaatgaattggaaaaaaaatggttgacgacattcatcataaattaattagtaaatacgaaccaattatttacatgcccacggaatcagaattgcaagaaaaactattagaggaactgcaaaatattttcgcaaaaaatggagttagtatatgtacttacaatcttccagaaatctcatcaaactatacaccaaatgacaataatcaacttattcaagaagaattaaactatgatcaacaatctttagaaatcgaagcaaccaaattatattcccaattgaatattgatcaaaaaaatgctttccatgagatcataaatagtgttgtaaatggaaaatcaaattttttctttgtatccggtcatggaggaactggcaaaacatttctatggaactgtattatatcgtttctaagagcacgaagaaaaatagttttgacagttgcatcatcaggagtagcttcactattacttccaaatggacgtacaacacattctagatttaagattccaatagatattgatgaattatcagtttgtgaaataaaacgaggcacaaaattagcacaactactaacacatactgatcttattatatgggatgaagcattgatgactaatagacaatgctttgaagcactagatagaacactaaaagatatattatctgaaaaacaatctaaactattagatatcccttttggtggaaaagttgttgttcttggaggtgacccaaaacaaatattaccagttatagaaaatgcttctaaatcacaaatcataaatgcctcaatattaaggtcatatctctggaatcatataaaaatattatctttacatgagaatatgcgcttaaaaaaactacaatgtactgattcagaaaataatgaatcaattgattttaataattggatattaaatgttggaaatgggagctctagcatatcagaaaccgatatagatgatgacgacgaagattgcactatagttgaaataccatctgatttgttgattactacaacagacaataaaataaaatcattagttcagtcaacatacccatgtttccaagacaaatacaacgatccagaatatcttaaagacagagctattcttgcaacaacaaatgaaatagttgatcaaataaatgattatataattagcttaat

SEQ ID NO: 45244 - DNA, 543 bp, Zea Mays
tatttttgtacggctaactgtatgtagacttgatgaaggtgtcaccggacatgcgttgaaccacatagctgccacagtgtttatttatttacactgatcctaaccaccattatttatttacactgatcatgtgtttatttacaagtaaccggtgattcagtgtgttcttgtgtagttctttcatgtcctggttatttacactgatcatgtgtttatttatttacacggatcacaacaactgttatgataggatactacaagcaactggtgactcggtgtgttcttgtgtgatcacaacacccgttatgatcagatactacaaacaaccggtgactcaatgtgttctcgtgcggttctttcatgtcctggtgtttactagctccttgttgcggtccactctcctaaccggtgactcgatgtgttctcatgtggttctttcatgtcctggtgtctcctattactactggctccttgttgggctccactcttctaattcctccggtccttctccgcgtttccctgtagacgtagaccttgtcaaac

SEQ ID NO: 45245 - DNA, 1406 bp, Zea Mays
gtttcatccacacatgaaacatttatcatctctcatcaaatctattccatgccatgtgagagggaaatgtgttatatgtcatttctatattgattttggtgattaatgtccaacacaacctcgagatctaactagtttgataaatgtgcacttgcatgttcataagtgcaagattgtggaaatctagctcaacttataggtcaaacagaggcaaaataaggcaaatcttggatgaggtgagctatgtctagttacacaagtttggataggttctcactgtccctaggaacaattttgagcaacatagaggctttggaattagatatttagaaaaggtgcatttggagctgagtttgagcctagaacatgattctgagttggagataagcaaaaagatgagaatctatgacttagaccgattatacatactctagataagtttatctaagttataggaaggttgttaaagttagccaaattgattggaagaagatatgcaaaaaggtgtcaagttctagctgttttggggcgcacctgacccttcttatagagcgtctgcaaaaggacttcagtggcctggcgcaccaaaccagtccggtgatgcgtcaaaccactttactggagagcattgtaggagcataattgtggtatagcacaccgatggtgcaccggtggcacacgagaccagtttactagagaggtctgcagttgaagcccaaagcaccttggcacgctggaccagtccggtgtgcacaagactagtccagtccaatggaaagtttcaacctttaacactcggcttcaacggctagctgacgtgacagaacatgtggcagagttcggtggtgcatcggaacggtctgatgagaccatcgaaggcaagtccagagcaaacgtcgttgattgagattaccattggaggtccgttgcccccgaggaaagagtagttttgcagattttttacaacgactatttggggtttgggggctataaataccccaaccagtctatttgagataccaatcaccactatagctgaggaacatttccatacactagtgcaacacatccatgtaatttcgagagatccaaacactccatctgagctaagatagtgattctagagagagtgtgcttatatgctttcttggtgttgttgctcttgttttttgtgatacttcattgtaaaggctagcaagaggctttgtactttgtggactgccttgcggagattcttttctcttcctagtggatccaagggctcaagtttgatcgttggatcacttgagagggtccgaaaagacactgtcctttgggacaccttaatggggatgtaggttcttcgaaaccaaactttggtaaataaatcatgtgtctcttgtgttctttactttctgttgtgattc

SEQ ID NO: 45246 - DNA, 429 bp, Zea Mays
gagggcattgcatcatgaggcagtagggttttgtggtgccgtctcctggcaggagagcagcgccacgccggtgaaatcaagcccgcaactcagcaaggagcaagcagatgacagcggcggcagcagcagcatcatcatgatggtgacgagcagcaaaacgaagtaggaggccatcaactgctcttgtatgtactagtgggtagtgtagtggcgattgtgacccggctgtccctatcaactgaggtggtggtccattttatagcccatgcaaatagtcgggcgctgttgcgtttgtgtgggccacccctctctcgtttgatcggggacgcagagcagatcaacgtagagcagagcagctagcgtcactctcatcactagtagtactatcgtacaactagcccagcaacaacaaactctcatcattatcgt

SEQ ID NO: 45247 - DNA, 305 bp, Zea Mays
ggatgatggctacattagtgctttcgatggtgagggtgaagatgatgactccagtgacgttgcttctaatgatgatgccatgcttggtgctgatgctacggcgaaccttcgaagcatcatggtgcagcgtgttcttagttctcagcctgaatcatcagagaagcagcaacgccataatttgttccagactttcttctccatcaagaatcggcgtgcacatgttattattgatggtggaagctgcaataatttggtgagttcagatttggtcaagaagcttggcttgaccacacgtccacggccac

SEQ ID NO: 45248 - DNA, 669 bp, Zea Mays
cggacctttcggtcggaggactcaaactcagtcaaaaatagcctcagcaccgaatggcgcaccggactggttcggtgtgcacatgcttggtccgatgtgaattatagtgaataagccagcctcagggaaattggagctagggcaccagaccgtccgatggcgcaccaggccgtctcacaagggaccaactgctacctgctatagtaggaatggtaacttgtcaaactactattcacggtccggtgcaccactgcacagagcactttttgcaaaaaatctaacagctcctttggttgttggtggctataaataccccaaccaacacattgaatacacaatacccttcccaacctactacacattaagtgcaacatctccatgcattcaaagccattcccgtgccgcatttgaccgattcgtgttttgagagacatagcgactagcgcatttgaaagttgcagggtcttgtgatcatttgagctttgattaattctcactctctcccctattctttttgttgtaaacatgaagcaagaggctccgattctttgtgtggaggcccttgcggaacttggtgtccccaagattgagaagaaagctcaattggtctttgtggttgtttgcgagagggaaagggttgaaagagacgcatccttagtggaccctcaa

SEQ ID NO: 45249 - DNA, 543 bp, Zea Mays
ggaaaatgtaggaggagccagtagaagccacgtttttggtgttctgtctctcaacaagaaaacaactctagctctcgggctctcgacgagaagccatttttatgactgtttagcagggcttcacgatgagccagatccgaatccgtccaaagagccatgccaaatgactctaagtgttaaggaacgatcgtacgtacattgttgttagagggtccgacctaagaggtagccttgatacgccctgactaccctagaatttgattaaaaaacaaactgccattcaacgtttagatccaaagaattaaacctacccaatttgaaacctaatttgatgagttaaatgtgtcacgagacattttggttgtattcagcttatgtaccaaattaataaaaaatatatgaggtactgaattatacataacatcatatatcaatttttttgtcttcaactattcttgatttaaatcctgagtccgcccgcatgtcgtgcaaatgtatgcaaacaactcgtttccaaataggtggaggcacgtgcagcaggag

SEQ ID NO: 45250 - DNA, 605 bp, Zea Mays
ccgtaccgtttacatgtacatgtacttgatttagtagctggattaattttttcatggcgatttggccagttagggtttactggttgtccccatcgcctattgttaggctttaacactgacctgatccgtcgttaacttgtagagcatgtggaagcctaatagtttttcgagcatacgatacaacacgaagagtccggtgtgattttcatagtcgtcatcatggcgtgcttactgtttgtattaccaccttagtccatcagctgaaataatatgtgctcatgtcagttgtatgttcattgctcagtcttgctggtacacaaatcattgttcatattgtaatgccaacaacaaagcacgaattaccgtttatttggtcatgacaacccctttgtttgatgcatatcactttttttgtattatgcataagttactctgtttatgaactccacttagttaacatagaacccctttgtttgatacatcagtaaacattgcatgcaactaacgaacccttcacttattatgcagcttcaaatatttatttcattatttgacgtccacttcaactaactgaggttctaaatcctttttcgctttagttattt

SEQ ID NO: 45251 - DNA, 333 bp, Zea Mays
ctcactcgtcgaagctcgttctcagaatcaaaaattgagcagagagctggacgaagctcgaataactttggaaaagaactcagatcgcttcgattgcgagtccaaagcattgagtgcaagagttgaagcaaaaattgaaaagaacgttaaactgagcgagacaatcacaaatcttcgggatagatgcttcggcttcgctactcaatgcattgcttagttgaaggggatattcaattctgtcagagccgcatcttaagaagttaccccttatttcgaagatattcctggggctcttgaacatattgaaaaagaagttgatgccctcgacgaggt

SEQ ID NO: 45252 - DNA, 353 bp, Zea Mays
acatatggaacaaatacgtttaaggtctttgttgtgtttttgaatgataatgtctcttttaaatgtaccaaaagataagtctccgcaaactattcagtaaatgcatgtaaaaaggaatatactccgtagaagaccaaaataagaaaggtgcgcaagaactgttccctttttctagggaaatattgcaatcataaaacagaaacacagctttgctaacacgtgagcagcaaaaggcaactgcaggtccacaatacctgcccttagatttagggtttgtaatatcctaagaaaatgagaaaagtgtgtgggtttgcggctgtagatgtagagcgcattgcaacatgagtttggag

SEQ ID NO: 45253 - DNA, 585 bp, Zea Mays
atggggcggcacataaatcgagagatatggtgatcgagaggtcaaacgacgcgaaaacggcgtttgaacgtgaaatagtgccacatgaggtttgaaattgaaaatgaggcatgaaatgatttggaattgagccgatacttcacgaataggtttatatggataaatatgagtgaagtgtgcgcttggtttgatttgaggcgaagaaaatggaatttgggcactcggctcggaatcgatcgctaaaaacggggatttgtgtaaaattgaagcatgggatatcggattggcgtgagattttgcgactatgttactagaggtattttgaaggtgcctcacaaatttgggatcgattggagcatttttggctggtttgggcatttcatcgagcacgtggcgtgcggtgttctagggtttggatgaaatgtctattttaggttgtgaaaccctcccaaagggagctcaagacctgcaggaggatccaagagaggactagggactcattcatgcacttgattcacagaactttaacaagaatttgaattggatcaaggtggtaaaactcaggctcactgaccagagaaatac

SEQ ID NO: 45254 - DNA, 448 bp, Zea Mays
gtccaaagctcactgcataaaacccctatctgtaatgtgcgtaagatttcccaaataaatcaccacatagcatgcattggccacaactggatgattgtggttggggattttatatgtatgcttttagaacatctcgtcattagggggaggaatgcccatatagtgtaatgcctcgatattctattaaacgcacaaaagccaaactgaatctgtcgttcggtgtgtactcctgtgtatatggagtttgccagaaattgttgaggagtaaccatattggtttgaatgcttctacttgatatagatgtggatatacccgggattaatatcatatccacattttacttattgacatttgatctattctcggggacgcctgctaatatgatccattggtcttagtcaaagtatatgtactgattgcatattcacgtggtctgtaataactctc

SEQ ID NO: 45255 - DNA, 343 bp, Zea Mays
gggcagagtttcgaatgctggtgctcctgttgcttattctgcctggaacttgccatcacatagatcctttttcgagtttgtgtctaatcttcctgcccgtgatggtggtctgggtcttagagtgcgaccctcccctgaagacattgaagctttaattgccccactccggagtctcctagagggtgagagacagactcattttgagatgtcagctagcacggacaacgagaagatagatgatgtgctcaacttgttggctagggaatcatttgactcgacacatgccgagccaatggctatcacagacgggcaagaacttgttggaatggagaggatccggaaa

SEQ ID NO: 45256 - DNA, 595 bp, Zea Mays
tgaggcatgaaatgacgtggaattgagccgatacttcacgaatagttttatatgggtaaatatgagtgaagtgtgtgcttggtttgaattgatgcaaataaaataaaatttaggcactcgactcggaatggatcgctcgaaacagagaattggttgaaaatgaagcctggaatatctgattggcgtgaaattgcgtgaatatgttactgaaggtgttgtgaaggtgcctgaaaagtttgggttcaatcggagcaattttgagtggtttgggcatttcaccgagcatgtggcgtgcggaggtttagggtttcggtgaaaaggctatttgaggtggtgaaaccctccctaaggagctaggaacctgcaggggattcaatggagcactagggcacacaatcatgcactgggattcactggaattgataagaatttgagattgagcacaaagggtggaatggaaggtttcactgacctagaaacagagagggaagggaagagggtgctcaccgagagaaggggagcaaggggagcacgagcaggatcaccacgccggtgatcgccggagagggggtgcaaatcgccagagggcagagag

SEQ ID NO: 45257 - DNA, 588 bp, Zea Mays
gccacaattggcctctgaacttgactaatcatactaaacactatgagtagagtctgcaatgaatagctcaaaaggatcatgtaaactatcaaactgcattgccattcttcctttgagctcaatctgtcaaacataaacacatacaattcaccaagctctgaagtttcaatatatgatgtcagcttgcttatcaagcatcagcgagttccacaagtacacttcgagctcttttgtgcttgtatgaagcacactaatcgaccctaatttaagcttccaaaaaagcatacccaaggtttagcgacaatttaataaatacaaataaatcaatagttataccacgatttgtttataactagccttgggtatagaggtcaacatctaataagggaatctgttcacaacaaaatgtctaaaatattttcagaaattgtgatacagcttcaaacagcaaaattacagctcagatgttgagatagcaatgcattacaaagattaaaaaaaaaacaatcggttcttgaaggcattgttctttgtttcccttatgtgttaagtgtttactttcccttttagcctaaggaaccaaacact

SEQ ID NO: 45258 - DNA, 331 bp, Zea Mays
taccagctgatgaatcacaccttccccacattccagcacctgatcgatagggcagttatgaccgagaagaagcgcaaggatatggaagatcggaagcgcaagatgagtggaccacagtccgggagcatcagccgcccccgcttcgcaggcagttcatctcagcaaggcaggcctggtcacccacagggatatcagcatcagaattagcgtccgcatcagcagctgtctcagaggcagtacccacaatagcagcagtatcgtcagaacagccagcagggaggtaatcagtatcagaagcagaacaaccaggcacctcgccttccttcccccg

SEQ ID NO: 45259 - DNA, 339 bp, Zea Mays
cacttgtctacgtgtcggtcagcatgtgaatgactgcaagatccatgacaaccatcgccaccacatgactagcaccacaatggcgcatgtgatgcttgaccaagggctcgacacatgttcagggtatcagctttcaccctgattgcgtgcagtctagtggccacctaatttcaaggtctccaacatcgacaagtacgagaccaagctcgaccctaggggctagctgggcgtttactcgacatcggctcaagtgccagggccactgaagacgtcatggcggcgtatctcccaatcatgcttaggcaggatgcactccagtggctctatcatctcccccac

SEQ ID NO: 45260 - DNA, 435 bp, Zea Mays
aaacgaacgtggtaggtttccccatcatccaattctctcaagtgtgctatgaattggctaatatgttcgtgtgtgcttttcccaccttcaccagaaaatttagagaagtctggtattctagttccatgtggatatggcacggtgtcgaatcggtggctataaggcttctgatacgattgtcctgtacctgacacactgacaccgagtttgtccctgaacatcccggctacctcgtctctgatcctctctgccatgtctggcgaccatccattgagtttgtgggtggaaatctcgggttgcctgacatcactctgtcggctttcctcccaggggtgtttgtggtgtgtgttaggtgtcctattaatgtcaccagctccttctctatacctcttaggctctcttgtggccgaacagtattcagccctatgtccatga

SEQ ID NO: 45261 - DNA, 340 bp, Zea Mays
gttttctgtttgttgagcaatgtgattggaatcttgacttatgtataggcctgaagtgagatttcatactttgcccagtttaatatcgtataaaacctcagtcaaatttctcggtcccttgcagatgtctgaacctgttatgaaggcagcaatgtatcctttttattctgcttgctacatcatgcttctgtttagtttcttaggtaacaaataggactagttgtgcacttgcacttgcacttggcttgcattaaactatactggtgtgtttggtttgtggaatcatcccatgcttcatgagtgcatcccatggatttttgtggaatcaagtaatcatccc

SEQ ID NO: 45262 - DNA, 634 bp, Zea Mays
ctggacatgcatcacctgtagatgcattaggacatggaagcagatgaggtcgtggatatcgaggaagaggatcctgagctaacttctagcttggacagaactagcgtagctcgctccaggggggccaccttccccagagtctagcgttgcctcatatgcccactaggtgtcgtgctaggagtaaatttgataggaagtagcgctccataggatagcatagcttttggtttcatggtatactaagctaggagttgagtcttgtcttgtcaattgtaacaatggaaaactttattttggaagatgggagaacaaatgagattaagttcatgtgtgaaattactgtgaccagatctaaagtttggaatcctcgctgtttgctcattacttatcgcaagtatatattatgagtaacagcaaggactccttagtttcagatgtcaggaagagcgcaccgcgggcagaactagcagactcccccaccaccgccatagcctctcactatgcaggagttgatggctcatcagaatgagattctgcgactgcttgcgcaaaatcagcaacaacctcggcactttgggggtggtgaacagtatcagcgcccaccgactacagccacttatcaggagttcctcaa

SEQ ID NO: 45263 - DNA, 440 bp, Zea Mays
gcatatcagagtgttggatgcaggagatcaaggtttcaggactctatcatcacgagtctctgacgttgctatccacctacgctgcttcggtcagcaatgctgctcaaagagctttgtggtccctcagccatacctattagcagcagttgcatgacacgacgtacatgcatcttcccccgcgtcctcgtggagagagccagacaagtgttgttccaggtgaagctggagaagatcgcctcaacacccttgtaggtgtggtggcaggtcttaacactgatctggacagtgctaccctggacctctcaagggtacatgaagaacttgaagatacacatgctaggattgcagcccatgaagctcagttcgaaggaagaaatccacccgaacctcaagtccctgccatagctgtgtccccgccccgcaagcgcattcgctatgga

SEQ ID NO: 45264 - DNA, 524 bp, Zea Mays
accaacaagtagacttactaatttttatacaagttatttcgcgcgctagaactaccatacaccattaatcaaaacattcaccacaatcatcaaatccggcatatatgtatatcaaaacgcttttcacccactagttcgtattttagcttagacaccacatgagcactactaatttttacccgcgaccataaccatgcgcatctagactacaacaagcaaatcatcgtgactatgagcttaaccaaagccatctagcaagttggttaaccaaagcaacaacctaggccgctatacaacatacttgttgactagcctattattatcgagatccgagacacaggatatatataacaatcactcaacgaaatcgactcctacttaacatgagttggctaatcacagaataagacttagcaaactattttagacatcgcaactcaaaacatggtttggagcagattaatcagcgtttcttacccatggctcaacttaatttagttaacacaccagccacctaaaacagc

SEQ ID NO: 45265 - DNA, 669 bp, Zea Mays
agttgccagactcttttatctggagtatacaatgtgttccacgtatcacaactgaagaagtgcctctgagtacccgatcaaaccatgaatatatcaaaagttaacttggatccatacctaacttattcagaatatcccatccttgttttggatcaaaaggatcgagttacttgaaaaaggacactcgagttctataaagtacaatggaacaaacatacagaagaagaggccacttggaagtctaaagatttcttagagaagcattttcctaagtttctagcttcttgtaacccttgaagttttgtgtactttattgtaaagttagataaggcctacacacccacccctgtcttgtaagagaaaataggaaataaagttgtgacacatatccttttctatcacttaccgaggagctttaaatctcgggacgagattcttttatgggggagaggatgtaacacctctggtgttatgagaactaaaaatttgtcatggcatcatacaaactgacattacattgtttgtgatacacctagaatgcattcactaggttaaaaaattcaatgaaacatgtgatgtgatgcatgttgagtgtatgctctagtaagggtgttccttaagctaggtaggggtgaatctttccaaggactagtaacatgtgacctcatg

SEQ ID NO: 45266 - DNA, 403 bp, Zea Mays
ggactgcctgagcgaggggagaacttttggcatgcttcgcatgacctcgtgacgcgattggcggtacaaattattgtgggccagtaaaatccttgacgaatcaccttggtagcgagggccctgggtcctgagtgggagccgcaagttccgctgtggacttcgcggaggatttgtatgccttcgatttcagttatgcacttcagcatgggctgactgatccccttcttgtacagctaaccctcgactaatgtgaagtcccagcttctgtgctttagtcgtttggcctcattgttaccgcttggatggtagtggccttgcagatacagagttattggggcccgccaatcttcggccatgatgaggttgatgatgcggtggccttcggcgtcctgagttatttgta

SEQ ID NO: 45267 - DNA, 468 bp, Zea Mays
tggttgggttgtgggaccggctcggtagcgccaattcgtgtgttgccggcgatgcgccgccgcacagttttgtcaccgccgcgctcgactgctgggattggggaagaaaagagcgatcgtcaattggctgatgagtggctacgattagatgtagataccgattcgtagagaatccagcgcggtcgcgagatcttgatcctacgcgcgggagtgtccctcgccactttaaatccaaaagcgttgatctgcaatccgaggaccgcggtcgttcgctgtttcctttaagtgctggcgtgatctgggctgttgccttgttatcccacggcccagggcgtgagataccccttcgcctcgcccgtattccaaaagagcccctgctctttgccacaattaacccgccgtctggggctataggaagagtcttgcggtttagccccgaattttataagaaacaccctgcgctctctg

SEQ ID NO: 45268 - DNA, 293 bp, Zea Mays
tgttttgccacgagtgggttcatttatggcttagtatggtgacattgttgtccaaccagttgagatacaggagcagggcgatattagaaggcttcatcagctttgggtggacataatttagcagtaaatactatatcgttttcaacctttcatgattccgttgtttgggggtactatgggagggctgttctttattactcggtctagagcctgtttgggtggacagatctgaaaatcggtgttgagcagttggtgaggcagtgtccagttttccagcaaacacaaggagagca

SEQ ID NO: 45269 - DNA, 533 bp, Zea Mays
agggaatgtcacactaatcaccacatagttgatggaaatcataggtttcacatcgagagagaaagtcaaattcagcaccattagattcatcgctaatttgctcgagaatattggaaatctttcggtggctccgatgtcccccgtttaagcttctgaggatctaatctacacttcagaaaatccaaatcaatttgatcttatgacatcgagttagactcaaactctacctcaacatcgcctcggacatagactcaagtatgactcagatttggattcctataatcttgaagactgctttgttttcatggcgaattctacacacctggatggcaatttcctaaacttaaccatgctaacgatgatgctgatgaagtaaccaggaattggtaggactaggagttacgagatcatgtctgagttatccacgattagatctagatggtcgactttcacaacgaacaagtctaaatgaccctgactcagaacatcatgatagtaaaactccttctacatagactcacgctactgctccc

SEQ ID NO: 45270 - DNA, 609 bp, Zea Mays
gccggccagccatctataaatagagcgcgggcactgcgtcgtcaccgcattccgcacatccgcagctaagtacttgactcgagctcaccagaaatacccgcgcagccccaattccctctcttcttcgttcttgctccgccgtgaagagcttcttcgtagccagcgctcctctggtcagtaatgatcaaattgctctttgttttagttagtatgtgatctattattgcccctggatgcaacaatttggagtttgaccaaagcctcttaccggaacgcacctaggcaccgtcaaacaccgccgtgacccccctcaccgtcgacccgttcttcgggccttgttctacccaaatcaaagaatgtccgtagaccctagcacacccatgaacctttccccagccttaattcggccgtcctcgccgtcgtttgctcggaatgcgttcatcctcttacccatccgctcggtcaccgtggaccgatggattcgtagtcccaaccataaaattgatttgggggaaatgatccgtaggagttcaattgtgttcctgtcgcttgggaacttcagccgtcgcgtcatccggccggtctagctcgccggagctcggcctcccg

SEQ ID NO: 45271 - DNA, 621 bp, Zea Mays
gaaaacttcttatcagaaaagatcaccattaaatgagtgtagtgcagattggatttgaggatgtagtatgaaaaggatgtcatccccttgaaaggagtcagccgaatagcaacgtagaggctccagttcattaaaataagtacgaggcatgtcgactacacttctcactcctatgcaacctcattactttaccccttaatgacacgtctcacatgccaatctgtgtgcagcgtggcttcttacactgttttgccattccttccatcgtccacatagtaaatcccttatataacagggttttactatttggtaaatatgcaagaggaacaacctggcatattgttaaagacaatgacattaaaaaaaaagagggatgacctattccatgtcaacactatgacagaggtccatttaaattctcacgtgaagctgccaggcccaagtccatacatgtgggcacacatgtcctagggtcagtagatttagaaatttaagccatgcattgaagaggttaaaaggatcatgttggctgcccaccgtggaaaaggattttgaatttaccactgctagtacactgtggggcaagtccagggtggtcatttgtgctgctctagcctgtcc

SEQ ID NO: 45272 - DNA, 504 bp, Zea Mays
acaagggtaaaagatacaaaaataatctgctcataagtcaacaacttctgtaccttcagactattgtatgtgaggctgtctacgaggtcatccttcgacatagcagagaggccaacttcgagctacggaaatcctatgtttcttgccatctcccggcaaatatatatttccttattgtccgggaggcagtacagaaagtcatattcattggtgccattgtataccaatgatcctttcagatatttcagttcccggacatagtgtctagcttcggcaatttcctcttctgacaattttctacccgaagcgtgtcggatgataaagtctagctcctcagtagacgcttcgggagtagaagattcaaccttcttgggcacatctttttccaggaccggagtgacatccaaaggttcttgttcaatactctgtctcgcttcagcaggccctgtttctatgggcactgaaggcccagtatcgacttcagcatgaattgtagtagcttcg

SEQ ID NO: 45273 - DNA, 559 bp, Zea Mays
gggaaaccaacactcttcgacagagtactgataaccttcgctccagtttggtctcggaggcatcctaagctttcttcgccaataccgtcgaagagcaacgctcctggttggtagccacaggatatagcatattctcgcagctcttctttctcagtcttagataactcttgaccaattatattttgaaaattgaagtccttttcctccgaagtatcttcggcgatcttcttcccttttccaggcactatggccagggtttcttcggcagctgcagcagcttcttccgtggccatattcaagagcattttatcaatatcagaaaatgtgctctctagattcgtggctttggctgttgtagcttcgtcagttgtagcttcgatgggagcagcttcggtagctgtggcaccttcggcagctggtgtttttgacgctgaggccggtggtggcgtttcttcaatagcttcaattacagtaataatcctccgcctttttggcccagcagacttctttgctgccgaaggcttcttcttcttctgtaaaagcttcatcagatgcggcc

SEQ ID NO: 45274 - DNA, 549 bp, Zea Mays
gttttgggggattttctaaccattcagaacattttttgagtattaaacgtgaaattcagattctcagatactattttaatatctaaaatttagtatttgtgaaagctaaaatattccaaaaacttgataatatctatttttttctttcttcctctcgttgagcttgttccagatcttgtgcccttttttgtgagatcaccgaatcacttattctcgcgaacggcatgctgcttgcgtcgactatcctcatctatccccgtctatccctcttacatctacctcgacattctagacccgcggactagctccgactatctccgtctaattttatctaaccttgtctaccacccgtctaactccatctccgtcttacacggtctcgcgcaatccgcaccgcaactgcctatccccacaaccattcatctcattgtcatctcggacccatgcgtcaccttcatcttctcaaaccgtcgctcgtttcacgtgtgcgtgtctgactcggatgccaccacaactacgtcgcccccgttctcgaatcacctcgcccat

SEQ ID NO: 45275 - DNA, 1302 bp, Zea Mays
tcttctatctcagcggcgagatcatcagcggaaggtagtaccttagaagtagtgtcgtcgctggtgccgaccgcgtcctcaccaagtgccatggtgcataagcctcctgcggtgtcggtgatgaagcacaacccgttcagcttgtcctcgacccgcctctcagtctcctcgtcgctcgaggaagatataacatcgtcggagtcgtggtcgaggtcgctgagggaggcgaggaaggcacgctccttgatctttgccttctgaaggtacttcttcttgagcgcctccttgttgaatcctcccttggacttgtacttgccggaggagtacttgcccttgcgctgactagagtgatggtcgcgcgggccatactccaatttgctcttcttagggcagctagcaacaaagaggtcgggatcaccacagttgtagcttccgtccttggacccgccacgccgccggctcatacggttgttgtggaactgcatgaaccggctggccacaagtgccagctcctcatccacaaggctctccacctgctcctctgtaataaacaataaagaagacagagcaaacatagcaggtgaggagttagaagcagaaccacctccagagaccagggccatggtgggtgcactagggttctcaatcttggctcgagtctggtggtcaatctctatggacttgagcttgctgaagagcttgtccacggtgagagtctcgtagttgggtgacttgatgatcgccgagaccttcacctcccaaaccctctgatctagagcatgtagtaatttcagcgctctctcatgatcactatagggtagttgtgccttgttggcacgcatcttgttcacaattgactggaacctggataacatggaatcaatggtctctccagccaactgtgtgaagttctcgtactctcgcctgtacgtctcaaacagtctagtcttcacatgatcattgccctcatggaatctctcgagggtagaccagatctgatgagccgtagtcagatgtccaactcgctcaaactcaccaagcgagagacaagagaacaaagcgttttgagctttgttgtttgtatcattgaactccatttgaattggagtgatccggtcacttgtagcatcgaaaatcgcatcgaggcaaatttcccaaacccgataactcatgctctgaagatacgcagacatgtgaatcttccagtacgggtaattggtcccatcgaagaacggaggtttgccaacacctcgttccatgtcgcctacgtggatttcgaaccgattatggaaggtaaatcct

SEQ ID NO: 45276 - DNA, 897 bp, Zea Mays
ggttatcatgcgccccatatggtcccgcttcggtctctgaaagccaaaggtcgaaattgatgacgccaccgaagcgtgtcagaaggctttcggtactgtctgcttcttcattggtataagagatttaattcaagagcatatagcattcagagtatggccgcttgtagaaagctgggaaatgccgaaggagaccatcaccaagtctagcgaaggtgaactggtccggctgaagtatacattcaggtatggggataagttcgatgaaccaaacgatgactggctgaaatgcatcgaagctacaagtgatgaacttcttggagcatattccaaggcagaagataatgcactatcctcagccttcggaagtcgggaaaagaagagattgaacagagtttttgatgccattggcttcgtttaccccgactaccgctacccgttgcggggaacaagggaaaagaggaaagctgctacttcggccaccccagacgaacctgtgccgaaggggaaaaagttgaaggtcttaactcaccggccgcgatacatcgaaccggccgcgatacctgaatttggcgaagggacttcctcggctgtcaaaacaaaagaaactattcctcccgtgcagaggactgaagagccggctataatgccaaaggtgcctacagtcaaggtagttgaaacgaaggttgataaggctgaaaagccagaaactgaacaaataacaaagatgctagaggttttgagccctccagtaaaggcaatagtaccgaaggtacaaatgggttctgtcgtaactcctaagaggaggagaatggtaaatgtactggatgtgctagagacaactgaaactttgaatcccgcttctacagggaaagttgccgaagcttccagggcgcaaac

SEQ ID NO: 45277 - DNA, 275 bp, Zea Mays
tgaactgcttggagcgtactccaaaaaggaagacaatgccttgtctgcaaccttcgggggtcggaataagaaaaggttgaacatggtatttgaagctattggctttgtgtaccctgactattgttacccgctgcgagggcaaggagtaaaaaggaagattgttgctgctggaaaagctgctgcttcggtcgtcacggctgagccgaagaggaagaggatgaaggttctgactcatcggtcgcgttacatcgaaccggctgtgatacctgagtact

SEQ ID NO: 45278 - DNA, 815 bp, Zea Mays
cgttaatcatcgtggtgcagccgcccaccgaggtggtcatgaacaccatggttctagcgattgtcgaggaggcaatctcggatcgcggggtttttgacctttgtgggctcgggatggaccgaggcctccctctctttgcgagagggtcttactcgttgttctgaggcaagatcccgaagccgagaggtagagctcttagcctgctgggttgcagcacatgccatgaaacccctgatttcgctgtggattcgacgtccttcagtggtggatggtttcggcattgtccagagaaagattgatgtcgcagctaggtttaggctagccctgtgaaaggccggtggaggcttgaccccagcctcttccatgatgcgatagtgaacgtcgcatgaatggcgcgtgctcccccatcgagggttgtctgctgcttcttgcttgagaacttatcgaagctgttgtagccattgctgctcttctccaagcttggcatgtatctcgtgaagctattcgaggtgcacgatgtgactccccatgggggtctgagtcgcaccctgctcccttgtctctccggcgtgtggagctggtgccggggcgttggcctcccgaggcatgccaagctcgttcccttcatcatgctcctcgtgccctatgcgaaagcactctcgagtcgggtcgtaaccctcatcgtctgagctatagtcgttggagccatcggagaggaggctatcacatgcagacaagaaatgacccatggccctaggatcatgaagcccagagaagtctaggccaggacccagaccatcttcttcctcagagtc

SEQ ID NO: 45279 - DNA, 1108 bp, Zea Mays
ctaccaactttgatgcagtaccggacccattgtcgcaaggagctgaggctagagaagctaacaacgaattggcttccatattgagggccaccaagctatcaacttgcataggtgtggtttggtttccattattgttggtcttcgtcacaaaagaattattaatgtttctctgcttgttagcagcatggtcggtattttcctttcttcggtcagcatcctcatttcctccattgtctcgcccactatttggggtaggattaggggttatcgccggtataaaatcttgtgactccggtgtgaatgtaatatcatatccaacattgtgaaacacaacatctgttgttagtggtagttggcccttgtctatgacacccactaataaacggataacccccttccttctgtaggtcagcatatccacttccaaagttgttccaatcatggttccaattgcccaaaaccccagataatgtcgccaagcatggggaacatctgttacgtgtatccaaatttcatcgaggtgatatgcaggcttaacatctccatgcatctaccatttactgatagtgattgtaactccgctcttcaaattatatcctatatcggccatccgcagaagctcttcttcagatgggaaaactgctaggaaggaaccatctccctgaggaagagcctctcaattccagtccacccttgaaagttttgcaagttccgcttggactgccataccttcaagatcacctccatccactttgatcaaagttgttggggctggttctggtacttcaatcttgtaatcgaactcagggattctaaagaaacaaagttcattttttgcataccccatcatagctgtcgtcagttttggcatcttgaggattgggcacttttttgtgagatgtaagtccttcttgttgcaaatgacacaatcgaggtctgcaacacagttttctgtcggatgtcctgataccttacacctaaaatagaaagggtttcttggcttctttgctttcacaattttttcttcatctctttgatcagtagttggtgtggtgaccgttgctgctggttggcactgatcttgtctcccgacaggaacaaatctttt

SEQ ID NO: 45280 - DNA, 517 bp, Zea Mays
cttccttgagcagttgcacttgcatttgcgcattggctaccacttggagtgcttgcacttgcatttgcgctttgacttgcacttgcatttgcgctttgcacagctgtaacaagtacaaaataatgttaatatacaattactagttgcatagagcctgcgaaactaatttgtgtaaattgaaaaatatacaaaccttttgcaaatgatggcactaaaacaatagctctatccttgtttgatcctactgacttggatgtcttaagcttgctcacaggagtagtggttcgctgtttgaccgcacgattctctacacccatgaatttcttcttctttccaacaagaggggtagcagcagcattagcaccatcagaaggttcaccagcaacttggtcatcgctgcgagcattgccatcatctataattggggcttgcacttcattctcattagacccattctcaatatcaactctaacatccacatccattgcactgcaaatcacaaatgagtacaaaaatt

SEQ ID NO: 45281 - DNA, 552 bp, Zea Mays
ggaaggggtaccgaataagtacgctagtctttatttccctatctccatttcccatcgtccaaacataggagaacatcaatcccacctttcattttcaatatcccgaccctcatttcccatttgccaaacaccacgaaaaaggctactctcgtgttcccgtgaattttagtttttataagaacacatgtgatattctggcccaatggagagttatgtcctgacctaaggcttaacaaaattaataaactactcataccaaccatgtgatcttctttttcaaaaacttgtcttgaaagaaactctagattaaacgtgcttggaccagagcaatattgagatgtgtgaccgaccgaaaagttttctaaaatgcatatgagtgagaataaagtgtgtataaaagatttatattggtctctgaggatgctctataatcatagaggactgacatgagtaagtactgcgggtccaggactcctgtgaattttagtttttatgagaacatattttgccaggaacatgagcatgtttccatacaaatacagtgtttcgaga

SEQ ID NO: 45282 - DNA, 561 bp, Zea Mays
cgagagtgaggagggcgtgaacggacctgcagaaggctggccacggcgcggcgttcacggaggcgcggaaacccgatttggggaaaaagaggaattagagagctatggtggctaattggaggcaggagcgggtgctctggcattgtgattacctaacgaagctagcggtatgctcaatttatagagtccaagagcggtggctcctaattttggaatggcgtgctggcggccgtagagaaggaaggttactatcgcaagggattcatggctttaaccatggcaagtcctctagcgatggacgggcttggtacacaggttcactgtgctaagcttccaagacatgtggcacacaatcgttaagtggctaacgccggtgaggatcatccccgccagccgcagtgcaagtgggtacgacgagctcaccgtcgaccgtgtccgagccaattcgagcgctaagatctttaatcccctcagttatccacttgcgctgggcatgaatcgcagcggccggtgcgaatccgggcgcaagatcaccggcagcgaggggcgatgaccttgggg

SEQ ID NO: 45283 - DNA, 370 bp, Zea Mays
ttcaggttaggtttttattggccaacaacaaagagtgatgcggccgagttagtccagaggtgcgaagcctgccagtacttgtcaaaacagcagcatctgccagcacagcagctgcagactatacccataacctggtcgttcgcatgctggggattggatatgattggacctttcaagaaagctcaaggaggatacactcatgtactggtggctatcgacaaattcactaaatggatagagttcaaacccattgcttctctaacttcagctaaggcagtggaattcatacaagatataatattcaggttcaggataccgaataacatcataactgacctaggatccaacttcaccagttcagaattcttcg

SEQ ID NO: 45284 - DNA, 585 bp, Zea Mays
ctggaacttcgtttcttcactaaataagtccctgaccgtggtgcgctcgctgatcatcaccaacgcggcccgtgccagccatggccgtcgacgactacctcgtctagctaccaggaggacataaccgaccaacggtgacctaggaacactcgccaatttggcatgaacacactgagaacggtctgcccacgtgcacgccggaaaccgtgaccacgagctcgcgttcccgttcaaccctggccgaattgaccaaacggtggccacgatgagcatccagtgcacaccaagttgcgaaaacggcacttgagaggcgtagaaccttaccagagtgggctggccacggacgagctatccacagtggcttagagacccgagttgggggaaaatggtgtcgcggcggctctgggtgaaattgggggtggagattggggctacacggccgttaggaactgtagtttcatcatgcacactcaatttgagaggaggggtggaggctgggagaatttgggcttggatcaacgcattgggtggaggtgtgcataccccgccgtggatcatggtggtatttatagccacggcggctcg

SEQ ID NO: 45285 - DNA, 331 bp, Zea Mays
tgcggagtcttgttctgtctagatccacgagtaggtgtgttctggtcagtcctctggttgctgttcttctggggtgtctatggattatgcctagggcagttgttggcatagtggccaagttcgccacacttgaaatagccattgggtttgcattgttgttcttggccggtgtgttcactgcgcttccctgacggatctgctgttgcccaccagacctttgaccggtctgggtgttgcttctctactggttctggtattgattgttcctctgactttattatccagagcgctgtgcttgatagttgttgttcccactctggtttccagagca

SEQ ID NO: 45286 - DNA, 414 bp, Zea Mays
atttaatcttagccgcccaactcaaatcgatggtagtcgattcttcttcttcctcgagcaccatggattgagcacggcggccaggaaacccaccacggcggatgccatgccagagctcatgccacgacgcccaagcccaactccgcgatccaaaagagcgacatgcagaggagaatgctacaaataacatggataggttgctcagctacaataggctacagaggagcctgcccacggtgcgagcggaacccacagcggagcaccaactccggcgtgaaattaccccgcgcaccgaactcaacttcacccaccgatgcgacggtcgatcaccacgagcattgctagagcccactgccccaaacccggcgttgattgagccctaaggtggtggttcgcctgcgtggcgtctctttc

SEQ ID NO: 45287 - DNA, 404 bp, Zea Mays
gttaatggtgcacccgtcagatggtgatgcatggaaggctcttgacaactttgatccagattttgccagcgatgcaagaaacgttcgtatcggcttggcaactgatggtttcacgcctttcaatatgactgttgcgtcgtattcatgttggcctgtcattgccataccgtacaaacttccacctactatttgcatgaaatatgagtttatgttcctctgtcttgttatacctgggcctgagcatcctggcatatgcctcaatgtgatgcttcaaccactgattgaagagttaaagaagctatggcaaggagtggaagcctatgactgcttcaagaagcagaaattcaatcttcgtgttgtgtatctattctcggttcatgattttatggcgtatggtattttct

SEQ ID NO: 45288 - DNA, 685 bp, Zea Mays
tatattaggtgtttaaagcttatagttttcagattaagtgtgtgccaactatcaacccttatgcccatataaggactctaggtggcttagtaagtactaattttgtgggggttcatgcatcatgtattaattctatcaaaaatatgatattgttagtatgaaatgccatagccacgtcatcaatgtaagaaaggcaagtgtaggacctggcagaccagggctagtcggctgccttcatatacggaaacgtgtatgtcatataaggactgctagatttactttcagcaatatatgaaaaatagtggacatgttgttattacctttcaaatataaacgttgcatcatggggatggactggaatgaattttctgcaggtacacaaactacgcaacgtgtagttcgtttagttatgtatctatgagtgaacgtatatgccaacacttataccattagaatcaataggatgtgaggttgtaagtcatgtacatgcatcatgacattgaaatcatttcgatcactcattgcaatatctccccttaaaacgtgtataaaatcgtttgctaatttaagtaaataaaattttcccaaaatctcacgagagtataaccttgtaacagatgtcccgtcgcacgctcatcactcgtaagtctatggaaggacatgttcctcgtcaccagcttgctac

SEQ ID NO: 45289 - DNA, 467 bp, Zea Mays
tagtttttcctgtagctaggcgctacaagggagaagaagtagaacgaccgcacagttattgaaccaaaataaccagataacaaaacatgtttcatttcatcggattcgtctgtcaactggcctccaaccacgagtcttgttgtagatctcacacgccatctttttgattttgagacttccgagctccaccaattttcttgccttctttttttgacgaatagcccaagtattaagccaaaaacaacaagagaaaatcacgttagtcggatcatcaattcggtcagtcccaaagcaacaattattgcgacatctccagatcgcccaaatgacagcaccacagccaaacagaaccagatttttttcagtcttattaaaactgttaatccaagtaccaaacaaatcatccacattatcaggaatagaatttaggccaagagcagagtagacaattctccacgtaaatctag

SEQ ID NO: 45290 - DNA, 509 bp, Zea Mays
tccgtcaaggattttactggcctgcgataatctgcaccgcgaatcgtgtcacgaggtcgtgcgaagcttgccagaagttttctccccgctcgggcaaccctttgcagttcaccaagctgatcgcccacacatggccacttcaacgctggggctggatattgtcgggcctctacctatggctcaagggaacctaaagttcaccttcgtcgccgtcgaatacttcaccaagtggatcgaggccagggcagtatccacaataacgtcaaagactgcccagaagttcttctggcaaaacattgtttgccgattcggagtccagtccgagctcacagtcgacaacgacaaaccgtttgacagccaggacttcagggacttctgcctctccatcggcaccaagcttgccttcgcctcggtatgccacccgcaatccaacggcgtcgtcgagcgcgccaacggcaagattttcactgccatcaagaaaagacttctcgacgacaagaagggtaaat

SEQ ID NO: 45291 - DNA, 801 bp, Zea Mays
cctcgttctcatcattatcctctccgaatatgacaccctcatcatcgtcatcaactggatcgtgaaaatacaatccaagtaaaagatagggcattcagggttgagaaaatatataacctcaataaagatttttaacaattaccattggaaatgaaccttgggatcgactagctttgctccaacccacttccttgttcgaccatgtttgcactcccatttgctaccacgatcgcactttggcgtgtattcctatattgtactgatggaaacacacgtttagttggactacattttatcgtcgtcgtgcaagatccatttaaaactggttagtataattaccagtgttgttgatctctatagttgaaccaggctgtgtcgaatcgtccatttttctgatgtcactgatagtatcctcagtcaaagtagccacattacgtgcaatgtttgcttcaaatttcttgttttgacgggataagatagcttgtctttcaccacgcagaacatgatgtttacgtcttagtggctcagtagacatatcgggtgaactgacatcctcagtttgtgttgaagctggcatgaaaggtgtactggtgtattcagggataacccagtcgcatgcgttatctgaggatgaatcaggttccgatacatctgctgtagggtgtacaacctcagaggtatatgttgggacctccatgatgatggacccctgattcaaagtgctagcttgtagtgctctacgttttcttatgtactctaactttccctctttccgccttggtgtctgattatacaacctaa

SEQ ID NO: 45292 - DNA, 508 bp, Zea Mays
tgtaaatgcatgcccttaaagtagtacgtgatcgagtacaaacgttgttgcttcattttagctttgctcctgtacttcccaattgcgcgtggatctggcaatgtgtgcctgagccctgagggttcaagatggagagtttggctgcaactgtcttgcatgtatgcaatgttgtatgcgctgatcctcacgctatctaaagttgccacatcacatgttaccatagaaaatataattttgtagtcctcataagacaattaaatactagatatgtattagagtatgattggtaggccaattagatggttaagatttaaatgcatatgatctcgtgctaaagtggtatctctctcaaggacaccgctttattctcttccctttttaataacatgccacatcagctttctatcttatgttgtggtatatattaaatgagtttgatactgtgcaccgagtgcacggggtaaccgccttccatgcgctaagcacggatggctggacaacacacgaa

SEQ ID NO: 45293 - DNA, 582 bp, Zea Mays
caaagttgtaacacccaaaatccttatgaagatcgtctggagatctttcctttgtttggtagtgaagctcatgaatctagcaaaaaccttccgtgtttgcacttagaccttggctctagaaggcccatatgtaaacgttgatcctaacaatcgcattcgaggttaactggtgcagatatatttcaaacctctcaagaattccaagaatcatttcatacatcgagaaacgaagcccagtccggaagaagcttctaaacacaacaacaacatcactcttcggctctgggatgatctcatcaccagcaaatctaatcatggtatcgtccttttgcccaaaatacccaagtctttttagcacatctaagtctttggcctttatagtagatttaccaaactcattttgactaggtttatttggatgaataatgctaggatcgtattcattgttatcagccaaagcttctgaatcgctcttctcaacgacgtctgctccttctctatcattcggctcaacaatacctgactctctcatcacttctgaaataggagttgtatcagctacatctgcaatttcacccccgg

SEQ ID NO: 45294 - DNA, 538 bp, Zea Mays
gtcgaagcgtagcattggtgagagttcgcgaagtggtgggcgccgacggatggggttggagcgaactcggcttcgtgtggatcggggtaaccaacgcgagctgctgtcttcgtcgtttgggatgagtttttgtgagggggacctacggaatttgtttgagggtgaggagttgagaataatgttgtttaattatcaggaggcagacattatcccgaaggttgagccgatgtagaatgtgcgatgccctcgcttgtcgagcggtgcgaatgcatttatttgtgcggtgggtcttggtgacccttcgctgtgtgtatgtaaactgcggcttgtgttgtaatgtggactgttgccctttgctttgtagtgtggtgctgaaagtgcccggctacgcccttgggcggctttcgcacggggttctttaagtaaaagacttcgattgacgcatttgttgtgctagttcggctgcacccttaggcgacttttgcatggattgtctttttagtaaaagacttcgattaacgcacttgttgtgcttatc

SEQ ID NO: 45295 - DNA, 878 bp, Zea Mays
ttgttacttagggacacggagacacctcttaagttgagacacatggaatacattatgcacatcagatagattatcaggtagctcgagttgataggccatctctccaactcgcctaaaaactctaaagggtccaataaagagaggggacaatttgcccctaactttgaatctcctcattccacgaagtggtgacaccttgaggtacacatgatctccttcctcaaattccagtggtcttcttctattatcagcatagcttttttatctggtctgagctaccctcaaattctcttgaattatacagacttgttcttctgcttcttgtataagttcaggcccaaagatctatcttcctcaagtctggtcctaaaatagaggagttctgcatttcctgccatacagagcctcgaacggtgacctcttcagactggcctggtaactatcattatatgagaacttagcataaggtagactcttgtcccaactactaccatgctgaagggcacaagctctcaacatgtcctccaatacttgattagtctttttagtgtgtccatcagtctgaggtaggccgaactaaaattcaacttcgtatccatattctcatgaaagctttttcaaaatctggaggtagactgtgaccctctatccgaaacgatcttcttcggtacaccatgtagagacataatccgagccatatataactctgctagctgagaatcctttataaatagtctttactgaaatgaagtgagccactttagtcaatctatccacaatcacccaaatagagtcatatcctgctggggtgcggggttgtccaacaatgaaatccatatcaatttcttcccacttccactcgggtatctttaatggga

SEQ ID NO: 45296 - DNA, 556 bp, Zea Mays
tattctaacgtgattctccaaagtggtcatcgctcgattttggaggcacctccagctcatatgaccagcacataagggccggtaacttgtacttaggtccctagcttatgtcaatcattttatttattcctccctctcccacacctctccatcatgtcaggatggagaaagatgaaggtggtttgatggttgtggtcggtggcgatggtgatcttttgtgaatggtgtcgattcaccagtgaagtaggtggtgggccaccatcactagtgggtgctgatgtagaccatgagtaacccgcacgatggtggccaccaagcacaagagaggggaatactcgcccaatatggtgacctactcgctacaattactgcttggaagatgtagttctttgcttgtccttaaacatgggtgctaagattggaaccttccgatggttagggtttcatatttggatttaccccattttgttgcatgtttagagtttgttcatctagttctagattcatggtgtaggtgatggtgaagaagaaggggtcactgtagagttccatcatg

SEQ ID NO: 45297 - DNA, 319 bp, Zea Mays
ggagaagaagacccccaatagacgcgacaccataccacaggtacgacgacgcacgacccaacaaacgattctataggggctacaaagcccagaagcacgacccatcaaacgacaccataggggatacgaggcctagaagcaggatgccaaactccatcacaatagaatacaagttctcattgtaacgtctacccttgagatataaaagggcaagacaacccccatcatccaatacacatcccacagcttcacacaagcaccaaactgtaacacgcttcaagcaatactattgtcactgcactagactagggctctgggc

SEQ ID NO: 45298 - DNA, 376 bp, Zea Mays
gagggattactatttatctggaacatacggaaggaaagggtacacacggtgtggcaatgtttgttttgattcctattacattgctcctaatttgggagttggacgctgttggcatgtgccagggctgccgacggtaagtagtcgtaacattatttattcttgttaaatggccatagtagcgaactgaaattatttattttgttgcgatttcagttggtacagaccacggtggcacagagatcagttttctgctcactgcttttcgttcgggagattcagtggagcgcttcgcccctctcaagtctcaaggtgaggtggggatccaccattccaccgatccagaggcgagcaaaactctgtccttcggaaatacatc

SEQ ID NO: 45299 - DNA, 626 bp, Zea Mays
atctccgacctcctcggagataacagaggccaaggtgctgcttcctagatctgctcgctaaaggatgggggtctaactactgaagctgtagttgctaacttcgtattcaagagcattcaacacttaaaggacagggtttaccccgcttacttatatagcggtgtgtacgattctacctgggtcacgaacagaaggattcccactgaagatttgctaagttgactggacatgatcctgaggggcagggtttcaaatgctggtgctcctgtggcctattctgcatggaacctgccgccacttaggccattctctgagtttgtatccagccctcctgctcgtgacggtagcctgggtcatagagtgcgaccctctcctgatgatattgagaatttgattgctccactttggagtcttcttgaggatgagaggcagactcactttgagatgccagctagcactcatgacgctgagatagatgctgtgcttagcctgcttgctggggaatcatccgactctacccgcaccgagccgatggccatcacaactgggcaagaatttggtgaagaggtggaaactccgaaacccgaaggtgcccgcccaaagcgtccacaccgagtgaaccgccc

SEQ ID NO: 45300 - DNA, 370 bp, Zea Mays
ctaggaaaattggtttcacaattttaggatttttctacaatttttaatagatttccaaatctctgctgaaaaagaaaaaagaaaaggcttcaacagtaatgggctggtttcagcccaggcggcccagttcataggagaaaggtgcccgtgcgcgcccgcgctctggaggttttacaaaacggcccccgcgtttctgtcaaactgcgaatgggttcagacactatttgtatcaatcactgacaacttgcaccgtggtccctcaggttctatctctttaccgcgctaggtccccgacgacggcagcgcgcggaggagctccggcgagccactgcaccggccgattgaggcgatgaccggcgccaatctttag

SEQ ID NO: 45301 - DNA, 533 bp, Zea Mays
ctcgaggatgaggcaatcaacagcaagcgacatcgccaagagaatccgcccaccctagagggcactttttgcacatgcagctctgagggactacctcgggcacctctaccaggcttcacctcccagaggctgacgacatcatcgaagacgacgaagtcctaggcatcttagtcgaggaccaactcaagttgtgatcccttcgcatcaagaacaaccacctatagaagcagaaggaaatactcatagccaagcgctaatgcatcaccatgcaggccaaggtaaggcagatggtactagatgaggaacagaaggcaaagtactggaacaacaaatagcagatatgaagacgaagacccccaccagctgcaacaaaaccctctccacataccagtactggccctagctactttccatggactaaactacattgatgagcgaagccccctcgctccactgctccaaacctcaccttggcctaacaatttcagtgcaggtacctaccccaagaacaacggtagtaccgacccagcaca

SEQ ID NO: 45302 - DNA, 277 bp, Zea Mays
caggaatttgttcccagttccacaatattctatcacaatgaaattgtatcactacgattggcctgaaatcatgtaatgtttattcatctcttaattgcaacattgacttgaagacatcctttctaacaactgcactccctaatgtcattagctcttgtagttaatctgttgcaaaattacttttcactccctccccttctgctgttaagtgctaacagttctctaaaatgcatctcgagttcgtcctaagaccatggaaccagctactaactttctg

SEQ ID NO: 45303 - DNA, 433 bp, Zea Mays
ctcatggaatgcacatgtgcttattcgatgaacttcaagtcctttggtacctcatcttattccttttcgggtctgtatgggtctttatccatttatagggattatcaaactttggtgttcaacacagactttgtttcttctggataggttccatctgggaacgataatctcaactaggagatattctccctacataggagagtgatcattcatcaggaatgtattattcggtatgagatttatatgttgcatatttataattcaaagatatgagtcctcctaggatctcatgacggatcttcagaatcctattaactgcatattataattcatgccatttgccagatatattatatagcggaacaatgtttattcaacacatacgtgggatgggtctctctcacaagaccacttgaaccatcgcattcaccac

SEQ ID NO: 45304 - DNA, 586 bp, Zea Mays
ctttctacctgcctgttggctcttgggtgcgccaccgaggcgtatttgatctgaatgcttttttgttcacagaaatcgaagaactctgagcttgtgaaattggatcccaggtcagttatgatgctattcggtattccgaacctgaatattatgtcttgtatgaattccactgccttagctgaagttagagaagcaatgagcttgaactctatccacttagtgaatttgtcgatagcaaccagtacatgagtgtatcctccttgagccttcttgaagggtccaatcatatccagtccccagcacgcgaacgaccaagttacaggtatggtttgcagttgttgtgctggtaaatgctgctattttgataagtactgacaagcctcgcatctctcgactaacttggttgtgtcactctttgtcgttggccagtagaaaccagacctgaagaccttaccaactagagtcctggatgttgcatgtatcccgcattgcccagcatggacctcgtccagcagttgcttcccagtagccgaaagaatgcatttcatgaggactcctatcgcgccccttctgtatagtgtttccc

SEQ ID NO: 45305 - DNA, 381 bp, Zea Mays
aacgacaagcagtttgacagccaagacttcaaggatttctgcttctccattggcaccaagcttgccttcgcctcagtatatcacccgcaatccaacagagttgtggaacgagccaatggaaaaattttcacagctgtcaaaaagatgctcctcgacgaaaaaaagggcaagtgggccgatttgctacctgaggcggtctgggcgctaaacacgactgagtgcagggcgaccgggttcacccctttccaccttctatatggatcggaggccatgaccccacaagaaataaaacatggctccccgcgaacagttccgtcagccgtccccgacgtggacgagcccactttgaaggatctcatcgatgcagaccgagtcttcgct

SEQ ID NO: 45306 - DNA, 485 bp, Zea Mays
cagcaacactattgagtcatgtatgcacaagagacctgtatggagtccgtaaatggtaccacacgcccacccctatggatatgtacattattgtcctagcccagaatacttcctgtgcctccgactcctgtgttatgtagttagggtgctcgaatgcggcgtacaaaaaaccatggagtgtcgtttatgtttctccatgtgtcgccctaattatatccacaaatcatgcacagtagatgcctgataaacatgctaacaacgctcatgtgtcgattgacttgctgattcctctcacccctaggttgatgcatgcctgattatatgacacttgacactgttggagaaaatcacgtacagaaccgatcgatcttaggcttatcaattatatgtatgcttgggtggcggtggatgaaggtcggggttgttttatatgggcatgagacctgggaatgatgttgcctggagatgaagtcataaatatgacc

SEQ ID NO: 45307 - DNA, 623 bp, Zea Mays
ggaagaaagaggaagaaatggaggaagaagaagaaagaaaggaaataagggtgccgtatgtaggcggagtgacgcaggtgtatcatgtggttagcggtttgaataaatgtttgtacacagagccagtgcggatgatctgcaaagttaggcagagctcccacgcaaagcatactgagggagaaaatggttttgcttgtttcagatgttgtaggtaacagacccaataaatgtctcacccgtgatttgattctttatgcgcttttgcaaaattaacctaaactgtcatgccttatgtcaaaattttataacttgttcggttgactgcgccagttgcatggcttatacaagagtcaagacctttcccattttccccaacagtactggaaacaggtaaagatctctgtaactgtgttgctgtcggttaaagaaaggcacatggaatccgggaagctctcattgtgtgcattcgatggttcagagatgagccagaccattcttggatcaggtgcatgcttcattttactcccctctaattctcacctaacattctttagaggaatcctgttggcgcagttatataagcacatgcgttcaagcgtagcatagaagttctgggaggtttc

SEQ ID NO: 45308 - DNA, 383 bp, Zea Mays
acggaacccatatagcattcacatatagccatcagttatcagacatatataacacaagcatgagttattaaacagaactgctcaacatataacaggttcgctaatttggcaaagtcatcgctaacacgagccgagaattataaaaatgacaataaacaacttgcacgacaaggaagttctctttgacctttcagcttctccacaaagtcacaggaagttctctttgacccatgatttgaatcgattttgcatgtaaagtttcacattccatcggtgaatgcgataggtgactcctcactttgctatcagctccaacgcccacgaaacaggatcattcggtgaggcaatacaacaaacaggtggctggcacacatgggtatcac

SEQ ID NO: 45309 - DNA, 585 bp, Zea Mays
tgataatatagctatagccaaatctcaggcctacatggaggcaagaggaaaatgcaataaatgtgaggatcacaccctaatccatataacgtgggactaggatgctaaagagtacagtcaaccagtggtctacgaggacaacatttacatgcgcttgctacgccttttatcatttttctttcctgcacatcagcattcagtttaaatactcacgatggaggtccttaacgacacactctgtgctcataatttaattatgcttcgataccctctctctttatgccccaaagaactttttttgtttttttatcactttattttcaaaatcagcacgtgcagttgttcactgaggtgaagcctgatagctggtaagattcagttgggggcagagaatgaaggaggtaacatagcagctagaggtgggcctcatgaaatgatcaagcacaggacgatataacaaacttgaagatatttggatcagaatgggtgaattcgttgtgtgaagtggcagaggtcggctatcctcggcctgtgtgcggaatatagagtctatttgggagagcccaatcttgaaaaatcagattt

SEQ ID NO: 45310 - DNA, 428 bp, Zea Mays
atataagactcagcttcactgtggacgttccccttggtgtataaatagggcagtggtccctccatgggacaggaagagacacacgtagatgaactcttgctttctcacactgtcttagatattgacacttgcctcaatcatctctagggacttggggacttctctcccgttgtgcttgtaaacccctactacaggcaacacaatgtgagtaatataagtctcatcctctctgctggaagtatggccttgagtagcccgaaccaggagaatcgcttgtgtcatctcgtacaccatctagagccagccacgcgacacatttactggttgttatggttgttaaggaaccacggtccaaacaccgacactagtcatctaactcgctaaatattcgattctccaaattggtttcctcactagacaaatccggc

SEQ ID NO: 45311 - DNA, 753 bp, Zea Mays
cactagcggagctctaactcgctctgtccacggtggcagcgggtaccacggacaatcgaacgtgttcctggcgatctaaggggtcctagtccaattggcggggtcggggagcatcagggacacaccagaacactgaaacgaaagagcagagggtacgagcggacctaagacgagctagccacggtgaggtctctttcaaggtggcgcaaagcagatttgggggaaatttggaattggcgagctctggtgaacaattggcatggcttggtgcttgactaccctacggacccgtcggtgtgcttaatttatagtgtgcttgagcggtggcctccaattttggatttgtgcactagcggtcggagaggaagaggggtactggcacacacgattggtggccgcaaccgtggcaacctcaccggcgatctctagataggtcagtacgagtcacggcggcgtggttaaagtgctgaggcacgtggcacaagaccgtgaggtgtctaactccggcgagggttgattcaaggcgatcggggtagagcggacacagtggccggacaaacagtgccttaagctcatccgggggagaagatcttttcaccgtggaacgttatccgggcgccggtgtgcacgaatcacctcactagcgtgaatccacgcgcggggtcacagcggccggttcactgaaccaatagatttttctggtcactgtaccatcagaatcttcttcagtcagtttgacagaccatgtttggg

SEQ ID NO: 45312 - DNA, 719 bp, Zea Mays
acatcttctctatcacttccaaccactcggcacacggcttgccaaaactcttttgaaatttgaagtggtaggggagtcgtacaagttcatatttttctcttcttcctttctcttcggcatccctcatccacgagaagatggaaatgtttgtttgtcaaatattcttgcactaagtccctaatgctaatatgctctgccacaactctaaattccacctcggctagctggcagggggacccaagctacaggttacacaagggccacgtcatgccgaagcttagttttaaggggctcatcaccatattaataagcttttcccttttcttctcgtcaactttcacataaaaccattcattggtccagccagtcggccattttgtgcgataaccagtcacaggagctttagtatcctttcggtacgaaaagttgtagcatccgaagttcttgtgcaaaccatcagctctagccttcgtctgatagtggagttcatgcacccggcaaaaccctttggcgttcgcactcttcccttggcttcagagagcccatatggcattggggtgagttgatgaaggtaaatctcgaacttcttcagtacctcaccaatcattttgtatagggggaaccgaagtcctgccctaaacaagcttctaaagactacaacttcgtcatctttcggctctggaatcacctcttccccagcaaaccgaactagcttgtca

SEQ ID NO: 45313 - DNA, 614 bp, Zea Mays
aaaacaccttcccttcgctagaatagtgaattacactgacctgcgggacccaccaatctgtagggctctgggtatataaatagaagcctatgtttgagtattttgcatgctatttgagttgcttgcgttgtgtttgccattttaaccttccttgctttgtcgagtttgattggattttgagcttcgacattctagcaaccattgtccaaatggctgatgagaagaagatcattgacccggcgctggccgaattttacgaagccatggaaaaaaccaacgtggagaagatcaccaatgagatgttagctggaatatttgaaaaccctagcgatagtgagagcttcgatgaggaaagtggaaattaagatgccaaagatcgaccatggagaccgagccatgttgtcttcagaaaattaactattaaacaagggcagatagaagcaatgagagggaggtactttcgtgatatttcaattgtgagagctagaggggataataatgttcctcttcccaaagctaacgaagtggtgatttttagaagcttcatgaaagccggactttggttccctctaaacaaaatgttggtcgcagtcttgaaaacttttgaaatctat

SEQ ID NO: 45314 - DNA, 362 bp, Zea Mays
tcacattgaatttcgtaaatctattgtgacgacagacgacatggttatgacgaagaaattgggatactttggggaggccgagagcaaacttgtctgttttgctggggaagaggtgattccagatccaaaagatgatgaagtcgtggtttttaaaagcttcttcagggcaggactttgtttcccactgcatgagatgattggagaagttttgaaaaattttgagatatactttcattagctgacacccaatgcaatcgttagacttagtgtctacatatgggccctttgaagccatggtatgagtcttaatgccgaagctttctgccgggtgcacgagctgcactaccaaacgaaggccagag

SEQ ID NO: 45315 - DNA, 682 bp, Zea Mays
tccttcccccgcccgagcccgaggcagggtgttttctcactggccacccacctctgctctctctgtctctagcgatttctccccaccgccggcgagctccagcccgtctctggcgaggtctgctcctgccagggctcggcctccctcacccttttctggtgagctcctcccttaccttctcctctccctctgtttcaagagcggtgcagcccctctgcccccctctgttgctcctttccaatccttatcaaatccagtgaatccaggtggttgaatgtgttcctagtactctattaaatccccatgaaggttcctagctccttagggagggctttactttctcaaatgagcatttcttgaaaaccctaatccaccgcacgccacgtgctcggcgaaatgcccaaaccagtcaaaattgctcggattgaacccaatttttccaagcaccttcaaaatacctccagtaacatattcgccaaatttcacgccaattcgatatcctaggcttcaattttacacaatttcccatttctagcgatcgtttccgagccgagtgcccaaattccattttcttcgcctaaaatcaaaccaagagcacacttcactcatatttacccatataaacctattcgtgaagtatcggctcaattccatgtcatttcatgcctcaattcgaatttca

SEQ ID NO: 45316 - DNA, 658 bp, Zea Mays
tgtcaatgatgggactactattttggcttctttgatagacaacctaagatcaactgtgaaatacattaagaaatccccatctcatatgcataaatttgtagagatttgtagatctcttgcattgcaaattggagagggtttgagtcttgatgtgtcaactagatggagttcaacatacaagttgttgagtactagtatagcttacaaagaagcaattcaaacgtgtcgatgctgatttaaattataaatgggaaactacaaattaggaatgggatttatttgttgcgattgagccaattcttgcctctttagccaaagtaaccagttcattgttagcttctacatatcctactgcaaatcttttctatcctcacatgtggatgtcaagattgcattgagaaaaatgggtactgtgatgatggagaagatcaataagtactgggaagaaaaaacataatgttatggttattgctacaattctagatccaaggtgtaagatgaggtatatcgagtggtgctttggttagatctctaatggtgaccaagttagatttgagatagatgaagttcgaggtgagttggaaaaattatttgaggactgttagttgcaacatagagtgagaaaagctcctcaaagcaaatctagtggttgttcttc

SEQ ID NO: 45317 - DNA, 945 bp, Zea Mays
cttcatactctgctgcattattggatgccggaaacaaaagctggagtgcattcttaagttgttcacctcctagagcaataaagagaatccctgcacctgctccttgcagcttcagcgagccatcaaagtacattctccatacttcagcaacttctaggatttttgggacctggtgctcagtccactctgatatgaagtcaaccagtgcctaagtctttattgtcgtgcggggctggaactctatgtcgtgagctcctagctcacatgcccacttggctattcttcccacagcttctttgttgtgaagaatatcacctatcggaaatcctttgactactatgactttgtggtcgtcaaagtagtgccggagcttgcgagcggttagaagtaccgcgtacagcagcttttgcacttgaggataccttatctttgaggacctgaggacttcgctgatgaaataaactggatgctgcactgggtatgcgtgtacttcctctgcctgctcgactactaacgtggtgcttaccacgtgagtcatggaggagatatacaggagcagatgttctgtcggctgaccaggcatagctcggtgcgatggcttgagtactggcggagtggtcaagaacttcttcagtgcctctagagcttcttgtgcctctatggtccactgaaatatgaacctgctcagagctgccatgcatccagtaagtctttgcacctttttatgcgaccgtggtgcttccattctcatgatggcctcgattttctctggatttgcttcaattcctcgatggcttacaatgaatctgagcagctttccggctagtactccgaagacacacttttctaggttccccatcggtagcgcctcaggctgttgaagactagttgcaaatccatgatgaagttttctgagttttctatcttgataaccacattatcgac

SEQ ID NO: 45318 - DNA, 709 bp, Zea Mays
gtgtcctaggcgttaaaatgcacgcgacgcctggggcctgtaacatgcaaattttactgttacccacacgttattgaggcaaggggcattgaccaaatgcgtcgtttgagcacccttcattatgacttccaccgtgccttgtgcattaccaaggcatgaagggacgaatggagaatactagacgacaccgcccgttacactctcctacaccgcaacctacaccaaggcttgtgtttcgattgaacgggacaaggaggcagtataaggacgccagaagatcatgcagtatccaagaatagatacgagtttaagaagacctagtgttgtcaacgatatccaattgataccgctccatattgtaaactctcctaggcccacttgtcagggcctgaactccattgtaatgtgcctcccttgtactataaaagggagagcacttgatccatagcaagagaggttggaggtcaacttacactcagaccttcaactccccaattctcaagcaatacaactcatattggatgtagtgtattatgctctagtggtctgaaccactttaatccttgtgttcttgtgttcatctagaaggccaggcaatcacctaatcctactcatccgaggatcagggcgggtgcaatacgccacccggtcggaggattctccccaccggcagtatacttattcagatatcaaaatttttagtattttt

SEQ ID NO: 45319 - DNA, 841 bp, Zea Mays
ccccagcttctaatcccaaacgtccagcagggatccaacggcccaggtaccatctcctacctccagcttggctggtgagaactgggcgcgacgctcggtacttgatggcgcggtgcgtcggcatcgcgacacgacggtccccgctcacccacccttattgccactccccatctacttggcgcaacgacgcgaccatctgggcgagccctatcgcacgcccgggcgtcaacatcccacagcgtcaagctccacatgaagggacgggtaaagcatagtatgaggtgttccttacctatagcaatggggtgcagttcccagcccaaggcgctacgcgacctcgcagcggaggagagggtttcttccagaagaggtccgtgggttggggctagtttctacgctaccccgcgaaggcctttgccaacttcccatccgagcacgacggtgctcccatcagtttctctccctcatggtgatgatggtggaacgcttgatgcttgtcgatgaggagccgagaggcatggtgtatggctttatacccgcgctaggtccgaatcccagcaagattttcccaaaatcttgcagtttgttgcggagcagagcgatggatatgtgcgcgggtttgttagaaggataagctgacaaggtgtccccacatgtcagtggttaactgcaaacacaggcgcggggagggaataatgggccaactgtcgggccagttctgcggaagatgggccagcacgaggggaaaatggcccaaggcgccaaatggggtcttcacttttatttatttatttctgtttgcattttatccactaaatttcaaactcgaatttgagttgtg

SEQ ID NO: 45320 - DNA, 307 bp, Zea Mays
ctcgagtgttgttttagcagctctgtataaccgtaaagctcatcgtagcagccgtttgcccaattcaggcatgagtgaatgggaacgcaggctcgacgtcacggtttccgccgtgcgcgtgggtaggaccttctctaagtatgcaaaccaaaattgaaggctattcttgagtcgcctggggtcggaaatgctcaccccatagctaattgggatagtcgccaccggccatggccagtacaggtcgcggggtgatcgacggcgagcgcgctgtggccaggggtctgtttgaagaaacaaaggtcaaggg

SEQ ID NO: 45321 - DNA, 494 bp, Zea Mays
ccgtgatgagttggcatctctttaggaattcacagtggagacaatattacagtttgagatgtgtttccccccatcgttctttgatattatggttcaccttgtggtgcacttggtgccacaaatagaggcattgagtcctatgtacttgcatgaaatgtggacgtatgagcgtttcatgtcaatactaaatggctatgtatcaactcatgctcgtcccgaggcatccatgatagaggggtactgtactgaagaggtaattgagtctggaggtccattctgcaatagtatcctaaaagactaggctgcaataagtttgcctccatcacgacacgggggtagactgtatggaagcggtaggatgggacaaaaatctttcatcccattggattacaatacaatacttgaggcacatcacaacatcctacatcagctagtgataatggagccatttatccaacaacacatcaatgagcttcgtgagcaaaatcctgggc

SEQ ID NO: 45322 - DNA, 778 bp, Zea Mays
caaatatggatatttctgctgccttggtgcatcaccttgaaacagagaagtgtttgtgtcattaggtaagaaaggagaggactacgtgtggacataatcacaagacttcaccagaaagcaagcaaaagatccccatttcatttggcaaggtacatacatgtatcttcttttaatttcatctggagcctattcttgatttggttgtgggtctgcattaggcgttgatgtggtgcttgctggttagccgtgttgtaggtggtttagtggtagattaaaccctgtccaagactgctacaataatattcagttgtggtaaatagatggtgcattcttcagggtttagttcttgttcatcaaaagctaataacccaattactttgtgttgtcattggatgattgtcattgcattttcccgtttaaaggagcatttactttggaggtctttatggtttttaacctgtgtttgggttgggacacgaataggatcatttcctagttagttcttcctaacatccaacaacctagcatggtctattttttggatctctgtacacattggatccattatgttttcttgttccaaatttccctgaattaattatgtggaaattttattctcgttgataattcagttcatgtgcatgttagcatatagttctctgggggtgttactatttggttggcattatgttttttggatctctgtacacacatttagatcagtagtattctgagaaatatgatttacattctactaattataacgctctgataaaat

SEQ ID NO: 45323 - DNA, 1339 bp, Zea Mays
atggacctccacatcattgagcgagggccatttaatcaggaggcgagatgtctgacctacaagattagcattgctgttctttcggctccccttcagtttctcccggagagcagtctgtctccttcggatgaggatgagctccatggtgaggagctccatggtgaggaggacgaggatgtctggggtcagtccaaccctcggatccgacaactgggtcctttgcagcgtcagtctgtccaccttcgcctcggttcccatcagagagcgggcagagaacggactgcagatgtgcatggggatatggttgaggcgccagttttagctctggaaggtggtgctgctttatgtgttggtgatgactcgctgacctcccctagatcttcttcgcctcagcgcagaagtttggctgagccgctagagaaggctgggttgagctcgccccgttttgccactcaagttccaagcatgacaacttcaaagaacattttggaagatttatctcctcgctgccatgatcatgatccagttgttcccggtgctgttttgtcagttcaggatgatctagggtttaacgtgcctggcgaggctatatcaacggaaagcattaacggcgtgcgagcacttgaggtggtgccagttgtgccatctgtggagaagataaacaatcctcaagttttatcctcgttgggtcgtcctggcttagctggaccgtatgggccgactgctgcgggatcgctggattctgtcctccctgtttcgccccagcgacacatgtctattgctgggccgctggaacaggctgacgcgaatttgccccaacctgacggtccatctgctgctgaggccacccggagagtatactcgagaagcagattcaaaagcaaacatgcccagattcaggggggacaggtgatacaggtcgaggaggccaacattacagagatggtttgcctgcctcatttggagtccttgggtaactctatgcctgtgtgcactgctgatgccccttcccatagaattgctgctgaagtccaacctcatgaagcagcaagctttgaagctagaaaacatgagtttttcaatggaatcaccaagcaatcttctggaattcttcctgttccgcgaactgatttgcatgcagatcctccaccttccccacctgctgctcccatgccaagaagaagtcgtcgtgttgcgtgtgttggagtggaatttaatttacatgacctaggagggagaactaccaggaaagtcatgagatccctgcatattatcaccgagaatgaggggattagtcaggaagccttggaagaatatgctcggctttttaagcgccccc

SEQ ID NO: 45324 - DNA, 381 bp, Zea Mays
aggcgagataccccgaaacggtatacccagtctaatccacgccgtcggtgtaagatccaacggtcgtcgtgtctcctcccacctcctgccagagacggcggcgctggcacagcccacggcggagccatcgccggagccgcgcaatccaacgccaaggcgtgtaatacatcgatccgagactcgcaacgcaacgtggaggacatcacaaacatggtaggtaggatacttaccaacgacagaggtgaatagggggctgcccatggagtggtgtggtccagcggtgaagcacttacaacggcaaggaaatccacccgaccccgttgttgattctgtcaggtggaggcacgtacgccttctatgcgacactccggagcttcccgg

SEQ ID NO: 45325 - DNA, 727 bp, Zea Mays
cagtgggtttaagtcgaaggtcactatgatgaagttgaagccctaacattggtaaacaaatttgttgtattaagcttggcctagtgttgtatgatttttggagtaaatcactcccaaatttgctctgtcaggcgctctcatgaacggtcgcgatggtacagtggtgaagaaaatcatcagatacatcacacctcgccaccggtgatccccgcgtatagattcacgccggccatcatgattcgttctcggagcgaactggataaccacgggggaggggggtaaaatatctggcggggggcggatttggtcgcgtgcaggagcttatcggatgcacttgatggacgtgcgacgtggccgaatgaccgatgtcgtcgtgggtcgccggtgagctcaattgcgccatgctgtggtcttttaccacgtagtcgtaaccgtggcaagctcagaattactatccttgcgttcgtatggcgtcgagcgccacgacgtactcaccagtacaacatcttgtcaccaccgcgatccaaatctcttccaaacttgggataaccgtggccaacctctataaattgagtgtacaatctgctccgttagcttacagtctgccaccacattagctttttcctgggtgatagtgaatttccaagtcataatctttgattagctcgagccaccttctttgtctcatgtttagctcggactgggtgaaaatatacttcaaactttt

SEQ ID NO: 45326 - DNA, 611 bp, Zea Mays
tttcaaaagctattgggacggcattgtattctgtaattgggagatacaccatcaataaaatgacttcattctcaaaggcactcgaattgttttctgcatgcttactcgactcagggtgaccactataccctacgaacgaagcaatcggcttaagtcggcaatgacttaaggcggtgtgacatgctcacgcttacttaacccagggcgaccactatgccctattaacagatcaatcggattaagtcggcaatgacttaaggtggtgtaacatgctcatgcttacttaacccagggtgaccactatgccctattaacggagcaatcggcttaagtcggcaatgacttaaggcggtgtgacatgctcacgcttacttaactcagggtgaccactataccctgctaacggagcaatcggcttaagtcggcaatgacttaaggcggtgtgacatgctcacgcttacttaacccagggtgaccactatgccctattaatgaagcaatcaacttaagtcggcaatgacttaaggcggtgtaacatgctcacgcttacttaacccagggtgaccactatgccctattaacggagcaatccgcttaagtcggcaatgact

SEQ ID NO: 45327 - DNA, 310 bp, Zea Mays
gtggcagcccctctggtatctcacttggaaatacatcagaatactcctacaaaatgttagcaacaacaggaggcaaagaatgttgcatatcttgaattgaaatcaaagcatccttgcataccaaagcgtaggcaacagaagtggaagcaaataattcattaacatcagattttgtcgcaatcaagcaatgccctttcaattttatcccatctttgttattaccaacaactttaatattcttgttgttctcagttttagcttttgtagctttagcaacatcatcacgcacaatagcctcaggggacatggg

SEQ ID NO: 45328 - DNA, 1351 bp, Zea Mays
ttaaagatctggccagagaaatttgatatataaagcgctcagatcatgggtgaccggcctatataattcgtaagcaggggagtatatataaaactaattattagctactagttgcgcatatacaatcaatgcaagtcgtcctcatcgatgacgctaaaatctgaagtacgtgctacgtaccagtagtagtagctagaaataatgcaggagcaaatcacatgcatgctcaccgtaccggccggccatggcccagacttatatgcatgcatctgcgggcaataatcagaatcagtcaaaaactaagcaaaactagaaacagaaacgacgatgcaattgcaatatgcaacgcgtacacacagcttgcaaccgtacgtacgtacgtacgtatttcagcaagctcagctggcccggtcgtcgtcgtctctgtcgttgctgctactcgacagacagcgatggattataaatttcagcaaacagactaaaccacacacctgacagtctgacagcaacaaaactctgtctgtttttggctcgcgtacgtgacctctgatctgtatttgctcctcccggccgctcgtcgtcctctcgcctagcttctttcttcttcctgtgtcgttgccctcgtcggcgcctctgcttcttttaatctttgacgtggtcctgcattaattgctactgctttgcaggcgggatcttgattattaacttcgtcctgatgctggaatctttcctaatgcatcggatgcgtcccccattcctgctttaagctagctagcctccgtcgtttctgtccagttcatcagagtatacactaaatatactcagcatgcatgcatgtacaagcagctgttgagatttgttgatactagctactgcgtgctgtcgggactcgggagcagcagtatatggtttactcaactttgttttcttatttggatcgtttagatgcatgagttgcaacgtacagcgtggtgacagtggattgattattctgtctgtcttgtttgaattgggtactagtgtacgtaggcatatccatccttcctgtacgtatgtatacacgaactgaaaccatcgatcaggcaggcatcgtcgtcgacacagttggcatcggttgacggagcccctctccctgaccagctaggcagttggcatcgaccaaggcatgcagaccaagcatgcagactgagcgccccaccagtacttacgtgcccggccgtcccccggctttgagaatttgacagtggattgataatttgtttcaaaggatttccatatttccaagggaaattagtttattgtccctagaaaaaataggaatccttttggaaaatggtgttcctaaactagc

SEQ ID NO: 45329 - DNA, 536 bp, Zea Mays
tacaaataagcatatttgataataaaatagatgtgaaaacaaatcattaaagtaaatgtgcataaagagtactgactatatgcatatataataaaacaaatgtgtaaacaaatgactaaggtgaatgtgcataaacagtactgaagatatgcatatatattacatacaaaaaagcatatatgtgttccttgggttgtataagagtactctctgctaactcatcagtaaatacctaatccacagcctttgtttaaatctatgaatgtcgggcgatagtgggaatatagaataaatacacatgccctaatatcggggctcctaaacaaaaaagagatgcaatgcgcgatgcaatgacccgattatagtgatgtctaagcggatacaaatcacacatttagctggagaataagggttacaatcaaatccacttcaatcgaccgataggcttcaaaaaatcgacggcaaactcggtgtatttcaatgttggattacctggaacttcttgaatcgcgctccaatgctgggagattgaagga

SEQ ID NO: 45330 - DNA, 620 bp, Zea Mays
cactgttgtgctgaagggcaagaaaatgaaggttctgacccaccggccacgatatattgaaacgaccgtagtgcctgaatttggtgaagggacttcctccgctgtcgaagcgaatcaagatgctcccgccgaggctgaagccgaaggatcgactgtagtgccgaaggtgcttatagtcgggtcagccgaagccaaagatgatgtggccaaggagccagagttggaaaaaacaatgatgctgcaaaaaattctaagcccaccggtagaggcagaattgccgaaggtgacaaaggctcctgccatagctcttaagagaaggagaatggccagcgtgctagacgctgtcatagaaaccacaaaagcattaactcctgctcccgcgaagaaatttgctgaagctgctacggctgaggctaaagccaaagttgtgccttcagtgtctgttgagatgaagcccgctgcaactgaggaaggggctgaacaagaatctttaggggttggcataactatggaggaagaaatagctgaagaagctaaatctcctgatcccgaagctctatccgagaatcttggttttattattcgtcatgcttcgggaaagaggttgtttgaaggggaga

SEQ ID NO: 45331 - DNA, 515 bp, Zea Mays
aaagggggtatagagagattaagatataaattagcttttagtttcccattagttcagaattaagagtccactttgtataaaaatccttaatgggcgattaggagagtatatatatctagacacttattatgtgggttgatgaatggataggttgggataaccaggattatggtaataagagactccatgtacagtggatcttgtttcatctagcgatccaacttgatctttgaaaacttgagttgatgcttttcctcccttgacgtggttggtcttctttggccctcaatcctggagttgccatccgagttaaggacatatggctaaggatatataattaggatagccagggtacacgaggtaggtgggtttgaacaaagttttactttgcttttgtgatatctggattagacaacctatgatgtaggttaggttgttgtttacggacgagttagtccaaggtattaatttagggtaagatatgtttacagaattagggcctagtttatgtcgcc

SEQ ID NO: 45332 - DNA, 284 bp, Zea Mays
tgccatcagagatgctacctaggcagaatttgaaactgctttccgagaacatcatgtgccccaagggatcgttcagctcaaggaagatgaatttcgagaactaactcaaggtggaaatctgtcagtgagtatgtgcacaaattcacagaattggctcgctacgcgcctgacgacgtcagcacaagccaagaagatggcccgctttttgaaagggctaagaccagaactcaagaccatcctcgctagccaagatttcctcagcttctcgcacctctcaaacaaag

SEQ ID NO: 45333 - DNA, 479 bp, Zea Mays
tttctcgccgtcgctcctgcgccgccgcgggccccctattcgccgtggtgcgacgtcgcggccaccctaaactaaggtgaggacgaccctacgttgttcatcctcgtcccttcaacgtctagcaccggtataattagattttggggcgctaaatcccttgggctccgtgcgccggtggaacaccgccgttcggcgtgggtggcgccgcctgagtccggtgaccgatgggggtgatggggtcggcgccgtttgatccgatgcaaacggctgtgattagaacttggagataccccttcacatgatggatatgattcgttggatctggatcgaatgggcttcgttcgatccgcgctatttaaaacggtggccatcagatctagatccgaggatcagcgttgcatacccgtttgattcgatggggatctaatctcgtccgtccagactcgatcgggtggcccgtgttggtcgataccccttcg

SEQ ID NO: 45334 - DNA, 422 bp, Zea Mays
attgatagtgttatctcatgatccctatattagtagattatataattggagatatacaagtaactagtgcagtagtaaattaaatggttgatgtttagtaagaaattagtttcgatcaatgtcaatttagcaagtgtcactatgtggacgagaaacaaaattaataagatgttaccatttctaataattgtgctgctaatctgagtattactaaataaccaaacaattgtgggctatctcaatagattagtataataagcagtgtgattaggctatcactttcttgtgggcccttggatgtatgcttgcattagagtattgcgaacaattgtaaaacctgattaagtgactattcctttttaactatgtttgtctatatataagttccaacaaatttaggtgtacttaactagtttaataat

SEQ ID NO: 45335 - DNA, 548 bp, Zea Mays
caagcatctaggtccaacaagcaggttcatctcaaatggttaatcaacaattgttgattcatgttcatcctgcaaaataataaaaacaatcctcaacagctcgagtcaggctcttcaatgcaagtcattaaagcaacaaataaacaataccatctcttcatcttgttcatcaagacaagtcatcaaaacatccatcatagttggagaccctacattgcaacaaagcagccatcattggttgtttcctataatgtgcatgaaatcaaataacatataaatcttgttaaaattctgaccacgtacctaacatgtcagcacgggaccaagcctgcatacacatgagtgcttccaccattgatggtgcaagcttactacggcgtggactaattattcttcctcctgtgctaaacacggactcagatgccactgttgaaaccggaattgcaagaacatcacgtgcaatctttcttaaagtaggatatttaagcccagcatgctgccaccactgaatgatatccaaatcatgtgtcctaggaagcagtggttcc

SEQ ID NO: 45336 - DNA, 524 bp, Zea Mays
tgatgaccgtcgtctgggcaacgcctgaattggtgcttggggtccaaattgagagaccatgttgcttcacaggaatacagaggacctgcacagaacctcttcatgtgcggtgatcgactaggattgctcgctgctctccaagaacgtcgcgagattgttgccaccgacatcaacgctatggcaacctagatgcgcggtaagatgccgtccgaattcaccttggacccccctctgtgcgttgtgccgtcgggaatggagttttcacggggtgccgcttgggccatggttagtcatggcgccgccgtgggcagggccggcgtgctgccgtattccggctgggagaagaagacatgcttctagccgtggatccgtgaaacaacgatctagattagatcgggttcaaactaaacatggaccatccgattggatcgaagggatggggctgatgcacatcttcattaaatatcacccgttggatctggatccgaagctttatattgcgtaccctttcagatgaagctaat

SEQ ID NO: 45337 - DNA, 709 bp, Zea Mays
cttcggcgagctagaccggccggatgatgccacgacaggagctcccgagcgacagggacacaattgaacctttaccgaacacttcccctccatcaatttcaccaagggggcattgaatcgatcagttcacggtgaccgggcggatgggcaaggggatgaacgtgttccgaccaaacgacgacgtggataaccaaattgaggctggggaaaggttcacggattcgccagaggttaggtacacacttggatttgggtgaaataggaatcaaagagtgggtcgacagaggggtagtcatggcggcgttttacagagcaagggtgcattccggtgatgggcttcggccgaccttcaattcgccgctttcgagagcaataagagatcaaagactaactaaaacagggagcaatttgataaatactaacccgaggagcgctggccacgggtgttgcttcacggcggagcaagaacagaggagagagggatttgtggtttcttcggtgaaattgagccgagtgctcgatcgcgaaggtgcgggatgtgataaagaagtagatcccgggcgcaatttataggccaactgccagaattggatgaggaccgtggactttagattgcgcaggcgagctcaccgcgcggcggaacccggtgatggcacggtggccgccgtttaaccggggcttgccacctcagtaactttctgccacgtcg

SEQ ID NO: 45338 - DNA, 482 bp, Zea Mays
ccttcgccggcgcccgcggagccgtgtctcttcttgagaaggttggtcgcgatcacgcaaaggttgtagttcagccagaattttttattttagccaatgatattaagagcccttcagccgaagtcgctgccctgagtgggaaattttactccgaagtctggttgaaaggtggccaagagatagctgacgaagctatcataaaaaacgagaaagagtctcatgatgccttggaagaggccaggaaaactgaagaggttgcagaacatgcaagacttataggtatatctatcgcgacctagcttcgtaaattattttagcttcagaactaacaaacacttgttctatggtgcagctgaactctctccccctccggagccatatgaccctgaagtcaattcatctctgaagggggctcttgacataattagaatagctaacgaagccattgacgaaactgttaacaggctactaaacgaaactgc

SEQ ID NO: 45339 - DNA, 433 bp, Zea Mays
tgtccattttcgttttaccgtggaccagcccgcagcaccgaatgtgatatcccccacgcacgccacccgtgaggccaacagaagtcagctggcaacatatgaagtacaagacccgcggtagagtagagtagagtagagacacgcagaagcgctcagtaaactttaaaaagccccggagtagagtagttcttacttaccagtgctgtcagtaacatcagcgcgtagtcccaaggaaggtcagtaacatgagcccagccgggacggaacggcgctccctctttctcctcccaccaaaaccaaagtgacgtgcaaaccaacaagcgcaagcaggctgggagtgcgcactgcagaggccgcctccggcacacacacacacacacagccaagtaaacaactctgccgtcgcggcattggacgcaggacgcgcgtgcgg

SEQ ID NO: 45340 - DNA, 560 bp, Zea Mays
gggtccattctgtcagcgctgaccgtccatttgcacgttcgccctcgctggatcacggaccccacatgtcagccacctccccttccataacctcccgctctcgctctccgccgtggacgcgcccacaacgcgcgtttcccggccactctcccacacgcccgacccctttctagagcccgcacccactcgctcactcccctcgcttagttgcgcctcagcagccaccctcgcttctctctctctcgcaccgcacgtacacccgtggagctcagtcgtggtccaccatccattccatagccgccatcgagcttcagtcgcgtccgttgcctcggtgagcttcgcctcctcgccagtaacgcgagacaccctctggtttacccccaacccctctgttttgccggtccgcgctcaccgggcctttttatcgtgcaggtggagctccaccaccatcaacctaaggcctccatgcgtcctcgtcgttgctcaagtgctccagagtcccccctcgaggtgagcaactcccccacgcccttaatttcccgtgaactgccctattgtcc

SEQ ID NO: 45341 - DNA, 298 bp, Zea Mays
agagaagggggtatgagaatgatcagaaatgagagatttaggtaaatcaacattcgatacttgagaacgggttatagcagataaccagataaaagggcaaaatcattaaagatccagagatttggatgataaggccacaacatgattcataacggtaaaggtttactagatctaggtgaaaagatatgtcatcaacccagatagcttctatgttgagcagaagagaatttaatgaggattttggacaaggtttccaaaaagaatttgaggctagacatggtttgcgtgaatagacaat

SEQ ID NO: 45342 - DNA, 517 bp, Zea Mays
ggaatctgaatctgcagatgatattctactagaaaaatctatgcatcatgttttatgttatgacagagactgccttcgcttctatccatcttgtgaagtatttgacaaatacaaatgcatatttgagattgccttgagctgccgggatctgacgatgtctattccccatcgttgcagtggccatgtgggggtgactaactttgatttttgcaaaggccacccttaattggtgaaaacttctagcaggctttgcaattctgtgttgtgccagggcatccctcacaattctaggctagaagaaacctaggcgtatgattcttgaggcgagggacctagggcccatgtggcaaccataaaatcctttatggacttcgactaggagttgtttgccctcgctctttgcgataatttgaggaggggttaaacaattccttttttatagagggtgtcttttgatgattgtgtaatggtggcttctgtatttgagcctggattcatctgatgggttgcttcggtg

SEQ ID NO: 45343 - DNA, 720 bp, Zea Mays
ggtttcctctggatttcgttgctcgtattctttttcgcatctctcttcttcgctttctcggctttggtcgctcccgtcgtcggtccgctccagttttcacggtggttggtttgagtccccgattcgtccgccgcttgtggaagaagagtggttgcctttgcctcgctcgatttctgcgtcgaagatggatccaaaaggtcgaaacccttactgggatcgatggggtcagaaggatgcgcctcaaggatcccaatcgtggaacaagaatcggaacctaagctggcgattgaagccaaatcttggcaaatcggatgtcaaggaggacatcgtgacttcatcttctggcgatgggggccaatcaggtattctcaaaacccccctgctgctttgaaaaaagagattgagaatgtgcgtcgtcctttatgtcaaaagtgtggggtggagggtcatcatgctaaagattgttttcgatctctatggtgcgatatttgtcacaaagaaactcatatgactgctcgttgtgtcttgcccaaacaaaacaagccatgcatgcctattgttggtatggcggctgatggattagggttttattcttctcatttcgcgaaacccttgtccagaaaaccaaaaagaagcttcatcgggttggtaaaggttgtcgagggtctgatttctgctcaagactttgagaaggactttggttttcattttccatggggc

SEQ ID NO: 45344 - DNA, 890 bp, Zea Mays
ctccttttcagcccactccaccttctccgtgtggcccaactaggtgaagggttcaccgaaaggagggcccatgtctctagtctcgtgcgcgcctggtgtcctcgctctgactagggtgccccacttatcaatcgcgtgtcatgcgccacgcattgcgctcctgcgctgactgctggggcacttacatccagggcctacctgtcagtctgcaccacctcaacaaactcacgcatatgccagcgatgtggagctcgggtgggtccgtttcttcctcctcccctctttcctctcgccttacataaggacctagccgccaaggaagaccattgtttccgtcgtcccgtgttccaccagaaggaccgctatggggtgtgggagagaggagtttgtgtgcgatttgggccaccgtgggtgattcccgtcgctgcgaggtgtccgtcctcggtgaagggccgaggagggacgtcatcatccagggtagccgggcgtaaccacaattgggaggcgaagccactgaaccagaagcaattcctcgccgttgatcgatttccgccgcgagcaacttcgccccgtgaccgggtacttctacgacgtcaaggctggtatgtcacccatccatgagctcaccatagtcttcgcattgtgtcgatgttgtcaaatttgggaatggttcccgtgggcgtgggcgcgctgctcaccggcgaaatcgtcgccacggtggaggccttggctgctgttcgcccaatgtagggaggaagacgaggtgatttccattgatcaagaggtgtgcggccacgattagacctcaggtaccccttcgagttttaaatctgaaccgtcgatgaagtaacgagcgatgcagattagatctgggcttcattaaattgtgg

SEQ ID NO: 45345 - DNA, 501 bp, Zea Mays
ctgaattcaggatactcttgtctggcacggtctttcagaacaactttgaagagtacttcaacaccttgtctttggccagacctcgttttgtcaacgacgttatgaccacgctggttacagaatcagaaaagagaacacggagccgaaccggcaaacatcaagaagcactggcaaggcatgtttttgtggaaagagtggggcacaagatagagtctagcagcaaacatgacaggatggatggcatctccttgttaaatgagcttactcaaggattcatcgattcgttcgaaggtacaaaactgaacattcttccgggtatacgtgtttatacccttttcatgaaacccaccgacgtccaggaagaggtactggcgaaactgctgatgcccttgtcaggcaatgcgcgttaccctctcgagtatgagctgctcatcacaattgcttctatccatccttggcttataaacacaaccaagtgtgctagcacttacttcaccccag

SEQ ID NO: 45346 - DNA, 474 bp, Zea Mays
gctccgtcggggaactacccgatcttgacgaagaccaactaccatgactgggcggccctcatgcgcgtgatgctgcaggcgaggaacctgtgggacgcggtgagtgaaggcacgacgacttacgtcgacgaccggaacgctttggagatactctccaaggcggttccgccggagctgatgggagccgtggctgggaaggcaacggcgcaggatgcgtggaagatgcttcgactgcgcaacgtcggagtcgaccgcgtcaggaaggcgaaggcgagcacactgaagagggatttcgacgccctcaagttcaacgacggcgaaagcgtggatgatttcggtgtacggatcacacgcatcacgggtgaactggcggtgcttggtgatgaatacaccgaggaggaagttgttaggaagtttctgcaggccctgccatctcggtttgatcagatagcggcttcaattgagacgctactt

SEQ ID NO: 45347 - DNA, 1026 bp, Zea Mays
gaagagttgaagttctgggtcggtctcttcgtataaggtggcagtgggcacagaagattgatgaagaacgtctttgggctggactgccagttcaggctccatgcaatgctcaggctttatttaaagttgctgtgcaaaccatggtgggcaatagtgcttcaactaagttgtgcttggaccgttggctccatggcaaggcaatagctgaatatgctcccaacatgattcagatcattccaagagagcagtgaagcaatgaacgaaggctcaagttttgcataacataagatgggtgtcggacatcaaggggctccaacagtagaggtcctggtggagtaccttataagttggtctaacccaccctcaacaaccaaggtagagctaaactcctgacaatctcacattaatatacacatgggccaaattcagaccgggtcagatgtcttccgcttttaataagctcacaacaggtgcacacaattttctcatttgagccaaatcaatttctcatacggaattaatcctttattgcacgtgtagacaatggattttatttggtttgattaaaataaggttgagccaagcccaattaaatacaacaaagatggctagctcattatcattggtatgggtgggcccatgtgcatgtgcaagttgtacattccatgcaactagttataaaaagagttgtcaacacaacccaagtatgtttctaaacagaggcaacatcatctagaattgctgcggtgagattaaagatttcccttgcccttatttggaactccctctctcaattcggaagcctactaatgctgagttgctgcccttaattgacaaagtagctgataaattgccggggtggaaagccacgctcatggcagagttggtcgtcttatgatggttaaggttgttctttcctctatcccagtctatcttatgctcaccatggacctccccaaatgggtaatcaacgcgatcgataaaaggagaagtttcctttggaaaggatacgaacatgcaaatggg

SEQ ID NO: 45348 - DNA, 486 bp, Zea Mays
ctggaattcttttcttataatgttgtttttgttaatgaacctctattccaaacagagtttgtgacaccgaaagcaccaaaggtccctagatagctgctccaaatgatggcacatgatccttctttatattaacgcaaaatcccatgacttttgaaagccaggccatattcttgtgtacaggacaatatggtatggataagatgtctatttgcagcttaccaagttacaaatactaaacatcatgatatcaactactttgtgcatgtcaaatttcatttataccagttgagggttattgtatctgtagtttgaacatctgacaaccttaagtacttgtagtgtccaattgagcatatggaaaactagtttctgttaaggcttatgtggcccatattacatgtgcctatatattctaccaagtcctaaggactaaaggaatgttagtaacatggtaccaaagcaggttaaggttagggttaatctccc

SEQ ID NO: 45349 - DNA, 458 bp, Zea Mays
gcgcgaccacacagtcgtcctgagagaattcagcgaaggagacctcgtactcgtccggacaactcggacagagtcacagggcaagctagaaccaaagtgggagggccccttcatcgtcaagacgaatgcatctcccagcgcgtacaggctaacaatgccatccggcgaagacttagagcattcatggaatattgacaatctccgcaaattttttgtttgactccttagggctagcttgcccttgtaattcaccaaacagttttattctggcccgcactcttttcctcccggggggtgaggtttttaatgaggcggagccatgtaatatacacgcaaaaaatcccccgcaaaaaaaattacgtcaaaaaagaccgcatcgacggtcttcggcattcgaccacaacgaagtcaccgcgaggggcagcgctggctaccctcgcgtgcgacactccgcgcaa

SEQ ID NO: 45350 - DNA, 578 bp, Zea Mays
ggggtacccggattacacccataaaacacgatttaaccctaaggacaccctcaaagtatgttccccgaggtcaaaggatcaagagtcacgcctcgcccgaggtccccctcaggggtcttcccaaactccgcctcgctcgagcctgatctcggatggggagtgtgcttgggaaaatatctatcctggtcgaggtcacgtcacccaagaacaacgatgtccgcctcggtcaaggacaaactcagggcaacacccatctaacgtctgtcgggggacaatcgcattcaatacgcatacctaccccactcaggcctgaaggtgaataggaacaacaagatcgtagtcttgtcaaagattcaccagctatgattatgcgtgcgaccactgtacatgcatgttgtctgccaactcctgatgggacgcgtaatacgacaggggcgcatggcagccctcgagcgcaaactccatctcgcccgaagtagaactcaccctcgatacaaaacttcgcctcacttgagcccggcctcgactacctggttccccacgaatcccgcagaaggccactccttcgactgtggcac

SEQ ID NO: 45351 - DNA, 680 bp, Zea Mays
aaacatttgggatggagagactacgatggtaacacatcaatgagaaaaggcaaaaatcctagcttgattggatgtgtttttacatggtcgatagtctccagattttagtggaccattcacctacgtgttgtgcaccaatgccctttgccccaccccgtctggtgaggcaagatgagcgagcgagggaacgtgggcttcctttctcctcatctaaaagctatatgtgtgattttggtaattgaggcaattagtcgagtaacctatattataagcattgtgaatgagctaggttaagtccatatcaaagatcgagcaagaatgacaactatataaaggatagtttagccataaaggataatcaagtgatcaacatgaaaagactaagaaaagtaaaatgtaagggcttaagacaaaggtataacaacaacatttcgttttgtccatcaagatacaatatattgcatgatcaaatttagaataagtggtcatactataaaaaagggaactcaaagtttagaatggttacttagataccacagatgaattaactctatgaatgaacatttgacctagtagtcatgaaaatccaatataaacataatcgtggaaatgctaactcatatgcataagtatgtggaacacattggagaaatttgaagaaattaactaaagggtgtatc

SEQ ID NO: 45352 - DNA, 1111 bp, Zea Mays
agttgcttcagctttcagtcgtctgtctgtgtcgatcgttgccaagccttcaggcgagtacgttcgcgccaaggagcactcctccacgagcgtgaactgcgcggccacatcaggtactaaacactcagcaaacttaccaacaatacaaccagtgctctgaactcttctgttgtcatcaggtacgtggtacacccagcagcagaccccttctgtcgtgaaacagtgctctgaaccacgttcagtgtcggtaaggtttccttgcagtagtattattaatttccgagttcaattccaactgcatagtatgtggtttcgcagataaccagatttgaaacggttcgtagtgacctggcactagccattgcaaagatgcatgtagttgggaacgagttgaaagatttggccggaaatgagataatggattcgccagatacggccaaagaggtgtcagtgaacttctcaatgtggcgcgtgtatgagcttgctcagtcactgctggacgaagcacaacgtttagaagatcttgaagctggtccttcgccaccattatctgaatgtttcaataaccattttgctgaagatgaagatatgggtggcggggaatgggcactggatgatgtggattctgaagagcttgtggatcgtcagatgaagtagagtagtatgtgtggtgtggaatgacactggatgttagctgtgtaaggttatttgtgtaagagttatctgtgttaccagtgtaaggttagtatgtgtggtgtggcagtgtaagagttatttgtgttagcagtgtaagagttatctgttcatggtatctgtgttagtatgtgttaactgaacttggaggttatctgtgtaactgaacttggaggttagtatgtgtggctgtgtaacttctcgcatttgttcaaacagccattcagctgtgttatctgtgttagtatgtgtgaattatttcagttatctgttcatggtatctgtgttagtatgtgtgaattatttcagttagacagaaacattcatgttcaaacagccattcagctccaatggtttgccagtttgcttttgccagtttggtcaagctgttcgaatttgccattcagctgaaacagaa

SEQ ID NO: 45353 - DNA, 614 bp, Zea Mays
aaaacgaagatcaaactagcaattagaaattgtacgttcacaacaattaacatcacccgtagcccgtgaagttctcttctccccatagtttatttacttttcttctatgtaaagggctaatgaaaagttgagcaaagtcatcccatgacattctaaatagaagcactactgatggcccaaaacaagatgattgtggtggttctcctccttgccacctttcttgtggtggcaagatcgttgtgggttccagaagaaccctcaaatgcggatgacataagaggtgcttgcatcgaggagtgcaccaaagaaaataaggctcctggcgacaagaagacatgcgaagtgttgtgcaccaagctcacaaaaaagcctagcgaagaaggcaaacatgattgatgaagtagcactccgataatatataccctagtggatgagtggtcatctttgtagccatgtctgccacacgatggccttgattatattgtcttattgttttgtttttggtttccactagtatcctaattccttgttcatgtaacctaatgtcactcaaagcattttatatgcttcacttaattaaataaatacaaaggcaaaggcatgttctgttttgg

SEQ ID NO: 45354 - DNA, 403 bp, Zea Mays
cgaggtcaccaggttcaggaccgtctgggtagagatgccggaccgcccataggtacattggaccgtccgattgatgtcactggaccattcgacgctagcagaagcatggccttggttgactcagctgattggagaacacctttggttgcatacctgtgtgatccaaatattgggacaaataggaatattcggtgaatgacttttaaatatgttatcattgatggtgaactttattgtcgaactcctaatgatgttttgcttaagtgcttggccactgatgatgctacatttgtcatggccgaagtgcaagaaggtatttgtggtacccatcaatcggctcaaaaaatgaagtgccttttgagaagatctggtttctattgacttgacatgataactgattgtt

SEQ ID NO: 45355 - DNA, 368 bp, Zea Mays
cctagccgagccctgcatggaaacacccctttcttcatggtctatgggtcggaggcagtgctacctgctgatctcaagtttggggcgccaaggttgattttcgagagcatagcagaagctgaggccaccaggctggaggacattgatgtacttgaggaagaacggctgaatgcggtaatccaatcagcgcgataccagcagaccctaaggcgctatcacgacaaggctgtgcggcaacggttcttttcagtaggagacttcgtcctccgccgaattctaacgggggagggacgacacaagttatcgcccttatgggaaggacccttcgtagtagcagaagtcactcggcccggatcgtatcgcctcac

SEQ ID NO: 45356 - DNA, 325 bp, Zea Mays
gtagcaactagggttctccttacaaggcgttggaccctaacgggatggtcgtgggactatcatagaggtttcatgagtgttggactggtccgaccgtagagggggaaagggtcgtccaactatatggtccagttgaatactctaaaggttatatctaactcagtaaggtcattatgactattgagtctcatcggaccaagggttatggtccgacggctaggcatcagatggcccgacacctatgtttttaccctagagtttttataacatacaattaggtggttggagtgtataaatgcaccccgactctcccattctaactctc

SEQ ID NO: 45357 - DNA, 374 bp, Zea Mays
cggtagcaaggttagaatcaataagaatattaattgcctatgctactaatcatgatttcaagttgtaccaaatggatgtcaagagcgcatttctaaatggaccactacaagagttggtctatgtggagcaaccgtcgaggtttgtagatccaaggaagcccaaccatgtttttcttctccacaaagtgctctacgggcttaaacaagcccctagagcttggtatgaatgtctcaaagattttctacttaaaatggttttgagataggaaaagctgactctaccttatttactcgcaaagttgataatgaattatttgcgtgccaaatatatgtcgatgacattatatttggtagtactaacgagaaattttgtg

SEQ ID NO: 45358 - DNA, 362 bp, Zea Mays
tgagcacattcatttcagggtcaagcagattgggagatgcgttatctgattttttcctggtaactgaaggggaactttgtgaaaaagtgtgcaatctattctgttgatgatctcagtcatgcttcaaggttggagcattctctgtccagcatgaaggaagctagaaattcaattccaaactggaaagtctcacaatgctggctatcaggcctctaaggctgactggctagaccaggtggatggagagtggaacaagtatctatacaagacggcgctatctggactgggagaggaaggatgtgccaaaaacattcacagtagtaagtaatagcgaaccccatattaggtaaggagtaacctgc

SEQ ID NO: 45359 - DNA, 341 bp, Zea Mays
atcccacgcaccgtgattccttgagccaccgccaggtgggacctcctcatcggatgtctcttctccagtccgaggcaatcgacgccgagcccgcggctcacctgggaccggaagctcctccaccttggccatcctctcattgttgcacgcgcggaactgttgctatcagttgggaaacaaactccgtgatgcgcggcacaaacaaaatcaaaatgaactccatggttctgcggggattatgatttcggctgctccctggaactgacacggtgaaatccacggcgagctccccggccaaaccgttctccgcctcgggtgccctgcgcctatataaatcggcg

SEQ ID NO: 45360 - DNA, 526 bp, Zea Mays
gtggaataggtggccgaacatttccagcgggatcctggggatgatgagtaggcagatctgcagagagaatgcgcggggaagcggcttgtaatattttttggttctgtaagatactcttaagtactaatcagtgctagcacttatctgcttgctttttatccttgttgtgtgcatcattaccaacttctcctagtacttggcccccctaggatgcgggctcgaggtatcgaggctggatgccagtgtacttaagaaagaattggagacctagcccccaggagatagtcttgaccgggacctggacctggacctgcacacagccttggctaggaagctttagtagtgtacccataggaaccactaactggtatcttttatcctttgattgacgccatagggcctacaggacttagactagggagccaatccgtgtgcccggaccgcatggatcgcagctccaaatactagggcacccatcgcaggatggtggagcgtgtgggcttagggtacaggacaaggctaagcg

SEQ ID NO: 45361 - DNA, 296 bp, Zea Mays
atgatgaattgtttatatttcctatctaaagagatcatccttcatcatatactcccttgtgctattaacatctttcttaagtattttcaataagtttgaaaggaaaaagaaacaactacaaatggaggactctcaaatgaaaggggaggacatcaagaacaacaacttggataataagatctacaaaacaatcaatggtgtggttgtgagtattctaaatcctttcataatgagaatactaggcttaagttgtttattgcaaatttaatgagccttgatcaaaatgtataatgctt

SEQ ID NO: 45362 - DNA, 567 bp, Zea Mays
atcggactgctgtcacaaaattatgaaagcctagggtttatcttataaatatcagggcccaactgtaatttcttttcactggaataggaccacgggtttattttataaaaacgcagggactcttctgaaaagttgctgccgcgaaggggtatcttcacatgacagccgtccgatctgcatcccacgaactaggttagatccgcacaccagaactggtatccatttatgaccgcatgatacgagatctacgacccatattttcttaagtccgatccgatatcacccatccgatcaccatgcaacggtccggatcgactcacgcgaagggatacatgcattctgttcacacccgcatgataccggatcaacggcccaacaccatctccttcctccaccagccgggcggcggcacagagtacgacgaagctcccaccggcgcgccatgccccgaccagcgaccataacggtcgacttccgaatccggcagagcctaaactatgcggcggtcaacacgacgctaccgatggggggtcataccattgttggtggcgtgaaggtccagcggcg

SEQ ID NO: 45363 - DNA, 910 bp, Zea Mays
gccgcgatcaaaaccaagttcaatactggcttatgttgctaatgaacttatgtgcggaaatgatgttagcaacgacgtggaatgtaaatgaagagcaaggcgagtatatgagcttagaagaggcaagggcatgcaagtccaaataggaaagtgtaagcacacgaaacacaccgatttgtttgtacacaactgactggatctctttcaaccatttcctcacgtactcaagtgaccaccaagttcaaacttgagttatcccttgctcaaatgatgagaccgaagtctcgcaaggctctccactcaaagttgaaggctctcgcttgctttacaatcaactggagccgcaactccaatcacaacaaactcatctctttcactaattaagtttagctcacatgagtgctcttgcaactagctctcaaatggatggctatctctatgcacacaactcaatttgattcacttgggtcacttggatggctaggagatgttgctctaacttgttcacaacgtttctcaaatcatggatgttgtaatgctcgattggagtggtatatataggctctccagctcaaactagccatttgaactccacctagaaatctgtgtcatatcgtacatgtccggttgtgcaccagataggtcaagtgcactatccagccagtgaccgttgggtaaagttgttagctgtcagattgtcacatagggcacatgacacgtctgttgtgccaccagatgtgccacatcattcgaccattggatattgttgttgtcgaccattggatctattgtgcatccggtgtgccatcggatacgatcgacgcatatctttgaagtgttcagtttgcaacctcattgtgtgccctgtccagtgacacatctgttatgccatcgaacacctctaagtgtg

SEQ ID NO: 45364 - DNA, 310 bp, Zea Mays
aaacaaagaagaccatctatcagacctcgcagaaacatttgccaacaagcgcgaagacagacttcgtctgatccccgaaaagtgtatattcggcgtccggcaaggcaaaatactaggttatccagtatcccacagaggcatagaagcaaacccagctaggatataggctatactggacatgacaccaccacaatcaacctgggatgtccaaaggctagcagggagactcgctgcactgaacagattcatctcacaatcaacagagcagagtctccacctcctcaaaacactgtgcggggcgaaagacttc

SEQ ID NO: 45365 - DNA, 752 bp, Zea Mays
caagttcggagcgccaaggttgatcttcgaaaacatagcagaagtcgaagccaccaggctggaggacattgatgtactcgaggaagaacggctgaatgcagtaatccaatcaggacgataccagcagactctaaggcgctatcacgacaaggtcgtgcgtcagtgatccttctcagtaggagatcttgtcctccgccgaattctaacgggggagggacggcacaagttatcgcccttatgggaaggacccttcatagtagcagaagtcactcggccaggatcatatcgtctcactcagatggacggcacaaaagtcgggaactcctggaatatagaacacctcaggaaattttatccctagctgtacttcaaaagctatcgggacgacgatgtactctgtaaaatggaaatatgtcatcaataaaaaagggcttcaaagatactcagtttgttcatgattgacttgcattcttacttaactcggggtgaccactatgccctgctaacggagcaatcggcttaagtcggcaacgacttaaggcggtgcaacatgctcatgcttacttaactcggggtgaccactatgccctgctaacggagcaatcggcttaagtcggcaacgacttaaggcggtgcaacatgctcacgcctacttaactcggggtgaccactatgccttgctaacagagcaatcggcttaaatcggcaacgacttaaggcggtgcaacatgctcacgcttacttaactcggg

SEQ ID NO: 45366 - DNA, 754 bp, Zea Mays
gcctcttcggtccaggaaaatgggcctgatttccgcaggagcttgaagaagggcagtgccctctcagccaacctcgaaatgaagcggctaagggctgccagtgaccccgtaagcttctggatgtccttaatacgggtgggaggcctcatcacctcaatagccttgattttctccgggttagcttcaatgccccggtatgaaaccaggaaccccagcaacttctcctgcggagacaccgaagatgcatttcttcgggtttagcttggtgtgggttgcccgtagcttgccgaaaaccagggtcaggtcttccactatagtcgacccctccctagtcttgaccatgatgtcatcgacgtagatctccaccttgtcctgaatcaggtccccgaaggtcttactcatcgcccaaacaaatgttggcaatgcatttttcagaccgtagggcattacaacataacagtatagcccatccactgtcacagaagcggtatgcctcctatcctccttagacatccggatttgatggaaaccagagtaggcgtccaagaaggacaaaaggtcgcaccctgaggtagagtccacgatctgatctatacgtggcagtggatacaggtccttgggacatgccttattcaggctggtgtagtcaatgcacatctgaagcttcccgtttgcctttggcacgatgactgggttggccagccacacggggtggtgaacctcttcgatgaagccggcatgcaacagcttctgg

SEQ ID NO: 45367 - DNA, 606 bp, Zea Mays
ctaaaatatagttcaaggttcaaaatcatcagttatctattttaggggacaactttataacaatgtattttaatccccaacttttggaagaaatcccctaagtcacacaatagaattttagagtgttacatttagccatagctaatatagcatcatctgggcccaagcatctaagtagggcatcgtcgacaactcggcggtagagttcatcatcaattaaaacatatttaaaagttgtacgccaaacattcttgtctgtcctaacactaggatcacacaagtaattaattataggtgccctccaatcagttgcatcggttgtgttgtcagtagaattaattaagaagacgtctcttgtaccgtcagacggtccagactccttgctcggatggtctgaacccaccgcgggcggtccagctatgtagtgtggacaatccgtgacatgtggatttggcgcaatatcatttatcaaactttcaacaatgtgaaatctccctcgctttatttgataatctcatgctacttacaccaaattattagctttgcaattctcagctctggatatatgccgaatatcgaattcgtcaaaagaacgcattatgtccc

SEQ ID NO: 45368 - DNA, 515 bp, Zea Mays
tacgccggaccatccggatatgcgtacgcagagccgagaactgcgcaatatgcacagtttccacattcatcgcagcaacattatggtgccccaccagcaacacattataatcataccataccacctcatggacatagggctgaatactgttcggccacaagagagcctgagaggtatatggtaggagctggtgacattaataggacacctaacacacacctcaaacatccctgtgaggaaagccgacagagtgatgttaggcaacctgagatttccacccacaaactcaatggatggtcgccatacatggcggagaggatcagagacgaagtagctggggtgttcagggacaaactcggtgttagtgtgtcaggtacagggcaatcgtatcggaagccttatagccaccgattcgacaccgtgccatatccacagggaactagaataccagtcttctctaagttttctggtgaaggtgggaaaagcacacacgaacatgtaagccaattcatagc

SEQ ID NO: 45369 - DNA, 580 bp, Zea Mays
tcactatcatgcacatgccaattgttttcaaacaagccattttattcattacatcagtgcattacaagcatatggttacgacaagttgtactacacgagagcgttccctgaggtactaccgaactctttctctaaagtatccccaaactccttgagaagatcatcaaggcttgctagggatatatcctcggcgtcggaccaatcatctaccctggggggaggtggggctggaggggtcttcttcttcttcttctccatttggcaccctcggttggtggtcttcttctggattttcttcttgggagcgagcttctttagcttcttgtcatagtccatctttagggttcgataggcttcacgggtgttggcctcctcgccttccgctatgtcgagacactcttggagggatgccttctcttgcttaagctctctgacttgccgctccaggctttccacccgggagtttaggtgggcgcagtgggaggagagatcatgggcgtcgagggtgtggaggtacccgaccatgtagacaatggtggggtcatcctcggtggggtctctccctaacagagcctgaagt

SEQ ID NO: 45370 - DNA, 585 bp, Zea Mays
ctcaagctctgcccttcttaacttttatacctgtggacggttctgcacctaggcacggatggtccacaacctaggaaaatgtatggtctgtgacctaggcacggatggtatgaaatacaatacctagaacacacaagtccctgtgcagatttaatcaagtcaattgtggactgtttttgtcccttagttggatggtccgcacaacacaccagggacataaccaaatcgaggctcttctggccaatactaccgaacaacccgactgctaagcccagctggtccgcggtacaaaacctacaaaccacacaaaaatgctttaaatctgcccaattttctgttagccttgtgaacagtctagcctcctagcccagacgatccacaatacacaatttcagtcctttttcaaaaattcgcttttaaaaagattttatttcacatcagaagtgctattagccatcacacacatgcatcgactatatgctctatgaggcactaagtatctcgtcaggaaaacatcattgaccccctcttgatagtatgactatctagctgtcacacccgggttttaggggcaccaagacccgg

SEQ ID NO: 45371 - DNA, 801 bp, Zea Mays
aacggctagctcttggtactatttgtaccctctaacttagcttcttaaggtgtcttgccccttctaacatgtgaagcatctacttgagagtgacgattacccttttcatactgaggagattagagaagtgataattgtacggttagcgaccacattagtgcatagatagtgacttatgtacaaccatcaccctcgttagactgggcatggtcaagtaaaagtctagtgtttgttactcttagtaattggcatcacctagacgacttagtcgcgatcgggtgtgatgtgatcacccagagagtttctaggtaacttgactcgagacttatacatagctgtgagtgattgaccatgttagagcaacgaagaaccaacttctagagagcacttggactttgcacggaccaactaggagtgacatccttgcatgggtactccaataaggattaatggagagtggtgactctctaaaacttcgaaaaaatatccagaagtcttttaacccttgctctactatatacatttacatttgatcaatttattttaagtatttaatttcttagaaattgccatgctagtgtagtgttgaaaattagggtccaaaactctgtatcacacattatgcacttgggtgagactggtcttacaattaggacttaattttagcaagaatttgtagagaatattaattcatctttctattgggcatcgcgatccttttaatatccacgagttattcacgagtctttctatattctaatttgaggaccgtcatccatttttcaatttagacctaacccc

SEQ ID NO: 45372 - DNA, 626 bp, Zea Mays
aggtgaacaacgataacaaccatattgacgacgactacatgccctccgagttgtcctcaccaacccctattgaagcacaccttaatgaagaatgagacttcgccaagcactttgaaaacatgtgggtgttgaatatgacttagtctcatagtggaaatgggggaaatgggggagcggtcgatggtggcaaatgggggagcggttgatggtggcagctcatgttaacatgggatgtagtcttggctaagctacctcgcccagagggcctccacactgacttagaatccttacggttgctttatcctaagtatgttttgtgaaagcctcatagtggatccctagccattcacctttgaagtgaatgtgagacacgcaaacccaggctagaagggatacacaacttgtaggtaaagttgtaccagctctgtagagtgtataaactgatatatcagtcgtacttacggttatgaatggcctagaacctcacatgataattgaacttgaagatggagattaaatcatggtttccttttggattcaagtgttcacttaagtgtttttcttaagtggttttgagatgatgagtaatgatacttattagttgggtattgggaattgctcaccct

SEQ ID NO: 45373 - DNA, 486 bp, Zea Mays
tcagaatttggatatcgctgggctcgtgtgcagagtaagataaagggatttgcacggtttaggatttagaaaacagcggatttctccgctcgcgatgactcagcggattctctattcacattgatttgaacaattttcacataggcatgctgagaagtaaagcatctggctgctagaacattattctgccggaccagtaaatcatgaaactgacagaaccacaaaacatatctcactgtcgacgagaacgaacgtaaatactgaaaactagccgacattagttcatagggatcaactcaaattatttgttcggagatgctccaagaatacttcagcaaattggacagtcgtagcaacggctaatgttgtatctacagtaggcagggagtggcgccattctcatagcttccttcactaaattaatgaataaaattaaaaaagagataaggacaagagattagtagcatgttgtttcatcaacaaaat

SEQ ID NO: 45374 - DNA, 677 bp, Zea Mays
atctttgcatggctgatcaggcctcctcaattccagggcaccctcgaggcctcttgcctccagttcggtttctatcgtctagcccttaaggacccagtcctagtgccagatccagtgtcagatgtttgggctgaggatgagaccttcagacagttcgagacccaaggtgttgttgctgacacttcttcagatgatgatgagggccttgggattccgccaccgcctcctatgccatattgctcacatgatcatgaggcgggtagttccagtgctgcttctgctgccctactagctattgatcctgctctggtcgcgattcttcagtcacttacgcagcagcaggctcatctggcagcagagcaggcttgacaggcagccatccagcaacagatgtccgaacggatgctctccatgtttcagactatccaggaccgttaggacactcttcagcaacagctctcggtagatagggccgagcaccgggcgtttatgacacatatccttcagcacaccggtgttcagctcccaccagtccagtatgcccctcctccagctcttcacgcagctatcctaccagctctttcggtaggacccccacttccctcgtttggtccttctccttctccgctctagtcggtcactttagacttctcgtcaccagttgtgggaaccgtcag

SEQ ID NO: 45375 - DNA, 499 bp, Zea Mays
cggtgatctagggcagtctagcttaattgaatgggtcgaggagcatcagtgtcatgtaatagtgctgaaacaagagagtagaggacaagattgggcctgaatcgagctagccacggtgaggaccttttcatggtggcggaaacccgatttgggggaaatgagcaattcgtggtctctggcgaacaattggaggcaagtgctggtgctttggatgggtaattaccctacggagctcatggcgtgctcaatttataggtcccctgagcggtggccagtgaaatttgaaggagacgcgcggcggccggagaggaggaggggcactggcgcgcgcgattggtggcaattaccgtggcaagctcaccggcgatcaccggatgggctaacgtgattcacggcggtgtggttaaagtgacgagccacgtggcgcaaggctgtgaggtgtctatctccggcgagggtagatccgaagaggccggggctaagaggacatgacggccgg

SEQ ID NO: 45376 - DNA, 853 bp, Zea Mays
tgggtccaaagaatttaggcctatcgacatacgagaaggaatgtttggccattttgtttgccgtggagcattggagagcatatttacagcatgatgaatttgtcatcagaacggaccagcagagtctgactcatatggacgaccaaagattaactacaccttggcaacaaaaggccctgaccaagctaatggggttgaatttcaaacttatttacaagaaaggggttgagaatcaggtggccgatgccctatccaggagaccaaatctgaaatgtgatgacacaactgttcagttaaatgtgcttgccagctctgcaattgtgccaagttggttgatagatgttacaaggggttatgagacaaatgaacagaccaagaaattgttgactgcgctgtctactgggcactctgtggaacatttcaccctggtggctggcatcatcaaacacaaagacagagtgtggttgggacacgatccggaactacagtctaaggtgatcgcagcccttcacgacagtgctattggaggtcattccggttttcctgttacctataggcgcattaaatctgttttcagttggcctggcatgaagagtaagatcaaagagtttgtagagacctgttctatttgccaacaagcaaagccagatagaagcagatatcccgggcttctgctccctctacccataccagagcatgcttggcaagtggtaaccatggacttcatttctgggttaccgatatctcacaaatacaattgcattatggtcgtggtggacaaattctccaagtatgctcacttcttggcgctggctcatcccttttcggctctaaccgtagccaaactctattt

SEQ ID NO: 45377 - DNA, 314 bp, Zea Mays
ctaaagtgagcctgaacatgtgagtttgaaatctgaaatcttaacctggcaaatgctgaagatggcaaatgatgaacatgtgagtctgaaattagtgagtgtgaacctgtgattcagtctgaaaactgagattgacagccctttgcaaatgatgaagctgttaatatgaacctgtgaacatgtttccctaaatctgtaaaattgaattcgacgacagtttgtcgagcaccactgctagctgctagctgctagcttagtgttatgatgatatcttgcctcgtggttttgtataccatagtaatgtttgtcgtttt

SEQ ID NO: 45378 - DNA, 433 bp, Zea Mays
cgaaagtggtatccattgacgtcataatgtccatagcttttggcagttactcttccaatagatagcttacgtaactcatcattcatattaatttcctccccaaactatcaattatgccacaaagcattagcaaagtgtgtattattagttaactaaaataatgaaattaggtctccgagccacataattgagacttacacgttcccggagccacataataaaattaggtcgcccatgcattccatcaccttgcaatttgtctaggtctctagctgttgtcctaccgagacacctcatgttttgtttgtcaaacttgttgtcaaatattattgcaggacatgagatatttgaggacataaactaattcacatatgaaaaatttaaggaaataaagtcttacatgaagtatttctccacctcaggcatattcgtg

SEQ ID NO: 45379 - DNA, 590 bp, Zea Mays
tggctcctcgacatgaggggagcagcagtgagagcaatgatcccataggagacctggaggctagagtcgaacgtattactatggagctatgccatggagggagggagcgtgcgcgtgctagtcgtcgcatcgctgagttgttagaagaggtagagcgtatgcagcgtgagattgtggaacgcgatcgggctattgactgggctgtgaattcacgatccatagcctaggactgcgaggcgactgctcgagcccgagtggaagagctgagcgtggccttggaaaatctagaagtgtacaacaatgttctgcacgaggaagtgcatgtggtgtatgaccaactacacccaaacatgctatcggaagttgtagagatgggagctagcgcagcggaagtagatgaaggaggactttatggggaactggacatcttcgaagcccctcctgtgaatgtcgtggataatcatcctcccgaagctagtagcagatctggagcagccaaggatgtggaggactagactagtgtaatagtaggttgtttccttatgtagtctaaataaggaaaataagttgtatgggttgagtatgtataa

SEQ ID NO: 45380 - DNA, 334 bp, Zea Mays
gttgtttttcaattgataaatatggtgcaatgattgtcatgtatgaagcatgtctaggttgcgtgtaaattgttatactccttgaggcatgcattgttttctctagtcataagttgtattatgtcatcgattcatttggtatctcctcgtgatgaagttaatagaatatgccttgaccaagatatgttgtgatcccctctagttctaaggaagctagaatgtgcaaagtgcaagtcattcaaatacttgatgcacaactttagggggagtacacataacttgtgtcttttgagactaattgtttcttgagtgaccttgtatagtctcaaggtgg

SEQ ID NO: 45381 - DNA, 647 bp, Zea Mays
cttgttcttaatggtgacctcattcagatctcgataatcgatacacatccttttggtgccatctttcttctccacaaataggacaggggcggcccaaggcgaggtgcttggccggatgtaacctttctctgacagctcatcgatctgcttcttaagctcaaccaactctggtccagatactctataagctctcttaaagatgggggcggttacaggaagaagctctatagcaaactcgacttttcgctctggtggcatacctggtaagtcctttggaaacacatctgtgaactcgaacacaaccttgatactctcaattgggtcttcttcactgctatcgacagccatctgataacaacttcctttctttggttcaggcggggctaactcggtcaccacttcctctcctagtggggacaccaacttgattgtcctcttatcacaactgataactgcctgatacttatctagccaattcatccctaggatgacatctattccttgagtacccattactatgaggttagcgggaaacactatcccccttatttccacacttacattcaaacaaatgctatcggctcgaattctaccaccggctgagtcaatttggatgagggttgacatggtagttatcggaagattat

SEQ ID NO: 45382 - DNA, 290 bp, Zea Mays
gttcgtggtcgttttcattgatgatatactggtttattccaagaacgaagccgaacacactaaacacttgcatactgtacttcagagactgcgtgatcatcagttgtatgctaagctgagtaagtgtgagttttggctgaaggagatcaaattcttgggtcacacaatttctcaagatgggatatcggttgatcctgagaaggtgcaggaggtgatggattggaaacccccgaccacagtaaagcagattcggagttttctgggattggcagggtattatcgacgattta

SEQ ID NO: 45383 - DNA, 490 bp, Zea Mays
ggaaagagtataataagaaaaagacttcatcctgaactgtggatcgtgattcctcttgaggttggatttgactcatctccttccttgtcgaggttgatcttttcttctccggtcttggtctcattgatttgaggttagtgtatatcatcggggttgaggaatatggttaatatagatatggatgagatagactacatgatgtaggtcaaaagtttgtttgatgttaggtggggatagacagattatgcaatccatcatgactctattggttgggtaagttatataacttgttatataggccaagttgatataactcaccaatttaggcttaagtaaattaggagtatggccttatcttttgtaccatcattaagtaattcactctagattgaatcataatagattggatagaatctagattaggttggtatggctagattaaactagttaagatctaattaatttatttagggacaagtaggtagatgag

SEQ ID NO: 45384 - DNA, 610 bp, Zea Mays
atcaaatctcgagcatgagtgaaaaccagatccttcgccttcatgaagaacactcaagaatagtgagaaaaatcgtcaacgaccacaagcacataccacatccccccgaaagagtaaactcgaggtggaccaacaatgtttatatgaagcaattcaccgggctacaaagtcgtcactttggtgactgaggaatgggaagcaacaaccatcttgccgtgacaacaagggtgatagacaagatccttctcaaatttcaacttgggcaatccttggatcaagccaagtgagctcagtctacacaaaaaatcaaagctcaagtgtcctagtttcctatgccacttccaaatcaaagaagagaatcctacctggaagcatcgagaagggccagaagaatgtgaaaaaacaacactgaaaacttgaccgaaaggggaaatctaactaacaagatcacccgagcatccaaaacctgagacaagaccttttttaagcacacttcatagtcatccccaatgagttgtgaaacataaagcagattgaaatgcaaattcgaaaccaaagcgacaaccttgagaacaaaactctcgtttacttgaacagagccacgtgagat

SEQ ID NO: 45385 - DNA, 566 bp, Zea Mays
cggttatgttgatcatcaaacaccaaaataacttactcaaatgggccggggtccattttccttacaaagttatcattttgaaccagctctgacaagtaaatttgtatgtacatgttctggattcggacggtgtgcttagtggatgcaatttttatactcgttcgggcataacgtccctacatctagtctttggtggctcgtgctaccagcaccttgttgctcaattctcatagtaggggctacaagaaggcaagagagggaagagttcctaggtctctatgcgttgtgggttctaagggactacatattgagggttgacaacctagctaagacgtgagtgttactgttagggtgttgtgttctctagattcgccccctatgggtcgctgccaaccctcccctttttatagaccaaggagggggttggttagaagtggcttctcatggcaggagttactatgtcgtggtagaattaagtgttctacccctagtagaaacgtgtctatcagtatttgcctcagtcgtctgagctctttgaccgggccctttaagtctggctgcgggtg

SEQ ID NO: 45386 - DNA, 506 bp, Zea Mays
cggaggtgccatcaccagggagcacccacctgccttcgcctgggcccgtcgagccctcctccttggactgcgagagtacacacgcagagaggggcgaaccgaggcaggctttctgctcgcgggagcagccaccacaggaggtggcggggttgatagccgatcagaacccaacggggaaatggttgttgttgcatttgtcgatgaagatggatccaccattctccctaaggacggaacacatgggggctccacctcctcctctggaagtgtctcaacattcaacaatgatatggaggtatcttccatcggtggggtgatctccctgtcaatgatgggccttggaatgcactagccttagaggtaagcaggctcctgggccacccatccagacaaatccccctcctcatctggcccatcgacatcagccgacccaaccatgcctttctgagacctacctatcttggtccaccacaggtaggcggaccgccatcctgcttcttagcagc

SEQ ID NO: 45387 - DNA, 612 bp, Zea Mays
gtgtgtggaagttaatcactaggagacgaagttgttagcaaggagggactctatgaggttcgatagtatcacatatgaagttgagggttaggcatgtcaatcaaagtagatgatgttgccatccatggatcatccttaggtggttatacttttgtatggagtaagtgatgaaatgtagctctaacacctcttgcaccacttgtctgtcaatatgagtggtgaggtgtagttgatgttgaaggcattgagtcatcaccatactgatgagctttgttgcgtttagagttgttatagtgttggtgcacctgtcacacacatgaaaactggttcgaaggcataggaaaaaaagacatggatggttgaagcatgtcacgtccctatgtgcacacatgtcagcagggatttgaagtttagcttcaagtaagagagtggatgagggaacgaggaaaggtaagtatgggtagttctaaataggaaagagcatatagaaagggggagaaagagtgactaagggttacctatctatgggggatgactacataactatgactacataactcttggaggggtgagatccacctatagtacttaccacctaggccaatagtgggg

SEQ ID NO: 45388 - DNA, 330 bp, Zea Mays
tacctaacggagccgagggtgtgcttaatttatagggctcttgagcggtggctggtgaatttgaactcgcgcggtggcggtcggagaggaggaggtgcactagcgcacgcgattggtgtccattaccgtggcaacctcaccgacgatgattggatgggctaacatgagtcacgatggtgtggttaaagtgccgaggcacatggtgcaagactgcgaggtgtctaactctagcgaggggagatccgaagtgaccgtgagctaagcggacacggcgaccggaatgaacagtggccggagttcatccactggtgatatttcttactccctctg

SEQ ID NO: 45389 - DNA, 1088 bp, Zea Mays
cgagactggattttacgggtccgttttcaaccctaatcgatgtgtcgcttgccggagacgagcgcgctagcgaggtaggacgcaacgtgctcctcctctctagccctgcacatggcttcatatcctgtctagacttgcacacggcgggggacagcgacgacgggcaatcgggtcaccatgaccgtgcagtgaagttggcggcctccgggcatatccatcggcacatccacggggtcatcgtctcatcgagaagctggaagataatactggtagccacgaaaatcaattttcgtttttcataagtgtcaaaaggaatttcagcatttaagacaagtttcataatgacactagagcaaagcccattcgattgatggtaaagtgtcgaagcctactttctacaatggctaaattccaaatttctcgtaagccgcgcaatccaacgccgccaatgcaccaagagaattaggacgttttcgaaagatgctccttatgtctcacgtcagaaagaccatttttgatcgccacgctgaaatcacagtgaatgagagagtagctgcacctacgtaagaccaaactggcaattactacaagtcggctttcaaatacaaagcctaacatcactcaaaatttaaaagagatgaatgacagcctttgatgtcgtaacgcccatggctcgatcttggaagatctggacctgataagactgccagtactagaaaagttggtattacgttggtttcgaaaaggtggtacgacattttgctgatgtgacctgctacgtatagctcacacacgtacagtcatactgcaaaccagtgcccagtagttggcctactcatccatcgtcatgattcttgagaaattgaagggagatgatacaccaaccttgaataaagaaattgatatttggaacatgattgggtatggtcttaatgagttttgctgcatgggtcaaacgatacataagacctcagcagaatcgattagatgattggattatgtcatgagtttgttctcaagactttgtgggccacctgtcaatatttatgcgcctatactattgatttgtgcattggcatcacgagtgg

SEQ ID NO: 45390 - DNA, 1065 bp, Zea Mays
ggagcagaagcgggagcacgagaagtggaatctagtgtggtggagaaagtgggcgcattaggtgtggtggaaggctcaagaggggcaggagctgacatagtggaggaaggaggagtggtgactgggtctgagggatcgaatcgagcaggggtggagcgagccagagacgagaggcgatggactcggaaggcaatctgatcggaggcaatcctcaacgagcatccttgctctgcctgatctgctgctactgcggcggcaactgttgcacgagtggctatgtccaactgtctcttttcttgccccctgctgctcaagatatactgccttgcccttgtcatgtctgaaagggcgaggagggttctgatcatctcctcccctgacggtgtgacattatttgtcttcaccatcctgcactgatcaatgacacgctacacgataatgaggaaaggtaagcaagtgcaatagagcagcaggtaagtaaatatgtagaatggattagctacctgggtacgtctcgagagagaataactaggcaggagaggagtctcgcaggcaggcaagcaggcacactgaaatgacagaagaggtgagcacatattagtcacatagtcataagcatatgaaatgtgagtaaatacataaacagagagttatgacatgaaatctgagagatttgggaaaacagaggtcaaacgacgcgagaacggtgtttgaacaatgaattgtgtcatagagagttagaaattgaaaacggggcatgaaatgataggaaaatgaatcaatactttactaacaggtaaataggtatgagaataagtgaagggagtgcttcatttgaagtttggctgaggaaaaataattttggcactcggctcaaaaaggatcaccaaaaagatgaatatgttgtgtaacaggtggctagagtgttggatagttgtgaaatttggcatgtgaggtactagtagtagctggagtgtgctggaaaaaattggggttgatttgagctcgtttggctagtttaggcatttcaccgagcacttggtgcgtggggtttgggttagaggg

SEQ ID NO: 45391 - DNA, 488 bp, Zea Mays
cccccaaatcggtttccgccactgtgaaagtatcctcgtcgtggctagcttgttctaggtttgttcatactctctgctcttctgtttcagcattcttaggttctcctaatgctggactcattcatttgagctgtaccgccctagatcaccgggaacacttcggttcctccattgtctgcgatgtttccgtggaccggatgatttagagcctcgctagtgaaattgattgaggggaaacacttgttaagggttgaataaggtctcagccgaattagagtacccgtcgttaagtattacggccggtataagctcgccggagctcggttctccgccgtgcgacgtcgtggacctcgggatgtaaaggaatagaagcgcgggggtgtatttgcaagtgtcagtgagacaaacaaatagtgtgcgggttccttactagattttcaaaccgccgaggtcttttgcgtaaaaccgctgcgcgggcgcgcgcacgg

SEQ ID NO: 45392 - DNA, 593 bp, Zea Mays
gttacaaaggtgcgaagggcttaggatttggtgtcttagacaaaatgtttctcaggttctctacattccacgagtgttcgaggtctttgctggattgtgatttgagtctgtaggtgtttggggacgttttcttcttgatgatgaatgaaccttcccatttaggctcgagtttgcaccaggactctgttctggtggttctgatgagaacgaggtccccttcgtcgaacactttaggaatgacagtgttgtcgcgccatgccttcgtttgcgcttggtatctgttcaatgcttcgagggcaagaacatggtctccatcgataaggtccttggtgattgactcgtcaacatctggagtagtcgtggcatttgctcgtggagatccgtgctttagttcttgcggtgtcattgcttcagacccgtacattaaacgggaaggagtgaacccagtagctctagattctattgtgttcaacacccatatgacttcgagaagttggtctacccatttgcccttcttgtcgtcgaggagtctcttctttatggtgctgaaaatcttgtcgttggcgcattctactactccattggatggtggg

SEQ ID NO: 45393 - DNA, 501 bp, Zea Mays
cttctaacccttgaatgttttacccttgagttacacctgcacagcttatagacccccatagcttgacccctaaatcgaataaaacttcctggtgcgctcatgtatgttaaaaaaacatcatcgtttggtgtctagttgcgcaaaccatgtccgagccatgtttctttccataaatccttgcccctaaaacttcatagcattcatgttgatcatccagctgatcttgttgcctacctctcctttcgcatggatctggtgatctttttccttgggaatcatgttgtggctttatcatctgaatctttggatcccttaatgattctgccctattatctggttatctgttataacccgttctcaagtattggatgttgatctgcctaaatctctcagttctggtcattctcatacccccttctccgaggatcatgacgcttgttttatcaactgtatctctaaacagtgtatccattcggttcaatggattttgcttttgtcttt

SEQ ID NO: 45394 - DNA, 1208 bp, Zea Mays
ggctttataggcgcgagcaagcatagctaagggccgctctgacatgcgctcggggcgtgcgtggaggagcaccagtgcctgctcggcctcctgggcatggcgtcgagcacgaggcagcgctgggagtggtcgttttcaggagcacattggctccagatctttgtgattttattgccatgatcactttatgagatctcatcaccagactctcctttgtcatttgtgtgtggcgacctacagattttgttgactggaaccgaagatatggggtgctctagtagggtttgtctcatggtgtgaacccgaggtaaaacccttgacttgacttgtctagggcttgaatcccaatgccatcttcacacaagttgcagaggggttaatttaacacaactttgtcaatgggagcctagggttttgagttaggggtcaaggtgaacgcgctcgagttctgagtgaggtgctgaaattcaaaaatctgaatttcagatttctatagagagcctccaattgaatgggcttttttgggattttgaaaaattcgtttggccaaactctcctaataatttttgtagcttattaagtgtatgtcaacttttataattggcccaagccatgatttcatatttttcattgcctttttacaaatttccccttttgcacttaaatggcttaattagggttattttagggtttgggcatttttctcactttgaggtgcatgatatggttaaggtatgatccatgagatgaaaaagtcttaattaacattttgctcctcaagtttggtgtcttttgctcaatttgatttacatgtgataatggtcttgagattagtactgagaagaaaccctaagtaacacctgggttcagccgaaccggtatgtgtggactaatcctagccactcactccaagatctacgactcatgactcatcggcgaaggggagacgctagattatatttaggccactgatccgggaatcgacgacaatgacgttatctcctacctccggctcggctggcaatgacaccgtgtctgccctaggaagacaggtaaggtcgcatgggtgccttaccgtgatccatgccgaggcagttctccgctcccgcacggtgtggcccgcggcaccgaagcactaggcggccatcttattccctctggatctctccctgcgctcaaccatggtggctgtggctagtgcggttgga

SEQ ID NO: 45395 - DNA, 787 bp, Zea Mays
ctggtggaggatcaccgaggacggcctggcagagatggacaggtagagccagaaggagacagcgaagcctccttcctcgccggctcaggccgctcccgtttctgggtcgacgcgcacgccgcagagctcgcgatagccgtcattcccgccgcattccgattccgactccgccttcgcccccacggaggcaggtgaagattttgcctcagccgtcgaccatcgttcgacatggtacggatgcccggggggttcatggcctcggttttataggcgccaatggggaaagatcgagtttgatttggtgaatctttatccaaggcgaatgatctggatggatttagcctggagtttattgcagcatgcggtcagggggaggaagaagaccctgagatccccgacaacgaccatggcgagcacgagctgttgcgggatttcagcgcggagagggaccaggtgtccgggccccacctaccggcggagaacgtgcctgcacccggtgtgcacggcgatggtggtaacaaaccatagacaactgtggaggggaaacaactgacagtagggccccacgtgtcatccacactaggaaaaagaaaaggggatactaaggtgggctggtgcggagggttgctgtgccgcgtggggtatgctgggtgaggcggggatgggccgaagagctagagttttggcccaaagcacaggaaaaattttcctttttaatttttccagttttgtttcctattcaattcaaaccttaaatcagatttgttttgattttttttaaattcag

SEQ ID NO: 45396 - DNA, 372 bp, Zea Mays
ctgggttgctagagaggtagactgcactgacattgtcacaatagaccactgaggagtgacgaagaggatgatggagctcgtgcagaagttggcgcaaccagcaggcttcgacaacaccattcgccactgctctatactccgcctctgcactggaccttgacacagtgggctgacgcttggatgaccaggagatgagattgtccccgaggaacacatcataaccggaggtggacttgcgcgtgtcaggacatcccgcccaatcagtatccgtgtagacaagaagatcagccggtgtggtccggtgaaggtgaagaccgaggtccaaagtaccctgaagatagcgaagaatccgcttcatagcaccaagatgag

SEQ ID NO: 45397 - DNA, 682 bp, Zea Mays
gtagtacagacgacaaagcagacggagctccggcaacggcaacaacacaacgtggtggcgcgagcacaacggtgcgcagcagcagggaggctcagtaatggagcaggggtcagcgaggcgtgaactccggcgagcacagtcgcggcagctgcgagccggtaagcacatgtgatgttgtgatttgtgagcgagagagcgatcaagggcaaggagagaaggactgggcgcaaccttttatagccaaagggaggaggaatttgcaaccgcgaccattgaagccgaccttgaattacagaggtaaaacgactgccaataaaatccattaacggtgtcggatggtgaaaggagaagaggagggggtgctgcgccctatatagtggaggaaaggagggaatcagtgtcgattaagaccctataaagagaaattgatgcactgctattaatccgtgagtaattaacagccagaatcaacatcaatggccgctgcgggggaaggtaactgctgacggggatgccgcgaggagggagaaggggaaaatcacaggaggagaaacgtcgccgcaatggtgctccactacgcaggcgaggagacggaatggctggcaaacgggtacggtcgcgaacagcgaacaacaaacatttggcgaggaatggagaaggcggatagtgttgatggctgggg

SEQ ID NO: 45398 - DNA, 826 bp, Zea Mays
gctatgtgctcctggactaggtctcttgtgccaataaaggcgcaaacattgttgaaagccttctggcatgcttcgatatcattcccaagcgcagtagccagccttctgatgccgaagcgagaccagatagggcgttggataatcccctttatgtcttccctttcaattagattattctttacataaaaccattcctccatccacgcccctggccacctttttagaaacgttggaactggataacttacatcagaacgaggaacgaaccataacaaccaaaattattgtgatactgctccttgccagtggccttcgtctcatacagcaactcgtgcatgttacagaagcactttgcgcttggctctagcccttggctcctcacggcccaaacaaaaatacccatcctgattatagcttcgggagtaatctgatgaagaaagatttcaaaggtctttaacacttcaaccagaaatttgctcaatggaaaccaaagtcctgccttcatgaagctcctgtaaacaacaacttcatcctcctcaggtgcaggggcggccttgtttcccccagccctcacaatagacatatcacgaaaatatcttcccttcatagcatcaatctgactctgtttgatggacgactttccgaagatagtatgactcggccgccagggctgtctttggcatcttcattcccactttccacatcaaagttctcgctatcatcagaatcctcagataacccaactaatatttcatttgtaatcttttctgtgtttgtcttttccatagcctcgtaaaacccagctagagcagagtccacaatcttc

SEQ ID NO: 45399 - DNA, 462 bp, Zea Mays
gtgagaccgtgagagtccaaaacaggggtatataaataacgagctcgaccacatcatcatcgagggaaatattgagaccgtgagactgtgagagtccagggaagaagaggactgtttgcataccttgcaggggcggttgaacttgcccgtggagtcggttgaactcgcggtggcggcggcgtggcgctggcgcattggttcctggaactgggaggtcgaggaggctaggatttcctgcaacaaatcacgattagggtttcgattttcgaagcaaataagggatccgggctgctggaggactcacggtctcacggtctcacggattaggcgaggagatccgaggagtcacggtctcacggaggaactgagcactgagaagacgcagatccagaagacaagaaccgaggagcctgctgccgcggatccgagtgcacggagggagaaccgaggagccgctgtccc

SEQ ID NO: 45400 - DNA, 293 bp, Zea Mays
tcaaaccttcctttggacttgtgcttgccaaaggagtactcatgcttgctcttatgcggaccagagttgtactttcttgcttgcccttcatcttagggcaattaacgatgaagtggtcaagatctccatagttgaagaagctctccttgcccctaccatgctatcgattcatgtagttgttgtgaaaccgcacaaaccaaccggcaacaagagcaaacttctcatctctaagagactcaaactactcctccaaaatagacaacaaagaggacaaagaaaacctacgaggtgaa

SEQ ID NO: 45401 - DNA, 325 bp, Zea Mays
agttactaattcatgcaacatgcttggctcttttgtgcatctttcttagccatactaataaaattggaatgtgaacaaccatatgactattactttgtggcctacggatatgaatatgataactattttccagctttgtgattgatattggcatattgtaatgtgatttagcctcctagcagcaccagtatcaacctttctattttttagagaacattgacttcatttctttttgttgcaaataatttctcagaatagtttgccacacactaataatttctgtttatagatgccactttgataaccgatgttgcctcaatattat

SEQ ID NO: 45402 - DNA, 864 bp, Zea Mays
ttagaggacgtccccatcctgcctgtcctaagctgtccagtaaacaaacgcatcccaaatgaacataatagtagagcgagcgccatgcccatagttttttcattaattatttgagctcaagtatcttcaaaccaaatacctacaaacatatatatgcagctgtaggtcaaaggcgtggagtctcaaccgaaagcctgaaccaaggatacgtcgtacgttacgttgcgttgccgttgcgtcgtctcaagcatgcagatgcaacgcaacaacctctcggacggacgtgtgacggccgacatgcatggtcaagcaggaatcatcggtgtcctagtttttcatctgcaatctgcagcggaactgtgagtgacggccgctctgcctagtatactatacaactcgtactcctgctaggctagctagctacacaaccgcacaatccatgcatccacccggccggccggtacccagcccagatgtacttgcgatggcagctttgttgtcaccggcacgcactggcaatagtagaacgagtcagcgagggatagattgaagaattaatggcccacacctccactggacaactgctatatactaggataacagagtgctgttcatcaatggatccaaagaaacgttctaactcgtaacagtattcacatttccgtctctagaccaactccagcaacgccctatactcggctacacgttcgtattctgcacgcccgaagccactattccaccctccaacagactctgtaaaccacagtgcaaaatgggtgtgcattttttcattccgtatttctacggtgtctctctcctctctgcacaagttaaaaccggagcatttaaaaagcgggacccaac

SEQ ID NO: 45403 - DNA, 471 bp, Zea Mays
gagagatggaagagaaacgaaacgagaggttggcttgcttccgaaaaaccaagaatggtgtgatcaaacagaccgttggggcaagcacgtcctgcaagaagatacaatcggtcctgactgatggacgattgacatttggagaagctaacaaaatgaagcttgataaagatccattccctatcaatgtaattgatttcgagagcaaaagagtgtaagttcggacagatcaggccgaaactactaaaggcaagaatgtggttatctctgatgatctcaaactcaagatgataataccaaagagtcagaaagttggtgtgtggaaagtaaacgagagaaaaagggttcagtctgtctttaaaaccaacttctgaattttttgctcaacaaaatataattcacaatggaaaagaaatgagttccaacattttagaggtttcaagagacccaggtctccagaaggggcaggaggcg

SEQ ID NO: 45404 - DNA, 302 bp, Zea Mays
cttaactttagtaccggttctaaacaccaatggtactaaacccaatggcaggtgcaaccggtaatgaaccttccattaatttttgtgccttccattaatttttataccggtttttggctacaacccatactattcttgccatggccgtagacagcctccatgagtccatgggtttaattcttgcctccacgggctttattctttgtataagatataatgttcatattttcataacagacaacataaaataatgttgagaagatacatacaatcaaaaaccaacatagttcataacattcatc

SEQ ID NO: 45405 - DNA, 910 bp, Zea Mays
gagcacacaagaatgctaaaacgggagggcagagggtatgagcggacctgagacgcgctggccatggcgaggtcacaaggcacggtgttcttggttgatttgggggaaatcccaaattggaggtctctggtgaaggatctgaggtacaggtgggtgcgctagatgcctaaatatatagcgaagccgatggcacactcaatttataggctccgggggcggtggcgtccaatttcacgaagaggtgctggcggccggaggggaaaaaggttactggcgtgcaagcttagtggctttcaccgtggcaagctccccggcgatgaacagacggctaatgcaagtcacggcgatgcaatggatgtgccaaggcacgtggcgcaaggccgtgaagtggctgtctccagtgaactcatccgaatccgccgtggtatgctcggtacggtggccggagtaaaataatggccggagtttttccacggtgtgatattgactgaatctgagtgcgaatcacggcggcgaaaacacgaatccatgtgcggcttgtcggaagcgagcgactgagctggcgatccaatccagtcactatacaattggaacctctattcagtcagcctgacagatcaagtttgggcgggattttctcctgattttacatggcaacaaggtcatcgttctgtagcaaagttgtagcctaatgatccagctaaaatcttactatagcaaccatagcaaattactgactggattataatcaaatccaagctcaaagatgtctcaaactcactctcagtctgaattcagacttaagacagtctgacagttaaactttaggcacatttttctccaatttctgttcagtaccagtgcttagtcacttaagtaaacttgttctcctatcatagctctacaaact

SEQ ID NO: 45406 - DNA, 471 bp, Zea Mays
cgaggttgaaactgtgtgcaagtaatagtccatccatcaatgtaacactcatgtgtttctttttggagctgggcatccttgtgatgtttcctttttggaaaacctggcaattcatcgtctgatagtgcatctgctattagtcgttcttggggagaccattgactttttatgccaggaaacaaaatccggttcttctgttttgtagtttcactttcgtttgtactgatctggagacaaggaattccatagtactcacaacaacaacatgttctaaagtcacttgtctgttggtttggttgtgcatccttttgtgtcttgaatgtctgttcatcagctattttatttatagtgttgttttgatttgccaacacaccacattctttgcatttagggacctcacttgtagttgacattccaaggtctgacatctgtatgggtatggaagaacgggagggacgaaagggttgagta

SEQ ID NO: 45407 - DNA, 736 bp, Zea Mays
acaactcaacggtccagctcgaccaagacgaagcggtagcctaagatctaatccggcccctctattcccagatcaacggctagcgtgcatcttcctcgcgactagccccgcggtggcgcagcaccgcccagcggcgcatcacaccggcgaatacagactatgcggcgccaggctcctacagctaaatggtgcacgtttaatcgatctccagagtatggtgaatgcaatagtgtaggccatacagccgattatgccgtggagttccctgtcctcggtagaaggcggacgacggtggcgatccctgctccagcgagcgattcccagtacaccagactgcccccggcacgagcgagccacgagcgtgcttctacaatcctctgtggaccaccagcctgagttgcccaagaccgaatcgcacggaaactagggatgacgcacgacggcgagtctgtgagatagggcaaggattctggctctggcaatgagggcctgtggagaagtccgggtcagcaggggggtttcatccttttatagcgccaggggaggtcgatcccgaggtgcccgcaaccactcccagattccatggcaagacccgagcatcacggagtaacgcacccgcgctcaacaaccccggccggcgtggagagctgttagggacgtttctgaccgagccggcccactagtcagaggcaaagaacccaagcatgcacgcggaagacagacaagcgggcccggc

SEQ ID NO: 45408 - DNA, 568 bp, Zea Mays
aatttcctaagcctggaagaaaaagaaaaggaaaaggattaaacagtaatgggctcaaatcagcccaactcagcccatggacggggaaaatgcgcccgcgctgtcaactttgcgtagatgaccctggtaaagaatctctagccactattcattatctctctgacattctcacttaggccccttcacttctgtttcttcgcagacctaggtccccgacggcgaacgacggtgagcacaccctccgggacacgctacgactgatgccctaactcggtcaatacttatttccacccctggcgactctaatccgaccatcaattgcaccattccggccagagtctttctgcccacgacgatggcaaaacccgaggggaaatcgaggtgttcctggcgatctagcgtggtctagatcaattggttgggccgagaagcatccttagcatgcaagggtgctgaaacgagggtaaggaggatgtgaacggacctggagacggtggtccacgacgcggtggttcacgtcggcgcggagaaccgaattgggggaagtttgaaattcgcgagctacggt

SEQ ID NO: 45409 - DNA, 389 bp, Zea Mays
ggaaatgtggtgaggtggcggagcggcctcgagttcgccttatgacgggtgggccctggcgtcccctcgactcctggcagaaccgtgcaccatatgtattgtggacgtctacactactgtcttatgtagtagtaaagatataatctatctgtttaaactttaccaaacacatccaaccaaatcacctcagcacacataacatccactaaatccaacaaataaattacatctagacttaacacaccaattaaaaacaacggttcagcaccttagtcttacccactcaaatataattgacaatattattggggtcatccatctcccccgtgatacctctctctcacccggcaccgtttcgcctcgcggttgtctatgatggttgctcctac

SEQ ID NO: 45410 - DNA, 309 bp, Zea Mays
tggagaactagcaaggacatcgttgtggacctctacgtacaaactattgagcactagatttggcatctatacacgatgggatggtatagccatgtggtccagatgctccacgcccaaaacagtccgcagatgtaggctggacaattcgcgattagattaattcaggcgagagttcttgtgcttatctagccattcgcgcggggagctattaggaagcgtctagaaacgggttcaaacctccacccctatatatataaggggatatgatcgattgaacttcacccaatcgatcaaatcaatctatttacc

SEQ ID NO: 45411 - DNA, 526 bp, Zea Mays
gtgcaccacgtggtgtaggctggtggctgcacgcttctgctgcgctcggaccgggcacaattgtacatccctgccaccctcacctcgtcgaacaaagggtggtagggacggtggttcaacctccgcaaagacgacgggtgactaccggtgtacacgcaacacattgtttttgcgatggcggaacattggcggtggggcgctccacgggagcactaggctcagctatagccgctactagatgcccagtggaggctttgggatcatggacttatcgaggccagagtcgtcgccaccttccaccggaggaaggtgctgccgttgattgagcgttagcttcgcttggacgagatgacatccgaggcttccatggaaagctctcgaattgctttgaccgccctctccacggacgtgctcctcccataggtgaagggggcggtggggaaggtacactacaccgcccccgtcccaatgcgccctgaccaaggctatgtgtctctagtaagtcttcggattctccttctgttct

SEQ ID NO: 45412 - DNA, 365 bp, Zea Mays
ccggtccagataagcctcgccggagttggccgcctgccgcgtgatggccacgtgccttgaagctttaccacgtcgtagtaagccactttaggtagctagttcatcgccggtaatcttgccacagtgaaagccacgcatctcttgcgccagtgacctcccctctctctggcggccagcgcgccattccaaaattgggagccaccatccttggacactataaattggtgccccagcctactccgctaagtaattgtgcacccagtgaaccagccctcacctccaatcatcccccacagctcccaatttgggatttcccccaattctattctctgcgccaccgtgagcgagctcgccgtggccagcct

SEQ ID NO: 45413 - DNA, 531 bp, Zea Mays
ggctgaagaagataaggccgagggagagttctaggcggctcggggaagaagatggccggagtggtgggatctttttttcccaaagcacacaagcggcgcgatctttttttccaaagcacacgagcgacgcgtaggataaggctgggagagatttttgttcagatttttttacattcctccccttttataaataaaattgcagatattttgaattggtatttttagcgatgattaaagggtcgaataattaggattgacaacaacaattgggcaggatttgatttggcgaattttccggaatctgaggagttttcacccgttatttatatttagagattcagatcgagatgagaaacacacagaccgaactaaacgggatcgacttggatatttaatctatgcttaactcgtctaacctgataaatctcatcgtcaaattctaatgaattttatttgggacacagatcacaaatgtggattgggcttccaatttcgcattcgttttctctgtataacttttattcagaccgc

SEQ ID NO: 45414 - DNA, 563 bp, Zea Mays
tctattttgtttgtgctacaatttttatcagagtttgtgtccattctagtttcctcccctctcctttggattttggaagaatccttgatttctttagctagggattgccttaggtggagagcctcgtggatgaggagctgccgcttgtgtctagtcggttcacgcggttccacaacaacgcttgagccgatggcatggcgggtccaaggatggatgctacaactacggcgaccctcatcacttcatcgccagttgacccaaaaaggtcaagcaggaggctgacccgcgagaccatcactctagtcagcacaagagcaagcgggagcacacctctggcaagcataagtccaggagaggttctacaaggaggggctcaagaacaagtacctccaaaaggcgaagatcaaggagcatgccttcctcgcctccctaagcgaccccaaccacgacttcaatgagtcgacctcttcttcgagcgacaaggagcccatccttagaaacaagtgtggtgtcataaacctaaccatcccaagaacccacttgacactctgccagatgtctct

SEQ ID NO: 45415 - DNA, 869 bp, Zea Mays
cagttgaggggtgcctaggtgttctccaaaattgatttgaactctggttatcatcaactgaggattcgtgaggaggatattgagaagaccgctttttgcaccaggtatgggcattatgagtttatagtcatgtcttttggcttaactaatgcccctgctgcttttatggaagcaatgaataggatgttgcatgagttcttggacgactttgtggtcgtgttcctagatgacattctgatttattctaagaccgaggctgagcatgagcagcatcttcgtctcgttctgggtgccctaagggagaatcagttttatggcgagttgaagaagtgtgcattttggctgtccgaagtggctttcctggggcatgtgattaatcagcagggcattgcggttgatcccaagaatgttgcggctgtggtggagtggaagagaccctctagtgtctccgaaattcgaagtttcttggggctcgctggatattatcgacgtttcgtaccaaaattttccagcattgctaagcccttgactagactcttgaagaagggtgttctcttcatctggtccagcgattgcgaggtcagttatcagacattaaagagcaagttggtggacgcccctatcctagctttgcctgagagcggtaagcgtttcacagtttatacggatgcttcacgtattggtcttggttgtgtgttgatgcaagaaggcagagtgattgcttatggctcaaggcagttgaggaagcatgaggggaattacccaactcatgatcttaaattggtcacggtggtttttgctctaaagtcgtggaggcattatctttatggcgaggcttgtgacatttacaccgatcataaaagtctcaa

SEQ ID NO: 45416 - DNA, 645 bp, Zea Mays
ttaaaatcaataccgagttaattagtgcataacagttccgtcccatccgtatgctacggaattacggacgtcgtcccggtcccgagtcccgacaggacaaaagaacagaggaggaccaccgtcatgtgccgcccccccgtgtacgcacgcacggcacgtacacggaccacacgtccctgcctctcgctcgcccacccactcgatcagctggccagcatgattggtcaagtgtctgccaccattatttgcatcgcatgcctctctgctgttacatacgcgtcacagaaatcagtgggccatcactagctaaacaagctagctagtacgtagctgcatcatagtatatatcatcatatcgcatagttatcagcatcgtctgattaataagatgttgatgtagtatattccctgatcgatcaggtcatgctactgtagtatctcaaactgaagctttattagcatgcagcaggccacatgcattgcttgttccatttcagctgtttatttgggaggaacaatataatcatgcgcgcgaccggtggagcaagtaatcaggcaggcagcactcgatcagttcagttggggagtcacattggtggtacagtccgactaactaacctagatttcggttcccgcacaacttcg

SEQ ID NO: 45417 - DNA, 943 bp, Zea Mays
gtaaaatgtaggacctagatttaatgtttctataacagtacaagacggcagattgattctcataaagggtaagggctcgtttgcactttttctaggccgaaggggtatcctcccaccacaaccgtccgattgtttatgcggtggttaagattttaaaacaggcacgatctaatcctaaccgcacacatctgatccgatggacaccacacacccatagttgaaacggtgcgtggatctaatcccagcccttaatctcccgatcaacggctgaggcgcatcttccacctcccgatccccatagttgaaacagtgcttgaccgtgacggcgccaacgcggacgcgcagtcccagtcgttcttgcgttctatatttggtgtggtgcaacacgcaaaggaaacataggaaacgcagtatggtggtattacttactaacacctaggactgtgacggccaaccactatgcgagacagctccgccgaaagactagaaccccacgacgtaattccctgatcgcttgttcctcccccggttttgtcgaatgatagtggtgtactcgaaaaaggagaagagtttattgtttttttctatggccgaggggtgaagctaatatataggagcggggttaaggttagcgacggccctagaggtggttgcaacaacctaggaactcgctggaaccctaacaaccttcatgtttggagaacactcgggcgaggggggcgcatggcatggatatacctattctgtttagtatgattccgaggttctcgagtcggttgcgcggaacatgagcggactctaggttggtttgtggagaaaataatgttggtcttgtagggatgaaggacctggccacgagggcccataggtcagcgctgccgatgaacatgcacgatgccgaacaagacgtcgaatcaagcgatttacgtcaccagggtttcat

SEQ ID NO: 45418 - DNA, 431 bp, Zea Mays
gatatttggactttatcacatcaaaaggctagttatatttctgttactgcacactatttggataatttatattgtcttcataagcgtgttataggttttagagtgatgaatgattcacatatcggtactgcaattgctaatcatattcttgaggtggttaatgattttaatataaggaataagattatgtctattactcttgataatgcttcctcaaatacaaatgcgatagaatctcttgcccctcatctgcagtcatacatatatggttgtgttgtccaccaaaggtgtgtgtgccacattattaatctggttgttcaggatggcataacagttgttagtaagtatttggataatgttcgtgctgttattcgtttcataactagtactcctcaaacgattaataaatttggcgagtattacaaggcaaa

SEQ ID NO: 45419 - DNA, 1741 bp, Zea Mays
catggagtcacagtcgtttacgcagtggaagcaaagtctccaggctgcaaagtctgcgaactcaggccatgggggaaaaaatcatacaaaatcctcacagccacagaggagaaccaagaaagcgaaaggttctcgctcgtctagtagctgctttactacattggaagactagtaaagaggtgaagagaacgactgaaaattcagctgctgctgctgctgcttcgttcgttcaacgaagcaggcagccagtgtttgacggacacggcgcgcggcaagtagccgttgcactcagttgtgtgaatgcacgccacctgctgctggccaggttcagttagactacggcatagctaggttcccaggctgcagaagggccaagagcaatggacggccggcaagccgacaaaaccaccatggaagcagatctttcgtcccggcatattattcgcggtcgatccaccagttccacacctaatccatatcagagatggcaatgatcccgatctccggttcctcctcgtgggaaattcttttattaggtcccgttcgttttaatcaaatccatagaaattgagagggattgaatcccccttaattcccatggattaggatgaaacgaataaattctctctcaacgagtaaacagggacgtagatggggaagcattcatcgtcccaataatcctcgttgagacccgttaattatatatgtgacaatattttcagatactagataattatattgcaaagaaatcacttgtttgtacaaatatgtttatctgacaatgtgtataagtgacaatattttgcattaataaacaaagaaaatacgtcctaattataatttaagcgatgacggagattccgacggggatttaccaccacatggaacggagattgagaagaaatatctccgcaagtgttcgtcgggatacctcctcgcggaaacggagagctaaaacccgacggagaattatccgttcccacccctaatccttatttactgggagctagtaatgtcgtagatgctactactactagtactctacaagatgctactactattatcaaattattaattctctttcagactaataaataaacttgctgaataagtcgtctctgtgcagctgcatcatcgtcgctcgtctcacttgtcattgagccaagtgtaatattcaggcagtgggcagtggtgcaggttccaggaaaaaagagtatactactactaactaggtgcattgcattgcatactttcaggcgtaacaagttactgtcttgtgacgctgtgacagacagtaacgctgcagccgacgatggatggatggatggatgggtgtgcaaaggtggaaaaaatatgtatccatgtatatcgtagaagatttgcaaagcacctgatcaaatgcgtagaaaagagacaacactttctggatcagaatcctttaaattaaagaagagcttttcggattagtttgtgcgatcctgtttcttgctagctgtggctggtttttttggttcatagcctaccgactccgacacacgctatgttaccgaatccagatctccccaagatcgtctataaatatatacatctcctggctgttcttgggcgacgacctaacctaccagacgcacgcacgcacacaacagaacagctaacgtcggtttcagaccttcctgacatgcagtttctttcttggccatctgctttctctgaaagggagatctccccccgtgcgcgcccg

SEQ ID NO: 45420 - DNA, 924 bp, Zea Mays
aaaacataatgtcgttttgaagaaacaatagagcggggagctcggcaatgggcctttacttcacgagaagataagtttcagcaattttagaaagaccctacatgtatcatctagatgacaaacacacaacaagggagtgttgtcacttgagattattttcctaaaaaggcctcataatgcctaagcccgaatcctagaggcccaaaatgaggaagaaaaatgacttagataacgatgataaaactaagttcccaaagccaactcaaggcattatgtacatctttggaggacctagttcctataaatctaatggaaaacataagcttgaagctagagaagtaaattttgttgaattgattactctagagttcttgcgctagttagaagttcctatcactttcgatagatctgattactggaaccatataccacacctagggcattactcgctcattctaaaccctacaatggatgatgcaaatttacaatgagtcctcgttgatgatggcagcagtctaaacatcctatttgccaaaaccttcaggaaaatggggatctttgggaaaacattgaagctaagtctagcaccattccaagaaaatccacaattcccttataatatatcatcctacctatcactttggggactacagagaactcttgcgcatagttcgtacgcttagaggtgtcagatattaatgtaccccacaatcacatcattggaagacctagacacactagtttatggcaataccgcactatacctacttaatacttaagatgtcgagccctagaggagtcatcaccatcaagggcaactttaagcaatcatatgcttgtgatagagagggatgcagcttagatgagtcccagatcatttaatcataatgtgatagcttaacagaagtgttgaaatagactgag

SEQ ID NO: 45421 - DNA, 288 bp, Zea Mays
tacttcaaacggagtgagatagagagaagaatgatagctagtattgtaccaaaactctgccaatgacaaccaaagtttccatttagttggacaagattgcacaaaacaacgaaggtaagtctccagacattgattaaccctctctgtttggccgtcggattagggatgataggctgtagtcatgcggagttccacgccgggtatatggaagagctctttccacagtgcacttgtgaatattttgtccctatcattgacgtttgccggagggaaaccatgcagtttgaa

SEQ ID NO: 45422 - DNA, 373 bp, Zea Mays
tacaacagttgatgatgatgatgattttggggttcctcctccgcctcctatgcctcctcactcacatgatcatgaggctgggagttctagtgctgcccctgctacccctcaggctatggaccctgctcttgcttcgattctccagtctatcactcagcagcaggctcacctggcagccgagcaggcccggttatccgagaggatgctctcgatgtttcagaacatgcaggacaggcaggatgcacttcagcagcagctacttcaggatcgggctgagagtagggcattcatggctcttatgcttcagcagtctggtgtatcagtacctccggttcagtctgctccacctcctccgcttcacgctccagttgtc

SEQ ID NO: 45423 - DNA, 465 bp, Zea Mays
ggtttcattccttctaaagcagacatgtccttattcatcttcaatcgggaaggtattcacatgtatattcttgtatacgtggatgatatcattattgtgagctcctcttcatccgctacggagcgtctccttcaccaactacacagggagtttgctgtcaaggatcttggtaatctcagctattttcttggcattgaagttcatcatagctcaaatggccttctcttaacacaacataaatatatcaatgatcttttactacgtacaaatatggaagcttctgcgggctcccttacacccatgctgcctgtggagaagctgtctctccatgacggtgatcccctctctccagaagatgctacgcgctatcgtagcgcagttggtgctttgcaatacctgtcatttactcgtccagatatttccttttcagtcaatagagtgtgccagttcctctcgacacctact

SEQ ID NO: 45424 - DNA, 355 bp, Zea Mays
ggagtgtgtgtgtgcaaggaatcaaagaatggcttgctggattactaggaccacgagcgccagcgggcgaaggaagtacagcgaggtgattcggtgtctccagcgaagtaccgttcggtctgagagttttggaggcttcactagcctctagggaagctaatagtgaagctagactaggaagagagcgactagggtggtcaaaccacagtggccaaggcttggcgtgcttgcgtgtggcgttgcgctcggttttctagcgatcaccggcgttcaggcttcgatgagggcatgaggcgtgcgggagagcaaggctgaggggctgggcagtcttataggcaaagacactggaactggc

SEQ ID NO: 45425 - DNA, 508 bp, Zea Mays
cctgaagcaagtttgagaagtgtcccatctcgaacattgaggtgtaatgctccacgataggccacattccaacaaaagccatcttcttgatcatgctcgttgttggcatcatcattattgtcgttgttttctccatcctcgtcatcacctccatcattgccagaatcattagggtcctcacctccagagtaggggcttgagctactagcacaggtagtgctgaagaagaagctccagcagcaaaggcatgatgttctgaggacggagtaggtgttgccagaatctcctcagaactatcctccaagatcacaccattctttacagcaaggtggtgcaactccatagggacttcttctgccacaactgggtaggaaggagcctgctgaggtggagggacacgggtgatgttcacacgagtagtctggagagtgtgcaccatctacaagagaaaagtgtcaccttagttgaatttaaagagacaagattaataaaataaatttgtaaaaac

SEQ ID NO: 45426 - DNA, 700 bp, Zea Mays
tgatgtgctacctggtgagtatgacataccacagtggcatgtatgggtgtccacaccatcgagtatggcataatttgtagctgcagaaggcgcacacactacatagtgcacataagtatacctatagtgtgaggtgtggctatagttacatcttttggctactatgtgtccttttcaaaataaatgtgtgggtgaaatccctatcttaatcacttggcaccagatgtggctgatctgatcaacggtgcacgtggtgtaggggtcatgccgcccaaggccatcctgcctcagggacatattgcagaatgatgtggatctcatatctagtagtggctgatagcgccccaaggactagctgccatcaggcttggccccccatatgcactactccaggaatgccaggctagtgctgagtcgaataattttagatccatctttggctaataaaaatcttaggcattttgctagcatcttgaggtatgtctttactcaaatactaataaagaggtatccaaaatgaataaaaaccaaacttgtttttatatctttcatttttagtcttgtgttaagaatttagatgatgggatgtgtgttactcgggtcttacaaacattggaggtcagccttttgtgcccacacttaggctggttctaaccggggtcactactaactagtgatgtggcactgtcgatggtcggta

SEQ ID NO: 45427 - DNA, 885 bp, Zea Mays
aacgcgagtttccctttggggagagagtagtgagtgaggaaactgtatccctgaggcgtaagtgttctagtgactcatttattcttccttagtcgggacatcctctgttccttgggggtttctcgttacaacttagggagaggctgcaaaacatgtatgtttttcaaaactgcgagaaaaaaggcaacacagaggaggggttcccccttctagcccccgagggaggctcagttttgaaggcaacgccgagcctcttgagagccattctttattaaatatgcggaacatactacaattaggcctgggcctgtatgccttagggtaaaagcgacgtagttgttctatattctaggcgttgtcgtagacttctccttcctcgttcaaagcttgtatgttcccggcttcagcaccttggcaatgatgaagggtccttcccagggagatgagcttgtggagtccttggttgtcttgtcgtagccccaagtcgccttcctggaacccccggggccggactcaccgttcgtggtagcgccgaagggattgttgatattttgctaagtgaaggagagctatgacccgagcttcgtttagctggtctagagagtcttcacgactgactcgattgttgtgtttgctgtgcgcctgtagccttggggaaccatactctaagtcggtgggtaggatagcctcggccccgtagaccaggaagaatggtatgaaccccgtggctcggtttggagtagtcctcaggctctagattactgaagggagctcgacgagccatcgcttgccgaacttgtttaggtcgttgaagatcttcaactttaggccctgtaggatcatgccgttggcatgctctacttgcccgttgcacctcgggtgtgc

SEQ ID NO: 45428 - DNA, 371 bp, Zea Mays
ttggtgtttatcaagatgaagctagcaaatgctaggaaggagcttgaggacatgagagcagacattaaaaaatccaaggatgatgttaggaaactttggaatgtcgcagctacatttcgggctgatatagatagggaggaggcaggtctactagcattagagcacaaagagcaccttgcttcgatttctgtatcatctcaccaggaagagctaagcaacattacatatgagctcaacatcatccatgaaagaacaaaagcaactaagatgcctatagagctacaacaagcaactgaagttgtggaacaagcaaaagctaaggctttgatggcccattatgaggtggcaaaagctagggaagatgcagatca

SEQ ID NO: 45429 - DNA, 958 bp, Zea Mays
cgaggatcggtagcaaacggtcgcacctcggtctcatctcgctcccggaagcgggctggtggaatgggtgttgcggaaatgggagcgggagggggaacagtggaagcgagaatggtggaggtggtgggtatggcggaagtggtggatggctcgggagcgactggagctgccaaagtgggaggtggagtagtagctatggcgggtgtagagggagcggatgagcgaggtcaagacgcgaggcgacaaaccctgtaggcaatcttatctaacgagatctgcaactagacacctcgctttgcctactctgctgctgccgctacaagagctgctcaggctgctctatccagacgccgcttcttgcgaccttcctgctgctctaagtacacagtcttgcccttgacctgcctgaaggggcaaagagggtcctcgtcgtctcctccctctggcgctgacacattcttcgtgcgcaccatcgtaacctgagggcaacataggcgagtgaaaaactaagcatgagtagatagcagctgataagattataaaagaacaggagacgggctcacaggcaggcgagatcactgaaatgacagaagaggtgagcacgtattagtcacatagtcataagtatatgaaatgtgaataaatacatacacagagagttatgacacagaaactgagtgatttggagatacagaggtcaaacgacgcgaaaacgacgtttgagcgaggaatagtgccataggaggtttgaaattggaattgaggcatgaaattacttggaattgagccgatacttcacgagtaggtttatatgagtaattatgagtgaagtgtgcgcttggtttgaatttaggcgaagaaagtggatttgtgacgctcggctcggaattgatcgctagaaatgggaatttgtgaaaaactggagtctcgtatatcggattggtgtgaaatttggcga

SEQ ID NO: 45430 - DNA, 1504 bp, Zea Mays
gtcataggattttgcctactggtttcaaagatttggagctctgaagtctagtctgtctcctagcctaaggcaaatccttggttttgtcgtgtctagggctcgcgtcccaatgccatcttctggcatgtggcagaggggttagttagacacgattttgtcaatgggagcattaggattagagctagggatcaaggtgaacacactcggttttggttcaagggctgaaaattcagaaatctgaatttcagaaatccccattgaacctccacttgaatggcttgtttgaagtttttaataaactattttggccaagctttcataatctttattgtagcttatttagtgtatttcaatgtttataattggcctaagccatgattttatgtttttcatggtctttcaccccttctctttatttctacttaaatagcttgattagggttggtattagggtttcaacatttttccctcttttgaaaatctcatttgttttgaacatgattctttagacataaacttagtggatcttctattattaagttgaattggggcttcatgctcaatttggctcacatgaaatgatggttcttgggttagcactgagaaaagccctaggtgacactggggtgtcacacacaccactatctggacggtggttctcccgcccctgtcgggattcagcacccttaccgttcaccgccccgtggtcgcttcgactatggtaccccagactgcaggacccggatagatttggatccctagatcgacagagtcggagtctgtaataatgcttagttcagtgtcttagtctaatcagttttagttagagttagtttgcttatcttatgttggatgcttgttatgatggacatgtaatgaagttggatctttgtaatgattgtcatcaaggtgtgggtatcccctgcaacttggtgtagttattaataaagttagttatttagttgggtaatccatttatttccactttcctctttatctaagaagttgttagtgaagatggccatctgttcattgctatgaagattttatatacatcttttcttatgctgaaagactgtagagtcacatttgatatatgtgtgtgatttctacagatgtctgagaaaaggcgtagaggtgtgaggcatgctcagccagagcagcaggcaccccaagaggaggcagccccgcagcagcatttgccaccaccacctctgatgaacattgagcaaatgttcttgatgcagactcaagaagtccaagcaattggtcagaccctagcaactatgcagcaggtgtagcaacagccaccaccgcctcagccttaggtgcaagtccaaatgccacaagtgcccagagacaagcggacagaattcatgaggggccatcccccagtctttgctaattccgctgatcccatggacgccgaagattggctacgtaccgtggagtgtgagttgcacactgcctagtgcaacgatcgtgagaaggcattgtacagtcc

SEQ ID NO: 45431 - DNA, 617 bp, Zea Mays
cttggggtgcaccaggcacgtgtcaccgccgtatccctagggtcgtgggtgcttgctgcgctcgccttggtccccggtagcggcagcagcaaccgaaatagcgaatcgtggcttttcgtgaccgtggttcttgtttctctttttcgtcctgcctccgccctgggtgacgacatctgagtcgcctatcttggtaaccttgacctgtggtaccgagtgccaagcacgaccctcagcggctctggcgcacttgtcagccagagcaaggagtgtggtgacgtcgttcacatcgtgtgtggccaacttctccagcatcttctcatcacgtaccccctggcggaaagcagtgatgatggaagcatccgagattcgggggattgtcccacgtaccttggtgaagcaggaaatgaacgctcggagggtctccccaggctcctgcctcactgcatggaggtgtgcctccactccgtgccgctggtaagcgctggcgaagttcgccacgaaccacgcacagagctcctcctaggagcagatggatcctggggcttggttcatgagccaagtccgagctggtccagacagggccacatggaagtgggttgccaatatggcggtgtctc

SEQ ID NO: 45432 - DNA, 612 bp, Zea Mays
cagggttgaaggcatgaccaagctagaggctttggtaggagtgtcttcaatgccactgggtgcgccttgcaatagcacagtttgtgactgttttggccccgatgaagatgcttgtatggagtcctttgcagtatctatctctgccacgactgcgttgacctggaaacaaatatttccagtattgattgtgtggtaagagaaactcacattccatatatacgtcttctcgagcagatctgtgattggatcaggaataaagccgatcggattgttggtaatgagcatatcgcacggcttcttgatgatgcgttgcgccatctgaccaaagaggatgaagtctgtgtcacccgtctcatcccctgcagtgagaagcagtttgtacctaaaacacatggcgataccgagtcagcacagtgaaaatgggtaggccatgtgtataggaaatggaaacattcactcagggtgatgcatagaaaagtagccgctgcatattagatgtgagtcggagtcaaaacagcgagagctattgggaggcaatggtagaatggaggcaattgaagcgaagagatgccgcctaacctttggttgggcgtgccaatggtagcgcaaact

SEQ ID NO: 45433 - DNA, 367 bp, Zea Mays
gtgaggataaactcggtcggccgcgcggcaagtggacaggatggccggaccagctagcaatcacaatccatcccgcgcccgatctttttacccatccccggtgttatccattcctccccgagcacgaatcgagacggcggtggcacgaatcgcggcggagaggtcgtcgatggtaaacagctgatctgatcttattcagatctgtaccatggccattcctcattcagacagtgtgtcagccaaagtttagggtgaattttctcttaattttatgtagtaacatgatcgacactctttagtaaagttatagctctaggatccagctataatcttggtatagcaaccctaggcaaattcttgctcgatc

SEQ ID NO: 45434 - DNA, 794 bp, Zea Mays
gttggattgactgatctatgctacaatgactaagtttcgctagacctaattctagtcatttgagttcttaagaccaagctagctttcaattattttgatacttatttaaagaccagttaacaaacgcaaaaagcacagacagcttcggctttagtaaaaaaatttagcagcacaacaatgcaatagcaatgaatgtcgtagtaacttcttaccaaccaatctgtttatatagtcctaaaggtgaagaaggcaaactaccgcgccgctcatactgacagatcggtggaccagcgtgggttgtaaatttttttttgttttttaataacaagctcaaacaaggtgttttcggaccttcgacattcagaaacattcgtgtgtttcgtggattgagatcgttatgaaaaaacgacctagcaccgtgaagggactactgttgggggtctccttctctgccgaaggtcctcaggatgaaggaactatttgcaatcaaaggaactaaacgccgaagctgcaacagacatgcataaaatgcagtgaagcttcgacttaagatagtcacgaaggttatacgtgacatcaagtcagcaaggaaaagactcgtttatccttaaatatttgtattagatcactgaaaagatatcaaggtcataattgtacttttgcttaggctacatcccttgcctataaatagatgaaccatacctccgtactattcacgcttgattggaaaggctgtattctcattctcttcatcgagcaagccgaaggtacaaatgtaatacatactttgttta

SEQ ID NO: 45435 - DNA, 480 bp, Zea Mays
caagatcgtccggatcttgtagtgcgtgtctttcacgcgaagctacaagagttaaagtataggctgactaaacaagatattctcggtaaggtctgggcctacgtattcgtcatggagtttcaaaagtggggtttgccacattccttgagcaatatgaccttttgatctcagtcgagatcccagacaaaaagtaccctgaactacgaaaaatggttatcaagcatatgatgcatagcctgtgtgggtcgctaaaccctaactgcccatgcactaagggtcgtgcatcgtgcaagaatcattacccccggcctttcagtgacataaccttacaagggaaggactcataccctgtttacagacgttgtgacgatgggcataaggaaaaggttcgaggatgcgaattggacaataaatgggttgtcccttacaatccatacctccttcgactcttaaactgtcacatcaatgttgaggtgtgtg

SEQ ID NO: 45436 - DNA, 612 bp, Zea Mays
ttaacacacaggctcttagtaaatcttcgaggatcttgttgactctttccgtttgaccatctaactgggggtgataagcggtgctgaaatctaacttggtgcccatcgcttgttgaaggcctttccaaaattttgaggtgaactgcgtccctctgtctgacactatctttcgcggaataccatggagcctgactatctccttaagatatatccgggcaagggcggctcctccaaaagtggtttttactagaatgaagtgggccaccttggtgagacgatcgattattacccagatagaatcattcctttttgtgttcggggcagtccggttacaaaatccatgcctatttcctcccacttccattcaggcactgggaggggttgcagtaggcctgcaggctttcagtgttcggcctttgttcgctggcaggtgtcacaccgggccacatactgtgctatctccttcttcatccctctccaccagtatctggttttgaggtccaggtacatcttggtggttcctgggtggatggagtaagctgagttgtgggcttcattgagcaggacttctcgtgcctctcccattggtacacacagacggtttttgaacca

SEQ ID NO: 45437 - DNA, 342 bp, Zea Mays
cgcctgtccattccactggcaggtgatgtgccgcctcggcatttaatgagctctgtccactccactggaaggcgatgtgccgcctcagcatttaatgagccctgtccactccgctgacaggcggcgaccaggccatcctgcaggcgcgtgcctgtccattacgttggcaggcagtacaccatgctgctgcgctcatcatgactcgcgcgttaccgaggaggcaaccatgacatatcaatactatatgcactatggacattatggcgctcggagatcaccctggcgttacaagcagtagttacttccttccattttgcccctgggcccacatgtcggggctca

SEQ ID NO: 45438 - DNA, 283 bp, Zea Mays
ctcttctagaataatttccttcaccttcatccccatcttcatcatggtttcttgcaccatcggggagttgacgatgacctctgattttagccataagtgtctgaagatcttgtgccaaccgatcttgcttgtcttctatgctttgtttgagctcattgaattgtatcatggtgacacattcttcaatctcagtgttgggatccatcttcctgtgaaattagtggagacaaggcaacaaatataggtggaatatgaagctatatataatctcacaacctcacca

SEQ ID NO: 45439 - DNA, 528 bp, Zea Mays
aatggcaaaattttcacagctgtcaagaagatgctcctcgacgaaaaaagggcaagtgggccgatttgttacctgaagtgttctgggcgctgaacacgactgagtgtagggcgactgggttcacccctttccgccttctatatggatcggaggccacgaccccgcaagaaataaaacatgggtccacacggacagtctcgtcagctgtccccgacgtggacgaacccacttcgaaggatctcatcgatggagaccgcgtctttgccctacaggctctaaataaataccaagcccaaacaaaagcatgacgtgaccacgcagccatcccgagggaattcagcgaaggggacctcgtactcgtccgaacagcccggacggagtccaggggcaagctggagcccaagtgggagggccctttcatcgtcaagacgaaggcatcccccagcgcatacaggctcgcaacgccaaacagcaaagacttggagcattcctggaacattgataatctccacaaattttttgtttgac

SEQ ID NO: 45440 - DNA, 341 bp, Zea Mays
ctctcttctgtccacgagaaccgcggagactacggacacttgatcgtgttcccgacgattggtggactcctagtgcgaattggtgacacggtaagcatcccagagcgacaagagtgctcgaacgaaggagagtgagggatgaactgacctggaaagggctggccgcggtgatgtgtggttcacggcggcggagagtcgatttgggggaaaacccgaattgcggggctacggtgaacgagtggagatgagagtgggtgctatagcttgacgattacatggcgcaaccgacctggccctcaatttatagaagggtaaagcggtggccagcgaatttggggagg

SEQ ID NO: 45441 - DNA, 1154 bp, Zea Mays
gttttcaaagttctgctgaaaaagaaaaggagaaaggttaaacagtgctgggccagaagcagcccatacggcccagcccagaggggaatcgtgcctgcgcgcgcgtccgcgcggcgagtttgcgcagaggcccttgccttcttgaagaattggaaacaggtttcactactgtttaaccaagtcgctgaccatttataaaatgatccccgtagttctatccttttgcaaggtggagtccccgacgacggcagcgcgctgtggagctccggcgagctagtaggccggccgattggggcaagtactggcgctgtacgttggtctaaaccgaattcagggccgagtgaaggttttccccaagttaatttcataaacaactacaccaatgtctctggccatggtgagcgcgcggatgaactaacaacctacacgttcccggtgattcatgggatcctagctcaattgggcgagttggtgagcatcaccagcacacagagatgctaaaacaagaacaaggatggtatgattaaacctgtggaggactggccacggtgagctcgaccctgcggtgtttcagaacataattgggggaaactagaaattggagctcacggttgcaagattgggagcgatactagatggtgtggtgcgtgatgaggttgcggagctaacggcgggctcaatttatagattccaggggcggtggcgcttgaattgatgatggcgcggtggcggccggagagggaaaaggctactggtgcaagtgaacttgtggcaaccgtcgtggcgacaactccggtgatcggcgggaagctaaaacgaagaacagcgatgtggtggaggtactcagatacgtggcgcaaggccgtgcgacggcggttccccggcgagcttatctgctcagtcgcaaaacagaaaggagaaggtgacaatgagtcaccggagtgacctccagcacaccgacagcaaaaatctttcatctcgtgatgttatccacccacccgagcgtgaatcctaacgccggcgacacgaatcgcggcggaggagtgatcgacggcggtgaagtattctgaacccaagcaggttactgtaccatcggctaactcattcagttggcctgacagccaatatttaggctcgatttgctcacaaatccc

SEQ ID NO: 45442 - DNA, 614 bp, Zea Mays
cactatggcagttggaaaccatagcatttaggtggggggcgagtctgttggccagtagcttggcgaggattttaacaatactatgaataaggctgataggcctggaatatgtgatcttaagagcctcgattttctttgggagcaggacaatattagttgagtttaacaactcgaatccttgggaattaagttggtatagacaattgagtgcggttgtcaaatcattcccgatgatgccccaacatgtcttaaaaaaggcacctgtgtagtcatctagacccggtgccttgtcaaacacatggagaagacggtacaccgaatttcgtcatgagtgaatgtcaattctagctgctggaggtcccacatttcatatcccagcgcggcagcgcctgccaatcaatggtcatggttctagtgaccgaagtgcccaggtgctcactgaagtaatcgtcggccaccttctctttctcatggtaagagaaaaacatgccaccctgagactgtaagcagtggatgtagtttttccttctgtgagcatttgctttcaagtgaaaaagcttggtgttggcgtctacacagcagatgtaagtgagcgtagacactagtagatatag

SEQ ID NO: 45443 - DNA, 853 bp, Zea Mays
tgatgttatggtacttaaaaaaggtcgtaaaattcgccacaggaaaaaaactgtgagaaaaaaataaggctggtaaatctcccaataataggaacatccctattaagtggagaggtcagactgaagggcacaccctgatttgttcagaatgattggtgtgatttggaattgtcagggtctcggtaaagaagtgaaaagtgaattcctccgggatattatcatgaaagagaaaattaactttattggtttacaagaaaccaacaagaaagactttgaagattcatggttgaatttcattagtggtaacaggaacttcgtttgggtctggtctccccctattggtaggtcgggaggtttgctggtaggatttgattatgtcatgtttgatgttagagagaaagaattgggtgaatttatgattaggactctggtgattcaaaaagaatcagggtttatttggaactttattaatgtttacggggctgctcaaaatgaccaaaaacagaaattattgagtgagttatcctctttctgttccaagtgttctcatccaatgttgattggtggtgattttaacattcttagaaaagattcggataagaacaagcctgggggtactaataagtggagttccctttttaattctattattgatgttcatgagctgattgaattggatctttgtggtagacattttacctggtctaataattgtaatccacctacttatgagaagttggacagatttcttgttagcccggagtgggatctgcattacaataatgtaaatgttactggtcttagtagatctttttctgatcatgtgcctttatgccttagaactgattttgct

SEQ ID NO: 45444 - DNA, 801 bp, Zea Mays
gcacgttccaaaataattggttacacacgtgtaccacgacccatacatgctcatgagaaaaaaagtagatcttgaactaaacttaggaaacaaacatatatatgccatggtggacctacagttgaatgaaattggaatagaaaaaggtcgctcatagaaagcaccggttaacaattttagatctagatagatacccatgataaccttgtggggcattactaactaaaaactagctaggtaaaagaagtcgcacggatccaaaaactagagaccgttaaccgttattgttgcgtacgtggctctagttgaaatatcccattagtacctaaaacgcaaaccatgtatggacatgataacgtgcaagaaatgtttcggcaacacgatccagagctgtcgattacacacgtgtacctgaaacgcaaaacatgtacgaacataataacgcgcaagaaacgtttcggcaacatgatccagagctgtcgattgcacacgtgtactacggttcatacgtccacgagggaaaccggagatctgaaactaaacttagaaaaaaaacaatcatataagccatgatgaatttatagcctaacatactaggatggggaaaaaagtcgctcaagagggatagagaccctttttcaaggagatcagaagctatatattgcctggatttatagagcacaaataaacatctagatatggatgaatatgaaccagctactatactgtggtagaaattcgttctacgcacgcacggatccatcgagagcggcagaagtgtttctcatgtatattaccttg

SEQ ID NO: 45445 - DNA, 324 bp, Zea Mays
cgggccagtaaaatccttgacggatcaccttggcagcaagggccctgggtcctgagtgggagccgcaagttccgctgtggacttcgcgaaggatttgaatgccttcggtttcggtcacgcactttagcatgggctgactgattcccttcttgtacagctggcccccgactagtgcgaagtcctagcttcggtgcttgaggtgtttggcctcattgatatcacttgggtggtaatgtccttgcagatacaaagttattggggcccgccaatctttagtcatgatgaggttgacaatgtgatggccttcggcgtcattagttattt

SEQ ID NO: 45446 - DNA, 757 bp, Zea Mays
gtcggctagtctaaaccaatgaaaaccacatcacatgtcgtagtaacgctgcgcagttgtcttcctccattgcgcacaacaaggggaggaatccttgaagggatgatggaccgcccaactaagaggggactgagtgagggaccacaccagttgaagctttctgatgaacaaccatctcccttgaagttgatgatgtgcaccccatagacaacatatcgaggcaccataaaccgtcatccaacgcccttaaaggggaggaagcctctaagaagagagtacgagatcatgggtccaccacgcataagattgatgtcaccaccaacatgagacggatgacgaagcagagatgtcaatggtcacgtaaccaagagctacgaccattacagtctgcaaggccaaagccaacagagaagaacacacataagcaaccatcaggcaagcagagacgatagtgcgaaagtaggacacctcctcgtgcaccgggcaccgcgctttcgccgcacgactaccacctttgcacagatttcagatgacctcgagaaccgccactaagaccgccacagacggcaaacataggcatcccggctttgcctccaacaaggtgaatgacatagaagcgtatcaagccgggatggtagaaggccaagcaaggctttcgcccataaccaacgtggtcgacgctacacgaccacccaaaccttatagacatggggtcagtgcagcggtcttggtggtcggagggcaacaagtcgacgac

SEQ ID NO: 45447 - DNA, 794 bp, Zea Mays
ccccgcgtggcccatacgcgcgcgtatctgccgcaggccgaccggtgggacccatcgtgcaggctcacactccaccgcggtcgcactcacgtactcactggcttgcgggccctccctgtcaggcgcctacctccctcttccttcgccgcataaatcgggcgagctcggcatggcgcgattcgcggattccgttggggtggtgcgcgaaccgtctcggacggccataagaaggtgtagccgggtccctaccctcccctctacctcgtcaacgcgcgaacagccgcaaccaagccgacctacaccaccgccgtgagaaccgagagggctgagttccgccgccgccaccgcggaatcgtgaacctgtcgccgtatcggcctcgggttgcaatcggggaccttcgcctgtgtataccgcttgggtctggagccttcttgcgtgacttgcgtgacctggcatagatgaattgctcgtcggagttcgtatctcatcaccggaccgcgcaccttcgtggttcatcctcggctcgccacttccaccagtaagaaccactgtcctgtactcggtttggactccgctacgtgtaggaccgatcggatttaagtttgggggccggaatggcacgcagccgcttcaccggccatggcaccgccgcggaagcataggcgctgccgtgtctggccaccaggaatggctagggcgcagtggaagcgtgtgggccgttgatcttctaagcgacggtcgcgattagatagagcgataccccttcgtgggattggatctgggccatcgatcg

SEQ ID NO: 45448 - DNA, 461 bp, Zea Mays
aacttatgaccaccagtgaatctctgtataccatcaaccttttaatgcctagtgatatggcaatgttcaatccgtggatcagagcttcatattctgctgcattattggatgctgagaataacaactgaagagcatatttgagttgttcacctccaggggcaatgaagaggatctcggcgcctgctccctgcagtttcagcgagccgtcgaaatacatccgccatacttctgcaacctatgggttatctggtacttgctgctcggtccactctgatatgaagtcaactagccttgagtctttattgcagtgcgaggccgaaactcaatgtcgtgagctcccaactcacaggcccacttggctagtcttccaatagcttctttgttgtgaagaatatcccctattggaaacccggtgactactatgactttgtggtcgtcaaagtagtgacggagcttgcgag

SEQ ID NO: 45449 - DNA, 607 bp, Zea Mays
tgtgtcgaatccacctgtcactgatggcagtttgggtcttagagtgcgaccctctgctgaagaagttagtgccttggttgcctcgcttggggagattcctgatgatgaacgacaggtccatttcgaggtgcccctgaaccctagtgatgcagagataagcgctatgcttgatttgctggctgaggattcttctgatgccgctcctgctggggcactggtagtggcgcccctcccagaggctgatacaactttggatactcagaaacctgccagtactcgcccgaggcgcctttgccgaaccaattagcctgatccttctgctgatgagcagaaaaagaaaagaagacgcctcaggcgagtatccagtttggatcgggacactggtacttcggttcctgctgctgaagaaatgcctgtgactgaatttactgatgctgaccccaatgggtgcacccaatccgctgctgataccaatgtgggtgctccatctgttgttgatcccaatgggggtgctgcttgtgttgccaatgtggacgacgaggaggaggaagatgaagttcctttgactcggaaaaacagtcggcagttcatcgccagcggtgaaagt

SEQ ID NO: 45450 - DNA, 511 bp, Zea Mays
gtagaaagatcttcaccgctattgagccatgggcactgttccgtccggccgccgtgtccgctcagcctcggtcgctttgaatcttccctcgccggagttagacacctcgcggtcttgttccacgtgcctcggcactttaaccacgctgccgtgaatcatactaacctatccagtgatcgctggtgaggttgccacggttatggccaccaatcgtgtgcgccagtgcccctcttcctctctgaccgccagcgcgccaatccaaaattggaggccaccgctcttgaacactataaataaagcatatcgctagctccgttagataatcacgaaaccagagcacccgctcctgcctccgattagccaccacagctctccaatttctctttctccccaaatatgtttttcgccaccgtgaaagagccctcgccgtggccagcttgttccaggtctgttcatactctctgatcgttcgttttagtgtccttaggttctcctaatgctgctcgactca

SEQ ID NO: 45451 - DNA, 601 bp, Zea Mays
ttctgtagttaatattgtacctactacgtgttagatattaggatctttactgtgtctaacttagtcaatccgagatcactagatagataataaatggatctatacgtgttcaccactaacacgtgtaaacagaggggatatgcacctgtagaagaggagggcggatccagtatcgtcattagtttgtcactcttctttgacaggcaatgggtcatgtctatggattagggtttagagctaggtactagcgttcgctttcatgtggtccttaatactgtatatagcgtcatgcatgtgaccgagggcttcaattgtggttaacctaggctctcccaatcaaatgtctgattaagaagatggacaataggatttaacttaatccagtcacttatgacctgtctgtcatagaggacacacccaacactacacactacgatgccaagatgcttaatccacgtacacaagaaaaacaggagaaatgtttaagttcaaatctgaagccacaatttctaaatcactatccaagatgctttgcatcacctctgtgcccagccttccctagcctctcgcgggcgtcgcctctatggccgtcttcttaatc

SEQ ID NO: 45452 - DNA, 458 bp, Zea Mays
tttaaatcttcaatactggggtgcttagtatttttaaacagtgtctaagtggagtttgaacttctacaaattttcttaacttcagcacagaagcataactaattttcttccttttaaaaaggtttggtcagtttctttaattaattccaaactctagaatttaaaacagaaagcatagagtttagtatttttatgtgatagttcataatattttgaatccgacaaaattggtttggctaaatttggttgaatataactcaagatatccatttcctaagttctctactgaattttaaaaaaataaacagaaaatggataaaggaaaaggtttttgcactggggtccctagcgaaaggttttaaacgtattatagacaggtcctcggttcactattcatctgagtctatgactctgcagaaaaccccctagggttccacaaaatcgaacttgcgatcctt

SEQ ID NO: 45453 - DNA, 713 bp, Zea Mays
tgaagaatagcggctagagcagggtcaatagctggtgggatagcaggagcagcactggaactacctgcctcgtgataatgtgagcgaggtggcacaagaggcggtggcgggatccctaggccctcatcatcatctgaagaagaatcagcaacgacaccctgggtctcaaactgtctgaaaatctcatcctcaggccagatatctgacactagatctggcattggtactggatccttaggggttggacgatagaaaccgaactaaaggcgagagcctcgagggtgccctggaactaagatggcctgatcagctgcgcaaagatgtgacagagataatgagcatatggcagatgatgacgagcacagagaccatccaatactatgtccttgatctcacaaataaggaagtcaaccacgtcgaactctaaatgtgagaccaaggctacaagtagccatagctgaatatgagtggttgcctctctgtatcacatcctgggtagtagtgtacgtctcatcagctcatataggaacttcgctgcagtagtggagtcggtaggagatcgtcgcgacccatctgtgaaaggcggtctgaacaggctacgacgtgagctgtggcgggtgcaactccgccgtgagggcgacgaggaggatctgaagtgccatagcacaaactatggagcctagtcgacgactctggaaatccaaggagctggc

SEQ ID NO: 45454 - DNA, 518 bp, Zea Mays
caaggtactgcatcacagagtcgccaccttgcttcagatgaacaaattcttccaacttcatttgcagaatgccatctagaatgtaatgctccctgaacgcttgcttgaactctgcccatgtaataggatgaccttcagactgaatggctacgaagtttgcccaccatgtactggtgggacctcgcagttgttgagtagcaaataggggcttctgagtttccgtgcatcggatcagtccgaacttctgttccatcacgcggatccattcatccgcctctgggggttcctctattttaacataaacaggggggcgagtttctgaaaattccatataagtagtatctctaggggcttgattttggcctctgcctccttgctggtgaatctggtttcctgccatctcctagagaaaccgggtattgtcagcagtagcatgaagcaaggcagcaatggcctcagccaaagttggaggtataggtggtgggattgtagtctcctccccactaccccgagaagtc

SEQ ID NO: 45455 - DNA, 721 bp, Zea Mays
gccatcttcctcatcaatgcacaaagcctaagaaaacaattcaagggcaagaacgatgatgaaagtgaggatgagaagaaggaaaagaatttttttcaagaagaaagatgacaagcaaaagaggttctacaaaagaaagaatgggaaagcatacaatgtttgatgattggcgcaccgacattgaatcctcaagcagctcttctccaatgggtatatgggtattagaacattctgccctcaagcatacgcattagcccatgtgtataaaataccttgtactaacccatgtatgattggaagatgctagaacttttgtaatggtatttagatggatatacttgacatttggagggacagatgtactagatatatatttggattgatggatggatggtattaggacttggttgaaaacctactatttgtgtaatgtgttattttgatatatgttccatctttatgggtatgggtaacctaatggatgacttttacccacatgggtatgagtacggggtaaaatttgtacccaccagtggatatgggtgaccgatagggttgttttttgtcgtgggtatgggtacgggatagcaatactcaatggggatttaccagttttcgtctctattcctaaagcgcggtctacaatcaacctctattaaaaacactattcacatgttgtagtgtaagaatcttttttcttatgaatcagtgtaagaatctt

SEQ ID NO: 45456 - DNA, 356 bp, Zea Mays
ctggagcatcaggaccaccgcggagctcggactctcgcggccagtgctctactccgcgtcaccctcggtatgcaaaccttccccatgcccaccatgtttctatgaatgtattgcgcatctccatttggagcctgcgctcgactgggttgctcgccggcgatggcgtccaccgcgaaatcgcgcgcgcggccatggcgatagctgggctggggggaagcggaagagcgcgtacccgtaggattcaagacaaccgatcgtgattagatcacggcataccgttttgctctgggaaatcctagccgtcggatcggacacgggcggacgagattagaacataacgtactgtttcgttaaac

SEQ ID NO: 45457 - DNA, 464 bp, Zea Mays
aacagcagtgtatgggtgatgcaatggtaagaaatggccgtattttgagaacttgtcgacgaccacaagaacacagtcggcgtggccagatttaggcaggcctgtgacgaaatccatagtgatggtgtgccaagctgctggtagaatttcaaggggctgcaacaggcctgggtagcgagagcggtctggtttgacttgttgaaaagtggtacacgttttgacaaaagaagcaacactggatttcataccaggccagaagaataactgtcggatacggcgaagagttactggtataccactatggcccccaacagccgtgtcatggaaagctgacacaatctgcgtatgaagggagggaactgccccatcatagatcttatccttgtaacgcagtaacccttgccgcagggaaaaatgtggtactgaatctggtttaaccgacagagctgtcaacaggtcttgcg

SEQ ID NO: 45458 - DNA, 797 bp, Zea Mays
gcaagggtgaagctagataggttcaaggatggacaacatcaggcgaggtagaggctataggagcaccaagtgaggttaggggcaagtggtagaaatggtgacactagacgatgatgggtttagtgagtcgatactatgggtgctaggcaggctccactccgacatcacgtggttgttagtgcccctatgtatgagtaccctaggcgctatagccaaactaggcatgcacgaagggggcaggttatgggccccgccctcaaggcggtccagattgacaagacccctctaaagggatagggagaatacatggtacagacccccgccacacgatgaaccaaagggaaatgtgtcatatgccatttcccttgccacgtactccgttgttaggcttccttctacaatgccctctgaaaaggaaatgtgtcatatgccatttatgtagtgtttttagtgcttggtgaccgacacaatactgtgatctaactattttgctaagcgtatgagtgaaggttcataagagtcaaattgaagatgtaaggatctagtatgcctagagggggtgaataggctacctgcaaaaactcaactccaatcagaatcaaattctaaagcggcagacactctatacatagcactgtcgtggtcccgcactgccgtgctgatgccaggccctgctggatgacctcaaatgctcagacttagttcaaattctagcaagatatatgaatatagaaagctaattaatacctaaaatatgaagctaaaactagcaagtcatagcaaatagagagcacagg

SEQ ID NO: 45459 - DNA, 350 bp, Zea Mays
aaacaaatgacgcgttccatggtaagttttacctctgagtttagggcttgacttatcacttaacaccatccttagtggccagataaatgttatagagtgacttctcgtgtcatatatctcagaactataatttcgaaaacaagaaacgtatgaccggtaagaaacaatggaaacaggagccaaatgttacactggtttcaaaacacatacaaagtgaaccattcaatcatggcagttggtggccatgatcaaagcagaaacagaaacagagtcccagagtgacagggtagagaaattatagagcaagaatgagcacataccaacgacctcacctctacctccaaccccgc

SEQ ID NO: 45460 - DNA, 412 bp, Zea Mays
ttctccaaactttgtatgaaatcaaagctcagttacttaagcaaagttgttctcctatgatggctctacaaatttgctatattgtccctaggcaaattctttgaatttctagagctacagagctctaaagtcaaccctgtccaactgttttcagacttagtcttataagaggaattgaatggctttttgcaaataagcccaattcacatcttttggcttgtaaatcttcaaacatgtgaaccatttgacatgaggtaccctatttccatgatttttgcacttaggtccaaaaatgtgaaaattttacatataacccccctagggtttcattccagggttctatttagtgtttctggctcttctagggtttggatgccacttaagtctattaatggtgacattttatgatcat

SEQ ID NO: 45461 - DNA, 1156 bp, Zea Mays
accaccttcttccaccagttcacctggatggcgacatgtgtcaccacatcaacaaccaacatgacgtgtgaaccagcatcgaggcatcacgcacccgacagcacaaagatgaactgaaacaccatgaggggtatgatcgggaccatggcacccccatgcggggagctgtgggctgagcagactccgtcgcttcctcaacaaacagcccagcaccaccccggtcggtggtcggcttgtgaccgactgcaagatccgtgtcaccagtcaccgccataggattggcaccatgactgtgttgtggcgatcattaagaagtttggggagtgtccggggtctctaccttcaccccctggttgcgtgctttccagtggttgtctaacttcaaggtctccaacatcgacaaatacgaggccaagctgggcatcaggggctggctggctactcaacgatgacctaggccactacagcgttggaggacatcatagcggcgtatctcccaattgtgctagggcaagacgtgctctagtggctccatcatctccctcgccactgcatttatcactaagccgacttctgcgaccggttcgtcgccagctatcaatcgctttctgacaagcctgtagagtcgtgggacctcaagtctatcgggcgcaagaacaatgagtcccttcgctcgttcctcgtgcatttccaatccatgagaaattgcatccccgacaatgacgaaatgatggtgatcaaggacttttatcaggggtctcacgacagggctttcatatgggatatccttcaaaaaggcccgacgacctccaaacaactcttctaggaggctaacatctacatcactgctgacgattggccccacagtcttgttgatcaaccaaggtctgcacctcagtaggaggggaacccacaacaggataagcgctgggacaacaggctgagggttgaagtccatgccatggggtcgcggtgactcgggcgcgtggcaccccctcaacagcaacccacgaatgatggacaaaattatcaatggcttgtgtccctagcataaggagatgcaccatactctgtgcaactgtagagacttcaagaattcgatcgaccatggtggacctttctagtcgctgcctccgccaccccggagcgaccaagg

SEQ ID NO: 45462 - DNA, 317 bp, Zea Mays
gccaccaacaactgtccgtcagattcggagttttctgggattagctggttattaccgaagatttattccggacttctcccgaattgcgaagcctataactgagttgctgaagaaagaagccaagtttgtttggagtcagaagtgcgaagatgccttccatgcattgaggcagcatctgactacaacaccagtattggcacaacccgacaacagcaagccttttgatgtgtattgcgatgcctctggcactgggctaggttgtgtcttgatgcaagacaaccgagtcatcgcttatgcctcaagagcactcaggcctc

SEQ ID NO: 45463 - DNA, 387 bp, Zea Mays
cggcttgatgcaagatctcgttttccctctccctctctttctagtggttgatggtaaaccgatggtgcagcccagctttataatctccagggagcggcgccacgacatgccccaacgacctccccccagctgggcgagtccgcgaccaaggcgtcaagcgcggatctcgggtgtgttcgttgtgtcggaggggacgagtccgtgccacggatgtcggtaggaggttggcacagaatcacggaggttcggagaggtcattgcgcggttcggttgcaacgacccgccagatccgtggcgagatggaggcgatgactgctgcttctctgagaccgagcgggacctgcggtgagttggggaaggatctgaccgcgagggcccaccggccgg

SEQ ID NO: 45464 - DNA, 374 bp, Zea Mays
cgaaactgagacttggagatgctactcggaagccttaaccactaggttagatgccttttcgagctccgtggcttgcttatttatttcttcactttcttgtattgcaagttgtcttattatggaggcatggtaactttgtgtttggaatgatctttctattcataggcttgcattccatgagctcaaccattgctttcatcattgacttctgaaggactggcctctgtctcgtttcagcccaaagtactcacaattaccaaaaattctgctgttacgcgatgtcctttccgctctcgccccttcctctcccgtcccttccgctcccgtcccctgccctcccacctccggccgacgccccagcccctccaacccac

SEQ ID NO: 45465 - DNA, 499 bp, Zea Mays
cttgcgtgcagttagaagtactgcatacaacagtttttggacatgaggatacttcttcttagatgaccccagaacttcgctgatgaagtagatgggatgctgtactagatacgcgtgtccttcctctgatcgctcgactactaatgcggtgctcaccacgtgagtcgtgcaggagatgtacaacagcagatcttttgccggctggtttggcatggctcggcgtggtggcttcagcactggcggcgtggtcaggaacttcttcagtgcatcaagagcttcctgagcttcttaggtccactggaacttatctaccttcttgagcaatttgtagaatggtaggcctttttctcctaaccttaatatgaacctacttcaagctgccatgcacccagtaagtctttgcactttcttctgtgactgtggtgcttccatcctcatgatagcctcaatcttttccgggttagcttcaatccctcggtggctaacaatgaatccaagt

SEQ ID NO: 45466 - DNA, 563 bp, Zea Mays
tggcagaaagcagagatgatggaagcatccgagatacgggggattgtcccacataccttggtgaagcgggaaatgaacgctcggagggtctccccgggctcctgcctcactgcgtggaggtgtgcctccactccgtgccgctggtaagcgctggcgaagttccccacgaaccgcgcacagagctcttcctaggagcagatggatcctggggcttgattcatgagccaagtccgggctggtcagatagggccacatggaagtaggttgccaatacgatggtgtctccacccgctgctgtaatggtggagacataaacctggaggaattctgatgggttcgtcgtgccatcgtactcctccggcagatgtggccgaaacttgggcggccacgtcgccgcgcggagatggtctgctagggcagcacggcctactccagccaacgggatgccggcctggaatcgagcatcccctgggacctgcggcgcaaccactatggaatcttgcccaagattgccgcagcgcccacgcgtcttctccaaagaggcacaagcatctctgcccttg

SEQ ID NO: 45467 - DNA, 396 bp, Zea Mays
ttgctgtgttgccatacccacttgcactgacgacgtggctgcgcgaccgccgccgtcgtgccgccatttatctctgttatgacacgctttcagtcgtttcaccacgtcgtcgcaggccgtgtagactcggcagtgaccgccgtagaccattacccagtgaatgccacattagagaactccgatgactcttctcccttatcaccgcgagcgcttctccgttaaaatttgtcctactcgcggccgcccgctataaattgatgcctcgacctgttccgctagattgttacaaagccagagcaccaaccctcgccctcaattagccaccatagtcggagaattttgttttccccccaaatcagttgtctgcgccgtcgtgagacgccacgctgtggccaa

SEQ ID NO: 45468 - DNA, 562 bp, Zea Mays
agaggggctttaaacaagactctatatgatatttatctcttatttttatgcttgcatgcaatatttttgtccatcccttttctcatcagtcaccttcctactccatttgttctttctctatagcagccatctttcctatcctccttgtttgaccataatagatgcaacctcctctctagaccagctttctcgagagagagtgttgaacaaggaggatttggacaaggtatgagagctcctaggatggatcatgtcgttagcctccaaccatgtccatccaatgtcatctcttccatcaacccatcgggagaagttgggagaatatatcatttttatattctcatgtaatgttgggtctaaacttttcttttatcgcttatttcttcacatccttgactgttatggtcccaagttgggcatcttatgcttattgttgtacttgtcctctcaaccttcacatacatgtgtaaagcgttcatcgaattgaggccatgtgtagaactcttttgcctttctttcttctttaggcatcaagtggccaaaatcgttttggttagattac

SEQ ID NO: 45469 - DNA, 509 bp, Zea Mays
aagaacacagttttttcggcggcaaaaccctagtttccacaagatgcagaagatctgatccagaaattaccgacatgtggttgccggcgaatggaagctggttgtgggggtcaatggtcggaatggttggaacagcggcgctctctcttccgcttgggagccatcacaatctctcgggcggaacgagcagactagaaaattcaaaaaacggataagtggtggaggagaaaagtgagatttagggttcggaacacaagaaggcacgtcggcatgagtataagttggctccttaagtcgggcattacctctaaagtgccagatcataactcagaaaagtaaggatcgcaatcttcaattgggcattacctctaaaatgccgacaagctttcaagcacacgaacaaaaagcaagcaacgatggttaagtggagtaacttcatccttcattcgtaatgggggaatcaacacaaactcgaagccgactcattatgagtcggcctcttctacccc

SEQ ID NO: 45470 - DNA, 1102 bp, Zea Mays
aattttctatgaatttactaagtttctgctattatttttactctaaaaactatttcccaattgaatttatttgattttctgcatccctggccgagcgcatcattaccagaaaacccaggggttaatccataaaatttcccagactcagaacccatttatgtgggccgcgggttgactctatggtttcccaggtgctcttatgcaattttacccatacgaaccgatattgacagatctcggtcgcccgatcaaacacggacagatagaattagagcagagctgttatgaatcggtatgaaaccggggtcactggattaaattatttcccacacacatgggacggcgggttgattacccataaactaggggtcctaactgtaaagacgctcgaccgaaagggtatctgcccaactgagccatccgatcaccaacgatcggcccatattagaacccagacgatacgtaaccagtaatttgctctggtcgccagatctgatatcgacggatgaggaacatccacgccccaacatgacctaaaccgtctgtcatagaatcgacgccccaaatcaactctcgcaaagggggtacatgctgacctaatcttggccgcccgcactccaatcaatggccatgctcaactcagttcctcacagcggaactcggcggcgccgcccaccgcatacggcgaaccatcgctggagtaggatatccattacgccctaatgtgctaattccatcggggagtggtgctatacgcaggtgggtacatgcgaacaacatgaagaatatctcaccgttgagtatggcgcagaggtcccaagcgacagtgacgccgatccacgatggagaggacacgccggtgagcaattcctcggttcccctagtcggagctctcacaggggacgattcgcaagcccaggatgatgctacggtggcccgcaatgtgatgacgcccccctctctcttgttcatggcagaactgctgacaacggtggcaaacggtgatttgggtacggcgaggcgacaagacccaagggggtgtttatatccactgtgcacccgatcccgcaggtgcggaggccgttatgccagtcgggtcgcc

SEQ ID NO: 45471 - DNA, 548 bp, Zea Mays
tgatgacccgtggccgagggtagcagatctactccgacgtgagctctccttgctacggacgaggccaccacggtgacaaccgaggaagaactctccaggtaagcaagactcaggaatgattcgaatctctggatttctattattcaattcataactgtcttctcaaccaccagatctagtatttatagaagtctatcttcctattacaagcctattaacaggccattaagcagactaacaggccgcacacaggcccatctcacagatctaagaataccaagactactactaggcgataatgcaacttcacatacctaggcatctgacatcttcccctcgcttagagtttgattgtcccaatcaaaatcagcaaaaaatctggtcttgagcacatcataatactcccaagtagtcacttcatcagtaaaatgtgaccacaacaccttcacctgaaccactggatgatttcctctacgcaccaatcgtcgttccaaaatcttcaatggtttcacatcagcaccagatagatccaccatctgagataaatc

SEQ ID NO: 45472 - DNA, 420 bp, Zea Mays
ggagaatttcttaagataaaagacttacttcaacctttgttattaatttttctttttttttgtttgatgttcatcccttcatttggtttacatgtgataatggtttgtgttagcttaaggaagaaaccctaggtgagactggggtgtcacaccttccatgcatcaccatctgacgggtgcactattaacccatcttgtctcttcgtacaatctttatgccacctcatgtgcatagcggtcttcctcgagagaaacaaatgtttcactctaggagtgagaggcatgtaacgaggttgtttatgtgcaacctttgtgaccaccttatccccatcttcatttacaagctccacgtacctcgacttcccacattttaagcatttctgctctctgccatgttccttccaaaaaagcatgcagttg

SEQ ID NO: 45473 - DNA, 352 bp, Zea Mays
caggagtacgacacagaggtgagcacgatttgtgccaccttctcgtcatcgctgtttataggacattgttgcgcctgcatccgatctggtgatctgattttgtttcgtataggatcgctgattttgtttcatataggattgctggttttgtttcttatagaatcatttttgtttgaaattggtgtgctcatagcagtgttagttgaaattgtgaatgttgactgttatatcagtcaccatgtcaatcgtgtttattgatttcgtgcaagggaaaaagttagtttgtcgtgactgtaggagtccactgtccatgtgggcagaatagctttttccctgatgactaacaaaacta

SEQ ID NO: 45474 - DNA, 634 bp, Zea Mays
cacataactagaggtgatggacttcctaacgattagactatgggtggttcgaagcattagaagctgaaaggttgtgcttttggcccttggtgcaagagatactatatacgggacatatgggatgtgggcaataagatattgtatcgcatatatcctttggctaattgctttcttttgtatggtgactgtacaagacttggttgtatggtatttgtactctccacggaatatacaatacgaccttcattggtgtgtgctttgattgaatcttcatccaaagttgcgacctcatcttggtgctggtgtatgatgaaaagcaccatgtagattttgcatgagagtactagatgattggtttgactattaagattgatgctacttttcttctacctattgtgagttctagatacttcgaatgtgcctttgtccttactaaagtttcaagaggctttggagtacctatgggccctttatcaacattgatgaaagtcattgtctacccagatatattcatccatcttttaaagaaatttgttcagagactagggtggctttctagcaaaatactacaatgcaaggaccgatcgaagccccttgaccaaggcattaattatgaggttgtataagacgccta

SEQ ID NO: 45475 - DNA, 961 bp, Zea Mays
atccttgaagcctagtatgcactttagatatgtacaaaagaatacaattatgctgcattcatactcatacatttgcattcattagttgcaatctcgtggacggagagtatgtcttgatccaagacccagaggcacagcaagaagatcaccctcgacgatagggagggcttcgtggtctacttgtctcggaattggtggagaaagatctacaggtggaacagatgagcaatcacattcaagcattggagcagcaggtggaaatccgggacaacaccatcgatatcctagaaaaccagctccatgatgtgcaggaggagcttgcggaggctaatgttcacctagaaatgcaccaccaagacatgagcgataatgaggcaggcagtgagggagaggaggatcccgaggaaatagagccagcaaccggtccgaatgtggctccctccggagtgccccctacacctgcatccagtgttgcctctaccaatcagggttagataggttagatttaaacatgttaggagaatgggaaaaccacataagcttagctttggtaccaacttttgaactaggctttagggtggatctcctaatatgatgtaacccataacaacttgtatgaacgatgcaatgaatgaatggttatccccgtttggttcaattttatgtatttttcttctcatgatataagtcactgtttgggaccctgaatcgaggtaacaacgacaaaatttctattttcagatggcagctagacctcatcacgggcaaaacgagcaggttcccccaccacctcccctaactccaacaatgcaggaacttatggatcagcaaaatgagatcgtgaggcagctggtgcagcgctagccctaccctcagcagtttgggggaagacagtagcaacacccacaggctgcagctacatatcaggagttcttgagcacccaaccgccgctgttcacta

SEQ ID NO: 45476 - DNA, 830 bp, Zea Mays
ggacgccatctgctccagatggttgcaccttaggcaccttagcaggcgccttggtgcaggaagtcgaggggtccctcccctcgtcatctgggcgagcggcttctgccgccagggcatgcaacttctcgacagctgcaagcgcagcggggcggtcaccccgcacggtgaggaccctagcaggggacggcatcttgaggaccaagtacccgtaatgggcaatggccatgaaccagtacagggtcggccggccaatgatggcattgaaagggagttaacctctgcaacgtcgaactagacgttcttagtgcggaagttttccccagtcccgaatgtaactgggagtgtgatgctcccaaggggatacaccggttgagggcccactccggagaatgggtgaaagggtcccagtcaggatcctgggatctgcagctgcttgaacgcagcatgactaatgacattgagcccagctccaccatcaatcagcacaagatgtagcttcatgttggcgatgacaggggcggtgatgagtggtagtataatagcccatgccatgtttttggggcagtcggatgccccgaaggagatagtggtactccgccaccgttgatgtggggctgccttcgagacccccgaggtcgtcgaaaggacctcgcggcgtagggacttcacgttcctacagaaggtgagctcacagcttccgccatacataacgtacaacttcttgcggcggtcgttgtcatcaccggagtcggagtctctagtaaggatgtccttgaggacttgctcgggggcctgatacccgaggtcccgttctcccgcggctacgtcac

SEQ ID NO: 45477 - DNA, 437 bp, Zea Mays
ggacgatcttctaccaagccagaaactctaaccagttggacggacaagaacagataaatgatgagccagcgcacatggatccggtgcacaggcggcaaggaaacaaagcaagagaaattagggtacgaagaaaaggaacggacgacgacgacagagtcaaggaggagaaaggaactcctgccaccaggccgagggaaaaagcaagacaccggcgaagggattccatatatgttggtagaaagtatcggcatgggcgatagggtggaaggacgggagaacagcgatccgacgctgttggaaacccacccgcgacgcggtggacgtggcggactcggaataagcacgaaggaagacacgggaaggcacagatttgtgggattttggaatccggtgaacaatccctacctgccggtatggtcacacgtagcgaagcacat

SEQ ID NO: 45478 - DNA, 441 bp, Zea Mays
ccagcttcggcgtcaaagacaccagttgtcgagagcgctacagctgccgaagctgcgcctactgaagctgtatctgccgaaggtgcaacggccgaagatggaaatttagaaagcacactctctaatattgataaaatacttctggacatggccgcagaagaagctgctacagccgccgaagagaccatggccacagtgcctgagaaagagaaggagatagccgaagatacttcagaagaagagaacttcaactttcaaaacttaattgggcaagaattgtcaaaggctgagaaagaagagttaagagactatgccatatcctgtgggtatcagccaggggcgatgctcttcggtggtattgacgatgaaagcttaggttgtctccgagaccggactggagcgaaggtcgtcggtactctgtcgaagagcattggtttcttg

SEQ ID NO: 45479 - DNA, 596 bp, Zea Mays
aatatttatttatatcctgagtttttatttataaaataaataggaataaaaaatataaaagaaagataaaactcacgcacttgcatggtcatccgacccatttgcccaatcggcttccctcacatctctccctctcacttacatgtgggcccccttagcacttgttattcttccaacttttcttttcctgctcgctcgtattgctcgaatggaggagcgccgctcgccaccgtggtctgcacacctaccagcgcatcgccgccacctgcaccctacgcccatgacgcgcacgccatcaatcgtggcggtttctcgtggcatttcttcatgtcgtaatggtgattaagcgacggttgcttgtcggccatcaacgtcatcaacgctaagcccctcctcctcggctataaaagccggtcgtgcccgctcatctcttcctccgcatatcctcgctcgttctgcatgctctccctcattgttctctgctcgccgtgcaacactgcttgcctcgccaccgtcgttcttgtatgcgcccggagctcgtcgactgccacctcgctagagctcagtccgtccccgtcgtcaaaagctcatcccgg

SEQ ID NO: 45480 - DNA, 422 bp, Zea Mays
tgtggctgcacacgtggttgtctgtgatgtatgtcaaagagtcaaagctgaacatcaaagaccagctagactactgcacccgttaaaggtactcgaatggaagtgagaagaaattggtatggatttcattaccgggtggcctcacacaccgaagatttatgattccatatggatgattgtggacagattgaccaaagtggctcacttcattccggtcaatactacttataaaggttctcaactggcagagttatacatggctcaaattgtgtgcttacacggtgtaccgaagaagattatttctgatcgtgggtcccaatttacctcaaggttttggaagagccttcatgagaacataggtactaagttgaaattcagttcagcctatcatcctcaaactgatggccaaactgagagaacta

SEQ ID NO: 45481 - DNA, 615 bp, Zea Mays
tacaatgataagggggcctaatgtttctaagggagaaagtgaaaaaaaaaacgggaagaaaaaatgggtcgtctagctgaacagcagtgtcactcctccgagcgttcagagccttcgtcgctgtcgttgcaagggacggtgtagtggatcacgacacgggctccggacgacagcctgcacgaagggttcaaagcacagccctcaataccagccctcgatgccactgcgtcaagacgacgacggggcaaaaaacaagaagaaagcatcgatcgagtgcattaccgagcactgacaaagagttcacagtaggttcaggtaaagaaaggccacgggcggcacttaactttcctcgatcttgacgagtttctcctccttcctgaacgactcggcccctgtggtcgcggacgcgacggaggcgtcggcgaacctcctgctcccgtccccggaggccgcgtcgtagtcccgccgggccgaggagctccgccggcagtccgagacgggagacctgagcgagtcgcccttcgggtgcaggaaggatgacaggatcggcgtccgcgggaggcacctcgtgcgcgacgacacgtcgtcggctttatcctcttcgcgtcttgtgca

SEQ ID NO: 45482 - DNA, 294 bp, Zea Mays
ataatattgaaaagcataaggatagagctcaggcaagactcgctaggtggggaagtggagaaaacaatcaagggtaagatatgtaaggttgcaacagaatggttgaagtaaagaagttcattactgagggatgttataaggaaaaacgagattagcaggaatgtgttaaataaaatgaccgctcacggttcatcgagaaacaagggtggccaagggcatgtaaactgaaatgtctcaaacagatattgcgatataaaggtaagcatatataaaaataagggtatgcaagattcc

SEQ ID NO: 45483 - DNA, 640 bp, Zea Mays
cgaatttgtcaccggagtacttccgcgccacggcaacatggtcgaccgtggtcggcatatctgggcgcccaggtagccggtgagtccttatctattgagttccttgcctcctctgcatttgttttcggggattgccagtgggggagggcagacctggggttggctgtcggccgttggtacgtggatgaacgatccagattagaactcaaatacctcttcgcctattttgaatctcggccatagatggtgacctggatggttccgatgcgatcttgcgtaattgaaaattgagccgtggattgttgatcctatggaccacactgcgtactggttcggtgtgggctgggtctaatctgcactgccagatagagatcggacggatctgataaccgatatccttttgggtgtgggcagttgcataagagcccctgcctctatatatatatttaacctatagtctaggttagtttaaagatctctacaagtgagtccataaattaataaaacgaaccctgtcctttctggaattatgacccgcagtccatagtcgttgatttgagtaaataaaaatctagaaaatgatttctagtatagaaataattctagaatcctagttaattcataattaattcattttaaa

SEQ ID NO: 45484 - DNA, 640 bp, Zea Mays
ggccaaggtgtatgccattcagagttggccaacgccttcgacggtgacacaagtgcggagttttcttggacttgcaggcttttatcgccgttttgtgaaggatttcagcaccatcgctgcccctttacatgagctgaccaagaagggcatttcgttccattgggggcagccccaagaggattcctttgcacttttgaaagagaaccttactcacgcaccgctactccaacttcctgattttcgtaggacttttgagcttgaatgcgatgcaagtggagttggtattggtgttgttttgttgcaaggaggtaaacccgttgcttactttagtgagaaactgcatggacatgttcttaattattctacatatgacaaagaattgtatgctctcattcgtgctttacatacgtggaaacattatttatggtctaaggaatttgttattcattcggatcatgaatatattaagcatcttcgtagccaaacaaatctgaatcgtagacaagctacgtggtagagtttcttgagacatttccctacatcattaaacacaaaaaggggagtgataatgtgattgctgatgcttgatctagacgctatgccttgttgtgtcaacttgattatcgtatttttggacttg

SEQ ID NO: 45485 - DNA, 777 bp, Zea Mays
ctttatgcatgagaagagaggagagaattaacttatccatgttctgttgtatttcgatttaatttcccagattattcaagcactacagagcttgatatagttattatgaccacttggcaatataaataaatatatgatgtcacacaacacaatcaaacaaaatataaagtgaaaacaaaattgtttacgaaggttgtgtataatgtgactctaggggcttgaacaacccacgacaatccacacgagtacaagctctagtgtctggtgtcaacacgtgtgtggccatcagggtcacgacaacatagccagccttcataattaacgcaacaagcacaattatggctcggtaatcggggtacacgataagtccacgcaacgtgcgcaacaggcgcaattttgagtcgatgatcacggcagacggacagtgcctacagggcttgcgaaaaatacgcgactcggcgatggcggtctgactcaacgagagcgatctgattaatggagagcgcgacatagcaatcatatgacacatccaagttcgagcggcacaaatactgcgtcgtgttgccaggacgcagccaatgctccgccaatgccataactcagccgattaatagcgcagcctgattgacatgtgtgagtacccaatatatcatttaatcgctcgacgtgagtacgaaagctcaaggcaacccaaatatttcgagcgatttaagtatgcacagtatataaccttcatatgcattttaataattttttgcttattatttactaccggga

SEQ ID NO: 45486 - DNA, 846 bp, Zea Mays
tgtatatcgggatattgattttaagacgtaatgattctcgagtatgaatcattccatcttcttcccatacttcgaaattgtctatttgggaccgtgtgcgtactccacgagatgctgattccgcttttgattgatttttgcaggtagcgtgtcactgcttctgacggtttcttaacattgtcagtggcgattcactaatgaattttctttgaagtagttggcccttcaacattggtgtcaacctttgcttccttttttatgtttgtgtcgacattctgaggaacaattttgtctacgtccccctcgtcgagttccttcgcaagaggtgatatgattgtttcaacagtttttgtggaggtcggtgctatattttcctgcaccatggggtatggaatgatcgaactatctttctgttgcattggtattgaattcggcgttggtgacttatgacgcgatagacggcttaagatcggctcatcacccaacttgatgtcgcatcgatgccaaaggaccaactcgttcattgcctcctgcaaagttatgatcccctcaactggaaagtctatctcccaatcttcacaaccactgtctgtgatctctagaacttggaccacaacatagtgtggcgggacaggattatccttgtagttaacaagtcctggttttaccaaaccagtagcagcttgttttgtttttgtcctagatcgattgattggaatatgaagaaagcaaggcctgtcctcaacaatatcgtctacagggtacttggtgcccgatacgaagtcttgcatagatcctacgctgctagggactagaggtggactcatgtggcctggcttgagttca

SEQ ID NO: 45487 - DNA, 805 bp, Zea Mays
ctgattagcccacccttcacaccgcccctgccgctaatcctcgctgcaccaccattgtatgctgcccagcaataggctgcgcaacagccctatacaccatggcaggacgcctgggactaacagtctcttgcaaattccttcaacacgatgtcactacagcagccaccttcgctcacctccgagtgggtagctgactctagtgcgtctaaccacatgacaccttatgctggtaatatctcactttttcgccccccctaattttgctatcccttcatcaattgttgttggaaatgagtctattctgtctgtcacctcagtaggcgacacggtcctccccgaccctttttatgtaaacaatgtccttgttacatttgaaattatcaagaacctgatctttgttcgtcaattcaccattgataacagttgctctatgaaatttaacccttttggtctctttgtgaaggatcttgctactaggaaacgtgatcatcaggtccaatagctccaggcctctctacattgtgcgcttgccagtcctccgcgctcctttggcatccacacattttgcgcttgttgccacaaccacacccatcccctctggtattggcgtcttggtcaccccggccctggcgctctgtctaagttatctagtgctgctgccatttcttgcaataagccagataatattcctgtttgccatgcttgtcagctaggttgacacactcggcttcccttcacgttgtcaaattctcgagctactcaatgttctgatcttatacattgtgatttgtggacttcttcagta

SEQ ID NO: 45488 - DNA, 691 bp, Zea Mays
gttgaggtaagaaagattatggtaggaaaagacttcatccgaaatgtttaagtcttgattcatctcgagatttgctttgactgttatatcttcccttgtcgatgttgatcttttcttctttggtcttgatctcattgattcgaggttattgtattttgtcaaagttggggaatatggttaggatagatatggatgagatagactacatgatgtaggtcaaaagtttgtttgatgttggttagagatagacagattatacaatccatcatggctctatggttagctcttctgctcatggttgagttggtttaatgcactattttaggtttaagtgcatgaggggagaacaaggtttataggagtaggatctagtttatttcactagtgttaacttgttaagtgactcacattagattgaataagatctcgattagtataagttgagggggtcatgtcaaattctagttgggtagctttgtgttaggtcggacttggagaagaaaaatgatgtatatcattgggaacatgtaggtcaagctggtagattagaatctctctctcttttttatagatagattaaggaatttattaagaaggtgtaggtcgttggtatatggctgagttgatccaagtcaccaatttaggcttaagtgtatggccttatcttttgtaccagcattaagcaactcac

SEQ ID NO: 45489 - DNA, 716 bp, Zea Mays
cttgacagctcgatgacccggacagatggcgcggaggcgggagctgaagggcactcagcgcctcaagctggacctggtgaagaccctgcagcggcatctgctccagcgctggtggaagggacacattagggttgttgggttttgggtttctttttgtgatactgaaggtcagttgctgcgtaggttctgacgtccgggcctgcgcaagcatcccccgatgatgttgatactaatattttgacggctgcgaatgcaacaccttttaatggaaatgtgtctgagggttctgaacctgggtcatggtcctcggacggggatgattttggtagccctttttcgtggattgaggagtcttctgaggaggatttagactactttgctgcgttggatttggccgcattggagtctccgcagcaacctgatgcgcgcgaagtgtctgccaccctggacagggcgatagtcgaagaaccacgcaggcgaaaagtggtgttgaaacagagcattggcaggacgtcacaaagtgggagacgtcgccgaatgggtatggagcggtcccgtcttcgactagatcggggtagtcaacgcgatcttctgtcctcgacgtccgggacgtgtattggggagggggacttgcgaaatctatttgagggcgaagagttaaggatgatgttgtttaatttttgggaggcaggtcttattccaaaggtagagctaat

SEQ ID NO: 45490 - DNA, 722 bp, Zea Mays
gtatgtttgaattcattgtcctttgtgttcatgattgatttgcttctttgaaatgattgttggtgtattgtgtgacttttgtccacaatggcatcaattagctaggaaaaaaccttagataaatgggttttctctgctctctataatctgtctttactcaaccctttcgtccctcccattcttccatacccatacagatgtcagaccttggaatgtcaactacaagtgatgtcactaaatgcaaagaatgtggtgtgttgacaagtcaaaacaacactacaaatgaaacagctgatgaacagacattcaagacacaaaaggatgcacaactaaaccaacagacaagtgaccttggaacatgttgttgttgcgagtactatggaattccttgtcgccagatcagtacaaacgaaagtgaaactacaaaacagaagaaccggattttgttttccggtataaaaagacaatggtctccccaagaacaactaatagcagatgcactgtcagacgatgaattgtcaggtattccaaaaaggaaacatcacaaggatgctcagctccaaaaagaagcaaatgagtgttacattgatggatggactatcacctgcacacagtttcagcctcgtcgtcgcatcagttccaagaaacaaaaatggaaacatggaaaaagtcaagaaataacttcaagaaaagcttgctatcaatgtggacgtgaaggtcat

SEQ ID NO: 45491 - DNA, 1127 bp, Zea Mays
caatttgatcgatgacaagttggacatctggttggttgagacagagggccttcggctggacaccactctgccctgtactttaatgcttctgttgattagacttgcgcttcaataaccacatttgggcttcctaccatttcaactgatctcctctttttgttgcagtacattcattgtgtatattttgtgggtatcacctcttcagaaaatcttgaagaatccgagcgatacacccaatgggtgtgaccaaggggtgtctgccccgcgaagggtgtttatcgcgttgtcctaaagtagtaatttgatgtgatggaggggtgtaatcatttgcctgagcagttggcttgggtccaactggtgccgtgttacacgaaacgacgtcagttgtctgactcattttcaggcggcttgaattgcttatttcttgtgactgtttggtgagcggggtaggaagtggacggtcacccctcgatctctttaaatagcccgattgccttggctgttttcttcactcgcccttgatcacttgctctcttcttcttcgtcacttctccactttctgcacgaccatgggcagaggcaagatgggcaagggatggcctcgccgcgctgacgacaagcgcaagcgtcctccaagtccaccctcggaggactttggtgactcggagtactcagaggaagtttcccgagttacagcctagcgctttgcacccgacttattgtgccaacccatacttctgccgatgtatccccttgaattccgaaccccaattctcactttttcctccgcgctttcctgtttccagagttcttgaatccacccacctcgcttgagagaccatgatggctcctaagaggaagagacatagcgttgttgtttcgatcatcccgccaatcgatcccaacagccaacttccattcgccgataaccacgtgtctgttatttccgaggctgaccttccgcacctcatcgaaactggtgttcttccaccaaaagagttgtattcctggcgaatctggcgcggggttactgtttcgacagaggacaccaacgaagttgttatcttcgtgccatttctcatccgaggactggccctgctagcttctcctttcttccgcgaccttct

SEQ ID NO: 45492 - DNA, 1922 bp, Zea Mays
cgaccacaaagtcgtccaagaactcatgcaacatcctattcattgcttccataaaagcagcaggggcattagttaagccaaaagacatgactatgaactcataatgcccatatctggtgccaaaagcggtcttcccagtatcctcctcacgaatcctcaattgatgataaccagagttcaaatcaattttggagaacacctgggaacccctcaactgttcaaagagaacctcaatacgggggagtgcatatttattcttgattgtcacttgattcaaagcgcgataatccacacatagccgcttgcttttatccttcttctcaacaaacaatactagggaagcccatggagacctgataggcctaatgaaacccttagccagcagatcatccaattgccacatcaattcaacctgctcctttggggccattcgatacggggccttatgaatgggctgcgtacccggaattagcttaatctcaaaagctgcatcgcgctctggaggaatgcctggaatctctgccggaaacacgtcagcaaagtcacacaccacccggatgtcctgcacccgcaaggcagcctcaccctccaccaccatggagaaaaagattcccgacttccttgactggtgatccagaagcaattgcgccaacaaggataacgtgaactttggggaacttcccaagaataccacctccctacccgacggtgcctgcaataacactgtcttccaaaaacaggatataactgcgtgatactgggataaccaatccatacccaagataacattgaatgcccccaaggaaatcacaaccagattggctgaaaagacctcatcagcaagaatgacggaacatccctgacaagctgaacagctactaatggagccattagcagaactaaccaaaattgggtgacccaacctctgcaccgaaagaccagcccgcgacacaaaatcctccaaaacaaacgaatagctagcgccagagtcaaaaagagcatgggccacaaacaaatcaactgaaatcgtacctgtcaccacgtctccttgctctctgccatccgcagtgggtagcacataagcttcggaaatacccgcagaagaggaagatcccggagtgaaattaacagaagaaccccactgagtcgtcgggtgaggcagacgcggagctccaaactgatatggcataggagtagtcggtgcaggagtaggcgcagccagatattgaggaaaaccctgcaccggcacgaattgagaagtcctaggcacataaaactgctgcggaggaagtggaactgaaaattgctgctcagtgcttgacatcatgttgatagtgccctaagaagaggaagaagtcactggctcccatctgagcttcccattgggattcctcctacacaccacatccttgtggtcttgactgcagattgaacacctgccgttccactggcactctgcacggcgatgcgcatcaccacaacggaaacacaccagccctagcccgggcttaggaacagcctgaaacctctgagtacttcctcccgaagtacccgagtcagaggatttgccacgatagggatggtggtgctgatgctgagacttgcccctcttgtgggctggacctccagtgttgcccctcctcgcgtcctggccacgaggctgatcaacacccgaagacttctgcgactccatggtatactggtgttgcatctccacacccagtgcttgctccactgtagtacggaagtccaccaacggaaaggctcccagggcatgcctgatggaaggtttcatgccctgacggaactggctcgccttctccatctcattctaagccacatgagggacaaaacggaccatcttgttgaagcccacttcatactatgtgacagacttcttctcctacttgtaggactgcaaa

SEQ ID NO: 45493 - DNA, 464 bp, Zea Mays
tggaggacaacatcaacttgtcggtggtgctagtttggagcttcgccgagggaggaaaatagagtaccttgacatccccctcaaggacaacattaagggatggcgcctcgagtggttcaccatggagaaccacaacaagtccctctgccccgatcagggaggcaacccaacgtccgcacgcccagctggatggagtcccccaccagttcagaggtagtcgaatctaaggtgttgtttgctgagatttgctcgctaaaagaaagaggcctgactgctgaagtcgtggttgctgactttgtcttcaagaacatccaacctctaaaggacatagtctacccttcttatctgtacactagggtcaacgaccctacccgagttactaacagacaaatttccaatgaggacctgctaagccgacttgatttgatgctaagggcagggtttcaaatgtcggtgccccctcg

SEQ ID NO: 45494 - DNA, 900 bp, Zea Mays
ccaggggacttgcaaacgtcttctaattctcattagggtatgcagaagatcctgttcttatatctgcgtgcacaggataatcagatttttatggagcatatttcatgggaccgctcgttcgttcctcctcccgactatttgatctcttatttcaaaggaagaggtgataatcagtgctgttagtacctttttgcccggcatcgagtcggataaaattgtaataattattacaacgataaacagtgtcacctagcatcgtctctattaccgctgggtatgcttctattgcatcgatctcatcttctaatttctttaattaaaattgtaataatccgcatcatgattgttacgtttagatcacgcgtgctcatgctcatgttatgtaactaaaattcttacacttaactatatttattacgcatgcaccacgaccacgtacgtatatacatacagttatgtttatgtttttttccctcaaaaggggaacgtatctactcctatattccgaactactacaagagaagctataagcgtatgcgtgatgactttttgcaaacagaatagcttataaaacaatgctggtgctagactatggagccttcagcaggacgacggtgagacaaactttatgcgtcgtttaatgacgtgttcgatcgcatacacgtacatcaacagctgaaaagaaaattgccgagacgaggattcccatgttcaaggcccgtacacggttcgtttctgacttaaacacaggaaacgttattgggctgccgcattgggccaaaattttggtcccagccatttcgcctactgtggcccaataaagaaaatgatttctgcagataaatgcccgttcagccgttctttgcgccttcggtccttccacagcacattgtcgctaaa

SEQ ID NO: 45495 - DNA, 293 bp, Zea Mays
aaagacagtttgtttaaaggggtaggagggtggacgtggtgaagaacggttttgattaaaaggtcggatcaccaacctttgtcgcttctcaggtccctggttggacctgtcacctccatagccctttgactttttcaggcctgcatacttgggttcgactgtcagtgccgtgctgacagccctgctgtaggagaggtcgaggcaggtggccatcttccgctgcagccggtcattaaggcctctcataaaacaatttctcttcttcaggtcagtgttgacctgatcaatggcat

SEQ ID NO: 45496 - DNA, 435 bp, Zea Mays
tttccacaaaacatagatatgaaactgtgcatttctttgtttcggtgcaaatgtatgtacatatatattttccacagatatatttctcggtatctattgcgggtagcgactagcacaagacgagggaatgcgtggacctagggttcgtcggcctcgctttcaactccgactgcaatgttctatccgaggtcgttacggactatcctgcgaagacctgtgccatgcgaagaactaggcttcttcgtcttcgccctctgctacgactgcaacacgctctctaattccatcaaggaccgaggtatagacggttgaatgctgttgcaacacatgctgctgcaacgttcattgatttttgccactttactgctaatcagggatactttttcctctagaacctttaattttgtgtactataatagagaatagtcctccgac

SEQ ID NO: 45497 - DNA, 614 bp, Zea Mays
gctgactgaatgagaatccgatggtacagtaaacaaaaatcttctgttcagcccccctcgccgccggtggcctttgcgcctggattcacgccggccgctgtgattcgtgcctagcgcgagtggataactgagaggagtaaagatcttagcgctcggattggttcaggctcgctcaccgttgtgcccgccgtacccacttggactacggccggccgggatgatcctcaccggtgttagccgcttaatgatcatgtgccacgcgtcttggaaccttagcacgtcgcaatgaacctatgtagcaagcctgcccatcgcccgagaacttgccacggtgaaagccatgaattccctacaccagtaacctcccctctctccggtcgccagcgcttctcctccaaattgagtaccaccgccgttgagttctataaattgaagcctcagagaactccgctaggtaaatacgcatccagtgcactagcacctgccgccaattgttcaccagagccacccaatttcgcatttcccccaaatcagtcaaaataccgtcgcgtgaacacctcgccgtggccacccttccgcaggtcagttcaagcttccttaattagtgttctagc

SEQ ID NO: 45498 - DNA, 909 bp, Zea Mays
cccacccgagccggatcattaccggcaacaccctcgagggctgggcaaccgctggcaccacccttaaggactgggttctctgcaacagccacccctaagactgaaggattctcagtcacctccatgggaattgaacgaccttgaccaatctcttggctctgaagaccgccttccaaggtcgacgatgcccgagacgctgcccgggatacctctaatcccacatctggaatgaccgagcagatgtccatcatatcaccatcagtttgctcggacagcagatcttcaggaacaacatcctcaagagcctgatcaaaatttgctagggataattcttgcagaccaacaagagcagacggagctagagaaggaatatcgctactcccccactgactctgcaacgccgactattcttacgaactaatgggacttcttcttcgtcctcgtcaacaatacggacaataaacggcacagggtcacacccattgggttcatctctggcagggtcacacccattgggttcagctctaatagggtcacacccattgggatcagcatcagtagggtcacacccattgggttcaacatcagcagggtcacacccattgggatcaggtccagtaaagagttccaccggtacttcttcagcagcaggagcagaagggccagcatcctggtccaaacacgacactcgtcgaagctgtctctttttctttttcttcccctcggcgggtgcagttggatgactgacctggcggagacgtttcgggcgagtaccctcaggccttcgagtatccatgattttttcaggctctgggatagttgcaacaaccattgtttcagcagagaccgagtcagaagaatccccagcacccatgtccagcatagcacttatctctgcatcacctgaac

SEQ ID NO: 45499 - DNA, 846 bp, Zea Mays
aagaagatcactagagatatcaggcaaggtgtcaagtgagttcttaagatgattaggtttggcacagcacacttgtttttgaggtggggatctcagaggctccccatacactccatctctcatagctgggcaaaaaatttgggtggattgaatttaataggctgggaagaggctggaggttttgctgaaggtgtcaagcaactacattcaccaaccttaacataactagtgtcactcccatccctagaggcaaagtctaaccctggttcactcattaccctcttaaattcactaacaatcatgcccaactagggctcagtactaaacacctagcccaagactgatagaaagtatgtgttttcttcctcgatcctagtctttgttgtgtctgtgggacttgagctaggactacaaatcctcacaaagtgcacattgagtaggtacagatgcacttactaagctatccttctcaagtgaggctatcctagcattcttctttgctagctcattctgtaaactaggaccagtcttacatgcacccaacagactagatctagatcataactccgcacactcatctagcagggtgcatacttggtttacaaggtggtgatgttcgacatgtgaatagtgcactcatcacaatcagttttgttggacaccactacaaaggctctagcagactcaagcttcctaagcgtagtctcatatttgtacttgtattctttcctctctcgagcatcaatcttaagtaacttgtccagactagccaaagtagtcgtcaactcacctacctcagcgatgagatcatctgtggaaagggttacctcaaaggtggaattgttg

SEQ ID NO: 45500 - DNA, 421 bp, Zea Mays
gaaaataggtggggggaattatgttctgagttcatcctctctttcccaagttacttcatcgtctgagtgatgactccactgaactttgtacatattgataactttactccgggtaattttgcatgatgtttccaaaatcttaataggatattctgaatatgtttagtcatcattaacattaagttcttccatggctaactgatcctcaggtactcttaaatacttctaaagttgtgatacgtggaaaatgtcatggacatctaacagtcggtcgggtagttccaactgatatgctacttctcatttcctttccaaaatcttgaatgaaccaatataacaaggagacaattttcccttaaccttaaaccttttcattcctctcattggtgaaactttaagatacacataatctccaacttca

SEQ ID NO: 45501 - DNA, 273 bp, Zea Mays
ccaaagccactgagactgtgccgatttccgaagcaatgaggcgttctgggcttgtttcatcagaggacacacctgctgccgaagcaacacaagctaatgttgaagaagctggttccgaagatgagtacagctgtggggtgccaagcaaacctagtcatctgggcccttcgtagccaaggggtggaaccgttcggtgagggtttctgctgagttcatgaattacactaccagactaaagccagaggagatggtctgcacgaaaattttggctgc

SEQ ID NO: 45502 - DNA, 713 bp, Zea Mays
ccaaggatcagatctatactgcttgcctctaatattatagcggtagcccagaactctcttcccataattattaatgtcaacctatgtgtcatatgatttgcctcaacatgccctttaggtgtaattactatcattggtgttttcatattttgcagtgatatttcatttgtgtgggcatatcgagcagacataaatgaatgtgtagcaccagaatcaaataatatggttgcaggaattgcattaatataaaacataccaagtgcgatgtcagcaccatcaggagtagcatcttcgctgacttgattaaccctagcaatagagtatcccttgctaggagtctgttgcttgttctaagctggtgtaccagaattccccaccggacaagcattagcatagtgcccaatctgactgcacttgagtcatgtaggacctgtcttctgtcctgtaggtctcgccgaggtgccagtgggggaagcctgacgagtgggaggtgtccgtggagacccctgtggagtgtactgagctgggtgtggtcctcctcctggacgagctgtggtaccctgaggcggaacgtagcgaggacgaacactgctgctaccctgcccctgggtaatggccttcctcttcaaatctcccaattgaacacgcttgtgttcaatagcaagagccttatccagcagtctctgaaatgatggaaatgtgtaagcaaccag

SEQ ID NO: 45503 - DNA, 638 bp, Zea Mays
aagcaccgagagaacctgccaccaagaggtgctacaacgcatctacgatggaaagggattcatcaacggagctgttgcacgctcgcttggcgccttgagccttgcctgccgatggagctccaaattccatgagagttagggataggggagtagcgctaagagagagcagggataatgagcttcggtgagcgacgaacaacggcgagcttgagagcaagagaggagcgcttagtggcggagtggcgtggttcactgccgatggacaggagagtggggagcgttcctgggatagagaagagagtgattgagttcacggaaaggagagggggcgataacgtccaaactccaaagagtgaatcgactagatgtttaaagcacaacatgtgatttgggcttaaagagagagagtctgggtcctattttttggaagcgacaatggcacggttctgtagttgaagcaagcaacgttggcattctcattttcagcatgcatcttcatgcccgttagcgagaatggcgttggcgaatgatgcacactactcttgcttctttgtgtttcatcgccccgtcgatttccatctgtttacacgatatacatacttgttttgtatatacttgtgttttaacttattattaag

SEQ ID NO: 45504 - DNA, 410 bp, Zea Mays
tccctcgcgaaagcagggaaaaaagaggaaaactgccacttcggccatctctgttgtgccgaagggcaagaaaatcaaggttttaacccatcggccaagatatattgaaacggtcgtagtgccgaaatttggcgaaggaacatcttccactattgaggcaagacaaatcgatttgccgaaggtgcctacagctgagccaatcgaaatgccaaaaaatgttgtcgaagccaaagaaaaggcgatcaaaaaaccagagctagaagaaataatggtgccgccagaaatcttgagtctaccggcagaagcaaaattgccgaaggtagcaaaggctcccgtaacaactcccaagacaaggagaatggctagcgtactagacgctgtcatggaaaccacaaaggcattaactcctg

SEQ ID NO: 45505 - DNA, 541 bp, Zea Mays
atgaaccatcttaatcctctgggtttgccaagaacaaatcagccacctcgtccgatttacagcggcctacgaatctatcacgaacagtaacagcgcgcggcgcggctgctcgcttggtgacgcctcggtgaatcgtgcaagggcgtccgtgctgctggaattagatgagagtacgggcgagcctacagtttaaaattataaaattttccattctgtgactgggctgcaactcgggcatgttggcaggcccgccactgcatgagagagcccatttatctatctcgtcaatcacgtgcaaataccttatagcctgggaacaagagaatatacaagcacaatatcggcataaaaaaaaaagaaacctaaaccatgaaaacaactactaatattttccaaacaatatacacttcagcgtcgcgtgcatctagatatgaacatgcagcaaaattctacaagaaacactgcattttcctagccccacaaatttcagtggatgttcactagttgtcacttgtcgcaaaagacggaagctctgttttcc

SEQ ID NO: 45506 - DNA, 318 bp, Zea Mays
gagactacaatattatcctctccctagtggcaaccaaaaaatattattcaagtttaatatccttatgagaaataacttctattccacaaactatcatatgtaatctaaaagtaatcagggaagctgattgaccagcccccaaaagtaggttttctcttggatgagcagggacaaggcagttctgctaacattcaaatatatgtaggacaaaacagggccaaaaaattatatgtacaaatctagatcttgatgcacacagagttaagcacaaagtgtagttcaaaaagtttaaaaccctgtagagctaacctgcatttc

SEQ ID NO: 45507 - DNA, 287 bp, Zea Mays
tgatgtggagggtttggatgatatggtggtggtggggggaggacttggacctcttgatgatgatggtacgcgtggttgggttggtgatggattcgcacgttgtggtatggttgctggtggtgttgctgggggtgataggtgtgcgcgacgactcgttggttgtcggctggctgggctctggccattctgtccttggtggccttggtctcagggcagtccctggtggggtgtgcgcagttttcgctaggcagtaaaatcttcgtggctgctagggtcggcctctgcct

SEQ ID NO: 45508 - DNA, 811 bp, Zea Mays
cggaggtatcgtatgctggaaagtatgttgggaacagataatgtcccaaagcaagctgaaatgcttgctgttgaagaattgttgacagccatcggtgaggagccatattcagtgactgaggctctgaaggtcactgattggagaaaggcaatgttagaggagatggcatcaattgaagggaacaagacatggccactggttgatttacaaaaaggacatcgtgccagaggtctgaaatgggtgtataagctgaagcgtaacgaatcaggagctgtgatcaagcccaaagctagactggtagctaagggatatgtgcaacaacaaggtattgattttgaagaagtttttgctctagtggcaagaatggagactgtcagggtactattggcagtcgtagcacatcatgggtggccaatccatcacatggatgtgaaatcagtgttcttgaatggtgatttggctgaggaggtatatgtcacacaacctcctgggttcactgcaaaaggggaggaaggcaaggttctaaaattgcacaaagctctgtacggactgcgacaggctcctcgagcttggaatgtgaagctagacaaaagtttaggcaaacttggtttcacaagatgcaagactgatcatgcactatatactagaaagaaaggtggtcagagagttgttgttggagtatatgtagatgatttgttaattataggggaatcagacgcacagatcactaaattcaaggagatgaagaaggagtttgaaatgacagatttaggatcactgtcatattatcttgggattgaggtacgccaaa

SEQ ID NO: 45509 - DNA, 377 bp, Zea Mays
gtataccactgcaaaaatggtaaacaccccaaaccatcacagtaagtgagttaaacaaatagaacttggatttagccaatactccaaataaatcaaaagaaagactaaaaatgtgaaacagtgagcaacccaaattttatctaaatacttatgacgtaaactaccagagaaaatatgaaactaagataaaaatatgatgcaatacaactcacccccctaccccatgaaaaagaccatgtattccaagaatttttccaccccttccctatgagcaaaattcaccaacttcaagaatgattgctcctacgcaaagagaaagatagaaaaattaggaactctgttgtttgacatttttcaaacatagtagtagtagaaag

SEQ ID NO: 45510 - DNA, 504 bp, Zea Mays
ccgcgccatggaagcagggagcgtgtgcgtgatagccgccgtattgctgagttgtcagcagaggttgacagtttgcagcgagagattgtggagcgggataaggctataggctgggctataaattcacgatctatagcatgggattgtgagacgactgcccgagcccggctggaagagctaagcgtagcccaggaaaatttgcaagcgtataataacactctacacgaggaagtgcacgtgttgtatgaccagttgcatctgaacgtgccaccgaaggttgtggcaatgggagctggtgcatcaggagcagctggcggaggaccatatggggagttggatctctttggagcccctccttctatgaacatcgcggatgatcattcttccgaagctagtagtggagcggaaggagccaatgacgtggataactagattagtgtagtagtatgtagtttccttatgtaatctaaatatggaaaagtaagttgtataagttgagtatgt

SEQ ID NO: 45511 - DNA, 355 bp, Zea Mays
gaaggggatcgtgccagcgcaagtgaggctccaaggtccagcagagggcgcaaacaactcgcatgtgcaaaaatgcaaagttcagatgcgcattgtaccactccagtagctctcgtacttcatcacgcaaaaaacgaacccaccagctaccacggtggatgcggatatcagcgtattctttctcctgttcgcatttgtttgtgcctatagcaagatgggtatcgtaggaggagtagacctgaccaagttttatcgagtctaggccgtgcttgatctcgtcttaacacgcgcggctgactcggtctgacgcgtttaatcgagtccgagtgatagcctattagtttatcaccttagg

SEQ ID NO: 45512 - DNA, 431 bp, Zea Mays
atcaacagtgtctgacgtgaggctccgtccaatccctttcaaaagacaagctgtgccagcagtggatttactcttctttttcttctcgaacgaggacactaattttggtatagaaactttaggtttctttgatggtcgtggatcccttgatggctgtggagaaggtggatccctgaagggcgatgtatgtggcgaagacggtgggccaccatgaggatgaggagaaggagggtcagaaagaggatgaggagcagcatgtgaagtttgaggaggtgatgatggatgtacaataggaacaacaatttgagaaggaggagacggttgggcctgcgacgacggctgttgtggtggatcaaccaattcgacatccgttcgaggccaaaggataaaattcttgatagcagaattcggatgggactttcaaattctta

SEQ ID NO: 45513 - DNA, 459 bp, Zea Mays
cgtgacctgtgagctacgatgatgactggcctagggaagagtgcgtcgtgtgaactccactgtgtatttgttgcccgtgtggacctaatttctcatgtagaaaactattttgccctctttcttattaattttcttatcatgtcactaaattctatatatgacaacaaaattaatgatatagaaactagatgacgtggaaggttgagactgctctaagatatgtgtatgaacttaaacacttaaatgtgggttcttagcttcaggatacatatgtcgaggttcattatctatattgattaaccaatcgccatacgacaggctaacattagagcatgtacaatgatatttaatatagggtttcttgagggatgtttagggcatgtataaccttgatacttcgcttcggttttctatgtacaagagacaactaaaagactgcatgatacaatcttgagacac

SEQ ID NO: 45514 - DNA, 300 bp, Zea Mays
attggttcaaggttccatgttgtaccatctccaggtttaatttctccatttcttgacataatgtggtgtccaaagtccttactgtaagacaatggcaagaagccttgcgacttagtgcatctgccaccacgttggcctttcctaggtgataatggatttcaaattcataatccttaatcagctcaagccatctcctctgcctcatgtttagttctgactgggtgaaaatatacttcaaacttttatgatctgtatatatatggcagatatttcccagcagataatgacgccatattttaa

SEQ ID NO: 45515 - DNA, 562 bp, Zea Mays
caaaccaacagacaagcagcactcagaccggtcaaaggtctagtggtcaacaacaaaatcgtcaaggaagtgtcccaaacaaaccggccagaaacaacaacacaactaccccagttcaacctaatggttgtttcaagtgtggcgaacttggccactatgccaacaactgcccaaggcgtaatcaacagacaccccaaaagaacaccaaccagaggactgaccagaacacatctcctcgtggatctgcaaagaacaagacttcacagaaccagagtagaggaagagtcaatcttgtgacagcggaatcggttcctgaggatgccgacatggcgtatggtatgtttcttattaactccatacctacatcagttttatttgattctggagcatctcactcctttgtaacaaagtcattcgtggaaaaacataatataccaaactatcccttgaagaagaaactattaattcgatcaccaggaggtgaatttagagccacacgctcatgccttcagactaagattgaaattagaggcctaagctttctagtagagctgataatttt

SEQ ID NO: 45516 - DNA, 682 bp, Zea Mays
gtccaagagccaaggcccatctttgtgtgacctacgggttgctactgcacacgatgcttctcggcccatgtttatttcctggcccgtctttagcttgggcagtttcgtagtcggcatcaggaattcaggaatgccagcgttcacagaaatttagccctttgctgcgtctgcagggtgggcctttgtgggctgccactactgcctcgcccgttgccctgtcgaaccgaaaacgattttcgacatactattctctcgctgacaattcatcatttgacatttcgcttcacctttgtctccagcgtcttgttgacttgttgtcacgtcttccgaagtcgaagctgttgctccaattctcaggttcacacacaggcacaggtgactcgttggagtcttggagggagagtgttggagtcttggagggacaggtcagggacagattagtagccaaactcacacaaatacccgggcaaattcatctgatttttttggattgatacaccgcacgcacgcattttggatgctaatgacgctcggcttgcatgcccacgcccagttcgtttttttgcggaggcgacgaccaaaacaaaatcgagcgtcaaacgttggccagccgtcacgtctggcggcatccaaacgcaccatttgaattggaactcactaacatcttctcatcgctgaggac

SEQ ID NO: 45517 - DNA, 524 bp, Zea Mays
gacagaatacagagatagccaccgacaaactagacgtagggtattatctcttagtgaccccgaaccaatataaatcttgtgtctcttgcattttacttttagatcattgatcgagtacacacccatcacagattcttcaaacactatctaggattcctcaacaattggtgcactaggtaggggtagcactgatcataaccaatctagtggcatccatgtatcacaagcaagaaggtcaaggtgacaatctgaatttgaagatggtggaaccaaccctgaggacaatggttctgaaacatgtgacaccaaaagcagatccaattgaataaaaccaagtttcacagatccatggggatgaaaatccacctctgcaccaactcacacttgatgacatcatggagtcaggccaggaatatgtcgtcatcttcgatataagttataattccaactcttattctgacccttctactacaacaacaatgatactagatctaaacaaagggcttgaaggaggcgaatgccaa

SEQ ID NO: 45518 - DNA, 637 bp, Zea Mays
cttagagtgcgaccctctgctgaagaagtcagtactttggttgcttcgcttggggagattcctgatgatgaacggcaggtccattttgaggtgcccctgaaccctagtgatgcggacataaatgacatgcttgatctgctagctgaggattcctccgacgctgctcctgctggtacgttggcagtggtgccccttccagaggttgatgcaactttggatgtccaaaaacctgtcagtactcgcccgagacgccctagccgaaccaatcagcctgagccttctgctgatgagcaaaagaagaaaagaagacgcctccggcgagtatccagttttgatgaggacgctggtacctcagttcctgctactgaagaagtgcctgcgactggacttattgacgctgaacccaatgggtgtacccaaactgctactgatcccaatgggtgtgctgcttgtgttgtcactgtggaagatgaagaggaagagaatgaagctcctttaactcggaaaaacagtcgtcagttcatcgccagcggtggaagtagtggagttccttctcctgctttgtctgccctcattggtctgcaagaactgtctctggccaactttgatcaaactcttgaggatatggtcccagagg

SEQ ID NO: 45519 - DNA, 486 bp, Zea Mays
gcttcataccgtgaattgatgcccgggtgatgtcggccaccgcaccaggcggaaccgtggtgaaagaggagcgccggtgagcgattactcacgcgtagacggcacaccgagcccaatgacacaacatccgcactccacacgaagtgccgaggccccagacccatgctccgaagacgatgcaccaacaggggcgggaatcctcggtggcgccctctcatctctcttctcgatttctctctgcacatatacgcggcacagaggcaactcgcttcggcttggcgtatccacagaggagcggcaggggttatataggggcggcacgagcccgggctcaagaatcacaaggatccgcaacaacccccgccagcgcaggtcacggagcggtagctgcacgcggaatctgttagaggatagggacgaatctgactcctgggtcccacacggcagtggcagcggggagagcgtgcgtgtgacggctgaatcgta

SEQ ID NO: 45520 - DNA, 921 bp, Zea Mays
tacttacattggcacaagagacttggtgcaagagcatattgcttacagagtgtggccacttgctcatggatgggagatgccgaaggaggctgccgatggctccagccaaaatggtttggtgtatctgaagtatacctttcgatacaggagccagtttgatgaaccgaatgatgactggctagatgccataaaggtgactagagatgagctgcttggagcatattcaaaggtcgaagatgaagccatgacaactgccttcggagctcggggcaaaaagaggttgaataggttattcgatgtcattgggtttgtgtatccagactactgttatcctttgcgaaagcaagagaagaagaggaaagctgctccctcggcgacctctagtacgtcaaggtcaaaaaaggttaaagttttgacgcgtcgacccaggcgcattgaaacggccgacgtgccgaagctaatcgagggggccactcctatctctgagccaagtcgctatgtgcctgtcgaagctaagacaaatgtgactgaagagccaaatgtggagaaaacaacagagcaaatgaaggcactgagtccaccatatgtaacagaactgccgaagccgtcaaacatccccgcagcaactccaaggaaaaggagaatggctagtatggttgatgttgtaatggggtctatgaaaacatcagctcctgctcctgccgaaatgcctaggacagaggctaaagattcaaagaaacctaacaaggccagaatggcacatactatttctgaagctggaccctcggaagttcctgccagaacaagaccttcggaaagcacaccgataatccgggagaaagagggtgcctctgagaaatccaaatcttctactcccaaagcacctgccaaagagctagaattcattgtgcgacatgcttc

SEQ ID NO: 45521 - DNA, 551 bp, Zea Mays
attgggtggcctcccaacataaggaatctaattagccaacccttttgaaaatggcactatgatatgactaatgtagtctttgtttcaggtgtttcttggacgttttgttcatctttaatcatttttcacctgtctattagcctcacggacggttctacccctgcctttatttatctccatgacagagtgagtcactcagggttcgtctttgcctaaccatcagggtgagggcaggcgacgacgacgactcttcttggttctcaaacactgtcctcccctttcaggtgctgacaaccgtagcaagcttgagtgagtaattcctgccttgaatcattatctccttgtttgcggacctagaatggctcacagacttctatgttgttcgtttgggctttgcataggctaaaatgcgatgtcagttcttcttgattccccaacctcgtcctcccttttgtatactgactactatcgtagcttgagtgcgtcattttcaccatgaatctaagtgtttccccccaaccgggtaagaccctaatcttctcaataagcct

SEQ ID NO: 45522 - DNA, 354 bp, Zea Mays
cgctggtatctacagaggtctgcttcaatcttcagcaaaccaacgctctttgagaaggtcctaacaaccttagcctcggtccgattccgaaggcatcttagttttccttcattgactccaccaaatatcagagaccctggtttgtatccacaggatatagcatatttctttagctcttctttttcagtatctgttaactcttgtccaagtatatcttgaaaattaaagtcgtcttcttccatagtgtcttcaatttgctcttttcctttttcagttgtcgtgttcaccgcaaccgcagcagcttcttcttcagccatttttagaagtatattgtcaatatcaccaagtgtagtt

SEQ ID NO: 45523 - DNA, 323 bp, Zea Mays
ctgttgggatcaatggggagaatgactgcgacggatgaactcgaagctttccgcttgggcgccatttcaacctcgccggcgaacggagcagaagcgatattgcaggagagcagagaaagcctggatgcaaaaagctaagcaaaacctagggaacggagcgtggaggcgtgctacaacacagtacgtatggggttttcccaggccaggtgccgtttccaaaaagtgccaggtcatcacccagcggttatttctaaaacgctggcgtgccatgtcatcactcagctgctatttctaaaaacgctggcgtgccatgtcatcactcg

SEQ ID NO: 45524 - DNA, 419 bp, Zea Mays
aggtggatagtggcattagagactaatgagctgacaaagtcctgaaccctctatcacctgcatccatcaccctgacatgaatgcgagtgatgtagtagaaagcccgaggaggctcgtacacttgccttgtctcagacaggggtcggacgtaggttcccaacgcatgcagaacatcctgcagcaggttagggaagtgccctgtctcgaacattgatgtataatgtttagtgacaggccataaccccacgtagtggtcctgctgttcttcgttggcttcctcgttgatgttttcctcatcttcttcttcttcctcttcgtcatcttcatcattgtcaccagagtcatccgggtcgtcgcgtctgggagcaggggcttatactgctggtgctggtggtgctgaagctgacgatccagctgcg

SEQ ID NO: 45525 - DNA, 313 bp, Zea Mays
ggatgatcccttgttgatgatgtgctggggaggccatggccgtgtggctgggagggccgttatataggagatgggcatggcagttgagcctgatgatcgctgcccagtgatccgctggccgattaaacaaaggtgggggtgttgggttggggccgggggcagaggacgcatggccatgcacgcacccacccggccacccccacccccagccttcaaattcggatcttgatttctcggttgcattgcatgatcagtctccctcgtggctgctggtggctctagggaaaaatgattgaatttggagggagggaag

SEQ ID NO: 45526 - DNA, 645 bp, Zea Mays
tttagattaaaaggtaatgataactgtagatagattaacgttggttgtactccaagtcatacgagtgggtcttacgtgaagcaattcctcgaaacaatatcaggctttgtctggagcagctacccccgatcgagtgaagttctttacatggctgacatctcttgacagaatccagagccacgtcaactcgcggaagaaaatgatcgtcctcgatgatacctgcgaagtatgctcggccggcactgagacaacatcacacatccttttcttctgtggcttcgcgcgagacttctgggcaacagtcgacgtcagctttcaacaccggcacctgctgcaccgaccttcaccggctcccgctccctactaccctcccgccaggacatgttcctcaccttcgccaccctatgttgctggcacatctagaaacgtcgcaactaacaaccttgtcttctgagatgacttgtcttccgagatgaattgtcttcagtcggatctaccctccacacttgcctgccagcggatgtttgcatgtggccataccgcctgaaaacatatgaaaaactatccattttatcggtgatggtatatatactatctagccattttcatcctccgtctaaaaacctatgaaaaactatccatttt

SEQ ID NO: 45527 - DNA, 510 bp, Zea Mays
aacaagggtagcgccgaaagcgagacatgattcacatgaatagctagtgctactgctaactgctaagaagaggcatcgaaaaacgcaaaaactcctcttcttcttcttcctctttcatttcggtttgcagttcgtcgcctgtaaaacaggggagccaaatgagcttgcagtttcttcctctcttcttgttgcagcttgcagctcttcccgcaaatatgatgtaaccctacgtattacactgtcgtaccaaactgagtaactgacgatgcacccagcattccagaatcaccattgcaaactaaactaaactgcatcattcggcgcattttttcgatccggtatcaaaatcataataatactgtcccaaactttaattttttttaagctaacctgctgatgcaacaaaaggattgggacatgggcttcaacgggccgtttctttctcgccggtgcttttgagaagcctgcgtgcattttgaattcgaacatcgcattgtatcctacgtacta

SEQ ID NO: 45528 - DNA, 514 bp, Zea Mays
caacacatttgtctcccacatttaataatgatctttgttatttcccaaaacaaaagattcattgttctgtattcccagcacaatgatattgcgcgcattgctaggaatttcatcatcaagatgaacctctttgtgaggcaaatcaccatcagggtgaattaatcggaggaaagttatcatagaccacgtgaatctgtaatcagaacatatgctttgactaaggctgatggatcatattcgcaggcgtccccgcggaatagatcaaatgccaataagtcaaatgtggatatgatattaatcccgggtatatccacatctacatcaggtagaagcattcaaacctatttgattactcctcaacgatttctagcaaactccatatacacaggagtacacaccgaacgacatgttcaatttggcttttgtgcgtttaatagaatattgaggcattatactatatgggcattcctccccctaatgctgagatgttctagaagcaaacagataatatccc

SEQ ID NO: 45529 - DNA, 317 bp, Zea Mays
gaacctgctccaagaagattccttcagctggtcaaagtcattcctgtcttcagacattcctcctgccctgctagagcctgggttggagatactttcttttgctatccccaagaagtgtccaaatgacaagttcctagagtctgttctctcagaggaatcaactggcagtgtctctgatccgaaagatgcgagctcttctccctctagaccaaccattgtggagtctgaccttaggaggagtaaaagactaagagaagctagggctggtttcaggcagggttcctgccaaaaaagaactgtttaatgtgccaacataa

SEQ ID NO: 45530 - DNA, 710 bp, Zea Mays
gcaagattgtaaaggttaggcaagctaagagcaagtataataacatgttgtaagtaagctttatcttgatatggagaaaagagaagagagttggattataagtaagcgcgctaagagatggaccataaagactcatgcaactagtactaagtcatataaggttagttctagcgctagtggttactggccgatgacctagcctcatgcgccgtcggtaccggttgccacatcacaatcatcggtcagcttggcaaagcggttggctaggctatcgatcggacatttggtaccaaccacattataaccacaccagtcagtaccaacccaccaattagagacctagtcagtaccaaccgtctattgtcacgtgacactttcttattgggttgcaccattttgaatttcaaaaaatttgaaaaaccaaaaattcaaaaaatcttgaaatctggtgtacaaatatggggtgtttgagttcattcacacttctaactattcaaattgcactaccacctcataattcaatcatctcactcttgtttcactccacttggtcatttccctaatgtcttcgtcgagcttgaacattgagatgactaaagataaggtgcttgatttgctgcatcaaactatgatgtatgcgacgatgaagcttgcatctatgtcttccatgaatacgaggcgaaggatacaacattagagctacatcgact

SEQ ID NO: 45531 - DNA, 605 bp, Zea Mays
caaaaacttgtccttcaatttcaaaaaccggttcaaccggacccaaaaccgattcaaccggtttctgaactgttccttctgtcacctctgacctgccagtatgccagtcaaaagctgtcagaaaaagtcgtatgcagagtttttcaaaaatcggttcaaccggatttgagtccggctcaaccgaattccaggtcggccgtgtctccggctgagtacctcaatgaaccgagatctccctggtagaaaccagttcaatcggtttaagaaacggttcaaccggtttttggtccacttctcccaacggctgccagcttttgggggatcctttaaatacccccacactctctctctctcttcattcactcctgctctctccacgatttcttggctgaccaacctccaaacaagggcattcaattcacctctcacacccgaaatcgcattcccttcaatcgtttgaaggatcctcagtgtgaggtgaagtcaatctaacacgttgttgatttcatcttgattctcccattctcttcattttgagctcattgcaacttaaccttgtgcggatttgttactcttggaacctagcattccttggcggttagagg

SEQ ID NO: 45532 - DNA, 677 bp, Zea Mays
cacaactgctagtgtatctcgaggcgaacagcttcgatgcaagtcgtggctgcatcatgttgcgctgcgctgaggtgactagcaaggtggtgctctacaagagcaggggtctaagcctctcgcattgaggcaagccagactgtggcagtgtacaatatcatgtgtgtgcaatgcgagcccggggatgtgaagctagacatcatgggtcccggcatgaatgctcttgcggtgggggcaccgagcgactcgcacacggagctctatgaagatggagagaatagagacactaaaagaataaggtgaggatataattggaagtttaggcactcttgaaccgatgaaaataatttatatttttttcaaactgatggaagagtattttaacgggaagacattgtttgataagggtataagagcaaagcccgtttgtatgaggacattctaacgaagaccatgtttcatgagaggaaacaagcaaataactcgttgtatgggtgtgtttggttggagctttttgctattataggactcgttttgatatgatttcctcttttagcactcacattttcgtcttctcactaatagtattcacaaacttttgctattatagtactcgttttgataggtttctcccttttagcactcacaattttgtcttctcactaatagtatttaca

SEQ ID NO: 45533 - DNA, 331 bp, Zea Mays
gctttatatcctttatcttttcaccttttgacatacgtgaatctttattagcaagcagtcaaacagccatgtcaaaacattttagagtcatatctagatttatccttaatatattttgcaagtctctgacagatatttctatcttaaaagggttgaaacttcgcacccatgtcatcctgtaatgtagcatgacgaaagtcaatatcaagactatacatagttggtatacataaaatagataaaacaatgagcacttattgtaatgtcatatcgtcttgaattgccattatgtaatcgcatagaacatctattaaatcggctttggtcacgg

SEQ ID NO: 45534 - DNA, 604 bp, Zea Mays
tcgaggagggccaccagggtgcatgagtgctcatcgtgacgttggcgggcggggaagaccaccgttctcgacccaatttctcgtcggacttggggaggggccggtgttccgcaccacaccgtgggcaggactccgaacgccacgatccttggaggtaagcccaccttctgtctcacgatcgcctccacgttgttttgcactagtaaggttgggtggtatggccatctgtcgcagttttgaccaactctggcgggcgcaccgccgtagctccaacgcgccgccatggtcaaaccacctggggtaggggataagcttgcaaccatcggatctatgatggatgtggctgtgattagaagcctcatacaagttcagctgggatagatcgtgactgcagatctgctagtgggcgggcaaggatggtctggaagcgtataaaattctaagcgttgaatcaagatctaacgacctgggctgcataccggttcggataaaagagatctaatctggaccaccgattaccgatcgcacgactataatcgtcccatacccctttgcatgtcattcttacttatgagcccctcggtttattccaaattaacccgtc

SEQ ID NO: 45535 - DNA, 583 bp, Zea Mays
agtccacaacggaacttgcggctcccactcagggcccagggccctcgctgccaaggtgatccgtcaaggattttactggcccgctataatctgcgccacgaatcgaatcacgaggtcgtgcgaagcttgccagaagttttctccccgctcgggcaacccttcgcagttcaccaagctgattgcccacacatggccacttcaatgttgggggctggatattgtcggaccactacctacggctcaagggaacctcaagttcaccttcgtcgccgtcgaatactttaccaagtggatcgaggctagggtagtatccacgataacgtcgaagactgactagaagttcttctggcaaaacattgtttgccggttcggagtcccgttcgagctcacagtcgacaacggcaagcagtttgacagccaggacttgagggatttctgcctatccatcggcaccaagctcgccttcgcctcggtgtaccacccgcaatccaacagcgtcgtcgagcacgccaacggcaagattttcaccgctatcaagaaaagacttctcgacgacaagaagggtaaatgggccgaccaacta

SEQ ID NO: 45536 - DNA, 916 bp, Zea Mays
tgcattcatcaccccgtttggagctttctgctatacctccatgtcgttcggcctcaagaacacgggagcaacctaccagagagccattcaaacatgcttagccgatcactggggcaagcgggtggaagcctaggtcgatgatgtggtgatcaaaatagaaaactcagaaaacttcgtcgaagatttgcagctagtcttcaatagcttgaggcgataccgttggaagctcaatccagaaaagtgtgtcttcggagtaccggcagggaagttactcggattcattgtcagccaccgaggaattgaagccaacccagaaatatcgaggccatcattagaatggaagcgccatgatcacagaaaaaggtacagaggcttactggatgcatggcagccctgagtaggttcatatcaaggctaggcgagaaaggcatgccaatctacaaattgctcaaaaaggtggacaaattttagtggaccacagaggcacaggaagctctagaggcactaaaaaagttcctaactacaccaccaaaactcaagccaccacaccgagccacgtcgaatcagccagcagaagatctgttgttatacatctcctgcacgactcacgtggtgagcaccacgttagtgtcgagcaggtggaggaaggacatacatacccggtacagcatccggactacttcgtcagcgaagttctcgggccctcaaaaatgaagtatccccaagtccagaaactgctatacgcggtacttctaaccgctcgcaagcttcgtcactactttgacgaccacaaagtcatggtagtcacaggatttccaatagaggacattctccacaacaaagaagctatcggaaggatagccaagtgggcatgtgagctaggagctcacgacatagagtttcgacctcgcacggc

SEQ ID NO: 45537 - DNA, 693 bp, Zea Mays
caaaaatttcaaacaagttgtattgagatgatattttgcaaataaaaccccagagtagggtacttaaccctaaatgggttcagaagggtaaaacaaaatccaaatagagaaaaccctaaagcttaagtgaaatagtcataaaatgttactaagaatggacctaaattacattcacacccatgaaataccaaaaaccctaaacaggaccctggaaaaccctaaaccaaaaccctagggggctaagtgcaaaattggtgcacttttggattaaagtgcaaaacctatgaagttaaagcatcttaagtcatatggttcacaatcatgaagatttgcaagctaaaccctgaattttggacctctttgcaaaaggaccctatttgagttctaaagctaagtctgaaattcagtgttttgagctcatctttgtgaccttgtaactttcaaacaaggaggattttgccctaggtcaccacatcaattttgtaggcctattgtaggagaacaactttgatgcagacatcctctttggttgttacacaaaaattggagataatcaaacacaaagtcgggctgtcaggctgtttgatgtctgaaattcagactaacagtggtactgagtcatcttgggagctctgtagatcaagaacttcaaagaatttgtcccgagtcaatatagcaaagttatagagccat

SEQ ID NO: 45538 - DNA, 313 bp, Zea Mays
tatttgaacaaaagtgtatgtgtgtgtgtctggatgggatgcagaacaattgcaatatgatgtagtagtactggagtggccccgcatacacttttacgcgccgtttccctttgctctaaaaggaggagtataaaggagaggcaaggatgcgacggatgcatgctaggaacgccatggctggcgaaaggcacactgttgtgcacctctccttttgcggtagacgatcgagtgaaaacagttttacattgcatgtaggagtagtagtagtagtatatttggattggataatcatcgccgtcgccgcatatgcagt

SEQ ID NO: 45539 - DNA, 584 bp, Zea Mays
cccatgtggaatgtcctgcgcccttagccatgtgttgaacctatggttgtgttccttcattatctagtcgtccgtatgcccatggttttgttcgcgaagctcattcatgtgttgctagatcaaaggatccattatcgagagctgatgtacgatgctgtgatgtgcctccaggactgtattgtaatctggcggaatgaatgatttctgtcccatcctcccacttccgtacagcctaccctcatgtggtgacggaagcaaacctattgcaacctggtctttgaggacactattgcagaatggacctccggactcaatggcctcttcggtacagtacccctctaccatggacacctcaggacgagcacgagttgatacatagccatttagtattgacatgaaatgctcatatgtccacatttcatgcaagtacatgggacctaatgcctctatctgtggcaccaagtgcaccacaaggtgcaccatcatatcaaagaacgatggggggaaacacatctcaaactgtgatactgtctccactgcgaattcctgaagagatgccaacccatcgcggtcaattacctttt

SEQ ID NO: 45540 - DNA, 465 bp, Zea Mays
ttgtgacagtggatgggctatactattatgttgtaatgccctacggtctaagaaacgccttgccaacatttgttcgggcaatgagtaagaccttcggggacctgatctgggacaaggtagagatctacgtcgatgacatcgtggtcaagactagggaggggtcgactatagtggaagacctgaccctagtttttggcaagctgcgggcaacccgcaccaagctaaacccggagaaatgcatcttcggtgtctccacagggaagttgctggggttcctggtttcataccggggcattgaagctaactaggagaaaatcagggctattgaggtgatgaggcctcccgcccgttttaaagacatccagaagcttacggggtcactggcagcccttagccgcttcatttcgaggttggctgagagggcactgcccttcttcaagctcctgcggaaatcaggcccatttg

SEQ ID NO: 45541 - DNA, 423 bp, Zea Mays
tcaacagagaactaattatcagcaaggacaagggtatggcagacatccacaaaatcgtcaagaaaacgctatgaacacacaagccaggaataataatccgatcaccccagttcagcccaatgggtgcttcaagtgcggagaaactgggcactatgccaataattgcccaaagtgcaaccctcaaacaccttagaaaaacaacaatcaaagggttgaccaaggaacaccaatttgtaacaacactcaaggtaaaagttatcaaaaccagaacaagggaagggttaaccatatcaccgcagaatcagctcagaacacaccagacgtagcacttggtacatatctcattaactccatacctgcttcaattttgttcgattctggagcatctcattcatttataaaagagacattcatggaaaaaca

SEQ ID NO: 45542 - DNA, 1739 bp, Zea Mays
gatgatgaattcagaatcctcggataacactgcttcaggtatctgcggtgatactttctctagtaagctttcactcacttgctctgttggcctactttctgaaggtccagcttcggcgtagtcaagagcagtgctttctctagcctttttcaagtctttagatttatcgttggaattttttgtagaataaggcattgccactttcgaaggcttcaaaacagcttcaagcacattagccattcttcttactctcttaggcgttcccgctggaacggtggcaatttgcagtttcgctggcgccttcgacaactcttggacttttggctgatctaccagttccaagcgaataggttccgaagcattcacttcagttgccagaggaactccttcgaccttttggacaatacctgtttcaggtagttgagcagccctctccaagaagtacgattttggtcgatgggttaaaaccttcaccttcttctcctttggtgcgacagaagaagcttccagcgcacttttcctttttagccccattttctgggcagggaagcggtaatcaggataaacaaatctgatagcatcaaagaccctattcagtctttgcttcctcgagcaccgaagacagtatacatagcttcatcctcagccttcgtatagccccctagcaattcatcacttgttgcttcgatggcatctaaccaatcatcatctggttcaccaaattgattcctgaatcgacaggtgtacttcaggcgaaccagactgcccattccgacttctatatcagcttcaacaccctttggcatttctcaatcggcagccagggggcataccttgaaggctatgtgttcctacactaggtctctagaaccaatgtaactacatacacattgattgatgccaggcaaccttgtgatttttctgtattcacaatagcaggcctcctcagtctgaagctggatcagataggccactggattacatccttaatatcgcttctttgactcaaatcattcttcacatagaaccattgcttcatccatgaacccgccatttttccgaaaagttggcacgagacaccttgcatcagaccggtacacgaaggtataacatccgaaattgttatgatactgctctttcccagtggccttcgtcggataagataactcgtgaatatggcaaaagcaattagcattcggttccaatccctggctccttattgcccaaatgaaaacctcaaccttaattaatgcgtcaggggtgagttgatgaaggaaaacctcaaacttcttcaaaacttcaattagaaacttgtgtaaggggaaccatagcccagccttcatgaagcttcgaaaaaccactacctcatctttatcaggaagtggaaatcctcaccatagacacatcatgaaagtatttgcctttcatagcttcaacatgacctttcttcacggatgatttcccaaataccacatgacttggccttcatggccgatcttctacatcatcgttgtcactcttaatatcaaaatcttcaggtcactagaatctccagatagtccagctaaaatctcatcagtaatcttttcaacattcgtcctttccatagcttcgtaaaacccagctagtgtggggtcctcacttctcttatcttcgaccatctcagcgttggttgaaacaaaaagccgaagctccaaaagtaatcgcggttacagaatcagcaagctaaacaacaaaac

SEQ ID NO: 45543 - DNA, 352 bp, Zea Mays
aagttatctaaccaaacaaagggtgcaccatgaaacataccagcaccctcactagctaacatgtgagctacatgaacgtggataataaaaagttttgacatcactaaaagcttacgacattaagaacttgacctccctaataaataataggtacaccttcaaaggcagcatcccaatcaatcgatgtcaacacacccttcagaacttggtaatcagtttccaactcaatgtaaatcatacatttttaaactgcaaattttattgctcgcaattaagcagtaatttcagcttaaaggggttcgccagggattgaatgttcactatttctgctgccataacttctccatttcca

SEQ ID NO: 45544 - DNA, 772 bp, Zea Mays
agatgacatggcacaaaaatggaaaatgatacaatcctgacaagatggtgcacacatctgatggtgaagcatagaaacactttgatgccattcacagtgagaaagccgaagaggctcgtaatgtacgcgttgcgctggccacagatgggttcaatccctacagaatgagcgctgccccgtacacatgctggcccgtgtttgttatcccaatcaatttcccctggtgtgtgctttcaaaggcagaacatatttgtgtcgttgataattccccggacacacggggaataaaatagacgtgtacatggagcctttgattgatgaattggtacgtgcttgggaggaaggggtatggacgtatgaccgagctacaaagacaaacttcaaaatgcatgtttggtaccagtactccatgcatgacttaccggcgtacgagctattctgcgcctggtgtgttcacggtaagttcccatgcccagtttgcaaggaagctcttaggttcatttggttgaaaaagggtggcaaatattcgtcgttcgataaacatcgaaaatttctccctcctggccatccattccgcctagacatcaagaacattacgaaagatgtcgtagtgacagaccgcccacctgcaacgatgactggtgccgaaattcgtcaacagatagatgggctcgtggccaatccagaaggtggttttgtgggatatggtgagcaacatatgtggacacataagtcgggcttgactcggctccccaattatgacgacctgctc

SEQ ID NO: 45545 - DNA, 421 bp, Zea Mays
cgaagattgagacatggatgatgctagacacgttgtgcagtaactccgcggcttccctcaacgtcaacgaggaatctccagacttccccagcgagggcacaatctccttctgtgcgtcccaacgaagctcccttagcaaaacccccgaggttgagagctggtgtggatgaactccgggtgcggcggcttggttttcccctgtttttcatggcggcgatgattgcactaagcacctagccttaagccgagtctgtggtggcttctgtaagcgcgatatagggcataggattgtaacgaccgatccaacagaatctcaacaaactcacatggatttcaacaatcccagtggtcaacttcgtggagaagaagaatgtggtgtttaggtgattaggtcccacttgcgagagaagttaggacaggc

SEQ ID NO: 45546 - DNA, 326 bp, Zea Mays
ggagtcacatgaaagggaagggagggagcggcaggcggtggtgccgtaccacagccatgggtggaggggatcggagccggagtaggagcggatgtcatccaccaccgacgagaggagctccttctcctgctccgcgacggcggccatggcttggctaggctccgattggagtcttcacgaagatatgcatcttgacctacacgtccctccttcgaatcctcgggcctttcatcatggggggatgaggatagaaggtagtgctgcggtttgagaatctatgcgggaagtgctccgcggagcgtgcgatgcggaggtagcgctgcatg

SEQ ID NO: 45547 - DNA, 756 bp, Zea Mays
caaaagcctccgtgcagaagtcgcctacgggcgtggccggatcaacgaaggcgtgcagccttatcatacaaattacggttaaatacacacagcgagggcatcatatattacattggctcaaccttcgggatgatacatatctccctatagttgaacaacattatcctcaattcctcaccctcaaaaagatttcgcaaccccccctcgcctacactcaccccaatcggcgaggacaacaattctcgcttaccagtcccgtccacgcgaagacgaccactctccatctcactacgatgacgcttaccgcctcgcgacaatccactcactctctgtttcgccaccgcccttcaccgcctatacccagtactcgcgcccgggagctcctccgaaccctccgcgcggggcgaaggctccgctgcagccacatctaacgcctcaaaataatccaagtcctcatctgaagactcctccgtccacgcaatcgaactcccagaatcatcagactcaaaacacttagacacagagccaaacgaatcatcatcatcagccacggtcgaagccgccacaaaaatagcattgttagtagcggttgcgtgcgcaggcccaaacctcagaacctgcgcagcaaccgaggttcagtatcacacagacaaaatttacaaactcctcaaacacctattcagccacctgcgaaggcccggccgcggctgtggggtcttcggctgacggctcggcaaccggctcggccaccacctt

SEQ ID NO: 45548 - DNA, 730 bp, Zea Mays
gactgcatcagaagaatctttagctaacatatccagcatggcacttatctccgcgtcacttggattcataggcacctcaaaatgaacctgcctctcgtcgtcaggaatctctccgagtgaggcaaccaaagcactaacttcttcgggagagggtcatactctaaggcccaaaccgctatcatcagcaggaggatttgacacgaaactgatgaaggcctgggagggaggcaaattccaagtcgagtatgcaacaggagcgccgatgttcgacacctagcctctaagtatcatctcaagccggttcaccaagtccacagtaggaattcttctgttagtcacccgggttgaatcagccaagcctcggtacagataggccgaatatgctatgtctttcagtggctgaatgttcttgaaaacaaagtcaacaaccacagcttctgcagtcagacccctttctttcaacaatccaacttctgctaacagagcccttgccttagccacctcctggtctatgggggattcggtccagctcggagtgcgaacatctggttgtcttcctgaccatggggggagggaattcccatgattctccatgatgaaccattccaggcgccatcccttgatgttgtccttgagtgggatgtcaaggtaatcagacttccttccgcggcgcatctccaagctcgcaccccccaccagctggtgctgcccccctgccatcccaggccga

SEQ ID NO: 45549 - DNA, 330 bp, Zea Mays
gagatatcctgttggcaaggtactcttgcactaaatctctagtgctgatctattcggccaccaccctgaattctgctatagcttgttggcatggtgaccccgacgacatgcggcacaggggcctagtcagcccgaagcttaaactcagcgggctcatcactagcgtcttcaacttctccctcttcttctcatcggccttgatatagaaccactcacttttccaaccggttggccacttagtgcgatagctaagcaccggggccttcatatccttgcgatatgcgaagttatagcagccaaagttttcatgcagcccgtcttctctgacct

SEQ ID NO: 45550 - DNA, 754 bp, Zea Mays
cgcagctagcaatttgcagtgcctcgacctcgactcgaccccctccgtcctgttggttgtcatggtcgacagccgtggcgtggcagggtcacgagtcacatgggtgccatccatgatcggcaacagtgatgctgtccctcgggtgaacggtaatggtacggtcgcagtgcgacgtacggcaaaccaacttgcgaggcgggacgagtaccgtggaactcgtttcttttcttcttatttcttccccagaaaacagatggaccgagtgcaagctagctgatgatgcctgcctgtctctcaccgtctcacgttatccggcccgttaatctaggtatcagtatgtggaccaaccaattgacggcccattaattagtaactcagcgcacctacgacgtacggtccgtgtcatcgtcacactccactgtggcactgtgcagagtggaaacccccggtcccggtcccgttcatacgcggacacgcctgcctcctcccgtcggccgtcgcaatggacgtctctgctcctccacgatctagactctagagcaggcggaccctgaacggaaggtgggcgctgcatgcggagcggaggttctaggcgctcgagctggtgcggaccgtcaatgggggaggaagcctgacgcggaagccaggtcgtactactccggtggcggactggctggctgcgacgccacctctccgagggaaggcgccgacttcttcggtgttcttcggaactgcgctgttcgttctaggtttt

SEQ ID NO: 45551 - DNA, 513 bp, Zea Mays
gggtcgagaaaggccacatcaaatgtgtgatgactaatctcttgcctgggggatttctcatattcaatacgctgatgatataattattatgattgatggttcgaagaggtcaattaggaatttgaaactaattctttactgttttgaatggctatcgggattgaaaataaactttcataaaagcgaagtgtacgtttttggagtggataatcaggaaaacgagaagatggcaaacatgcttaactgtgccctaggatctttgcctttgaaatacctaggaattcccttatcagacgtccgattaaaggcctctacctttggacacatcttagagaaaatgaagaaaatgttggacccatggaagggaaagaacctgtcttcagggggaagactcatcttgactaatacttgcttaagtagccttccgatgtacatgatgggcttctacctactgtcgggaggtttgcatcaacaaatgaactcggttagggcaaatttcttttggcagggagc

SEQ ID NO: 45552 - DNA, 795 bp, Zea Mays
tgcgccttggaaggtagctggagctccagacagaccaaaggccatcaccctgaactcaaagtgtccatgatgggtttggaacgctgacttgtgttggtcttccggggcaagccgaatttggtggaaaccggctcggaggtctaaggtggagaaccacgctgccccatgcaattcatccagaaattcatctatgatgggaactgggaattttgtctttgccgtgatagcattaaggtgcctgtaatcgacgcagaaccggtatgtgttatccttcttcctcactaggatcactgagctggaaaaatcacttttgctgcgttcaataataccagattggagcatctcagctacctgtttttctatttcagttttgagggctggggcgtatcggtatggtctgatttgtacaggtcggacgcctggcagaagaggaatgtggtgatcacagtctcttgcgggtggaagtccttgcagcagagcaaacacatgggagaaacgagcaataaggtgttgcaatgcttcaggtaaatcttgaacgagctgattgtctttgtctggtagagtggcaatgtggcaaagctccatgacagcacactgtgatgaacttgcttgaagtcccaagagcttgattatggaccctcggtagggaatagtaagccacttatccaaccagtgaacagacataggactatgcaactccaaccaatccatgtcgaccaccatatcgtacgtggtcagtggtaaaattttcagtgtagactggaactgatactcgttgaggaaccatactgtctc

SEQ ID NO: 45553 - DNA, 569 bp, Zea Mays
taaaaatgctctgtggtaatattatttctcccacctttccttgatcgaccaaatcgtggtacaacatcactcatatttggtattgggatatcatttgcaaggcagaatgttgtggcttcttccaacaatggctcccaatcatcatttctcaaatttatcaaacgtgttctcacatcaacaaccagagacatggcttcgacaacattttgatcctttctttgcaagagaagagaaagctcatttgtgatacggaggatctgtaacatcaacttcatcataaacacaaagctgaaacactccattttcccaacaaagccacctgcacctgatggattacactcatcttggtgcacaatttctaaaacttatatcactgattcccacattgactcaatacggagcaaagtcttgtaatgagatccccatcttgtatctccaagtcttgacaatgatgtttcttgttgtttgcctctccctgatgaaatttctccactctctaactttgataagagattcaaacgatgcttatgttgtaatatatcctttcttttgcaagaagcacaagtgct

SEQ ID NO: 45554 - DNA, 1112 bp, Zea Mays
aatgaagcaagtgttgttctactcccaaaaaaagaggtctcggatagcatcgataagtttagacctattagtctaataaacaactttatgaagatcgtcaccaaaattttggcaaacagactggcaccgcgcatgaatgaaattgtatctgttgcccaaaatgccttcatccaaaagcgatcaattcatgataacttcttatacgttcaaagggtgattatgaagatgcacaagaggggtcagcctgcgcttttcatcaagcttgacatctccaaagccttcgactccataaattgggcttatctccttgatgtgttaaaggccattggtttctcccaaaggtggcgagactggatcgctctaattctaggctcatcttcctccaaaataataataaatggagagccgacaaatagaattaaacacaggcgtggtgtacgacaaggggaccccctttctccatttcttttcattttagcaatggaccctctccagcgtatgatcgataaggcggctcaggctgggctactgggaagcgtcctgcctaaaggggcaaagcttcgttgttccctatatgcagatgatgctggggtgtttgtgagagcagacaagtcggacctcaaagttctcaaaacgattctagaagtctttgaaggttgttcagggctaaagataaattttgataaaacagaaatctttccaattcgctatcctcagtcgctttggtcaaatcttgccgaagtgttcccgggtaaatatgctaacttacctggaaagtatcttggtcttcccctccactttaggaagattaaaaggacctccttgcaaccgctactggaaaaaatcaacaacagactggccggttggaaaggcagactactctctaaagcaggcagagaaacattggttaaatcagtattaacagccgaactgatttatcatcttacgatttttccagttcaaaaatggctgctaaagaaaattgatatgataagaagaggctttctttggaaaggaaacaaccctgaagcttgcagtggaggtcactgtctgatcaactggtctacaacatgtcagccaaagaacaaggggggactgggcattctgaacct

SEQ ID NO: 45555 - DNA, 693 bp, Zea Mays
cgaaggtcttcaacctcggctttatgagtttctacctaggcattgtatttcgcctcatcttccttcactttgttcaccaatgaaattaaaatcttgtctttctccaaagcttcgtttctcagctcagttacctctgagcgaaggttgctgagagctattgtacaactttcatcctcaaagttcttttgagccctcagagcgttgctcagaattaagccctgtgaaaaagaaaggtaaatgtttagcataagaataaaagcttgattcccaaattcatgaactttaagtttacaattcctgtaccttcaggctgttgtatgcaaggctatccgcaaggtcatcctttgacatggcggcgaggccagtttcaagctttggaaatcccatacttttggctatctcccagcaaatgaatatttctttgttgtctgggagacagtacaggaaatcatcttcgttcgtgccattgaacactaaggcccccttcggatattttagtttctgggcatagtgtctggcttctaagatttctttttcggataatcttttccctgaagcatgtcgaataatgtaatcaacatcttcggacggagcttcgggggcaggagatttagctttttctaccatgtctcgccccactgccatgccggtatccgaagtttgttgctcagctatatcctcaggtgcggcagg

SEQ ID NO: 45556 - DNA, 537 bp, Zea Mays
ggggctccatgcagggagggccgagcaagttacgctcaatgtcggccagctatcgagcaagtgcatccatcacggtgcattcgtcctcctaggcgagggtagaattatgttcacactctcaagcagaggtaacagccgtcttggcagcgacgagggttgtagccaaggtggagtgagcagtcgtggcatcagagggtaggagctcgggtagaagatgtgcaaggctggggtctgctaggcccaggccaaagagggttgggctaggggctgtcgtggaaggggcggttagggctagggtgtcggtggtcggaccgactagggcgccaattacagggccgaccaggcccctaatcgcgggagggtagacatgacgaaggtggcatagagggtcaggggcactgggagcgatcccctagcaaccagccctagcagccgcgacgttagaggtggtcaacgagtagggtagcatccttacgacgacatgagacagaggtggtatgtcggctagaggaaggaggtgcggtcggcgcatgcatg

SEQ ID NO: 45557 - DNA, 516 bp, Zea Mays
cggacttctgcgagggcactagatactctggtttgtgcaccgaacacgttcgataagtgttccacatgtactagccattgccgaccattgcgcttgggatagctggtgtagtgtttagtgcaacaccgtagtcgctggtgtgttgtaacctcgctcgattgcatttacaacatctctgaaccctatttggtgcggagttgggtgcatcacttgatatgttcggtacgatgtaatccttcgtgtacacattgcatacttctattggtgccatacccagtgtgacatttagtgcacacttgcatatccaatgtactctaatatcaaaccccatttttagtatagcactgctcttgtctagtaatttatctagtgcactaccggacacatgttgtgttgctcagcagcctattttcttctctcttcataatttgttcgtcgaggattctttcttcttgtgtattaaactcttgcatgatcttcatagatctttaatgagtattctaatgtattactttg

SEQ ID NO: 45558 - DNA, 929 bp, Zea Mays
tgatggttggaataaaagtcgggtgactcagctgaaaggattgctaaaactaacaattttatcaatcgtgatatttctttgtcaactatcgataaggtccaatgtctgtgcaacaactatcaaaacgtaaagttatttgcatggctttaggttacgaatgcgttcatgaagcatgtgaaagggctactggttaataattttcagaagtattcagatacatacttgatcgtggagtatctataggtatataatatttggaaacaagattacttaattaagatattacttttgttttaatacattaacaaatgtgtaggcccaactcctatcgttggaggttcatccaaatgctcatcattcattgggttttaaagaatttcaagagaaaacaatgatgaaaagaagctaagtgaacaagggtggaaagtatatgtttggaggcgatggatacattcgtatggctagacgaatggtaagacatgtcaaataagattttcagaaacatatctatgtagtcagcaagcatcataacgattgttcattttttaatatctagaattagttgtgatacattaagatctatgttttaagtttgtttttctaattgtagtagcgatatgggtaggagatggtttgacggcaaggcaaaaactacaattggcagaatatattgactaacctgatggcagtgcatgctagtggcggtggaaaaacgtatggacaatgatatcataatttctattacttaaactaaaattttgtttacctaggtgacagactcaataaataccatcacgagaggatcttccacttagaatttgggtgggtagttactgatgttgccgcatggagcaagacatagtaatcaagaatcagcattaggcactgaaggcacaaaatgagtacaacatgaggtgacaagattgtta

SEQ ID NO: 45559 - DNA, 432 bp, Zea Mays
gctcttttgtgaagaaatttaacaagttcatgaggaaaaagaagggtcagcctagaaggggacaaacataaaaaagaaatgccttcaatgatagaaaaggttttgagtgtggggaacccggtcacattgccatgaattgtccaagcaagaagaacaagggtaaggatggagatgataagaagaaaaagaagttctaacacaagaagagggatggcaaatcctatctagttgaatgggattcggatgcaagctcggatgatgatgatgattcttcatctaaactaaatgccggaattgctatcaaggaggctccctcacttttctcatctcctcattgtcttatggcaaaaggagatgctaaggtaaaaatcataaccaatttaaatgacattgatgatattgatgatgatggatattcttatgatgatattg

SEQ ID NO: 45560 - DNA, 559 bp, Zea Mays
aactttgtggatgaccaatgaggtttttgatgtggactcaaaggtggtgggtgataaatcctccacccaagcaaacccatcaacctcaagtcatccaagtcttgaagaaggtcatcaacctcaaaggatgccaaccgtggtagaagatgaacatgagaatattgatggtgaagtgcctctttatcaagtggatgatgaggaggagcaaattcaaagacaaccatcagtgccccatcctcaagtccatcataccattcaaagagatcatccagtggacaacatcctgggtagcatcaagagaggggtaacaactcgatcctgtttagcaaatttttgtgaattttacttgtttgtttcctctcttgagccacttaaggttgaagaagcgttgggtgatccggattggataattgccatgcaagaggagttgaacaacttcacccggaatgaagtctggtccttggttcaaagacccaagcaaaatgtgattgggacaaaatgggtctttaggaacaaacaagatgaacatggcgttgttacaagaaacaaagcacggttg

SEQ ID NO: 45561 - DNA, 697 bp, Zea Mays
ctgagagggatactgccgaggcagccatgcaagatgcagcatgacgagcactttctcagtattgctcgttgtttagcggggtagctgatggccttgacctgaagtactaccctcgtcgttcgaccgacagtgctggaggtgtgattgtctcgctagttggtgagggcaatcccaggctgaacagcatggtcaatctggtcgcggtgctcaacacagagttggaccacgcccttgacgagttgggcaaggttcgggcggaggttgcggaattgcgtgttgaatccgcggcacgccactatcttgatgttggtgctcctgtccctgtcaggattcagcacccttatcgttcaccgccccatggtcgcttcgactatggtaccctagactgcaggacccgcatagatttggatccttagatcgacaaagtcggagtctgtaataattcttagttcaatgtctcagtctagtcagtctagttagagttagtttggttatctttggttggatgcttgttatgatggacatgtactgaagttggatctttgtaatgattgtcaccaaagtgtgggtatcccctgcaacttggtgtagttattaataaagttagttatttagttgggtaacccatttatttccactttcctctttatctgagaagctgtcagagaagatggtcaattgttcagtgctgtgaaga

SEQ ID NO: 45562 - DNA, 304 bp, Zea Mays
ggcagttagtgctaatccataatactattgtggcaagtggtggctacttatgtgacatgacaaataaacttgattgggctttttggctgcttgggttcagcaaacattgctgagaggaatctgtctgaaggcacatggaggattaaactgcaccgaggaaaggtcattgctgaggggaatctgtctctgtctttcccttcccctgtggtcagaactatagcaactgctggatccacaagcaagatacttgcaatcaagtacacgttgatgtggcctcggcccctcgctcactttcgcctggtca

SEQ ID NO: 45563 - DNA, 1238 bp, Zea Mays
gctctggaggtgtggggaggtgggtctcactcccttctccatcggcttgtctttcagctcttaggggaaaccctgctccaatcccggaggcggtaggcgtggtcttatccgaagccatctgccagggggagagagtcactattatgcatatgcccaaaaaaatttcaaccaagttattttattcattacaccaattcattacaagcatacaactactacaagtcgcactatacgcgagcgctctctgaagtacttccgaactctttttctaaagtgtccccaaattccttgagaaggtcatcaaggctagctagggacatatcctcgacgtcggacaaattctctatcctggcgggaggtggtgctggaggggctttcttcttccgctcagtctaacatccttggctcttggtcttcttatggattttcttcgtgggcgcgagcttctttagcttcttgtcgtaatccatctttggggttcggtaggcttcatgagtgttggcctcctcgccttctgctatatcgagacactcttggagggacgccttctcctttttaagttccttgacctgctgctctaagctttccacccgggagtctaggttggtgcagcgggagaaaaggtcgtcgtagtggttatcgagagtgtggagatatccggccatgtagacagtggtggggtcatcctcggtaggatctctccctgacagggcctgaagtcttttcctccaggtgggggtatttttgttgctaggtgggaagtaacgaagggggggtttcaaaaaccccacggttatagttttggcatagctgtttaagggcttttcgggcaacattttggcaagtgtctgggaagcggtgcccgatgaaggtgacttggaagggagggtggtttggttaacttcggctttctcccaggtagactgccatagagcacttctcaactccgttttctcggtattctttccagacatattacggcttcatgcggattcccatgcgtagtgcgcaactctgtaagagatgagggaatccttcctcctctgagcagtaggatgttctaatgacccaagagccttccatctggtaggagaaaagaagggtctgttaatatcggggaaaggagagaaggtttttcttagaggtaagagatgttttcttgttaaggcaacttttaagggctgcgatctacggccagtaacctggctctgataccacctgaagtgcctcgatccttt

SEQ ID NO: 45564 - DNA, 727 bp, Zea Mays
gaactggacaaatttgtggtggtcttcattgatgatatcctggtattttcaaaaagtgaagacgagcatacaaagcatttgcacacagtacatcagtggctacacgatcatcgcttgtatgccaaactctctaaatgtgatttctggctaagggagatcaagttcttaggtcacaccatctctcaggatgggatagcagttgaccttgagaaagtacaagaagtgacagattggaagcctcctaccaccgttcggcagattcggagtttcctgggtttggcaggatactatcggcgattcattccggatttctccagaattgctaaaccgatgactgagttattgaagaaaggagtgaaatttgattgggatcagaaatgtgaagatgcctttcatgccttgaggcgacatttgacaacagcacccatgctcgcacagcctgacaacaccaaatcatttgatgtatatttgcgatgcttcgggcactggactaggttgtgttttgatgcaagacaaccgagttattgcctacgcatctagagcacttaggcctcatgaacagaattatcccacacatgatctggaattagcagcggtagtccatgctctaaagatctggagacattataatattttcactggattgctaaaatttatactgaccacaagagcctcaagtatattttcactcaggctaatcttaatatgaggcagaggagatggttag

SEQ ID NO: 45565 - DNA, 340 bp, Zea Mays
caatatgatttgtacataaagagaaaaagttccctgctgtaaacgactaaaaaaagttccctgctgtaaacgcacaacaaatcttccaagaactgaatattgcctcatatcatcatcaatatctacagttgtagaatgtctattttgcatgctctatataattatatatgtacatatgtttaggccttcaaaaacaactcaactccatatgctactgcagatgctgaaacagaccaactagccttgcacaactcaactaacgctgttttatatgagctttcctatttcagaactattgtaagatttatgtaaatacataaattaggacatgctgacatgt

SEQ ID NO: 45566 - DNA, 401 bp, Zea Mays
ggatggttcgtcgtcggaatccatccatcattgaatctgactcagatgacagttccctagagattcatgaggagacaccctcacggtctagatccaagcgtgggcgaggatctggcaatgtcatgatgggtggtgaggcctctaggtctcaaggaactcgtggacgaacgactcgaaacccttctagtcgttctcatcccgcgacaaatcctcaggcctgggagtctactagtgatgatgaaggaggcaaagatgatgttgttgacatccctcccgctaatgcccccatcattcaaggattggtccttcacaaagctcaggctcggcgttcccccaatgaagaagttactgacttcagtgccagcagagggtctgctcttcttcaagacatgcgttttcag

SEQ ID NO: 45567 - DNA, 951 bp, Zea Mays
gcggaggatgccaggggtgaggtagacatgttggcgaaaggaaaggaggattcatcaaaaacaacatgtctagaggtgagaatgcgattggactctagctcgagacaccgataacctttgtgctcagaggagtagctgaggaagacgcatagagatgaacgaggagcgagtttatgggctatagtggaggacatgtttgggtaacaagcacaaccaaaaactttgaggtgttcataggaaggtgtagtggtgtgaaggtggaagaaaggggtggaggaggcgagggttttggtggggagctggttgacaaggtaagtggcagtgtggagtgcctcaaccagtagaccggaggaagactcgcctgaaataagagtgagcacaagatgttattaatggtacgaagagagtgctcagctttgccattttgctgggatgtataagggcacgacatgcgaagggcaacaacgttggaaagaaagaacgtgcgggccgaggaattatcgaattcacggcccattgtcgcactggacgcttttgatggtggtgccaaactgcatgcggacataagcaaaaaagtgagatagagtggcaaacgtgtcggattttaggcgaagcggaaaggtccaaatgtagtgtgagcaatcatctaaaatgacaagataatatttgtagctcgacacactcacaataggagatgtccaaagatcacaatgtattaaatcgaaattatttgtagttcaagaatttgaggaaccaaatggaagtctagtgtgtcgaccgagctgacacgcatgacataaatggtgactatcatctttattacacgagatggctttggagctaatgagtttggacaaaacttcatgcccaagatgcccaagacgacggtgccatagcgaggtgggtgcagtgaggaatgcggaggtgctggtggctggaggaaaaaacggg

SEQ ID NO: 45568 - DNA, 675 bp, Zea Mays
cagatttggcgcccgtcttggaaaccttggtgaactttgccaaatcggtgcccttgcccttggcgtgaggtgtggggggagggggtagaaccgtgcaccgtgaacgcctacactatagtcttaagtagtagtagagataagaatgcccttttccgtaagtaaactaacattatccccctgtttcatatttcttttttcatcaagttaaattcaaatttcgaatttcatccacaacatgtttacttttcaaagcaattcacatcagttgcatttatacatgtatattccgagagagagagatggccaactgaccccacttttggtcggctggccccaccacatccacataacatcacttggttggctcaccaccacacgagctgctcgcccacccatggaggccacaccatctctctcccacttggtgcattggacaaaatggtgtccaatctccacctaattttacatggattcgcccctccactatgtatggttggccactcctcccgccgaacccactcttttctaacactataaatacccatgctctccttcaggatgccccacaccaagctacaagctaatctctctctaatgctttcatttgttactaagtaaccaaggttaaggcactaaaactctgttagcataaaaaaataaatttttgtctcaatt

SEQ ID NO: 45569 - DNA, 373 bp, Zea Mays
cattgttaagaattgcctgatacagggactgaacagagaacaacccattagcagtcaggtcccatctgaatgaatccctgttagtagtcaaattagtatacgccaccaacgtcactagttgaaaccattgagccctcatctggtgcacgaatcccctacggaatgatatgtttaagggtactgtggagaagacaaaggcaacagttgaattcttcctccttgcaagattatacaaaagaggaaaacagaattttagcgctcccaacccaagccaattgtcctcctagaaacgcgtttgggacccatcttttacctgaaaggtacctttactcatgaatagatccttaatcttcataaggccactccaaaagtg

SEQ ID NO: 45570 - DNA, 496 bp, Zea Mays
agaaccaaccaaaattgggtgatccaacctctgcaccgaaagaccagcccgcgacacaaaattctccgaaacaaacaaatagctagcgctagagtcaaaaagagcatgggccacaaacgaatcaactgaaatcgtacctgtcaccacgtctccttgctctctgccatatgcagcgggtagcacataagctccggaaatacccgaagaagaggaagctccgagagtgaaattaacagaagaaccccactgagccgactggtgaggcagatgcggagctccaaactgagacgacataggagtagttggtgtaagagtaggcgcagccagatactgaggaaaaccctgcatcgacacgaactgagaagtcctaggcacataaaactgctgcggaggaagtggaactgaaaattgctgctcagcgcttgacatcttgttgatagtgccctgagaaaaggaggaagtcactggctcccatctgagcttcccattggaattc

SEQ ID NO: 45571 - DNA, 836 bp, Zea Mays
gccatagtaccgatgagggagctctgggcacgacaacctcgccgccgccatgaaagaattccaactcacgtcgtcgacctgctcggagagtggtgtggaatcttcgtcaacacatgtgtgacctacgggcagcggattcaccagaaaccccgaccaatcttgatcggaattgctcaccgacgacgaggaccccgagaacttccatcgtgcgccatgggcgtgactcccggtgacctaatcctcggtaaggtccccaccattatgcccaccacctttccctctttgttttgtaccggattgcgttagagttaaggccttcctgacactagctcgggagttcgccgtcaccggcgcctcggcaatggtgttcgtaccgccagcagggctcgagatggggaagaccgcgctaaggcgtagatctgggaacggactgctctgattagattgggcgtaccggttgggtagattagatcagcgccgatgatcaaacatcggacgatcgaggagcgatccgtaggatttcaaatctccaccgttcattttagatcatgctcgtgagaatctatctgagtaaattgaatctgtgatgtcgatccacgatctgatggtcactcctgcgtacctcttcatgatgcgctagaactaatcgtggcctttggtttagatcgaagagtcgtagtatcaagatacgccttcggtcgcctaaacttgcaaataaacccctctatttctgtagtatcaaccagcggtccatcctcaggtgtagctgagtcttgggaaaattgcaagttagctcccgagctctctggttattattctcgtagtccaggaaatag

SEQ ID NO: 45572 - DNA, 446 bp, Zea Mays
gagggtcgggcagcattaggagaacctaaagatactaaaacgaacgaccagagagtatgaaccgacctaagatgcgctgaccacggcgaggtctctttcgcggtggcggaaacacagattgggggaaatgagcgattcgcggtctctggtggacaattgaagacaagcgttggtgctatggatgggtgattaccctatggagctcacggtgtactcaatttatagcaggcatgagcggtggccggggaattggacgaagacgcgtggcggtcggaggaataggaggtcactggcgcgcgtgattggtgtctatcaccgtggcaagctctctggcgatcaccggatacgcttaacatgactaactgcaatgtggtgagatgctcgggcacgtggcacaaggctgcgaagagtctatctccggcgaacctatccaaggcggccgcgac

SEQ ID NO: 45573 - DNA, 739 bp, Zea Mays
cagcatattgtggtcaaggcctaatatcataagagaagataagttagtgaaagtatctgggattccacctgataggttatttattgctagatttaccatttgtatgttcggtatttgccaaacttcattaggaatgcttccatttagttgattgtttgaaagatcaactaacaatagtgtggagaggtttcttaaggttggagggatgaccccactgagataattaccataaaggttgataccttctagctttttaagaaaggctatgttcggaggaatatgacccgtgagatggtttttagagagatctaggtagactaagttggaacagtttgtaagccaatctagaataacatcctccaaatggttgcttcccagaaagagtaagtccaggtttcggagcttgttaagaagaggtagggggccaatgaagctattgttgctaagatcaagggtatgaaggaaggtcaggtttccaacagaggagctgatttggccagccaagttttggccggtgaggttgagctccgtgactcgatatggtcgcgtggaactgcagttcacaccatgccaatggcagaagtggatgctggggttccaattgctcaaggctccgtgcggatcactggtgatgcccttcttgaactctagcagagaatgaaaatcttggctgttgttatggtgcgtcgagcaatggactttgtccactgcatgacatagcagcagcagcagtactaca

SEQ ID NO: 45574 - DNA, 317 bp, Zea Mays
agcaaaactataaccaaaatgattaataaaaatccagtggacttacaaccaccagagccccactacaaaaataaagagcacctcagcccaactctttaagtaaagaaaataaatacaaagtgataataaggcattttcccaataaatcatgaacaacacctattaatgtgataatgggcaaccaaaaattagctaagtccatgatgagataaactaccagagaaaaatgcaaacccatgaaaaagaagcaaactcacacctattgctagtgttttatgggaaacgccacttaattcaaataatgcataccacccctt

SEQ ID NO: 45575 - DNA, 447 bp, Zea Mays
gtccagtccagtccaatctgtagtagatatcccctccggcttggccgtccgtccttgccccaattccgattgaccggagaggagttggatcagggagcattggaatggccgccaccgcataggatggagctggattcctccggccgctgctcggttggtcccatggatgctgtgattcgaggacgcggctagagattcggtaccgatggtggcgcgaattttgcacggcggcagatttgacgcgcgttcgcccgtttttgcgggtggggttgggtccgcattgctgcattgacgcatatgcgtcaccctcatttcagctggtttgctacattgcagccacgtacgcttagatatggtacaacgatagcgcagtggtttgtgtggaacacatttggctgaagttactcactgatcaaaacctgaaaggttcgcctatggacttttatg

SEQ ID NO: 45576 - DNA, 456 bp, Zea Mays
tgatgaagcccgttaatctccatgctcttttgtattaatgcaaatatacatgcccgggaagcactctaaccagccttgtgtaaagatgctactgctataatttgcttttgtgttccattctaagcttatgaagcctggattcgatgcgctcgatacaattaggataggcgcctcgatagaaagctatcatcgtctccctcccacccgaaatgggaagctagcttcatggccggcaaattaggcaaaccagtactgcgtttctggcacgctacacgcactcgctgctggtcattaactcgtcacgggattcctttcaacggcgagcgtgagctacatgcgaacggtgaggcacgagtggaggagcgtcattaagccaaaccatgtgcggaaaccctccgagctcggaacgaaatcaaaacaaaaaccgtaagcaaaaatcgtgaagcagtcgacggc

SEQ ID NO: 45577 - DNA, 302 bp, Zea Mays
gaatatttctcgacctacatgagaaggttcttttaccttaaaacaatgcctctaggaggggtcaacccctcctctcccaccaatagagttatcttagtctaacataatctgctaaaagtatacgcatgttccgcattgagttccaaccaagcaacactctccattgtggccctagatctgtcccctatctcttttcctcatgtgtccttgctagtggagatattggggagggcaagcctttcgtctctatagtctagtatagtagtttagtaggttaggattagtgattcaagtttacccag

SEQ ID NO: 45578 - DNA, 321 bp, Zea Mays
catgatctcagatccttatattggtggaccaggatgaagagagaaattgctaagtatgtatctgagtgcgacacttgccaaaggatcaaagcaagccatttgaaggtagcaggtaccttgcagccactccctataccatcttggaaatgggaggacctcagcatggacttcattgtgggattgcccaacacctcccgacaccacgattctatatggatcattgtggataggctaaccaagacagctcatttcttgtcagggcataccacccatagggcagaaaaatatgcagaaatctatattgaccaaattgtgcgtttg

SEQ ID NO: 45579 - DNA, 743 bp, Zea Mays
ggttgagatttttgggatgttacaaacctaccccacttaaagaaatctcgtcctcgagatttagactggatttgagaaaagataagggtattccctcctcaaagagtcctcactctcccaggtagcttcctcttctccttctctgctccactgaactttacagagtttcatttcagaggtgcgggtgttccggactgctgaatcaaggatctttactggcttctcacggtactgaagatctttctgaatctgtattgcctcttcttcgacgtgactttctggtgcttgcaggcatttgcggagctgggacacgtgaaacacattgtggatgtcggacatggattctggtaattcaagacggtatgctgcgggtcccactctgccaatgatgggatagggaccgacgaatcgtggtgctagctttcctttcacttggaaccttctgacaccacgcatcggggagaccttgaggtagacgaagtctccttcctcaaatctgagttctctccgcctgttgtccgcataactcttctgccgactctgagcttcaagtaacctcttgtggatcagggcaactttctcctcatcctctttgacaaaggcaggtccttctagtgccttttcccctacgttggaccacatgagaggggtctggcattttcgtccatacaatgcttcgaacggtgacatcttgatgctggcctgatggctgttattatacgagaactccgcatagggcaaac

SEQ ID NO: 45580 - DNA, 316 bp, Zea Mays
atcgttttagggtgccatgcccccacatttaccagagtgggctgcagatgacaatttctagagggcccttacatactgaattactgattaccaaccaaaaaaatggcaccaaagaggattattatgttcattttaaaaagtgcatggcgctgtcatttaccagtgtagacagactattttcgtgatgtggatatgtgatataattttcttagttacaccttttcaggtagttgtcaacctaaagtttaagcacagtgcatcatgtctccttttcttcattacaagattctattgttttatgatcccattgttgatg

SEQ ID NO: 45581 - DNA, 495 bp, Zea Mays
tgaaagtggtgatagaaaagacccctgatggaggggagacattaaagatcaccatcacgacctccaacactggcggcaggtgcacaaaagaggccaggtgcagccccctgttcagtgcaccgcggacagtctggcgcgtagtcgcggacggtccgacactgcccaggagcagcgaccacataccttcaaacatcgatgcctagaaatagttacgtggaaggcaaacacgtttaaggcatccagtcgactggtcaaagccagactaacctttgatcagttattatctcaatatatgaaaaagaaggccaacccaaatgaccggccagcaaagcgagcttgctcacctactgaagaacgactacaggtaagaccgattgagtcatttcaccaatcggaggagtcagcacataacgatattcattcaagacccaatgtacctacatggacacctccaccctcatacccacctgtgccatatcagtatgcatatcttcc

SEQ ID NO: 45582 - DNA, 999 bp, Zea Mays
agcgggaatagatacaacaagaggattatataaggctaacacgtgcatttgataaatctatcattactagttttccatcatacgatgcccaaactaaagaaaacctataggacccatcagatgcaagtgggcaagtccaatcccagaaactttatgggatgccgatgaatccctataaaggaccgccacatcctctcccacccatatgggagcatcttgtgccctacgcacggccgaacggttggcctagcggtggtcggatctatccctcgcgacgaatcaccaaagctcgcaccaggagcaatagagatgcttggatagtctggctatacacgctgatagtccgagcacaccttcgaaccattcgagtattacaccggactatccgcgccagcgtatgaggagcaaaacgtagaatgctaccagcaaccctactaccagacccaaagtaatgtttctctagcacccacggctcctcaaggacgtgtaatgataccacacacacataggtatgagccctttttggcccctagaaggccggaaagacctagcatgtagtatggagtacctagggccaacattaatgccccacataacctaaacccatgggcaagggggcaatataatgatacaccagcgaccacacatatggaccaaagggccggtgcattaccactggctgtcattgatatagttagagaggatacaggtggtgcattccgagacaaactcggagttaacatgtcccatggagggcaatcttatcgatgaccatacgacagccgattcgactatgacccatacccacacgggacatggatacctgaattttaaaaaattttgggtaaccagggaagaagcacacaagagcatataggccaattcttagcctgattaggtgaattggccgataatgatgcgttatgcatatgtttttatcactatctctaaccggtactgccttcgcatggtacgccaccatgccacctaactctattt

SEQ ID NO: 45583 - DNA, 972 bp, Zea Mays
aaaacgtgaagggttgtagggctgtttggtttggtgcctcacttgccacagtttctcacatctaaggttagacaagtttgactaagttaggtatagaaccaaacatgcccttagggtttgacttgtcaccttgttggatttgcgttaaataaactactcgttgaaagaaaacaactacttttcggaattaacagcacctttaccatggacagctctgacgtgttttactttgtttttttccttccttgtgttttgttctttctctcacaggatattgtgggaaaccctaactctaactaggattgggacttctattaattaaccaagatttgttaggcttggtcccttacacaagggtatgaaggtaatcacaaggggattaaccccacaaacctaattgggttctaacaccaccttagtctcaactctatcatgtatagatgttgagacaggagcgaaaatcggtgaagacactcgacgacagcaccttggtgaagatgtcgtcgaactatagcatggtcgggacgctgagaacccgaacatcaccgatgtcgacgcactcccgaacaaactgaaggtcgatctccacgtgcttcgtgcgctgatggtgtacgagatttgtggagaggtagatcgcgctaatgttgtcgcagtagtcgagggtggcgcgctggaggggactatggaactcctagagaagttggcgcagccaggaagcctcggccatgccattggcaacattgcgatactcggccacagtgctggagcgagagacgacgagctatcgcttgttggcctaggagacgaggttggcgcctaggaatatggcataaccagaactccaaccatctttgccatgtcagtgcacttttgaacccggttcatgcccccaaaaactcgatcccactctgtgatgtatgaatgtattagatgaaacttgatgtaaaaatgggatcgagttcttgggatttg

SEQ ID NO: 45584 - DNA, 288 bp, Zea Mays
caaccgccagacccggattctgtatctcgagaccgccttccgccagcttgctcagggcgatctctctgtggacgagtattgccgccagatgaagacgatggcggatactctccgcaccctcggggcacccatcaccgatgagagcctagttctcaacctcctccgtggtttgagccctcgtttcgatcgtgtgacgcccatcctcacccgcatgaagctgtttcccacctttgcggaagtgaagaacaaccttcttctcgaggagcttcgcctattcgccactccgac

SEQ ID NO: 45585 - DNA, 366 bp, Zea Mays
ggtactccctctgaagttgagacattagcattgcaagcagctacattgggcactatcttagctggtggtacttgagtgcataagttggtcgagggctagggttcactaagtggaaatgggtttggggtaggtttgatggtgtaggcaaggattgtgatgccttttggattatagatcttgatgaggtcattgttggtttcaaatttgtaagtagtgtagttggttttgactagtgcccttgttgtgcaagttcccacaacaaagcctctacacgaggtgttggctgtgatgcctttcataatgaattggtcgaatgtttttatttcctaaccttcatgggcacacatgaagtcacatcaccatgtt

SEQ ID NO: 45586 - DNA, 290 bp, Zea Mays
gaggagtctgggccccatctgggttacatggtggaggctggtcatcttcccgtggcatgccgaggtgatctccttcctcggggatctccgagtcgatgtggaagaattcccgggtcggatcataaccctcaccaccggagttgtaaccctccgacctttcagagagcatctcattgcacacatacaaaaactgcagcatggactcaggatctctcaacctggaatagtccaaggcgaagctcggaccgtcttcctcctcggagtccaggcaccttgaagggaaaggaagg

SEQ ID NO: 45587 - DNA, 482 bp, Zea Mays
gcgcgacgtctcacggtggcgcggacaacagatttgggggaaaacaaaattctccgactatggtggctaatcgagggcaggggtggatgctctgacttcgtgacaaccttgcggagctagcagcaccatcaatttatagtgtctgagggtggtggctctgaattttgaaagggggagaccgacggtcaaagagagaggtgagtcactggcgcgaactaccgtggcattcaccggggcaacgtctcaggtgatggacagactacctacggctatctactgcaacgtggtaactcttctaagtacgtggtgcagctacgaaagatggcgaactccggcgaggacacctgagtcaatcgcgcggcaagtggcacagtgaatagtccggtgataaggctccaatccttacctgcgttgagatctttcaccaccagccgttatccgcaaaccagggcgcacgaatcgcgacgaccggcgtcaatcgc

SEQ ID NO: 45588 - DNA, 450 bp, Zea Mays
gcacattgtctcaatcatttctagccactcttgacaaggcctcttgaactgcttctcaaacttaaagcgataaggcaaccacacaagctcaagtgttttcttcgttccctttagctttggcatgctaaattcacttaacgtcggagacgtcctgttatccaagtatacttgaactagatccctggtgctgatttgttcagccaccactctgaattctgctacagccagttggcatgctgaccctgccgccatattgcacaagggtctggtcatcccgaagcttaaaaccagcgggctcatcaccatcgtcatcagttttcctcttttcttctcgtcggccttaatgtaaaaccactcactcttccagccagttcgccacttggtgcgatagctgaggatcagggccttcgtatccttgcgatacacgaagttataacaaccaaaattttc

SEQ ID NO: 45589 - DNA, 658 bp, Zea Mays
tttaatcaaccaaatgccaataagaagaaatttaaatctaaatacatttctactttgttgtggggcaaaacgggggaacaagtcataacactggtcccacaaattcttagttctcgtttccctccctaatatctattcccctatgacatataatgtggtgcccatgcacattataattgtgatcccaatgacataatgcttaccaatgcctcgactggatgcacaacatggagcgcatgactacctcaaatgacgctgataccatgcacaaaagtcaactatgcattactaaaggtatcattgcgtgattttgctgatacggctagtgaataccaatgcatgacatagatatgccaaagggaaagtataggatgcaggagtatttatgaagagatatgacaatgcggcgtgaggatgcgtattttgactaaagaaaatagtgcgggacaggttggtgagcggaggaagcacgcgaggtctaggattcaaggagtaagagagaagatttgatgactacaaaccaatagatataataaaaagaaagataatataaccatagttacttaggagttgtgaagtatatatttttccaattctacccttatttgagagattatgatattttccattataaagaatgggcttcgcaaaattgtca

SEQ ID NO: 45590 - DNA, 1107 bp, Zea Mays
ccccccaacaaccaccaacaagggtgtttgatcatgtgatacctttagtgcctggggttgtgcttgtaaattctaagccctacatatactctccattccataagtctaagatcgaaaggcaagcggaagagttattagctgctggactggttgaacccagtgtcagcccttttgcttcacctgcgttgttggttaagaaaaaggatggcacctagagattttgtgtggattatcgtaagttgaatgatttgacaattaaaaatagatttcctatgcccctagtggatgagatcctagatgagttatgtggtactcaatttttcactagatacaccaaacctctatcaccctggtggttcagtaaccgttctggaaaagctattaggtgtcaggtggcaccaaaccagtctggtgcaccatcggaccatgctatgtcagcaccacatcagtcgatcattgggctatccaatgtgaccgttggagtttgataggtccagttcacaccagatcaaggtccagtgctccatctgtctactccctcttctttttcaaaacaaactctctacataatcagtctgatgcaccactagactggtctagtgccccaagccctcttgcatccaaaaacatgttctctgcatcggggttaggatattgataaggaaaccggtgctgtgacatttgcccctgaaaagtgttagaaaaaataccagtcatcctcggtgccatgggggggataccgatcaccagaagaagaaactgtggtctagcggggaagtaagaaccaaagccattgccatggagtccttggccatatggcacacgaccagcaccccaccgggcacgaccaccacatggtctctcctcctgaggcctagcagaaagaggcaaagcacctctaggcctcgcaggacctctctgaacaggctgagcatgaacaccatgagaagggtagctcatgttcttcgtgctcaactcaaaaacccaccactcatctctcttcctcctaaaacaaaaatttgtcagatgcccatccctctcacaattctcacaatggaacctcacccctttcttgggtggattttgcttgtgggaggaggctttctt

SEQ ID NO: 45591 - DNA, 1425 bp, Zea Mays
ataaagcctaaatgagagaaaacttcaaaactcattagaaatggtcataagatatcaccattaatggacttaagtggcacctaaaccctagaagtaccaaaaaccctaaatggacccctagaaaaccctggactgaaaccctagggggttatatgtaaattttgcacacttttggacctaagtgcaaaaaccaaggaattagggtaccctaaagcatatggttcacacatgtgaggatttccaagtcaaaagatgtgaaatgggcttatttgcaaaaagccacttaattcctctcatgtggctaagtctgaaaatcagtgaatgtggctaactttgtagctttgtagatataaaaataaaaagaatttgcctagggttaatacatcaaaagtctagagctactatagaagaacaactttgcttaagtaactaagctttgatcacatacaaagtttggagaaaaataagctcaaagttgtgctgtcagtcagccctaagactgaatttttagtaacagtgaagttggatgtacttagagctcgattttgagtaagatcctgtgactatttgatggtggacattataacaaagttaaagctggtttgttaggctacaagtttgctatagacagattagcatgttgtcacgcaaaagattaagaaaaacgcctctgaagatcctcggtcagaacaactgacgaagcttctgatggtacagtggcaaaagatctgcggattcagtgaatcctgtcgccggtgactctacgccgcgattgacatcgatcgtcgtgattcgtgcgccgtggcttgcggataactattggcgatgaaagatctcaactcaggaaaggagtagagccttatcgccggactattcactgtgacacttgccgcgcatttgacagaggtgtcctcgccgaagttcgccgtcgttcgtagccgcgccacatgcttagaagaactaccacgtcgtagtagatatccgtatgagttctgtttgtcgcctgaggcattaccccggggaatgccacgatagttcacgccggtgactcacctctcccttcgaccaccggcctttccctttcaaaattcggcaccaccacttagcgcccttattaattgacagcacggtctgctccgctatgttatcaccaagccagagcatccatccctaccctcgattagccactatagccgttgaatttgggttttcccccaaattggtcgactgcgccgccgtgaatcaccccatcgtggctagccgctcccaggtccgcactcaccctccgtgttcgtgttttagtaccctcgtatacttgtgatactcattgactcaactaaatgagcttgacggcatctactcgtcgggaacgccttgatttggtctcagtgatcgccgtcatcgtggacaggcaaatccaggacc

SEQ ID NO: 45592 - DNA, 514 bp, Zea Mays
ttaagaatgagtaaaagggaactgagttaaaatatattaatataaagtcaatccacctcttttaacttaagcacccttatcttcacccatccctgtcgatggaggagacatccgcttcagctttgactacctttcctaagagggctttccctatattttgtgggaggtgctctgctccgttggataccccacacccccgctatacatggtgcagctgtacgaggagcatcgggtgccatgttgtaaggtttggctgaccctagagtctcaccctctacatcctgggtggcgttcactcgattccgagactatcgggttcagggcggacgacaccattgaggtcgcagtgttaaaagctttgatgaccttctgcggatatcaccccctggagatgatgatgcacccacttggactcttccccaccgagaagagggatgacccaatgtggtgcaacagagtgagtcacgtgaaggatgtgtgggccatgcatcccgatcaggttgggagaattacc

SEQ ID NO: 45593 - DNA, 432 bp, Zea Mays
tgggtagggtaggcacttgaagagccccaagatgatagatctggccctaaaatttaataatttgatgaatctagctttcgccgttctagaccgtatgactaataatttgatgaatctagctttagttgcattgccaccggagatctaccgtcgatgtatgagtagaagcaccacttgctagtggcgttgttgaggtcccggatcctgtcctcgagctcgtggatgcgcgcatccctgtcctcctgcgcgtcgagcgcgtgcggagtgtgagctccgctacacacgaagacgtcggagccatgactgagaaggacccatgacaatgataaaaccacgagacttatatggccactatacttggctggttaattaaatgaactagagttctagcttgcttacctgaaagatggcgtaaggaggagagttttaagt

SEQ ID NO: 45594 - DNA, 404 bp, Zea Mays
cccacaccgaaacattacccaagctctaatcctagccgcacaatttacatcctatggctcacacggatcccccattcctctctacttccccgggtcagcagtgtggacgccagcgtcaagccacggcggagccatggccagccacagccctgagcggcaaccagcgcacgaaacccaatacgaagtagtgccatacgcgaaggaaggcaacgcgaactaaatggaggggtctcaccttcattgctagcgccaaagctcctgcccacgttgaatggcggccgcgcggcgggggtacgattccggcgggcgatttcgtcttgccctggccgatgactccacacgggattgcccagatccgccgcaggaggtccaagtgacatgcccgcccacatgccagactcggg

SEQ ID NO: 45595 - DNA, 489 bp, Zea Mays
ggaaagtgaactagcaaggtatgactgggtaaagggtgagtcattggaatcattctttgattggctgatggttctagttaacaagataagggtatttggaagtgaggaccagaatgattcaaaggtcacaagatttttcatgagagcatacaaagagaaggatatggatttggcaagaatggttagagatcgagatgattatgaggaaatgactcctcatcaaatgtttgcgagaattcaacaacatgagtctaaagaagctccaacataggctcaggattcaaatgccttagttgcaaatgaaaaagagtcaatgaatacgtcctcctcaagcaaggatcacaaatgcaagaaagttattgagagctcaagtgatgataaaagctctagtgatgataaaagctctagtgatgatcttcatgaagatgcaactatgtttatcaagactttcaaaaggcttgtcaaaggaagcaacaagtttcaaaggat

SEQ ID NO: 45596 - DNA, 567 bp, Zea Mays
taaaggtctgtgttgtggaccgtctgggtcaggtggccggaccatccgcgatcctcttagaggggtccgaagtgtggtgacttcggggtagtccaaagtgtttgcgctgcagaccgtctgagctttgggcccagaccctctgcagtcatgaccagagatgtattcaatttgcagaagatcctgtgtgctagtgcggacagtctgatcgggataggcggaccgtccgtaggtgccaaaatggaattgggcagggattgtgtgttttttgatgtttctactatggattgtccgagggttcagcttggacagtactatcttctaggtcgcgaaccgtccagactttgtcggcgaaaagtacgcctgtgttaaggtcacatggtcagtgatcaggtgccttttgttgttaggtcatggaccatctggccagggtcggtggactctccgaaccttcttttactgacatctctaacaagtttcaaacggaaaaactagttgttacttgtacggcggaccgtccagccagagggcgcggaccgtccgcgtgtgcgtagaaagtgggcaaattgc

SEQ ID NO: 45597 - DNA, 1712 bp, Zea Mays
tactgtgttcaatcgctcttcctccaacacatcaatatcctctagtctggtagtttctgcttcagctatgctttcgaagaccagcctcggtgccccgaacatgaggtcggcgggtagcactacttccgaaccatagaccaagaagaacggggtatttccatatagagctcgactaggttgagtcctcaagctccaaaccacatatggcagctctcttatccactttcctgcaagcttttcatttttgtcgaacactttcttcctgagtgcttccagtatcattccattggctctttccacctgaccattggctcttggatgcgctactagtgcatacttgatccggatactccgttgttcgcagaaatcgaagaacttagagctggtgaagttggatcctaggtcggttatgatgctatttggtatcccaaacctgaatattatgtcttgtatgaactccactgccttggctgaggttaaagaagcaatagacttgtactctatccatttgatgaacttgtcaatggcaaccagcacgtgagtatagcctccttgagctttcttgaagggtccaatcatgttcagcccccagcacgcaaatgaccatgttatagggatggtctgcagctgctatgccggcaaatgttgttactttgacaagaattggcaagcttcacacctatggactaactcggtggcatcactcttcgtcgttggccaatagaaaccagacctaaaaacttttccaaccagagttctggttgctgcgtgtactccgcactgtccgacgtggatttcatccaatagctgcttcccagtagtcgaggaaatgcacttcatgaggactcccgtcgcaccccttctgtacagtgcaccccttatgagggtgtagtgggccaaatgtcttgcgatgcgttctgccgcaaccttatcatctgtttattcttcatcctttatgtacctgatgataggctctctccagtcattagggtccgactctggttggctcaaggtattgcattcctctgtctgatctgagggaatactcgggcgtgacacttcctggatgaagatcccgggtgggacctaggtccaactggatcccagctttgacaacgcgtctgctgctgcattgtggtctctttccacatgatggaattccaacccttcaaacttgtcttctaattttcggacggctgcatagtacttgcctatagaatcaatcgagcaatcccagtctttatttatctggcttatgaccactagtgaatctccgtataccatcaacctcttagcacccagtgacacgacgatgttcaacccgtggatcagtgcttcatattctactgcattatttgatggtaggaataatagctaaagtgcatacatgagttgttcacctccaggagcaatgaagaggatccctgcgcctactccctgaagtttcagcgagccatcgaaatacattcgccatacttcagtagcctccgggttgtctggaacctgatgctcagtccattctgatacaaagtcaactagcgcttgagtctttactgtcgtgcgaggccggaactctatgtcatgagctcccagttcgtaggcccacttggctattcttccgatggcttctttgttgtgaagaatatcccctattggaaacccggtgactaatatgactttgtggtcgtcagagtagtgacggagcttgcgag

SEQ ID NO: 45598 - DNA, 332 bp, Zea Mays
ggaaactttgcaacccttctgctacgccgaggcctgaaattgctcggcaacaactttctgcgcttaacgctgagaggaggattaggcaacagctgagccgttggcaaaataatatcatttctgaaatcctgcaattggggtgacagcaccaaattttcaaccgtcaatgtcttctgccttctggagtagaccttgaaacatggcggcttggcactcaaccagcaattcagcaaaggcccagccctcccatgcagatttagggaaggaccaaagggatccgcaatgttgacatcagcaccccccaaaactgtagggcaaaaattggaatcaac

SEQ ID NO: 45599 - DNA, 455 bp, Zea Mays
gaacaattgggcctcaaatttgttactcgactgacccccaattgccaatcattaagggtattgggggctaggatacctcatcccaaagttccacctcgcccgacccccaagggcaaggggtcacatactgtaacacctatgagaccacttgcctgacgtcgtgtcgaagttatcgtcgtcgtgatccgtcagtcgcccttgtcgtgccacacgtagcctcgcttcacccgtcatagtgagcgtggtgaaaggtgaaacaagtgcccaagtcatcgaactaaatgtgcgccacggtgaacgaacctagtgagaatatctcatcgccgtaatggacactcatcccgaatccgcgaagcacgcgatcgatctctttaaattgagtgttcccctcactctgcctctctgttacgcgtccagcccaccctcaaccccctcccgccgttcatcgtagcccg

SEQ ID NO: 45600 - DNA, 486 bp, Zea Mays
agtcaccgctgaccgtcttcgtctaattttatctaactctgtttgccacccgcctaacccagtcttcgtcgtacactgtgtcacataactcgtcgcacaactgtctctttcgctcgaccaggacgtgatctgcgacaaattttgcaaccgcctttcgcatcctatcttgtctataaaaacatccctagccgtcgcataacccctcgtctcgcctagatccagatcgcaggccgtgaagggcaacacttaccaggtacggggacatccctcctcttgtttccaatcgccaaaccgcctccgatttcccgagacccagatcacacgagcatgcccgttcggttaccggcgacgcaggtaagccttctcttctcccttttccttccggcgacgtgtagcagccctttcccccaacgaagcccctcccacggacgcctgtctcgaagcccattgccgacggatccgtccagccaacccccctagtctcat

SEQ ID NO: 45601 - DNA, 315 bp, Zea Mays
tgctatattcatagacctagttctctgttaatgtatccatatgaatatagatataaaattctagagctaaaacgactactattttaaaacggatggagtatataacatcatgttcccctgcacaaatgaatcataccgaaagaagtatagctccactgaactagggatttaaaattaccgatccacgttgtatataccccgtttctggtacccttattattagtaccgaaaacttttgtgcgaccctaagctctaaccaaccaaacgtctgaaaaccgtggtttttagtagtgggatctccaaccaccattttac

SEQ ID NO: 45602 - DNA, 664 bp, Zea Mays
cataggtcgttcggaggatgagcgatgggtagaaggtgattagctgcttgggtaagcaaccgtcggtagccttccacgtctgaagttcgtgggaggccgttagctatctgggccagtacccttccaacttcactcggcgtgttcattgcacgagcaaagtcggggtataggttctgagcaaagtcggggtatgggtgatgactccaatctccccccgatgaagaggacgtcggggaagaaaggagccagcgctatggcgctcttcctttcgtccttctttgagggcgaaggcatcggaaagatggctcggtgtgttctcgttccctgactcggggcgtttgcttccttctttcgagtgatccgtgtccactcctttgttggcgaggtggacagcggagtttttcgggtaggcgagctcccgacctttggtttgtaaggggtcatcttccctcgagatgcaagtggtggtgccacccgctgttctactctggctccccttaggatttccgaggaaagcttcttcttcggcggatctgccacgcggtgtagagttccctcttcatcctctatggacaagatggttccaaagtagaacatggtcctgaggcgaagggcaatcttgcacttggaggtgatggccattgagctagctccgatcaacgac

SEQ ID NO: 45603 - DNA, 1046 bp, Zea Mays
ggatttttttgaggcaaaaaatacagaaaactggacatggttctttcattagttgcacaaggttgtgggggatctgcctttgttagctttgtgttcagatgcttgcaaaggtcttaaaaatgctatgaacaatgtcttcccatatgccgagaaaagggagtgcttcagacatctgatacagaactacataaagtagtttggtgggtctgagtacatgtatccagccgctagagcgtataggagagaggtcttcgaccactactttagaagcatctaagaaataccaaaggtcaacacttggctaaatgagcatcacgacagtctttggtaccgaagtggcttcaatacggacatcaagtgcgactacataaccaacaacattgctgaggttttcaacaattggattaaggattggaaggatttgcctgtttgtgacttggctgacatgataagggaggaaattatggagctgtttcacaggaggaggaggattgcacaaaagttgcaaagacggattttaccgtcggttctgcatatcctacacgccaggacaagaggtttaggtcatttagcagtacagaaagctgacaactacattgcagaggtaagggataacaatgatgtgcattcaaagcacattgtaaatgctcagctgcgggaatgttcgtgcaaagagtggcagcacacgggcaaaccatgtatccatgccctgtgcttgataacagctcaagaatttagggatgacaggatggagggttttgtcgacgagtactactttgtagctatgttcaccacagcgtactcaagggtggtccagccaatcggtgacaaatcgttttggccaaatgttccttttgcaaaagaagtgggtgctccaattgggaaacgtgatgtgggtcgacagatgaaaaataggatcaaaggatgccttgagggaggcagtggtaaaaagaaaactaacaatgagaatgggaagaaaagcattcggggaaagttcaagtgtccaaactgtggtgaattagagcacagaaaaacaagctacaaat

SEQ ID NO: 45604 - DNA, 443 bp, Zea Mays
caccatcaccatgatttataaagccaccaatgagttgtgctccaccacaccattaagcttctacaatacaaggcacatgtcacgattccatgcccccacaaatttgggcacctcagatgatttgaaactcctatcacctatgattgctccaattatcctcataacatggtagatataggaattcttcatcgtatggtacccctaccatcaacaacatatagttcagacatgtcttggttgatgatagggcagacctcaacattttgttgatgtacgccttcaataatatggatatatctcatgccaagcttttggttgcgtgccattcatagggtctccttgggtatgttcctctttatcagctccatcaagttggcagacacctttggtaccatggagagcttccacactgagtatgtggatttactatcgctgagttctac

SEQ ID NO: 45605 - DNA, 697 bp, Zea Mays
acgacgatgtcagagtttcttcggtgagattggactctagaaaggccacacacaccactacacgagaccaggcgagggcgacggtgggctcagttcacggtgtaggcagctggaggggcttggttatgtgagccgaactctggcggcgtgtggctagctcaccggagcatagtagaactctagggaatggtcacaaaagcatcaatggggctcaggaattgtgatgatgcgctcggctagggcgggaggtggctggagatgagtactcatgtaagcagggacctcgacggcgatgccaactttagtgaattctttggtcgcaatgatggccagtgaatgggagtgggaaggcacgaccaaggtagggagacacaaatgcaactcgagcatgacttaaataggagctaacatgttggagaggggtaataatggcgggtcggagatgggagcatgaccagtgcgcgagcgtggatgaggcacgccaacgaacacatggcgagtgccttctgcgtgttttaaaacatgctataggccatcaaaacgtgcatatctaccctaaatctctatatgagatatcttctctgattttcactcttcaaatcttgtgtaagttcactcttcaaatcttgtgtaagttccaagtggattaggggttaggttcaaaagtaatggattagggcaaattggtttgtccaac

SEQ ID NO: 45606 - DNA, 315 bp, Zea Mays
gcagaatatgttgattttggtgatgctctaacttttgatacaacacataaaacaaatctatacgacaaaccactaggaatgtttgttggagctaaccatcatcttcattgcacattgtttggttttgtgttactcggggatgagactgtagatacattcgattgggcttttaaagcattcaaaacatgcatgggctgtgaaggtccgcgagttatgctaacatgtatgaaattttattgaatttattgaatatgtatcaatatggaaatattaagttaaattaataatttttatgacatatgatttagatcaaga

SEQ ID NO: 45607 - DNA, 600 bp, Zea Mays
atcttcacttgtgcacaattttaatttatttttaccgtttaagcagggagtggagaggggtaacacacgaatggagtggagaaagtctcgctttatattagtatagatttaatgaataaatgtgggaaaaaggaaaacatggagaatagaactccatgtttctaccatacaagaaaaacaagacatgggatgtgcactatacacatgttcaagtaatttagctatccttgcaaaaaagaaacaaagcaaaactacaatagcttcttttgccgcataaatgtgtgttattcagaattaaactactgaacccgcatgttgatcatcaataattctgcagtgctacaatacgataggatgaaagaacatcccatggtgcttgtaatataagacaagcaaataatgaaaaccaccgaaaaacgcaccattcgcctcacaataatgtggaaactgcaccattccttccacctttattcctgcaagaaaatattcatatttcaaaattgtcacccatataaatacatattacagtacacaatttaaataaggcgaaaagataatgaagtcacctctcctttgccagaatcaaccttccaagccatg

SEQ ID NO: 45608 - DNA, 782 bp, Zea Mays
cgcgtcagtaccacgcctccttggggccgccgcagaagacggagaagttaaattttcaagaccaatgcagcgactcgaggcaccccacgcatagcccaacaaatgcattaagtgcggaggtcacgggtcagtcagccgcggggacaggcgtggcagtcagcgtgactaagggcggaccgtcagtaattgcatcaaatgggcgagccaatcagtcaaactttggccccacctgcaggctcgtatcctcccctaaggcgggcccgggggccactgtcggtaccctaaatcaggggtaccccttactacagtatgaagacacggtgcccgtacgacgatctctagccgcacggagaacagcacccgaccctgccacgtggacagctcaaggggcaccacatggcgagaaaacaagaagcatcccaggatgtaccagttggatcggacctccgcgaggaagcaccggacccctgtacgcgcaacccggacccccgattacggtccgggactcccaagtaagcatgccgggtcccttggatggggtccagatccctccgagtaaggtccgggccacaacggggtcccgagacaggggataccctggcataagcaagggtccggtactgacacgtgtcaggccttatcctatgcgcttgcgctccccgctcaggcggagacccgctgctgccgcgtggcttgtagcccgtgacataagccagcgggcggagcctgacgtaaggcctctaaagccgcgcgatctctgcatttattgcggagaggacgcg

SEQ ID NO: 45609 - DNA, 1182 bp, Zea Mays
taaagggaagaactatacacatacgcaaatatcttgttgcaagtgcaattatttgtgaggctttgtgcaccttttcaggggatgattttgataggagtttcgggggagatatttttactagttttgtgagcctttacctctttctgaagggactacttttgcttttagagttgtcaacatgttttcgccttttgctctaatcattagctagtggtgttcactcttttttacctcttattgagggctagccatttttgcttggttgtgttgagtcattgcccatgtctttggaaatcaagctttgcaaatctctgatgactttgatttggcttttgtctggtcttttgtcatttgagtgagttcttcctttcttccttctgcattgttctttgtgtttttgtggtggtgttgataatgcattcatgagggggaagattgtgaatacaaggttgatatgtgcccttatgatttaggtttgtggtaaatgattgtcaacggagtagcttcttgggttgaatcatgtcaccaggttatgaaggtgagtgcaacatggtccttgacttgtgttgtacatgtgtgacgtccggagatggtggtcgatggcaaaggtggtggtcatgtaggtacatgtcgatggaccaagagtggtgaaggacaagcgatgagtcttgactaagggactagagaagctaggtggctagccatggtggctaacgccgagggacaccgatatatgcaaagatatggcaaagcaaatcatgttgccgatatggttgacgaccgacaagacacgtgtccaagatgaggaggacacatatggagtacgctacatgcggaggtttggtggttgagcctcaaaaccacccagtgacgatttcacgagtttggcctcaaaaccttgtggcttgttctagagggaatcatagatggtacatggagccatcacagagggtgcgtcaagacgaagcaactttgtgaagggagtgtggtcattagatcatcatatcaagagttggtattttttttgcccctggttaagtagacaaactctatatatcttcaggtagtttaggaatatgaaaaactccctacaaataaggaggaagggttgcacctaccaagtaccaaccatctctatagttgtattctactctttatttcttatttgttacaagatcttta

SEQ ID NO: 45610 - DNA, 336 bp, Zea Mays
agacgacggctgtcacaactgcggcaagcttggccactgggccagggactgtcggcagccacgacgtggtcaggccaacgtcgcacaggcggaggcggaggaggaggccctgctcctggcacatgcaagcatcgagcctgatggaataagtcttgagcatctagaggacagcctgcttttgactgtcctctgtagccctttagcatctagaggacagcttgactgtcctctgtagtctctttagcatctagaggacagcagtcgtttttttgactgtcctctgtagtcgctttagcatctagaggacaacagtcgcttttgactgtcctctttagt

SEQ ID NO: 45611 - DNA, 757 bp, Zea Mays
agctttctagtgtttactctattactgaggagccagaagaatactttgtgtttaactaagaggaggaactccagagccatcttattgtcggatgaatggagtaggttccgatgaggcgagagtaagcccttctcgaagaatactgcaatgaacaccaaatatatgaccacacatctctattattatcttcatgggctatattattacagatcaaatgtaactaagtgaattgagtgaaagcagactctgatagatgaatatgaaaaagtgcatggggttcctgttgtaccataaacagttgcaaagtgatgtcttgattctcggcaaaggaaaatagctctacaaactggacactcagaatgtggctattccataagtccttctagagaaatattgtactcctatccctagccattgcatgataaagtcccttgaacaataatgtgagatcatgtaccctcctccacgaaaaggaacatttctttatattcactcatagattgccacttctcccaaactaggctaacccagtggactagatccttactgtagaatttgtggagacatttcacgagaagggcctcattttggattctcaaatttttacacctatgccacctattgattttggcctctatgccattttctaggacactgaaggtggcttgttaacatttatgttagatcctctccctaaacaatgtatttcaaatatgtctatctatttaataaccaaaatggacaactttagagtgca
